United States Patent Application Publication US 2017/0009304 A1 - sequence listing, part 9

SEQ ID NO: 172368 - DNA, 101 bp, Homo sapiens
ttcagaaggatatcgacgtcgtgatccagaagtccagagctgaggactgcctgtttgcaggaatgtatacaaagactatcgcttccttgagctggcatgtg

SEQ ID NO: 172369 - DNA, 83 bp, Homo sapiens
gcccctcgtacgggctgtcggccgaggtcaagaaccgggtacatgtcccagagcaagcacacggaggcccgggagctcatgta

SEQ ID NO: 172370 - DNA, 101 bp, Homo sapiens
caccacaggaatcatgactcctggagaacggatcaagtgcttattacaggcatagaatgtcaagctaaccaggcgtccgctacttcagaagagtgtactgt

SEQ ID NO: 172371 - DNA, 82 bp, Homo sapiens
catactccggaagaaacctgccacagatgggtgaccattgtgaggtagatattttgttctaattttccagatgaggaagctg

SEQ ID NO: 172372 - DNA, 85 bp, Homo sapiens
ctgtgtggttgcaacggagataaattcccggaaccgcgattcggcgtgtcagtgcctacaccaactaatgttacaattgaatcct

SEQ ID NO: 172373 - DNA, 100 bp, Homo sapiens
ggaatcgagagaagactcctcaacaagttgctgcaatgtctgtgtctaatctatcatgtttgttgcatattctaaggacccagacataggcttggtggcc

SEQ ID NO: 172374 - DNA, 98 bp, Homo sapiens
tggtggcaaagccagaccatgctggccggggtgcagtaccccagctccatcaacctcacgctgcacctggactaccgagcgtggaagaagcagaggtg

SEQ ID NO: 172375 - DNA, 85 bp, Homo sapiens
tgccgcacacagacttcaccctgtgcaagtgcatgatcgaccaggcacattgtggcgggcgtgtttgtgtgcctgctggagtacc

SEQ ID NO: 172376 - DNA, 90 bp, Homo sapiens
gaaaaggaggaattcgccgtgcccgagaatagctccgtccagcagataccttttataccttcagattaaaagggacatttttcatggccg

SEQ ID NO: 172377 - DNA, 75 bp, Homo sapiens
ttgacgggcagccagctagctggggtcccaggtgtgacaccttcagcaggtctcagggaagatggcagccctagg

SEQ ID NO: 172378 - DNA, 89 bp, Homo sapiens
aggacggaccttctggctactgaccgttttgctgggtcctgctgcgtgtccgcatgctgtactacctaagacaagaagtgataggagac

SEQ ID NO: 172379 - DNA, 100 bp, Homo sapiens
tgagatccaggtgcaggtgtgtttgtacgccttcgacctcatctacctcaatggagaggcccgggtggaacgcatggagcagttccagaaggagaaggag

SEQ ID NO: 172380 - DNA, 98 bp, Homo sapiens
agcagcacccgagcaaaccccagcaagatgcggaggctgcctcggcggagcagaggaaccacacgctgatcatggcaaacagaccttgctgactgaag

SEQ ID NO: 172381 - DNA, 100 bp, Homo sapiens
gaaaatgccgaaggcactcagacagcctaaaatgaccaatgtgtgatttcagtggaataaatggcgtccaaagtcacagatgctatagtctggtatcaaa

SEQ ID NO: 172382 - DNA, 83 bp, Homo sapiens
ggagatacattaaatgcaatagcccttcagtactgttgtacggtctcgtcagcctatctcggcccctctcttttcatgtcctg

SEQ ID NO: 172383 - DNA, 83 bp, Homo sapiens
cgctgaacggcttgaggctccagtcaaaaaccattaaggtaactaggatttctacctcaaccgcgagacctatgcaaggacgg

SEQ ID NO: 172384 - DNA, 75 bp, Homo sapiens
accatgctcaacttcggtgcctctctccagcagactgcgctgtgtcagcgtgttatgatgccgtcccgtaccaac

SEQ ID NO: 172385 - DNA, 100 bp, Homo sapiens
gcagtggatggctggaggtgcagggccaggaggaacatgaggtcagcccaaggccaaccccactgtcactctgttcccgccctcctctgaggagctccaa

SEQ ID NO: 172386 - DNA, 75 bp, Homo sapiens
taccacctatatagatccccgcacaggaaaatctgccctgtgatggaatatgagaataggattcgagcctactcc

SEQ ID NO: 172387 - DNA, 89 bp, Homo sapiens
accgaggcgcctcgctggggcggggaccttgccttgcccgggatggagaaggatgaaactgtgagtgactgctccccacacatagccaa

SEQ ID NO: 172388 - DNA, 51 bp, Homo sapiens
tgacacgtattgtctcaagattaaaggtactgaacgacacctgggtctcct

SEQ ID NO: 172389 - DNA, 100 bp, Homo sapiens
aagggcttctccatgccgggattcctgtttaagaacagtatcaagtgaaagatgtcatgtatatctgcccatttatgggagcagtgagtggaaccctgac

SEQ ID NO: 172390 - DNA, 98 bp, Homo sapiens
gcggttcctcctcctgtcgctgcccgtgtgattactgagactcaggtactactgagcgagtgtgcttgatccagggaacggttgaagcactgaatgca

SEQ ID NO: 172391 - DNA, 96 bp, Homo sapiens
ggaaatgaagggtattgccgctgttactgatatacctttagatccctctctgggcgcattgttggaggtgtgtggtggttctttaccctgatcata

SEQ ID NO: 172392 - DNA, 82 bp, Homo sapiens
cacagcacagttcctgggaaggtggagccaccagcctctccttgatgcacccactgggcctatgtaataacaatgacgaaga

SEQ ID NO: 172393 - DNA, 82 bp, Homo sapiens
ggcagcaaccaggagattccctgggcctgcaggaagcccttccgcggaccgaaagtgaatggcattactgaggaagctgatc

SEQ ID NO: 172394 - DNA, 75 bp, Homo sapiens
caagggcgaagaaaagaggccttcctcagtctaacaggcaaccagccaagttgaaccttctcacctgccaagtaa

SEQ ID NO: 172395 - DNA, 101 bp, Homo sapiens
gccccacccgcatgctctttgtcactccccggcggcagcacgaaagtaccataacagagtgtgaggtgtgagacaagtacttcagttcaagagtgtattta

SEQ ID NO: 172396 - DNA, 100 bp, Homo sapiens
cgcgcagtgctgccaacgccccggtggagaagctgagtgccggtggtggtgtgcacattgagccccggtatagacagttcccccagctgaccagatccca

SEQ ID NO: 172397 - DNA, 98 bp, Homo sapiens
atcatcactaaggagttggcagaagaaggctaacaatgctaagagaggcctctgatgaaattgtggctgaaaaagaggctgaagttaaattgccagag

SEQ ID NO: 172398 - DNA, 90 bp, Homo sapiens
gcgcgactcggcgcccgcccgcggaatcccgttctgcttccagaagtggaagtgctcacggatcggggaaatctgcaaggcatacccctg

SEQ ID NO: 172399 - DNA, 100 bp, Homo sapiens
gtggagaatgatctgtacatagattttggtggaaagtttcattgtgtatgtagaagaccagaagtggatggagagatggagctatgacattgaagagagg

SEQ ID NO: 172400 - DNA, 82 bp, Homo sapiens
cctggatctcatcaaaaaggacaccagcaagctgttcaatgaggaggttactcactataaacaatatccacccaacacaagc

SEQ ID NO: 172401 - DNA, 75 bp, Homo sapiens
ggtggtgaataagagcgtgctcaccaattacagttcctattttgacgagaaaggcttggttagacaacagctgga

SEQ ID NO: 172402 - DNA, 97 bp, Homo sapiens
agactgcccggagagcgcgctctgcctgccgcctgcctgcctgccactgagcacaccgttccggaaggcaaaagccttgtatgcctgcaaagctgaa

SEQ ID NO: 172403 - DNA, 115 bp, Homo sapiens
tctatagccaaggaaggcttcgagaagattagcaaaggtgctaatccagtggaaatcaggagaggacaatctctatgggaagcagaaggcaaggaccccggtcattttaggtaga

SEQ ID NO: 172404 - DNA, 114 bp, Homo sapiens
cgagaccatgtcggacctgggctcggaggagttggaggaggagggagagaatgatattgggagctgaagaagcaggtggagagtgccgagctgaagaaccagcggctcaaggag

SEQ ID NO: 172405 - DNA, 101 bp, Homo sapiens
gtgtttggaggcgtctgtccatccgtcacatccatcattgcagagtccctccaaggctggaatctggtgcaggatcttatgaatccttcagtggtctccct

SEQ ID NO: 172406 - DNA, 100 bp, Homo sapiens
tctgaacatttcatctggcagtggcatgctccctgtcccactcttgaccatctattctgcaaccaagtgtatatggccattttagtgggcacagatcagg

SEQ ID NO: 172407 - DNA, 75 bp, Homo sapiens
cgcagaccccttcaagttctagtcatggaactgtggctgcaccatctgtcttcatcttcccgccatctgatgagc

SEQ ID NO: 172408 - DNA, 100 bp, Homo sapiens
gcaagagtactggaagcagtcagctaacacacaaggaagcctgggaggaagaacaggaagttgctgagctaacaagaatgtggtggtggctgacttcggg

SEQ ID NO: 172409 - DNA, 100 bp, Homo sapiens
cattggggtgcagcagctgcaccccaccttgatccagcggacttacgggtgacgcattgctggatgccggcgagtccatgaagcgcctggcagaggtgaa

SEQ ID NO: 172410 - DNA, 100 bp, Homo sapiens
agctgctgcagaagaatattttgcctgctggaacctgctgtatctactcaagagtggaagttttcacagtgatcgaactgtgagaatttggaaggctcgc

SEQ ID NO: 172411 - DNA, 82 bp, Homo sapiens
tggaacagtttgaggacctcctggtgcgcatcctgctgctggctgcccttgtctcctttgatatatcccctggggcagctgg

SEQ ID NO: 172412 - DNA, 101 bp, Homo sapiens
cgtaaagggaagtcatttctactggacttcatgcttagatacatgtataacaagaacgccaatctgaattgccaacgcaaagcaaagcgagcttccccagt

SEQ ID NO: 172413 - DNA, 51 bp, Homo sapiens
atgttactgcaatggcatgaaaagttcctaaggacggtctgaagagccaag

SEQ ID NO: 172414 - DNA, 100 bp, Homo sapiens
ggaagcaagatcgctccgggttgagatccacagagctaaacgttttagagtaccaaccattgtgtgctgtgaggtaaagtgatagatacagtgatgccag

SEQ ID NO: 172415 - DNA, 90 bp, Homo sapiens
tcaaagctgctgccgccccttgggctaaaagttgactatattgtggagtatgactatgatgctgtacatgatgatgaattaactattcga

SEQ ID NO: 172416 - DNA, 78 bp, Homo sapiens
aatcagatggttcccagcctcatttagtgaacatccaattcaggcatggaagaggagatggttcgtgttacgcagtgg

SEQ ID NO: 172417 - DNA, 103 bp, Homo sapiens
gctgaacggtgcagcagtgatggatgcagctcttctgttgatagaccccaccaacaactgaacgctttggtcaggctgctacaatggaaggaattggggcaat

SEQ ID NO: 172418 - DNA, 98 bp, Homo sapiens
ctgaagtccctagggaaccaccaattcttcccagcttacgaggaaatatttcagtaaaagcagttaaaaaagaagtagaaaagaaactccgatgtctt

SEQ ID NO: 172419 - DNA, 50 bp, Homo sapiens
gcatcttcaggttttcttcctggtgacagacttaaaccattggatattga

SEQ ID NO: 172420 - DNA, 51 bp, Homo sapiens
tgatattgcaccttccacagatgacttggaatctcgctctgtcacccaggc

SEQ ID NO: 172421 - DNA, 101 bp, Homo sapiens
cgaggatgacggtgctgcaggaacccgtccagggtgtggtaactgcagccacaagtctgatcaccactttagcacagaagaacccagaagagtttaaaacc

SEQ ID NO: 172422 - DNA, 83 bp, Homo sapiens
agcaccatggacccccggggaaacgcgccggcggcgaaggagccgagccccgctgaccccgcactacatctacccaccagcca

SEQ ID NO: 172423 - DNA, 98 bp, Homo sapiens
ttaaagaagattaacacgtgctggcaggaccactgcagacaaatgatatggccgcgtggaaagtgtcaaaattcttcccaagaggggatctgaaggag

SEQ ID NO: 172424 - DNA, 100 bp, Homo sapiens
cagatggcctattgtgggaccttgtgatcatgatatggtgactacagcttctacgtacctgtttgaagccacagaaaaaagattttttttcaaaaatgta

SEQ ID NO: 172425 - DNA, 80 bp, Homo sapiens
ttgccagggcttcctggcccgaaaggagagcctcttcgccgacacgaggtgaccatctgcaattacgaagcatctgccaa

SEQ ID NO: 172426 - DNA, 90 bp, Homo sapiens
cggcggctgctgctgctgctgacgctgctgctgcccggcctcgggttttcggctttgtgagaaaccttaccatcaaacacgatggccagc

SEQ ID NO: 172427 - DNA, 77 bp, Homo sapiens
ggagttcgactgcgagggcctgagacggctgcttggcaaggctttcatgagaaggacaagaagccatattgccgaaa

SEQ ID NO: 172428 - DNA, 74 bp, Homo sapiens
tcgactccaaatggttgaaaacagatatacagatacattccaccgttgatctgggggaaaagtggacacatcca

SEQ ID NO: 172429 - DNA, 74 bp, Homo sapiens
attaccaagcatataggtttggtgtacagtggcatgggccccgattacagcctgatgtgtgagaagcggatatt

SEQ ID NO: 172430 - DNA, 144 bp, Homo sapiens
atttgatcgaaacccggaacttcagaacctcctactggacgacttctttaagtcagctgttgaaaactgccagaggctaaaggcagcagttcactatactgtgggttgtctttgcgaggaagttgcattggacaaagagatgca

SEQ ID NO: 172431 - DNA, 75 bp, Homo sapiens
gggaggtgcccctgcgttgtaccatccgcctgtgggacacctaccaggatgtaattggaaaatcgatgaatcaag

SEQ ID NO: 172432 - DNA, 100 bp, Homo sapiens
cgtgctgatgcctagtcccagaatctggccccaggtgactccaacagctcatgatggagcagtccaagaagtcctccctcatggtggcccgcagtattct

SEQ ID NO: 172433 - DNA, 83 bp, Homo sapiens
gccgccagagaggcccgcccaccagttcgcccgtccccctgccccgttcacaatgcctggtctccaagtcctctcctaagaag

SEQ ID NO: 172434 - DNA, 75 bp, Homo sapiens
gctgacaccgccaaggagaaggacgctgccattgaccacaaatctctagaagatgacggtgttctttaaaacgct

SEQ ID NO: 172435 - DNA, 82 bp, Homo sapiens
atgaagcttctgaaccatccacacatcataaagctttaccagggattgcttggcattttgtacagaaccagtttttgccagt

SEQ ID NO: 172436 - DNA, 101 bp, Homo sapiens
tgtggaggattgatatgacagaaaggagccaaggatgactcaagtttttggccagagctgtattcatcaccaaagaaaaaacttacaccaatgcagaaatc

SEQ ID NO: 172437 - DNA, 74 bp, Homo sapiens
atgcagttcatcacatcattcatgattttcagagcagccagcggcggacaatccttgaaatgctcctgggtttc

SEQ ID NO: 172438 - DNA, 75 bp, Homo sapiens
cccacagtgggggtgtgcaaacccgagagaactgggtatatttggcccgaaaggaaggatcatcttttgcttata

SEQ ID NO: 172439 - DNA, 90 bp, Homo sapiens
catggtgtgtaagaagatccaaggctccaacaaaagaatcctctgaagaggagtatgactctggagttgaagaagaaggatggccccgcc

SEQ ID NO: 172440 - DNA, 90 bp, Homo sapiens
gaacgtgtttctcgcctacttcctggtgtcgatcgccggcctcctctacgcgctggtacagctcggtgaccattgtgaggtagatatttt

SEQ ID NO: 172441 - DNA, 87 bp, Homo sapiens
ttcgccacagttcctaccttatgagctcggttttcttatgcttataagagtggaacagcgggagatacagatgacccaccaagaatt

SEQ ID NO: 172442 - DNA, 89 bp, Homo sapiens
tttgagtctcttaccatgggggcaaagaagaagctcaagacccagctggagctggaaaagttcctcatgagagtgctggactcctacgg

SEQ ID NO: 172443 - DNA, 82 bp, Homo sapiens
cagattcgcagtggtcgcttcttctccttgattgctcatttagaaagtggatgtgtgggataacatgtccaatgtgtccgag

SEQ ID NO: 172444 - DNA, 76 bp, Homo sapiens
aaggaacatgtttgaatttcagatgtgttcctcaatgaatcaccctctgaagagccaatccattcaggatgggaaa

SEQ ID NO: 172445 - DNA, 75 bp, Homo sapiens
gcgggagccacgcagaggacgccggaacaccctggaagccgagaaatgggaagtactacatggccactatgacca

SEQ ID NO: 172446 - DNA, 100 bp, Homo sapiens
tgaagaagcagttctacaaggcgagccagatttatcagtcctggctagacaagtccacaccctacacggctgtgcgatgggtcgtgacactgggcctgag

SEQ ID NO: 172447 - DNA, 73 bp, Homo sapiens
aaaactgtcattcgagctatcaggttttaaaatcaaagatgggaaaatcggagaaaattgcccttccccatgg

SEQ ID NO: 172448 - DNA, 100 bp, Homo sapiens
gctggaggcagcgccatatcctggaggtgaaggtatgcacctgtgggcatcctgttcctgattgctgggaagattctggagatggaagacatggccgtcc

SEQ ID NO: 172449 - DNA, 100 bp, Homo sapiens
caagaaggccctggacacagcaatatctctgggctttcacagtgtcctgtttcccagaggaacagttcatttcaacagccagggagaaagcctggatgct

SEQ ID NO: 172450 - DNA, 100 bp, Homo sapiens
ttcagattacgaggattatggatgaacgtaacagacagttttgatgtggacaatggcacatctgcgggacggagtcccttggatcccatgaccagcccag

SEQ ID NO: 172451 - DNA, 98 bp, Homo sapiens
ccagttgaatgctgtcttccaagaacagaagaaaatgatccaggcccagctccagaaagcagtggggcctgagatcaccaagacagacctggtccctg

SEQ ID NO: 172452 - DNA, 126 bp, Homo sapiens
cctcaaccaatcggacacctaccaggtggacggcacggacgacagaagcgactttggtgagactctgataccccagaatcttccatgctccgtcacactgcagccaggcccagaggatacaggaaa

SEQ ID NO: 172453 - DNA, 50 bp, Homo sapiens
caacagccagtgatatgctatacatgggcagtcagggcgacagcaagaat

SEQ ID NO: 172454 - DNA, 89 bp, Homo sapiens
cccatctggactaccaaggagaagctatagactacttctactccaccaggaagatactagagtaaaaggatggtttcttctggacaatt

SEQ ID NO: 172455 - DNA, 85 bp, Homo sapiens
agtgcaaatgcacctcctgcaagaaaatttcatgatcaacatgggagactcccacgtggacaccagctccaccgtgtccgaggcg

SEQ ID NO: 172456 - DNA, 105 bp, Homo sapiens
ggctatggactcacgcagagcactgtcggcatcatcgggctggggcgcataggtcagcccaaggccaaccccactgtcactctgttcccgccctcctctgaggag

SEQ ID NO: 172457 - DNA, 75 bp, Homo sapiens
aaagcaggcgactacagccacgtgaagtgtgctggaattgatgttcgtctgtgtgatgttggtgaggccatccaa

SEQ ID NO: 172458 - DNA, 100 bp, Homo sapiens
tcgcagagaaatcgggcatttgcaagatccgcccacccgcggtgcgaatcataaacatgtacaaggaaattgatcaaacaccctacaaacaagagatcaa

SEQ ID NO: 172459 - DNA, 51 bp, Homo sapiens
tgatgctgtggaacttgcaaatcgaagattgctctggaagcagccaaagca

SEQ ID NO: 172460 - DNA, 75 bp, Homo sapiens
cctgccttcaacccccaaagcagtgtcagagatggctttggattccccgttctgtgtgctgctgtctggctcctg

SEQ ID NO: 172461 - DNA, 100 bp, Homo sapiens
tgcgctgtgacctgctccggagtcataaagaggacgccgggacaccaagaagcagggaaatgcacccctgctggatgcatgctgctggcacaactgctgg

SEQ ID NO: 172462 - DNA, 100 bp, Homo sapiens
gcgatacgggagctcaaagtgtgccttctcgggacaagttggatggcttgaggactggtactaaaaggaaacgtgactgggaggccattgccagcagaat

SEQ ID NO: 172463 - DNA, 80 bp, Homo sapiens
caaagcacaggaatctcactctgttaaagctggtctgttctaactgaggttggtttgacttccacaaatgcagaagtaag

SEQ ID NO: 172464 - DNA, 75 bp, Homo sapiens
cgcgctaaaacatggatttgacaccctagagcgcctcacaggatgactacgacaaccatactggaattgatttgg

SEQ ID NO: 172465 - DNA, 90 bp, Homo sapiens
tatgcaaaaagagcactagaaaaaaatgaatcaagttttgcatctcataagtttccgcctcagaccacagagcctgaatggatcagatta

SEQ ID NO: 172466 - DNA, 100 bp, Homo sapiens
cgaaacgccgccgcggagccgaggcggagccgctgtcctcgtccccagcggtcccgcccaacgcccgactctagttgctggagaatgtaaccctaatcca

SEQ ID NO: 172467 - DNA, 74 bp, Homo sapiens
tgccctcagctccgagtccagggcgaggggtcgggccccggctcagtggtcccaggcagctcgggtgtcggaac

SEQ ID NO: 172468 - DNA, 75 bp, Homo sapiens
acaatcagccctacagcgtccgcatccctgaggtgaacctgagcaaggtgggcgagtattggtggaacgccatcc

SEQ ID NO: 172469 - DNA, 98 bp, Homo sapiens
agcaatggaggaaacagctatatgggaacaacatacagtgacgcttcacagggtgtaattacttcaagcctccaggatggcaatccagttccgttcgc

SEQ ID NO: 172470 - DNA, 106 bp, Homo sapiens
ctaggtctcctacgtctgcccctgcccggctcccggcggccccagctgtcaccgggtgtgggccgaagatatgctcatgtggtgttgaggaaagcagacattgacc

SEQ ID NO: 172471 - DNA, 75 bp, Homo sapiens
ggactgtgggctggtgtgtggaactgggtttttaatgaccacaacaagcaagcatgcagcttactgcttgaaagg

SEQ ID NO: 172472 - DNA, 74 bp, Homo sapiens
attgcttcgtttgccattttcttatggagaactgtccttgttctgagatatggggagcctacactccggagggc

SEQ ID NO: 172473 - DNA, 101 bp, Homo sapiens
cggagcagtatttcaatgtggagcacacgtcacatggagatgggcgtcaagaagttacctctcgtaccagccgctcaggagctcggtgtagaaactctata

SEQ ID NO: 172474 - DNA, 100 bp, Homo sapiens
gagcaggcagtcattgaaaggaaggagaaggagaaaattggcttcttcaaccagcagtatgcagagcagctgcgcatggaggagacgcccactgagtacc

SEQ ID NO: 172475 - DNA, 82 bp, Homo sapiens
gcggacagcgggctggagcctgacgagctggcgggctgtctgtccccagaccccagagcacgtccggcaccaccatgactgg

SEQ ID NO: 172476 - DNA, 100 bp, Homo sapiens
ggcaggcctacagggaaggggacgaagataatcaacctctagccgggcttgttccagctgctgatggcccaggagatcgtttcatcattggggaatccca

SEQ ID NO: 172477 - DNA, 90 bp, Homo sapiens
gtccgacgagcgctgcactaacgcaggatccggctgccgaaggtcctcgccaggtgctggagaatctggtaaaagcaccattgtgaagca

SEQ ID NO: 172478 - DNA, 75 bp, Homo sapiens
accagcatgtcaataaggggtcataggtggaaaagacatgtttggtaactctcattcgacatccatctgaactaa

SEQ ID NO: 172479 - DNA, 90 bp, Homo sapiens
ttattatctcattgaagcttggaattacatagctggaaaggatcttacagtgccccagcaagacctttggcaccttcagttccaccaagg

SEQ ID NO: 172480 - DNA, 100 bp, Homo sapiens
gaaaacaacttcgagggcagagcttttacgagatgagcgacggtggatcctgctccctgtccacgtcctgtgcctccgtctgcagtgaccacatctctcc

SEQ ID NO: 172481 - DNA, 50 bp, Homo sapiens
acagatccgacatcgacgcagtctacatcgacgacatcgcggatggcgcc

SEQ ID NO: 172482 - DNA, 75 bp, Homo sapiens
gcctggcttcccagtgcatggcgctcaagtctgtgcgccgaaggtgtcttgctgcaggtaactaatgaagaagtg

SEQ ID NO: 172483 - DNA, 90 bp, Homo sapiens
ccctctcccgacgccggccagagtccagctctacaacgtagtgcttcagcctcaccagcaaactacagggctcctttgatgtcagtgtca

SEQ ID NO: 172484 - DNA, 99 bp, Homo sapiens
ctcgcgaccgccgagcctgcagcctgccccgcggccaacatgagcttcttgttaatacagttatggccacccaggtaatggggcagtcttctggaggag

SEQ ID NO: 172485 - DNA, 100 bp, Homo sapiens
cgaccgggagcggcggcagcggcggcgcggaggcggctgaggtgcgagccgaattaaatatgggtgatgttgagaaaggcaagaagatttttattatgaa

SEQ ID NO: 172486 - DNA, 100 bp, Homo sapiens
gacaggtgctctcggttgcacaataaaccgacgtttagccaggtgtttggagaagagggattgaccctgaatcttgaagacgttcagcctcatgacttag

SEQ ID NO: 172487 - DNA, 100 bp, Homo sapiens
attcaattgactgttctgtcttggagccaagaatctagaaaagccaaatgaggagcagagtctgagatctaataacattgcagagctgagtccaggagca

SEQ ID NO: 172488 - DNA, 82 bp, Homo sapiens
acaacttcctgcaggactccaaggtcattttcgtggagaaagccccaggcttgggcactgtttaaaggaaagttccgagaag

SEQ ID NO: 172489 - DNA, 90 bp, Homo sapiens
aatgggattcactgtcagcacaatccaagaaaacattcttggccaaaatctaggggaagttactgccacttcgtactatataaggaaaac

SEQ ID NO: 172490 - DNA, 74 bp, Homo sapiens
tctggtaaccaggctgtgcgcctgcccctcatggaatgtgtccaggtgccatccgcagagccatcctgtgcaaa

SEQ ID NO: 172491 - DNA, 75 bp, Homo sapiens
atttggtggacacttttgcttgcagttaggtcaagtggagtgattctgccccacattggcagtgccacccacaga

SEQ ID NO: 172492 - DNA, 100 bp, Homo sapiens
gaggcctgcaaagctgtacaagagatcatgcagctgaaggaagaggatcaccttccaagacaaaacagtcttcatgggggaaaaatgacgcttgtccagc

SEQ ID NO: 172493 - DNA, 74 bp, Homo sapiens
ccacaaaattctcgcccatattcagaacattagcagtgttgtggctgcattttccgaccttcttcacgtccgaa

SEQ ID NO: 172494 - DNA, 100 bp, Homo sapiens
tgtggttgcaacggagataaattcccggaaccgcgattcggcgtgtcagaagaaattttggaatccataagagccaaaaagggagacattgataatgtta

SEQ ID NO: 172495 - DNA, 89 bp, Homo sapiens
ctttgcacgacgctgccaacaacgggcactacaagctctcctatgtggacgccgagggcaaccctgtgggtgtggtacagatgaccttc

SEQ ID NO: 172496 - DNA, 90 bp, Homo sapiens
tcatgaactcaaggagcacaacggacacatcacaggagggagcaaaggagtttgctgctgctctcaccgctgagcggataaagaccccac

SEQ ID NO: 172497 - DNA, 75 bp, Homo sapiens
gaggaaatgtcactgccaaagctggagtcgttcaacggtggagtggcagggtcccagccagtgagtgagaagcag

SEQ ID NO: 172498 - DNA, 98 bp, Homo sapiens
tggactggaacctctgggcccacatctgccgacaccccaggccatcgagccccaggccatcgtgcagcaggtcccagcccccagtcgaatgcagatgc

SEQ ID NO: 172499 - DNA, 75 bp, Homo sapiens
atgaaagcctattgtgaacgacaggatgggcaacactccagattcagcctcagacaacctcggtttccgctgtgc

SEQ ID NO: 172500 - DNA, 103 bp, Homo sapiens
agacacagaagaaaaagtgggactgaagtacactgaagcaggtactccaaagattcaggtttactcacgtcatccagcagagaatggaaagtcaaatttcctg

SEQ ID NO: 172501 - DNA, 100 bp, Homo sapiens
atgcatcaatcaacgcacatcggaacagggagacctgacagatgccaaaacaaaggaacagttgggatccaggcagcatgaggtagaatggcaaacctac

SEQ ID NO: 172502 - DNA, 100 bp, Homo sapiens
ctttttactgccaagttcccactctgcatggtgttccacatcattgacttactgctttgtgaggttcaaaccttgtactactcagctgatcacaagctgc

SEQ ID NO: 172503 - DNA, 82 bp, Homo sapiens
cccttcatgcatgaaagacaaagctactcagtctaccctgatgggagagtctgcatttccatcctccacgcgccaggcgatg

SEQ ID NO: 172504 - DNA, 100 bp, Homo sapiens
ctttcacaaatttggaatctgccttctactccatcgtgggactcagcagccttggtgctcaggtgccagatgcaaagtcagcaggatggacctggagatg

SEQ ID NO: 172505 - DNA, 71 bp, Homo sapiens
caccgacagcacagacagaatccctgctaccagggccagacacctgctgagtcggatttccaggtgctcga

SEQ ID NO: 172506 - DNA, 100 bp, Homo sapiens
gtccccatacagagggacctctacaaggaggtgatgctggagaactataacagcattgtgtcattgggagctgctgctcaagaggtcatcaaaataatca

SEQ ID NO: 172507 - DNA, 75 bp, Homo sapiens
cgcagtggtcgcttcttctccttggtgacagctggatctgcaagtctgtcctttctgaaggccaccagcgcaccg

SEQ ID NO: 172508 - DNA, 101 bp, Homo sapiens
gtcttcaattaaaaaatttattaaaggaagcacacctaaggtgaaaggtgtagcagtcactcggcctacacccacagcatcgaccttgtgaacccagcgac

SEQ ID NO: 172509 - DNA, 100 bp, Homo sapiens
aaattactgatggctctccttccaaattgtggaagatatcaataagcgcagagagccgctccccagcctggaggctgtgtatctcatcactccatccgag

SEQ ID NO: 172510 - DNA, 118 bp, Homo sapiens
atatctgtcttcggtggactccttcggcagtccacccaccgccgccgcctcccagatggactcaccctgtcacccaggttggactgcactggcctcaacctcctgagttcaagtgatc

SEQ ID NO: 172511 - DNA, 100 bp, Homo sapiens
gagatacgcgccgtggtgcgcaccgagcccttccaggacggctacagcctgtgcccgggccgggagctgggcagtaccttctccaggcaaattccgttcc

SEQ ID NO: 172512 - DNA, 50 bp, Homo sapiens
gcaatatttcgagcagtttggcaaggaagtgctctctggcgtggtggtca

SEQ ID NO: 172513 - DNA, 50 bp, Homo sapiens
cagtggtcgcttcttctccttgctcccaaattataaccagcccccttcct

SEQ ID NO: 172514 - DNA, 85 bp, Homo sapiens
gcgagcgcgagcggcgcgagaaagttaatttggagtggcccctggagtcagtttcctacaccatccgaggccccacccagcacga

SEQ ID NO: 172515 - DNA, 98 bp, Homo sapiens
tgcagagcatccctgacgcacacaggagccaaaaacctgtatatcatctccgtgaaggggatcaagggacggctgaacagacttcccgctgctggtgt

SEQ ID NO: 172516 - DNA, 76 bp, Homo sapiens
cttcaacacccaaattaataccaaaagttaccaaaactgcagacaaccccacagagcaggtgttgccaatgctgcg

SEQ ID NO: 172517 - DNA, 98 bp, Homo sapiens
aaacgtcgtcagttcgaggatgagaaagcaaactgggaagctcaacaacgtattttagaacaacagaactcttcaagaggttttgtgtacaccacctc

SEQ ID NO: 172518 - DNA, 100 bp, Homo sapiens
ccaaaaacccctctgcagaagagcatggacctcttaggaaaacaactttccttttactcctttggtataatagggctttttggtggtgctggagttggca

SEQ ID NO: 172519 - DNA, 97 bp, Homo sapiens
gaagtaagattgtcttggaaatactaagttgggtggatcatccatgccatggagtatgaacttcagatccgtggcggagacaagccagccttggact

SEQ ID NO: 172520 - DNA, 90 bp, Homo sapiens
cggaacccttcgctggcgggagcgcggttcggggccgcagaggctgattcaccccaagagtggccgttcctaccacgaggagttcaaccc

SEQ ID NO: 172521 - DNA, 100 bp, Homo sapiens
tcagaagctggaatatcatcaggttaggtcttctgaatcattaatgagtgaccagtgtccatgtttatgcattaaagaattatgggttctacttattcat

SEQ ID NO: 172522 - DNA, 50 bp, Homo sapiens
agacgtgcggatcctgctggtgggagaacattacaattcctagaccttct

SEQ ID NO: 172523 - DNA, 100 bp, Homo sapiens
ttctcctcctgcttgtgagcccaggctgttgataatcaggtgtatgtggccacagcctctcctgcccgggatgacaaagcctcctatgttgcctggggac

SEQ ID NO: 172524 - DNA, 50 bp, Homo sapiens
cggagctggaatgactggcaacccaggtgaaatgacaatggatgctctgt

SEQ ID NO: 172525 - DNA, 50 bp, Homo sapiens
gtgacactcaacaggattcccgaggcaagtatattaatagcagccagaag

SEQ ID NO: 172526 - DNA, 105 bp, Homo sapiens
ccgcgcggaaggagctggagacggtcgtagctgcggtcgcgccgagaaagagtgaagacatttccacctggacacctgaccatgtgcctgccctgagcagcgagg

SEQ ID NO: 172527 - DNA, 90 bp, Homo sapiens
tgggaatgccaacacagaaaccttgccatcagggatctgaaccaatgatgctgggttcacccacatctccaaagccaggagttaatgccc

SEQ ID NO: 172528 - DNA, 108 bp, Homo sapiens
ctgagatctatgatcccacatctggaatctggaatgaaatcttccaagtccaaggatgtccatcactggtgcaagctatatttaacggagatcctgatgaagttcgag

SEQ ID NO: 172529 - DNA, 50 bp, Homo sapiens
acctcagaggacaacgaagtgttcgggctattgagtggccagacttcccc

SEQ ID NO: 172530 - DNA, 100 bp, Homo sapiens
cccctggatcccagctttgtggctgccgtcatcaccatcaccttcaatccgctctactggaatgtggtgaaaggtgtagcagtcactcggcctacaccca

SEQ ID NO: 172531 - DNA, 90 bp, Homo sapiens
accaccgtcctgctcttccagttcgggatggtgcgggagatggaggcagagctggaggacgagaggaagcagcgctcgatggcagtggcc

SEQ ID NO: 172532 - DNA, 82 bp, Homo sapiens
gggatcagtgagaaagactccaacttccagaacccatttaaaatcgaccgcacagagatggagtttcgctcttcttgcccag

SEQ ID NO: 172533 - DNA, 75 bp, Homo sapiens
cgggtctgctcgggggtctacttcgaggagtgtgaacatggctacgcctcttcattcccgtccatgccgagcccc

SEQ ID NO: 172534 - DNA, 90 bp, Homo sapiens
atttcttaatgcatccaaagccttctggcaaatccagcctagggtgaatgtttccccctccaagaaggggcccttgcagcaccacaacct

SEQ ID NO: 172535 - DNA, 93 bp, Homo sapiens
ctccgtggccttagctgtgctcgcgctactctctctttctggcctggaggctatccagcgtcctgaacgaggctgtgggggccctgatgtacc

SEQ ID NO: 172536 - DNA, 144 bp, Homo sapiens
agcgcgtgagcgtcgcgggagcctcgggcaccatgagcgacgtggctattgtgaaggagggttggctgcacaaacgagctcggcaagatgtcggtgaaggagggcgcacagcgcaagtgggcagcgctgaaggagaagctgggg

SEQ ID NO: 172537 - DNA, 100 bp, Homo sapiens
ttgcacaacgaggacgccttccagcacggcatctgctttgaggccaagggggcgacgatggccttctgaggggctgggacaccagggtacccggcaaatt

SEQ ID NO: 172538 - DNA, 82 bp, Homo sapiens
ctcatgcccgagtgcagacctgcatcaacctgatcaccagccaggagtacgccgtcaaggcttacatcaaaatctatcaagg

SEQ ID NO: 172539 - DNA, 50 bp, Homo sapiens
atccaggagaacggcggctggaccttcacggcatggtgcaactcccacct

SEQ ID NO: 172540 - DNA, 58 bp, Homo sapiens
cgcacagccaggacatcctggaacctgggaaaggcccctgcgaggaattggcatcctt

SEQ ID NO: 172541 - DNA, 75 bp, Homo sapiens
gttccgtcacaggggctatttgtttggatatcctgaaagatcaatggtgactctgacatcattagaagcatgcca

SEQ ID NO: 172542 - DNA, 82 bp, Homo sapiens
tggcgcgatgcgtcaagtacactgaaattcatcctgagatgaggcagtgaaaaagcagtctggctcccgaggtccacccctt

SEQ ID NO: 172543 - DNA, 100 bp, Homo sapiens
aaacgtcatcattaagttggagcagggagaggagctgtggataacgggaggtgaatttccatgtcaacatagtcctgaagaagaactggcaactcctcca

SEQ ID NO: 172544 - DNA, 82 bp, Homo sapiens
cgcccaccagttcgcccgtccccctgccccgttcacaatgtttaagaattgtttaagctgcatcaatggagcacatacaggg

SEQ ID NO: 172545 - DNA, 100 bp, Homo sapiens
ttcagttgcctgggctccagatggagaattatttgctgttggatcgtttcatactttacgcttgtgtgataaaactgggcgattgaacaggagaagcaag

SEQ ID NO: 172546 - DNA, 87 bp, Homo sapiens
agaaaatcttctgttggatgaaaggggcacagaaaactgaatctgtagataacgagggagaatgaattgtcatgaaaaattggggtt

SEQ ID NO: 172547 - DNA, 49 bp, Homo sapiens
gaactggccctggactacctctgcaggccatttgtgtaggaccagaaaa

SEQ ID NO: 172548 - DNA, 50 bp, Homo sapiens
taatgatgcaaaataccatgaggaaaccgtggctgccaggctttctgttt

SEQ ID NO: 172549 - DNA, 101 bp, Homo sapiens
gattggaggtgtcagtgttaaaggaacctctacaacgaaggtgaagccacggaagataaggtccggacactgtttgtcagcggcctccctgtggacattaa

SEQ ID NO: 172550 - DNA, 136 bp, Homo sapiens
tggaggttttggctctgcgtgagtgtggtctacgagctgtttctcatctttatactcttccaggccgccatggcatcagatgaaggcaaactttttgttggagggctgagttttgacaccaatgagcagtcgctgg

SEQ ID NO: 172551 - DNA, 96 bp, Homo sapiens
tcgctgtcggaggagaatgagaccctggtggagtttgctattgggaaggagatcacgttgctgatgcagacattgaatactctgagtaccccagag

SEQ ID NO: 172552 - DNA, 101 bp, Homo sapiens
caatggcaccactgggcccgtccgggtggccattaagagccagccaccaggcatctcaagccagcacttcacctaccagatacactgcctctaggactggg

SEQ ID NO: 172553 - DNA, 100 bp, Homo sapiens
tacagatggaggaatcctggatccagatgatgtcttggcagatgttgttgaagataaagacaagtgctgggcctaaaggagataacatttatgaatggag

SEQ ID NO: 172554 - DNA, 117 bp, Homo sapiens
caccagccaatgatcttttcaatgctgcgaaagctgccaaaagtgacatgcaggtaaagtgttgagagaggagaaccagtgcattgctcctgtggtttccagccgcgtgagtccagg

SEQ ID NO: 172555 - DNA, 101 bp, Homo sapiens
gcgcagcgccggcgcccgggagacccaggaggagcccgcagctttttgtcgataaagatacgattgttaatgctgtcggggcatcgcacgacatccacctc

SEQ ID NO: 172556 - DNA, 100 bp, Homo sapiens
ctcaatgaccatggcaagaactggcgtcacgtttacaaggcttcaacggaccacaccaaaatgccatctcaaatggaacacgccatggaaaccatgatgt

SEQ ID NO: 172557 - DNA, 96 bp, Homo sapiens
gcgtccctgagtcccagagtcggcgcggcgcgcatgcagcagattggaataaatatgatgaccgattgatgaaagcagcagaaaggggggatgtag

SEQ ID NO: 172558 - DNA, 90 bp, Homo sapiens
ggatgatgccaaagttttattaggttttctgtctcaactggtctctgacaagcctctgactgaatgtatccgtgctggccactatgcagc

SEQ ID NO: 172559 - DNA, 100 bp, Homo sapiens
cgagcctggaggattgtcactccaacctcttttcgctggactgagcacggaaggcatctaccgggtcagcgggaacaagtctgagatggagagtctgcag

SEQ ID NO: 172560 - DNA, 75 bp, Homo sapiens
gccgaggcgttcggtcctgctgttgcggccgctgccccagggctgcggggacgactacatgaggaaataattgac

SEQ ID NO: 172561 - DNA, 98 bp, Homo sapiens
gaccggctcgcgggtgcgggtccgggtgaagcgggaggcagccagagtcggagccgggcccgagcaccaggcgcaggaaaagcttttgacatcaccta

SEQ ID NO: 172562 - DNA, 100 bp, Homo sapiens
gtttttgtgggtggattgagcccggatacttctgaagaacaaattaaagaatattttggagcctttggagagaatgaagagcttcgaaacttgtctttgt

SEQ ID NO: 172563 - DNA, 100 bp, Homo sapiens
taaggattccaagtaactcttatttggaaaataccaagcccggattctttccgagagccttctcactcctgcggagtaccagaaggaagtcaattacgag

SEQ ID NO: 172564 - DNA, 83 bp, Homo sapiens
ccagaacccaagaagattccgataagaaacacgattcttcgctgctgctgccttaccgccgagaaccaccacccgccaggcgt

SEQ ID NO: 172565 - DNA, 75 bp, Homo sapiens
cagaccttcgcctcgccccgccggttcctcaccctcggggagcaacatgggagtgaactgctttcttttatcaaa

SEQ ID NO: 172566 - DNA, 75 bp, Homo sapiens
gcgtggtcgcagctactctagaggtggttgggatccatatgcagggacttgggtgtgatgaaatgctgcagggtt

SEQ ID NO: 172567 - DNA, 49 bp, Homo sapiens
catggtgtggtgaattcaacacttccatcaacgaaacggaatattccaa

SEQ ID NO: 172568 - DNA, 101 bp, Homo sapiens
aaagatgtcatgatggagaattatggaaacctggtctcactgggagaagtttcggtgtccgacatccctgtctgttgttaaagacagaaacctaactgaga

SEQ ID NO: 172569 - DNA, 82 bp, Homo sapiens
gaacatctctttcaatgacaaaaagtttgtcattaaacccatcgacaagaaggcacctttttccttccagcagggtggatgg

SEQ ID NO: 172570 - DNA, 76 bp, Homo sapiens
ggaaactgtacattgaagcagagtctctccagagctgttcaatgttgatcatcggattaacacaacctcgttgata

SEQ ID NO: 172571 - DNA, 98 bp, Homo sapiens
tgggcttggagaccactgtgaagtggaggaatcagacatcattgatcttgagaaacgctattggttattgaaggctcaatcccggactggacgatttg

SEQ ID NO: 172572 - DNA, 115 bp, Homo sapiens
gatgatggaaatgaagtataataccaagaaagccccacttggagagagctctgttagcagaatgaaaaaattggaagccagattcagggagggactggaagcaaaagaatttctg

SEQ ID NO: 172573 - DNA, 104 bp, Homo sapiens
caggagcaagtactccaggaagcacagagctgtaccagtacacggcccacgttgccagagttcgaaccaacgtggcctcaaccagatttggaatgtcaaaaagc

SEQ ID NO: 172574 - DNA, 75 bp, Homo sapiens
gtgatcctgtccgtggtcgggggcctggccgtgggaaaggcctccagaggaagaagtccaagttccgcttgtcca

SEQ ID NO: 172575 - DNA, 100 bp, Homo sapiens
ctgcagtggcgcctaaagtctgagagagggaagtcgcctctgtgctcgtgagtgcatggggtataagcggagctggagtttgttcagatcatcatcatcg

SEQ ID NO: 172576 - DNA, 90 bp, Homo sapiens
gtcctgcgcgagtggagctctgaagaagctctgagcggagttgtgttcttccccaggctaaagaattacctccaaagccattgtcaagac

SEQ ID NO: 172577 - DNA, 90 bp, Homo sapiens
cgcctgggcccaggtgtggcgtctctgtccccatctggttttagtggatcaatcttcctgtcctacaactgacaaaggatcccctaaaga

SEQ ID NO: 172578 - DNA, 100 bp, Homo sapiens
ctcagcgaccctgtggagctcctggtggcagataaagtggagaattttcatgaagaacatgaaaagaatagtcaccatattcacaaaaatgctgatgaca

SEQ ID NO: 172579 - DNA, 75 bp, Homo sapiens
gtcaagacaacagtgatgaggaaagctgtgaaagttctcaaggaaatgtagtctttggtgagcccatcactgcca

SEQ ID NO: 172580 - DNA, 74 bp, Homo sapiens
gcagcagcagccagtattcgggaaaggcagacaggatctgcctacaaactggtttgctactttaccaactggtc

SEQ ID NO: 172581 - DNA, 60 bp, Homo sapiens
gctctgttagcttggcctctgtccctgaagctcttcatcacggtcatggacaagctgcgc

SEQ ID NO: 172582 - DNA, 100 bp, Homo sapiens
gagtggaaaggctctcagtgaaaaaggaaaatgttctgctgctgccctggatgttcttgcaaatgtgtatcgtgatgaactgctgccacatattttgccc

SEQ ID NO: 172583 - DNA, 97 bp, Homo sapiens
agaggtgaccctcaggtacttcgggtctccaggtgactgtggggatcatgttgttataatgaacacaagacacattgcattttctggaaacaaatgg

SEQ ID NO: 172584 - DNA, 50 bp, Homo sapiens
gggacacccgggagtcaggaaatgtcaggatggctaaaggtgaccccaag

SEQ ID NO: 172585 - DNA, 101 bp, Homo sapiens
agaaacatcagttgaaacatagggaactctttttgtcacgccagtatgaatctctgcccgcaacacatatcagcgcggagacccacatcaagggcttcaca

SEQ ID NO: 172586 - DNA, 95 bp, Homo sapiens
tgcgaaaagttactttcaatggactgaaccagatgattgtcatagctcttgaagatgttgatctaaacaaagtttacatcctcggtgggcttgtg

SEQ ID NO: 172587 - DNA, 87 bp, Homo sapiens
gccgccgctgtccggagccccacagggagtgcatccgccccaacccttttccccctcgtctcctgtgagaattccccgtcggatacg

SEQ ID NO: 172588 - DNA, 104 bp, Homo sapiens
cgaaggccgtgaggtatttttctaagttgatgcggatgaaattaaaaggctaggaaagagatttaagaagcttgatttggacaattctggttctttgagtgtgg

SEQ ID NO: 172589 - DNA, 100 bp, Homo sapiens
cttggaattacctgctgcgatttttcttcacagccagtttctggattgtcaccagacctgcaatctatggagcagattcggagaattatgagacctactg

SEQ ID NO: 172590 - DNA, 75 bp, Homo sapiens
tcaattcttggagaacacaaagaagtgtgatgatcctgcaaggccttgtcgatgtccgcatccctcataacaact

SEQ ID NO: 172591 - DNA, 100 bp, Homo sapiens
tgcaatgagattgttcatcctggctgcctccaggcagacctgtctaactacaagccagacttgggttttctcctgtagtttgaagacacactgactcctg

SEQ ID NO: 172592 - DNA, 90 bp, Homo sapiens
ggaactggactgggatttggaggatttaatacacagcagcagcagcaaactaaatgtttctccatcccagagagatgaagtaattcaatg

SEQ ID NO: 172593 - DNA, 96 bp, Homo sapiens
accggcgaccgctgccgaagcatgaagaaggggtaaggcgtgagcccccaagatttcacgattccaggagggcttcgtgtatggacctcaagcgtt

SEQ ID NO: 172594 - DNA, 100 bp, Homo sapiens
gagtccttggctgggaggatcaatgatgtaagagttccctatttcattgatttgaaaaaaccacaggatcaaggtttgaatcacacgtgtaactactacc

SEQ ID NO: 172595 - DNA, 98 bp, Homo sapiens
aaagacagctttcacagtttgcgggactcagtcccatcactccaaggagagaagatttaaggaccatagtacagctatggatactgaaccaaacccgg

SEQ ID NO: 172596 - DNA, 75 bp, Homo sapiens
ggttctgtatgagactagagctaggagagaaatgactggatcagcatactattaaatgcactgaaatcacaatcc

SEQ ID NO: 172597 - DNA, 101 bp, Homo sapiens
cccatgactaaagtgcaggccgaactagatgagaccaaaatcattctggctgtagtacatgagcgagctagagaaatcaccaccgtttagaccaagctgta

SEQ ID NO: 172598 - DNA, 100 bp, Homo sapiens
gaaagtgggattggaaaccacatctgcttctctcccaggactgctaggaagacaagattagatggcaggttctggcttcagacaccctgaccaccctgtg

SEQ ID NO: 172599 - DNA, 98 bp, Homo sapiens
ggaagagtggattatttggtcactgaggaagagatcaatcttaccagagggccctcaggttataccttattggtgtggacgttgtctaaatttcggta

SEQ ID NO: 172600 - DNA, 83 bp, Homo sapiens
atgacattgttgacatgcatgcagctgcagacatcttcaaacactacatgaaggtttatgcatgtatgatggttttcttcttg

SEQ ID NO: 172601 - DNA, 100 bp, Homo sapiens
ttgagaaaagtaactcagagtgcatatgcccaagctggaatgcaatagcgtggtcttggctcactgcaacctccgcctcccgggttcaagcaattctcct

SEQ ID NO: 172602 - DNA, 100 bp, Homo sapiens
tggaagggaacgggaacggccatgagcactgcagcgattgcgagaatgaggaggacaacagctacaaccgggggacccagatgatgtggtaccagttggc

SEQ ID NO: 172603 - DNA, 76 bp, Homo sapiens
gaaaatgcaagaagactgatggagcaggcttgcaatattaaagtgaccatggaggctggtggcctccccttggagc

SEQ ID NO: 172604 - DNA, 99 bp, Homo sapiens
cgaggcggagaccgagggggagccccgcgcgcggcgtcgaggctgggaggcggcagaatgcagccagaggagggcacaggctggctgctggagctgctg

SEQ ID NO: 172605 - DNA, 87 bp, Homo sapiens
agtatttgatgtcttagagaaacttggagaagggtttaaagttctagctaaccaatacaaatctatataccccactttggaaataga

SEQ ID NO: 172606 - DNA, 100 bp, Homo sapiens
tggtgttagcgcaaaagttctgaatggcatccgtcctaccggaaacctaggaaaaggaagagagaagggcacagttacctaagtatcaacgtaatcttcc

SEQ ID NO: 172607 - DNA, 100 bp, Homo sapiens
tcaaggcacgaactgagctgatccttgccccagttaccaggcagtgacattgccagtgggagtgatgtactttctgatgtcatacccagtattccaagtt

SEQ ID NO: 172608 - DNA, 113 bp, Homo sapiens
ctgggtgaaggaaactcctcgatccgttcctggctttaaccctgactcgatgtgcgagtcccagtgcatataacctacagcaagcgagcatggcagctggctgcacggactcc

SEQ ID NO: 172609 - DNA, 75 bp, Homo sapiens
tgcacagcgccttgttccagcagggcctgatccaggaaaatggcattcctatgaagaaagcacgaaatgatgaat

SEQ ID NO: 172610 - DNA, 82 bp, Homo sapiens
ccatcctgccgtccttctccactttcgccagcccgtgccgcgagcgcggcctgcaggagggtggcccagttgaaatccttcc

SEQ ID NO: 172611 - DNA, 100 bp, Homo sapiens
tgcaacatctgcaaggtccgcttcaccagaaccacaccttcatcaagcggtccgaggtggaagaagtggattttgccggctggttgtgtaaaaccctgcg

SEQ ID NO: 172612 - DNA, 83 bp, Homo sapiens
cccaggtccgcccagcagccgcgcttcagccagccgcggcgagtcctttgcacatgttggcaacacacgcatccgcatcggcc

SEQ ID NO: 172613 - DNA, 75 bp, Homo sapiens
atgctctccagccaccacacgagtatgtgccctgggtcaccgtcaatggggccttggctgcctggagggtcagac

SEQ ID NO: 172614 - DNA, 75 bp, Homo sapiens
gagaacactggatagacttcgaacatttaaacagattctggaagccctgtctttttctatgagttccagcatcga

SEQ ID NO: 172615 - DNA, 75 bp, Homo sapiens
aagaataagcttcgacacctctcagttgtcaccctggctgctaaagtaaaggttttcccatcatatgattcccgg

SEQ ID NO: 172616 - DNA, 98 bp, Homo sapiens
gatgggagtatctgccaaacgtagaccaaaggctcagcccacaactcttgtcctaccacctcaatcttatgccttcattcatccggcatggtccaaca

SEQ ID NO: 172617 - DNA, 100 bp, Homo sapiens
gcgcctggtggacagcaaaggctttgatgaatacatgaaggagctaggatccggagtgttggaacagcagctgttaatatgtgccttgtggcaactggcg

SEQ ID NO: 172618 - DNA, 100 bp, Homo sapiens
ttggactgacttttcttatgctgggatgtgccttagaggattatgggttttagatggagcaggattagatattgatttccatcttgcctctccagaaggc

SEQ ID NO: 172619 - DNA, 76 bp, Homo sapiens
aacaagtccaaggatgaatcccagtccctgttacggatacactctgtgcagttttagagagagacacactcagtat

SEQ ID NO: 172620 - DNA, 51 bp, Homo sapiens
catggtggacagaaagtcagcctcttgtgtaccaaaagaattggtggagct

SEQ ID NO: 172621 - DNA, 82 bp, Homo sapiens
ccatcttcggctaggtcgtcacaggctccggctcatggcatcaagtggcatccatcataagccagagagatgacacggggga

SEQ ID NO: 172622 - DNA, 100 bp, Homo sapiens
ggaccagcccagaaggcagcggcggcccaggccagcattcccgcagcttcccaggtggcttcccctcttcccctgggggctgatttccactgagcagcca

SEQ ID NO: 172623 - DNA, 100 bp, Homo sapiens
cggcggggtccgggccggagtacgtcgttcccgctgcgctaggggaagcgggcagaccactaaggcttttcttcctacgatgctggagattaatcatggt

SEQ ID NO: 172624 - DNA, 106 bp, Homo sapiens
gtcgccagcggagcgaacccgagagcgtggagcgggctgggccaggtcctcagaatggttggaatgaccctccagctttgaacagagtacccaaaaagaagaaggt

SEQ ID NO: 172625 - DNA, 101 bp, Homo sapiens
ggacttctaccagggccacatcaccgccttcctgggccacaacggggccggcaagaccaccaccctggggcagtacccaaaggaaacgctacgaaagaata

SEQ ID NO: 172626 - DNA, 100 bp, Homo sapiens
ggccatcaagtgctcgcccagcctgcacgtcgacgacagagttgacgggcgccgacctgaaggactgcgtcagcaacaacagcctgagcagcaatgccag

SEQ ID NO: 172627 - DNA, 100 bp, Homo sapiens
tggcactgaagcaagagctacgaggagccatgaggcagctcccctacttcatccggccagctgtccccaagagaggaatctggaaaaccaggggctcatg

SEQ ID NO: 172628 - DNA, 75 bp, Homo sapiens
ctcaaccttgtgggatgtgaaaactctgttactgaaggtttgcccatttggcagcagtgaagctgttagaggagc

SEQ ID NO: 172629 - DNA, 74 bp, Homo sapiens
gagtgcatctgtagatgctgaaaaatcaatgctgtccaaacttaaacatggagaataaaggcagccccgttgat

SEQ ID NO: 172630 - DNA, 100 bp, Homo sapiens
ggcaccatcaagcatggatcggcgctggacgtgctcctctccatggggttccccagagcccgcgctaccaaaagaattggtggagctccatttgaagctg

SEQ ID NO: 172631 - DNA, 100 bp, Homo sapiens
cccctgccctctcccccacttccccccggcccatggtgcgaggctgggagccgccgcccgggctggactgcggtgttacacataatattgcattacttcg

SEQ ID NO: 172632 - DNA, 83 bp, Homo sapiens
ggaagaccgcgcgcagggcctgcagcgggagctggacggcgagcgcgagcggcgcgagaaagggttggcatctgcacatcctt

SEQ ID NO: 172633 - DNA, 90 bp, Homo sapiens
aaaatgtgtcaaattctggaataaattctgcagaaatagatagaatcgcctaccatttggtgcaagcaaaaagcaatcagcaattggaca

SEQ ID NO: 172634 - DNA, 90 bp, Homo sapiens
cgctgggcctgcagcgcggagcagaaagcagaacccgcaggctatgactttgcagccgtcctggagtggttcgcggagcgtgtggaccgc

SEQ ID NO: 172635 - DNA, 101 bp, Homo sapiens
ggactggctgatactacatattccagatgggcaaacttgaagataaatcttttgactccagctctttagaggatctaaagtgaccttgatggacagtggaa

SEQ ID NO: 172636 - DNA, 99 bp, Homo sapiens
attcgcagtggtcgcttcttctccttgagctgaagaagcaggtggagagtgccgagctgaagaaccagcggctcaaggaggttttccagaccaagatcc

SEQ ID NO: 172637 - DNA, 101 bp, Homo sapiens
gatctgcaccttcaggaccagttcgcagtagcagtggaatgggaggaagaggtttgcctccagatattacagtggatgaatttatacaacttatgtccaag

SEQ ID NO: 172638 - DNA, 100 bp, Homo sapiens
tgccgctgcaaactggcctctgggccgggggcgagcagcccccgggaggccgagtgcatctgttggaccgtgcgaggaacctagaaagattgtacaatga

SEQ ID NO: 172639 - DNA, 98 bp, Homo sapiens
gaggacgagatggacctggagcccaacggtcctggctataagtcaccatggcacagcaagctgccgataagtatctctatgtggataaaaacttcatc

SEQ ID NO: 172640 - DNA, 74 bp, Homo sapiens
agcctcctacctgctgattcctgcagcctcctatgtgctcccagagttaagtgggcagaccaacatccacctca

SEQ ID NO: 172641 - DNA, 75 bp, Homo sapiens
gtggatgcaactaacctcactccaagattatgaatgaaggcaggagaccttttaaaattgataatgatgatgaac

SEQ ID NO: 172642 - DNA, 100 bp, Homo sapiens
aaggtgtctgactttggcctgactcgcctcctggatgactttgatggcacatacgaaacccaggtttttcgttggaatatacgttgcacatttatggcga

SEQ ID NO: 172643 - DNA, 88 bp, Homo sapiens
aacattcagggtgtctatagcccgattgccccatcaagacgtggtgatttggaaatacttggttattgcatgatccaatggcttactg

SEQ ID NO: 172644 - DNA, 83 bp, Homo sapiens
cgcgtggaacggctgcttttggaaggagcatcagatccatgctgctgctgactcggagccccacagcttggcacaggctctct

SEQ ID NO: 172645 - DNA, 100 bp, Homo sapiens
ttacgcagaaggacctggccacgtttctgtgtttgaagaacatacgcaccttcctgaaagtctgccacgataaatttggattaaggaacagcgagctgtt

SEQ ID NO: 172646 - DNA, 100 bp, Homo sapiens
gaaaatcatccatctaaagcaccagtaaaatatggtgaactcattgtcttagggtctgtttatgatggtgaagaacatggacgtttcatggagaagcttg

SEQ ID NO: 172647 - DNA, 90 bp, Homo sapiens
ctaacatattactggcatcttcaatctgagttctatatgaagggaaagaacggcttattccaggatgtgaagtgatcctagccacaccct

SEQ ID NO: 172648 - DNA, 75 bp, Homo sapiens
gcaggagctagccagagccaaagaagccttgcagggcacaaatatttaaacatggaaaacgtgaagactgtttgc

SEQ ID NO: 172649 - DNA, 83 bp, Homo sapiens
ctcggaccgcatgctacaggacacggtgctggccgccggttgcaagcagatactggtgcctgattatttttacccaagatact

SEQ ID NO: 172650 - DNA, 82 bp, Homo sapiens
tggacagctagctgcttatggctataaaattacagcggacaaggcaaaatctcagcaagttcggacctctagtacaataagg

SEQ ID NO: 172651 - DNA, 82 bp, Homo sapiens
cggaggatggaagagctgcacaaccaagaggtgcaaaaacgaaagcaactggagctcagtgtttgaagatactgtggaggag

SEQ ID NO: 172652 - DNA, 100 bp, Homo sapiens
ccagaggctcttcatgattctttggctcaaaggagttgtatttagtgtgacgactgttgacctgaaaaggttggtagcacccacagaaggatcactagaa

SEQ ID NO: 172653 - DNA, 100 bp, Homo sapiens
atttaacatctacgtcagtgataaaatctccttgaatcgctctctcccagatatccggcacccaaatgttttacctcaatcatatatccacacaagtgct

SEQ ID NO: 172654 - DNA, 75 bp, Homo sapiens
tgaaggggtctagatgtaaatgtcagtggaaaggagagctaccatcactaagcccttgaagataaggatggtcaa

SEQ ID NO: 172655 - DNA, 82 bp, Homo sapiens
ttgtacttggattcagcaaggaaccttccgatgatgattattctccaccgtctaagagaccaaaggccaatgagctaccgca

SEQ ID NO: 172656 - DNA, 100 bp, Homo sapiens
cttaaggtcactttctgaaggcggcctcatcacagtcggaggctaccggctctctgaccagttccacgacatcctcattcgaaagtttgacaggcaggga

SEQ ID NO: 172657 - DNA, 100 bp, Homo sapiens
gaccaaggagcagctgcacctggtgatgcagggagacgtgatccgccattacggggagcacgtgtgcactgctaagggctgtgggacagatgatgtctac

SEQ ID NO: 172658 - DNA, 75 bp, Homo sapiens
catacacaagaagtttcaggagtcagaggagggcttactgtggatttctccgtcctggagtttcttcagagaatc

SEQ ID NO: 172659 - DNA, 83 bp, Homo sapiens
ccaacggggaggccaacgtgaagaagagagatggagccatctcagtgtgtggaggagctggaggatgatgtgttccaaccaga

SEQ ID NO: 172660 - DNA, 100 bp, Homo sapiens
gacgtacctttaccacatagacaaagctcacggacacagacctaattaaacagtgtatagatgaatgcacagccaggattgaaattggactgcattacaa

SEQ ID NO: 172661 - DNA, 100 bp, Homo sapiens
cgcaactctcagttcgagagtaaagaatctgtctatgatcttctcccaaaggagttacagttacctccatctagagaaacatctgtagcatcaatgagtc

SEQ ID NO: 172662 - DNA, 74 bp, Homo sapiens
agaaaacctcatgaatagcaatcacagagactcggagagcatcactgatcctgaaggacacagccctgcagaaa

SEQ ID NO: 172663 - DNA, 100 bp, Homo sapiens
gaggcgtgcacatctgctcttcttgcccattacctgctgggtttaccatggcaatggggatttatactggggtcacttatacatctcaagaggatctggt

SEQ ID NO: 172664 - DNA, 96 bp, Homo sapiens
ggagttgtacggcctggcactgcgcttcttcaaaggatttgtaggtgaaaatgcccagccaatcctagaaaataatattggaaaccgaatgcttca

SEQ ID NO: 172665 - DNA, 87 bp, Homo sapiens
gctctgctacttcaagtaccaggtcctggcgatcagcaccaagaacccactgcaggcctttgaagacctcagcaaactaatgatcaa

SEQ ID NO: 172666 - DNA, 79 bp, Homo sapiens
cgggaaccagcccttgggcctcacggacccagccgacacaagaaatccgagctgttccacttgttaacagagaccgggg

SEQ ID NO: 172667 - DNA, 74 bp, Homo sapiens
cagcgcatgcaggactgccagcgggagctccagagcctgctggtggaggaggacagtcattttgtttactcatt

SEQ ID NO: 172668 - DNA, 100 bp, Homo sapiens
ggtcgatcttccagccatgattttttggctccagttgtggaagatatcaataagcgcagagagccgctccccagcctggaggctgtgtatctcatcactc

SEQ ID NO: 172669 - DNA, 51 bp, Homo sapiens
gaatttcacccaggttctgacagttccatgccattgcagtgtcaactaggc

SEQ ID NO: 172670 - DNA, 83 bp, Homo sapiens
gggctttggggaggagtccagggagcccagcacagatctgactgcagccatgagcagcaatgagtgcttcaagtgtggacgat

SEQ ID NO: 172671 - DNA, 100 bp, Homo sapiens
agaatgagaatgaatctgaaaaaagagaactggtattcaaagaggatggtcagggacatgatccacatcgcggacaccaaggtcgccaggcgttatgggg

SEQ ID NO: 172672 - DNA, 100 bp, Homo sapiens
tactggttctgtgtttggtcaagcagccagtactggtggaatagtctttggccagaattctccaaaacaccagtggggagaagaggaaccaaattctcag

SEQ ID NO: 172673 - DNA, 100 bp, Homo sapiens
gcccctgacatctgtgtggctggacgctgtctgattatgtttgagaccttcaacaccccggccatgtacgtggccatccaggccgtgctgtccctctacg

SEQ ID NO: 172674 - DNA, 100 bp, Homo sapiens
ttgcatgacttttctgcacaacgctggaaaatttgatgcccagggccgacgggaaggtgcaggttctcctgggcgcgcactccctgtcgcagccggagcc

SEQ ID NO: 172675 - DNA, 98 bp, Homo sapiens
agccgggaagacgcggggaagaggaggcggaaaaggacgcaaagttctccggcgaggttgaaaggattgttgacaaaaggaaaaataaaaaagggaag

SEQ ID NO: 172676 - DNA, 96 bp, Homo sapiens
gtggaacaccctcactggcccgggccggcgcgggagggctgtgtgatggcctcggagcgcccggagccggagggggagtatttctcagcattcaag

SEQ ID NO: 172677 - DNA, 101 bp, Homo sapiens
gattgttggtctgctggtgggactcaatgttctcgatgccaatctctgcttgaaaggagaagacttggattctcaggttcagttccggaaggtgtcttaga

SEQ ID NO: 172678 - DNA, 123 bp, Homo sapiens
gaatgagccagatgtttatgaaactagcgacctacctgaggatgatcaagcggagttcgatgcggcatagaatgtcaagctaaccaggcgtccgctacttcagaagagtgtactgtcgcatgg

SEQ ID NO: 172679 - DNA, 75 bp, Homo sapiens
gcgagctggaaatcgtgcctgtgcggcgctcgctcaaggaactgatcccgatgctcccataatactctcagatag

SEQ ID NO: 172680 - DNA, 75 bp, Homo sapiens
gaaattatctctggtgctgcagctctatacattccaccgttgatctgggggaaaagtggacacatccagacagcc

SEQ ID NO: 172681 - DNA, 96 bp, Homo sapiens
cagcccggccccgctgagcgatcccaccgaagcagcgtgtcctccgtgggagcccgaggttttaaaatcaaagatgggaaaatcggagaaaattgc

SEQ ID NO: 172682 - DNA, 74 bp, Homo sapiens
atctggaggagcagttgtctgatgaagagaagtctctagtgatccctgaaaagttccagcatattttgcgagta

SEQ ID NO: 172683 - DNA, 100 bp, Homo sapiens
gcgcccgggagccacagcctgagctggctccaaggctgcatctctccactggactagcgagagggttgtcagtgttttgctcctgggtctgcttccggct

SEQ ID NO: 172684 - DNA, 74 bp, Homo sapiens
attcgcagtggtcgcttcttctccttgagcttgtcaggaagatcggaggtgccaagtagcagagaaagcatccc

SEQ ID NO: 172685 - DNA, 100 bp, Homo sapiens
gcttggaggagggtcactatgtcattgggccaaagatagagattccggtacattatgcaggcaccattcaggaagattacctaagagagctgctgacaac

SEQ ID NO: 172686 - DNA, 75 bp, Homo sapiens
gcatgccaccttggcggatttggtggaatatcacaagggatctaccgaacagaaagggacaaagggacattgtat

SEQ ID NO: 172687 - DNA, 75 bp, Homo sapiens
cagacatgcttataagacaactcttagctgttcgatctggggctaatgttctaatttgtggtccaaatggctgcg

SEQ ID NO: 172688 - DNA, 74 bp, Homo sapiens
gcctggcggcttccaggcgcactaccgcgatctggtggctggacccagagctgacctatggctgcgccaagccc

SEQ ID NO: 172689 - DNA, 50 bp, Homo sapiens
gggcggctgagacaaaggcgacgttgcagaatgaagaagagtctggagaa

SEQ ID NO: 172690 - DNA, 50 bp, Homo sapiens
agaaggtgtgaaagttaacaagaacagtaaatgtcctgagggaacaaaac

SEQ ID NO: 172691 - DNA, 100 bp, Homo sapiens
ctttaagaaaggaatgaacatgtatttaaccaagttccaacaaaagaatgctgccgcagggtattatcatctaccgagccgcctacttcggtatctatga

SEQ ID NO: 172692 - DNA, 50 bp, Homo sapiens
tctaagcctatggaaaagcttctggctttggagtttaacccttctgccaa

SEQ ID NO: 172693 - DNA, 100 bp, Homo sapiens
gcggactcttcttcgccttcgacataagctgtggccatgactactgaagtaggctctgtgtctgaagtgaagaaggactctagccagttaggaacagatg

SEQ ID NO: 172694 - DNA, 100 bp, Homo sapiens
gaaaatggagcccttcaccaatggtgaggaattttaaattggaacaagagcaagaaaaaaacaaaatcttgtcagaagcactggagacgctggccactga

SEQ ID NO: 172695 - DNA, 100 bp, Homo sapiens
cagacaaagcccatttttcttccaaatgcagaagatgtagattgtgtgatgaaggacatgggatgaggagaatttctgtgccactgtgcccaaggatgga

SEQ ID NO: 172696 - DNA, 90 bp, Homo sapiens
ttctcatcttggctgctgccgacccaaggattataaggtggaaccgtcccaaaatgtcccttgctcagaagaaggatcgggtagctcaaa

SEQ ID NO: 172697 - DNA, 130 bp, Homo sapiens
aggaattccgcccttgtccttacgtcctgctaacccgcttggcattgagattgaaaaatgttcttaatagttgctcctctttctgtcctctacaactggaaggatgaattggacacctggggatatttca

SEQ ID NO: 172698 - DNA, 105 bp, Homo sapiens
ggactgtgcagaggtgcgcgcccacgccggcctcccggaccagcctgagctcggagcgcctctcgccctcaggagaactatcctatccctgaaccaggcccaaat

SEQ ID NO: 172699 - DNA, 75 bp, Homo sapiens
atttgatcaagaagaagtttttgagaagcctacacgtgaaacatgccagggtgagaagccatttaaatgtgatca

SEQ ID NO: 172700 - DNA, 102 bp, Homo sapiens
cgggattttatgctgatcacaaacaaatccttgaaagaagaagatggagaagaaatagttacctatgatcgtgtttcagtcacctccagtaacacgggcgtg

SEQ ID NO: 172701 - DNA, 75 bp, Homo sapiens
gtcctcagtacttgcaaaagcacttgaagtcattaaaccagctcatatactgcctcaacaagaacttgatttaaa

SEQ ID NO: 172702 - DNA, 98 bp, Homo sapiens
cgggaggcggaggcgagggtgcgatggcgcggagcccgggacgcgcgtacgccctgctgcttctcctggtcttaaagaaagtgcagaagagatggtca

SEQ ID NO: 172703 - DNA, 51 bp, Homo sapiens
gtgaatcagaccttcaactggaatacaatgaacagcagagaatttcaaagg

SEQ ID NO: 172704 - DNA, 74 bp, Homo sapiens
tttaatgaagatattctgtgtccacatggccaagtcatcaaggcatgggacattggggtggctaccatgaagaa

SEQ ID NO: 172705 - DNA, 90 bp, Homo sapiens
ctttgaagtgaagattgtcagcaaaggaagagatggtggagaacatgcagctgaccctgaacctgcagacggagaacaaaggcagcgttg

SEQ ID NO: 172706 - DNA, 90 bp, Homo sapiens
gatccacaaggggctgtgtggccaggttctccagagagcgggcatccagagaggagtcctgggagagcgggcggagcgagcgagggcccc

SEQ ID NO: 172707 - DNA, 50 bp, Homo sapiens
cggaacggtaccccctccccaccgtcctggaacccgagcgtcatgttagg

SEQ ID NO: 172708 - DNA, 104 bp, Homo sapiens
agatggcggatgccctgcagtacctgcagaaggtctctggagacatcttcagcagcacatgattaagtaccggtacatcccgttcacacatgggaagagaaggt

SEQ ID NO: 172709 - DNA, 99 bp, Homo sapiens
tagcgtcatggagccccatgcgccatctcgaggccaagctgaaagttctactctttctagtggaatatcaatagaaacctctgcgccatgagagccaag

SEQ ID NO: 172710 - DNA, 82 bp, Homo sapiens
cacagctcctcacccccgtgccgtccctcgtgttcacgtacaaaatggttcgttacatcagaaggatacagttcatgacaat

SEQ ID NO: 172711 - DNA, 76 bp, Homo sapiens
gcccggacatcaagtacccgctgcggctcatcgaccgggaggtgaaatgacaatggatgctctgttggctcgattg

SEQ ID NO: 172712 - DNA, 100 bp, Homo sapiens
attggattcgttactgctttgcaacgcgcacctaactccagagagtcccacgaactggctgggtatacagaaatgtccagaggccggagagcgtttcaga

SEQ ID NO: 172713 - DNA, 75 bp, Homo sapiens
caggaacctacggtcccgactgtctcgcttactgcagagtgggtctgggcatctgctacgacatgcggtttgcag

SEQ ID NO: 172714 - DNA, 74 bp, Homo sapiens
gtggcagtggaggagtgtgacagggatgatgaagaagacctgctggatggaaaatcctgccttgcttcgttggg

SEQ ID NO: 172715 - DNA, 83 bp, Homo sapiens
ccccctcctctgcctcgctccaacacagttgaggaaacgtgtgaagcttgaagggaaagaacttgaagaatacttggaaaaag

SEQ ID NO: 172716 - DNA, 98 bp, Homo sapiens
tcccgccgttgttgcctaatccgtatattatggctccagggctgttacatgcctacccggcggcggcggcggcgcccgggagccggagccttcgcggc

SEQ ID NO: 172717 - DNA, 97 bp, Homo sapiens
gaaacatccggcccagacatgactatcaaggtctcattgttcatgaaggagctgcagtttacagagtgtttaagcgctggcgagctgtgaatttgca

SEQ ID NO: 172718 - DNA, 100 bp, Homo sapiens
aggacctgcaccgccaagccaagctcaacctcaaatcagtactgagggtctccacaaaccggaggactacccccagactgcagtaagtgttgtcatggag

SEQ ID NO: 172719 - DNA, 100 bp, Homo sapiens
ttcagattcacttccttctcatccttttccaccagctaaagatgttgatgaatgcacatcaaatccctgcactaatggagattgtgttaacacacctggt

SEQ ID NO: 172720 - DNA, 89 bp, Homo sapiens
gggagcggacgcagtgatttgctccccctcgtgcagcaacccccacacccagcaccagattttaggtgatgggcaagtcagaaagtcag

SEQ ID NO: 172721 - DNA, 75 bp, Homo sapiens
cggagcccggccccggggaactagggagcgtctccggctgcacagcgctcaggattctaacattttcagagaacc

SEQ ID NO: 172722 - DNA, 98 bp, Homo sapiens
aagcggtgccccggaagtctctcaaggaccccaacaacagcctcaccctctgggtcatcgaccaaggacactttgccaccatcaccttgaccttcatc

SEQ ID NO: 172723 - DNA, 50 bp, Homo sapiens
gttttgagttcacactgatggtggtcgcttcctcggttatgtggacatgc

SEQ ID NO: 172724 - DNA, 74 bp, Homo sapiens
gaggactgccagctggcgctgcaggttatcaatactctggctgaccatcatcatcgtgggactgactttggtgg

SEQ ID NO: 172725 - DNA, 100 bp, Homo sapiens
cctactacgcgtacgtggtggagctctgcgtgtacaggcaggattgaacccaactaccccaaggtctgcggccaccagggcaatgtgctggatatcaaat

SEQ ID NO: 172726 - DNA, 83 bp, Homo sapiens
atgccgtcggagaagaccttcaagcagcgccgcaccttcgagccgatgatgagcaccccacctcctgccagcgagctcccgca

SEQ ID NO: 172727 - DNA, 100 bp, Homo sapiens
cgccacttcatgttccagtgcctcgagcgctcaggatggaggaagactcgatccgcctgcctgcgcacctgcgtatacaaatgctctcagtccagccaga

SEQ ID NO: 172728 - DNA, 73 bp, Homo sapiens
tccacaagggcttcctggccctctaccaaaccgtggactcattttattagtgctgcactcaagactagtagtt

SEQ ID NO: 172729 - DNA, 100 bp, Homo sapiens
gccccggcaccgccgcgcgccacccgctaggatgccggtggccccagcgccctcagccgacggagcaccgaacaagatttgtgatgaaatggagcctgga

SEQ ID NO: 172730 - DNA, 83 bp, Homo sapiens
agttacaggacaggctaacaccaatggaggctttacttcagacaaggcatctggccatctgaagaggttttggcttactactg

SEQ ID NO: 172731 - DNA, 100 bp, Homo sapiens
gccttcttcacctacgtgtcgctgagccaggaaggcaggtcgctgcctgtgccccagctggtgctcttgaacatcagattccaggttctgcagcctttgg

SEQ ID NO: 172732 - DNA, 101 bp, Homo sapiens
caagtggatccttcagctcatgcacagttgcaaagagggctacgtgaaagatctgaaaggtgctggagaatctggtaaaagcaccattgtgaagcagatga

SEQ ID NO: 172733 - DNA, 83 bp, Homo sapiens
gcttaaggtcttcagcggggcgctccaggaggcactcacagacctcctgccccccgaggtctgcagtctcctgaacccagcag

SEQ ID NO: 172734 - DNA, 90 bp, Homo sapiens
ccattgcttctaggacctctcagaacacagtggacagtgacaaggtattccttgtggagaaggcagggcgacgttctctctttctaattg

SEQ ID NO: 172735 - DNA, 51 bp, Homo sapiens
gaaagctttaggagttcacagtgcccaagaaacagatattttcaagaaaaa

SEQ ID NO: 172736 - DNA, 96 bp, Homo sapiens
gtttaccgtaagctgtagtaaaatgagctcgattgttgacagttgcctttccccatcttcctggttctgctccttcgtggcctagtcttgtggaca

SEQ ID NO: 172737 - DNA, 75 bp, Homo sapiens
ccgcacgtgtgatgacctaaagctttgccattccgcaaagcagagtgcaattgtgggcacacttgaagctgaaaa

SEQ ID NO: 172738 - DNA, 97 bp, Homo sapiens
agcagggctattcccccacacccctacccactggaaaggagtgttgtaagactaggttttggctaaggcactgtgctgtgttgcgggaagtcaggga

SEQ ID NO: 172739 - DNA, 75 bp, Homo sapiens
agattatagctctgtatgagaaggacaacacctacttaggccagtacgggatccctgaaccatggaattttcctt

SEQ ID NO: 172740 - DNA, 100 bp, Homo sapiens
aacgactgtggggacaacagtgacgaagagaactgtctcctggtgaccgagcacccgcctccgggcatcttcaactgtgaaaggtgtagcagtcactcgg

SEQ ID NO: 172741 - DNA, 83 bp, Homo sapiens
accgaagaagaggcccggactcatacagagattgaaatgttccttagaaaggagcagcagaatggatgatgaacttgttgttg

SEQ ID NO: 172742 - DNA, 100 bp, Homo sapiens
tgacaggcggctttgcatcggaaatcagctctacagttcagattgctcttaaacttggtgtgactgctaatgatgtaaagaatgtcattatctggggaaa

SEQ ID NO: 172743 - DNA, 100 bp, Homo sapiens
gacgtcttcaccgccccacactggcggatgaagcagctggtggggctctactgcgacaagggctcaagggttcttgttgatgcacgagataagcttggca

SEQ ID NO: 172744 - DNA, 100 bp, Homo sapiens
aaccagctgccgccgtccatcctgctcaaggaaagaccggcagagaccaatgccaatgtggacaactcggcgtccccctcggtggcccagctggccgggc

SEQ ID NO: 172745 - DNA, 50 bp, Homo sapiens
agaatccattcacactccccaaaccagataatttgcggtaaaagcctttc

SEQ ID NO: 172746 - DNA, 75 bp, Homo sapiens
ggtggaggacgaggggctccgggtcttccagagcgtgaagatcaagatcgaagacagacatcttcctgtgaaggg

SEQ ID NO: 172747 - DNA, 88 bp, Homo sapiens
ttccccagctctgcagccacatactatccgtttgttcaggaaccaccagtgacagactgatgttctaatcatgtcagataaagatgat

SEQ ID NO: 172748 - DNA, 51 bp, Homo sapiens
ctgtaatcaattgtgctgacaacacagtgaggactcagaagacaaagatgt

SEQ ID NO: 172749 - DNA, 90 bp, Homo sapiens
ggaatacacttatttatgaagtccaagacaagctgctgctatctgcgtgccacttactggtctcactggccaccaccgtgcggcccgtct

SEQ ID NO: 172750 - DNA, 50 bp, Homo sapiens
ctgctgcagattctctcagatgaccggagcacggtcctgttgtgccaggc

SEQ ID NO: 172751 - DNA, 88 bp, Homo sapiens
tcaatttgctggatttaagcactgctgcactttatgagaaaaatgtctcaaattgggtataacaaatcagcgtgattgcctttcacct

SEQ ID NO: 172752 - DNA, 99 bp, Homo sapiens
tctgtgtgcgcggccctgaaaggctgtgggacagatgatgtctaccatgttctacccactggtcacctttgtcctcctcctcatctgcattgcctactg

SEQ ID NO: 172753 - DNA, 98 bp, Homo sapiens
tcattctgagaatggaccagttttggttgaagaactgggaaagaagtcatacagcagatggaacaaaaaaaattacaacaaggaattcctccatcagg

SEQ ID NO: 172754 - DNA, 88 bp, Homo sapiens
cgacgtcgtgatccagaagtccagagctgaggactgcctgtttgcaggtggtgcagagccggagccggagccggagccgcgccgcgcc

SEQ ID NO: 172755 - DNA, 80 bp, Homo sapiens
aatagtaaaaaccactaagcttcaatctgaaaggcattatccaattggtttgctatttgatcttcttgcatcaagttcag

SEQ ID NO: 172756 - DNA, 101 bp, Homo sapiens
tagtaaccctgccaaatacatcagcttgtaggagacagagggtgttgaaagcagcaggggcctagaagacattaaaccgataccacagaaatacaaaggat

SEQ ID NO: 172757 - DNA, 84 bp, Homo sapiens
cctggagcctcagttggaagcagccgatccagcctgcggagcctgtggggcaggtttgtcctggttgtggtcaagactggatga

SEQ ID NO: 172758 - DNA, 75 bp, Homo sapiens
ccacatcctcctcctcctacacccaaaggctcccatggagagctcaggattcggacggagagcgcgaggactcgg

SEQ ID NO: 172759 - DNA, 75 bp, Homo sapiens
agccatggaccaggaaggaagacctctcccaagacacctgtccagatctaccttctgagatatcatccttcttca

SEQ ID NO: 172760 - DNA, 82 bp, Homo sapiens
ggcacacgcgcagccccggcctctcggcctctgccggagaaacagattttgcaagaacgaggctcaaggatgtgagggacac

SEQ ID NO: 172761 - DNA, 98 bp, Homo sapiens
gatcgagcgcatcgaggatttggcgctgcagaaccagatccgggagcacgtcatctccatcgaggacctctcccggagctcctcgccaccctcactgc

SEQ ID NO: 172762 - DNA, 111 bp, Homo sapiens
aacagcccgcccgaccccgtcccgaccctggccgccccgagcggagcctggaggacatggatttgattgacatactttggaggcaagatatagatcttggagtaagtcgag

SEQ ID NO: 172763 - DNA, 75 bp, Homo sapiens
acttcccagcctccagaactgttcggtggtgagaggaagcctcgcagaatccagcagaatcctcacagaatccag

SEQ ID NO: 172764 - DNA, 98 bp, Homo sapiens
gagtccgccctggactaccgcctggatcctcagctccagctgcactgctcagacgagttggagtgcctcaagcttattgcctctcaaaaatttacaga

SEQ ID NO: 172765 - DNA, 83 bp, Homo sapiens
cccgccccccaccgccgccccctccggcgtgttcatgcccccggggttgaagaagcctcagcggaggcgatacggcctcctcg

SEQ ID NO: 172766 - DNA, 74 bp, Homo sapiens
gaaaagacaattgatgacctggaagcttcttggacacttaatgattgttggcaagaaatgtgctgctgatctgg

SEQ ID NO: 172767 - DNA, 75 bp, Homo sapiens
cagcggcccggtcatcaaccatggcatgtggcagacagtgtccccaggtgtcattgccaacccctttgcggcagg

SEQ ID NO: 172768 - DNA, 75 bp, Homo sapiens
tgaacaacctgaacgtcaccgaggagaagtaccaggaggcgttggccaagggttactcactataaacaatatcca

SEQ ID NO: 172769 - DNA, 80 bp, Homo sapiens
agcatcgctcttcggcaacccgaagccacaggatggaggagggggatcccagcaaaggaaatctggcattttttaaagtt

SEQ ID NO: 172770 - DNA, 100 bp, Homo sapiens
aagacaaggtggatgaggttcctggcttatcagggcagtccgatgatgtccctgcagggaagggtatacctcagttaccatgtgccaaagcattatacaa

SEQ ID NO: 172771 - DNA, 100 bp, Homo sapiens
tccagcggtggccacacgtcacacagtggggacaacagcagtgagcaaggtagtaaacctattgatggcaattttgctgactgtggaagtgactcatcca

SEQ ID NO: 172772 - DNA, 50 bp, Homo sapiens
ggaaccgcatgtatcacaccaaagagtgaaatgacaatggatgctctgtt

SEQ ID NO: 172773 - DNA, 74 bp, Homo sapiens
ctttgctttaaaacagtattacttgcgaatgccgggtctaagttgtagattttatcaacacaaatttcctgagg

SEQ ID NO: 172774 - DNA, 98 bp, Homo sapiens
ctggacccggaccggttttggcctggtccgacccccagtggcactaacgtgggatcctcagggcgctctcccagcaaagcagtggccgcccgggcggc

SEQ ID NO: 172775 - DNA, 133 bp, Homo sapiens
ggggaggagagaagaggaggtggaggaggaggaggaggaggcttgggcttgcgccgttgaaggtgctggagaatctggtaaaagcaccattgtgaagcagatgaggatcctgcatgttaatgggtttaatgga

SEQ ID NO: 172776 - DNA, 74 bp, Homo sapiens
aagagggatccttcacccgtgtctgctgcacggaacgtcatgaaggaccaacgcctggttttccatagtaaagt

SEQ ID NO: 172777 - DNA, 76 bp, Homo sapiens
atgtgaaaatgaagccagaccgaggtacaacaaataacactgtgactccaacctcacaacctgtgcgaaagtctac

SEQ ID NO: 172778 - DNA, 112 bp, Homo sapiens
attttaaagttatgggactacaacagcagccacaggaaccttgaagtttccaggatggcttctgcatcaacttctaaatataattcacactccttggagaatgagtctatta

SEQ ID NO: 172779 - DNA, 101 bp, Homo sapiens
tctatatccatagattggaatattggtgggccagcaatcctcagacgcctcacttaggacaaacaattcctcctcgcttcaagaagatgaagaagtagaga

SEQ ID NO: 172780 - DNA, 74 bp, Homo sapiens
ggcagtcggcggagcttcgccaaggctggcgcagtcggaccatctgtcgttcgttaccatctgcccaagatgtt

SEQ ID NO: 172781 - DNA, 90 bp, Homo sapiens
gaaggtctcacctgaggtgaaccttcgaccttggacttctcagcctccagaatgcgacgagtagaacagcccctctatggtttagatggc

SEQ ID NO: 172782 - DNA, 75 bp, Homo sapiens
agaaggctgtgagaaagtgcgtgtgtttgaagaagccacggaggaggtaaatgacaaattgcgggatatgccaga

SEQ ID NO: 172783 - DNA, 78 bp, Homo sapiens
tccaacaatggaggccagtggctggtctcagcctgtcagagttgttcagtataatatcaatacagaagaattatattc

SEQ ID NO: 172784 - DNA, 144 bp, Homo sapiens
gagggctgtacagctgcgacatcaccgcccgggggccatgcacgcggatcgagtttgataacgatgcggaagatccatccaaaagctatgtgaaattacgagactttgtgcttgtgaagctttgtcaagatttgccctgttttt

SEQ ID NO: 172785 - DNA, 98 bp, Homo sapiens
tgcccacacctcttcccggcccctgaagttggcactgcagcagacagctccctgggcaccaggcagctaacaggctggagtaaaagggacattgggaa

SEQ ID NO: 172786 - DNA, 75 bp, Homo sapiens
tgtttgtttgaaattgcattgacgactgggccgcgatgggcctcttggaacattggtgtgttcatctgcattcga

SEQ ID NO: 172787 - DNA, 100 bp, Homo sapiens
ggactccacggccagagccctggatgtcatttggaaaaacactagagacagacggctggcaggaatctcggaaaacatggccgtgcctctgatgccagac

SEQ ID NO: 172788 - DNA, 96 bp, Homo sapiens
gggaccggagccgcagccggcggaggaggcagtagcgggggactcgatggaccgcggctggcaatttgctgctttgtggtgcacaagcggtgccat

SEQ ID NO: 172789 - DNA, 90 bp, Homo sapiens
tgcttcgggagaacctggaggaggaggccatcatcatgaaggacgtgcccgactggaagatggtcatcatgggccagtgctactacaacg

SEQ ID NO: 172790 - DNA, 101 bp, Homo sapiens
ggaaaagaaggcagtcacgtttttcgatgatgtcacagtctacctgtttgaccaggtaggagatcaaatcattgaaatcaatggggaaagcacaagggaca

SEQ ID NO: 172791 - DNA, 83 bp, Homo sapiens
aacggcgagagtgggcgagaacgtccactgcgggccggcgaaagctggttgggacagcgtcttcgctgctgctggatagtcgt

SEQ ID NO: 172792 - DNA, 101 bp, Homo sapiens
gcagattatatcgcatcctatggctcaaagaaagatgattataatatccaaggtatctccaagcacccaattcagattactacacctaagaattttaaagg

SEQ ID NO: 172793 - DNA, 100 bp, Homo sapiens
caccatgcaagctttgtcggaagaggaccggaggctctggatggaagccatggatggccgggaacctgtatgcccaagaggacagagaacgaatgcacag

SEQ ID NO: 172794 - DNA, 75 bp, Homo sapiens
cggccctcaccgccctcaccacccctatccagacggctgcccttcaagtaccagagcttcctggacgatttaaca

SEQ ID NO: 172795 - DNA, 100 bp, Homo sapiens
gaaagatatgtggcaagcttgatgcctttgcagaaaagtatttccccatggaagagtccaccctgcacctggtgttgcgcctgcgaggtggcattattga

SEQ ID NO: 172796 - DNA, 50 bp, Homo sapiens
gaagaggcctgcagtgggagagcagggcgtcacaatgtagcagggacccc

SEQ ID NO: 172797 - DNA, 75 bp, Homo sapiens
agaccttcgagcaccccaacgtggtcaggtgaggcaggcgactaatcagattgtgatgaattgtgctgatattga

SEQ ID NO: 172798 - DNA, 98 bp, Homo sapiens
actgccctcatccacgatggcctagcacgtggaattcgcgaagctgccaaagccttagacaatgtgaacgtggcatcactgacacaatcagaaattcg

SEQ ID NO: 172799 - DNA, 90 bp, Homo sapiens
ggcggcccgcttcctggaatggcaagcgcagcaacaacagagagcacgtgggagtgcatccgccccaacccttttccccctcgtctcctg

SEQ ID NO: 172800 - DNA, 100 bp, Homo sapiens
gacaaagtggaggggcacgtggctatcaagaggtcggatccgcagctgcttgcccggttctactatgccgacgaggagctgaaccaggtggccgcggagc

SEQ ID NO: 172801 - DNA, 101 bp, Homo sapiens
ccaggacaagggtggtttaattcctcttcataatgcggcatcttatgggctcatgggcctcctgagtgacccagaattaggtccagcagcagctgatggct

SEQ ID NO: 172802 - DNA, 98 bp, Homo sapiens
gggcaggattcagggaacagcaatgggaacgccagtatcaacatcacggacatctcaaggaatatcacttccattggtgagaactcagccgtgctaca

SEQ ID NO: 172803 - DNA, 74 bp, Homo sapiens
ctggtgatattgtagaaattgctggtaaaatgtcggttccaggaccttaccaggcggccactgggccttcctca

SEQ ID NO: 172804 - DNA, 87 bp, Homo sapiens
ctgaagagtttgaacatatgaaggaaattgtggttttggtggtagacttgctgctggctcgaggtgcaaataaagaacataggaacg

SEQ ID NO: 172805 - DNA, 100 bp, Homo sapiens
tcagcgtcctcatgtggggggtaaaccactcgaagagaagccagattgctccaaggcccgctgtgaagtccagttctctccacgttgtcctgaagattct

SEQ ID NO: 172806 - DNA, 50 bp, Homo sapiens
aaagggatggaactacattcttgaggctaagacatcaagcacacaaagaa

SEQ ID NO: 172807 - DNA, 75 bp, Homo sapiens
actgctacttttcccattttgcagggaattgatccattttccttagattctcttgcaaaacatggaatagtagct

SEQ ID NO: 172808 - DNA, 98 bp, Homo sapiens
gcagcaggggtttcaatgggaggattaaatctcttgatgaacagtgtgtggttggcaaaatttccaagcactggactggaattttgagagaggcattt

SEQ ID NO: 172809 - DNA, 96 bp, Homo sapiens
tggaccatcgggcggagacgaggcaatggacctcatcatgaccgttgctgtacttacaatgaaaacaacttggtggatggtgtgtattgtctccca

SEQ ID NO: 172810 - DNA, 83 bp, Homo sapiens
aaggaccagttcgaatgcctaccaaggcacagaaaactgaatctgtagataacgagggagaatgaattgtcatgaaaaattgg

SEQ ID NO: 172811 - DNA, 75 bp, Homo sapiens
gatgggaacttgtgtgttaaagtaacagatgatttagttgtattttaacagcagtgataacaatttacagtattg

SEQ ID NO: 172812 - DNA, 101 bp, Homo sapiens
cggggttccccgggtccgagcggatggcgactgcagccagcccggtttttcgttggaatatacgttgcacatttatggcgattctgagtgtgagggcagac

SEQ ID NO: 172813 - DNA, 100 bp, Homo sapiens
tcggtggagtgcgctactcaggcgctggagaaatacaacatagagaaggacattgcggctcatatcaagaagtactatggactacaaattttggaaaatg

SEQ ID NO: 172814 - DNA, 100 bp, Homo sapiens
catttctgtcctgctgatgaagtctacgttcattcagggcctgctgtggaagaccagccccaaaggatctacagcgagatattgaacaacacagcgcagg

SEQ ID NO: 172815 - DNA, 87 bp, Homo sapiens
cacctccgctcccccgatcctattcccagtcgtcaccagtggcagttcgcagcctccaggacttggctcgcatcgccatccggggca

SEQ ID NO: 172816 - DNA, 112 bp, Homo sapiens
cttcaacggaaactagctcatctgtagagactgatttgcaacccttccgggaagccatagctctgcatgacaccagttggcgctccgaggcaacctttcagttcactgtgga

SEQ ID NO: 172817 - DNA, 88 bp, Homo sapiens
gcagcttttccggcctgacaacttcatctttgaggcggggtttcaccatgttgcccagactggtcttgaactcctgagcttaagcaat

SEQ ID NO: 172818 - DNA, 100 bp, Homo sapiens
ttttaaaggaacttgatctggaaaagggactgctgagatgtcctctattcttgaagagcgtattcttggagctgatacctctgttgatcttgaagaaact

SEQ ID NO: 172819 - DNA, 76 bp, Homo sapiens
ttaagactgagggagccactctaagatgcggccatcatggtctcttgctgtgctatttcttggtcaactgttgatt

SEQ ID NO: 172820 - DNA, 95 bp, Homo sapiens
tggatcaagcaggttttaaatcaagatttaacattccaacacataaaaattatttatccaacagctcctcccagagtctcgctctgtcgcctagg

SEQ ID NO: 172821 - DNA, 88 bp, Homo sapiens
taaaactgaggaggcggagccaagacggtcggggctgcttgctaactccaggaacagctattttgaagatgaggaagaagattctagc

SEQ ID NO: 172822 - DNA, 51 bp, Homo sapiens
gccgccgcgaggccgggaaggtgaagttcttcagattattaaggaatccca

SEQ ID NO: 172823 - DNA, 80 bp, Homo sapiens
ggtgtgattagcttcgcagtctggaaagctttaggagttcacagtgaacgtcaaggtcgtgggaaataaaaggcagttct

SEQ ID NO: 172824 - DNA, 100 bp, Homo sapiens
accgtcgagatggttttgaaagtcatcgcatttaagcctaagacatatgtagagtgtgtcggtcagaaggaacacctgagaaaccgctttatcatccttg

SEQ ID NO: 172825 - DNA, 100 bp, Homo sapiens
tacaggcacgcgccaccactcccaggaaaaacagcactggaggcaatgtttctataaatcaaagaagagacagtgtgagaatgtcagccctcaactggaa

SEQ ID NO: 172826 - DNA, 75 bp, Homo sapiens
agaggtgccgacatggggcttaagatgtcctgcctgaaagatgaggacggggacttggttgccttttccagtgac

SEQ ID NO: 172827 - DNA, 110 bp, Homo sapiens
tgggtgcagatgcagtgtggctctggatagcaccttatggacagacaggggcaagtgtccgagtggtgaatcagctacttacagagatggatggtctggaagcacgccag

SEQ ID NO: 172828 - DNA, 75 bp, Homo sapiens
ttgaagcaacaagattgcttgcaacaattgttatgcttacattgtatgcaaacctgttccattctttcttcgtgg

SEQ ID NO: 172829 - DNA, 100 bp, Homo sapiens
cgacggtgttgagatcactgtgcagaaagtcattcacacggaggattaccggctgcgactcatctccctcaaggatcgacgagaacgtgctaggagccca

SEQ ID NO: 172830 - DNA, 100 bp, Homo sapiens
tcgctccgtggccttagctgtgctcgcgctactctctctttctggcctggaggctatccagcgagagaacattgaaagtattctctaagctatttgaaga

SEQ ID NO: 172831 - DNA, 83 bp, Homo sapiens
ttgcagccagcgcagtttatcatctcacagacgccccagggccagcaggctccctgtgctgtcaggaatctacaggacttggc

SEQ ID NO: 172832 - DNA, 75 bp, Homo sapiens
gaaaatgggagcagttttcatggatgcccctgtttctggtggagaagactttgcagttgtgcagcaagaaattat

SEQ ID NO: 172833 - DNA, 74 bp, Homo sapiens
cggagtcgtgcttcgtcgcatctgggaggctgagatctgcctacaaactggtttgctactttaccaactggtcc

SEQ ID NO: 172834 - DNA, 103 bp, Homo sapiens
ctccggcgcgcccggtgacggcggagaggcgccccccgcagcaggcaaaatacatatctcagtgcattgatgagatcaagcaggagctgaagcaggacaacat

SEQ ID NO: 172835 - DNA, 83 bp, Homo sapiens
ctcggagcgcggtccctgtattggtctcctgctcctagaggtctcggcgcggaagatggccggcggcgtggacggccccatcg

SEQ ID NO: 172836 - DNA, 83 bp, Homo sapiens
gtctccggggccgctggattctgaggaccagcagatggccagtcacgagaacccagaaattttactgcaggataaaactccag

SEQ ID NO: 172837 - DNA, 100 bp, Homo sapiens
agccagccgtcctgctgcctgcctgggcaggttcgccctgcccccaccccccggtggaaacaggttggacgtgataagtatgagcctgcagctgtttcag

SEQ ID NO: 172838 - DNA, 100 bp, Homo sapiens
cggggctcaagtgatcctttcatctcagcctcctcagtagctgagactacaggtgaatctggattgggaaagtcgacattaatcaactcattattcctca

SEQ ID NO: 172839 - DNA, 99 bp, Homo sapiens
aagagcaaagctacttccattccagaaagatggcatcatttttgccctcaaaagaaatggcagacagagtctcactctgttgtccagactggagtgcag

SEQ ID NO: 172840 - DNA, 50 bp, Homo sapiens
agaaatcctgataagaactgctttatgaagtggaaagggaaggacctctt

SEQ ID NO: 172841 - DNA, 75 bp, Homo sapiens
aattgtatgggacccatctgtataccactcagatatcccaaaggccaggccaggatcagatgggaagtggaagct

SEQ ID NO: 172842 - DNA, 100 bp, Homo sapiens
tgaaggagcagatttacaaactggccaagaagggccttactccttcacagatcgcaaaccagtccagctacgggggcccagccagccagcagctgagtgg

SEQ ID NO: 172843 - DNA, 100 bp, Homo sapiens
ccgccttcgccaacagccactacagctccaggctggggtccgcaatcttctcctctggggatgacctggatgattctttgggattgggacttaaaacaat

SEQ ID NO: 172844 - DNA, 95 bp, Homo sapiens
agctctatagtcggagtggagaactgcaaggaaaatgtctaatcaacaggagaagtatgaagctcagaatatagtcaattcaacagaagagagtg

SEQ ID NO: 172845 - DNA, 75 bp, Homo sapiens
aaagagacccgttcagagtcctacagtggcagaatatatcactgatgtccattcgaatgacctgtctacaccaca

SEQ ID NO: 172846 - DNA, 83 bp, Homo sapiens
tgtgtgctgcgttcacaggtgtttctgcggcaggctgaccccgcactacatctacccaccagccatcgtgcagcccagcgtgg

SEQ ID NO: 172847 - DNA, 80 bp, Homo sapiens
aagaccacacactgggaaacatcattaaatcggggctcgaatggttcgtgaactctttgaaatggccagaacaaaaaaag

SEQ ID NO: 172848 - DNA, 50 bp, Homo sapiens
cacaaccccaagcagcctggatgaagaaaatgaggcacgaggaattgtta

SEQ ID NO: 172849 - DNA, 100 bp, Homo sapiens
gattgggaaccttctgcacccttctgtacccatcagtaacgatgagatggaggagatgtataagaaagctcatgctgctatacgagagaatccagtctat

SEQ ID NO: 172850 - DNA, 96 bp, Homo sapiens
gcctcactgagcaaccaagacaaaaatcaccatcagagtcgtttattggtcgagagaagaggtcaaattctcaatcatacattggacgaccaattc

SEQ ID NO: 172851 - DNA, 100 bp, Homo sapiens
gagctggctacttctcgctctgcttcatcccactattattttggcacaacaggaaggttatggacctcaaaggccaaatgatctacattgttgaatccag

SEQ ID NO: 172852 - DNA, 113 bp, Homo sapiens
gagtatgaggacgaggaccagtgggaggatggagcagaggacattctagagaaaggtggttatggaggaggcggccctggttactctggaggaagcagaggctatggaagtgg

SEQ ID NO: 172853 - DNA, 75 bp, Homo sapiens
cgcctcccggccgagctgacgggtgtgggccgaagatatgctcatgtggtgttgaggaaagcagacattgacctc

SEQ ID NO: 172854 - DNA, 98 bp, Homo sapiens
gatttccttactggagcaagggaaagagtcctgcatggtttcaagggacgtaccaggaggatggtgcccaggaggactcggaggagagtgaaattgac

SEQ ID NO: 172855 - DNA, 75 bp, Homo sapiens
cgcgcggtgtctgaggaggcagtcggcgaccgagtgttctgccagttctggataatccactgtccaagaaggttc

SEQ ID NO: 172856 - DNA, 131 bp, Homo sapiens
ggtggaccccaagaagaccattcagatgggatctttccggatcaatccagatggcagccagtcagtggtggaggagtctactcttcatcttgtgttgagacttcgtggtggtgctaagaaaaggaagaaga

SEQ ID NO: 172857 - DNA, 83 bp, Homo sapiens
ctggtccggcggatagagaagagcgagtcgtcgtgagcgcggtcggcggaaggaaaatcacctcggcagtgtttgaaggaagg

SEQ ID NO: 172858 - DNA, 75 bp, Homo sapiens
gtgcccatgccgcttgctccggagaaggataagtctacttttcttccacgtaacaaccacaggatagatgacatt

SEQ ID NO: 172859 - DNA, 100 bp, Homo sapiens
cctcctgagtagctggaaccatcatatgcaccagcacgcctggctaaggcagctgcaatgactctccgcacggtattattgtcattgcaagcactattgg

SEQ ID NO: 172860 - DNA, 83 bp, Homo sapiens
aaaggtgtacttgcaagaaacctcaggacttgagtaacagcaacatgtcaccttcaggccattcagaggaggaaagagagggg

SEQ ID NO: 172861 - DNA, 100 bp, Homo sapiens
gtgaaagctcggacagctcaattagccaagataaaatgggtgataagtgtcgctttctacgtattgcagattgcattctcacaacacaatacaatcatgg

SEQ ID NO: 172862 - DNA, 75 bp, Homo sapiens
cttttctgggaacgtgagtatcaaccaagccggagcggttgcagggcacacattactcggtgcagtcggacatct

SEQ ID NO: 172863 - DNA, 90 bp, Homo sapiens
gcggttgacgttgcctctcggcggcgcggcggcggtggacgagtacctggagtaccggaggtcacagggattatggacccagaacagatg

SEQ ID NO: 172864 - DNA, 82 bp, Homo sapiens
ccgaggacatggacctgtacagcatcaactacctgcactttggggagcctaagtcctgttttctttttaaaagcggaaggag

SEQ ID NO: 172865 - DNA, 90 bp, Homo sapiens
gaaattcctttcctgctagaactttcagaatctcaggcgggtgaggtagatgctggctggattggattttggtccatagttggaggctgt

SEQ ID NO: 172866 - DNA, 75 bp, Homo sapiens
tctcgtgtgatctccatctgttatttcgagcaggagaatgactggtttttccgccaactagaccgggacgggagc

SEQ ID NO: 172867 - DNA, 100 bp, Homo sapiens
gcggaggacagctctgatgaggagtaagactttgaccccgacgcaggcttcagtgattgccgcggatcagaagcctgagcactttggctcgagacaatta

SEQ ID NO: 172868 - DNA, 98 bp, Homo sapiens
cacggggtcccggacagcgcccaagtacggcaacgccgagctcatggagaccggggatggtatgaacgctgccgtccgtgccgtggtgcgcatgggta

SEQ ID NO: 172869 - DNA, 75 bp, Homo sapiens
gttaaggattccaagtaactcttatttggagctgggaatcccaagtgcaaaattgcaattgttttgggaagaact

SEQ ID NO: 172870 - DNA, 74 bp, Homo sapiens
acatcactttagaccctccacctaattgcagggattaatgaaaatcaagttccatcctcagacaagaggtaaag

SEQ ID NO: 172871 - DNA, 82 bp, Homo sapiens
ttccccatgtctacatgagaaagcagagccaggtgtacggagaggtgagaagccctaccactgcaactgggacggctgcggc

SEQ ID NO: 172872 - DNA, 100 bp, Homo sapiens
tagtgaatctgcacagaaggcccttaagactacacttgctgctttgaaggatgaagttgtatctgttgaaaatgaactctcagaattgcaagaagtagaa

SEQ ID NO: 172873 - DNA, 100 bp, Homo sapiens
tctacgctgacatcaaaactgttcggacttccccgttagaactcgcgtttccacttcagagatctggtgttgacttcaaaatcaaaactgtagagctaag

SEQ ID NO: 172874 - DNA, 75 bp, Homo sapiens
ccctcaacaaacaccagcgctttggacgagccaaactcaggctgtaccttgagcagctcaagcaactggtgcccc

SEQ ID NO: 172875 - DNA, 83 bp, Homo sapiens
gcaacttacccgagaacgtgcgggaagagaagatcatcgagcatttcaaacgagacacctatggctgccgatgaaggctcagc

SEQ ID NO: 172876 - DNA, 102 bp, Homo sapiens
gaatatttaatggaaaatcgcttggttaaaacctgacacttttaacaggagctgtttacttggagggaagcctggaggaagccaagcagttatttggacgct

SEQ ID NO: 172877 - DNA, 73 bp, Homo sapiens
cagaggcagcgccacctcgcttggacttaaccaccaccatgtcgagcaaaagaacaaagaccaagaccaagaa

SEQ ID NO: 172878 - DNA, 100 bp, Homo sapiens
cagctgtgataaaaaaaaaattcatctgggcggtatctggaacttggtatacagaccagggcggcgaggaggaggaggactatgaaagtgaggagcagtt

SEQ ID NO: 172879 - DNA, 75 bp, Homo sapiens
ggcggaagccttcgtctcccagattgcaggtaaacattataccagtgattgccaaagcagatacggtttctaaaa

SEQ ID NO: 172880 - DNA, 75 bp, Homo sapiens
tcgagcagatcgacaagtccgggagctgggcggccatttaccagtattaaaggtggaagaaggtccatatctttt

SEQ ID NO: 172881 - DNA, 85 bp, Homo sapiens
ccacccctgtggcaagatgcagcgtgaggcagctgaaggagcatgccgagtggtttgaggatgatgtcatacagcgcaagaggga

SEQ ID NO: 172882 - DNA, 75 bp, Homo sapiens
ctggacggcgagcgcgagcggcgcgagaaaatcccggcagcggctccgctgaagggcccaggcccctcttcgtcc

SEQ ID NO: 172883 - DNA, 101 bp, Homo sapiens
cagagatacccagacaacaggatcgtctcgtccaaggaccggccagccttgcagctgtatgatccaggagctcgcttccgagcgcgagagtgtggcggaaa

SEQ ID NO: 172884 - DNA, 98 bp, Homo sapiens
aggaaagaacagctggaggcagcatccagattccaacaatgtctcacccatcttggctgccacccaaaagcactggtgagcccctcggccatgtgcct

SEQ ID NO: 172885 - DNA, 75 bp, Homo sapiens
agtgaagcctgcctacagttttcacaaatctaacttcttccttgacatggtcctttggaaagttgtgttcaaccg

SEQ ID NO: 172886 - DNA, 98 bp, Homo sapiens
gctccacttgcccgcttccacccggaaagccccccaggctgagtgcggcatgatctccatcaccgaatggcagagattaacctccatttcagctaatc

SEQ ID NO: 172887 - DNA, 74 bp, Homo sapiens
tggcctctggacatccgagtgggcatagaatgtcaagctaaccaggcgtccgctacttcagaagagtgtactgt

SEQ ID NO: 172888 - DNA, 101 bp, Homo sapiens
ggtgcaggagtaataggtgtagaattggagcagatgtctcaagtattagatgccatgtttgaaaaattggtcaaagatggggagcatgtaattgatcaagg

SEQ ID NO: 172889 - DNA, 51 bp, Homo sapiens
attattcctcgcccacatctgtgccagttggctaagtggaagacagctgag

SEQ ID NO: 172890 - DNA, 100 bp, Homo sapiens
ccagagcgcccaccctcttccacctcggagcagtgagcagcattttgcagtccctagttgacaggggcaagtgtccgagtggtgaatcagctacttacag

SEQ ID NO: 172891 - DNA, 100 bp, Homo sapiens
gcagaaatgttggatttgaagatttagacaagagtcaagaggagatcaaaaaacatcatgccagcatcagtgagctgaaaaagaacttcatggagtctgt

SEQ ID NO: 172892 - DNA, 100 bp, Homo sapiens
gatggaggggccggggctgggctcgcagcttcatccaattctgtgacaacatatgaaacctgccagacctacgaacgccccatcgccttcacctccaggt

SEQ ID NO: 172893 - DNA, 100 bp, Homo sapiens
agcgcaggggaggcagaagtcatgacaggcgaggtgggttctgagggctccttgatcgtctgtgagttcctgctgcaaaacggagcggacgtgaaccaaa

SEQ ID NO: 172894 - DNA, 76 bp, Homo sapiens
ctcgtttgtaccgtccctcttcagttacttatgaaatgaagacaaagaaaaggtttggtaataagaggagaagcca

SEQ ID NO: 172895 - DNA, 51 bp, Homo sapiens
ctgggtagagatcaacagcagttcaagggcgaactttctgaccaagtatac

SEQ ID NO: 172896 - DNA, 74 bp, Homo sapiens
aatcctggaggctatccgcaccccggagatcagaggcccagagcaagagaggcatcctcaccctgaagtacccc

SEQ ID NO: 172897 - DNA, 100 bp, Homo sapiens
gaagcgcaccattgctcaggattatggggtcttaaaggctgatgaaggcatctcgttcagtggctgtatcctcttggggtctccacagagctcattggcc

SEQ ID NO: 172898 - DNA, 99 bp, Homo sapiens
tgctattccggcgcctccactccgtcccccgcgggtctgctctgtgtgccatggacggcccgcggcgccatggctcacgtcggctcccgcaagcgctcg

SEQ ID NO: 172899 - DNA, 75 bp, Homo sapiens
tggatatcagctacagactttcctgagtcagaaaaggtggacaagtcctattttcaagagaagatgacttttaac

SEQ ID NO: 172900 - DNA, 83 bp, Homo sapiens
ggagctccccacagccgggaagattgtcaaatcagacctattgtgaccgcctggtgcaggacacgcctttcctgacaggccat

SEQ ID NO: 172901 - DNA, 73 bp, Homo sapiens
ttgtgaacagactcgatcgttagggaatggcctcattgctacgatttcagagtaccctggtaatagctgagca

SEQ ID NO: 172902 - DNA, 96 bp, Homo sapiens
tcaatttcaactctaactttaactttgcattggttggacaccttttaaaagcctctccttggcagatactaatctaccatccgaagtggagccaga

SEQ ID NO: 172903 - DNA, 96 bp, Homo sapiens
tctgagatcatcttgcgcaagtgcaacccagtttatgcctgaccccaagctcatggatcacgggcagtcccacccagaagatatagatatgtacag

SEQ ID NO: 172904 - DNA, 82 bp, Homo sapiens
ccgacctcgacgtcttgcctgtgtcccacttgttcgcggcctatagaacagggataactacatccgttcctgcagattgctc

SEQ ID NO: 172905 - DNA, 75 bp, Homo sapiens
gcctctgcctgccacacctggttgccctcacagggtgtcctgatgtcagaagaagaagtgtttgaacttgttcct

SEQ ID NO: 172906 - DNA, 83 bp, Homo sapiens
gaggagaggatccaggaggaggagttgcagagacaatgcagatcttcgtgaagactctgactggtaagaccatcaccctcgag

SEQ ID NO: 172907 - DNA, 97 bp, Homo sapiens
aaagaccattgcacttcgtgcccgaaacgccgaatataatcccaagactggtgtcgttcagtatttctacattgaagactggcaattcgttaatgat

SEQ ID NO: 172908 - DNA, 100 bp, Homo sapiens
aaacaggccctccagaatgagctggagagactgaaagagctggaggagcaccggaattcacagaagcagatgaagctcctacagaaaaagcagagccagc

SEQ ID NO: 172909 - DNA, 132 bp, Homo sapiens
gggggattgtgggagtctccgcgtcccgctcgctgggagagaggtacctctccttttccctctccctttccctaaggtgctgaccttaaggaaagagccaaaatgagttccagtgaagttggtccttttgtc

SEQ ID NO: 172910 - DNA, 50 bp, Homo sapiens
aagtgttgtgtaaaggctacccttgtacgagtgcttccatatccatttac

SEQ ID NO: 172911 - DNA, 101 bp, Homo sapiens
cactttcctgggagcggcggccacggaggcaccatgaagaagtcttactcagactctcttgagcctgagggatccattacagtttcaatgggtattgactt

SEQ ID NO: 172912 - DNA, 100 bp, Homo sapiens
tgtgatgccattccagcactggactcatggaggctgagcatttattcagagtaaaaacaaccgtcctctccgtacgagccagatctatgcccaggatgag

SEQ ID NO: 172913 - DNA, 100 bp, Homo sapiens
tagtatcttgggctttctgtattctgaagacagcgccccagcatttgccatcttcaagtttgttcaggctctgggaaccacccttctactttctgtctct

SEQ ID NO: 172914 - DNA, 82 bp, Homo sapiens
agaaactgcaccttatcacccggaacctgcagctgtcgacttgctggagaagatgcttgtattggactcagataagagaatt

SEQ ID NO: 172915 - DNA, 51 bp, Homo sapiens
tcctgaaattgccacctctgagttagataaagaaatgggggctccgagcag

SEQ ID NO: 172916 - DNA, 138 bp, Homo sapiens
cctccctaaatgttggaattacagacatgggccactacacctggcgatctgtgtcttatacgcctccaggccctgccttctgcctgcacattctgccctgatttccggaacctggaagcctaggcaggcagtggggaa

SEQ ID NO: 172917 - DNA, 78 bp, Homo sapiens
tttattttacctcagtataacattagcgtgcctacagcaggtggagtaactaatacggcacaatatcagaacaggcta

SEQ ID NO: 172918 - DNA, 75 bp, Homo sapiens
ggctctgcgctggccgggggcgcgggcggcggcgccggcaggaagggaagacaggcgcgatgatggactccccgt

SEQ ID NO: 172919 - DNA, 80 bp, Homo sapiens
agcgagactccgtgggcgtaggaccctccaagccaggcagttttcttagctgtgattcccactgctgccattgtctgtgc

SEQ ID NO: 172920 - DNA, 83 bp, Homo sapiens
ggcccgcttcctggaatggcaagcgcagcaacaacagagagcacgtgatggagttttaacattgaatgcggagaacactaatt

SEQ ID NO: 172921 - DNA, 100 bp, Homo sapiens
actgggaggagcatgtcaacagcatgcttgagagttcaaaccggcttgatgaagaacacaggctaattgccaggtatgcggcaaggctggcagcagagtc

SEQ ID NO: 172922 - DNA, 90 bp, Homo sapiens
cagaggtggaggcgctttgaaagagatcttcgctttaacagaatcagagagatccaacctggggcattcaggcggctgaggaacttgaac

SEQ ID NO: 172923 - DNA, 100 bp, Homo sapiens
acctcagcccttcgcgaagcgccgggcagctcgggaacatggccctggagcggctctgctcggtcctcaaagaaatgcactcggtgatggaaagagagcc

SEQ ID NO: 172924 - DNA, 75 bp, Homo sapiens
tttcgggaggaggcggagggcgcaaagcgagccgacagcccacctgaggatattgaccataaggactcatatctc

SEQ ID NO: 172925 - DNA, 82 bp, Homo sapiens
cagacgcacacttctgccaagcatagccaccacgattcctggtcgggtggcttccagtggtcttcagtctgtcgtgcaccga

SEQ ID NO: 172926 - DNA, 90 bp, Homo sapiens
cccggacctccaggaaccatgggtcccactggccaagtcggggaccctggagaaaggatttctccacccaggtgaactcctccctcacct

SEQ ID NO: 172927 - DNA, 89 bp, Homo sapiens
ccctccctgctgagatgcgcaaattcactccccagtacaaagagcagcccgacggccatggaggctgaagagacgatggaatgccttca

SEQ ID NO: 172928 - DNA, 75 bp, Homo sapiens
ggatgatgaattgtactctacaggagggatttgttcgtgttgaccgagattatgtgctgaagtctgcagagctgg

SEQ ID NO: 172929 - DNA, 100 bp, Homo sapiens
tgaacctggaccaggaggaggttttcaggaccaaaattgtggaaaagtcactctggcaatttgaatcaacccatagaagtgacagcgctgtattcatttg

SEQ ID NO: 172930 - DNA, 82 bp, Homo sapiens
gggaagtcaggttcttccgccacctcccagccagaacccagcgggtgccgcttctccacccgaggcttccacctccaacgag

SEQ ID NO: 172931 - DNA, 82 bp, Homo sapiens
gttcattgaattatggcatagatcttgggaaaattgcgaatgagtccctggaacgccagatgcgtgaaatggaagagaactt

SEQ ID NO: 172932 - DNA, 82 bp, Homo sapiens
ctgtgggtgctgggacttcccgtccgcggcgtggaggcgtccgtctccaagagagtatgaagagagtgcgtctgtagggcag

SEQ ID NO: 172933 - DNA, 90 bp, Homo sapiens
gtttatggcttccagtggaggcattttggggcagaatacagagatatggaatcagacataacagctgggagccggaggagaacatcctgg

SEQ ID NO: 172934 - DNA, 100 bp, Homo sapiens
gattggagtcaactcaatgtgctcaaaatcaagtcccagcagagcgaggtgacccgaatcctggatgggaagcgcatccaataccagctagtggacatct

SEQ ID NO: 172935 - DNA, 80 bp, Homo sapiens
tgacttctgaacatcctttgttagttcctaatgtggatctaccacccctgtgttcatcgagattccggtctggacctcct

SEQ ID NO: 172936 - DNA, 100 bp, Homo sapiens
aagcacctggatattcctaaaatgttggatgctgaaggagtggacgcttctcttgtgagccagctggaggtcttacctctttgactgaaccacccaaggg

SEQ ID NO: 172937 - DNA, 51 bp, Homo sapiens
caaccagctccgcgagctgcccgagagctctcgatgttctgaagtatgagg

SEQ ID NO: 172938 - DNA, 96 bp, Homo sapiens
tagttctgaggtgaagacagatcatgggactgataaattggtgtcatgtgattctctgagggagcagctgcgtgagtggagatgctttcagtggtg

SEQ ID NO: 172939 - DNA, 100 bp, Homo sapiens
ggatgacaatttggtttcacagcttgtccatagcctcaaccaggtatcaacagatcacatgatgactcactggttgtgtggaaggaagtcgatttgaccc

SEQ ID NO: 172940 - DNA, 74 bp, Homo sapiens
tagaggctggcataacaggacaagagttggaaagacaggctgaagggtatgtgattggcagctgtattaaacac

SEQ ID NO: 172941 - DNA, 100 bp, Homo sapiens
gagacgctcccctgaccaccacttgctctgcgctgaggtgctgggacagccatggtttcagacgctgggagtgtccactcgccttccaccagcatggcaa

SEQ ID NO: 172942 - DNA, 82 bp, Homo sapiens
agtagcagcagcagcagccgcggtggcagtgcaaaaggctggcagtacagcgccatcatgaccgggtcctataacaacttct

SEQ ID NO: 172943 - DNA, 73 bp, Homo sapiens
ggctgggtccagcagaaaagaggctgagatcttccgggccttcacggagctgttccaggtggcctgtgccaag

SEQ ID NO: 172944 - DNA, 83 bp, Homo sapiens
cagaccctggagcctcagttggaagcagccgatccagcctgcggagcctgtggggcagacctgaaagatgtctgaaaattcca

SEQ ID NO: 172945 - DNA, 74 bp, Homo sapiens
agcagcagcagcagagatgataacatgtttcaggtgaatatgtttacaaaccaaggaacagtgatccactttaa

SEQ ID NO: 172946 - DNA, 101 bp, Homo sapiens
tggctgtgctgcgcgacccccgcgcatggttctaaggcccagcagctactacaaggattgcaagccagtgatgaaagtcaacagcttcaggcagttattga

SEQ ID NO: 172947 - DNA, 80 bp, Homo sapiens
ccaacatgtggttcaagaaccttgacaagctcatccggctggtaaatgcgcaggtacggttcctggagcagcagaacaag

SEQ ID NO: 172948 - DNA, 75 bp, Homo sapiens
tccagagagagaaacaggagttcgagcgaaacctggcccgattcagaccaggtttactatacctccaccgaccct

SEQ ID NO: 172949 - DNA, 88 bp, Homo sapiens
ggaaacgacggcctaggggcgtgccctgctttagaacccctctgggaccgctctcttctaggttgcctgcaggagggaaggcggtgaa

SEQ ID NO: 172950 - DNA, 90 bp, Homo sapiens
caaagaggacatagttaccatggtcctcaaattaaagtttctccacagacactacccaaagcagtccttcactacagtggcagacagacc

SEQ ID NO: 172951 - DNA, 90 bp, Homo sapiens
agtacctgcagatcctgacctctctgatgagatggatcgggacttgccatgaggtgttgaagccttgtttcactgagttggagagactgg

SEQ ID NO: 172952 - DNA, 75 bp, Homo sapiens
tggacaaaggaacaggtatctcagtcatatttgatcagaaattggatgaaccttcgggatgctgagacagggaag

SEQ ID NO: 172953 - DNA, 83 bp, Homo sapiens
gacggcgagcccttgggccgcgtctcctttgaggttcaaggtgtttgcagactatgaagcctacatgcagtgccaggcacagg

SEQ ID NO: 172954 - DNA, 100 bp, Homo sapiens
caaagagcaggttcttcatcttcaaaaatgaacagtttgatgaataatacggcagctagtccaatgtctactgcaacttcaagtagtggaaggagtacag

SEQ ID NO: 172955 - DNA, 100 bp, Homo sapiens
gtgatggcggaaagcgcctttagtttcaaaaagttgctggatcagtgcgagaaccaggagctcgaggtgaaaggaaagcaagccaggatggatatttacg

SEQ ID NO: 172956 - DNA, 83 bp, Homo sapiens
ctggcagcgaagaagatcgaaaattaaacctcagaccatggcaaaagttataaccaccgtactgaagttccctgatgatcaga

SEQ ID NO: 172957 - DNA, 74 bp, Homo sapiens
gcccacgccagacacgacgtctggcaggaacctcggcctcagaggccatcgaagacggcaatttggaggaaatg

SEQ ID NO: 172958 - DNA, 119 bp, Homo sapiens
ggagaaagactttgacttggacatgactgaagaggaggtgcagatggcactttccaaagtggatgcctccggggaggctttagaatccaaattagcagcttgcaggaattttgcaaagg

SEQ ID NO: 172959 - DNA, 100 bp, Homo sapiens
cggccaccgagcgcgcgcctgggctccggcagtgaccgaggcgaactccggggccgctccggggcccgcagatatcagaaaggtagatttgtcaaaaaac

SEQ ID NO: 172960 - DNA, 100 bp, Homo sapiens
cgactggctcctgattacgatgctttggatgttgccaacaaattaattggccttggtcctcacagctccaaaaagaaacaggatctcgataagctctatg

SEQ ID NO: 172961 - DNA, 89 bp, Homo sapiens
ctgctgtcctcaacatggaggaatctacctacattgccccaccagctgccattttttacccatcgggtgctcatgacacgtcgaatgcc

SEQ ID NO: 172962 - DNA, 50 bp, Homo sapiens
agttctccagagaatacaatagcagagtgttgcggagataggaacatggg

SEQ ID NO: 172963 - DNA, 82 bp, Homo sapiens
ggccgctctaaaggttatggtttcatcacgatcatggaggagttggcagatgctctaatgtactgccatgggaagaaggtga

SEQ ID NO: 172964 - DNA, 100 bp, Homo sapiens
gggtgtgagagtccgtaaggagcagcttccaggatcctgagatccggagcagccggggtcggagcggagcagccatggaggaggtggtgattgccggcat

SEQ ID NO: 172965 - DNA, 100 bp, Homo sapiens
acatccgcgagttcctgcgcggctgcggggcttccctgcggctggagaagatggcagtgaacgtatactcaacgtcagtgaccagtgataacctaagtcg

SEQ ID NO: 172966 - DNA, 90 bp, Homo sapiens
cagctgagaacgaggtgtccacccccatgcaggaatttttcacagacaacctatgggacacactcccttgctcatggcaggaagcattgg

SEQ ID NO: 172967 - DNA, 100 bp, Homo sapiens
atcatatgacaaaggctttgccgcagttcatcttcctccctgtgtactttccatttgccttcctgggccaatatacccagtagaagaattagaagaagaa

SEQ ID NO: 172968 - DNA, 76 bp, Homo sapiens
tgattagcttcgcagtctggaaagctttaggagttcacagtatggccgccctgctcccccaatgaaaggccagctt

SEQ ID NO: 172969 - DNA, 87 bp, Homo sapiens
tccatccttgccaccgcagtgatcaacaggcggcgactggcggcgcgatggacctgaccgggctcctgctggacgaagaaggcacct

SEQ ID NO: 172970 - DNA, 75 bp, Homo sapiens
ccccgcctcccccgtccggtccctctctccacggtaaggggtttggacatatttgactcttttccccccaggttg

SEQ ID NO: 172971 - DNA, 75 bp, Homo sapiens
ttctggtctcccaggcccaacccacctgaagctattggaatcagatgcaaagatggtgttgtctttggggtagaa

SEQ ID NO: 172972 - DNA, 75 bp, Homo sapiens
tgttccctgtgaaggtgaaagtggagaaatcaggcattgaacctggccacatcccaggtaccgtgaacatcccct

SEQ ID NO: 172973 - DNA, 100 bp, Homo sapiens
ctgacttttcttgtccagtcaaacttcatagaggcattgctaccatttatgttcgttataagcaagttcatgctctgagtcctgaagagaacgttatcat

SEQ ID NO: 172974 - DNA, 99 bp, Homo sapiens
tcttaaccatgtaagtaaacgcttagaggaagagggagacagagtaatcacttacttggaccacagcacacagtgcctggaatacttattaagaaacga

SEQ ID NO: 172975 - DNA, 75 bp, Homo sapiens
aggaactaaggcggaggaactgagacgtttcgaattccagaagagaagctgaatttggacgacagccagtgggag

SEQ ID NO: 172976 - DNA, 90 bp, Homo sapiens
cccggctctcggtccgggacgtgcgcttccccacgtcgcttgggggccacggcgcggacgccatggatcacagtcaccttctatatagca

SEQ ID NO: 172977 - DNA, 98 bp, Homo sapiens
tgacccctttgacctcttcgatgtgcgagactttggaaaggacctgaaggagaagaaggagaaggtggaggagaaggcaagccggaaagagcgaaaga

SEQ ID NO: 172978 - DNA, 102 bp, Homo sapiens
agcagaaacatcagttgaaacatagggaactctttttgtcacgccagtatgaatctctgcccgcaacacatatcaggtcaccatatcatcagccaacctctt

SEQ ID NO: 172979 - DNA, 74 bp, Homo sapiens
tcgacaggcggcgcgggcggcgggcgtgctggaggtactgtcagaggttgaatgccatctgcgagtgtctttct

SEQ ID NO: 172980 - DNA, 75 bp, Homo sapiens
tgtccacccgccggccggaccaggagcggttggttccccgaggcgtacgtgaaggctctggaggaggggcccgtg

SEQ ID NO: 172981 - DNA, 78 bp, Homo sapiens
ggggtagtgtctgggatccagtacgagttgaatcattgttcaaataaggacgactgggtttggattcagaagaggatt

SEQ ID NO: 172982 - DNA, 75 bp, Homo sapiens
tgtccatcgtgtgcctgatgatcacgcagctggctggcttcagtggaccagctgctgatactttggctgtgaggc

SEQ ID NO: 172983 - DNA, 100 bp, Homo sapiens
agacaagaggtaattttcctgtaatcacaggatgactcagtacttctgaaattcctcagttccggctgccgtatgatgtagtgaattttgagattgagct

SEQ ID NO: 172984 - DNA, 74 bp, Homo sapiens
ccgcgggtccgtgcgcccagcgtcccagggcccaggccgagcagccggaagaattaacctcgagtctgcacgct

SEQ ID NO: 172985 - DNA, 100 bp, Homo sapiens
caatggcagcatctacaaccctgaagtgcttgatatcacagaggaaactctgcattctcgcttcctggagattccaaacagaggcattgatttactgaaa

SEQ ID NO: 172986 - DNA, 100 bp, Homo sapiens
ggggctgaggaggccgccaagatgccgcagtccaagtcccggaagatcgcgatcctgggctaccggtctgtggagtgatcagcagctggactgtgccttg

SEQ ID NO: 172987 - DNA, 75 bp, Homo sapiens
ctgcacgtggctgctgccaagggctacattgaggtgatgagctcatgatggagcagtccaagaagtcctccctca

SEQ ID NO: 172988 - DNA, 100 bp, Homo sapiens
ggttgtggctgctcctggttacgttgtgcctgaccgaggaactggcagcagcggactctgaaaaggaatcttgcccaagcagtgatgaagttgatgagga

SEQ ID NO: 172989 - DNA, 90 bp, Homo sapiens
tcaaagaatattaaaaaatctggagggactccaacttcaatggtcagtgtgagaagaagattgtttctgagcttgagaagcttctggagg

SEQ ID NO: 172990 - DNA, 83 bp, Homo sapiens
cgcggacgcccgctgagcttggcgcacgggccgaccagttggaatcgaagcctcttaaaatggcagatgacttggacttcgag

SEQ ID NO: 172991 - DNA, 83 bp, Homo sapiens
ctgctcaagatctcagagaaggaggaggtgaccacgcgcgaggttgacatcatggacatatgtgagtccatcctggagaggaa

SEQ ID NO: 172992 - DNA, 83 bp, Homo sapiens
cctcacatatgcagatgaatatgcaattggatactttaagaaacaggtgcaagaagtggggtgtcccaattgagaagatttac

SEQ ID NO: 172993 - DNA, 82 bp, Homo sapiens
cggccactgggacggcggcgcggagaaggcagaagtcccgggcccagagcccggccagcaggagcagttggtcttcggcagc

SEQ ID NO: 172994 - DNA, 75 bp, Homo sapiens
cggggacccgctgatcttccagctcccctcacccaacgtcgtccctgggcgctgcctatggcacagccaagagcg

SEQ ID NO: 172995 - DNA, 51 bp, Homo sapiens
actcttagagcctgtggtttgcatgctggttgtcttcttgcctgccctgtg

SEQ ID NO: 172996 - DNA, 75 bp, Homo sapiens
ttgtcttcaacctggtagagttggaaggccttgtttgtatgaagtccagcacatctgtggttgagcttgttatgc

SEQ ID NO: 172997 - DNA, 75 bp, Homo sapiens
cgcgggaggtgttcgagaacgaccccgagacgggggtccactggacggggcctgagctacaacttcacccacctg

SEQ ID NO: 172998 - DNA, 97 bp, Homo sapiens
gccgaggtggagaatgccaagtgccagggtgcccggcacccatttgcccaggcagtgggcaggaatatagccaatcccacggccatgctgctgtcgg

SEQ ID NO: 172999 - DNA, 101 bp, Homo sapiens
ctgcttctcttactcgtgttccctgccactgtcttgttccgaggcggccccagagtcaagaaagaggcggtgctgatccaagccggcgagtacatgggtca

SEQ ID NO: 173000 - DNA, 76 bp, Homo sapiens
ggggcctcttctggaccaggaaactctccacggcagctgcaatgactctccgcacggtattattgtcattgcaagc

SEQ ID NO: 173001 - DNA, 110 bp, Homo sapiens
ccgaatggagccatcccccttcggcgacgtctcctcccgcctcaccacaggttttaaaatcaaagatgggaaaatcggagaaaattgcccttccccatggccagcttgtt

SEQ ID NO: 173002 - DNA, 88 bp, Homo sapiens
ttggctgacctcctgatgcctcacttgcaccctggaggagaagaggttctgctggaacaagctggtgtagatgcaagtgaaagctttg

SEQ ID NO: 173003 - DNA, 83 bp, Homo sapiens
ctaagaaacagggagatcattacatcctcaatggctccaaggcttgggcactgtttaaaggaaagttccgagaaggcatcgac

SEQ ID NO: 173004 - DNA, 74 bp, Homo sapiens
agaaacccctgcgtccgccacggcccaggcagaggaaaatattgacttattagatgatggctctaattcttttg

SEQ ID NO: 173005 - DNA, 100 bp, Homo sapiens
gtcggtgctggcggcggcgcttgggctctgttgtttttcaccattcagaacattgcctgaagcaggtccaccatgccgttagtaacgaggaacatcgagc

SEQ ID NO: 173006 - DNA, 82 bp, Homo sapiens
gacacggcgcggcgctggcgctgccggagctgtcgacccggcctggcgccggactaggaaatctggcattttttaaagtttg

SEQ ID NO: 173007 - DNA, 82 bp, Homo sapiens
tgcagatgattctctacgaagtgatagtgttccatctcttcctgatgaaaaaggaaggcaacagcccccaggggagcaacca

SEQ ID NO: 173008 - DNA, 97 bp, Homo sapiens
acgaccttcctgcccttcacgctccaggagctaggcagtctgggctcttggcaacattgctggagatagtaccatgtgcagggactatgtcttagac

SEQ ID NO: 173009 - DNA, 95 bp, Homo sapiens
aagagccacttgctcctcaggaaccctattttggactgacgtaccttaacatggggaatcttcttaaagttttgacatgcacagaccttgagcag

SEQ ID NO: 173010 - DNA, 74 bp, Homo sapiens
atctggatgcgggagtcatcctgggcagaaggactgagaagctgacgggtcgcctcatgctggccgtgggagga

SEQ ID NO: 173011 - DNA, 75 bp, Homo sapiens
cctttgcctttttctttctggaatcagaaggctttgctggcctgaaaaaggatgaatctggttatagatggacaa

SEQ ID NO: 173012 - DNA, 75 bp, Homo sapiens
aaatggtctccgagtcaagtagtggactggatgaaagccagcagccagcttcgggtgtagcctattctcatccaa

SEQ ID NO: 173013 - DNA, 74 bp, Homo sapiens
gctcttccacttcaaggagacaacggccacacactgtggggagtttttcggagctgtacacgctgtcgctgcag

SEQ ID NO: 173014 - DNA, 101 bp, Homo sapiens
cagcaaacaactggcgatttccccaggtcccacgctcttgcggacagcccctgtcaaagggaacaggaagcagtccacggagggtgacgccctagacccac

SEQ ID NO: 173015 - DNA, 100 bp, Homo sapiens
ctggctccctggctggtgccacagcccaaaccatcatttaccctatggaggggcacgttccgctttgaaagacctgatggctcccactttgatgttcgga

SEQ ID NO: 173016 - DNA, 101 bp, Homo sapiens
tttcctgggagcggcggccacggaggcaccatgaagaagtcttactcagcctttgccattttcatgtcgcccgttgtattgtacaagtatgatgaatctag

SEQ ID NO: 173017 - DNA, 100 bp, Homo sapiens
gtcgaacagttttttctaatggctattcaagtacaaatggtgatgatcatcaggtcaaggatagtctggagcaattgagatgtcactttacatgggagtt

SEQ ID NO: 173018 - DNA, 100 bp, Homo sapiens
agcatcctagtggaggacgcccctgtggtgaaggagtacctcctggcaactatgggaactatggctatgctaatagtgggtatagtgcctgtgaagaaga

SEQ ID NO: 173019 - DNA, 82 bp, Homo sapiens
gaagatcctggtgtcgccatgggccgccgccccgcccgttgatcacggatacacgactctagccaccagtgtgaccctgtta

SEQ ID NO: 173020 - DNA, 76 bp, Homo sapiens
ggttttacttcaggttatgtacgcttctacactgagggatcttgctgcctttgacaaatcccatgatcaagctgtc

SEQ ID NO: 173021 - DNA, 75 bp, Homo sapiens
tatggccgtgggcatctcctacattagcgtctacgaccaccaagtgctgaccatgctgccttgaacagcattgtg

SEQ ID NO: 173022 - DNA, 76 bp, Homo sapiens
cgctctcatccggaggcaggaccagctgcagctgctagcggactcactcccctccatctggtagcacaagaaggcc

SEQ ID NO: 173023 - DNA, 76 bp, Homo sapiens
tacgttcatgtaaacagcatgacgtgaggccgtggatgcaggcattaagacagagtttcgctgttgttgcccaggc

SEQ ID NO: 173024 - DNA, 100 bp, Homo sapiens
gagtggagcttggtttcgggatctcggtgctgcagacggcgagacctcctgcacaggcttctgggaacttggcagacgcagcttagagagactcaccagc

SEQ ID NO: 173025 - DNA, 100 bp, Homo sapiens
gaagattcttccaaggaaccagtgcgaagtcttactactttgaccgcgatgatgtggctttgaagaactttgccaaatactttcttcaccaatctcatga

SEQ ID NO: 173026 - DNA, 83 bp, Homo sapiens
gtgtgtgcatctggctgttagaagaattcatgctcatccggaccatagtcttgagtttacttatgaggtcaattggaaataag

SEQ ID NO: 173027 - DNA, 100 bp, Homo sapiens
cgcagatccagcaggaggttatcaaagcctatggcttcagctgcgacggggaaggctctgacgcccgctctgcggcttcggtgtttgaacaggccacagt

SEQ ID NO: 173028 - DNA, 75 bp, Homo sapiens
cttgtgttgatcaggagtgaattcacagtctaccatgaattggaaggggtatactctagttgaatatgaaacata

SEQ ID NO: 173029 - DNA, 71 bp, Homo sapiens
gacgatggtgttaatactttcaaagttcttacaaggcttcgccgacacgaggtgaccatctgcaattacga

SEQ ID NO: 173030 - DNA, 100 bp, Homo sapiens
tgagaaggacccacggcgtctgttcgaaggcccggaggctgtttgatgtcctgcacgagcccttcttgaaagtaccctgatgaccccagctgccaaggaa

SEQ ID NO: 173031 - DNA, 100 bp, Homo sapiens
cttggtgttcgctaagatgaagggctaccctcactggcctgccagggtgagaagccctaccactgcaactgggacggctgcggctggaagtttgcgcgct

SEQ ID NO: 173032 - DNA, 75 bp, Homo sapiens
tcctgcttggctaaatttctcaacaccacagtcagctaaggacctagatgtgaaggctggtggaggctgtgtaat

SEQ ID NO: 173033 - DNA, 100 bp, Homo sapiens
ccgccgcctcgggaccggctgtatgattaggccacaatcttcaatgagtaaacatattcctgagcgcagctcagctgggctggaactgccctcctggaac

SEQ ID NO: 173034 - DNA, 75 bp, Homo sapiens
cgcgtcccgctcgctgggagagaggcttgggcactgtttaaaggaaagttccgagaaggcatcgacaagccggac

SEQ ID NO: 173035 - DNA, 100 bp, Homo sapiens
ggattatgaagtattaattcttccactgatatctcaaaaggtgatctggacaaaggaacaggtatctcagtgttttacctcaatcatatatccacacaag

SEQ ID NO: 173036 - DNA, 100 bp, Homo sapiens
gttgtcgccgcggtcctgctgttgatccagacatttaatgtggatgcaccatgccagaccgtggaagatttaacgaatggggttgtgatggcccaggttc

SEQ ID NO: 173037 - DNA, 80 bp, Homo sapiens
gtgcgacctcttctgcggccggcctgggcaggtgtcttcctcgagagttggaatttggagctggagacctacaggggcct

SEQ ID NO: 173038 - DNA, 100 bp, Homo sapiens
aaagcacaaggcagaaaggagtggtgatttgatgaaggctgctgcaggagagttcgcagatgatccctgctcttctgtgaagcgaggcaacatggttcgg

SEQ ID NO: 173039 - DNA, 100 bp, Homo sapiens
tggaggcctacttgcagcatattacctatcaggagaggagggcagaaatttagcatctggagaggttggattttttccaagtgatgcagtcaagccttgc

SEQ ID NO: 173040 - DNA, 50 bp, Homo sapiens
ccaaatggttgaaaacagatatacaggacgactgggtttggattcagaag

SEQ ID NO: 173041 - DNA, 100 bp, Homo sapiens
ctcttctccatcttcaattcattacaaggaatctgtctgctattcaggatagagaaatttgctgctattcaatttcttgcaaagaaaaggataatatagg

SEQ ID NO: 173042 - DNA, 75 bp, Homo sapiens
gcgacggcagcggtcccagcggcagcagcagcggcgggaggagcctccgggacaaatttacatgtattggagacc

SEQ ID NO: 173043 - DNA, 75 bp, Homo sapiens
ataagccatggcgcctcggacccagatttatgaacctgatcaaagaggttgatgataattagaagcatgctttcc

SEQ ID NO: 173044 - DNA, 82 bp, Homo sapiens
ttaaaccaaactggacaaatccttgtggagcaaatgggaaaaggaccatagctgtctgcagtgcaggaagccaactattaag

SEQ ID NO: 173045 - DNA, 88 bp, Homo sapiens
ttgaaaaggttctggtccacatctcagattggtccagaaaagggcgtggtgcacctggcgacagcggccgtcctaaacgcggtgtggg

SEQ ID NO: 173046 - DNA, 90 bp, Homo sapiens
ggctgcggggtgatggaacaacaactggtcaattcagggcggcgactggcggcgcgatggacctgaccgggctcctgctggacgaagaag

SEQ ID NO: 173047 - DNA, 100 bp, Homo sapiens
ccgccccatccccctcccggagtcgaaatttcccgggattatgtttcggaaaggaatttaaactttgggataatgagctgcagtatgtggaccaacttct

SEQ ID NO: 173048 - DNA, 96 bp, Homo sapiens
tcaaacttcaacagaatgtggcaaccaggttccacttccaaacatgagttccaggccgagacaaagaagcttttggacattgttgcccggtccctg

SEQ ID NO: 173049 - DNA, 76 bp, Homo sapiens
aaggaggaaattttggcggtgctgagatgagtgaactgagtgtggcacagaaaccagaaaaacttttggagcgctg

SEQ ID NO: 173050 - DNA, 51 bp, Homo sapiens
tcgacgccctctgcccgctccagaagcagccatttcgtagagtgacgtttt

SEQ ID NO: 173051 - DNA, 82 bp, Homo sapiens
ctcttctaaggatcgctgtcctgacagaagagcaattctgtggtgttcttggtcacacatttatggagtttctgaagggcag

SEQ ID NO: 173052 - DNA, 100 bp, Homo sapiens
ctcaatcatttatgtggagctgactttgtgaaaagtcatcagaaacctccacagggttgtctaccttcataacaacaatatctctgtagttggatcaagt

SEQ ID NO: 173053 - DNA, 96 bp, Homo sapiens
cgcttccccaggcggcggcggtcctggtgcggaccctccggccgcagccatgtgggacccgcgggcagctaggtggggcagctgcagctctcccac

SEQ ID NO: 173054 - DNA, 88 bp, Homo sapiens
ctcccgcttttcaacaccctgatgcctgaaggatgttgcttcagagtgtgaagtcaaatgcatgccaacattccagttttttaagaag

SEQ ID NO: 173055 - DNA, 98 bp, Homo sapiens
cattccaggcaaggtgattttatcaaatgtgtggaacagaaggcctgctgaattagccaccaagtacgcaaacttttcagagggagcttgcaagcctg

SEQ ID NO: 173056 - DNA, 100 bp, Homo sapiens
tagaaaactcgaggcaactattgtgcacaaatgaagatgtttccagccctgcctcggcggaccaaagggattccagacagcattggaaaagacatagaaa

SEQ ID NO: 173057 - DNA, 50 bp, Homo sapiens
agccatggccctccacagcccgcaggaaaatgtttataggaggccttagc

SEQ ID NO: 173058 - DNA, 87 bp, Homo sapiens
gcgctgctggcgctctggctgtgctgcgcgacccccgcgcatgttgattatggaagattcccacaagagtaccacgtcagagacagc

SEQ ID NO: 173059 - DNA, 75 bp, Homo sapiens
ataatgaatcattagtatcggacacagaaaccaaagaatggctcaagaagtactgacacatttaaaggagcatcc

SEQ ID NO: 173060 - DNA, 100 bp, Homo sapiens
ggaaagtcggccaagaaagacaaagacccagtgaacaaatccgggggcaaggccaaaaagaagctgaaacattaacaaacgtgctggatttcaaaaggga

SEQ ID NO: 173061 - DNA, 100 bp, Homo sapiens
cgccgcgggatttggagctgcctagcctcgcggtcgattccacagatggcgagggtgactggagtctctggtctgtctgcagcgtcacctgcgggaacgg

SEQ ID NO: 173062 - DNA, 100 bp, Homo sapiens
gggtctcgggggccgctctgggatcccggccaccagcaattgtccggggtcaggcccagccccaggcccagtggtattactgaattcactgaatgtggat

SEQ ID NO: 173063 - DNA, 83 bp, Homo sapiens
gcccgtggaccacaggccctcgttgcccagatttctgtggctcctgatggatctgagaagatggacgtggaggatgaaaatct

SEQ ID NO: 173064 - DNA, 87 bp, Homo sapiens
gcgacgccggcgccgagggacaccgcagtatgaggcagaggtggagccgccaccaaaatgcagattttcgtgaaaacccttacgggg

SEQ ID NO: 173065 - DNA, 83 bp, Homo sapiens
gttgcttctgcaggaagcctttttggtggcatggtcctcaagaagttcctaaaaggagagctcaaaggatggctactgacatg

SEQ ID NO: 173066 - DNA, 100 bp, Homo sapiens
gaaagaaatagaaaatttgaagggtattgttccagatcttaacagttgcagggacttcacagcccacacgggctacgaggtgctgctgcagcggcttctg

SEQ ID NO: 173067 - DNA, 75 bp, Homo sapiens
agagagagaggtggacagatctgagagatactgaggtttatgctaaaactatcgatgggcaacagactattattg

SEQ ID NO: 173068 - DNA, 98 bp, Homo sapiens
gacgacaacccgggcctccgagaaattggcgtgttagccaaggctttcattgaccaagggaaactcatcccagatgatgtcatgactcggctggccct

SEQ ID NO: 173069 - DNA, 90 bp, Homo sapiens
atctttaagaaattttatcttttgaaacacgttctgattaaccaaggatcctgggtgtttggctgacctacagatacaggaaccagaaag

SEQ ID NO: 173070 - DNA, 83 bp, Homo sapiens
ccttctcccaggaggggaggcacgtacaatgccagggagtactacgaccacctgcccgagctgaagcaggccgtggaccagat

SEQ ID NO: 173071 - DNA, 100 bp, Homo sapiens
cttcgtgctcaggatccagatcatagacagcaatggatagatgccattgaacagcacaaggaaaatgtttataggaggccttagctgggacactacaaag

SEQ ID NO: 173072 - DNA, 89 bp, Homo sapiens
acttcctcttcagtcatcagtgtcacggtctagatcacattctcgatccagaggaaggcgatactctcgctcacgcagcaggagcaggg

SEQ ID NO: 173073 - DNA, 95 bp, Homo sapiens
aacgagcttgacagaagtgtggttaaagaggcttcctgttacctgaaacagggcaaatatgctgaggctgagacactatacaaagagatcctgac

SEQ ID NO: 173074 - DNA, 100 bp, Homo sapiens
cctttggctatgtcgagatcccctgtgtggccaagaagctggtgtgcggagatgaagatgtcccctagctgtgctgacctctgcactgtgtagtgttgtc

SEQ ID NO: 173075 - DNA, 76 bp, Homo sapiens
ttcactgtaaacttcataatgggataaacagagacagcagcatgactgggggtcctgatgacaacttaattgaagg

SEQ ID NO: 173076 - DNA, 75 bp, Homo sapiens
cccggacccatgcagcttgggcccgcatcatcgcttgttcgcaatcatttggggaagaatctacagttgctgatg

SEQ ID NO: 173077 - DNA, 100 bp, Homo sapiens
ccccacgagctgccacacggcctgcactctgcgctttgagctactgggctgtgagctgaacgagctctgcgtgcctcttgctgtgccctacctggacaaa

SEQ ID NO: 173078 - DNA, 73 bp, Homo sapiens
tgaagtgcagaggtttttttctgtcctcctccatcaaagaaaatgaagttatttggatttaaagaagatccat

SEQ ID NO: 173079 - DNA, 100 bp, Homo sapiens
cagaacagttgacaggtgtgcctttagatgactctgcaatcacaccaatgtgtgaagtgacaggcgatgtggaagatgtgaaatttgtcatcaattatga

SEQ ID NO: 173080 - DNA, 83 bp, Homo sapiens
caggatttgggcctgatgagcccagctgggtgcctgcctcatacttggagaaagcgggagatacagatgacccaccaagaatt

SEQ ID NO: 173081 - DNA, 100 bp, Homo sapiens
gaatttttgcctctatggttatcagtgacagtgacctgacttcctgatccatttgctaaggtggtggttgatggatctgggcaatgccattctatagata

SEQ ID NO: 173082 - DNA, 75 bp, Homo sapiens
tacaaagtcagcccaggcagacctccagatcagtcgcatcgaatacattcattcaaagaacttcatccaccggga

SEQ ID NO: 173083 - DNA, 87 bp, Homo sapiens
gggcttctctgaggcggcgagagatggtcaggtctggagctcgaccgggccaggtgaaatgacaatggatgctctgttggctcgatt

SEQ ID NO: 173084 - DNA, 74 bp, Homo sapiens
aaaacctgcagaagaactggcttcgggaattttaccagaaaatgacagatggcgagacctggacaggaaatgcc

SEQ ID NO: 173085 - DNA, 104 bp, Homo sapiens
gcctgcagcgggagctggacggcgagcgcgagcggcgcgagaaagaaagatgaatgggagggctgattttcgagagccgaatgcagaggttccaagaccaattc

SEQ ID NO: 173086 - DNA, 74 bp, Homo sapiens
cgactgcccagagtccgcggccggggcgcgggagcccttcctgttctccaagttccttcccttcccctgaagga

SEQ ID NO: 173087 - DNA, 73 bp, Homo sapiens
cactttcccctgagcctcagcacctgcttgtttggaagaggacagcctcaaggatgggcaccagctgaaacaa

SEQ ID NO: 173088 - DNA, 100 bp, Homo sapiens
cggggaagtccttatgcgaatcgtcagggcattagaaatgaatactgcattgagggacggacttctggtcttcttcttcctaattgttccccttattgtc

SEQ ID NO: 173089 - DNA, 75 bp, Homo sapiens
caccgggcctgtcagttgacctaccccttgcacacctaccctaaggcagtcgacaagtactttaagcttcctcat

SEQ ID NO: 173090 - DNA, 80 bp, Homo sapiens
acatcctgctcctgctcatggacgaccaattctgtggtgttcttggtcacacatttatggagtttctgaagggcagtgga

SEQ ID NO: 173091 - DNA, 82 bp, Homo sapiens
gtgtacctcatccacagggcctcctgccagccccagcccctggagaggatgcagcggagctggagtttgttcagatcatcat

SEQ ID NO: 173092 - DNA, 75 bp, Homo sapiens
actgagtttcactcccgacggatctttgcttctcacgccaggcatagaatgtcaagctaaccaggcgtccgctac

SEQ ID NO: 173093 - DNA, 100 bp, Homo sapiens
ggtctgttttgttcccaaggaccccctggacctcctgaaagaagaccccgtggcctttgaatacctctatctgcagtctgtagatggacggcagatccga

SEQ ID NO: 173094 - DNA, 100 bp, Homo sapiens
caaaagagtctccgcggtggaggtctgcgttgctcttgcttttcctcgctggggtgtacgctggacccacaaaccgtggagaccaagaactggcacacgg

SEQ ID NO: 173095 - DNA, 90 bp, Homo sapiens
gtgtctgctcgccctccgacgctgctcagtccacaggtcctggctaccctgggaagagacaagaagtaaatgaagaaagaggaagattcc

SEQ ID NO: 173096 - DNA, 89 bp, Homo sapiens
ataggcctgtgacgaaggtgctaccatcgtgagagtaagctggaagatctggaagttactgtagctgatcacattcaaaaggtcatgaa

SEQ ID NO: 173097 - DNA, 100 bp, Homo sapiens
caaatacccctttgaattaattatggctgtaactataactacccaatattgcagccatggagtccatgcttaataaattgaagagtactgttacaaaagt

SEQ ID NO: 173098 - DNA, 100 bp, Homo sapiens
gtgctggccagcagaccgcacacgctagatggccgaaacgttcaagcaataaatgcgggagtgtttttctttaggtgtacaatatgcaataatagtgaca

SEQ ID NO: 173099 - DNA, 75 bp, Homo sapiens
agccgatgcaccgagtccagcccaggaaaatggagagggatggcaccacagatgtgacgcggacaatgcattttg

SEQ ID NO: 173100 - DNA, 100 bp, Homo sapiens
tggcgctgcagctgcacttgctccgggcgctggcgcaagatgagattgtggggaacctgggtgaaggcacctttggcaaggtggtggagtgcttggacca

SEQ ID NO: 173101 - DNA, 99 bp, Homo sapiens
cccttgcccgctcgggtatgaagatcgggcggattggtgtggtttctgcagctgacaccccagataagaaagagcatttggtcctggtggagacaggaa

SEQ ID NO: 173102 - DNA, 74 bp, Homo sapiens
cggcacgctccggggcatcatcaagagcatggtcccgcggcagtgctggtggccatggttcccgtagccagaag

SEQ ID NO: 173103 - DNA, 101 bp, Homo sapiens
cagtccccgacacgtcgtcttacatcaagatcgcccaggaccacaccgcagcgtaactgcaggcctctcagcgaaaaagggggaaagcaaagacccgggtg

SEQ ID NO: 173104 - DNA, 101 bp, Homo sapiens
ctcaggagaggctcagggagactgagcttcaagaatccagaggctttaggaagaagataaaacgccttgaggagtcaaacaagaagttggctcttgaatta

SEQ ID NO: 173105 - DNA, 75 bp, Homo sapiens
gcactgtattctttacctgcttcccaatcccactgatgaggatcagcccatgggattaatgaaaatcaagttcca

SEQ ID NO: 173106 - DNA, 101 bp, Homo sapiens
acccataccttttgggcttcagaatgcagtgttttcggagttgatccctgaattttattatctccctgagatgtttgtcaacttcaataattataatcttg

SEQ ID NO: 173107 - DNA, 74 bp, Homo sapiens
gagaacgtgcgggaagagaagatcatcgagcatttcaaacgatcaaccctgaggaaactgaagccggagagtat

SEQ ID NO: 173108 - DNA, 98 bp, Homo sapiens
gacggcccgagcgggagcgggagcggacgcggcctcagtcctgcgcggaggcggggtttcaccatgttgcccagactggtcttgaactcctgagctta

SEQ ID NO: 173109 - DNA, 144 bp, Homo sapiens
gtccagtggaagaccatctacatctcccacaggaagtgtcacacagcagtcaagtatgtcccaaacgtctgaagttggtgaaccatctaaagaagagaaggctgtggccaagtatcttcgattcaactgtccaacaaagtccac

SEQ ID NO: 173110 - DNA, 100 bp, Homo sapiens
ctaggaatctatgatgctgatggtgatggagattttgatgtggatgatgccaaagttttattaggaagtgtttggattgtgagctatttcagaactgttc

SEQ ID NO: 173111 - DNA, 75 bp, Homo sapiens
cgccatcctgcaccgccaccggcccgacctcatatcccgactgggcctcctacactctgggcgtcttcatctgcc

SEQ ID NO: 173112 - DNA, 74 bp, Homo sapiens
gcctgcgatttttccaaaaagaagcctcatgcgagtgtgcagaaaccactaatactagcctcttgcaggtgcaa

SEQ ID NO: 173113 - DNA, 87 bp, Homo sapiens
caggaggctaagaaagtggtgaatcccctgtttgagaaaaggcctaagaattttggcattggtgcattggatcgttgtgtgatgggg

SEQ ID NO: 173114 - DNA, 75 bp, Homo sapiens
tcctggctcccttctgccccagctccgtctcggcggcggcgggtccaaagaggactggtgatctacgtgtgcttt

SEQ ID NO: 173115 - DNA, 121 bp, Homo sapiens
ccgagagcgtgaccgagagcgcgaatatcgtcatcgttagaagattttgggaaccagtaggacattgacatacatccgagaacattctgtggtggatccagtggaaaagaaaatggaactt

SEQ ID NO: 173116 - DNA, 100 bp, Homo sapiens
aaaaatgtggtcagtgaacctatcgaaggacatgaagactaccacatgatgtgtgaccgcaacaagggaaaacatggcttatactgtggaatgcctgcgg

SEQ ID NO: 173117 - DNA, 50 bp, Homo sapiens
cagataaccatcggaacaagtttaagaaagaaagtcgtgctgtatcccta

SEQ ID NO: 173118 - DNA, 90 bp, Homo sapiens
caaaaatgtgcatactcacagagttagagagagggatggtgagcccacctgaatgaccttgaaaatattattccatttcttggaattggc

SEQ ID NO: 173119 - DNA, 98 bp, Homo sapiens
ctcggacctgtcacaaaggagtcgcgccgccgccgccgccccctccctccggtgggcccgggagattcactgcgtgctgtcctcacttgttctacaat

SEQ ID NO: 173120 - DNA, 90 bp, Homo sapiens
gatttttttcgggtagtggaaaaccaggaccgtataatagacgctggccccaaaggaaactactctcgatttatgaatcacagctgccag

SEQ ID NO: 173121 - DNA, 75 bp, Homo sapiens
gggtgtatatcaaacggcaagatgtccagtaatgtcccggcggatatggcttgttgattggtgctggctgtgccc

SEQ ID NO: 173122 - DNA, 100 bp, Homo sapiens
aatgttgaagatgtccttaccagctttgacaatacaggaaatgtttgtggaggaactgcaatgtctggtggagaacagaaaccagagaggtactatgtgg

SEQ ID NO: 173123 - DNA, 100 bp, Homo sapiens
caagttttacagatggatctcagagcggtatccctgtctcagcgaagtggtgaaagagcatcaggaaaatttaaacctagctctgaattctgcctcagcc

SEQ ID NO: 173124 - DNA, 100 bp, Homo sapiens
tggggctgggccagaccactcatcctgtcgaatagagcgtttcctgcagctgtccgcaggcttgtccaaaaggaaacatcggaatgaccacttaacatct

SEQ ID NO: 173125 - DNA, 74 bp, Homo sapiens
atttggtgaggattcagttggagtgatttttaaaaatggtgatggtgaagtgccagcattataagaaaaaacga

SEQ ID NO: 173126 - DNA, 97 bp, Homo sapiens
cccttgtgccgtgccgcggcggctggcgctacgcccaggcccactccaccatcgtcagcgagatgatgattattctccaccgtctaagagaccaaag

SEQ ID NO: 173127 - DNA, 75 bp, Homo sapiens
tatctttcaaaagtgaaaatttcaggcacaccaaagaattggtaaatcagaagactgaagcacggcatatactca

SEQ ID NO: 173128 - DNA, 96 bp, Homo sapiens
tcatccttgtttaatgactttggtgccctcaacatctctcagagacgaaagactcccaggaaggaaattacaagtcagaagtcaacagcaaaccca

SEQ ID NO: 173129 - DNA, 75 bp, Homo sapiens
ctcccgagtggctgggattacaggttggtcttcctgcaaaatctggagttgctgggggcattcttttagttgtcc

SEQ ID NO: 173130 - DNA, 51 bp, Homo sapiens
caagattttgaagaagcttgtcgaggattagaaaagcacttgggaagccca

SEQ ID NO: 173131 - DNA, 75 bp, Homo sapiens
cacctcagctttggattcatgcaggatcacagaagaactgcagcttcctggggagcagtttcacctccacaggca

SEQ ID NO: 173132 - DNA, 74 bp, Homo sapiens
tcttggaaacattatataccttggggaaagctgatgttcaaaccttgtactactcagctgatcacaagctgctt

SEQ ID NO: 173133 - DNA, 74 bp, Homo sapiens
tggcaggtgggggcggcgacctgagcaccagatctatgcagttagatcagttgttcccaacaaaagcaataatg

SEQ ID NO: 173134 - DNA, 100 bp, Homo sapiens
acattgtagcaaaatggcgactgtcattcacaaccccctgaaagcatgatcatgggaacagcaatagtagtcatgtaaaaatctttttaccgaaaaagct

SEQ ID NO: 173135 - DNA, 90 bp, Homo sapiens
gagatccaagtgcgcgccctggcgggtccggaccaaggtggaggaactgcaatgtctggtggagaacagaaaccagagaggtactatgtg

SEQ ID NO: 173136 - DNA, 90 bp, Homo sapiens
gccaaaggcatatgatctatgaagaatgaccagtcaacaggggacataaaagtaattggtggagatgatctctcaactttaactggaaag

SEQ ID NO: 173137 - DNA, 51 bp, Homo sapiens
ggattccaagtaactcttatttgatgaggaaactgaggcttggtgaagtta

SEQ ID NO: 173138 - DNA, 98 bp, Homo sapiens
gaatgaatgaaccttgccctggggttaacactccagtgggatgaacagacaaaccccacaagcactgcatacgatcgccatggatcggatgaagaaga

SEQ ID NO: 173139 - DNA, 95 bp, Homo sapiens
actaagaccaagtcctcgctggactgctcagggtgccagacctcatcgacttagcactcaggcctgtgaatcaggagatacaaagacctccaaaa

SEQ ID NO: 173140 - DNA, 80 bp, Homo sapiens
caggagttcgtctcttacgtctgcggaagtgcagctgcctcagttcttagcgcaggatgtacatttttggtggatgggtc

SEQ ID NO: 173141 - DNA, 100 bp, Homo sapiens
cttatctatgtggtcattgatctccctatcaatgtatttaaggagctgaccagtgctttggtgcatctaaaactgcatctttttattcagatctttactc

SEQ ID NO: 173142 - DNA, 90 bp, Homo sapiens
ctcctgcagacatggctgttggagatgaaccttgttcatgcaccccaggttggcaacattgtacaagtcacccagccagaaggaatgcac

SEQ ID NO: 173143 - DNA, 74 bp, Homo sapiens
gtgggctggtgtgtggaactgcaatctgcacatcgtgctgccacacgaggcttcattcgttatggctggcgctg

SEQ ID NO: 173144 - DNA, 80 bp, Homo sapiens
caggacccgaagcctaaattccaggaggtttgctggcctagacctgaactcttcagataatcagagtggaggaagtacag

SEQ ID NO: 173145 - DNA, 90 bp, Homo sapiens
gccgcctcttggtttgcgtcctgcactgaaaggaaatgacggattttataacaacgaacttgatgcaagtgataggtttgccaaggtcag

SEQ ID NO: 173146 - DNA, 75 bp, Homo sapiens
cagattcgcagtggtcgcttcttctccttgggagcaccaggtactccaggtcttccaggacccagaggtgatcct

SEQ ID NO: 173147 - DNA, 89 bp, Homo sapiens
cagaccctggagcctcagttggaagcagccgatccagcctgcggagcctgtggggcaggatcgacgagaacgtgctaggagcccagctg

SEQ ID NO: 173148 - DNA, 50 bp, Homo sapiens
ctctgcgccgccggcaccatgaggtgattgatgagatttatcgtgtgttg

SEQ ID NO: 173149 - DNA, 96 bp, Homo sapiens
ctcggggacccttcgtgtccggtggttgctgttgcttggcctggtgggcccagtcctcggtgcggcgcggccaggccctgtttgctgaaatgttgg

SEQ ID NO: 173150 - DNA, 87 bp, Homo sapiens
cggcgccgccgcgtcttcccggtctcctttcccggccgcacagggtgatgctgtggagtcttcaaaaagcccgaccactctggatta

SEQ ID NO: 173151 - DNA, 110 bp, Homo sapiens
tgaaggaccgaaaatggcagatattcaaaacgtcagcaaccaaaggcaccggccttgatgaggcaatggaatggcaattttatcaagaaagctgttggtcccagaaatcg

SEQ ID NO: 173152 - DNA, 90 bp, Homo sapiens
aacacagctcgacagtacgcctacttctataaagtcatccaggccaaagaagcccaggatgacctggtgaagaccaaggaggagctgcac

SEQ ID NO: 173153 - DNA, 90 bp, Homo sapiens
gcaccgattcctctcgggctcttgggcgctgctctgagtcactattccaggtcctcaggatatagccgtgacctaaacacagaaatctac

SEQ ID NO: 173154 - DNA, 95 bp, Homo sapiens
caggagtgcggcaacagatctgttctcttcttaaaaagggcagcggtcttaattctttttatgatcaacgagaatacatagggagaagtgttcat

SEQ ID NO: 173155 - DNA, 100 bp, Homo sapiens
ctcagccatagtcacagtgagaaggcgacaggaaccagctcgggggccaactctgaggagtccactgcagcagctttctgaaacaaagactcattttgaa

SEQ ID NO: 173156 - DNA, 101 bp, Homo sapiens
ctgaacagaaagatccggatcctgagtttccaacagtgaaatacccgaatcccgaagaggggaaaggtgtcttgggcttccgttacaagatgaggtctgtg

SEQ ID NO: 173157 - DNA, 101 bp, Homo sapiens
gccatgtggccatcgcagctactaattttcatgatgctcttagctccaataattcatggattgccccctgtgggtcactttctcagtcattttgagctcag

SEQ ID NO: 173158 - DNA, 100 bp, Homo sapiens
ttggaagcaatgtttgaacaaactcgaagaacagctgtggaaagaagttgcaaaacactggaaactgattattgatgagaagaagtattacttatttggg

SEQ ID NO: 173159 - DNA, 117 bp, Homo sapiens
tccaagggggccagttcctgccgtctgctcttctgcctcttgatctccgccaccgtcttcaggccagacaatgcagatcttcgtgaagactctgactggtaagaccatcaccctcga

SEQ ID NO: 173160 - DNA, 49 bp, Homo sapiens
gcagttttgtgtccatgtgaacaactgttgtaaagctctctgaaatagt

SEQ ID NO: 173161 - DNA, 100 bp, Homo sapiens
ccgccgaagaagcatcgttaaagtctctcttcaccctgccgtcatgtctaagtcagagatgatgtgctgactaaagacgcgggtgagtgtgtgatctgcc

SEQ ID NO: 173162 - DNA, 90 bp, Homo sapiens
taaatcggcttcacagaaaggagtcactgccttctaacgaaagggcagtacagactttggcagaactgccattggatgtccagaatcccc

SEQ ID NO: 173163 - DNA, 101 bp, Homo sapiens
ctgctggttagtgtgctctgagggagggtccgagccagccgctgttttgccggaggagcccctcaggcctacatagtggaatgtcatgggatcacccttct

SEQ ID NO: 173164 - DNA, 97 bp, Homo sapiens
agacatttgtggtacatgcagggacagatacaaacggagatatctttttcatggaggcttccaactgaatatgagaggaacgggagatatgagggct

SEQ ID NO: 173165 - DNA, 82 bp, Homo sapiens
agatgctgcgcagcagtctccgattccccatcaccaattcggctgggccaagactaaggggctgcagagcggggtggacatt

SEQ ID NO: 173166 - DNA, 96 bp, Homo sapiens
tgccagcgcagaagggacgtgagcccagccgaggtaccgctgaagaggaatcaattttgagggaatctggaaaaattgcaatcaaaacatcatttc

SEQ ID NO: 173167 - DNA, 83 bp, Homo sapiens
gctggaacaaaagagcctctattaaggaacatgcttaccctgctgatgaactcatgcctttaacctgtagaggtcgagttaga

SEQ ID NO: 173168 - DNA, 50 bp, Homo sapiens
cgacgagctgaccctgggagacatcgacgaaaaggtgtgagcggtactgg

SEQ ID NO: 173169 - DNA, 97 bp, Homo sapiens
ctgggagcaacgggagtgtcctggacccagctgagcgggcggtcattcgcatcgcaggtgccaagtcctgccctgccaacttcttggcagctgccga

SEQ ID NO: 173170 - DNA, 50 bp, Homo sapiens
taccgcctcaaccgcgacgccgaggagatggtcatcacaaacttgcagcc

SEQ ID NO: 173171 - DNA, 100 bp, Homo sapiens
ctaagtctgtttgcaaagcacctgaactggatgggactgaggaagacccacaggcagaactggccatcattcatggtcagatggcttatattctgcagct

SEQ ID NO: 173172 - DNA, 88 bp, Homo sapiens
gatactctgactccacctttacttttacctacgttggcggccccagaaggatggagctatgacattgaagagaggaaggttccaaaac

SEQ ID NO: 173173 - DNA, 75 bp, Homo sapiens
cagactcctcttgccacgcatcagtctgaagttgctgagacaaaggaaaacccactcccttggaggagcatgacc

SEQ ID NO: 173174 - DNA, 100 bp, Homo sapiens
aggaatcgtatcgtatgtccgctatccagaacctccactctttcgcccctgtccctgccttacccagcaagcttcccacgtttggagccccggaacagtt

SEQ ID NO: 173175 - DNA, 96 bp, Homo sapiens
gccttccatagggctgagtctgggaccgaggatctcgaggacctggaagaagcagaggagccagacatggaggaagacgatgatcagaaagctgtg

SEQ ID NO: 173176 - DNA, 131 bp, Homo sapiens
ggcgcggtggcaggagctgacagagtgatgggaaacgcgtgagccaggccgagaggagtacgagacccaatctagtgcagaagccaaatttgtgaagcagctagaccaatgtgaaatgattcttcaagcat

SEQ ID NO: 173177 - DNA, 82 bp, Homo sapiens
gagtggccggaagatccacagccaggaggaagccttgcggtcccaggggcagccactggcctcccagcccccggtcgtcgac

SEQ ID NO: 173178 - DNA, 100 bp, Homo sapiens
agaatgtttttgaccagaaaaccgacaaccttcccagaaagtccaagctcgtggtgggtggaaaagtgttcgccgaggtatccagggtgtgagcaagcag

SEQ ID NO: 173179 - DNA, 82 bp, Homo sapiens
ccaagatttaatcaactactgtctgagctacattgcgaaaattaaactcccgaagaagagggcagctgcaatgactctccgc

SEQ ID NO: 173180 - DNA, 75 bp, Homo sapiens
ccagcgcggcaacgtcgccaagacctcgggtcctgatgaagaagctgttgtggatcttggcaaaactagctcaac

SEQ ID NO: 173181 - DNA, 96 bp, Homo sapiens
ctcccgagtagctgggattatagatgatttcacaaaagttcatcttcattgcagatacctgcctttctttctaggttgtatctcccacttcaccct

SEQ ID NO: 173182 - DNA, 100 bp, Homo sapiens
aatgcgctggacttgaattcagtgcttgggaagagctccaaacgagaatggaagccgctggaggaccgtagctgcacagacataccatggctgctgctct

SEQ ID NO: 173183 - DNA, 75 bp, Homo sapiens
ccccctacagatctgtgggactggtttgaatccttccttgatgatgaagaggtcccaagctctttaaggagccca

SEQ ID NO: 173184 - DNA, 50 bp, Homo sapiens
cgtcaatcagagcgtcctgtgcgccccattggatgagaatgacctagagg

SEQ ID NO: 173185 - DNA, 51 bp, Homo sapiens
gcactttctcaaaccaaggctgcttccacagaatcttaatcagaggatgga

SEQ ID NO: 173186 - DNA, 100 bp, Homo sapiens
caggatttaactatcagaatgaagatgaaaaagtcaccttgtctttccctagtactctgcaaacaggtactccaaagattcaggtttactcacgtcatcc

SEQ ID NO: 173187 - DNA, 75 bp, Homo sapiens
tcgcctggaggaccagtatttcccatggaggggaactctaatgatccaggacaaagaagttaccctggagtatgt

SEQ ID NO: 173188 - DNA, 96 bp, Homo sapiens
tttcagtggaatttaacaaactgatccctgaaaatggtttcataaagttcacacaaaagatgttggacaatttctacaattttgcttcatcatttg

SEQ ID NO: 173189 - DNA, 100 bp, Homo sapiens
tttcgggctgccgagggtgttcttgacgattaatcaacagattgaggtggtgccttctgcctctgccctgatcatcaaagccctcaaggaaccaccaaga

SEQ ID NO: 173190 - DNA, 74 bp, Homo sapiens
atcagcatttacatgacagaaatcacctatgtttacagcgacaggaatactctgaagatagtaactccgagcca

SEQ ID NO: 173191 - DNA, 100 bp, Homo sapiens
gtggccccgagggcggatccgagaggtcctgctgtactagccaccaaagcagctgctggtactaagaaatatgatcttagtaaatggaaatatgcagaac

SEQ ID NO: 173192 - DNA, 98 bp, Homo sapiens
ctaaagagcaggaatcatggactgtgaatttacaacgggaatgattttaccaacgaaagctatggcaacccaggaattgactgtcaaaagaaaactga

SEQ ID NO: 173193 - DNA, 100 bp, Homo sapiens
tggacttccagagccggaacgtcatccctgatatccctgaccacttcctgtgtctgtgggagcactgtgagaatgccagaggacttggatctgagctaaa

SEQ ID NO: 173194 - DNA, 80 bp, Homo sapiens
gattttcctgcatggattgggagatactgggcctgtctccactaactctggaccctaaaacagctcacccaaatctggtg

SEQ ID NO: 173195 - DNA, 100 bp, Homo sapiens
ggaagatcattcgagaccatggagacatgaccaacaggaagttccgccatgacaaaagggtttacttgggaggcgggatgtggtaacagagaccaagact

SEQ ID NO: 173196 - DNA, 50 bp, Homo sapiens
gccctaaacacactatgaccgctgtcacgaccggaggggggactcgcagc

SEQ ID NO: 173197 - DNA, 83 bp, Homo sapiens
cggcgactggacttacgaggagcagtttaagcaggagctctgtgtgtcgtctgagcagtcgcgagaagatttccctccaggac

SEQ ID NO: 173198 - DNA, 83 bp, Homo sapiens
aaattccattaatttttactctttgaaacagtggggcaatgagctcaagtgcacatgaacttgaacagatgcagctgatttta

SEQ ID NO: 173199 - DNA, 82 bp, Homo sapiens
gacacaacaccgcggagccctgcaggcgaccaggacggtgacaagcagctctctgtgcccgagttcatctccctgcccgtgg

SEQ ID NO: 173200 - DNA, 83 bp, Homo sapiens
acgcggcgcgcgaggacccgagccaggcggggacaggacggcggggcgagccagacctgaaagatgtctgaaaattccagtga

SEQ ID NO: 173201 - DNA, 100 bp, Homo sapiens
cttggtggtgtgtaacgactgtaatcaggttgtcaaaccgcaggcatttcaatcacattatggaattacatgaatgacagtcttcgaaccaatgtgtttg

SEQ ID NO: 173202 - DNA, 100 bp, Homo sapiens
aacaacctgaacgtcaccgaggagaagtaccaggaggcgttggccaaggttgaaacattgtagtcggtatatacatgacttatttccttcactcatcaag

SEQ ID NO: 173203 - DNA, 75 bp, Homo sapiens
caaagatctcgtacaagatccttctttagccatcatcaaccactttaaccccaaaattgagtcctacgctgctgt

SEQ ID NO: 173204 - DNA, 100 bp, Homo sapiens
gggacgatgatgagcctggcccttggacgaaggaggggaaggaccggatcaagaagctggggctgaccatgcagctgatcatggatgaacaggatcaaca

SEQ ID NO: 173205 - DNA, 100 bp, Homo sapiens
ggccgtcctgggggccttcagagccgcaatcaagcagggcttcctgaggctgcggtggtcacgcttcgcccgtgtcctcctcacccgctcctgcgccatc

SEQ ID NO: 173206 - DNA, 83 bp, Homo sapiens
ctggagaagctgggattggagattccacccaaacttgctggtcactgggaggacatggatttgattgacatactttggaggca

SEQ ID NO: 173207 - DNA, 100 bp, Homo sapiens
cgcctagatggctttggtcacggtccagcggtcacctacccccagcaccacctccagcccctgcgcctcgggggaagtccagccaagcagacgacctggg

SEQ ID NO: 173208 - DNA, 82 bp, Homo sapiens
tgacgctgctggaggaaacacctcaggacacggcctacaacaccaagagctggagaagaagcaggcgctccctccattccag

SEQ ID NO: 173209 - DNA, 75 bp, Homo sapiens
gcgcagggtggagcgcgccagccggggtcctcggatctggcccagtttgtcagggagccactggtgatgtggatg

SEQ ID NO: 173210 - DNA, 101 bp, Homo sapiens
gagatggtggccctaacacagggggaatgggagcctattgtccagcccctcagatgtcccactctgcagtgaacgctctgtgtcgagccatcaagctccag

SEQ ID NO: 173211 - DNA, 116 bp, Homo sapiens
agggaatctgggaagaattgcaaagtctgtatctttagtaaggatgggaccttgtttgcctggggcaatggagaaaagccaacctctaccccaccgtaggcctgcagacacctggg

SEQ ID NO: 173212 - DNA, 75 bp, Homo sapiens
caccagtttccggacagcttcgtgctgggtggtttcagacaccctcacaggttttctaccatgcagcaactgaac

SEQ ID NO: 173213 - DNA, 110 bp, Homo sapiens
ctcgggtagaggctgaggaaggccgtgttgtttgtctacctgggactaaatggaggctccagagtgaaattaatgacactttgtcgatgaagatcttgattgtgacctct

SEQ ID NO: 173214 - DNA, 98 bp, Homo sapiens
gagcctggggctggggccgcggtgctgaggacgcaaatgtgatgctttcttcacatgtcgaaaaaatgtccttctggcgaacagctcatccccccagg

SEQ ID NO: 173215 - DNA, 101 bp, Homo sapiens
gaaaaagtttttaaataccaaagacggaggagatgttaaagtaacccatcttgcaggacgacattgaagattggtcttctgttgatctaagatgattattt

SEQ ID NO: 173216 - DNA, 101 bp, Homo sapiens
aaaaccaaactcttggagaagctgttaagatattgtactccaagatacttggattacgaagatttggagcgcaagtactggaagaacttaacttttgtggc

SEQ ID NO: 173217 - DNA, 103 bp, Homo sapiens
gagaatacacacatcacaaagatcctggaatatataaatgtgttgtttgtggaactccattgtttaaatggactagaggcttttaccagatttcttaaaactg

SEQ ID NO: 173218 - DNA, 110 bp, Homo sapiens
ttgtgatttcacctgggcagggacagattgcagtatccgggatccagttaggaaccttcacccccccaaggatgaaggacccaaggtttaattggttggggtcagataag

SEQ ID NO: 173219 - DNA, 74 bp, Homo sapiens
acctaccccagcggccagatcggcttcatgctgtgcagcaagaacccggacacaactcagatgggaagttcatc

SEQ ID NO: 173220 - DNA, 75 bp, Homo sapiens
cagttgttgaaattgtccccgcagttttcaatcatggaagcagaatctggtaatataagtcaaaagtctgatgaa

SEQ ID NO: 173221 - DNA, 50 bp, Homo sapiens
caggaatcatgggctatcaaaggtggtctttgggaagaagcttcctgcct

SEQ ID NO: 173222 - DNA, 105 bp, Homo sapiens
taaagatggcggcttcctagtgagtcggcggctgatttagaaggaggttcaggctacggtgagccgaagatgtctggcgataaagggatttctgccttccctgaa

SEQ ID NO: 173223 - DNA, 90 bp, Homo sapiens
gacaactgcaagggggaagtagagagataacaaaagctgctcagagtctcaatgaacttgagtaccatgtaatttccactttcaagagga

SEQ ID NO: 173224 - DNA, 82 bp, Homo sapiens
gggtgagagatgtgatcactggtttcgtggcctgaccaaggacctccaaggaccctgatgctcccataagacagaaaatgcc

SEQ ID NO: 173225 - DNA, 83 bp, Homo sapiens
cgttcttgcctcaggccagtcgcctccaggccaagagggatccttcacccgtgtctgatgatatcatcaagttgaatcgaaag

SEQ ID NO: 173226 - DNA, 80 bp, Homo sapiens
aacgtgcgggaagagaagatcatcgagcatttcaaacggcatcaagcatgatggaaccatgtgtgatacctgccgccagc

SEQ ID NO: 173227 - DNA, 50 bp, Homo sapiens
tggataatataatcaactcctctgcctgtttggtcgcccaactcacattg

SEQ ID NO: 173228 - DNA, 99 bp, Homo sapiens
cgctactgcgcgcgcttctcctacctctggctcaagttttcacttatcatctattccaccgtgttctggatttctctatgaatcatcatcaagaactct

SEQ ID NO: 173229 - DNA, 51 bp, Homo sapiens
cactgacctgggacagtgaatcgaacgtcaaggtcgtgggaaataaaaggc

SEQ ID NO: 173230 - DNA, 73 bp, Homo sapiens
gtacctgatgcactggccttatgcctttgaagtgatagattcgtgtggcctttcaaatgattgtgaagtggtg

SEQ ID NO: 173231 - DNA, 100 bp, Homo sapiens
ctggcggagggtctgaggcggcgcggccatggctcacctccggggatttgccaaccaggaagcaatgaggctccccaagaacacacctgaggaaaaggac

SEQ ID NO: 173232 - DNA, 100 bp, Homo sapiens
gaggaaggactcctcgctctatatagtctgcgggccaggcatcgacatccgcaacgactatcagcagctgaagcgcctggagaactgcacggtgatcgag

SEQ ID NO: 173233 - DNA, 89 bp, Homo sapiens
gcggccgcggagacctacctgcggcgtcggcagctgctgctccgagattccagaggggtgactaccatattgatgtctgtatcaatgac

SEQ ID NO: 173234 - DNA, 76 bp, Homo sapiens
gaagaccacaataaaagagacctctacttagctcagcaattcttaccttgagctttcaagttgtggatggaataaa

SEQ ID NO: 173235 - DNA, 50 bp, Homo sapiens
gaacagatctttgactgggtagagatttaaggaccatagtacagctatgg

SEQ ID NO: 173236 - DNA, 100 bp, Homo sapiens
ggcggggttggcctaggcgaagatccggactctgggtgttttgctaccgtgaccgtttaggtgacaacatccgggaattcttgctgagcctcagatactt

SEQ ID NO: 173237 - DNA, 100 bp, Homo sapiens
cagcgggctccgtttcgtctccagaaccctggacagctcctccaggccaacgagacttttgcttttgtgggcaacgtgactcactatgcccaggtctggc

SEQ ID NO: 173238 - DNA, 98 bp, Homo sapiens
ggggtggcgtggcaagccggactaaggaccggggacttcttgattgaggtcatcaacgggctggtgcagaccaccggctggcccagcgtcgtcacctg

SEQ ID NO: 173239 - DNA, 82 bp, Homo sapiens
aggaacctgcttttcccaagaggagagaatggctgctgggtacctgccccgctggtcccagaaaactttagaaactgttcct

SEQ ID NO: 173240 - DNA, 96 bp, Homo sapiens
gggccctgaggtgcggatggcgaatgcagatgccaggaacatgggcgcccacagatccatgatgtgcagttctctggagcaggcgctggctgtgct

SEQ ID NO: 173241 - DNA, 100 bp, Homo sapiens
aaaacagcaggcacccaagcgggcggcagtacaagccagctgccatgttgtgagcacataccacatagctccatggagatgcccatgtgactgtgatgaa

SEQ ID NO: 173242 - DNA, 98 bp, Homo sapiens
aaaaagagagtcccttctccagtgaagaggaagaagaagatgtgcctttggactcagatgtggaacagctatactgtgatgtgtgtcccaaaacatgt

SEQ ID NO: 173243 - DNA, 90 bp, Homo sapiens
cgatgaggataacatccctccagaagatggttattccaatgttgcaggaatttataatcaacagattgggacgtgcattcattgaaccac

SEQ ID NO: 173244 - DNA, 75 bp, Homo sapiens
tgtttgagaaaaggcctaagaattttggcattgcaggaacgaatgcaggaatttgggaactgagctgtgcaagtg

SEQ ID NO: 173245 - DNA, 75 bp, Homo sapiens
tcccgaaaaggagaacttcttaagaagagtgcggatgtgatgctggtacaacccagagtagaatttattctgtct

SEQ ID NO: 173246 - DNA, 100 bp, Homo sapiens
gaccttacgatcagccattgtttacatcgggaagcatcaatccggagtaactggcaagcagtatcctagaaggaaaacatcaccatggctacagaaattg

SEQ ID NO: 173247 - DNA, 100 bp, Homo sapiens
gaagaaggatgagttctccaccaagtgcaaccagacggaccaccacaggatgtccggcgggaggcaggaggccgaatcccgccgccgctcttcctctgac

SEQ ID NO: 173248 - DNA, 100 bp, Homo sapiens
cgagcgcgtgtcccgggccctggccgagctgggctacgagcggaccccgtcccagtgccgggagcgcatcaagatctttgaccatcagtctgtgacctgc

SEQ ID NO: 173249 - DNA, 118 bp, Homo sapiens
gccgggcggggggcccgggttcgccgagccgcaggagagacacgctgggccgaccccagagaggcgctggacaggtggagattctggacgcaaagacaagggagaagctgtgtttctt

SEQ ID NO: 173250 - DNA, 83 bp, Homo sapiens
aaaagaagcccaaagttttaaagagttcttggagtctctgcggagtccctgggccagatctcacagtgaaagctgcaggatct

SEQ ID NO: 173251 - DNA, 89 bp, Homo sapiens
ccattcccgggaggggggagcggcgttggaggccaccgtttccaggtctgccatcatggatgttctcgcagaagcaaatggcacctttg

SEQ ID NO: 173252 - DNA, 100 bp, Homo sapiens
ctctgaaggcgaacgcttcgctggccatttaggagctctgctcaaagccagacgatcaacagtacaaattctgaagtttgtaaacttgctgatggtggtg

SEQ ID NO: 173253 - DNA, 100 bp, Homo sapiens
cgccatgccctccagcggccccggggacaccagcagctctgctgcggagcgggaggaggaccgaaagccaaactgattatccaccagacactcagcgtct

SEQ ID NO: 173254 - DNA, 83 bp, Homo sapiens
ggaaaatgcgctcgggctggaccagcagtactatactggcaattgctggagaagattttgcaattgttgcttctgatactcga

SEQ ID NO: 173255 - DNA, 100 bp, Homo sapiens
ccgaggtgtgggaagacatcaagcttccagcatagagaacaagcaggactggataaagcatatccgcgaagtcatccaggagcggacgatccacctgaag

SEQ ID NO: 173256 - DNA, 100 bp, Homo sapiens
tagcaggaatgcttactgttgcgtggttcgttattaacagttttctggatatgccgcagaaggatccgtgccagaagcaagcctgtgagatacagaaatg

SEQ ID NO: 173257 - DNA, 83 bp, Homo sapiens
aagagattcagccagcacactcctcgcgagcaagtatatttaaagttggagttcgttgctaaagatggcagacccagatgtcc

SEQ ID NO: 173258 - DNA, 100 bp, Homo sapiens
cgaagactggcaagcacggccacgccaagatacgtgcttttcaacatgccttcagcactaatgactgctccaggaatgtctacattaagaagaatggctt

SEQ ID NO: 173259 - DNA, 75 bp, Homo sapiens
tgtgtaaacaactagagaagattggacagcaggtcgacagggccctcctcgccaaagacagcctagagaggacgg

SEQ ID NO: 173260 - DNA, 80 bp, Homo sapiens
accctggagcctcagttggaagcagccgatccagcctgcggagcctgtggggcaggtctgttgcggttctcccacttttc

SEQ ID NO: 173261 - DNA, 98 bp, Homo sapiens
gaaagtggtgaatcccctgtttgagaaaaggcctaagaattttggcattgaaaaaaccgggaagatcctgacggagttcctccagttctatgaagacc

SEQ ID NO: 173262 - DNA, 73 bp, Homo sapiens
tttgtgaaaggatttggtggaattggaggtgaaatgacaatggatgctctgttggctcgattgaaacttctga

SEQ ID NO: 173263 - DNA, 74 bp, Homo sapiens
tggtgtaccaggcgaagctggccgagcaggctgagcgatacgacggggaacgcccttttgcttgtgactggcag

SEQ ID NO: 173264 - DNA, 90 bp, Homo sapiens
gaaggagggtcctctcagtgattaaggaactcgaatcatttatgacagaaagtttctgttggatcgtcgcaattctcccatggctcagac

SEQ ID NO: 173265 - DNA, 75 bp, Homo sapiens
ggaggcagtagccaaacacccaggaccctatgtactcggaactgggcttatcttgtacgctttatccaaagaaat

SEQ ID NO: 173266 - DNA, 100 bp, Homo sapiens
ctggcctgcggcgcctgggcgctctgagattttagtccatggagaacagaatgaaatggccagattgaaagcagcactgattcgagaatatgaagataac

SEQ ID NO: 173267 - DNA, 50 bp, Homo sapiens
ggtaaatggcttccaaactgcagagttgatccctgaattttattatctcc

SEQ ID NO: 173268 - DNA, 100 bp, Homo sapiens
gaacaacacagagtcctttgctgtcgcactctgccacctcgcagagctacacgcggagcaggtggctccgctgccggatgggagtgccccagtgtgctgg

SEQ ID NO: 173269 - DNA, 98 bp, Homo sapiens
gtcctaccatggtatttgctaacgtttagagagtgcttccccttgccgagcactgggtcttcagaactactagcagataatttggggggacttcatat

SEQ ID NO: 173270 - DNA, 100 bp, Homo sapiens
gcctcccaaagtgctggaattacaggtgtgagccacggcgccgggccccctagggattttcagatctctgaccttacttataagagagattctgtctggc

SEQ ID NO: 173271 - DNA, 83 bp, Homo sapiens
cgctggcagccgcggatctcaccgccgctcagggtcatcatcagatttgaaatatttaaagtggatacaaaactatttcagca

SEQ ID NO: 173272 - DNA, 73 bp, Homo sapiens
tacgatgagaactggttctacacgcgagctggtgaaagaaaatggcccgaaccaagcagactgctcgtaagtc

SEQ ID NO: 173273 - DNA, 75 bp, Homo sapiens
ctgaacgtctggatggtggagaagagcagttgaaaacgaggcccactgcgactttgtgaagctgcgggagatgct

SEQ ID NO: 173274 - DNA, 50 bp, Homo sapiens
ggacaatggtcaccgtctcttcaggttttgagcaaaattttggactgtga

SEQ ID NO: 173275 - DNA, 80 bp, Homo sapiens
gagctaatagcatcggttccaccagtgcctcttctgtccccaacacagagataattgacgaccttgccaacctagtggag

SEQ ID NO: 173276 - DNA, 90 bp, Homo sapiens
ctttcaagagacctttgagaaagtgcagccacctcccaccacacaagattagaaaagcacttgggaagcccattaatcttgccggcgttg

SEQ ID NO: 173277 - DNA, 82 bp, Homo sapiens
aggtggtgattccctgcggtgtgcaagtccgactggaacagctgtcgcctggttgggcccggaaatgggacgtcgcgctttc

SEQ ID NO: 173278 - DNA, 75 bp, Homo sapiens
tggccggagcggcccgcgcctgggctgccggcacttcgcggcagggagaatgaagttgaagaggtaaaagaggag

SEQ ID NO: 173279 - DNA, 82 bp, Homo sapiens
gaggatggatctttataagagaggaattccccctgctagtgctgggattacaagcgtgagctaccacacccagcgaggaagc

SEQ ID NO: 173280 - DNA, 100 bp, Homo sapiens
ctaagacgccaggacccactggaagcctagaaatgataacttctttgtggatgattatgctagatttactatcttggattcccaaggcaagactgctgct

SEQ ID NO: 173281 - DNA, 110 bp, Homo sapiens
cctgctgattcctgcagcctcctatgtgctcccagaggggcagccattttggggggtgctgatggatacctgcggggtcggctatgttgccctgggggaggccggccccg

SEQ ID NO: 173282 - DNA, 135 bp, Homo sapiens
gattgtggaatttcacagaggaggaagtctcagaacgagtgacacttcacatttgtgcttctacaaaaaactatacacagaatgggattttacatatgctggacagaaataagagaatcaagccccggccagaaa

SEQ ID NO: 173283 - DNA, 100 bp, Homo sapiens
cccgcccgcggcaaacatggcggtggactcggcgatggagctgttatttttagatacttttaaacacccgagcgctgagtagagacggggtttcaccgcg

SEQ ID NO: 173284 - DNA, 100 bp, Homo sapiens
cgagcgcgagcggcgcgagaaattttgagtatccgaggagcccaggaggaggaacccacagacccccagctgatgcggctggacaacatgctgttagcgg

SEQ ID NO: 173285 - DNA, 102 bp, Homo sapiens
aagcgcacgggcctcgccgccagaacgtgagaaagatcagtctaaagaaaaggagaagaaagtgaaaaaaacaattccttcctgggctaccctttctgccag

SEQ ID NO: 173286 - DNA, 98 bp, Homo sapiens
ggaggccttcgactggctgcttggggagattgagtccaagttcaaccaagccattgtcaatgagctgaaggagaaaggcaacaaggccctgagcgtgg

SEQ ID NO: 173287 - DNA, 97 bp, Homo sapiens
tgaaatgtacacagaatatctctccagtgccttcgtgggtctgtccttccctactgtttgtgaacggagtctctctgtcacccatgctggagtgcaa

SEQ ID NO: 173288 - DNA, 115 bp, Homo sapiens
gactctccttgcttggaattctgcccactctgcggagttagcagtcacgacctccagcacagtgaaagatgtcatgtatatctgcccatttatgggagcagtgagtggaaccctg

SEQ ID NO: 173289 - DNA, 100 bp, Homo sapiens
ggagccggcgtgcgagcggcaggtaatcattaccaaatgaggaggaaaggacgatgtcatcgaggctctgcagcgaggcatccttcttccccatgcagtg

SEQ ID NO: 173290 - DNA, 75 bp, Homo sapiens
ttctcagcctccataattgagtgagccaattccctgacttgtgcaccatggacaattttgctgagggagatttca

SEQ ID NO: 173291 - DNA, 101 bp, Homo sapiens
gccaccgggaagccagcctcagggactgcagcgacccccaaacacccctcccccagtgatgacgacattgtatttgaggactttgctcgccagagactgaa

SEQ ID NO: 173292 - DNA, 82 bp, Homo sapiens
ccgcctcgccgcagtcggggcagccgctcgcccctcttttccatgtatccgtccagatcttgatgtggaagaaatggaggac

SEQ ID NO: 173293 - DNA, 82 bp, Homo sapiens
gcagtttgaggagctgctgcgcctcaaagccaagtgcagcagtgatcaatggctctcagcatccatcatcatcgtcgtctgt

SEQ ID NO: 173294 - DNA, 80 bp, Homo sapiens
aagatagtgcctttcagccctaccagaacattctagtatgccagtagaaaaaaatatcactttagaaaggccttctaatg

SEQ ID NO: 173295 - DNA, 51 bp, Homo sapiens
gcatggattgggagatactgggcaacctaatgaggcctctcttgaattatg

SEQ ID NO: 173296 - DNA, 90 bp, Homo sapiens
gaggcaaggagctaaagcagcgtgcgttcagccctggggcattgaatgccccagaggagcccgaaacctcccaggcttggtgcaggaagg

SEQ ID NO: 173297 - DNA, 100 bp, Homo sapiens
ttccacagatgcatatggagagctactgcatgcccagcaccattcctaggctgggagcaaaacggaaggacattccccaagaagggccaaacgtgtgtgg

SEQ ID NO: 173298 - DNA, 83 bp, Homo sapiens
ttagcaaaagttcatctccttctgcatccttaactgagaatgagggatttcagtcataatcggttgtctaactggaacatcag

SEQ ID NO: 173299 - DNA, 100 bp, Homo sapiens
ttgctggatatccaagcctctcagcttcggagaatggagtcttccatcaatcatatctcacaggctaaagcgagcagtcctcagggttttgatgtggatc

SEQ ID NO: 173300 - DNA, 110 bp, Homo sapiens
gttaaacgttctaaaaagaggcgaaaggaagcaagcagttcagaagagccaaggaataaacatgcaatgaacccaaaagggtaaaagaatgtcacatgtcagcatttgta

SEQ ID NO: 173301 - DNA, 80 bp, Homo sapiens
ggacaagtttgcagatcgggagcgcaaggtcgccctcaaggccatgatcaaaacagttgaagtattgataacaccaagga

SEQ ID NO: 173302 - DNA, 100 bp, Homo sapiens
gggaacctaaattattctgcaagacaaagggaagaaataaaattttcccatactgataactctcaggagccttctccgcagttggcttcctcggtagctt

SEQ ID NO: 173303 - DNA, 82 bp, Homo sapiens
cgagcgcggggaacccacggcagtgtctgtgcctgtgccaggctgcaggatgggagtcccagcttctggagacggggttcct

SEQ ID NO: 173304 - DNA, 74 bp, Homo sapiens
aggaattgccccatagccttcacagaatggggtttctgttgaaccagtctggtcaccgtcactcccattcccac

SEQ ID NO: 173305 - DNA, 98 bp, Homo sapiens
gtccatccatttcgtggttcacccgctgccgggcaccgaggaccagctcaatgacaggaacattttagtggacaaaccaaatgaccaatcttcaagat

SEQ ID NO: 173306 - DNA, 100 bp, Homo sapiens
caacaagggaaggtgacatgaaaggagctcagacaatttctgtccagcaacatgacagcaagctcaggctgctcatgcccagacctacgatttagtatgg

SEQ ID NO: 173307 - DNA, 98 bp, Homo sapiens
gggccgtgctgcttatggcggcgctggagagggggcgctgagctgttgggggcctgaaggggctctttttgaacattcagtggagacaccccttgtca

SEQ ID NO: 173308 - DNA, 90 bp, Homo sapiens
gttccttggggtgaccaacaccattgactaccacaaaaccttggcgatgatctgtctgctgtgcgtccggaccgcgtcctctgtggacat

SEQ ID NO: 173309 - DNA, 83 bp, Homo sapiens
ggggagagctgtttgtgggccagctgccctctgaggagatggtcatgacaggtgcgcgcggagccatggttatcatgtcggag

SEQ ID NO: 173310 - DNA, 75 bp, Homo sapiens
ccctggagcctcagttggaagcagccgatccagcctgcggagcctgtggggcagctacagcagcacctgcggagt

SEQ ID NO: 173311 - DNA, 78 bp, Homo sapiens
aaacagagagccctcctctggtcaggaaactgagatccaacaggaaaatcgtgaagtcgatagaaatgaaggcctgaa

SEQ ID NO: 173312 - DNA, 83 bp, Homo sapiens
cggaggtctcatctttgaactactgccggagcttctgccaggcaagcgcctccaaggtttgtcttgaagcatagctccagctg

SEQ ID NO: 173313 - DNA, 100 bp, Homo sapiens
gttctgatggagagatatttgaagttgatgtggaaattgccaaacaatctgtgactattaagaccatgttggaagagtcttgctctgtcacccaggctgg

SEQ ID NO: 173314 - DNA, 76 bp, Homo sapiens
cgcgcagcatcttctgggagctccaggatgaatttcatcctttcatcgaagcacttctgccccacgtccgagcctt

SEQ ID NO: 173315 - DNA, 75 bp, Homo sapiens
catcgcggtcatcaagtactcttcggaaccaaaaagaagcttcccagagccggggccaggagccccaagcgccct

SEQ ID NO: 173316 - DNA, 51 bp, Homo sapiens
gtgtctgcaatgatagttggcaaggtgctgtacttctttgcagtatacaag

SEQ ID NO: 173317 - DNA, 75 bp, Homo sapiens
gcatttacagaaagagtcaacagcagtggcaacagaaagctgacttcatgagaccgaggatctcgttcgttgatc

SEQ ID NO: 173318 - DNA, 75 bp, Homo sapiens
caagaagatcatcattaaggacggaggcacgattaataaagaactcttcagaattcctggtgtttcatcatatat

SEQ ID NO: 173319 - DNA, 50 bp, Homo sapiens
gccaggaacacaacctcaccttgatcaggagcatattaatgaaaagtgcc

SEQ ID NO: 173320 - DNA, 83 bp, Homo sapiens
cgccggggccgctgcaaggggaggagagaggccgcctcagccaggcgggcaccacggcaggggctgagctaccctcatggaag

SEQ ID NO: 173321 - DNA, 101 bp, Homo sapiens
aacaattaagccattaaacctgagtcaagttgaagaatgtgaaagatgttgcagaagtgttccagaagtggctgaagatagaaggaaaaaagtgccactgc

SEQ ID NO: 173322 - DNA, 75 bp, Homo sapiens
acgacttttacatcatcacggagggcgaagctgtgctcaggcccgggctggacgcagagccagagctgtccccag

SEQ ID NO: 173323 - DNA, 88 bp, Homo sapiens
gtgcttcgggatggaaacctatggttatctgcagagggagtcatgctttcaaggacctcatattcttcaaacacctaaatgaaagtga

SEQ ID NO: 173324 - DNA, 75 bp, Homo sapiens
ctttccagcctcagtcggacgggcgcggagacgcttctggaaggagtgcgctacagccagcagggaaacaatgag

SEQ ID NO: 173325 - DNA, 90 bp, Homo sapiens
cgcaggtgggggccggcggggtccgtggccaggtgctggagaatctggtaaaagcaccattgtgaagcagatgaggatcctgcatgttaa

SEQ ID NO: 173326 - DNA, 85 bp, Homo sapiens
ctactacgaacaatggggaaagcttacagactgtgtggaaagtatgtgatggtgatgggagtggttcaggcctgcagccctgagc

SEQ ID NO: 173327 - DNA, 100 bp, Homo sapiens
tgcagctcaacttctaccagttcctcggggtgcagcaggttgggctcagatctgtgatagaacagtttcctgggaagcttgactttgtccttgtggatgg

SEQ ID NO: 173328 - DNA, 90 bp, Homo sapiens
tggtcggcggcgcccggatgggcagctgaggcaaacgaatgcacgtgcagttgtccaccagccggcttaggactgcgcccgggatgggag

SEQ ID NO: 173329 - DNA, 75 bp, Homo sapiens
ggaaaaacagctggcatggaagttgatgtagaacattctcatgttcgatttctgggaaacctggtattgaacctg

SEQ ID NO: 173330 - DNA, 80 bp, Homo sapiens
aagaagtctcatcttcctttgaccacgttatcaaggaggcctatgagagctacaagaagaaggactacacccaggtggac

SEQ ID NO: 173331 - DNA, 100 bp, Homo sapiens
tacaaccaaatgatggaatgcctaccgggttataagcgggttaacaacaccttttgccaagtacgaggatgtcgtccaggaaagattgtgcagatgactg

SEQ ID NO: 173332 - DNA, 75 bp, Homo sapiens
ggatttgttaaggattccaagtaactcttatttggtctccatcatcaccagttccagtagtgaaaaacagaaccc

SEQ ID NO: 173333 - DNA, 76 bp, Homo sapiens
catcatttccagaaaggacatcacagtgaagcggaatgactacgtgcacgccctggtggcctacttcaacatcgag

SEQ ID NO: 173334 - DNA, 89 bp, Homo sapiens
aagtaatacatgaagatgatgaaagaccttctgagaaaaaaacagattgtctcagtttacctagctttgaaaatgccatacccatggga

SEQ ID NO: 173335 - DNA, 100 bp, Homo sapiens
tggcttccggctccccccatctggctggaacacacatcagtcacgtggcaggttttaagaagcaaatggcagatactggaaaactgaacacactgttgca

SEQ ID NO: 173336 - DNA, 95 bp, Homo sapiens
cttcagcctcaccgtgtggaaggccggccgcaaggaggaggccaccaaccagacggtctccgatgatgacctcgacccatcctttactgtctcaa

SEQ ID NO: 173337 - DNA, 100 bp, Homo sapiens
agctgcggtgctctgccatattgtgtcttccccggccggtccctcgcctcccggccgagctgacgatatattcgactttatgggagaaaatttagcaaag

SEQ ID NO: 173338 - DNA, 50 bp, Homo sapiens
ggctgctgcaggagccattttaggaatactcccccagttgcaagaggcgc

SEQ ID NO: 173339 - DNA, 51 bp, Homo sapiens
gagactatgaaatattgtacttgtaccgccggaagcaccaggagctgcaag

SEQ ID NO: 173340 - DNA, 100 bp, Homo sapiens
cccgcaacgactgcccgggctgcgggaggggaggagagcagagaacgtccccagcctatatatgcaaacagatttgcagtaccaacctatgcagccaagc

SEQ ID NO: 173341 - DNA, 97 bp, Homo sapiens
ggcccggtcaggccccatactcaggacttcaaacaagtgtgaagaggctgtgtggcgagattgtggaactgaagcagcacctggagcactacgacaa

SEQ ID NO: 173342 - DNA, 127 bp, Homo sapiens
aacgagtcttcgccagcccaaaggcgactcgacaccgtcccagctgaagagaggtgctggagaatctggtaaaagcaccattgtgaagcagatgaggatcctgcatgttaatgggtttaatggagag

SEQ ID NO: 173343 - DNA, 75 bp, Homo sapiens
cttcaaggtggggttggcatcccccacatacggggccacatcagccagcagcctcctccaaggcctcagcttcag

SEQ ID NO: 173344 - DNA, 98 bp, Homo sapiens
agaatttgaaaaatgaagatgatgtagacactggactattaggtatagtggaggattacaagccaccgttctacgatgtggttcccaatgacccaagt

SEQ ID NO: 173345 - DNA, 100 bp, Homo sapiens
ccgatctcagccttgctgatcatctcgtacagcagcagaaaatgaccatgttacaggcaactttttcctgtacctgtgaggagcagtacgtgggtacttt

SEQ ID NO: 173346 - DNA, 100 bp, Homo sapiens
caggggctggagcaagaggcagagaacaagaagcgttcccaggacgacagggcccggcagctgaagggtctcgagtttgtgatggacgcctctgacccca

SEQ ID NO: 173347 - DNA, 100 bp, Homo sapiens
atggctggacagctagctgcttatggctataaaattacagaagagcgtgttgtccccattgaagtttgccggtccaaactgtccaaatacttgcagggag

SEQ ID NO: 173348 - DNA, 75 bp, Homo sapiens
aagtatgctgcaagtgagaacatatttaacagttggctactcctggcttcccctcctgaaagacggaagggtggt

SEQ ID NO: 173349 - DNA, 100 bp, Homo sapiens
agcagatatgcctgctaacatggataagcatgccctgaaaaagtatcgtcgagaagcctatcatcgcatgcagccagtaaagatcccagagaagttcgag

SEQ ID NO: 173350 - DNA, 100 bp, Homo sapiens
tggcgcggccgccgggccccggggttgaggcgaggagcccgcgggcggccggtcgggcggggcggcggcgctgacagggatgtgcagatggaggtcggag

SEQ ID NO: 173351 - DNA, 82 bp, Homo sapiens
ccccctcctcccctggctggagtgccctgcctggagggagccctcctggctgggggcaaggctcgaatgctcatcacagaag

SEQ ID NO: 173352 - DNA, 51 bp, Homo sapiens
caggggatcctctctgctttcctgggccctgtggtaggaggctggtacaag

SEQ ID NO: 173353 - DNA, 80 bp, Homo sapiens
ggagaagaaactgaggcctggaatttgattaactcattcaaggttacccagttgacacgaatgcagagtttgagtccaga

SEQ ID NO: 173354 - DNA, 82 bp, Homo sapiens
tgaggaggcagctgcggtggcagctgctgagttctcggtgaagactcggtgaaatacctggagtgctcagctctcacccaga

SEQ ID NO: 173355 - DNA, 100 bp, Homo sapiens
ccgccttccggcagaagctggtcagtcaaatgggccctcctgctgctccctccatgaggctggtcctgaaggaataggcctgtggctcgtccctcctccc

SEQ ID NO: 173356 - DNA, 90 bp, Homo sapiens
atcatgtctccttcatcagttcattgagaataagtaggattgttttgaggtgaccagagaggccatgctccatttgggcattgacacccc

SEQ ID NO: 173357 - DNA, 83 bp, Homo sapiens
tacagaatggacccaccttcagtgtggaaattggtgaaagtgtacgtggagaggatgtctacattgttcagagtggttgtggc

SEQ ID NO: 173358 - DNA, 100 bp, Homo sapiens
aaggaaccttcattaacagatgccattccctctcacccaagaggttgcttagccagacaatgaaggatcatctagtaagagtagcaaatgaagctgaatt

SEQ ID NO: 173359 - DNA, 75 bp, Homo sapiens
gaggtggatgaggagggcaagtttgtccggctgcgcaacaagtccaatgaggtgacagagctgaatgaacctctc

SEQ ID NO: 173360 - DNA, 101 bp, Homo sapiens
gtcgagatcgccatgcctacccaatatgacagatacctagcatctagcaaaataatggcagctgcttaccttgaccccaacttgaatcacacaccaaattc

SEQ ID NO: 173361 - DNA, 75 bp, Homo sapiens
cagagtttgtagcctattggaggaaaacacaccaagctgatgttctaatcatgtcagataaagatgatattgaga

SEQ ID NO: 173362 - DNA, 73 bp, Homo sapiens
ttggtggggaaagcaagcattaaaggaatctcaggtattctctactgccgctgatggtcaaacgcaagtggaa

SEQ ID NO: 173363 - DNA, 110 bp, Homo sapiens
gttcgtgcagatggtggcggagctggcgactagaccccaaaacatcgagacgctgcagaacgcggatcaatgaactgagccatgttcaaatccctgttatgttgatgcca

SEQ ID NO: 173364 - DNA, 100 bp, Homo sapiens
tcagcgtgtcaaccactgggatattagcgggagtgaagggtctgactgcgtaccatgatatctccctggacaagtgctatgtcatcgaactcaacaccac

SEQ ID NO: 173365 - DNA, 83 bp, Homo sapiens
ccctgaatgagttgctaaccccccagggtcccagaaggaggcaatgtatatgcaactggtggaaataatgaaggacagttggg

SEQ ID NO: 173366 - DNA, 82 bp, Homo sapiens
attttgtaatggaagggcatggcaagactccacctcctggtgaagaaagcaaacacaaaacaagctatcgatcagggaagat

SEQ ID NO: 173367 - DNA, 75 bp, Homo sapiens
ttccctcgggaattccacctctgcgtttttccctccaggtgtggacactgccagcggctgcagccgacttggaat

SEQ ID NO: 173368 - DNA, 74 bp, Homo sapiens
tggggagcccttctgcgccacagaataatcatgggccagactgggaagaaatctgagaagggaccagtttgttg

SEQ ID NO: 173369 - DNA, 101 bp, Homo sapiens
gtggaagactctcttatgatagagtgttcagccagagatattttagttaagggtgtgggccgaagatatgctcatgtggtgttgaggaaagcagacattga

SEQ ID NO: 173370 - DNA, 97 bp, Homo sapiens
tgctcctcccggggcccttcccgggcaagtttggcaatgaggagcagcagctggcgtgggccaagcgggagagcgagaaggcggaacaggagaggct

SEQ ID NO: 173371 - DNA, 60 bp, Homo sapiens
gtgaaagccaaaaaggagaattctctctttcagggcaatctagagcagccatgatacctc

SEQ ID NO: 173372 - DNA, 90 bp, Homo sapiens
cacgaactgctttggagataatgatcctattgatgtttgcgaaataggctcaaagggttatgtaccgaaggactctaccgtgtcagcggg

SEQ ID NO: 173373 - DNA, 80 bp, Homo sapiens
gtaggagacaatgacttcctggaggtcagcaaattcaacacccaacagcttccttaatagcaaaggtagcaacagcccag

SEQ ID NO: 173374 - DNA, 101 bp, Homo sapiens
aaggagctaggattggagacctacaaagtgaatgaggttgagcgtctgatccaccatgtaaaggtcaaaatgcagatcttcgtgaaaacccttaccggcaa

SEQ ID NO: 173375 - DNA, 83 bp, Homo sapiens
cagcctccgaagtagctgggattacagggacaagaatccttcaagaaacaggaaaaaactcctaaaacaccaaaaggacctag

SEQ ID NO: 173376 - DNA, 95 bp, Homo sapiens
gcaagtatgttctcagaagctatacactcattatctgatacttgtaatcaggtggagaaggaacgtgataaagaagtaagcgatgatgaggctga

SEQ ID NO: 173377 - DNA, 100 bp, Homo sapiens
gggacagtgccggaggggcctcctctgctgcagacatctgactcagcccacctgcacccaggtgaaataaacagctttattgctcacacgaagcctgttt

SEQ ID NO: 173378 - DNA, 100 bp, Homo sapiens
ctgatcatcaagccagacaacttctggcagaaacagaggactaattttggcagttctaaatttgaatttgagggaaaatttgttggcagattgtttgcag

SEQ ID NO: 173379 - DNA, 75 bp, Homo sapiens
acagcggactccgaacccctcagtgccggatctgcttccagggcccggagcaggctggagtgcagtggcgcaatc

SEQ ID NO: 173380 - DNA, 83 bp, Homo sapiens
gtagcatagaagatgtggactacaatggaaaccttccagatctttgatggaaaacagattccacagagaatggttgatggatg

SEQ ID NO: 173381 - DNA, 75 bp, Homo sapiens
caacagagggacaacaaaagcctcctacaagagtcctaccaaaagtaggattattgactgtgcttttactgtcac

SEQ ID NO: 173382 - DNA, 75 bp, Homo sapiens
cagggaaccctggtcaccgtctcctcagagctcaggccccggggcctccagcggcaccagcggagaccacggtga

SEQ ID NO: 173383 - DNA, 83 bp, Homo sapiens
tgctcgtacagtctttagaagaatgcaccaatagccggatcgagctgggagatgtgacaccacacaatattaaacagttgaaa

SEQ ID NO: 173384 - DNA, 83 bp, Homo sapiens
ctcggttcgagatggagcgggcgcactgggaggtggaacgggccgaactgcaggatgtgatggtggcaggtgggatggagagc

SEQ ID NO: 173385 - DNA, 75 bp, Homo sapiens
ttcagcaggcaaccagacccagaagacacaaggtggacaagagcaaggaccaagtgtggaaggtcttaatgtacc

SEQ ID NO: 173386 - DNA, 100 bp, Homo sapiens
ttctccccaaaataaccattctccagatccagtccaatatcagatggaaatgatgcggagccttcgccatgtaaacattgatcatcttcacgtgggctgg

SEQ ID NO: 173387 - DNA, 100 bp, Homo sapiens
ggcgtggatagcctgaaggcagccattcaggagagacagcgtctggagaccatcctcagtctctgtgctgaatacacaaagcctgacagtcgcttatcta

SEQ ID NO: 173388 - DNA, 75 bp, Homo sapiens
ctgaattgggctgtggcagctggagccgaggatccagttcccatccgctcttgtagggtaattaaaaccatggag

SEQ ID NO: 173389 - DNA, 100 bp, Homo sapiens
cgtgccgcggcggctggcgctacgcccaggcccactccaccatcgtcagcgaggctatagaaagcgcaattggtggtaacgcttatcaacacagcaaagt

SEQ ID NO: 173390 - DNA, 142 bp, Homo sapiens
cggagtggggaagacctgcgtcctttttcgtttttcggatgatgccttcaatactacctttatttccaccataggtcttagaaaaataccccaatacacccatgagtcataaagaaattcttcaagttatccagagagaagg

SEQ ID NO: 173391 - DNA, 100 bp, Homo sapiens
gcgcagacctggtggaggtgttaaatgaaagtgtcagttgtacccgaggcgttctcagcagcagcaagtacctgtggtggatttccaggctgaactgagg

SEQ ID NO: 173392 - DNA, 73 bp, Homo sapiens
aggattcaagggaaccttccctgatgcggcagtcacccgcagggccaaggtggctcccgctgagaggatgagc

SEQ ID NO: 173393 - DNA, 100 bp, Homo sapiens
atccctggaaaatttatgggctatacagcatctggaacttctcctggtctctcagctggggccactgtcggcatcatgattggagtgctggttggggttg

SEQ ID NO: 173394 - DNA, 89 bp, Homo sapiens
cctgagcagctttcagcactggagattgaccgactcatcagtcacggggccgacatcctgaagcctgtaatgctcaggcagggagaaaa

SEQ ID NO: 173395 - DNA, 100 bp, Homo sapiens
tgtattctgaagacagcgccccagcatttgccatcttcaagtttgttcagggaaattcacctcttctatagaagagtttgttttgaactatacgatttga

SEQ ID NO: 173396 - DNA, 83 bp, Homo sapiens
agaacgtgtagccgcgtcccctccagtccgctccgggcagctgcggttggatttctcacgatgtccagtgttatctccatgtc

SEQ ID NO: 173397 - DNA, 97 bp, Homo sapiens
ggaaaagctgcaatctcaaataaaatcaccagttgtatttttcagttattacaggaagcagattttcagctgaactctcatctctcaacactggcaa

SEQ ID NO: 173398 - DNA, 98 bp, Homo sapiens
aataaggacatcatctgctataacctacaagcagttggacagagcaatgctaagaagacgtttggtttaaagaattaaaaggaagaacaacttaagag

SEQ ID NO: 173399 - DNA, 51 bp, Homo sapiens
taagccattttccgaatatacaggttcagtgtcacattctgaatgcagcac

SEQ ID NO: 173400 - DNA, 83 bp, Homo sapiens
gaaggaatcatcgaggcatgggggtccacactgcaatgtttttgtggaacatggaactgtggctgcaccatctgtcttcatct

SEQ ID NO: 173401 - DNA, 98 bp, Homo sapiens
caatatgtctcaagatggcggccaatgtgggatcgatgtttcaatattggaagcgctttgatttacagcagctgcagtactatactggcaattgctgg

SEQ ID NO: 173402 - DNA, 75 bp, Homo sapiens
ggcaaattaaagcaattatgaaagaagtcattccttttttgaagtgtgttgaagagatcctaggatacctgaaat

SEQ ID NO: 173403 - DNA, 100 bp, Homo sapiens
gaaaacctaaccatgaagacttgaacttaatacagcaagaaagaccatcaagtttaccaacaacgactgaaagacctttcattcagaagctgtttcgtcc

SEQ ID NO: 173404 - DNA, 80 bp, Homo sapiens
accattgacgccatgtcgggttattcgagtgaccgagaccgcggccgggaccgagggatgctccagaccttgtatgatta

SEQ ID NO: 173405 - DNA, 50 bp, Homo sapiens
cggacacacgccgtctctgtgtcagttgctgccaaacaaggtgaatccga

SEQ ID NO: 173406 - DNA, 75 bp, Homo sapiens
ccagacccttactgtaaatgtagagggcactaaaacattgccagatgatcaccctggtacctgacagtgtaaaga

SEQ ID NO: 173407 - DNA, 100 bp, Homo sapiens
cctgaaagcattaccgggttcgctaggctcacagacttgtcagcttgtgggaaagtgacatcagcgtccacccgctaaccctgccctctgcaacctgctt

SEQ ID NO: 173408 - DNA, 82 bp, Homo sapiens
gcagaggccatgctgacctacaagcagaagagattttgcaagaacgaggctcaaggatgtgagggacacagtattgacagct

SEQ ID NO: 173409 - DNA, 100 bp, Homo sapiens
gggagtatttccctcacaggatcctgctcagcccagaatgcctccttggatttacaatgagagtttggttccagaactcaagtaacttcatgaatactac

SEQ ID NO: 173410 - DNA, 48 bp, Homo sapiens
aggaaggaatatatcctgactgattagtgctcgtcttcgggccgctgg

SEQ ID NO: 173411 - DNA, 75 bp, Homo sapiens
gtgtggggaaggtagatgtcattcaagaaccagttggtcagaaaatacaatatggcctcaaggggtgctggtgcg

SEQ ID NO: 173412 - DNA, 76 bp, Homo sapiens
gatgttggttatgagagatttttgggacctgaaatcttttttcatccagagactgtggatattcataaggagaaag

SEQ ID NO: 173413 - DNA, 108 bp, Homo sapiens
gagagagcgagctgagtggttgtgtggtcgcgtctcggaaaccggtagcgcttgcagcatgcaattaatggatgcctcgaagttgacgtacatatatattcagaaatg

SEQ ID NO: 173414 - DNA, 75 bp, Homo sapiens
aagcgacaagtggaggcgccgctctagcggccgggactctgaactatggcgctatcagttgagggatttgcagtt

SEQ ID NO: 173415 - DNA, 74 bp, Homo sapiens
tcctgaaggagttccaccaggccgggaagcccatcggggagtaccctgacttctaccggaagctctacggcctc

SEQ ID NO: 173416 - DNA, 100 bp, Homo sapiens
agctccaggagttcgtctcttacgtctgcggaagtgcagctgcctcagttcttagcgcagatggcggctcagcggcagcgggcgctggccatcatgtgcc

SEQ ID NO: 173417 - DNA, 83 bp, Homo sapiens
cgcaaccattgacgccatgtcgggttattcgagtgaccgagaccgcggccgggaccgagggtatttaacatgaagtcgctcca

SEQ ID NO: 173418 - DNA, 75 bp, Homo sapiens
ctttgccctcagcatctcccttcatgtctgggtcatgagccgggcgccaatctcagccaagcttgttgcaaatat

SEQ ID NO: 173419 - DNA, 82 bp, Homo sapiens
agcgcggccgccgcccccgcctcagtgagacggtttaagcggaagcatcttactgccattgactgccagcatttggctcgga

SEQ ID NO: 173420 - DNA, 90 bp, Homo sapiens
ggctattggactgacttttcttatgctgggatgtgccttagaggattatggacatggagactagaccacagagcaaggattcaacttcag

SEQ ID NO: 173421 - DNA, 97 bp, Homo sapiens
gtattgcaagcaacagtagtcgctgttggatcgggttctaaaggaaaggaggatcgtttaaaaattgatgtaattgactggttggtatttgacccag

SEQ ID NO: 173422 - DNA, 75 bp, Homo sapiens
tggggtgaattttcttccaaaagagtccggggagtccaggaacggagctttgactgtaagatctgtgggaagagc

SEQ ID NO: 173423 - DNA, 90 bp, Homo sapiens
aatgctgagaaaacagacagatttgtcatgaagaaactcaatgatcgtgtcatgagaaaatgggatttgaccgatacaaaatggtggtgc

SEQ ID NO: 173424 - DNA, 100 bp, Homo sapiens
ctcggaggatgagctaccccctcaggtgcacaagtgcgactggctcaacaattaccacctgacctgcagggatgtgattgggaaggaattgcagaaacag

SEQ ID NO: 173425 - DNA, 90 bp, Homo sapiens
ggtgtgtcctgctccttgtttgcatgtctctgttttcagcagtcggtaacctggatgaggacatcattgcagaagagaacatcgtttccc

SEQ ID NO: 173426 - DNA, 75 bp, Homo sapiens
cctgaaccggcacctgcacacctggatccaggataacggaggctgggagtacaagcgcaagctagccagagtttc

SEQ ID NO: 173427 - DNA, 95 bp, Homo sapiens
acaccttcgccacccactattggaccagggcacacgtgtttcacgttgacaggtttgcttgggacgctagtaaccatgggcttgctgacttagcc

SEQ ID NO: 173428 - DNA, 89 bp, Homo sapiens
ttgggaacgaggggtgaagcggcccaggtgaggaaactaattctgaagcaagcccttatagttgtgctgcagtggtgtttcaatcacaa

SEQ ID NO: 173429 - DNA, 75 bp, Homo sapiens
cgcagatcctgagacccggacagtggcagtgaaacaggaaaagctggaacgggtgatcctagggagtgaggctgc

SEQ ID NO: 173430 - DNA, 100 bp, Homo sapiens
ccaagagacaggcagctcaccagggtggacaaatcgccagagatgtggtacacatttaatgaggatgagggggagcttccggagtggtttgtgcaagagg

SEQ ID NO: 173431 - DNA, 100 bp, Homo sapiens
cgcgcgtcccgagcatggcaggctccctgcctccctgcgtggtggactgtggcaccgggacccattccaacaatctcgtaaaacatggtggattactatg

SEQ ID NO: 173432 - DNA, 75 bp, Homo sapiens
gagctgtctcgagctgagccccctaccgggccggatcccgaggaagatttcgatgtcgatcattttgtgtctgac

SEQ ID NO: 173433 - DNA, 100 bp, Homo sapiens
tctttcatcattaagaaatcaggaatccaaaaatccttgtggagtgtcttactcctgattttcgaggtgatctcaaagcaatagaaaaagttgctctgtc

SEQ ID NO: 173434 - DNA, 100 bp, Homo sapiens
tgaccgacaggcagacggactcggtattggagctgaaggcggcggcagagaacttgccggtgccagctgagcatctagcctgattccaactcaaacaacg

SEQ ID NO: 173435 - DNA, 101 bp, Homo sapiens
gttgaattgccatggctgctggaagaagtctcaaaaagctcccgactagggacaatgactcattcttcccaggacactggttcttgtggcattcaggaaga

SEQ ID NO: 173436 - DNA, 96 bp, Homo sapiens
agcctgggtctcagccccgcgtacggcctttcacgagtcttcaagccttcagactcctgctttgaacttgctgtgggagaagtgttgcagtgacaa

SEQ ID NO: 173437 - DNA, 90 bp, Homo sapiens
acatcttcatcatcaaatgcagccgagagacagagaaggctatcttagcggcacagagacgaggagaagatgtggagacttccaagaaat

SEQ ID NO: 173438 - DNA, 100 bp, Homo sapiens
aacaatgtccagcagctgttgaagttcttaacctagtagcccaggaatgtagtgctgataacaacgaacttgatgcaagtgataggtttgccaaggtcag

SEQ ID NO: 173439 - DNA, 137 bp, Homo sapiens
tactggatcgacggctccaacagggatgcgctgagcgatttcttcgaggtggagtcggagctgggacggtttattacccagaactctttgtctgggtcagtcaagaaccatttccaaacaaggacatggagggaagg

SEQ ID NO: 173440 - DNA, 83 bp, Homo sapiens
cttagccctctacttttcaagacaccaagtgagaggccaaccaggctgcctgctgtttcccggggagatcatgaaacgaggtc

SEQ ID NO: 173441 - DNA, 100 bp, Homo sapiens
aagttcgggatgtggaaaagagctttatgtctagcaagcacatctttgcactctttaatacagagcaaagttccagggagtttggctccgttgactattg

SEQ ID NO: 173442 - DNA, 104 bp, Homo sapiens
cctggatcccagctttgtggctgccgtcatcaccatcaccttcaatccgctctactggaatgtggagcaggggagagaagacagaagaggttggagaggtcagg

SEQ ID NO: 173443 - DNA, 90 bp, Homo sapiens
agtggggctcagggccagtgctcactcttattgattaagcctgatcaagatgacaacctcccaaaagcaccgagacttcgtggcagagcc

SEQ ID NO: 173444 - DNA, 82 bp, Homo sapiens
cagacgcagacctcaagggccttctccagcggctggagacagtatcggacaatgcagatcttcgtgaagactctgactggta

SEQ ID NO: 173445 - DNA, 75 bp, Homo sapiens
cacgatgttgaacatgtggaaggtgcgcgagctggtggacaaagcgggcaagattcttgccaagagaattaatgt

SEQ ID NO: 173446 - DNA, 100 bp, Homo sapiens
cctcgccccttgcaacaaaggcagactgagcgccagagaggacgtttccaactcaaagtcctctcagggtgcgccatcattgtccgaggtcagcctcgtg

SEQ ID NO: 173447 - DNA, 123 bp, Homo sapiens
ctgaggacccgcggccagtgcgggtggctggctttgccattagcgggggcctttcctgaggacggcgtacggagtgtggaatcctcactatggatgggctcattgaggacattaagcatcggc

SEQ ID NO: 173448 - DNA, 82 bp, Homo sapiens
ggccgccctgggccgggccccaccggacggtgctgggcgtcctcttctttgccatagcctgcttcttatacaagcccctgtc

SEQ ID NO: 173449 - DNA, 83 bp, Homo sapiens
cgagcagccagtgctccaagcccggtgtcatgtccttcacagagcagctcagaaagatctcgagagacgccggcatgcccatc

SEQ ID NO: 173450 - DNA, 87 bp, Homo sapiens
gaccatcaggatgtcgtattttggggagcatttttgggtttgttgataagccggggcccttcgtgggaccctgcggtcactggatca

SEQ ID NO: 173451 - DNA, 100 bp, Homo sapiens
ttactacttcctaggcagaatgcttggaaagttactccacaggatccgctgaacataggatgttgccacaaaatctacctcgtgtatttttctctttcac

SEQ ID NO: 173452 - DNA, 100 bp, Homo sapiens
ttgcacttcagttcacatactatttatgggaagacaactgttagttttgtggcttactgctgctccacccagtgtctgcagacttttgacctgctgagtt

SEQ ID NO: 173453 - DNA, 75 bp, Homo sapiens
cagcagatggccagtcacgagaacccagcccctgtcaaagggaacaggaagcagtccacggagggtgacgcccta

SEQ ID NO: 173454 - DNA, 100 bp, Homo sapiens
tcaccaagagggcgggagaactcactgaggatgagtaacaaatgtggcaattattttggatctatcacctgtcatcataactggcttctgcttgtcatcc

SEQ ID NO: 173455 - DNA, 100 bp, Homo sapiens
aaatatcttcgagctgaacctgaggaccattattttttaatggatgaatattctatctttcctcagacatactccatagatattaatggctatattcttg

SEQ ID NO: 173456 - DNA, 100 bp, Homo sapiens
gtgccaactgtaagtctccaatacagaagaatgaaggctgcaatcacatgcagtgtgctaaggttggactccatgaaagaattgcacaaaacaaatcgac

SEQ ID NO: 173457 - DNA, 99 bp, Homo sapiens
cctcgctcttctgcgacttgtctacgccgctggcccagttccgcgaggacatcacgtggaggcggccccaggtggtggtgaagtttattaagaaggaga

SEQ ID NO: 173458 - DNA, 87 bp, Homo sapiens
aagcagaattatacctagaagtctactaatggacagttagtcacccacctacatgttgaggacccagatgatgtggtaccagttggc

SEQ ID NO: 173459 - DNA, 75 bp, Homo sapiens
cagataactggcaaaggtgcttcggggacattccaggttcctcaagccaggacctacgcacctgttgtgagtggt

SEQ ID NO: 173460 - DNA, 97 bp, Homo sapiens
gaaatcagtccttcctttccgacttagtcctcgggaagaagtttcagactacaaggtgatgcaggttctgaatgctgatgccattgttgtgaagctg

SEQ ID NO: 173461 - DNA, 100 bp, Homo sapiens
gcggcggcggcggcggcggagtgtaggaagaggcactgctgagggggcgcgaggggaacggaggccagagctgcgaataccctctaccatctgctttggt

SEQ ID NO: 173462 - DNA, 73 bp, Homo sapiens
gggtgaagtgctccgtcgcccttgcctccaggaagatgagaatgtgcctactgctcctgatcctccaagtcaa

SEQ ID NO: 173463 - DNA, 73 bp, Homo sapiens
aaccttcgatctcctgacgactgctggctccaaccagaaaagggatttatatggggcttccttggacctgtct

SEQ ID NO: 173464 - DNA, 51 bp, Homo sapiens
caggagtcgggcaccatcccaaagaagcgggacaacctaacagatgctgag

SEQ ID NO: 173465 - DNA, 100 bp, Homo sapiens
gaatcctgccaatacccgcagcatttccaacatgctcccctcccacccggtcactccgtccagcaagcacgcagacagcaagcccgcgccgctgacgccc

SEQ ID NO: 173466 - DNA, 90 bp, Homo sapiens
gtgagctctatttctacccaggctgctgtcgtcgtgggagccaacggattgctgaggagctctatactaagggagatcggacaaaagatg

SEQ ID NO: 173467 - DNA, 88 bp, Homo sapiens
tcaagcaaagaagagttgagcacaatcagattgcattcacaggaactacttttattggctatgtaggattatggactggccagagccc

SEQ ID NO: 173468 - DNA, 97 bp, Homo sapiens
gtgtgagacaatggtctatcaccccaacattgacctcgagggcaacgtctgcctcaacatcctcagctatgtgatgcgcatgaaggagtttgagcgg

SEQ ID NO: 173469 - DNA, 75 bp, Homo sapiens
cttggacgattccagccaatgaagctgtttgctatatgcctgaatcaaacgttgggaattcaagcatcctcagcc

SEQ ID NO: 173470 - DNA, 75 bp, Homo sapiens
gcagatctgggacacagcggggcaggagcgcttccgcaccatcacctccacgtatcatgatattagctggtttga

SEQ ID NO: 173471 - DNA, 82 bp, Homo sapiens
attctcctccgaaccccttcatgcccaaatcccggaaactccagcgtgtctccagccgtggggaacgcccttttgcttgtga

SEQ ID NO: 173472 - DNA, 75 bp, Homo sapiens
gcgaggagtcagaaactcagccactggttgccttggtaggcaataaaagaaagtgtgctgtgttgtcattcaagg

SEQ ID NO: 173473 - DNA, 75 bp, Homo sapiens
cgcgaggcgcgcgccgcgcaagtcttcttcctcaaaggtgtgcaagccccgtaacccctgcacggatgggaccca

SEQ ID NO: 173474 - DNA, 100 bp, Homo sapiens
gtcaactcaaatgcaagtccaagaggaggaggaggcggaggtccaagcggaaaggaagatgatccctatgatcttgaagatgtttctgcacagaaatgag

SEQ ID NO: 173475 - DNA, 137 bp, Homo sapiens
tggctccctgggccagggcctcggggccgcttgtgggatggcctacaccggcaaatacttcgacaaggccaggatgctataaaatcaccacggtctttagccatgcacaaacggtagttttgtgtgttggctgctcc

SEQ ID NO: 173476 - DNA, 75 bp, Homo sapiens
ggcgaattactactttggtttcaatgggtgttccaaaaggatcatcaagaacttccagaactcgggacaactcag

SEQ ID NO: 173477 - DNA, 98 bp, Homo sapiens
ggccaagcaggtgaccatggcagaactgaacgccatcattgggatggcgttcaggaagtggcttatattcactcaaaccagaatgtaattggatcgag

SEQ ID NO: 173478 - DNA, 100 bp, Homo sapiens
tgtcacggctgcggatgctgctcaaggccaagatggacgccgagcaggatcccaaggtcaaccagaatcaagatgtctgggactgaggaagcaattcttg

SEQ ID NO: 173479 - DNA, 83 bp, Homo sapiens
tttgagattgacgcggtgaactctgtccagttttcaaaccacacagccatgccagtgacggtaacccgcaccaccatcacaac

SEQ ID NO: 173480 - DNA, 82 bp, Homo sapiens
cggcgcggcagcggagggacggcagtctcgcgcggtcgcaatggaagaagagatcgccgcgctggtcattgacaatggctcc

SEQ ID NO: 173481 - DNA, 95 bp, Homo sapiens
ctgggagggagccgcgcgcctttgtgcgcgcgccgagtctggctcttgctgattgaattcctttggtgcagtttagcatgttcctctgtgttctg

SEQ ID NO: 173482 - DNA, 100 bp, Homo sapiens
aagcactgctatgaagactgagaattgtgtggccaaaatatttgatcctgatgacctttattcaggggtcaatttctccaaggtactgagtactctttta

SEQ ID NO: 173483 - DNA, 83 bp, Homo sapiens
tcgaagaactcgagcgacagagacaagctgagcttgccgcacaaaaagctagagaggaactgtggctgcaccatctgtcttca

SEQ ID NO: 173484 - DNA, 100 bp, Homo sapiens
gtgctggacgctggacagggggcaaaagcacctgctcgggggtccactggacggggcctgagctacaacttcacccacctggacgggtacctggaccttc

SEQ ID NO: 173485 - DNA, 80 bp, Homo sapiens
ccaagcatataggtttggtgtacagtggcatgggccccgattacagtataaaagaagcctgtattgttttgaatttgaac

SEQ ID NO: 173486 - DNA, 87 bp, Homo sapiens
tggagctagtggaggaaactgtgcaggctatggagatcctgaaggacacagccctgcagaaagtgaagcgtggccagagctgcctgg

SEQ ID NO: 173487 - DNA, 100 bp, Homo sapiens
gctgagcacgtggagttaggcaggttaggggactcggagactgcgatggtgccaggaaagggtggagcgggagaccagtatgatgtctgtgccatttgcc

SEQ ID NO: 173488 - DNA, 90 bp, Homo sapiens
ggggccgaagcccacccagggagttgatgagataattgacgaccttgccaacctagtggagaacacagatgaaaaacttcgcaatgaaac

SEQ ID NO: 173489 - DNA, 98 bp, Homo sapiens
ttgcattgattgtcttatatttcaagttaaggtccaaaaaaactccagctgtgaaagcaacataaatggtttctgagtcccttcaacatgatcctggg

SEQ ID NO: 173490 - DNA, 50 bp, Homo sapiens
ttctgcaggatcccatgagaaggatccgagccagagacaacaacggctcc

SEQ ID NO: 173491 - DNA, 100 bp, Homo sapiens
gcagcccagcgggacccagggagaaacaggggggcgagaagagaaacaggtattatacctgaagaaccttagccctcgggtgactgaaagagatcttgtg

SEQ ID NO: 173492 - DNA, 89 bp, Homo sapiens
ggagaaggaaggcatggaaagttccagccggttcgagagctagggagtgcatccgccccaacccttttccccctcgtctcctgtgagaa

SEQ ID NO: 173493 - DNA, 76 bp, Homo sapiens
tgcaaaccttattaatctcagggaactggatgtcagcaagaatgattaactgctgaagtactgatcgagttctgca

SEQ ID NO: 173494 - DNA, 100 bp, Homo sapiens
cgggcacagggtgccgctgaccggtgattggcatgcactacttctctcccgtggacaagatgcagctgctggagattatcacgaccgagaaaacttccaa

SEQ ID NO: 173495 - DNA, 87 bp, Homo sapiens
gatgagagcctgaggagccattttgagcaatggggaacgctcacggactgtgtgcacctggctgagcacgcagacactgtgcagctg

SEQ ID NO: 173496 - DNA, 101 bp, Homo sapiens
cccgactcggtgattgaggacaagaccatcgagctcatgggtgaggtggctttgaccccgggttgcccggccagcacgaccgaggaggtggctggacagct

SEQ ID NO: 173497 - DNA, 100 bp, Homo sapiens
ggcggccgcagtggcgtcctggagccctcctcaggtgagctggagctgcccggctcggcagcgggaagaccatgctcgacagctgaccaaggccatgatg

SEQ ID NO: 173498 - DNA, 50 bp, Homo sapiens
ctggaaaaacttcttgccaaccaaagaagagatgtcaggagaaagtgtgg

SEQ ID NO: 173499 - DNA, 82 bp, Homo sapiens
gagggccacagtgggattaaaaagaccactgaggagcaggtgcaggagcatcagatccatgctgctgctgactcggagcccc

SEQ ID NO: 173500 - DNA, 83 bp, Homo sapiens
ccagaagaaactgcaccggaaatgtgcctaccagatgctaaagaaaacccttatggcgaggatgacaataagagtccattccc

SEQ ID NO: 173501 - DNA, 101 bp, Homo sapiens
gtctccgcggtggaggtctgcgttgctcttgcttttcctcgctggggtgtacggtgatctgcaactctttcaccatctgtaatgcggagatgcaggaagtt

SEQ ID NO: 173502 - DNA, 51 bp, Homo sapiens
attaccgtcatattccacccattactaagttgattatgagatcaatgccca

SEQ ID NO: 173503 - DNA, 82 bp, Homo sapiens
cgccgaggcaccgaggcactcagaggaggttaaccccaaagattggctttccttggagtgaaatcaggaacatctctttcaa

SEQ ID NO: 173504 - DNA, 74 bp, Homo sapiens
gaaaggattggattggcatctttagagagttcattcaaaagtgcctgcagtctgagcctgctcgcagaccaaca

SEQ ID NO: 173505 - DNA, 100 bp, Homo sapiens
gggattacaggcacgcgccaccactcccaggccataggaaaaggatacagagtagagtttcatgaacctgaaacttggtggaaatttgatcctgaagaat

SEQ ID NO: 173506 - DNA, 100 bp, Homo sapiens
ggaaaacctaaccatgaagacttgaacttaatacagcaagaaagaccatcaagtttaccagctttgtggatttgaccctccatgatcaggtccaccttct

SEQ ID NO: 173507 - DNA, 98 bp, Homo sapiens
cttccctgggctgggcgtcagccgccaccggcagcagcagcaccaccggacgattctcgctgaagtctgttaattctactttttgagtacttatgaat

SEQ ID NO: 173508 - DNA, 50 bp, Homo sapiens
atcaactcctctctgttaatggagtggtctcgctgtgtcgcccaggctgt

SEQ ID NO: 173509 - DNA, 75 bp, Homo sapiens
cacgagcgggtgacgctgggcctgcagcgcggagcagaaagcagaacccgcaggatggatagaatgacagaagat

SEQ ID NO: 173510 - DNA, 104 bp, Homo sapiens
ttcgctttccaaggacaatgtcttcgagaataaccgtttgattatgtttgagaccttcaacaccccggccatgtacgtggccatccaggccgtgctgtccctct

SEQ ID NO: 173511 - DNA, 99 bp, Homo sapiens
ggaaagctgtgaaagttctcaagaagctgccagtaactcagattctagccatgaaggtcaagaggaatcttcaaaggaaaatgtgtcatcaaatgctgc

SEQ ID NO: 173512 - DNA, 82 bp, Homo sapiens
catccagcacaacggactcatcaagattggctctggtgaggcttcgagctctgaggaagagcctccatccccagatgataaa

SEQ ID NO: 173513 - DNA, 102 bp, Homo sapiens
ccaggagaagccgcccaaagaactgtgtaaacaggaacatcgataagtagtgtaaaaacttgcacaatgaaatccgaagccaaggatggagaggaggagagt

SEQ ID NO: 173514 - DNA, 82 bp, Homo sapiens
gctgtttgacccctttgacctcttcgatgtgcgagactttggaaaggtccgctgccagccccaagccccccaccagccatga

SEQ ID NO: 173515 - DNA, 126 bp, Homo sapiens
gccgggctaggacgccgagcggtgactccccgccgctcccgggggccgtgacggacccagatgatgtggtaccagttggccaaagaagagcctggtgttggtgcatgtgctttggactagcattta

SEQ ID NO: 173516 - DNA, 75 bp, Homo sapiens
acaaagacccagtgaacaaatccgggggcaaggccaaaaagaagactggcattgctcgggtaccacttgctggag

SEQ ID NO: 173517 - DNA, 121 bp, Homo sapiens
ccatgaaccaggcgttgcagaggcgcttcgccaagggggtgcagtacaacagtgctggagaatctggtaaaagcaccattgtgaagcagatgaggatcctgcatgttaatgggtttaatgg

SEQ ID NO: 173518 - DNA, 88 bp, Homo sapiens
ggccgggggactcttcggaaactccgagcctcagagaaatattgccttgggtccccagtgtttactcccatcaaggcagacataagcg

SEQ ID NO: 173519 - DNA, 96 bp, Homo sapiens
aaatgcagaagtaagaggatttatagatcagaatctcagtccaacaaaagtggatctcttagagttgagtacaacaaatgaaattttcaaacagca

SEQ ID NO: 173520 - DNA, 82 bp, Homo sapiens
ccccgctacctcatgggggagacgcagctgtgcaccacaaggtgaaaatggcattacggacatcaggacatctcttactggg

SEQ ID NO: 173521 - DNA, 100 bp, Homo sapiens
gaaaaaaatggctgctactctgtttggaaaaataccatcttcaactgtacaagaagctttacacaatttccttaaggtgctttgtaacagagccagactg

SEQ ID NO: 173522 - DNA, 100 bp, Homo sapiens
tttggattacataaaccagtcacccaagtgcattgcctttggaaacgagggccatgatccaaaggaaccagagcagttgagaaaactgtttattggtggt

SEQ ID NO: 173523 - DNA, 75 bp, Homo sapiens
tggtggtctactctgatgtcaatcttgagggctaggacctagaagaatcccttaggatgaagctgagtcttacca

SEQ ID NO: 173524 - DNA, 50 bp, Homo sapiens
attggatttccctctgtgggtaagctgaccatgccactgcctcggtacgg

SEQ ID NO: 173525 - DNA, 82 bp, Homo sapiens
gaacatctctttcaatgacaaaaagtttgtcattaaacccatcgacaagaaggcacctgtgtctgacaacaaagcatccctg

SEQ ID NO: 173526 - DNA, 101 bp, Homo sapiens
cactgccggagccatctcggagctcacggagagccgcctgaggagcggcacaggtactccaaagattcaggtttactcacgtcatccagcagagaatggaa

SEQ ID NO: 173527 - DNA, 75 bp, Homo sapiens
gcaggccccacgagtgggaggtgctgagccgctcagctattgacctgaaaagtggttctggaaaagtgtaccaag

SEQ ID NO: 173528 - DNA, 82 bp, Homo sapiens
caagaagtgtgtaccacctctttttccacctccccaccatcccaggtaggattattgactgtgcttttactgtcacttttaa

SEQ ID NO: 173529 - DNA, 90 bp, Homo sapiens
gtctaccatgacgataagcaaccaacgttcagagcactctatgaagcaatacgggatgctgaaggtgatgtggccgccctcaaccgacgc

SEQ ID NO: 173530 - DNA, 83 bp, Homo sapiens
ttttcaagtatgccaccaacagtgaagaggttcccaacaaggctacgcagaagaacccccttgactgaagcaatggagggggg

SEQ ID NO: 173531 - DNA, 51 bp, Homo sapiens
cctgcacctggtcctgcgtctgagaggttactaccggtactacaacaagta

SEQ ID NO: 173532 - DNA, 74 bp, Homo sapiens
agagaaagagaatgatgaagagaaaggcccggagactgtgctggagctggcaggtaatgcttctaaggatctca

SEQ ID NO: 173533 - DNA, 100 bp, Homo sapiens
ggagaccgttacgacggcatgctccatttatcttaaagaaattggacagcatatgaagacaggacatcacatatgaatgcacgatatgaagagcctggtt

SEQ ID NO: 173534 - DNA, 83 bp, Homo sapiens
tatgacaatctcacccagaggctaacggtggaggcggcccagttcatacagcgatttcctcgtcctgtgactgtggagcccat

SEQ ID NO: 173535 - DNA, 74 bp, Homo sapiens
ggcctgtaccatcgcagccacggccagcgtggtcaaggagaagctggctagaccatggcgagcccagggaaaga

SEQ ID NO: 173536 - DNA, 101 bp, Homo sapiens
gccgcgcaggagggaaagttcagcgacggcggcagcggccggagccgggccgggcagctagcagggcgcttcgggttggccttggggaggcactattagag

SEQ ID NO: 173537 - DNA, 82 bp, Homo sapiens
gcctggcggcttccaggcgcactaccgcgggccagccaagtctcgggatggtgaacgtactgtctattgcaacgtacacaag

SEQ ID NO: 173538 - DNA, 100 bp, Homo sapiens
gctgggtggagcttagaggaattaaactttggccctgcgcctcgtccagcctaggttccacccttttctgggaacatgaaactctaccgataaatgtgat

SEQ ID NO: 173539 - DNA, 78 bp, Homo sapiens
cacaccaccgaccaggacctggtgaagctctgtcaaccgttcagccgtctgtatatctccccagatacctgaaactga

SEQ ID NO: 173540 - DNA, 100 bp, Homo sapiens
ccctcgtggaaatcattcttcatgtagttagacagatgactgagactcaccgcactgtgttaaaccagatcctacggcagtccacgacccaccttgctga

SEQ ID NO: 173541 - DNA, 82 bp, Homo sapiens
cgaccggatcctgaggaggcagctgcggtggcagctgctgagttctcggtgaaggttgaaatcacaaagattagacaccttt

SEQ ID NO: 173542 - DNA, 100 bp, Homo sapiens
taataatgttaacatggacatgatcttctttataattctactttgagtgctgtctccatgtttgatgtatctgagcagcactttaatgggagtccctggg

SEQ ID NO: 173543 - DNA, 75 bp, Homo sapiens
cggcgcgctgcccgaggggagcaaggacagggtgccaagaagagtgctattggtcagcgcattgtggcaactcta

SEQ ID NO: 173544 - DNA, 76 bp, Homo sapiens
aattgatcaggatttttggcctaccctccaaagaaaagaaacagtatctcacctccctaaactggttaatagtggc

SEQ ID NO: 173545 - DNA, 82 bp, Homo sapiens
gcgaccgtgaggacaggcttttgctctgcgacggctgcgatgcggggtgacttaagagattaaaattaatttggttgctgtt

SEQ ID NO: 173546 - DNA, 75 bp, Homo sapiens
ggaccttgaagacgacttcgaccctgcccagcacgaccagctcatgcaggtggggaagctgaggcaggaagccct

SEQ ID NO: 173547 - DNA, 155 bp, Homo sapiens
cctttatctatggttatgtggatgcagcatataagccaggcatgtctcccgaggagtgcaggcgcttcaccacagacgctctggattaatcgaattacagctgctagccaggaacatggactgaagtatccagcgctcattgggaatttagttaa

SEQ ID NO: 173548 - DNA, 85 bp, Homo sapiens
agttcattgcctaccagttcacagacacggttggtgttcgaggaagagacattgttgttcttggtgtggagaagaagtcagtggc

SEQ ID NO: 173549 - DNA, 90 bp, Homo sapiens
agcacctcattctaaagaccacatttgaggatcttattcagcgctgcctttcttcagcaacagaccctgcctttgaagacctcagcaaac

SEQ ID NO: 173550 - DNA, 101 bp, Homo sapiens
aacctcgccccttgcaacaaaggcagactgagcgccagagaggacgtttccaactcaaagtgaatggaagagaatccgaagaagaaaatctcaataaatct

SEQ ID NO: 173551 - DNA, 100 bp, Homo sapiens
tggagagcagatatgggagatccagaaggttatcttggaagatgttgcaatgttgcatatcaaaccagatcaatttacttatacttcggatcattttgaa

SEQ ID NO: 173552 - DNA, 80 bp, Homo sapiens
ctgtcaggctacatcagcaaagggcaagcatcctctgcagatttaatgatcaggaacatccttctgatgcatgctgggag

SEQ ID NO: 173553 - DNA, 74 bp, Homo sapiens
cagcacattggtgcctttcttgtgcctccggagccagcgtggtggccatagacaacaagatcgaacaggccatg

SEQ ID NO: 173554 - DNA, 100 bp, Homo sapiens
gaactttacatccgagtccaaagttgtgtttactgagaagaccacagatgtggaagatgtcaagtttgtgatcaactatgactatccaaacagctcagag

SEQ ID NO: 173555 - DNA, 89 bp, Homo sapiens
tacctgctacaactacagtgtaaaggatttacaggataatcgagttcacattggaccaaaaatggaaattcgggtcgttacgttaggat

SEQ ID NO: 173556 - DNA, 100 bp, Homo sapiens
gtcaaagcctctgtcaccacaccaaaatacaaatggggatctgtgactcatcagagtgtgggggttgtgaaaggttctccacagacgaaggtcaatgctg

SEQ ID NO: 173557 - DNA, 83 bp, Homo sapiens
gtctcctgtgtggcgatggtcttcctgctggggctcatgtttgaggctggacggcagtctggaaacgaccaatgagatcttgg

SEQ ID NO: 173558 - DNA, 100 bp, Homo sapiens
atgcatgccaacattccagttttttaagaagggacaaaaggtggttatcactaggctaaaactggacaaagaccgcaaaaagatcctcgaacggaaagcc

SEQ ID NO: 173559 - DNA, 77 bp, Homo sapiens
acatcaaaataaagatgaagaagttcaaggagagacttctgtgcaagtttagagcctggttaagaatcattgctgag

SEQ ID NO: 173560 - DNA, 105 bp, Homo sapiens
gcttagtagtcctgttccagttgctcagaagcatccccagcatcctgctcatcttgctggaaacctgtaggaagtgtcagggactctggaaagaacataatggcc

SEQ ID NO: 173561 - DNA, 100 bp, Homo sapiens
ctgtgcatcaccttgaccctggggaccttcctcgtgggagctgcgctggccgctggcctactctggaagttcactctacgtctcctccgagagccgcttc

SEQ ID NO: 173562 - DNA, 82 bp, Homo sapiens
cgccgagggacaccgcagtatgaggcagaggagggtgtgaagacagagaatgaccacatcaacctgaaggtggccgggcagg

SEQ ID NO: 173563 - DNA, 101 bp, Homo sapiens
cggacgggaaggcgggagacgagaagcctgaaaagtcgcagcgagctggagccgccggaggtgtgttctactccctcttctgggaatgaagcctccccagc

SEQ ID NO: 173564 - DNA, 83 bp, Homo sapiens
ccggccgggagaggcgcgcgccatggcttctggagccgaaaaccaaggtgtatgttggtaacctgggaactggcgctggcaaa

SEQ ID NO: 173565 - DNA, 88 bp, Homo sapiens
gccgccagtgtttccgtcagtacgcgaaggatatcggtttcattaagttgcaagaatgtagtaactctgatcagctacaaggaaagga

SEQ ID NO: 173566 - DNA, 83 bp, Homo sapiens
tggagatcggcagagacaccttctggcccgataaaccacataatcctatggtaaatgctggagcaattgttgtgacttcacta

SEQ ID NO: 173567 - DNA, 82 bp, Homo sapiens
cggcaaccgagggacccgcgtccaggctgaccccgcactacatctacccaccagccatcgtgcagcccagcgtggtgatccc

SEQ ID NO: 173568 - DNA, 75 bp, Homo sapiens
cagcagaagccagggcagctgaaagacagagaccttcaggacgatactttgatgaaatcagccaggacacgggca

SEQ ID NO: 173569 - DNA, 82 bp, Homo sapiens
aaaccagatccagaaactggaggagtcccgctcgaagctaggtacaccaggggttggaaaaaccacactaggcaaagaactt

SEQ ID NO: 173570 - DNA, 75 bp, Homo sapiens
ctttgggcctgtaatttctgttttcaaagaaatcaggtacaaagtgaaatcacttcagcaaacacagaagatgat

SEQ ID NO: 173571 - DNA, 83 bp, Homo sapiens
cccagcatgaagaccccggcggacacagtgctgctcacggccgtgaactgctacagcgtgaaggccgccacccgggtccagga

SEQ ID NO: 173572 - DNA, 100 bp, Homo sapiens
ctaaaactcactttcttccggactctttcaagattagtagcaaggaagtttgtaggagcagcaaattatcgggagaagattcatagtactttgactccat

SEQ ID NO: 173573 - DNA, 83 bp, Homo sapiens
tcgccagcatcgccaacccggactggatcaacaccggggagtctgcggggacaggagagagtggcaagagtacgtttatcaag

SEQ ID NO: 173574 - DNA, 100 bp, Homo sapiens
tgatgtccaggaaggaggaggaataatatttatggagcatatattatggaacacacacccagtcagcttgaagagtttcaaatggaccctaccactgaga

SEQ ID NO: 173575 - DNA, 83 bp, Homo sapiens
cgtcaggctgaaggaatcttggtaaatggcaccaaagactctgcacagaagcagaagaactcgcctctgttgagtgtaagtag

SEQ ID NO: 173576 - DNA, 82 bp, Homo sapiens
cgcttcttctggaagaccagccaacagaactgacacatgagtttctacagattttggagaaaactcccaacaggctcaaacg

SEQ ID NO: 173577 - DNA, 82 bp, Homo sapiens
cactgcccatgtgcccccgtaccccatgaagatcgcccccccagatggcacagcagattatcttgacaatggtaataataaa

SEQ ID NO: 173578 - DNA, 80 bp, Homo sapiens
caaccataaagacatcttaattgggcacgaaagaggccttctctgactaccagatccagcagatgacagccaacttcgtg

SEQ ID NO: 173579 - DNA, 100 bp, Homo sapiens
cctgcatctgccaacaagactggaagcaggagcctcctcaacaagcccaagagtgagatgaccccagaggagctgcagaagcgagaggaggaggaattta

SEQ ID NO: 173580 - DNA, 83 bp, Homo sapiens
aagagaaaaacctactcttgatacacaatctaaaaagaattaggaaggtccttcagcaaaagtactttgactcaggagactac

SEQ ID NO: 173581 - DNA, 89 bp, Homo sapiens
cgggaccccagcgcgggcggcggcggctgggcgggagccccagagcattaaagactgtaaatggcaagaaaaaaacatcgtagtcatgg

SEQ ID NO: 173582 - DNA, 90 bp, Homo sapiens
taatttcaacagaagagtgagagatggaacccgaagaagaaaggattcgttacagccagagattgatttaggcctattaaaggaaggcag

SEQ ID NO: 173583 - DNA, 98 bp, Homo sapiens
gagaatgcagaaaatgagtatcaggtacaccccagtgggccgttcctttttctcacccccggaaggttactaccaccctctgggagggggcagggagg

SEQ ID NO: 173584 - DNA, 51 bp, Homo sapiens
tggagaactatagcaatctggttttcttggatgacagtcgaactgcaagcc

SEQ ID NO: 173585 - DNA, 74 bp, Homo sapiens
tcagaagtcaattcaaaggacctgcccccagagagagagcgagaacccgagcagcgccatgagcaacactaccg

SEQ ID NO: 173586 - DNA, 50 bp, Homo sapiens
gctgccccggctgcctcctccctgaggctgaccaactgactgaagagcag

SEQ ID NO: 173587 - DNA, 75 bp, Homo sapiens
aggatctggtgtaccaggcgaagctggccgagcaggctgagcgatacgacgctgcctgtggaggaaccgattgtg

SEQ ID NO: 173588 - DNA, 74 bp, Homo sapiens
gtggcccgagaccccgctgctgctggaggcaaggagtttcataatagaagagcagagtttcttactatgtgaag

SEQ ID NO: 173589 - DNA, 100 bp, Homo sapiens
tggacagtttcagtgcattacaggattatcgagattgcagcctgtcactccacacacacgtctgcggccaagacgcagggtgggcacgtgtacatgtggg

SEQ ID NO: 173590 - DNA, 50 bp, Homo sapiens
ctacgccgtggacttccagcgcagaggccccacagtatcaaatatccgcc

SEQ ID NO: 173591 - DNA, 90 bp, Homo sapiens
cacaatgaagcagtcggacgcgtctccccaagaaagctggtcgatcacaccgctcatgtacccagcctccttcttcttctccgtgcccag

SEQ ID NO: 173592 - DNA, 87 bp, Homo sapiens
gccctggcggagaagactcgaacggctcccacagccgggcgttgggggaaagacaaatttacatgtattggagaccagaccagaagc

SEQ ID NO: 173593 - DNA, 82 bp, Homo sapiens
gtggtgacattgtatcattggtcggttaagaagattgtctaccaaatatagaacagaaaagatatatcccacagccactgga

SEQ ID NO: 173594 - DNA, 83 bp, Homo sapiens
gaaactatggcctccaggcttccgacggcctggtcctgtctgctcatccgaaatggctctgaggtgcgggacccactggttac

SEQ ID NO: 173595 - DNA, 82 bp, Homo sapiens
caggaacagggacagcacctcatcccctggatgggggaccacaagatcctcatcgacaggttgatgccggcccaggatggat

SEQ ID NO: 173596 - DNA, 133 bp, Homo sapiens
attctccatggccagtgaggaagtcttgaagaatagagccataaagaaagcaaagcgcagaaatgttggatttgaagagatcctgctgggccgtggcttcaccttttggcagtggtttgatggtgtcctggac

SEQ ID NO: 173597 - DNA, 73 bp, Homo sapiens
ttctcttgaccatgtgacatctgatgctgtggaacttgcaaatcgaagtgctgattcctaaagaaaagccccc

SEQ ID NO: 173598 - DNA, 100 bp, Homo sapiens
gtggcccagctcgtgcagcggctccagaggttctatgcccgggactcgggcctgctcaagtttgagatccaggcggggttattgggccgccccatcaacc

SEQ ID NO: 173599 - DNA, 74 bp, Homo sapiens
gtcgactgcccagagtccgcggccggggcgcgggaggccagaggcattgatgtgcagcaggtttctttagtcat

SEQ ID NO: 173600 - DNA, 75 bp, Homo sapiens
cttggtcgccgcgtccttggctggcgttgatgtcttggcattgcccattttcaagcaggaagattccagccttcc

SEQ ID NO: 173601 - DNA, 74 bp, Homo sapiens
atacatctttcttcgacaaaggattttaccaaatgttgcaagaactctggagttcttatggtagtaaaatgccg

SEQ ID NO: 173602 - DNA, 100 bp, Homo sapiens
gacctgcatgtactgggggattcgcagggaggatgtcgggacaccccggaagctgggaaatggtatggcatttcaaatatagatacaaccattgaaggaa

SEQ ID NO: 173603 - DNA, 100 bp, Homo sapiens
ggtgattgttggtctgctggtgggactcaatgttctcgatgccaatctctgcttgaaaggagaagacttggattctcagacaggcaggattgaacccaac

SEQ ID NO: 173604 - DNA, 90 bp, Homo sapiens
ccgaggctgaagaaatagaagctgaatatgctgcattagacaaacgagaggaggaatatcagggcgaggggatcacgtggcacaacatcg

SEQ ID NO: 173605 - DNA, 100 bp, Homo sapiens
agacgccgccgctgcctcccgcgaagggtagatgtctacccaaatggaatattgagtatcagagacttcaaatgataacttttgtttgtttggagaaaat

SEQ ID NO: 173606 - DNA, 98 bp, Homo sapiens
cacagtaaggccaaaaatgtgcatactcacagagttagagagagggatggtggaacttccagcaccattacttgatgataaatgtaaaaaggaatttg

SEQ ID NO: 173607 - DNA, 100 bp, Homo sapiens
ccacagattctgttgcgaaggcagccatctttagttcgtctttcctagagaggttcaaaccttgtactactcagctgatcacaagctgcttgatgggaac

SEQ ID NO: 173608 - DNA, 83 bp, Homo sapiens
cggcggccttggcccccagcggcttcctcggcctcccggcgcccttcagcgaggaaggtacgaggaacagcaaattcaggaaa

SEQ ID NO: 173609 - DNA, 100 bp, Homo sapiens
cctcggcagtcctgtttccctgtaaggaagatgagaatgtgcctactgctcctgatcctccaagtcaacatttacgtgggcatgggacaggcttttgctt

SEQ ID NO: 173610 - DNA, 90 bp, Homo sapiens
ccttcccaggaagccagagccacacacaccatcatggtcctggtgaccaagaatatggcccaggtgaccaaagccctggacaaggccctg

SEQ ID NO: 173611 - DNA, 90 bp, Homo sapiens
ggattctcgctgtgacagagacaacaccgagtatgagaagtgatttggatatctactctggagataaagttggttcatcgttaaaatatt

SEQ ID NO: 173612 - DNA, 100 bp, Homo sapiens
tagcaagcatgatctttcgaagggaaccattcttccatggacaggacaactatgaccaggttggtggtgtggacccaaagcagttggctgtttacgaaga

SEQ ID NO: 173613 - DNA, 100 bp, Homo sapiens
gatggtcaaaagcatgtggtcacattacttcaggtcccttatttcgcgtgagtctttggcgtccacgaccttgagtctgacggaaagtcagtcggcctca

SEQ ID NO: 173614 - DNA, 98 bp, Homo sapiens
gccaggaacccctggaagcctagaaatgacttcccaagtaagaagcggaagaggagccgctggaaccaagacacaatggaacagaagacagtgattcc

SEQ ID NO: 173615 - DNA, 74 bp, Homo sapiens
gtctttcctaccatctaaaatacgaaggtttctggctggatagaagaatttcgaaggctgaggacacatgttaa

SEQ ID NO: 173616 - DNA, 82 bp, Homo sapiens
cgaggcgcaccagatgtaccggaccctgttcttcagaagtcggccagagcagcatgtggatctccactgatgccgccgcctc

SEQ ID NO: 173617 - DNA, 75 bp, Homo sapiens
cttctatgaggctgagctctgcccggaccgctgcatccacaggtttgtcgcccattggaatattgccaagtctat

SEQ ID NO: 173618 - DNA, 100 bp, Homo sapiens
cgtgcgggtgctggacgagaggaaggcgctgatcccctgcaagagatttattcaggagattgagcatgctctgggtcttggcccagccaaacagtgtcct

SEQ ID NO: 173619 - DNA, 75 bp, Homo sapiens
accacacccgctccgagcagtgctacagagacgtgtctgatctaaaggttcaggagctccatgaggaggaggcac

SEQ ID NO: 173620 - DNA, 100 bp, Homo sapiens
cttgtgtgaagaaagcctcctaccttgattgcatcagggccattgcggtatataatgtttacatggcagggaggcagctgtgttctaagcggtaccggga

SEQ ID NO: 173621 - DNA, 86 bp, Homo sapiens
agctatgcccccgtggccaccgcctccagcttgccaccaaagacctgcgactttgctcaggggaacgcccttttgcttgtgactgg

SEQ ID NO: 173622 - DNA, 96 bp, Homo sapiens
atgccaaccaccgtgtaaccactatgagcagtgcctacaaaaccttaaaggcagtgaaatcaactgtgcagaccatcactgttggaggagtgagca

SEQ ID NO: 173623 - DNA, 82 bp, Homo sapiens
gactctgatctcaacattttggctgaagttatggaaacaaaggacatgctttacatcgtcactgaatttgctaaaaatggag

SEQ ID NO: 173624 - DNA, 101 bp, Homo sapiens
tcgggcttttgttcccagaaaggtgtttcccgaccagtccctgggcgccaactagagtatggactgaccaggtacctggatggagacctgagctggagaag

SEQ ID NO: 173625 - DNA, 85 bp, Homo sapiens
cctttcctgctagaactttcagaatctcaggcgggtgaggtagccctaatggagaaccttgtggaaagacttgtttggaagagag

SEQ ID NO: 173626 - DNA, 100 bp, Homo sapiens
gctcggggtccgccagaaatgaggagcacccaggagcagcttatgtgctggcagggggcttctaagctggttaacagatccttccctggagaacctctct

SEQ ID NO: 173627 - DNA, 75 bp, Homo sapiens
gccaccaccaccgccgctgccccggctgcctcctccctgagatcatggggaatttcagaggtcatgccctccctg

SEQ ID NO: 173628 - DNA, 95 bp, Homo sapiens
aaatcagaagacaaacttgccaaagctacaagagacaggctcatccatggaataccaattctttttcttagtgttcacattggatttttctgtta

SEQ ID NO: 173629 - DNA, 75 bp, Homo sapiens
atagaaaatctagccaaagccaatccccagaaaggcttcccaactgatgcaactcttgatgacataaaagaatgg

SEQ ID NO: 173630 - DNA, 100 bp, Homo sapiens
tttagggtcctttatatagaagggagacgcgttccttcacctcgggcagaataactttgcagaagcccacaggttcttcacagagatcttaaggatggat

SEQ ID NO: 173631 - DNA, 100 bp, Homo sapiens
ccctacgccgtagccgtccagagactggcaggcctcggcctaaagtgcatccactctgggagagcgtggacctggttcctgggggcgatcgccagtcacc

SEQ ID NO: 173632 - DNA, 82 bp, Homo sapiens
tggctgtgcgcgctggcgctgagcctgcagccggccctgccgaacatcttcgcctggtgtggtggaaagtccaacatcctgg

SEQ ID NO: 173633 - DNA, 101 bp, Homo sapiens
attaaaatctcccaagaggaatgacaaacaaccagctcttcaggtgctggagaatctggtaaaagcaccattgtgaagcagatgaggatcctgcatgttaa

SEQ ID NO: 173634 - DNA, 83 bp, Homo sapiens
ctgctgcgtcctgctgaccttcgttatttctcaaactctgaggctgcggagttcacacattgaaatctgtcatctttttcaga

SEQ ID NO: 173635 - DNA, 75 bp, Homo sapiens
acactggcaacattagatccacctcatacaggtatcagtcagagccggatctctcattggctgttgcagcaggga

SEQ ID NO: 173636 - DNA, 90 bp, Homo sapiens
gtttttacaaagaacatgctcacatcttcaggtgcctcattcacatacgtcaaggaaattgaggtcaccaaggaagaaggattggccttg

SEQ ID NO: 173637 - DNA, 141 bp, Homo sapiens
gacgataattcaaaaacactatcccagggagtgcaagcttagagcgtctggccaagaatcagaggaagtggtatcataatgaagacctggaaaaagacaaaacatcacaaaactgcctaggaagaggaatggaacaagtag

SEQ ID NO: 173638 - DNA, 74 bp, Homo sapiens
gggagacgtgctggacacactggaggcgctgggactacatgaggaaataattgacttttataacttcatgtccc

SEQ ID NO: 173639 - DNA, 75 bp, Homo sapiens
gctatggccggttccataatcagttcctacaacccacaggacagagagcaatgtggtgttaaaaatgatgaaagt

SEQ ID NO: 173640 - DNA, 80 bp, Homo sapiens
gggcccaactggaattccacttacgggtatagaacaagatgcagtgaatacttttaccaaatatatatctccagatgctg

SEQ ID NO: 173641 - DNA, 50 bp, Homo sapiens
tagcacaagagcaccatactttgagggtctggagttcccctggggaccga

SEQ ID NO: 173642 - DNA, 100 bp, Homo sapiens
gcccgtctttctcagccagctctgaggggacccgcatcaagaaaatctccatcgaagggaacatcggtgacgcatccaaagaagacattgacactgctat

SEQ ID NO: 173643 - DNA, 82 bp, Homo sapiens
atctgctctaaaccttatagcctgcttatgggggaaggtgacttaagagattaaaattaatttggttgctgttggttctgaa

SEQ ID NO: 173644 - DNA, 101 bp, Homo sapiens
agatatgcctgctaacatggataagcatgccctgaaaaagtatcgtcgagaagcctatcatcggaattgaatgatctggcacgggaccctccagcacagtg

SEQ ID NO: 173645 - DNA, 100 bp, Homo sapiens
ctacgtgttcctgctcttctgcggcgcctacctctacaaacagggctttgccatccccggctccagcttcctgaacaagttgaaatcatcgcagaaggat

SEQ ID NO: 173646 - DNA, 100 bp, Homo sapiens
tcctaaacttttcaagcctgaaggaaaggcagaactgcctgattacaggagctttaacaggtggctatggaggcttttacaacagtgatggatatggagg

SEQ ID NO: 173647 - DNA, 103 bp, Homo sapiens
tggatctcgcgccacaaggagatggccaccagcccctcgggttccaagatgcagctactggagacagagttctcacacaccgtgggcgagctcatcgaggtgc

SEQ ID NO: 173648 - DNA, 98 bp, Homo sapiens
tctgagacccggaggaggttcgaagctgagtatgtgacaggcagcaattccatttccgtgagggcgtttctagatgaagatgacatgagcttggaaga

SEQ ID NO: 173649 - DNA, 74 bp, Homo sapiens
ctgcacgtggtacccttgctccaagatgcttcccaaaaacaccagtttgcagaaaaaacttcagcatgtgccag

SEQ ID NO: 173650 - DNA, 80 bp, Homo sapiens
atccagtccccgctaccggcctgagcctcgcgttgcagcaagagagatgaaggccaccagcttgggctccccacggaggg

SEQ ID NO: 173651 - DNA, 75 bp, Homo sapiens
cccagaaaactatgatgatcgacaatttgaaagtggattatcttacaaaggcacttcgtcttagtaacatggcca

SEQ ID NO: 173652 - DNA, 83 bp, Homo sapiens
caacgtctctctgccgtgaatcattcctgcagatgaaaaagtgtgacttggcagctgatgcagcagcttttttatgagaatta

SEQ ID NO: 173653 - DNA, 100 bp, Homo sapiens
gctcgtcagcccatttctggggctcatcaacagagcagacgagcagaccgtttattagctgcaggcaaatacgaagaggctatttcttgtcacaaaaagg

SEQ ID NO: 173654 - DNA, 100 bp, Homo sapiens
ccacgcagacttctagtcctggttccactgcttactcggagaataaaggcagccccgttgatgactgaaaatgacaaagcatccacctaacagacgagga

SEQ ID NO: 173655 - DNA, 99 bp, Homo sapiens
gccacttcgacatcgagatcaaccgggagccggttggattggatgctgctggcaagacaaccattctgtataaactgaagttaggggagatagtcacca

SEQ ID NO: 173656 - DNA, 83 bp, Homo sapiens
tgcttggaaaaacgtgtgggtacgaccttggtaaagtcagtgataaatcttttgtttgctgcatatactggagatgtgtctgc

SEQ ID NO: 173657 - DNA, 100 bp, Homo sapiens
aggaccgtggaagacttcaacaaattctgcacctttgtcttggcctatgctggctacatcccttatccgaaggagcatgcaatgatgctacctgttctga

SEQ ID NO: 173658 - DNA, 83 bp, Homo sapiens
ggcctgacagctctgcggctcgggccctgagggttcacagagagtttcggagctgccaacatctcccaggcagcacgggaaag

SEQ ID NO: 173659 - DNA, 101 bp, Homo sapiens
ccaatcctcagtggagctggtcgcagatcctgagacccggacagtggcagtgaaacagagcctatttgctgcaaaactttaatgaagagggaacaactgag

SEQ ID NO: 173660 - DNA, 100 bp, Homo sapiens
ccatgactaaagtgcaggccgaactagatgagaccaaaatcattctggttattcagcttctcaaggctggaaaagcgaaggaagtttcctacaatgcact

SEQ ID NO: 173661 - DNA, 83 bp, Homo sapiens
cgagagctcgccccgaacgggggtcttcctcctccgccgttgacagccttatgccagcctggaccatcttggaggcagtgtag

SEQ ID NO: 173662 - DNA, 90 bp, Homo sapiens
ccgggatcgtgaccgagaccgtgaccgagagcgtgaccgagagcgcgaatatcgtcatcgttagaagggtgaggtggctttgaccccggg

SEQ ID NO: 173663 - DNA, 75 bp, Homo sapiens
gtgggtgatttagctcgagaagggtgatgaattagaagacaatggaaagaatttctacgaatctgatgatgatca

SEQ ID NO: 173664 - DNA, 99 bp, Homo sapiens
cagccacaatgtgcctttgcaggggagcctgagagccacaggttttgaagtacaggaagaaggttatctggcaaaaatcctggtccctgaaggcacaag

SEQ ID NO: 173665 - DNA, 74 bp, Homo sapiens
gcatcattaccctggacctggaaaccatttttgtcaaggtcagcatctcctcgacgatcaagatctatctctct

SEQ ID NO: 173666 - DNA, 75 bp, Homo sapiens
gcgaaggagtggtttctccaggcggccaaggatgtggacccccaaaagtacaagggcatatttaacggattctca

SEQ ID NO: 173667 - DNA, 112 bp, Homo sapiens
gaattcagaaggatatcgacgtcgtgatccagaagtccagagctgaggactgcctgtttgcaggtgacagagttagtccttgataattgcctgtgtgtcaatggggaaattg

SEQ ID NO: 173668 - DNA, 90 bp, Homo sapiens
attgttgattggaggagcaaccacttcaaagggcaagattcttgccaagagaattaatgtgcgtattgagcacattaagcactctaagag

SEQ ID NO: 173669 - DNA, 75 bp, Homo sapiens
cgggagatcatccgtcggctggagcctggaattgtctcgccatttaaacgagtattcctaaaaggtgaaaagagt

SEQ ID NO: 173670 - DNA, 50 bp, Homo sapiens
ggaacagcctatgtgggcttccacggagatatgggcacggttatgaaata

SEQ ID NO: 173671 - DNA, 75 bp, Homo sapiens
gatttgttaaggattccaagtaactcttatttgaacatggttggtgcgggagaggtggatgaagacttggaagtt

SEQ ID NO: 173672 - DNA, 92 bp, Homo sapiens
gaagtctataagctttgcaacagaattacagagtatgatggaggtggggaagacagggctccagctaccacaggacgggctctgggtatagc

SEQ ID NO: 173673 - DNA, 100 bp, Homo sapiens
tgggcggcaccctggccaggaagcggagggcgcgcgaggccatacatagaagaaatttgtgaaagccttcgaggtgacatttttcaaaaatttatggaaa

SEQ ID NO: 173674 - DNA, 83 bp, Homo sapiens
aaaacatcgtggccctgtacgacttccaggatattgactgggtacagacagagaagcacgtgtttgagcaggcatccagcaac

SEQ ID NO: 173675 - DNA, 100 bp, Homo sapiens
gaggcggaccgcgtggcggcggcgcacgggtacctcaacttgggccaggtgctggagaatctggtaaaagcaccattgtgaagcagatgaggatcctgca

SEQ ID NO: 173676 - DNA, 100 bp, Homo sapiens
gtccgagctgtcagcctctccaaagcctgcgcgagaggagccgggacacgcctagcgcgggctccagaaaaagcttgtggtgaaggggggcaaaaaaaag

SEQ ID NO: 173677 - DNA, 74 bp, Homo sapiens
ctctacattaaagtttctaatatctcgaaatgcggctgcttttcaaggacaacttgcctttgatgattttcaag

SEQ ID NO: 173678 - DNA, 100 bp, Homo sapiens
gccgattcctcctccttggtcgccgcgtccttggctggcgtattttctggcatccttaaatcttgtgtcaaggattggttataatataaccagaaaccat

SEQ ID NO: 173679 - DNA, 82 bp, Homo sapiens
taaatgtagacaatggttagagaagaattttccaaatgaatttgcaaaacttactgtaggggttggtgtagacaatgatgga

SEQ ID NO: 173680 - DNA, 75 bp, Homo sapiens
cctcggaggcgttcagctgcttcaagatgaaggttcccacgtaacatcacatcagacccaagggcccgttcattg

SEQ ID NO: 173681 - DNA, 76 bp, Homo sapiens
taaggtatcagatctcatcagtcgctttgaaggaggcagtctctgctttctatccgtcaagatgataaagtcgtgt

SEQ ID NO: 173682 - DNA, 75 bp, Homo sapiens
cctacctctggctcaagttttcacttatcatctattccaccgtgttctggacaatgcagatcttcgtgaagactc

SEQ ID NO: 173683 - DNA, 82 bp, Homo sapiens
cggaaggcggcgtccgcgacgcagctgttcacgcttaggttacttcttgctgcagattctgcgcaggatcggagctgtgggc

SEQ ID NO: 173684 - DNA, 96 bp, Homo sapiens
tgctcaaagtgaatatattaagcttgcattcacaagagatgggctctgtggtctgtggaatgaaatggttaaagatggagaaattgtatacactgg

SEQ ID NO: 173685 - DNA, 75 bp, Homo sapiens
agaaaactaaaatccagtttattgtatttcaatactatgtcataacagtcagaatggatgatgaacttgttgttg

SEQ ID NO: 173686 - DNA, 75 bp, Homo sapiens
cttccccaagcgcggccagacctgcgtggtgcactacaccgcactgccccccaggtgttgagtaccagctctcca

SEQ ID NO: 173687 - DNA, 98 bp, Homo sapiens
gcgagactccgtgggcgtaggaccctccgagccaggggctttgttatgcacctaaagccatattggaagctccagaagaaagagcaccccccggaagt

SEQ ID NO: 173688 - DNA, 100 bp, Homo sapiens
ggttaagtatgcggcgccaggagctagagaagaagaaggaggttcctgctgtgccagaaacccttaagaaaaagcgaaggaatttcgcagagctgaagat

SEQ ID NO: 173689 - DNA, 75 bp, Homo sapiens
tggatgcacgtacagaatacattcagccgtcaggaatatcagaataagcttatctatctggtacctgagaagcaa

SEQ ID NO: 173690 - DNA, 80 bp, Homo sapiens
gagaagaaataatggcaaataacttttccttggagagtcataacatatcactgactgtgaactttgaggcgctgatcatc

SEQ ID NO: 173691 - DNA, 80 bp, Homo sapiens
gaggagggaactgcggagcgggtgtatggttgaagcctggaattttttgcggcaacattgcaataggttgaatatagagg

SEQ ID NO: 173692 - DNA, 96 bp, Homo sapiens
cttgggaaaaggagaactcctgactgattagcattcacaccagatccaacttagaaataatgtttcattcaagataaggctcgtggcttaggagat

SEQ ID NO: 173693 - DNA, 83 bp, Homo sapiens
ctcaattacacttcgactctcaaagcaataccaggatagctgttgtttcagagaaaggatggaactccaacctcgaaaacatt

SEQ ID NO: 173694 - DNA, 90 bp, Homo sapiens
gacttgagcgaagttttatgcaaggaatgtatcctgtcaggtataatgtcagtgaatggcaagaaagttcttcatatggatcgaaaccct

SEQ ID NO: 173695 - DNA, 75 bp, Homo sapiens
cggtgggaatgacaacttcggtcgtggaggaaacttcagtggtcgtggtggcaaatatgttcctcgtgccatcct

SEQ ID NO: 173696 - DNA, 100 bp, Homo sapiens
ctcgctcccgccaccgccggacttcaatgcccagtccccagctcgccagcgtttccacttgagcggcacagtgacagaacctgcaatacaatcggagcca

SEQ ID NO: 173697 - DNA, 90 bp, Homo sapiens
atcctgaaagccatgcagcggggaggtggggaagacagggctccagctaccacaggacgggctctgggtatagccgttccagtcagggac

SEQ ID NO: 173698 - DNA, 75 bp, Homo sapiens
cagcgcgatgcccaaatccaagcgcgacaagaaaggtccccagtctatgtgaggatctcctgtcttctgttgacc

SEQ ID NO: 173699 - DNA, 75 bp, Homo sapiens
gccgtgttccgtgtctctggattcaagtcccaggagtcctgaccagagagcagatggcagttgaattcctgcatg

SEQ ID NO: 173700 - DNA, 50 bp, Homo sapiens
ctcaattatttgaagatacttacaagagacggggtcttgctctgtcaccc

SEQ ID NO: 173701 - DNA, 98 bp, Homo sapiens
ggatctcagcaatggggataccattctggaagacttgcccatccaatctgatgctgcaatgtacaacaactctgaagccctgcccacctctcctatgg

SEQ ID NO: 173702 - DNA, 48 bp, Homo sapiens
aggcctgcaagtccaccgtgggccctcgggaccaaggatcacgtcatg

SEQ ID NO: 173703 - DNA, 100 bp, Homo sapiens
tcctgattctacccaagtacatatgatttcagctgcaatggcaggggaaaaaagtctttcaccccaggatgaacaatgtgctgtggaggaagcactggat

SEQ ID NO: 173704 - DNA, 99 bp, Homo sapiens
caaacaagacgttttgatgaaggaaaattaaaagctggccaaagtgtaattggtctgcagctttcaccaacaatcaccagtggtttacacaacattgca

SEQ ID NO: 173705 - DNA, 78 bp, Homo sapiens
ttcctgttacctctcatcattgtgttaatggtgaagcacagcgattcccgccctcgggaccaaggatcacgtcatgac

SEQ ID NO: 173706 - DNA, 90 bp, Homo sapiens
cttaccatctctaccatcatccggggaaacactactatgaagtatcctgtcatgaccaagggttatgcagggtcgggtggtctaccatgc

SEQ ID NO: 173707 - DNA, 97 bp, Homo sapiens
agaagttaatgcacctggtggttgaaagttttccttcttacagagatgtgactctgtttgagtttaaggaagaaatctctaaacgttttaaatcaca

SEQ ID NO: 173708 - DNA, 100 bp, Homo sapiens
taagactcgaaggcagcacaggacctggaaaaattacatggtaaagaagaccctcaaactggatttgctgctgaagtgcttttaactcacctgtgcggag

SEQ ID NO: 173709 - DNA, 74 bp, Homo sapiens
cagacaccgagcttcagcaagctctctccaacggtacaccaggggttggaaaaaccacactaggcaaagaactt

SEQ ID NO: 173710 - DNA, 100 bp, Homo sapiens
ctcccgagcgctggccttctggacatatcaggaatgatgagaagacagcagctgattacaagattttaggtggttcagtccttcacctggtgttggctct

SEQ ID NO: 173711 - DNA, 83 bp, Homo sapiens
attcttacctctttgatctcgacaataaggctcctggcgacctccctgctgcagggggccctcccagcggggccatgcccttc

SEQ ID NO: 173712 - DNA, 74 bp, Homo sapiens
cggcgtgggagaccagtgccgcaaggagttcacaggtctatcagccacagtctctgcaagtttccaagagcagc

SEQ ID NO: 173713 - DNA, 75 bp, Homo sapiens
acgagattggggccatgccaaggactatgtggagtatgctcaggcttcagaagaggctcgcctctagtgtcctcc

SEQ ID NO: 173714 - DNA, 82 bp, Homo sapiens
gaaggaacgaggcaaggagctaaagcagcgtgcgttcagccctgggctaggacttctctcaaacttgtgtgctgaggagact

SEQ ID NO: 173715 - DNA, 75 bp, Homo sapiens
tcaatgcaggacgtacagttcagcgttacagtgtttctgccacctctgtacaaaagacaattttacttgtgtgac

SEQ ID NO: 173716 - DNA, 82 bp, Homo sapiens
ctcacctcgctactcgcttgcctacccgccggcccgcgggtctacttcctcaaaggagtccaaaactacttacctggaagac

SEQ ID NO: 173717 - DNA, 99 bp, Homo sapiens
cagtgaccgtgtgtcagaacaatcttgaatcatgaagctactaaccagagccggctctttctcggccttcatggtgaaacacctcttggagtataccca

SEQ ID NO: 173718 - DNA, 100 bp, Homo sapiens
ccgtgggactgatgaattacatagcccaagtagtcccagttgtggacatcggatacccaaggagacgaagctgaagcaggagaaggaggggaaaattaac

SEQ ID NO: 173719 - DNA, 75 bp, Homo sapiens
agcatatggacaggtctacgccacatcacttagctattgacctgaaaagtggttctggaaaagtgtaccaaggcc

SEQ ID NO: 173720 - DNA, 82 bp, Homo sapiens
gcagccgatccagcctgcggagcctgtggggcagccatacatcgaagagatttgtcaaaacctccgaggggacgtgttccag

SEQ ID NO: 173721 - DNA, 100 bp, Homo sapiens
cgagtgaccgagaccgcggccgggaccgaggacgcaaacatgcagatctttgtgaagaccctcactggcaaaaccatcacccttgaggtcgagcccagtg

SEQ ID NO: 173722 - DNA, 100 bp, Homo sapiens
ctagggctcgggcgccggcgagatgcctttgttcaccgccaaccccttcgagcaagacgtggtaatctatgccagcaattatgacaatgttagcagacca

SEQ ID NO: 173723 - DNA, 98 bp, Homo sapiens
ccgggattggaccgacgcagccatgattagtgacaagagctggggttaggatccggttggactctgacatcggatgccctcaaacatacagaacttcc

SEQ ID NO: 173724 - DNA, 51 bp, Homo sapiens
tggctctcgccgtccgagtcgtttattgattgtgaataagtggaatacagc

SEQ ID NO: 173725 - DNA, 100 bp, Homo sapiens
ctcggaccagcagtgaccttcaaagtgagcgccaatgtccaaaacgtgaccactgaggatgtggagaaggccacagaagctgcacacatacatgtaagag

SEQ ID NO: 173726 - DNA, 80 bp, Homo sapiens
aactgcgcagcctcttcgagcgccgcggacgcgtcatcgagtgtgacgtggtgaaagactgattcttgctattccaaatc

SEQ ID NO: 173727 - DNA, 73 bp, Homo sapiens
ttggttggtggtaccctaaaattagggcatgattaaggttatttcagacacgcctcactgaaacccatttgcc

SEQ ID NO: 173728 - DNA, 74 bp, Homo sapiens
gacaagatggtgcagaagaagaacgcggtgaatgaaaactttgccattgatttgatagcagagcagcccgtgag

SEQ ID NO: 173729 - DNA, 51 bp, Homo sapiens
cttcattgttgcactcaataaggtcattgctagaatcgtggatggaagcag

SEQ ID NO: 173730 - DNA, 118 bp, Homo sapiens
tcgcgcccgggaggaaggaacgaggcaaggagctaaagcagcgtgcgttcagccctggggctcttgtcaggatggtgaagctgttcatcggaaacctgccccgggaggctacagagca

SEQ ID NO: 173731 - DNA, 50 bp, Homo sapiens
tgtgctgcagaacccccagaccatcatccctgggcgctgcctatggcaca

SEQ ID NO: 173732 - DNA, 75 bp, Homo sapiens
caacttcgtatgcagggtacattgaagaccttaagaagtttctaaaactgcatctgggggaggtgttgtagccat

SEQ ID NO: 173733 - DNA, 100 bp, Homo sapiens
gagttcaaggagttctccaggaagcagatcaaggacatggagaagatgttcaagcaaagcccccgagcgcccacagcatgaaggaggaggccttcctccg

SEQ ID NO: 173734 - DNA, 100 bp, Homo sapiens
gcttgtccagccggaagccctgagggcagctgttcccactggctctgctgaccttgtgccttgaattaacactgaatcctccggaaggaattgtagcagg

SEQ ID NO: 173735 - DNA, 98 bp, Homo sapiens
ggtattccatgccgacgctattcttacaaaggacaacaatattagagtaattggagacaagttggatggcttgaggactggtactaaaaggaaacgtg

SEQ ID NO: 173736 - DNA, 100 bp, Homo sapiens
tttatagctaagactccaggacacccctgaagccgagaaatgctccagcggcgccatgagcaaatgaaaaagaatttggaagcacagcacaaagaattgg

SEQ ID NO: 173737 - DNA, 75 bp, Homo sapiens
gggagagataaaccaccgcttacagatattgggtacctcatcgcccatccttatcaagcttagaaacgttaatgg

SEQ ID NO: 173738 - DNA, 100 bp, Homo sapiens
cgggaaacgtgcaccttgactaattcggttttctgtggctacgagagcagtttaaggaagaaatctctaaacgttttaaatcacatactgaccaacttgt

SEQ ID NO: 173739 - DNA, 78 bp, Homo sapiens
agcagcgcacgcatgaagctgaattgggctgtggcagctggagccgaggatccagaacaggccgcccgcctgaagaaa

SEQ ID NO: 173740 - DNA, 102 bp, Homo sapiens
gttaaatacctgtgcatcccagcagcggattcaccatctcaaaacctacaatgcagatcttcgtgaagactctgactggtaagaccatcaccctcgaggttg

SEQ ID NO: 173741 - DNA, 100 bp, Homo sapiens
ccacgtgcagacatctacaaccttcgatctcctgacgatgatcctgccatgaagcagtttctgctgtacttggatgagtccaatgccctggggaagaagt

SEQ ID NO: 173742 - DNA, 83 bp, Homo sapiens
ctccttttccctctccctttccctaaggttggcgctgtacgtttatgagtacctgctgcacatcggtgcccagaagtcagccc

SEQ ID NO: 173743 - DNA, 83 bp, Homo sapiens
cccgcgccccctccccctcgccatgaaggttggtgttcgaggaagagacattgttgttcttggtgtggagaagaagtcagtgg

SEQ ID NO: 173744 - DNA, 75 bp, Homo sapiens
gtggttttgatcaccggggctagcagggtttgggatgctctgacagacaattacatcccttcactctcagaagac

SEQ ID NO: 173745 - DNA, 51 bp, Homo sapiens
tcacctgtccagaggccaacgctaccaaggaaaatggctttgtaaagaagt

SEQ ID NO: 173746 - DNA, 100 bp, Homo sapiens
gatttgttaaggattccaagtaactcttatttggaatagccaggccagaagaaggaaggcctgtggtgagtgggacaggaaatgacatcaccaccccacc

SEQ ID NO: 173747 - DNA, 83 bp, Homo sapiens
gtcggggactgccagggagtggaggggagccaggcggccgcctcaggcccatcttgacgattccaagaccacccccttgagca

SEQ ID NO: 173748 - DNA, 82 bp, Homo sapiens
gagatggcgagcgcccggattggggatgagtatgcggaggacagctctgatgaggagggaaatgatggcgggaacacagcaa

SEQ ID NO: 173749 - DNA, 112 bp, Homo sapiens
gctgcagaccctcgcagtgagtgttacagctcttaaggtccaagacaagctgctgctatctgcgtgccacttactggtctcactggccaccaccgtgcggcccgtctttctg

SEQ ID NO: 173750 - DNA, 75 bp, Homo sapiens
atggaagtacaagtgtcagcacctatggctaaggaatatgagagtttaatggaaaccaaaaattctggctctgat

SEQ ID NO: 173751 - DNA, 52 bp, Homo sapiens
cttctgcaagtggggcattcacacaggtttcgagacaaggagtggatcaggc

SEQ ID NO: 173752 - DNA, 82 bp, Homo sapiens
cagcggtacgcgcttaaccgcatcacggtgtggaggagcaggtgaaaggtgtagcagtcactcggcctacacccacagcatc

SEQ ID NO: 173753 - DNA, 90 bp, Homo sapiens
ggcgagaaccacgaggcagctgcccgcatccaactgaaattgattgagtctcagccctgggaaaaattggaagctccaccacccacccca

SEQ ID NO: 173754 - DNA, 83 bp, Homo sapiens
caactgcagaggaactggaacagaggaacattttgaaaccccagacacatggccccaggccaagcaccccatcaggctacccc

SEQ ID NO: 173755 - DNA, 100 bp, Homo sapiens
ctgtggactctgaccgcaaacaaggagagcctactgagcagcctgagtggtgtaaacaggaacatcgataagtagtgtaaaaacttgcacaatgaaatcc

SEQ ID NO: 173756 - DNA, 74 bp, Homo sapiens
gctactctctctttctggcctggaggctatccagcgttggtgaattctggccttacgtcagtctgttgttcagc

SEQ ID NO: 173757 - DNA, 75 bp, Homo sapiens
aactcctccagcctccagaaagcattcactcatacggcacaatatgatgaagcaatttcagattatttcaggaaa

SEQ ID NO: 173758 - DNA, 82 bp, Homo sapiens
gccggccagcagacaagatccagatggtggccttggataagggctgctcccaattccgcctggccgtcctggactggaacca

SEQ ID NO: 173759 - DNA, 97 bp, Homo sapiens
aggcgcgccctggagctgctagagatccggaagcacagccccgaggtgtgcgaagccaccaagtgagcctgaatttaaatacattgggaatatgcat

SEQ ID NO: 173760 - DNA, 90 bp, Homo sapiens
aagctgtctaagtccaaagatttttacccaggggctttgttatgcacctaaagccatattggaagctccagaagaaagagcaccccccgg

SEQ ID NO: 173761 - DNA, 101 bp, Homo sapiens
gtgtggagtgcagcacatacacttgtcaccgagccaccattttcctaaggacggtctgaagagccaagagctatttgatgaaattagaatgacctacatca

SEQ ID NO: 173762 - DNA, 97 bp, Homo sapiens
acacctctgattttaatcagttctgcgtttgaaaggaaacccgctgagcttcagtcattgtctattcctggaacttaccaagagaagatcacccacc

SEQ ID NO: 173763 - DNA, 75 bp, Homo sapiens
ccagttcgctctagcagacaagatcagatccacaggttaaacccatccagagtaatggctgcggccttacccagg

SEQ ID NO: 173764 - DNA, 100 bp, Homo sapiens
ttgcctgatcatgcagacatctccaactgtgggaactctttccagcttgtgtctggttcggctttccagtttggcagcagcactacaaatttcaacttca

SEQ ID NO: 173765 - DNA, 101 bp, Homo sapiens
tgcgaggtcgccgcggggctggccgccatgcacaagctgcacttcctgcacagctatcagttgagggatttgcagttgataaaatggctggagaggttaag

SEQ ID NO: 173766 - DNA, 87 bp, Homo sapiens
cgaggttggcgacgccgccccgccgggccccagatcaggtatgatctcgtgaaaccttgagagaaactgaatgacgaatgaaactat

SEQ ID NO: 173767 - DNA, 75 bp, Homo sapiens
ggcagacttctctgtgagctcttcattagggcaccaaagcgaaggaatctttgtctgaagtggaagaaaaataca

SEQ ID NO: 173768 - DNA, 83 bp, Homo sapiens
gctgtctatgagggtcatgtttcctgtgtgaaattgcttctgtcaaagggaatgacagaggaagaggaagacaaacttctggc

SEQ ID NO: 173769 - DNA, 100 bp, Homo sapiens
atgttgtctcactgccaagctctgtcgcaggcctgcaattattctgaagttccgatgaagttaaattccgtcaagatttaatgaatattgcgggcacaac

SEQ ID NO: 173770 - DNA, 78 bp, Homo sapiens
ggtgaagatcctcgttcagtagtctacaaggaagtcttcacgaggagcagtgagaactcagcgtcgtcgacgttctaa

SEQ ID NO: 173771 - DNA, 143 bp, Homo sapiens
caacagatgagcaaagaatgacagcaagaggcaaaacttcggacatagaggccaaccaacctttggagaacctgctaaggctgcctcagacctgactgcctggttcagcctcttcgctgacctcgacccactctcaaatcctg

SEQ ID NO: 173772 - DNA, 74 bp, Homo sapiens
ttatatcctccaggaatactggccagtgggcgctctacctgttcctggttaaatgcacgatcagcatttccacc

SEQ ID NO: 173773 - DNA, 148 bp, Homo sapiens
accatgtatttgtggcttaaactcttggcatttggctttgcctttctggacacagaagtatttgtgacagactacacttgctgctttgaaggatgaagttgtatctgttgaaaatgaactctcagaattgcaagaagtagaaaaaaaa

SEQ ID NO: 173774 - DNA, 75 bp, Homo sapiens
gcagatttgctggatacgtgacatcaattgctgcaactgaacttgaagatctttttttctcaaggtgcaatgaaa

SEQ ID NO: 173775 - DNA, 90 bp, Homo sapiens
ttgccttcctgttctccaagaccagatgatgattattctccaccgtctaagagaccaaaggccaatgagctaccgcagccaccagtcccg

SEQ ID NO: 173776 - DNA, 100 bp, Homo sapiens
caagtgattcttctgcctcagcctcccagtgatgtggagccaactgcaccgatggaggaacccacagtggtggaggagtcccagggcaccccggaagagg

SEQ ID NO: 173777 - DNA, 90 bp, Homo sapiens
gccagttcatgaaggccggcagcatcaatgtctggaacatctgtcccctgttcaaagcaggctctgggttgggtgtgcccccacactcgg

SEQ ID NO: 173778 - DNA, 50 bp, Homo sapiens
agaagctgaggatgaagaagatgatgctgagatgaatcgtcacctgtgtg

SEQ ID NO: 173779 - DNA, 82 bp, Homo sapiens
gcaggggcaggcctagtttgactctgacagtcctcccactaaggattatatctgtccaagatgcgagtctggttttatcgag

SEQ ID NO: 173780 - DNA, 100 bp, Homo sapiens
caggagagacacgctgggccgaccccagagcggcgctggacagcgatctagggcagccctgcagaggtacctgttctactgtaatcgctatatgaaccac

SEQ ID NO: 173781 - DNA, 100 bp, Homo sapiens
aaccacagccctggagatgcctgaccgggagaacacgtttgtggttaaggaaggcccgaacaagacaggaacgtcctgtgccctggactgtggagctggc

SEQ ID NO: 173782 - DNA, 100 bp, Homo sapiens
agactacataccgaataggagtccttccaaaaatgtggtgatggcacttctcaaatactggccaaagactcacagtccaaaagaagtaatgttcttaaac

SEQ ID NO: 173783 - DNA, 50 bp, Homo sapiens
tgacagtgaggaggaacaagaggagggtccccgcactcccggtgaagaac

SEQ ID NO: 173784 - DNA, 80 bp, Homo sapiens
tccagcacctggaggatacctgctacctgaaaatcatcagcgtgttagcattttctttgactatgcaagatgtagcaaga

SEQ ID NO: 173785 - DNA, 90 bp, Homo sapiens
cagattcgcagtggtcgcttcttctccttgatttggaacattgctaccaataaactgacgttcttgaactcctttaagatgaagatgtct

SEQ ID NO: 173786 - DNA, 100 bp, Homo sapiens
tgccctgcagtacctgcagaaggtctctggagacatcttcagcaggttctgcgttagacctgcatcttagcaatgtgaatattgcatccctagagaagga

SEQ ID NO: 173787 - DNA, 82 bp, Homo sapiens
aacatagttttggaactagcagatgctggcgacctatccagaatgatcaagggctgtggtggaggctgtgcatcgacttgac

SEQ ID NO: 173788 - DNA, 75 bp, Homo sapiens
cccaggaagccagagccacacacaccatcatggtcctggatgccaaagaagagtgaatggcccacaaagagcctg

SEQ ID NO: 173789 - DNA, 100 bp, Homo sapiens
gagggactctctaggctgccgggcgctggtcgtcagcgccgaggctgggctgaggcgccgcggtaccatgaggcgccgatacactctgtgcagttttaga

SEQ ID NO: 173790 - DNA, 78 bp, Homo sapiens
ccatttcgcctttatcgtggtggagtccaccctggctgtggccggatcacctcaacagtcacgtcagacaagtgcact

SEQ ID NO: 173791 - DNA, 100 bp, Homo sapiens
acacccaggaaaagactcaggacggacaagcacagtcttcggaagaataatcatgggccagactgggaagaaatctgagaagggaccagtttgttggcgg

SEQ ID NO: 173792 - DNA, 75 bp, Homo sapiens
accacaaccccgccggcttcaactgcaaaggtggtcctggctctgccatatgacacccccgtgcccggctacatg

SEQ ID NO: 173793 - DNA, 49 bp, Homo sapiens
tagctaatgaccgtggttcccactgaggatctcatagatcagaacatac

SEQ ID NO: 173794 - DNA, 90 bp, Homo sapiens
agtacatcagcgtgaagacgcagagggagacaggggcccagaagacacctgctttgagtttggtgtttttcctgccatcctgagtttccc

SEQ ID NO: 173795 - DNA, 96 bp, Homo sapiens
cgcagctccacactccaggtacttcttccaaggacctaggtctctcgcccatcggaaagccctgaacactctgcggcttctctgagaaaccctatc

SEQ ID NO: 173796 - DNA, 83 bp, Homo sapiens
ctcgagcccagaagatcaagactagtgtgagcaacaaaggatttgtcttggctgttactatgacacgggaagcaattgatgaa

SEQ ID NO: 173797 - DNA, 99 bp, Homo sapiens
ctgtgtgtaaacatgacttccaagctggccgtggctctcttggcagccttcctgatttctgcagctctgtgtgaagaagttcaccatgtctattctcaa

SEQ ID NO: 173798 - DNA, 74 bp, Homo sapiens
ctttggccctgtatcaggagcacagactctttttgatcagaacaatgctgcaaaaaaagaagagtcagaaactg

SEQ ID NO: 173799 - DNA, 100 bp, Homo sapiens
gtcccgctgcagccgagatgccgggggagcggggccttccacaccccctccgtgggtgtgtggtgagtgtgggtgaggaattttaaattggaacaagagc

SEQ ID NO: 173800 - DNA, 100 bp, Homo sapiens
agccgcttcccccagagctgtcgccatttccaaagcccagacttgggaactcagtacctggcaccagttgttctgcaaactcaccctgcggcacatcaac

SEQ ID NO: 173801 - DNA, 100 bp, Homo sapiens
aacttggcccagccttgcggcagcgctagacattgagaatgaagtcaataatgagatggccaatcgaatgtccctcttctatgcagaagccacgccaatg

SEQ ID NO: 173802 - DNA, 100 bp, Homo sapiens
gcgcctccaccctcaccaccacctacagcagcggcgtggccaccgacccccagatcgatcccatgacagattctgttgtcacgtctccttacagagtttg

SEQ ID NO: 173803 - DNA, 100 bp, Homo sapiens
ggccagagttgtgggccgccgtcggcagcaagaacagagagagaggtggacagatctgagagatactgagatctcaacagcaacggattcatttgtgact

SEQ ID NO: 173804 - DNA, 83 bp, Homo sapiens
cccccctccccaagaatgttccgctacgaggtcaccctgctttcctttgctgtggagtcagagtgcaccttccttgactacat

SEQ ID NO: 173805 - DNA, 74 bp, Homo sapiens
tctggatagcaccttatggacagcctggagatttgaaaaagagaattgaatctctgatagacagagactatatg

SEQ ID NO: 173806 - DNA, 83 bp, Homo sapiens
tgcgactgctacagggaccatgggacactattacgcaacagagcagcccgacggccatggaggctgaagagacgatggaatgc

SEQ ID NO: 173807 - DNA, 90 bp, Homo sapiens
gcacatttgtgatgatagccagtcccgagagccaggaggagagacttcagcatgcaaaccttcatctgttcggcttgcaccgtcattttc

SEQ ID NO: 173808 - DNA, 88 bp, Homo sapiens
cttcaatactacctttatttccaccatagcacttgcacctcctgcgccgccgccccccatccaaggatatgccttcaagcctccacct

SEQ ID NO: 173809 - DNA, 83 bp, Homo sapiens
tgtgtttgggaggactcgaactggcgccagttttaacaacctgggcatccagtgtgtgaggaagaaggagattgaggctgcca

SEQ ID NO: 173810 - DNA, 75 bp, Homo sapiens
agaaaacatcaaagaggtctagcaaagaacctagaagtcggaatccggaagaagatcgaacatgacgtggtgatg

SEQ ID NO: 173811 - DNA, 75 bp, Homo sapiens
aagaccgagctctcttcaacggagcccaaaagtgtatcatgatagaggaaaccagttttgggaaaagttatgcac

SEQ ID NO: 173812 - DNA, 90 bp, Homo sapiens
ggcagagcctaagagaactatggcaacatcaggtgactgtcccagaagtgaatcgcaggccccctcttctctcctggaggtcagccggcc

SEQ ID NO: 173813 - DNA, 100 bp, Homo sapiens
gccgcttatcttcaggagcgaagagctgcttctgtatcttaagctacagcctccgcttggcgtcccgatgctctccaccagcggccccgtacatcaccag

SEQ ID NO: 173814 - DNA, 100 bp, Homo sapiens
gcctgatctcaagcccaacctcaactccttgcactcatcgccctctggttggatggcaagcatgtggtgtttggcaaagtgaaagaaggcatgaatattg

SEQ ID NO: 173815 - DNA, 90 bp, Homo sapiens
gcgtcggcaagaagatcggctgcggcaacttcggggagctccgcctaggctgtagcaaggtgctgctgaggccacggacgtcggaggagg

SEQ ID NO: 173816 - DNA, 100 bp, Homo sapiens
ttcaagaaaaagcaatggagattggatggatgcacaatcggagacaaagggttgtgagtcccggcccagcccctccacccccctgcccccccgatgcgac

SEQ ID NO: 173817 - DNA, 101 bp, Homo sapiens
accactctttgcctgaaactttagagaagacgttcatatcattgtcttccacagatgtgtcaccaaaccagcaatctgaagaggatgtaagtcagtttgat

SEQ ID NO: 173818 - DNA, 74 bp, Homo sapiens
ctgggcctcagtgacatgaatctgtggagagtctggctcagcaggcaacagtgacaatgccccctgccctacca

SEQ ID NO: 173819 - DNA, 90 bp, Homo sapiens
ttgctgcatttgttctgcctgacttggaccctggaaaacctggccctcttcaatttctgacaaaagacttccttgtgaaacctcctagta

SEQ ID NO: 173820 - DNA, 75 bp, Homo sapiens
ctcggagggccagaacctcactcgctctcccgcaggccaaagatgaagaggaagcctttctggattggagtgatg

SEQ ID NO: 173821 - DNA, 90 bp, Homo sapiens
cggggtctccctcccaggacacaggagtcaaggacagagcgggatgccaccagcttgtccaaagggaagttccaggagctcctggtgggc

SEQ ID NO: 173822 - DNA, 100 bp, Homo sapiens
tctgagtgatgttcagaagtttgcagagataaatggtatggcatttcaaatatagatacaaccattgaaggaacgtcagatgacctgactgttgtagatg

SEQ ID NO: 173823 - DNA, 95 bp, Homo sapiens
agggagagcaagaccatcatgctgcgcggccttcccatcaccatcacagagagcgataatggtgaggttctggagaattgatgaggattatccag

SEQ ID NO: 173824 - DNA, 75 bp, Homo sapiens
ctggcagccaaatgcatcctggcaggttgaggaacaggttagcaccactgagagagtgtttcaggatagacaata

SEQ ID NO: 173825 - DNA, 89 bp, Homo sapiens
tggagatgatccatttcaaggacttgctgctgcacgactttgtgtccctggtgatgttggaacattaatgatggaacatggccaaactt

SEQ ID NO: 173826 - DNA, 75 bp, Homo sapiens
ggttcatctgcaagtgccctgcgatggcagaaacggtggacacaagcgaaatggtcaacggcgctacagaacaaa

SEQ ID NO: 173827 - DNA, 90 bp, Homo sapiens
attttagggtcctttatatagaagggagagtagattggaggtggacacaaaggaagaggcagccagacagctacttcagcgtcctcaacg

SEQ ID NO: 173828 - DNA, 80 bp, Homo sapiens
tgattagcttcgcagtctggaaagctttaggagttcacagtgactccctggaggaaaagcggaagcggcagcggtctgaa

SEQ ID NO: 173829 - DNA, 75 bp, Homo sapiens
ggagaggtggaaaagctaatcaagtgcgacgaaattcaggcaatgaatcgctccctggctaatgtgattcttgga

SEQ ID NO: 173830 - DNA, 100 bp, Homo sapiens
gtccctgtcgtgtgacattttctggcaaccacacctccaaatcaaggaaggccagattctcctgtctatgctaaccttcaagaactgaaaatatcccagt

SEQ ID NO: 173831 - DNA, 88 bp, Homo sapiens
agatgacatgtctaattatgatgaagaagtacactgtgtggaattttgttccaaaaaatttatttgaacagttcagaagagtggcaaa

SEQ ID NO: 173832 - DNA, 100 bp, Homo sapiens
ccgagtatgcttcgtttttcgccgtcatgggcgcctcggccgccatggtcttcagcgaatagcattcctttcgaacaccacggcaagtagctgctcgtct

SEQ ID NO: 173833 - DNA, 100 bp, Homo sapiens
cgagactctgtgttgacctggctgctgaaggacagccttggaggcaactctaaaaccatcatggttgccagaatacaaacagaagcttgcacgagtaacc

SEQ ID NO: 173834 - DNA, 100 bp, Homo sapiens
gcaaagcatctctatggaatacctccgtatggatctgtaaagaagagtcccacttcagtcaaagacagtagattatgagctggcatgcctcttggagtgg

SEQ ID NO: 173835 - DNA, 83 bp, Homo sapiens
cggcaggagagtccggccgcgacaggacgattaaagagtctattgttggggaaatcagacgggaaattgtaagtggacttttg

SEQ ID NO: 173836 - DNA, 100 bp, Homo sapiens
cggacgccaccctgacgccgtggcctgggccaacctcaccaacgccatccgcgagactggttggaggctggcagcgaagaagatcgaaaattaaacctca

SEQ ID NO: 173837 - DNA, 76 bp, Homo sapiens
ctcgcatctcagcctcccaaggagctgggacctcaggcccttccttctaccatgattatagtagcagtttattgtc

SEQ ID NO: 173838 - DNA, 75 bp, Homo sapiens
aggcctgggctggagtgttacattcagttcctggactccgtgactattgggaagaagttacctgcaactacagca

SEQ ID NO: 173839 - DNA, 75 bp, Homo sapiens
acttcctggcagtacaccctcctccagctccaggttccaagttccccatcaagtggacagccccagaagctgccc

SEQ ID NO: 173840 - DNA, 82 bp, Homo sapiens
gcctgacagctctgcggctcgggccctgagggcgtctctggccgagcctctttttgtggaaaacgacagcagcagcagtggc

SEQ ID NO: 173841 - DNA, 101 bp, Homo sapiens
ccatggccctgcagtcgatccggaacatgcgcgggaactcccactgtgtggactgcgagacccagactgacaagctctctactgatgatctgaactccctc

SEQ ID NO: 173842 - DNA, 98 bp, Homo sapiens
atgcgccaatccaaaccgaaagccagaaggcactgaagtggcagcagcatcagggattgcttcctcctggtatgaccatagatttgtttcgaggcaag

SEQ ID NO: 173843 - DNA, 80 bp, Homo sapiens
tgtcttcagatcttcacagcacagttcctgggaaggtggagccaccagcctctccttgagcacagcaatggaggaaacag

SEQ ID NO: 173844 - DNA, 89 bp, Homo sapiens
ctcccgcccaaggagaatgcgctcttcaagcggatcttggttcgaaccagtgtcctaccagaacataaggatcccccgccagaagttgg

SEQ ID NO: 173845 - DNA, 100 bp, Homo sapiens
gacaacatgacagacatggtgacccacatgcctgaccgctacaagatcgtggagacactgatccagcacgagtataacatgtatggctggtgggtgggag

SEQ ID NO: 173846 - DNA, 100 bp, Homo sapiens
gaagagttgtcccagctcggcccgcgggggagccccgggagccgcacggccgccattgtgaagtccatcagatgatcgggaactacatgtgggaccccac

SEQ ID NO: 173847 - DNA, 87 bp, Homo sapiens
gcgcctggcctggcgacccggtggactcggcccgcggcggcgcgctcacccgccccgttcaggatttttagactctgaggagcagtt

SEQ ID NO: 173848 - DNA, 87 bp, Homo sapiens
tgaagtccctggaggaggagctggagaggaaggcgagggagtgcatccgccccaacccttttccccctcgtctcctgtgagaattcc

SEQ ID NO: 173849 - DNA, 75 bp, Homo sapiens
aaggcctggacgacggcccggacttcctctcagaagaggaccgcggatagagacgaggtttcgccatgttggcca

SEQ ID NO: 173850 - DNA, 99 bp, Homo sapiens
gataaagggctctgaaagctagaagaaaaggtgtacttgcaagaaacctcaggacttgagtaacagcaacatggccaatagcttcaccgtctcctctgt

SEQ ID NO: 173851 - DNA, 90 bp, Homo sapiens
aaatcaacaacagtttcctgcgcgaccacagctatgcgaccgaaggtcagtatgggaatcctttaaataaatatatcagacattatgaag

SEQ ID NO: 173852 - DNA, 75 bp, Homo sapiens
ctggacttaaatttaaggactgggtatcaagtaaacgaagctgtcaccactgactaaagaagagaaaactgcggc

SEQ ID NO: 173853 - DNA, 75 bp, Homo sapiens
gaggaatacctcgtatgcaacctcaggcttcagccagacctgatcccaaccttgaagaaagtcctaaaagaaaaa

SEQ ID NO: 173854 - DNA, 75 bp, Homo sapiens
gcgagaagagcttctgtctcgaaccttcaccactaaccggatggacatggaccggcggagggaagatgcccggaa

SEQ ID NO: 173855 - DNA, 109 bp, Homo sapiens
cgagcgggagaggcccggggcacgtgcagaaaggagccccgcgagtggcgcgccggggatatgaaggatttgggggcagagcacttggcaggtcatgaaggggtccaac

SEQ ID NO: 173856 - DNA, 100 bp, Homo sapiens
ggtgcagaagagagacttcctggtggacgatgcggaggtcgagcggttaagaatgttcgtggcatcagagagaaagatgagagctcaccaggtgctcacc

SEQ ID NO: 173857 - DNA, 98 bp, Homo sapiens
cttcgcctcctaatccctagccactatgcgtggagattggtgaaagcgtgagaggggaagatgtctacatcatccagagcggctgcggggaaattaac

SEQ ID NO: 173858 - DNA, 100 bp, Homo sapiens
gattatttgtattgactaaatactggcaacaaatcccactaacagatcaaagactgacatcaatttgccctatcttacaatggattcttctggacccaag

SEQ ID NO: 173859 - DNA, 96 bp, Homo sapiens
agaaaattctgggcatatttataataagaacatatctcagaaagattgatgttccatttaagcagacctcttccatagctgtagctggagcggtaa

SEQ ID NO: 173860 - DNA, 50 bp, Homo sapiens
gtccagcccagcgattctcagtcagatgttccatttaagcagacctcttc

SEQ ID NO: 173861 - DNA, 83 bp, Homo sapiens
atggatccacgcctgatggctccacgcatttcccttcgtggtaagagcttctgttcgtgtgcagggaaagcagctcacagacg

SEQ ID NO: 173862 - DNA, 150 bp, Homo sapiens
gtatccccctgacaattacctgtataatcatctcacctatgcagtcaacatttggagtgaaaacgacccggcagatggtgatgttcagcggacactcatccaagtggactttggcgatggtatcgcggtgtcttacgtcaatctcagctc

SEQ ID NO: 173863 - DNA, 97 bp, Homo sapiens
tgacgtaccaaacaggcacgagataaggtaattcatttgcacacctgttagcaagaaacagaagttgaaggactggaacaagtgaactaggaaagag

SEQ ID NO: 173864 - DNA, 98 bp, Homo sapiens
tggcgcggcggaatccagggccgacccgggccggaccgaccccaggcggcgagagaagaagaaggaggttcctgctgtgccagaaacccttaagaaaa

SEQ ID NO: 173865 - DNA, 100 bp, Homo sapiens
agaggaactaaggcggaggaactgagacgtttcgaattccaggatggatagaatgacagaagatgctcttcgcttgaatctgttgaagcggagcttggac

SEQ ID NO: 173866 - DNA, 111 bp, Homo sapiens
gactggcgcgtacgagatctccgaccagtctgggggcgctggcggcctgcgcagccacctcaagcccaggtgtggcctcactcacatcccactctgagtccaaatgttctc

SEQ ID NO: 173867 - DNA, 90 bp, Homo sapiens
tagagtgggaaaaaagcagaggccagggcgccggctgcaggccaacttcaccatccgggaagatgccaaccccagctcccgacagcgagg

SEQ ID NO: 173868 - DNA, 83 bp, Homo sapiens
atcagccagtgtggaaaaccagtggtaaatgtcagctacaggccagcttatgaccaggcgggtgaaaatgaaagccggctgta

SEQ ID NO: 173869 - DNA, 124 bp, Homo sapiens
ttgactcacgttcttggagttgctggtgttctatactggaagaggcatgccagaggtagagcagaaatatggctacacacacctttctgcaggagagctgcttcgtgatgaaaggaagaaccca

SEQ ID NO: 173870 - DNA, 75 bp, Homo sapiens
tccagttgccctccaccatgaccaacttgcgctctggtttgggtacccagaccccacctacctgacccgggtgca

SEQ ID NO: 173871 - DNA, 100 bp, Homo sapiens
cttcgccatctggctccaactggtaatgctccggcctctcgtggcctccctactaccactcagagagtcgtttggtcagatgaagactgggtggagaagt

SEQ ID NO: 173872 - DNA, 100 bp, Homo sapiens
cttgaaaagaagcattagtgcttcaattaatccagaagatagtactttccctgttttcagataactattatcgtgcagaaatgattgatgccctggccaa

SEQ ID NO: 173873 - DNA, 75 bp, Homo sapiens
gacctgccgtgggaccccagagattcccaccttgccttacacccagacaaaactctcgttgcaactggccaagtc

SEQ ID NO: 173874 - DNA, 75 bp, Homo sapiens
ccccgcgcctgcacttagccccgcgcccgagtcttgcgtccaacggcatctccacagaaggaggaaagagccttg

SEQ ID NO: 173875 - DNA, 98 bp, Homo sapiens
cgtgtttcaagaccaaaaaacacaataccaggcatacatttggcagaataaatgaaccagatatgatggacgtggtcacctgcatgacctttctgagt

SEQ ID NO: 173876 - DNA, 100 bp, Homo sapiens
gcgctcggcgatggtaggcgtccctggagcggccgccttccagcgcggccgggagaacaagatgcctattctcatttccaagatcttcaagggattggca

SEQ ID NO: 173877 - DNA, 91 bp, Homo sapiens
cttcggtggactccttcggcagtccacccaccgccgccgcctcccaggtctcagccttagatccaaggacagtccaaggaagtcctaagac

SEQ ID NO: 173878 - DNA, 75 bp, Homo sapiens
tacgaccggccctggcagcgcgccacagcccgcgaagccaacgagtgcgtggctccggcaggagcctgtggtggt

SEQ ID NO: 173879 - DNA, 98 bp, Homo sapiens
gaggaacgagagcgcgaagctaaggtgatttgatgaaggctgctgcaggagagttcgcagatgatccctgctcttctgtgaagcgaggcaacatggtt

SEQ ID NO: 173880 - DNA, 100 bp, Homo sapiens
ctcactccctttcctctgctgccgctcggtcacgcttggaagtggttacctggaaggaaaggagctgcagaacttgatccaggagctccagcaggcgcga

SEQ ID NO: 173881 - DNA, 117 bp, Homo sapiens
ttgaatgatttatagctaagactccaggacacccctgaagccgagaaatgagtgtgaacatggctacgcctcttcattcccgtccatgccgagcccccgactgcagcattcaaagcc

SEQ ID NO: 173882 - DNA, 83 bp, Homo sapiens
tggcttttggggcaagctacggaacagataacgaaggaggcccaacttcattcaataaggagcctgacggatttatcccagac

SEQ ID NO: 173883 - DNA, 114 bp, Homo sapiens
ccctgatcatcctgctgggcttcgtccagatcgggaagggtctacgacgttcctccatcggtgagcaaggatgtgcccgatggcccactgctgcgtgaggagacctacgatgtg

SEQ ID NO: 173884 - DNA, 100 bp, Homo sapiens
tttgatgataggcagcttaggctagatgggtcatcaaaacttcaatcccatatgaggcattcagacagcatttcttctctggcttctgagagagaatata

SEQ ID NO: 173885 - DNA, 82 bp, Homo sapiens
gagggccagagcgtcggggaggcaagatgatccaccagcggttccatcctacacttggttcccccagaagatcaatggaagg

SEQ ID NO: 173886 - DNA, 50 bp, Homo sapiens
gagaaagtgaacagtaggtttgtagtggacccccaaaagtacaagggcat

SEQ ID NO: 173887 - DNA, 75 bp, Homo sapiens
cttcgcggacggtgctggccccgggcaacgatcggaactcggacacggaggagccgaggaaggtctgcttcacct

SEQ ID NO: 173888 - DNA, 100 bp, Homo sapiens
gtttttcttgcaaaccttgctttggattttatgtgctacagtctgcggaacggagcagtatttcaatgtggagcatgtagagcgcatgaagtacaggaca

SEQ ID NO: 173889 - DNA, 100 bp, Homo sapiens
acgagcatgttggaagctttgccagggacctagtggcccagtggaagaagctggttcctgtggaacggtgtctttcaggttgcagaaaagatggaaaaaa

SEQ ID NO: 173890 - DNA, 74 bp, Homo sapiens
agatatagtactacattttgccgcacaaacacatgtagcagttaggacttcaggaattatttcctcaaggtcat

SEQ ID NO: 173891 - DNA, 83 bp, Homo sapiens
gggacggcgaggccctcatgtaccacacggatgaagtgtcctcttgctagcaccaataaaagatttctaattaacacaattaa

SEQ ID NO: 173892 - DNA, 111 bp, Homo sapiens
ctcaactttaacaccgacgagcaggcactggaagaccacttcagcagtttcggacctatctctgaggcctccgatggaaccccacagggggagaaggaaaaggaagaaaga

SEQ ID NO: 173893 - DNA, 50 bp, Homo sapiens
gctggagggagaatttcaagaactgcagaaatcttcccaaggctgcagac

SEQ ID NO: 173894 - DNA, 75 bp, Homo sapiens
aaacctgcggctgatctccaagtttgatactgttgaagacttttgggctctagagcatgtttggaaaggattcaa

SEQ ID NO: 173895 - DNA, 83 bp, Homo sapiens
aacctggtcctcatactattttgacctgcagctcctcgtcttcatgtttccagtttcctgctctacgaaacgcactcttttgc

SEQ ID NO: 173896 - DNA, 50 bp, Homo sapiens
aagggccttactccttcacagatcgaatttcctgttgagatataaaggcc

SEQ ID NO: 173897 - DNA, 75 bp, Homo sapiens
ttggcactacccgtcttgaggaataacatgccagcagaagcattcaccaactgacatgtgccctgaaagaaggcg

SEQ ID NO: 173898 - DNA, 51 bp, Homo sapiens
atccattctcggattctagaacagagagattaaacagattctagaaaatga

SEQ ID NO: 173899 - DNA, 83 bp, Homo sapiens
gcttgagagctgggttctattttccctcctcaaactgactttgcagccacggagaggaactgtggctgcaccatctgtcttca

SEQ ID NO: 173900 - DNA, 100 bp, Homo sapiens
tttgccagggcatgtagctctccaggcttgcaagcgattaccagaaatacaggtatcaggatgaagatacacctcctcaagagcatatttccccacaaat

SEQ ID NO: 173901 - DNA, 98 bp, Homo sapiens
catcaagttcaaggagtctcttgttaatgccataggaaaaggatacagagtagagtttcatgaacctgaaacttggtggaaatttgatcctgaagaat

SEQ ID NO: 173902 - DNA, 124 bp, Homo sapiens
tatgaatgagtatcctaaaaaaagaaaaaggaagactctacacccttctcgttattcagtggatcaatgagacaatattagtgccacttgttcaagagattgagtctgtcagcacacagatgag

SEQ ID NO: 173903 - DNA, 75 bp, Homo sapiens
ctcatgttctgcacctcaggagggaattcagcctcagtgatgtccatgagaatcatgtcaaccctgccatggact

SEQ ID NO: 173904 - DNA, 75 bp, Homo sapiens
tgacccggacgacagatattacaacggtgcgtgccctggaggaggccaacactgagctggaggtgaagatccgtg

SEQ ID NO: 173905 - DNA, 83 bp, Homo sapiens
cgacgctggagtggggagaagcatcatggttcaacacaatgcagatcttcgtgaagactctgactggtaagaccatcaccctc

SEQ ID NO: 173906 - DNA, 50 bp, Homo sapiens
aacgccaacctcaggcgagatgaatcagcaatctaagtccagaagaagag

SEQ ID NO: 173907 - DNA, 78 bp, Homo sapiens
ccgggggtcggcttcttcttcaaggagaaagtggaaatgcagaggcagcgcttcagattggagtttgagaagcatcgt

SEQ ID NO: 173908 - DNA, 100 bp, Homo sapiens
tgaaatcttgtgctgagtgggtgtctctctcaaaggccaggattgtagaatatgagaaagaggtggagaagatagacaatgaggtccttatggctgcctt

SEQ ID NO: 173909 - DNA, 100 bp, Homo sapiens
agtggtgaagctggaacagccagaattggacccgaaaccatgcctcactgtcctaggcaagatgactttgaagaagccaaggaaattttgacaaagatga

SEQ ID NO: 173910 - DNA, 76 bp, Homo sapiens
ctccagtaaaaattgaaggttatgaagatcaggtaccagcaacttcaaggtttctgccagcccactgttgtatacg

SEQ ID NO: 173911 - DNA, 87 bp, Homo sapiens
gcagaacaggatggccatgtcccagtaaattcctcatctatgcctgtctgctgctgttctctgtgctgctggcccttcgtttggatg

SEQ ID NO: 173912 - DNA, 75 bp, Homo sapiens
ggctacttctcagctttaccatccctggaggagacctggcagcaggaggcaagtgaggcctatctggttggcctt

SEQ ID NO: 173913 - DNA, 101 bp, Homo sapiens
aagatgtgcaaagggcttgcaggtctgccggcttcttgcttgaggagatttcagagacaactgtctgaaccctgccaccccttccctcctcagccaggagt

SEQ ID NO: 173914 - DNA, 90 bp, Homo sapiens
acaaatgtgatggaggcaaaccagcgggcgcggatcaagaagatcatgcagacggacgaagagattgggaaggtggcggcggcggtgcct

SEQ ID NO: 173915 - DNA, 75 bp, Homo sapiens
gacccacctttgtttcctagtgagaaccgagtcagtgctcttacccaggaatactctgaagatagtaactccgag

SEQ ID NO: 173916 - DNA, 100 bp, Homo sapiens
atttaatggaaaatcgcttggttaaaacctgacacttttaacagggttaatgcctcttggaagtcaggagtcttcagacagtctagctgcagagattgtt

SEQ ID NO: 173917 - DNA, 100 bp, Homo sapiens
agccgaccttgagctccaggagttcgtctcttacgtctgcggaagtgcagctgcctcagttcttagcgcagaaaataaacagagttgtctttgttggaaa

SEQ ID NO: 173918 - DNA, 98 bp, Homo sapiens
ggagccaccatcaagctgtctaagtccaaagatttttacccagctattgacctgaaaagtggttctggaaaagtgtaccaaggccctgcaaaaggtgc

SEQ ID NO: 173919 - DNA, 100 bp, Homo sapiens
caacatccagcggatcagccaagccaaaatacaggtatcaggatgaagatacacctcctcaagagcatatttccccacaaatcacaaatgaagtgatagg

SEQ ID NO: 173920 - DNA, 82 bp, Homo sapiens
ggacgagttggagtcatctttcgagacccaagtcttggattgaggaacaggcaatgggatcattcctcagtgtggccaaagg

SEQ ID NO: 173921 - DNA, 75 bp, Homo sapiens
cactttattatggatgatccagcaggaaacagttacttgcagctgaatttcaatatgctgaaaccgtatttcgag

SEQ ID NO: 173922 - DNA, 60 bp, Homo sapiens
cgaggaaggcggtggtagtgacggacccagcacaccctgcctgcatggcgctgcgctgca

SEQ ID NO: 173923 - DNA, 75 bp, Homo sapiens
gcgagatccccttgaaagacaagacgctgattgagttcagagaagccgaactgggattaccatgcagaaatacaa

SEQ ID NO: 173924 - DNA, 74 bp, Homo sapiens
agggtcctttatatagaagggagagtagatgtggacgagtgctcactagcagaaaaaacctgtgtgaggaaaaa

SEQ ID NO: 173925 - DNA, 83 bp, Homo sapiens
cggagataaattcccggaaccgcgattcggcgtgtcagatcctgataacttaagtgactctctcttttccggtgatgaagaaa

SEQ ID NO: 173926 - DNA, 82 bp, Homo sapiens
cgatcctcaccgcaacattccttatccaatcccttaccgcaacaggataagacctcgtctaacctacatgaagctgcttcgg

SEQ ID NO: 173927 - DNA, 82 bp, Homo sapiens
accttggagtccagcactctgcatgtgactccccgcagcctggacagggacatggcttgcagtgtggcaggcataacttctg

SEQ ID NO: 173928 - DNA, 128 bp, Homo sapiens
ctcagaagaacttgtacagagatgtgatgttggagaactatagcaatctggttttcttgggtgtcatggagaaactccagctgggcccagagattctgcagcgggaaaatccaaggcttatttatgcc

SEQ ID NO: 173929 - DNA, 75 bp, Homo sapiens
gtcgtcggcctctgggcagcaggttacttttcacatagaaccatatagcaatcgagatgatcaaaacatgtacaa

SEQ ID NO: 173930 - DNA, 83 bp, Homo sapiens
ggacgacgagtacgactacctattcaaagttttgtaccaatggctagaagcagatcgtcatggcaagagccaaggtgctgcaa

SEQ ID NO: 173931 - DNA, 83 bp, Homo sapiens
cagtcgtagatacaaatttttggatgatgatggatccatttctcctattgaggagtcaactgaaatgttcagagtgaaagaag

SEQ ID NO: 173932 - DNA, 82 bp, Homo sapiens
cggcaggctgagaaaagcgagaccgcgtgcgaggaccgatataacacgtgggaaccggaggagaacatcctggaccccaggc

SEQ ID NO: 173933 - DNA, 100 bp, Homo sapiens
tagagcagcaagcttagttataatgaaatccttagaaatcaagtttcaaaattattcttcagcaagtgaagtgaaaggagatggggtctcaccctgtcac

SEQ ID NO: 173934 - DNA, 113 bp, Homo sapiens
cttcgctgtctgggatgttggcagccacttcaaaatcagacctctgtggcagcattttttccagaacacaaaagttttacagctcccagcacagtaggaaagagaaatttgag

SEQ ID NO: 173935 - DNA, 75 bp, Homo sapiens
aaggagcaagagcaagatcaccgtgacatccgaggtgcctttctccaaaaggagagggctgaacccccctcatcg

SEQ ID NO: 173936 - DNA, 99 bp, Homo sapiens
caggtttgtctcttccagatcagaactgaggaacaaaaacccccatcctgggaaaaatggggaagctggtagtaagcattaataatgtctttcatcttt

SEQ ID NO: 173937 - DNA, 105 bp, Homo sapiens
cggcgcaggcaccggcccggggagaggcaccatgagcgacacatcaactggatcattctgctcattacctgcgcctgaaatttctaatagaaaacaaaatgcagc

SEQ ID NO: 173938 - DNA, 75 bp, Homo sapiens
atgtgacctgttcacgcaggggaaacttgaacattcgcaggtttttggcgcattctcacagacttagatgaaact

SEQ ID NO: 173939 - DNA, 88 bp, Homo sapiens
cgggacccggttccccggcccacagtgggggtgtgcaaacccgagagaactgggtggagccgccaccaaaatgcagattttcgtgaaa

SEQ ID NO: 173940 - DNA, 100 bp, Homo sapiens
ggcggcttcggcggctcaggttgtggtagaggcggaggctcaggcagcttgagtttggtgaggattcatcaacctccagtatgatgtctgtgaactttga

SEQ ID NO: 173941 - DNA, 100 bp, Homo sapiens
cgcagcgagctggagccgccggagttcagatcttttcctgctgaccctttgatttcaaatgtgcagaggggtgtctcggaacaaaagccagaactggaac

SEQ ID NO: 173942 - DNA, 100 bp, Homo sapiens
ggcggtgtgaagagagttcgcctgagccagatcccagagagtgattgactgcctggaggatgagaaggcaaccctcaccttggccatggctgactggctg

SEQ ID NO: 173943 - DNA, 75 bp, Homo sapiens
ccatcgtgatgaaggcagagagcagagacatcccgatctggggaagaatggtctggaacacggacctggtggaga

SEQ ID NO: 173944 - DNA, 74 bp, Homo sapiens
agacagaagcggacccagaaatgatcaaggtacaagaagtatgtcttcctggaccccctggctggtgctgtaac

SEQ ID NO: 173945 - DNA, 75 bp, Homo sapiens
gtattaagaaacatcgagtcactttgcctggacaggaggaaccctctcctactccaatgtggccagatgacctgc

SEQ ID NO: 173946 - DNA, 100 bp, Homo sapiens
cccaggcccttgcatgctttggccgctgatgaggtttatataactttccaagacaaggaagttgtgcaaagcctcacagctactaagaggctgggctggg

SEQ ID NO: 173947 - DNA, 75 bp, Homo sapiens
cctgccccccttggagagaaactgaaagcgtgacgacagcatgtacgatccctgaatgggcccgtgggcatattt

SEQ ID NO: 173948 - DNA, 51 bp, Homo sapiens
ccaaaggcagggcaaggaaactggccacaaacagcccacctgaggatattg

SEQ ID NO: 173949 - DNA, 51 bp, Homo sapiens
cagaatcttgaatcagaaattgagaagctgatatttaatgctacaagggag

SEQ ID NO: 173950 - DNA, 82 bp, Homo sapiens
agcaggggtcagctgggccgcaggggcgcgcagcgcggggagctgccagacatatgtagagtgtgtcggtcagaaggaacac

SEQ ID NO: 173951 - DNA, 90 bp, Homo sapiens
gaaagccagtgttgtggaccctagcacagaggctgaccccgcactacatctacccaccagccatcgtgcagcccagcgtggtgatcccag

SEQ ID NO: 173952 - DNA, 75 bp, Homo sapiens
gcgggatcttcaaccacctcgagcggctgctggacgaaggtaatgaatattcgaacagtactgaacaaactggaa

SEQ ID NO: 173953 - DNA, 82 bp, Homo sapiens
tgccttcatcgagtacgaacacgagcgagacatgcactatctgactgcagccatgagcagcaatgagtgcttcaagtgtgga

SEQ ID NO: 173954 - DNA, 90 bp, Homo sapiens
accacttccttgtgctgtggatttgctaactcaggtaatctacagttgctgcagaactgcctggcagtgttaaatggagacacataagcc

SEQ ID NO: 173955 - DNA, 82 bp, Homo sapiens
taactttgccacccttgtcagcacctacgccaaagctgaagacctaactgcagcatgtctgtatttggagatggggcctcta

SEQ ID NO: 173956 - DNA, 100 bp, Homo sapiens
cggcccggcgcggcccagcgccctcagcgggacgaccctgggacagtctccactggggcagatccagctgaccatccggcacagctcgcagagaaacaag

SEQ ID NO: 173957 - DNA, 99 bp, Homo sapiens
tcctggcccgaaaggagagcctggtaaaggagctggaagtgcgaaaattgatgcatgtgagaggagatggaccctggtattactatgagacaattgaca

SEQ ID NO: 173958 - DNA, 50 bp, Homo sapiens
ggagaaaagcattgatgacttagaagaggatgctgtgttcctgaagaatg

SEQ ID NO: 173959 - DNA, 100 bp, Homo sapiens
cggggaggcgcggagcgcgcgtgtggtccttgcgccgctgacttctccactggttcctgggcaccgaaagacttaattcagtgcacaaatgagatgaatg

SEQ ID NO: 173960 - DNA, 90 bp, Homo sapiens
cagaaaaggaagtaatccctagtgtcagcagattcagcggtactggtgtataataggttgaacaaattgaagcagggacaccaggccgac

SEQ ID NO: 173961 - DNA, 83 bp, Homo sapiens
caccgccatcctgggccccacgtgttgcctgaccattcctgagcccaggtcaaaatgcagatcttcgtgaaaacccttaccgg

SEQ ID NO: 173962 - DNA, 88 bp, Homo sapiens
ccgcccagcccaaaccaggagattgcgagggagcgatgcggtgcagcgcgacaatgcagatcttcgtgaagactctgactggtaagac

SEQ ID NO: 173963 - DNA, 75 bp, Homo sapiens
attctggcactgcactgggtaggaaaaagcttgaaatccatggcccaaaatgactctaccagtggagactctctt

SEQ ID NO: 173964 - DNA, 100 bp, Homo sapiens
cggacgccggtggtctctggcctcgctcccttcatctggctatggcaccaacacgcccagttccaccgtctcgtgcatttgacctacctcaggatatcca

SEQ ID NO: 173965 - DNA, 83 bp, Homo sapiens
cagaaggatatcgacgtcgtgatccagaagtccagagctgaggactgcctgtttgcaggtgaaagaaaatggcccgaaccaag

SEQ ID NO: 173966 - DNA, 75 bp, Homo sapiens
cctccaagagcactagtgtctagaaggcactaagggacctcagcagccatgtcgaagccccatagtgaagccggg

SEQ ID NO: 173967 - DNA, 75 bp, Homo sapiens
cttcaatactacctttatttccaccatagtcccacagtgttttgttcgccccacggaggccaagaaagccgcaga

SEQ ID NO: 173968 - DNA, 75 bp, Homo sapiens
aattattgagagagctgaaaaatttggactcccgccagtggtggaacggccgccttctccattctccatggcccc

SEQ ID NO: 173969 - DNA, 75 bp, Homo sapiens
ggtaatgctggtggtctgcatcaccaccggatcaacttcgacaaataattatggattggatatgtctacttctgg

SEQ ID NO: 173970 - DNA, 51 bp, Homo sapiens
attcgcagtggtcgcttcttctccttggatatcacgcagcagcacctctgt

SEQ ID NO: 173971 - DNA, 82 bp, Homo sapiens
gtctttgctcaaggatcccagttttctctggatgacgtgttgcatttgctggtctggcctttgcgtccttctacctggcagg

SEQ ID NO: 173972 - DNA, 87 bp, Homo sapiens
aaggacaaaagccaagaggaggacagttcgctacacagcaatgcatcgagtcgtgagatggagaataaagaaactctcaaagggttg

SEQ ID NO: 173973 - DNA, 100 bp, Homo sapiens
agtggagctcagccaggggcagccggctctggtgctcccagaagaggtgtctttcctgaagactatcttcccgtctcaaaatggacatgatggatccacg

SEQ ID NO: 173974 - DNA, 96 bp, Homo sapiens
caccatgtcagacgcagccgtagacaccagctccgaaatcaccaccaaggtttttagaacttcagccataaaaatgggcagaattttccttgatca

SEQ ID NO: 173975 - DNA, 100 bp, Homo sapiens
cagaaacgtcaggccgtagccgaagcctcggaaggagcggcccacggcaaagtatcccagtcgacatcagtgacagtgatatgatgctgaacatcatcaa

SEQ ID NO: 173976 - DNA, 100 bp, Homo sapiens
cctggaaaagacagccagcatttccatcgcaggcagcctggcatcctcgctacaacctcattgttgtgggccgatacccagatcctaatttcaaaagttg

SEQ ID NO: 173977 - DNA, 98 bp, Homo sapiens
tgcagcgggaaaaggctaatggcacaactgtccacgtaggcattcaccccagcaaggcacctacaaaggcagcacctaagcaaaagattgtgaagcct

SEQ ID NO: 173978 - DNA, 50 bp, Homo sapiens
cccgcggaggagaggatcccggcccagactatgttaggtcttaatggtgg

SEQ ID NO: 173979 - DNA, 75 bp, Homo sapiens
agcccatcgtgcttaaagaagggtgaccagaagtcagcagcttcccagaagccccgaagccggggcatcctccac

SEQ ID NO: 173980 - DNA, 83 bp, Homo sapiens
atcctcatgttcactacccttcatgcatgaaagacaaagctactcagacaatgcagatcttcgtgaagactctgactggtaag

SEQ ID NO: 173981 - DNA, 100 bp, Homo sapiens
aaagaagctacctgcaagctctatttttaccagatgctcttggctgtgcaggtggaagaagagcccgaagaagaacctgaagagacagcagaagacacaa

SEQ ID NO: 173982 - DNA, 100 bp, Homo sapiens
gaaaggcactcctaggggacataaaattagtgattactttgagacggcagaacacaccggggagggcaggccagcgaaactgtcctacacggaggcagag

SEQ ID NO: 173983 - DNA, 50 bp, Homo sapiens
gggaaggttccctcaagtccaagataaatgcagagggaacaccagaggac

SEQ ID NO: 173984 - DNA, 76 bp, Homo sapiens
aggatggctactatttcaccaatctgggccttcatggaatcgagctcccttcagaaaaggatgcggagtgtgttgg

SEQ ID NO: 173985 - DNA, 100 bp, Homo sapiens
aaaaggtgatctggacaaaggaacaggtatctcagggagttgaccacatttggccatttcccagaagggccccaccccaagggtgagtggccaatgggga

SEQ ID NO: 173986 - DNA, 98 bp, Homo sapiens
aatcaagaggttcatcagacaagagatcattaaaatgtttgatgtggaggacctggagaggaatgacggctcggccgagaggccttacttcatgtctt

SEQ ID NO: 173987 - DNA, 101 bp, Homo sapiens
caccccgcggccgcaccttcccgccttctcagggcgccctgcgtccggcagaggaggcgagcatcccgctcaggtgatgaggaacccctcgcgcacccagc

SEQ ID NO: 173988 - DNA, 90 bp, Homo sapiens
tggtgtttggtgtacccatgtgactaatttgtccaaagagagaccgagacatgggtgcccggcaccgcgcccgagcccactccattcaga

SEQ ID NO: 173989 - DNA, 83 bp, Homo sapiens
cccggcagcgcccggcccccggctcagcccccggagtgcggagccgaccagtgtcacaccatgtctgaccggaaggcagtgat

SEQ ID NO: 173990 - DNA, 90 bp, Homo sapiens
caaaaatgtgcatactcacagagttagagagagggatggtggtaaacgcaaagcactgaagttgaattttgcaaatccacctttcaaatc

SEQ ID NO: 173991 - DNA, 81 bp, Homo sapiens
agaacatccagaaatccctggctggagcttgggcactgtttaaaggaaagttccgagaaggcatcgacaagccggaccctc

SEQ ID NO: 173992 - DNA, 98 bp, Homo sapiens
gagaccggcggcggcggcaatgctggagacccttcgcgagcggctgctgagcgtgcagcaggatttcacctccggtttgctgctttgtggtgcacaag

SEQ ID NO: 173993 - DNA, 76 bp, Homo sapiens
ttcaggaccaaaattgtggaaaagtcactctgtttacatccacgtgttctctgccttgattgtgatcatcgctggg

SEQ ID NO: 173994 - DNA, 75 bp, Homo sapiens
cagtggtcgcttcttctccttggcctgcaagaccccccaaagccagcagtcagcctacttcctgttaacactgtt

SEQ ID NO: 173995 - DNA, 80 bp, Homo sapiens
gtgcccagaaggtcggggctgtcggccggccacagggatgtcttttactatagcggaatagaagatgaactcaactgaat

SEQ ID NO: 173996 - DNA, 100 bp, Homo sapiens
tggcaccaagccagccaacaagcggcccatgtcctctccagaaatacctgcaggctgggacaatgaaaagaaaatagctattttacatgaaaattttaca

SEQ ID NO: 173997 - DNA, 51 bp, Homo sapiens
ctcccaaagtgttggaattacagagctttatggatattggaacattgatat

SEQ ID NO: 173998 - DNA, 82 bp, Homo sapiens
ctcgagacttaccagagccacaagtgcgaggacgacgggcagacgttcttcagcctagatgacgggaacaccaaattctctg

SEQ ID NO: 173999 - DNA, 98 bp, Homo sapiens
tgagggtgcccccgcctcacctgcagaggggccgttccgggctcgaacccggcaccttccgggaccatggccaacctggagcgcaccttcatcgccat

SEQ ID NO: 174000 - DNA, 100 bp, Homo sapiens
ggccggaggtcagactgttgcacgccggctcgggggccgacacagcgagtaaccagctcataaatcacatcgaacagtttttggatactaatgaaacacc

SEQ ID NO: 174001 - DNA, 100 bp, Homo sapiens
cggcggaaaccgaaggggagccatggcggctgacagtcgggaggagaaagaaggacagaataacgggctcccagattcacaagccccaccaagaggatca

SEQ ID NO: 174002 - DNA, 100 bp, Homo sapiens
gtgcactgtgtgtggccagtcatttaccaccaatgggaacatgcacagagactctgacctgtttttgttggacacccgtgtagtatgggcctcagaagaa

SEQ ID NO: 174003 - DNA, 100 bp, Homo sapiens
atattcctgtattcttggacaagtacactggtgacatgtagctgtattcagagcaatggaagagttaatagttgaacttcgtctctttcttgaactcctg

SEQ ID NO: 174004 - DNA, 82 bp, Homo sapiens
gcacgtagcccggcgctcggcatggctctcctggtgctcgatggactcaccctgtcacccaggttggactgcactggcctca

SEQ ID NO: 174005 - DNA, 103 bp, Homo sapiens
gaagattttcctgagacctcagagcccgtttggatactgggtagaaaatacagcattttcacagctgcccaaactccaaaatgatggtagagaattgaccaag

SEQ ID NO: 174006 - DNA, 74 bp, Homo sapiens
aaagacaaggatgaccaggaatgggaaagccccaggagcatattaatgaaaagtgccataaactgaaaaaccaa

SEQ ID NO: 174007 - DNA, 75 bp, Homo sapiens
gtggggaaacgttgtctggagtcatttgaaccaattctccgcctccttccccagggaatctctcctgtcagccag

SEQ ID NO: 174008 - DNA, 83 bp, Homo sapiens
gggcgggccgcgggagccgcacgcggcgatatggaagaggagggcaagaagggcaagaagacacgatgaggcgagtggtacga

SEQ ID NO: 174009 - DNA, 90 bp, Homo sapiens
caaggcggtgcgctgggggccggggcgcgtcgcaggttgtgcatctttgtcaggaacctcccagaagtgatgccggctcttctcagtgca

SEQ ID NO: 174010 - DNA, 100 bp, Homo sapiens
ggctaggacgccgagcggtgactccccgccgctcccgggggccgtgacggcagagaattttttgtgggcctttccaaaaggacaaatcaacgaggtgctg

SEQ ID NO: 174011 - DNA, 74 bp, Homo sapiens
ctgtgcagccctcccaggtggagtacacggcagactaatagcctaacatggcagaccagagacagcgctcactg

SEQ ID NO: 174012 - DNA, 76 bp, Homo sapiens
tccaggtcccggatagcgagggcggccgcgccggctccaggccataaaattttgagtagaaaaatccagaaatttg

SEQ ID NO: 174013 - DNA, 90 bp, Homo sapiens
caaacacacacacatttttcccccggacttggaaagtcacccaaagccgccccaagtgcaggtggagattctggacgcaaagacaaggga

SEQ ID NO: 174014 - DNA, 90 bp, Homo sapiens
ctgtgaagttagaaaagccctgtcaaagcaagagatggctagtgcttcatccagccaaagaggacttcggcagtctgtccaaccttcagg

SEQ ID NO: 174015 - DNA, 87 bp, Homo sapiens
caattcgggaacaaatactactacatcccgcagtacaagaactggagagggtgctggaaatgtaaacaagaatagactgttcattcc

SEQ ID NO: 174016 - DNA, 131 bp, Homo sapiens
cgagaggcggcgccgctcccaagatgtcgcagacggccatgtccgaaacctacggtagcccagccatgacccataggaatctgacttcctccagtctgaatgacatttctgataaaccggagaaggaccag

SEQ ID NO: 174017 - DNA, 75 bp, Homo sapiens
ggaactggagcaattgaagctgactactaaggagaataaggtgaaaaaactgtattcattggtatctgaaaagaa

SEQ ID NO: 174018 - DNA, 83 bp, Homo sapiens
cgagaaaccgcagcactacacgaaccttcaaagagactgttacactgacgtggccctccctctttatgaaaacctcaacattg

SEQ ID NO: 174019 - DNA, 90 bp, Homo sapiens
cctgactggggaaaatcagcaagagctttctggaagaaaggaaatgttaggatcactttattctgtgtggcaaaggagcagagaactttg

SEQ ID NO: 174020 - DNA, 100 bp, Homo sapiens
ttccagtctgatccttttgttggcattgctctatatgcaatcagtgctgtctactttgctggagtgatggtgcgactgatgttgactttgactccagtcg

SEQ ID NO: 174021 - DNA, 102 bp, Homo sapiens
tcagctgccaggcaactgctggctggaaatgcaaccttaaaatcagtgacaagaaacattccaaacaagcaacagtcttcaagaaattaaactggcaagtgg

SEQ ID NO: 174022 - DNA, 100 bp, Homo sapiens
gctgcacctgccccgccgggatctccggcgccaactgccagcactttcagaccatgctgaagtctaaattgaatgtcttaacactgaaaaaggaacctct

SEQ ID NO: 174023 - DNA, 83 bp, Homo sapiens
ctgaagagcgacaagccgctggcagccgcggatctcaccgccgctcagggcaggtaaaaatcaaggtgaccccaagaaaatgg

SEQ ID NO: 174024 - DNA, 50 bp, Homo sapiens
tacacagacactgacctgtacacagcgttacagtgtttctgccacctctg

SEQ ID NO: 174025 - DNA, 114 bp, Homo sapiens
gagatcgagagcaccgacaccgcctgtgtggggcccaccctccggtgaagtggatcctaaagagaggatagcacgccaacgaaaattattacagaagaaacttggccttaatat

SEQ ID NO: 174026 - DNA, 100 bp, Homo sapiens
gtgctgatgaaacttgggactctgcaatagatacatggagcccatcagaatggcagatggcttatgaaccacaggtggacccccaaaagtacaagggcat

SEQ ID NO: 174027 - DNA, 83 bp, Homo sapiens
gggccggttctgcaccatcttcaggtcctactccaggggcgctcaggaggatacgaagcgttttcggcttcctgcccggagct

SEQ ID NO: 174028 - DNA, 75 bp, Homo sapiens
ttgaagatccaccaattccagaaaaaccatggaaggtatagccttcacagacctcccggtgagtactactattga

SEQ ID NO: 174029 - DNA, 90 bp, Homo sapiens
gcggcggccgcggcctccgcaagccgggaaccaatgagattctccggatgtacatcgccctgacgggtctgcagcatgccggccgcatcc

SEQ ID NO: 174030 - DNA, 100 bp, Homo sapiens
ccgccgcctgaggaggcgagctagccgggagttacaccgccaccgccagggaccacgggatcattcgaactctggatttacccatctatgtcacacgggt

SEQ ID NO: 174031 - DNA, 75 bp, Homo sapiens
gtttactttcaccattttggataataggatatggtttcggaactttcagagcctgtctccccaggaccgtgcagc

SEQ ID NO: 174032 - DNA, 114 bp, Homo sapiens
agctgtgctcgcgctactctctctttctggcctggaggctatccagccctctgaagagccaatccattcaggatgggaaaccacgcaggcaaacgagaattaaatgccgagaag

SEQ ID NO: 174033 - DNA, 100 bp, Homo sapiens
gacgactggcgagaggaagagggactaggtccaaacgctaggtggctgggtccagggactgttgacatttagggatgtggccatagaattctctctggag

SEQ ID NO: 174034 - DNA, 100 bp, Homo sapiens
taacatagctgtttgcagttctaagaagtccaaggcttgcgagaaggtcatttccgtgggtcaaacggtcatcacgaagcatcggaacacccggtattac

SEQ ID NO: 174035 - DNA, 85 bp, Homo sapiens
acgtttagcttaaaaacagctcattctcctaatgttttccttcagcaaggacaaaggaagaccaacactgtcatctgaagttgga

SEQ ID NO: 174036 - DNA, 96 bp, Homo sapiens
ttcgcctgtcgcaggccacccgccagcgcctgagcatccccgtcatggtggtcaccctgggcctatcactgtcccagcttctggatgaaatgcggg

SEQ ID NO: 174037 - DNA, 133 bp, Homo sapiens
aaagaagggtaaaaagaaggatcagattggaaaagggacccagggagcaactgcaggagcttcatctgaactgtacctggaaggaaaccacctaacagccgtgcccagagagctgtccgccctccgacacctg

SEQ ID NO: 174038 - DNA, 109 bp, Homo sapiens
ctgatgctagttaatgatgatagcatcaggatcgtcttcagctacatattctgccttttcaacactacacaggtacccactgatggtaatgctggcctgctggctgaac

SEQ ID NO: 174039 - DNA, 51 bp, Homo sapiens
cacgtacagaatacattcagccgtcagaacgatttcgagatttactactgc

SEQ ID NO: 174040 - DNA, 75 bp, Homo sapiens
tattggagaaggccaatttggagatgtacatcaaggcatttatatgagtccagaattcgaatttagagtttaatt

SEQ ID NO: 174041 - DNA, 100 bp, Homo sapiens
cctcaagtatacaattaaatgtgtcgcccttccaaaggcaggaagcggggcttctgctggtgtgtggataagtatgggcagcctctcccaggctacacca

SEQ ID NO: 174042 - DNA, 74 bp, Homo sapiens
aatggcaacttgcgcggtggaggtgttcgggctcctggaggacgagacagccgctcaggaagcaatcttgcatg

SEQ ID NO: 174043 - DNA, 75 bp, Homo sapiens
agcgcagaaagcaggcgaacccgcggcgcaataacgtgccctctggtggtcagaagatgctgtgctgtctcgtta

SEQ ID NO: 174044 - DNA, 75 bp, Homo sapiens
attgggggattatggaagtttactgaaattggccttgcctctctgggtgcacctgatgaatacattgaaaagctc

SEQ ID NO: 174045 - DNA, 100 bp, Homo sapiens
cgcccggcgccccactccgcgcagcgggttgcctccgctccccatacggcggccccaggccccttcacagatgtagtcactacaaatcttaaattgcgaa

SEQ ID NO: 174046 - DNA, 83 bp, Homo sapiens
tactgggataattatccaaataaattgcaagcattctatccaaatgggttgaaaggaggagcaggaggtactgatggacaagg

SEQ ID NO: 174047 - DNA, 97 bp, Homo sapiens
ttctccgccatgcaaggctggcgcgtctccatggagcaaaagctggcaggctgacagaggcggcctcaggacggaccttctggctactgaccgtttt

SEQ ID NO: 174048 - DNA, 74 bp, Homo sapiens
tactgctgtaaaccctgctacaattggaaggttggtcaaagaaaaagtgatgtatgaaaaagaggcaaaacaac

SEQ ID NO: 174049 - DNA, 88 bp, Homo sapiens
ggaagtgcccgaggggccgcgatggagctgggggagccgggcgggcgcactgtgtgaggagaacatgcggggtgtgcgcttcgacgtc

SEQ ID NO: 174050 - DNA, 88 bp, Homo sapiens
caaatgtgctacctccaacgacctcacacaaaaagaaatccggaccctggaggtactgcttaggatgaatatgatttggagaaattcc

SEQ ID NO: 174051 - DNA, 100 bp, Homo sapiens
gccaggggtggtcaccaaagcaggactcatcctctttgggaatgatgacaaaatgagtatccggtctaaagtggagttgtcagtctgggatcagcctgag

SEQ ID NO: 174052 - DNA, 74 bp, Homo sapiens
tgcttttgctacgacctcattttctgctggaactggtgatgatgaacagtctacacagatggctgcaagttggg

SEQ ID NO: 174053 - DNA, 100 bp, Homo sapiens
caggaacctcgccatccagaaacaccattcgcttttcacccaagatgatttgatgtcttataaaactctgatgaaccatgatggctacacagacattaag

SEQ ID NO: 174054 - DNA, 83 bp, Homo sapiens
tgaaaaactgagtgaatatgatcagatttctccaccaaattctcagcctgataagggtcaccatcagaaaagctaagtttgct

SEQ ID NO: 174055 - DNA, 121 bp, Homo sapiens
ggggaccgcttgcagcggggacgcgaggacccgggctgggctttcctcacccggtgagccccatgcacggttctatgcagctcagatagtgctaacattcgagtacctccattcactagac

SEQ ID NO: 174056 - DNA, 82 bp, Homo sapiens
gcctgacccaggcctgctcggccctcacaggaacatccagtcatggataaaaatgagctggttcagaaggccaaactggccg

SEQ ID NO: 174057 - DNA, 50 bp, Homo sapiens
tggaggaggtcatggagaagttcatgagttaccctgcagtttgtgaattt

SEQ ID NO: 174058 - DNA, 75 bp, Homo sapiens
cccctgaattttcctttgagaaagcaagagtcagaaaagactccagggttttgactctgggaggagggctgcctt

SEQ ID NO: 174059 - DNA, 75 bp, Homo sapiens
gggaagaaagagaatattgttcagttgattatgccagccagatgcagatcaccggcgtaatcaacccagcgttgg

SEQ ID NO: 174060 - DNA, 71 bp, Homo sapiens
ggagccgcgggccggcgagcgcgtcgccaccatgtcttgaatccagataatagttttgaaatactggttga

SEQ ID NO: 174061 - DNA, 89 bp, Homo sapiens
caaggaattacataacatcaaacgtgggtacaccaggggttggaaaaaccacactaggcaaagaacttgcgtcaaaatcaggactgaaa

SEQ ID NO: 174062 - DNA, 87 bp, Homo sapiens
cgctgacttctccactggttcctgggcaccgaaagacaaaacctgctacaaccccctcttcaactacgaggacatgcaggagatcac

SEQ ID NO: 174063 - DNA, 74 bp, Homo sapiens
ctggagcacttgagggaccagagacccggcatggtccagacgaagcagccattgtttgatgtcctgtgactgag

SEQ ID NO: 174064 - DNA, 100 bp, Homo sapiens
accgacaggcagacggactcggtattggagctgaaggcggcggcagagaacttgccggtgccagctgagttttcggctttgtgagaaaccttaccatcaa

SEQ ID NO: 174065 - DNA, 98 bp, Homo sapiens
gactcgggcgccgagaccggaggggaagaaacccttttttcttggagccagcaataattatcacaattactgatgggagcaagttgactaccaccagt

SEQ ID NO: 174066 - DNA, 82 bp, Homo sapiens
agagacagcttggatttgctgagacgagttgtactgctgtcacaggaaatggacgctggattacaagcatggcagctcaggc

SEQ ID NO: 174067 - DNA, 75 bp, Homo sapiens
ttaacgaatggggttgtgatggcccaggttcttcaaaagatcagggaggagagagcgatggcttttttcacccag

SEQ ID NO: 174068 - DNA, 98 bp, Homo sapiens
aaagttactgggagataacttcgaaggattttgcaacaaattcgagctgtccgactctgagaatgagtcgaggtggaaaaaagtttcttcctgtattg

SEQ ID NO: 174069 - DNA, 73 bp, Homo sapiens
gggcctcggcactggtaccctttacatcgctgagagaaagtgacttcagtgatgattttagtgatgattttgt

SEQ ID NO: 174070 - DNA, 100 bp, Homo sapiens
caaccatgaatattttgcactccagcatgccgatagttcaaacttctatatcacagaaaaggaccgtataatagacgctggccccaaaggaaactactct

SEQ ID NO: 174071 - DNA, 100 bp, Homo sapiens
cgctgccagcgacatgttcaagtttgcaggcctttcagatatatccatctcacaagacatccccgtagaaggagaaatcaccattcctatgagatctcgc

SEQ ID NO: 174072 - DNA, 100 bp, Homo sapiens
cgtcgatccagctgccagcgcagccgccagcgccgggtaaaatgtcggttccaggaccttaccaggcggccactgggccttcctcagcaccatccgcacc

SEQ ID NO: 174073 - DNA, 96 bp, Homo sapiens
gtcctctcgggagaagcagcgcctgttcccggggcagatccaggttcaggagctggaggagggaatgatattcagtggtgtttttctcaggtgaaa

SEQ ID NO: 174074 - DNA, 75 bp, Homo sapiens
tcgcagatcctgagacccggacagtggcagtgaaacagatctccacaatggaagttcgaagcaagcaaaagccac

SEQ ID NO: 174075 - DNA, 96 bp, Homo sapiens
aaaaagcgatgactgtgaaggagttcaggcagctggccaacagtggcaagcaatcaggatgagtgaaaaattgatttgcagctgacctgcaaatgg

SEQ ID NO: 174076 - DNA, 101 bp, Homo sapiens
gggacgacgacatctttatcatcacctaccccaagtcaggaacgtcaaggtcgtgggaaataaaaggcagttctacacagactgcagcaacggttgcatct

SEQ ID NO: 174077 - DNA, 50 bp, Homo sapiens
ccgacccaatccgcatcttggtgaaacgctcagtgcacctgtgcaacaac

SEQ ID NO: 174078 - DNA, 98 bp, Homo sapiens
aaggcgccaccatggcggcgcccccgcagcccgtcacccacctcatctttgacatggacggacttcttctgggctggcgcccatgcggctctacacgc

SEQ ID NO: 174079 - DNA, 100 bp, Homo sapiens
ggtggatcctacatgtgccataggattgtgtcagcagctaaggtgtgtggagctgccagtgagtcaccgtcagtgaagagcctccgcttgcttgttgctg

SEQ ID NO: 174080 - DNA, 100 bp, Homo sapiens
tcagaggaacttgtactgggatgtgatgatggagaactacagcaacttactctcactgggcaggtgctccgggatcacaactgtctgcagacgctgctgc

SEQ ID NO: 174081 - DNA, 127 bp, Homo sapiens
ttctgtgcagcagagacgccaatacagacgacaaaaccagcagtcttcatctggtacggatgccactcatgcggagcacatcgagaccatcaaagcccggatgtacgtgggcctcaccccagacaag

SEQ ID NO: 174082 - DNA, 82 bp, Homo sapiens
ttccacttgcacgaaagctttcctaggccaaaaagagttcctactgactatagctacttgcctgaaagcagttttattggag

SEQ ID NO: 174083 - DNA, 83 bp, Homo sapiens
cctaggccaaccagagattcatctttcatgcagtgacatgttgataaaaaatgatggaagctcttcgtgggcggtcttgactg

SEQ ID NO: 174084 - DNA, 100 bp, Homo sapiens
gatcaagttccccacctggcccgttgctacccaacctacacgtcgtggagctgactctgagcccaggtgtcatggagaaactccagctgggcccagagat

SEQ ID NO: 174085 - DNA, 100 bp, Homo sapiens
gaagaggcacgagatgccccctcacatctatgccatcacagacaccgcctacaggagtatgatgcaaggtatggcgtgagtcccgagaacattatcctct

SEQ ID NO: 174086 - DNA, 90 bp, Homo sapiens
gggagggccaccaatgggacaagattctggactctacttataatatccctaactgctggattctcctgttgcagcttttcttggacagtg

SEQ ID NO: 174087 - DNA, 141 bp, Homo sapiens
gaaaaatggctcggactgtggcggcttcggcggctcaggttgtggtagaggcggaggctcaggcagcttgaggtaggaatgaattgatagccagatacatcaaactcaggacaggcaagacgaggaccagaaaacaggtaa

SEQ ID NO: 174088 - DNA, 74 bp, Homo sapiens
tgccctgagacggtgtcccgccgaaaggccaaacttccagatctgcaaccatttccttctccagatggtgatac

SEQ ID NO: 174089 - DNA, 82 bp, Homo sapiens
ctttatcctggtcatcttctatttccaaacttacaaaacactacacagcaaaataatgatctgctagactgctaacccgagc

SEQ ID NO: 174090 - DNA, 50 bp, Homo sapiens
catcgttttcttcgcctccataggtgacgccttctgggccccatctgtcc

SEQ ID NO: 174091 - DNA, 127 bp, Homo sapiens
ctgaggtcggctgctgcgggaaatacttcctgtttggcttcaacattgtcttctgggtgctggagaatctggtaaaagcaccattgtgaagcagatgaggatcctgcatgttaatgggtttaatgga

SEQ ID NO: 174092 - DNA, 97 bp, Homo sapiens
atattggatgagtctcacagtattgacaaggacaatggggaggtgatttgaagatattaaagctagaaattggaactagaaaatcaaaagaattcaa

SEQ ID NO: 174093 - DNA, 100 bp, Homo sapiens
aatgtcagtggaaaggagagctaccatcactaagataggactgaggctttcagtgcatactggcaaccttggaaggcaggaatgtgaaacttttccctac

SEQ ID NO: 174094 - DNA, 100 bp, Homo sapiens
gaaattttaatctcaactgaatggaatgaacgacagcctgcaccaggaatacaggagtttccagaaaatataaaaaattgtaaagttttgacaattgtgg

SEQ ID NO: 174095 - DNA, 100 bp, Homo sapiens
cccatcccctgaccgtggacacccagcctgagcaagcgccacagaagcctcgtctcctggaggaaaatgctgtgggtcatcaggaagaactgctgagaag

SEQ ID NO: 174096 - DNA, 51 bp, Homo sapiens
aatatatacctgcactgtctgtagggttctgatctacaatggccaactgga

SEQ ID NO: 174097 - DNA, 75 bp, Homo sapiens
ccgcgccgagccggaggccgcgtggacccgaaagccgctgggaaaagtactccaaagattcaggtttactcacgt

SEQ ID NO: 174098 - DNA, 100 bp, Homo sapiens
agactgggagatggcagctgcacttcttgcggctggatcacagatgcgtctgaagaaacatcgctggtataagaaaatcctcaagtcccgagatccaatc

SEQ ID NO: 174099 - DNA, 96 bp, Homo sapiens
gaagtgtggcatcccaaggctttgggttttcctctccaaacaaaacagctttggagtttaacccttctgccaatccagaggcaagcacaatattcc

SEQ ID NO: 174100 - DNA, 99 bp, Homo sapiens
cctcctcttcccttcgctccggcccggtgaaactgaacttataatcgtcactggattcacccggggggccagcgggtcatcgggcactacgctggagaa

SEQ ID NO: 174101 - DNA, 100 bp, Homo sapiens
ctacagttgaaagtttgatacaaaaatttgctgagtcaaaaggcactgggaaggaaagacctggtacagcctgactatttggactggaaaaaatgataac

SEQ ID NO: 174102 - DNA, 96 bp, Homo sapiens
caataagcataccatctttggaaaggtttatgaaggtaaactagctgaccagtactaccagagaactttactgaagaaagtctggaaagtctggcg

SEQ ID NO: 174103 - DNA, 100 bp, Homo sapiens
tgtgactctgccgctgaaccctcaggaagtgatccaggggatgtgtaaggctgtgcccttcgttcagcgatggcaagccggcaggtggatattgcaactc

SEQ ID NO: 174104 - DNA, 50 bp, Homo sapiens
cggaaacaaagttattttgctcgtgacaaccatgagtggaaaaaactaat

SEQ ID NO: 174105 - DNA, 101 bp, Homo sapiens
ctgacggccgtgcccgaggggctcagcgccttcacccaagcgctgcccggtggttctgggaagcgtacttccagtcaattaaagccattgccctggccacc

SEQ ID NO: 174106 - DNA, 82 bp, Homo sapiens
tttttattaaggctgttcatgtgaaagttatggaggctgagaagtccaaggtcaagggggccacacctggtgtgagctttct

SEQ ID NO: 174107 - DNA, 88 bp, Homo sapiens
gcagaagattatacctcactattctcttgctcgatggctactctgtaatggcaggagttccgattctgaagaggcatttgagaccccg

SEQ ID NO: 174108 - DNA, 83 bp, Homo sapiens
cgctgtgatgcctgcagagctgtggcttaccaggcttacatcaaaatctatcaaggagaagaacttccacatccaaagtccat

SEQ ID NO: 174109 - DNA, 50 bp, Homo sapiens
tctctcattgattaatgtcaatggaatacaaacagaagcttgcacgagta

SEQ ID NO: 174110 - DNA, 98 bp, Homo sapiens
cttgtcacatgcatcaggaccagaggtggatggaagcatgcctaggggaagatctgcctcccaccacagaactggaggaggggcttaggaatggggtc

SEQ ID NO: 174111 - DNA, 82 bp, Homo sapiens
gcttgcaggctgtgtcacagaagagaaattcgagtggtgaatgcatttcgtagttctttatatgaagggttagaaaaaccgg

SEQ ID NO: 174112 - DNA, 75 bp, Homo sapiens
ggcccagagctcgggtctccggggaccgaggttttgagaacagagtgctgttttagagctggcagcagcatctca

SEQ ID NO: 174113 - DNA, 100 bp, Homo sapiens
tattacactgtcaaaactttacaagttaattgaagagtcttgtccacagctggcaaattcagtgcagatcaggggccctcctcgccaaagacagcctaga

SEQ ID NO: 174114 - DNA, 50 bp, Homo sapiens
cgcgaatatcgtcatcgttagaaggagtcaaattgactttatcagcttta

SEQ ID NO: 174115 - DNA, 83 bp, Homo sapiens
cagacgttagcgtgagtgatcactctcaatcccgggtactgctataaccagaatttggtagaaaaaggatttacttgttgggg

SEQ ID NO: 174116 - DNA, 82 bp, Homo sapiens
tcttcctcctccgctaccaccaccacaccagaaactagcaccagccccaaatttccatcagaagagctaacaattgctggaa

SEQ ID NO: 174117 - DNA, 75 bp, Homo sapiens
gggaagttcctctccaatgacacggtgcagctgaacgtgaagcgaattcctcctgatcagcagagactgatcttt

SEQ ID NO: 174118 - DNA, 75 bp, Homo sapiens
cacactcctgcttccttccttccctgcagttgctccagagcctggcctgcgctccgcctttaggtgacagctgga

SEQ ID NO: 174119 - DNA, 75 bp, Homo sapiens
aaaagacagtcctcgtcagcactgactttcagctatggaatcggaacttgtaatagctggcatcgttgagaatga

SEQ ID NO: 174120 - DNA, 80 bp, Homo sapiens
ggccactacattctgggtgacacgctgggggtcggcaccttcggcaaagtgaagggcaatgaatcgctccctggctaatg

SEQ ID NO: 174121 - DNA, 90 bp, Homo sapiens
cactgaaccacctgggggagattggcaccaagaccacactgagcacatctactttccaaaccatttgagagccttaagttggagagtaag

SEQ ID NO: 174122 - DNA, 83 bp, Homo sapiens
gtgattccccggaatcgtgtgctgggctggtcccccttgggatgctgagaacttgctggagtcacagccactgggatcctttc

SEQ ID NO: 174123 - DNA, 100 bp, Homo sapiens
caaagtagaaccaattaccaagcatataggtttggtgtacagtggcatgggccccgattacaggccctcagtctccgaggaggatctcaaggtcctgttt

SEQ ID NO: 174124 - DNA, 97 bp, Homo sapiens
gttccagccatcacagctgttcgacttcgatgatttactgaaatttgatgacctagatggaacacatgctctgatgtattctgaaaaggaggacaaa

SEQ ID NO: 174125 - DNA, 97 bp, Homo sapiens
gccaaatgggaaaacccttaaagtctgcatagttttgcttgtcggtcttaagaagctggccgtggtgcaataaggaacttaaaacaatggaagagcg

SEQ ID NO: 174126 - DNA, 82 bp, Homo sapiens
gacccttacgcctggcttgaagaccccgacagtgaacagactaaggttattggagtgatgagtaaagaatacataccaaagg

SEQ ID NO: 174127 - DNA, 122 bp, Homo sapiens
cacaaatctggaacgggtggccgattactgcgagaacaactacatacaggtaaacactacacgtgaagagtggtgaaagggaacattgattactgaagtgccctggagagggaaagcactgg

SEQ ID NO: 174128 - DNA, 101 bp, Homo sapiens
cccagtttgaaagaaaacttcacgcggccgaaatgaacgtcacctcaccgctccaagcctccagccggcagaaaacataccagatgacaattttagcatcc

SEQ ID NO: 174129 - DNA, 96 bp, Homo sapiens
cgcgctcgcgcaccacgcgccccgcgcggcccgcccggatcgtggcctctcgagagcaagaaccgggctgtgggtcggcccaaggggaagctgggc

SEQ ID NO: 174130 - DNA, 82 bp, Homo sapiens
cgctggcagccgcggatctcaccgccgctcaggtgtcttgggacaaggtgcgcattcctggtgtgctgcagcgattgggagt

SEQ ID NO: 174131 - DNA, 100 bp, Homo sapiens
gaggaaattcagaagaaattagaagctgcagaagaaagacgcaaggaggagatgttaaagtaacccatcttgcaggacgacattgaagattggtcttctg

SEQ ID NO: 174132 - DNA, 90 bp, Homo sapiens
ccgacaaggaagtgaagaaggcgcatcactcccagctgcgcaaagcttgcgaggtggcgttagtttgttgcatattctaaggacccagac

SEQ ID NO: 174133 - DNA, 100 bp, Homo sapiens
ctggaaggagcacgaggaagcatacaagccagctgccatgttgtgagcacataccacatagctccatggagatgcccatgtgactgtgatgaagagctaa

SEQ ID NO: 174134 - DNA, 105 bp, Homo sapiens
aaaacaatagctcaaggaaacctttccaacacagatgtccaagctgccaacatccgcacttccactaatagccaagtagacaagctgaccctgtcagggagtgac

SEQ ID NO: 174135 - DNA, 73 bp, Homo sapiens
ctatcgcttcttaatccagaacgttctgaggctccagaaggaggaagataccaactagagataaaaataccag

SEQ ID NO: 174136 - DNA, 51 bp, Homo sapiens
aagactctctttcaggacagaagggttatgtggtccgaatcagtggtggga

SEQ ID NO: 174137 - DNA, 75 bp, Homo sapiens
ctccgcaccagccgcgcttctgtccgcctgcagctgagccattatctggatattgtggaagtaaacattgctcac

SEQ ID NO: 174138 - DNA, 82 bp, Homo sapiens
gcgtggtagcagaggagcttgaggaatgtatcctgtcaggtataatgtcagtgaatggcaagaaagttcttcatatggatcg

SEQ ID NO: 174139 - DNA, 51 bp, Homo sapiens
ggaacgctcacggactgtgtgagcatagagcctctggaccccagtgagaag

SEQ ID NO: 174140 - DNA, 101 bp, Homo sapiens
ggtttcaagggacgtaccaggaggatggtgcccagctacaaaagaccccacagctgtagagagagcaaacttgttaaacatggctaaactgagtatcaaag

SEQ ID NO: 174141 - DNA, 83 bp, Homo sapiens
cccgccagacttaagggacctggtcaccacgctcggaagatgatccctatgatcttgaagatgtttctgcacagaaatgaggg

SEQ ID NO: 174142 - DNA, 100 bp, Homo sapiens
cttattaatacggggatctgtgagtcttctggcaaacagtgtttgcctctggttcagctcatacaacagcttcttagctcagtcaaaggccaactgtcgc

SEQ ID NO: 174143 - DNA, 88 bp, Homo sapiens
cattcccgtccgacgaggatatcgtgtctggagcagtggagcccaaagacccctggagacatgtgatcaacaaatacaagcgcagacg

SEQ ID NO: 174144 - DNA, 75 bp, Homo sapiens
tttttgtacaaaagaagcagctcaggaggctgttaaactgcttgatgtagttttagagaccaatctggcaacaat

SEQ ID NO: 174145 - DNA, 98 bp, Homo sapiens
gttattgacatctcttgtatttatggattctggaacttttcaaagcctgactctcttcttgaaacagtggagcatcatacagagtttacttgtggttt

SEQ ID NO: 174146 - DNA, 85 bp, Homo sapiens
gtgctcaagagcctcattatctaccacccgagatgccccaaggcatgactaagagatatcgtgaaattacaactcaacaatgaat

SEQ ID NO: 174147 - DNA, 75 bp, Homo sapiens
gggttccggagatcccggcctcacttcgtcccactgtggttagggaaagtttcctacactactgaggtttagggg

SEQ ID NO: 174148 - DNA, 100 bp, Homo sapiens
ctttggggccgaacgtgaggctacgctgaccattgcccagtacaggtcaaagattctaaactgcctgcatataaggatctcggtaaaaatctaccattcc

SEQ ID NO: 174149 - DNA, 50 bp, Homo sapiens
gtcatcaccttattctggtcccgggtcaaaaggctgagtttcaaattctg

SEQ ID NO: 174150 - DNA, 83 bp, Homo sapiens
ggcagcaagaacagagagagaggtggacagatctgagagatactgaggctgcctgctgtttcccggggagatcatgaaacgag

SEQ ID NO: 174151 - DNA, 82 bp, Homo sapiens
accgcctgagctttctacaccggagcggagaccgcagcgcagagagcagaggcgctcaaggacttctcccgctcctcgtcca

SEQ ID NO: 174152 - DNA, 82 bp, Homo sapiens
atagacttcaagtcccggaccttatccgtgcgccgcttcggtttgcagaacagtccaggctctgcagacagcatcccacctg

SEQ ID NO: 174153 - DNA, 75 bp, Homo sapiens
cagggcaaggaaactggccacaagtgaagactgatgagaagagtctgtgggtgaagacattgaaaaggtttcaac

SEQ ID NO: 174154 - DNA, 71 bp, Homo sapiens
gcattgacaccaggctcaacaaagctgtctgggccaaaggaataaggaatcgacttctatacctccattac

SEQ ID NO: 174155 - DNA, 48 bp, Homo sapiens
ccgggacatctgaaagccaggaaatggctttcttcgagagtcacccag

SEQ ID NO: 174156 - DNA, 98 bp, Homo sapiens
gccttctggagagctgaccaaacactaagggcctcttctgaagagctgaaagctgcctaccggaggctctgtatgctctaccatccagacaagcacag

SEQ ID NO: 174157 - DNA, 82 bp, Homo sapiens
tgctgcttcaatgtccgcatcgcaaccaccgccctggccatctaccatgtgcggagctggagtttgttcagatcatcatcat

SEQ ID NO: 174158 - DNA, 98 bp, Homo sapiens
gcagatagctggaggctgttcccacagtcatgtctcagcgaagaagtcggagttcagcagccatcagaaccaagctccagagaagccttgggacacca

SEQ ID NO: 174159 - DNA, 75 bp, Homo sapiens
cgcagtggtcgcttcttctccttgggacgcactctctgagatattttcgcctgggcgtttcggatcccatccatg

SEQ ID NO: 174160 - DNA, 100 bp, Homo sapiens
gcccccccgcgccgaccgcgttcctatggacagacgcacagacacctgcagtgctgggcctaaaggagataacatttatgaatggagatcaactatactt

SEQ ID NO: 174161 - DNA, 100 bp, Homo sapiens
cttgactcctccgctccgccacttgtcaagatgacaggaaagaccacagcaagattctttcattcgtctcctcctagcctgggggaccaggctcgaactg

SEQ ID NO: 174162 - DNA, 146 bp, Homo sapiens
cttgagtcgggaaatggccgctgtgtggttgcaacggagataaattcccggaaccgcgattcggcgtgtcaggatgtgatcttcgtggtggaaagctaaattttaaaaccaccccaatggatgcagacagtgatgttgcattggac

SEQ ID NO: 174163 - DNA, 83 bp, Homo sapiens
cagctgtcgccgccgctctcagcctcttgttgctgtaccacatagaattcactcaacaagtagaaacgtgagagaagaaaaaa

SEQ ID NO: 174164 - DNA, 100 bp, Homo sapiens
gccagcactttcaatgatagagtttttgccagccccatgttatagtacattgtgcagcagagagaagaccagatgttgtagaaaatcagccagatgctgc

SEQ ID NO: 174165 - DNA, 90 bp, Homo sapiens
tgaggaagctggaagctgcagccacaatgtgcctttgcaggggagcctgagagccacagtgacgagtagcacagcccctctatggtttag

SEQ ID NO: 174166 - DNA, 117 bp, Homo sapiens
ataagagcctggtgagacggagctatcggcgccgcggcaagagccagctgggagtgtccactcgccttccaccagcatggcaacgtcttcacagtaccgccagctgctcagtgacta

SEQ ID NO: 174167 - DNA, 100 bp, Homo sapiens
gaagccgcacgtagaattaagacggagttcctagtgcaaatgcaagctgtcggaaaaggtaacagaagatggaactcgaaatcccaatgaaaaacctacc

SEQ ID NO: 174168 - DNA, 100 bp, Homo sapiens
tactcaagaaagagtgcccaattccaaatgtacagtataacattcaggcttatccaacaacagtggtattcaaccagtccaacattcatgagtatgaagg

SEQ ID NO: 174169 - DNA, 100 bp, Homo sapiens
cagcttcagcgaccccggagtcctcccacgagccacgcctgatgaagccgccgatctggaaaggcaaataggacatgtctcaggaaggctatggaactag

SEQ ID NO: 174170 - DNA, 80 bp, Homo sapiens
ctcctgatcatggagggcctctcggcctttctccacgcactgcgcttacactgatgtgaagttcatttccaatccgccct

SEQ ID NO: 174171 - DNA, 51 bp, Homo sapiens
agacgtgacagcaacatctgcatggggcattctcttctcccaccctcggga

SEQ ID NO: 174172 - DNA, 74 bp, Homo sapiens
tggagagggggcgctgagctgttgggggcacctggacgatgacggattaccgcacgggttctgcacagtcacct

SEQ ID NO: 174173 - DNA, 100 bp, Homo sapiens
ggggaagcgatggctgggcccgcgtggatctctaagaaaactgtggatttagttactccactctgccatgtctttccaccactgcctgcacatttgagac

SEQ ID NO: 174174 - DNA, 100 bp, Homo sapiens
caggccttaaggagaaagtttcagctggaagaagaactgagacagcagaaagaagcagcttgtttcaaggctcgtccaaacaccgtcatctctcaggagc

SEQ ID NO: 174175 - DNA, 88 bp, Homo sapiens
ccacttgttccacctcagctaactataaaagacttctacatgacagcaaaagatacagatattgtggatgaagccatctattacttca

SEQ ID NO: 174176 - DNA, 100 bp, Homo sapiens
cccataccagagaattatgatcaacttcaaccctcacttcgatttggaggacagagactgcaagtttaaatgtgatactggtgtagatctccttgttcta

SEQ ID NO: 174177 - DNA, 75 bp, Homo sapiens
gcggcgaccgagccggagctgctcgacgaccaagaggcgaagagagacacctatggctgccgatgaaggctcagc

SEQ ID NO: 174178 - DNA, 100 bp, Homo sapiens
aacaacctcttgaggatcgaatcttcactcccgctgtctcagcagtctacagcacggtctgtccacgttctctgtgggttcattgccggacttgagtctg

SEQ ID NO: 174179 - DNA, 75 bp, Homo sapiens
gagcccgatcctgtccagaggcttcaggccaggagtggtggctcacacctgtaatcccagctctgggaggccaag

SEQ ID NO: 174180 - DNA, 96 bp, Homo sapiens
ggcaatttagccatctgtgtgattatcctcttgtttatcctggctgtcatcaatttaatagtggaagcactgcaggctcagctgggagagcagacc

SEQ ID NO: 174181 - DNA, 98 bp, Homo sapiens
caggattgagacccggaaggcttcaaaggctgtcgcaaggaggaagactatctgatcaacgtgatggatgccctgggcctgcagccgtcccgcaccct

SEQ ID NO: 174182 - DNA, 74 bp, Homo sapiens
atccaacaaaaacagaccagaagattaccaagattcttctaacagagaaaatgccattgaggatgaagaggagg

SEQ ID NO: 174183 - DNA, 75 bp, Homo sapiens
ggagatgcttccgaactgtgggcaaaaatggcggacctgacaggaagcggggccgccagacctacacgcgctacc

SEQ ID NO: 174184 - DNA, 97 bp, Homo sapiens
tcattctggacgtgcttctgcccgagcagaaaggacccaggagcgataacagtaaatcaaataagatatttgtcggtggaattcctcacaattgtgg

SEQ ID NO: 174185 - DNA, 127 bp, Homo sapiens
caggagtccagggctggagagaaaacctctgcgaggaaagggaaggagcaagccgtggtgtcatggagaaactccagctgggcccagagattctgcagcgggaaaatccaaggcttatttatgccag

SEQ ID NO: 174186 - DNA, 50 bp, Homo sapiens
cgggtggagtgtaggtcatatcgccgcgcttggcttgtggagatgttgaa

SEQ ID NO: 174187 - DNA, 75 bp, Homo sapiens
acatctagcagaagtaagtcagaccagggtgccgtgagcgatgtggagatgcaggaacactatgatgagtttttt

SEQ ID NO: 174188 - DNA, 90 bp, Homo sapiens
ctacacagctgtcttcggtgcctacactgctttcctcttcatccgcacaggacggaacccccagaaacaggcccggacctcctcctctac

SEQ ID NO: 174189 - DNA, 100 bp, Homo sapiens
caagcagctgcttgccggccccaacacggaccttggtaatggcaccattgacttccccgaatttttgactatgatggctagaaaaatgaaagatacagat

SEQ ID NO: 174190 - DNA, 100 bp, Homo sapiens
agagcaagtctgctcatgtgcagactcagactggccaaaattcaatccctgctttagctcaggcgcattctacattctaaaggggagctcagtgaagata

SEQ ID NO: 174191 - DNA, 100 bp, Homo sapiens
ccttaaatatgcatgagtcttctcaacttgaaggtcatttaaccaacctcagctttacaaaccctgaatttataactgatgttatgtgccaagaaccttg

SEQ ID NO: 174192 - DNA, 50 bp, Homo sapiens
cttgaatggcgactagatgtacaggaaagaccacagcaagattctttcat

SEQ ID NO: 174193 - DNA, 100 bp, Homo sapiens
ctcagacagatcgccggggaggcagcgcgggatcccagcctcaggcgtgcgcggacggtgtgcgggacctccggctagcctgtttcagccacctcgtcgt

SEQ ID NO: 174194 - DNA, 100 bp, Homo sapiens
agcagttttcatggatgcccctgtttctggtgggttcttgaagcttttgagattaacaatggcaggaaaatcatcactttttaaagtaattctccttgga

SEQ ID NO: 174195 - DNA, 75 bp, Homo sapiens
tctagaagaaatgccctccgggtcacaggataaggagtttgggctttgcaaaactgagaacaaagccaagtcggg

SEQ ID NO: 174196 - DNA, 83 bp, Homo sapiens
ctggaaaactggatgctgcagacactgaacgaggagccagtggccctagcacaaaacacagatcttaaagaacgcttacgcag

SEQ ID NO: 174197 - DNA, 100 bp, Homo sapiens
agcccgcgcgcggcccacactcgcctcccctcggcacccccggccccggagctgcctggaggcggccgcactcggaaaatgcatccgatgcagatttatg

SEQ ID NO: 174198 - DNA, 90 bp, Homo sapiens
tggaccaacttctttggcaagtggacattttactggctcaaatatgagatcctgactccaaactccattcccaagggtttcatggacggg

SEQ ID NO: 174199 - DNA, 82 bp, Homo sapiens
tgaagacttgaacttaatacagcaagaaagaccatcaagtttaccaattcactgcgtgctgtcctcacttgttctacaatga

SEQ ID NO: 174200 - DNA, 83 bp, Homo sapiens
cagagctgaggactgcctgtttgcagaggccgagcatggttatgcgtccctgtgcccgcatcgcagtccaggccccatccaca

SEQ ID NO: 174201 - DNA, 83 bp, Homo sapiens
tcttcaacaagaggacccaggagaaattcgccctcaaaggcgaccattgacgaggtggagacggacgtggtggagattgaggc

SEQ ID NO: 174202 - DNA, 51 bp, Homo sapiens
ttcgcagtggtcgcttcttctccttggttggactcttcacagaaattgggc

SEQ ID NO: 174203 - DNA, 96 bp, Homo sapiens
tccaagactgaccacatccctgctcatctcacctatgggaagctgctagctctaacagaagctcataaaatggtgagagaagcaaatatcaagcag

SEQ ID NO: 174204 - DNA, 100 bp, Homo sapiens
ggaaccatctgggagccttcctgatccgggagagtgagagctccccaggggagttctctgtgtctgtgaaatttgttcctgatcttgaagatattgtaaa

SEQ ID NO: 174205 - DNA, 75 bp, Homo sapiens
gcagccttgggcctcgcgccggctatggccgtgccctggggctgagccctcaggccggctggatcctgcaggcag

SEQ ID NO: 174206 - DNA, 97 bp, Homo sapiens
ttctccactttcgccagcccgtgccgcgagcgcggcctgcaggaggtaaggctggcctctctgcagtcagaggtctgagctctgccatggggatagg

SEQ ID NO: 174207 - DNA, 75 bp, Homo sapiens
ccatcctgccttggacacctacatcaaggagcttctggaagaggtgaagaaggaattgcagaaagtgaaagagga

SEQ ID NO: 174208 - DNA, 100 bp, Homo sapiens
cttggacttccagcctccagaactgttttataggatcacattgacaaaagtaccatggagttttatgagtcagcatattttattgttcttattccttcaa

SEQ ID NO: 174209 - DNA, 83 bp, Homo sapiens
ggtctgctccggatggctccgcaagtcccccccggagaaaaagttgaagcgttatcaaactgaccgggcaaatagattcgagt

SEQ ID NO: 174210 - DNA, 100 bp, Homo sapiens
ggcctctgttgccctgtgatctgcaggtccggagagacgcacagctaagatgtcaggacatcctggaagctgggaaaggccagcagaaaactgagcttcc

SEQ ID NO: 174211 - DNA, 100 bp, Homo sapiens
cctttgggccgtcaggcagttggttgggacccgctccaaccctcgatactgcaggcaaacagctcgccgaggtgtcccatgggggtttaaaagccgcatc

SEQ ID NO: 174212 - DNA, 97 bp, Homo sapiens
atgtaaacgtcaatgcacaaaatggatttggaaggactgcgctgcagctgagatctgtatctgtggacctgaatgttgatccctcgcttcagattga

SEQ ID NO: 174213 - DNA, 145 bp, Homo sapiens
ctgctcctgcggttggtgagattacctgggtctagagtgcggagctgctccgtggccacgaggacgtcaccatgacttgggaagatccccatgaaaaagataagagcacgaactgctttggagataatgatcctattgatgtttg

SEQ ID NO: 174214 - DNA, 98 bp, Homo sapiens
ctggaaactgttttggatgatcttgaccccgagatggaacagattaaaagggccaataaactgtttaccaatgattgtatatttctgaagaaaacttt

SEQ ID NO: 174215 - DNA, 92 bp, Homo sapiens
cacttgtccagcgagccccactgctcggggaggaggagccacggccggggacaggtcagcagcacagtggccatggaaaaagaaaaactcta

SEQ ID NO: 174216 - DNA, 75 bp, Homo sapiens
gatggccagctttcccccgagggtcaacgagaaagagatcggacactcatgaggaccatgatacttccactgaga

SEQ ID NO: 174217 - DNA, 90 bp, Homo sapiens
ctcttccaaagaatgccacagaatcaggggaggcatgcttcagcttttaataacccacgaccagggcaactgggcaggttattgccaaac

SEQ ID NO: 174218 - DNA, 75 bp, Homo sapiens
tggaaaataccacaggatggagactacgagtttgctgcagaagatgtcaatgttactttcgaagatcaacaaaag

SEQ ID NO: 174219 - DNA, 75 bp, Homo sapiens
ggtcgcaggagccctgggagccgccgccatggcaatggctgccatccggaagaaactggtgattgttggtgatgg

SEQ ID NO: 174220 - DNA, 98 bp, Homo sapiens
tactatcacgacgggaagctgtggtttgaaaatctgaacacagttgctgagtgtctgttttctctggtcaacggtgatgacatgtttgcaacctttgc

SEQ ID NO: 174221 - DNA, 101 bp, Homo sapiens
tatgattaccaccaggagattgcaaggtaaagtaatctcacaagctgccaaagaacacatcccaagcagtaatcacagacgatgaagcaccttacaggacc

SEQ ID NO: 174222 - DNA, 100 bp, Homo sapiens
aggtgaccaaccccaaggaggacgagggccggttgccgggcgcgggcgagaaagaccagcatctcagacatgtcgaaaaagatgttttgatccctaaaat

SEQ ID NO: 174223 - DNA, 98 bp, Homo sapiens
ctgaatttccaggcctgcgtcccatgtagcctctccatgaactgcagaaggcatgttctgcatggttaccatttcagaatggcttcggttattgcctt

SEQ ID NO: 174224 - DNA, 100 bp, Homo sapiens
gtttttggcatactacgtgcaggagcaaggtgggcacaaatgatgctgacttagtagatgaatccacatttgagtctccatactctcctgaaaatgacag

SEQ ID NO: 174225 - DNA, 100 bp, Homo sapiens
cgtctccatcctctacctcaagtatgagccaggcctgaggtcctttcgagactgctggggaacctggtggtgaagaacaagaaggcccagtttgtgatga

SEQ ID NO: 174226 - DNA, 98 bp, Homo sapiens
gggcggctccgcagtgaccggactcgggggagattgccacactgaaggtcaaaatattttattcactgatggagaatatattaatcagatagctgctt

SEQ ID NO: 174227 - DNA, 89 bp, Homo sapiens
aggaaaccagggcttgcagatattggtgaatgaaaactttgccattgatttgatagcagagcagcccgtgagcgaggtggagactcggg

SEQ ID NO: 174228 - DNA, 82 bp, Homo sapiens
gaagtaggcagctatcccattttaagagcaagaagaactacttcaagttcagttggcttcctgaggctcaggtagtccaaag

SEQ ID NO: 174229 - DNA, 100 bp, Homo sapiens
ccagtaatggaattgatatgggctacaatgggaataaaactccaagaagccaggtgttcaaggtggaggagttactgatggccatggagaaggtaaagca

SEQ ID NO: 174230 - DNA, 100 bp, Homo sapiens
tgtgtgatgtaattttagtcgctggtgatcgcagaattccagctcacaggaagccagttgagggaagttctccatgaatgtacgtcacaatgatgatgac

SEQ ID NO: 174231 - DNA, 100 bp, Homo sapiens
ctgcgggagtcaagcccctccaggagcggactgaaggccccgcaggtgaatggagagtagcagccggggcccagacatggcccatgaacatggacatgag

SEQ ID NO: 174232 - DNA, 78 bp, Homo sapiens
ttagctgctcacatatggatactttcacagttcagggaggatcaaccgccaaaggcacagctctgaagactggctctg

SEQ ID NO: 174233 - DNA, 51 bp, Homo sapiens
acacaaagcagcccaaccaaagggctctccagcagaactatctcctactac

SEQ ID NO: 174234 - DNA, 50 bp, Homo sapiens
gccccccgtgtttgacgagaatgaggaagatttctcacattggcaaactg

SEQ ID NO: 174235 - DNA, 100 bp, Homo sapiens
cgggcaggacctcgaacccgcctgcgatggggcgagaaaggtcccactgcagccctccaagcagagcactgcagtttcctcctgaaggctggctccggct

SEQ ID NO: 174236 - DNA, 87 bp, Homo sapiens
gatcttcgagttcaaagagaccctcggaacctgtgagccgtgagctttgaggcggtgggatgtgtcagcagaatgtctcctgccccc

SEQ ID NO: 174237 - DNA, 90 bp, Homo sapiens
cagatgatcttggaggaaatgaagaagccgacagaggatatgtgtctgactgaccaccagctatcatggtgaacttacttcagattgtgc

SEQ ID NO: 174238 - DNA, 113 bp, Homo sapiens
aaactggctcatttctttgtatgagaatggcatcaatggtatccttgcagatgaaatggtaaagagaaatgtgtatgaccttacaagtatccccgttcgccaccaattatggg

SEQ ID NO: 174239 - DNA, 100 bp, Homo sapiens
atcgtgggctcggtgctggaggggacgtacctggacaagcacatggaggctcagcgggccgaggagtgtggcaaaggagcagagaactttgacaagttct

SEQ ID NO: 174240 - DNA, 75 bp, Homo sapiens
gggtatggaaccggccttctttcagccaacagacattcactcatggaggaagaacgtgcaaaacgtgaggagcta

SEQ ID NO: 174241 - DNA, 76 bp, Homo sapiens
aggaggtgtcagatctgccagcacctgtgctacctgtccatgtgacaaccatgagtggaaaaaactaattatggtt

SEQ ID NO: 174242 - DNA, 101 bp, Homo sapiens
ttgctcttttgggtgtcatcattgccaaaacaccagtcacttcagagactgttgtgacggaggttttgggtcaccgggtgactttgccctgtctgtactca

SEQ ID NO: 174243 - DNA, 88 bp, Homo sapiens
gttaaggagtatgcccaagttttccgtgaacatgccaacaaattgattgagttccgggagaacctccaggacctgctgcccatactgc

SEQ ID NO: 174244 - DNA, 100 bp, Homo sapiens
aacaatgcaaggaggtagacatccttatcagcacagcacttattccaggtacgtcttattcaggttatgaagcagcagtgtattcagctgcatcttccta

SEQ ID NO: 174245 - DNA, 75 bp, Homo sapiens
catggcccggctccttagcacctctccagaaagaacattggagctatcatgtctggaagtgtgtttgcaatctaa

SEQ ID NO: 174246 - DNA, 98 bp, Homo sapiens
gtgaaggagaactgcaaacctctgaagactctggcctggttgtcccaagtatttcctatgagctgcataaaaagctgttgtccgtggctgagaagcat

SEQ ID NO: 174247 - DNA, 50 bp, Homo sapiens
gcctggctccccatactagtcgccgactctggcaacgggtaactcgagcc

SEQ ID NO: 174248 - DNA, 100 bp, Homo sapiens
ggatattctggtggggagatgaacccaacctagtgggtgtaatacatcatgaactgcaggtgcacctggtggacatatggaatgtcatagaagcattgcg

SEQ ID NO: 174249 - DNA, 75 bp, Homo sapiens
caagaaatctcaagatattaaagttactgctgttaaaaagatgcggcattccaaaagaactcactgtcctgattg

SEQ ID NO: 174250 - DNA, 86 bp, Homo sapiens
gagatcccgggcgggggcaccgagggctaccacgttctgcggattgagaggatccagaatccagatctctggaatagctaccaggc

SEQ ID NO: 174251 - DNA, 75 bp, Homo sapiens
agtcaccccagattcgttcgaaccatcccggagctgagtgttcggccaaggttggaccgacagttacaagacata

SEQ ID NO: 174252 - DNA, 74 bp, Homo sapiens
ctgagcgcaactagcggcgggtcgtgggcacctccagattgtcactgctgttccaagggcacacgcagagggat

SEQ ID NO: 174253 - DNA, 90 bp, Homo sapiens
ctgagccggaatccggacaattatgtccgcgaaaccaagttggacttacagagagagactaatagacaagtcacgagttacctgtgtcaa

SEQ ID NO: 174254 - DNA, 99 bp, Homo sapiens
gaatttatatagagatgtgatgttggagaactacagaaacctcgtctccctggccacaccatatcctggtggatttaaatgtttcacctgtgaaaaggc

SEQ ID NO: 174255 - DNA, 82 bp, Homo sapiens
cgagtgacttctgtccggaaacctgcagtcaatataaagcaagataacgaaggaggcccaacttcattcaataaggagcctg

SEQ ID NO: 174256 - DNA, 74 bp, Homo sapiens
aaggattccaagtaactcttatttggtgcagctgacgagatcatgttgccttgtgaattttgtgaggagctcta

SEQ ID NO: 174257 - DNA, 105 bp, Homo sapiens
ggatgagctgaggagagtgagcgtcccctatccaagtagcctgctgtcgcccagccgcggtatattgagatcttcagaagtagcaggagtgaaatcaaaggattt

SEQ ID NO: 174258 - DNA, 50 bp, Homo sapiens
cgagggctccagaacccaggaaggattatatgcgtcaggcaggagaagtg

SEQ ID NO: 174259 - DNA, 75 bp, Homo sapiens
gctgaaccgtgcagtgctcgctgccatggatgccaccaagctgtttggtgccctggttgtcagatgttggaaagc

SEQ ID NO: 174260 - DNA, 51 bp, Homo sapiens
ggacatttgagtgtggcgcgtgcaggtgttaaaaaagatattgagaagctt

SEQ ID NO: 174261 - DNA, 83 bp, Homo sapiens
cagcacattgaccgctggctgctggccgagatgctcggggatctgtcggagattgtggacggcaacgcaaagatgaccctggg

SEQ ID NO: 174262 - DNA, 100 bp, Homo sapiens
gtagttgttgagcagagggaaagggataggagaaggatgtggactgcagtgctgcagtgccaggaagcccagaacctcatggccctcaccaatgtggaca

SEQ ID NO: 174263 - DNA, 80 bp, Homo sapiens
aaggagatacattaaatgcaatagcccttcagtactgttgtacggctttcatgagaaggacaagaagccatattgccgaa

SEQ ID NO: 174264 - DNA, 75 bp, Homo sapiens
tcctcagagagtgaacttggaatcttggacctcatccagagtgtagcttccattggcaatactttaaacagcgtc

SEQ ID NO: 174265 - DNA, 75 bp, Homo sapiens
gagagtttgaaagtgcgattgtggaagctgctcggtttttccagaaaggaggagtcaaggaagcccttagtgaac

SEQ ID NO: 174266 - DNA, 75 bp, Homo sapiens
aattcatcaaggagctcatcaaggacgggaagtcactcataagcgcgctcaagaaacaccttccaccatgaccac

SEQ ID NO: 174267 - DNA, 83 bp, Homo sapiens
ttaagcttgcaactgaactccctgatgctgaacttaggaggactttatggccacatgctaaatgccctttatgcagaaatgat

SEQ ID NO: 174268 - DNA, 75 bp, Homo sapiens
cctcaccaaacgctgtctccggagctactggtctgaccgctgcggcttgatgagacccaggaggcagagttccag

SEQ ID NO: 174269 - DNA, 99 bp, Homo sapiens
tcctgtaaatacgaatctttccaaaggagatgcccgatgccttcaattaagttgcagagttctgatggagagatatttgaagttgatgtggaaattgcc

SEQ ID NO: 174270 - DNA, 83 bp, Homo sapiens
ccccttcgcgtcccctgcaccatgagctggggcaccgagctctggaactgaagcgctgcggcatggcgcgcgcctgcctccag

SEQ ID NO: 174271 - DNA, 96 bp, Homo sapiens
cctgaacgaattttctttcgatggcattaccagagtatagacttaattcagtgcacaaatgagatgaatgtgaacatcccacagttggcagacagt

SEQ ID NO: 174272 - DNA, 90 bp, Homo sapiens
gaagacatcactgattatgtctctggtcagtgaagaatttccagaagaggttggaagtgtatcctcccttcttattttttctagctgttg

SEQ ID NO: 174273 - DNA, 110 bp, Homo sapiens
agaagatgtggtggcttccgtttgttggtggaggaggtggcaggcctcggcgttttcggctttgtgagaaaccttaccatcaaacacgatggccagcaacgttaccaaca

SEQ ID NO: 174274 - DNA, 104 bp, Homo sapiens
cggggcgacgctggctgcagggacccggtgacagcgtgagagggattttatattggaagacatggatcttgctgccaacgagatcagcatttatgacaaacttt

SEQ ID NO: 174275 - DNA, 50 bp, Homo sapiens
cgagtcatatggggacctttcggaggaggcggcaaagaagtttgtttctg

SEQ ID NO: 174276 - DNA, 100 bp, Homo sapiens
cgaatgcagattgctgggaagctgacatcacagaaattgataaagaaggtgtgattgaaccagacactgatgctcctcaagaaatgggagatgaaaatgc

SEQ ID NO: 174277 - DNA, 98 bp, Homo sapiens
ggccttccagctgtttgaccgaacaggaggcaggtggaagtcatcataaagtttctgtttcacccgtcgtccatgttcgaggactctgtgaatctgtg

SEQ ID NO: 174278 - DNA, 100 bp, Homo sapiens
tgtggattcactgtctccagcgcctcttctttgagaaccaccctgcctccatccctgccaaggcctgtagtggtggagacacgcccagtggatgatccta

SEQ ID NO: 174279 - DNA, 100 bp, Homo sapiens
cggcgtgctactgtgcgctcgatccagcaccatggggaagcgggacaatcgggtgaggttgacggatatattcagacgttacgacacggatcaggacggc

SEQ ID NO: 174280 - DNA, 87 bp, Homo sapiens
tgatcatgctgggagccatctgtgccatcatcgtggtagttattgtaagtgccgtgagcgatgtggagatgcaggaacactatgatg

SEQ ID NO: 174281 - DNA, 101 bp, Homo sapiens
cgacgacccagcagccgccatggctctgctccgagcactattcctgatcagagaactccagttgcttcaacacacagtatcagtagtgcagccaccccaga

SEQ ID NO: 174282 - DNA, 100 bp, Homo sapiens
tccgtcgctctgtgacctgctggcattgaatgatttatagctaagactccaggacacccctgaagccgagaaatggacacattcagctaacgtattttag

SEQ ID NO: 174283 - DNA, 82 bp, Homo sapiens
cttgtccgggtgcggataagggacccgacactgattgccaaatctttggagtgttgatggagaagttacagtagctgaacag

SEQ ID NO: 174284 - DNA, 50 bp, Homo sapiens
gctgccaaagccttagacaagcgcagttgtgtagcagttgagtaatgctg

SEQ ID NO: 174285 - DNA, 100 bp, Homo sapiens
gggatgatcggatccatggagccttgttgatccttaacgagctggtccgaatcagcagcatggagggagaggtatataatgtttacatggcagggaggca

SEQ ID NO: 174286 - DNA, 100 bp, Homo sapiens
ctggctcgagaacgaagtaggccgtctcgctctgggtctccaggcccgcgaccgtccgccagtcgtcccgagccatcgacgagtacaagccccaggatgc

SEQ ID NO: 174287 - DNA, 75 bp, Homo sapiens
gacctgcatattgttaagaacagctgcaaaatgtaccagagagaaagatcaggtttggtttaagaataaaagggc

SEQ ID NO: 174288 - DNA, 70 bp, Homo sapiens
cttcatagtcttcactgtgataggtggaggcaatgcccagagctgtggcagccaccttgcagccgtgaag

SEQ ID NO: 174289 - DNA, 109 bp, Homo sapiens
tttcagacaactatactctggatcatgacagagctattcacatccaagctgctgtaagtaaagatgattccattatttcaagtcttgatgtcactgatattgcaccaag

SEQ ID NO: 174290 - DNA, 73 bp, Homo sapiens
ccactggttgccttggtaggcaataaaagtcggcggaagcagaagtgggctgtggatcctcagaacactgcct

SEQ ID NO: 174291 - DNA, 50 bp, Homo sapiens
gggacccagattgcgggttcagcttcctgcctgacacagctcacttcaag

SEQ ID NO: 174292 - DNA, 75 bp, Homo sapiens
aattttattcccaaatactgcttaagagagtcatccagagctggctacagagctgaagatccctgaaaacgccaa

SEQ ID NO: 174293 - DNA, 88 bp, Homo sapiens
gccgaggaggcagcgcgacctccgcacgagccctatgagtttgtctctctggaatggctgcaaaagtggttggatgaatcaacaccta

SEQ ID NO: 174294 - DNA, 83 bp, Homo sapiens
attgcttttgaagttattaaagtctgttggtgcacaaaaagacacttatactatgaaagagctgctgtgttgaaatatgaaaa

SEQ ID NO: 174295 - DNA, 75 bp, Homo sapiens
tgagaacccagagaagaatgaggcctttctggaatagccaggccagaagaaggaaggcctgtggtgagtgggaca

SEQ ID NO: 174296 - DNA, 98 bp, Homo sapiens
gtatctaacgacctctcacagaaactatatgccaccatggagaagcataaagagaacactcctatgccaccttcaccagctgtacaagtgcagggcca

SEQ ID NO: 174297 - DNA, 50 bp, Homo sapiens
cagcctcccaaagtgctggaattataggcatgagccaccacgcccggcct

SEQ ID NO: 174298 - DNA, 90 bp, Homo sapiens
ctgtgctgggtgtcttctccctcgccagctgggaccctgatgcttggtgtgacctgagtaaatttgacctccctgaggaaccatctgcag

SEQ ID NO: 174299 - DNA, 82 bp, Homo sapiens
agtgtttctcgggttggaaaagccattgataagttactatgcgagtcagaagaaaacatttgaaattaatcccagacacccg

SEQ ID NO: 174300 - DNA, 101 bp, Homo sapiens
aatgtctcatgttcgagtctggggctgtcgctgtgctctggttattttggagctgttggagcactccttgagctgttgaagatcccgtgatcattacctgg

SEQ ID NO: 174301 - DNA, 97 bp, Homo sapiens
tgagctcagaagtgaaagaacgacgaattgttctcattagggaacgaaaaggttgattcttcaccacactgaaaccattaggaaaaatccttgtggt

SEQ ID NO: 174302 - DNA, 100 bp, Homo sapiens
ccaaatagccatggacgtgatggaacgctgcatccacttgttgtcagataaaaatctgcaaatccgcctgaagatatctcttccaaatgcatgatgaagg

SEQ ID NO: 174303 - DNA, 75 bp, Homo sapiens
ccattggtctaaacttgatccaaagacaatgaaggtcaagagcaatctgaatccaaatgcaaaggagtttgttcc

SEQ ID NO: 174304 - DNA, 56 bp, Homo sapiens
gggaggcgattacagccgacccccgagaaggggacgaactggtagtacctgaaaca

SEQ ID NO: 174305 - DNA, 89 bp, Homo sapiens
caagaccagtccatttggggaaatccttcggatggtgaactcattagaattaccttatcccatatcacacaactggtcctcagccataa

SEQ ID NO: 174306 - DNA, 90 bp, Homo sapiens
tacctatctggaaacaacaggcgagacctggagatggacctgtgatctgggctctgtgtgctccgggatggagcaggtgtgcagagggtg

SEQ ID NO: 174307 - DNA, 80 bp, Homo sapiens
gcaggctgtggaacgggccaagcaggtgaccatggcagaactgaacgccatcattgggcggggatctgatgagcttcttt

SEQ ID NO: 174308 - DNA, 98 bp, Homo sapiens
atcaggtaggctgcgttgaggatctttgctcttccatccgcctttgatcgtcttcctcttcagccatccaggggctcttcagagcagcaggacacctg

SEQ ID NO: 174309 - DNA, 100 bp, Homo sapiens
tgaggatggtgagcagttctctattatctggacagttgggaaacagcccagtggtataagggatggatagaatgacagaagatgctcttcgcttgaatct

SEQ ID NO: 174310 - DNA, 75 bp, Homo sapiens
gcaatgttcattttactccgcccagaagacaacatcaggctggaatgggtcgggaagttgagaatcttatattag

SEQ ID NO: 174311 - DNA, 75 bp, Homo sapiens
ccaaactgctcatacagaattacgcatttccacttctaatgctcggaatacctggccatcacctctgaaagcaaa

SEQ ID NO: 174312 - DNA, 82 bp, Homo sapiens
gtggactgtgaagacagacgatattgttttcagatcacctctttcgatggaaaaaactgaataccactagaaacatacctgt

SEQ ID NO: 174313 - DNA, 100 bp, Homo sapiens
aggaatgttaagttgattgccctttcaatagacagtgttgaggaccatcttgcctggagcaaggatatgctccagtcaccggcatgtgtcatccagtgag

SEQ ID NO: 174314 - DNA, 101 bp, Homo sapiens
gccctctcaaggctggttatttcaacttcacctcggcaacaattacttacctggcccaggaggatgggcccgttgtgatatgtgcagcgggggctacagcg

SEQ ID NO: 174315 - DNA, 76 bp, Homo sapiens
cctggttctggaatcctcagttcaaggtatttaacatgaagtcgctccagattgtgttacctgcccgagcagaccc

SEQ ID NO: 174316 - DNA, 97 bp, Homo sapiens
acaccatgtctgcaggaggtggccgggcctttgcttgggagaagccggagacccagggccccctggactacctgcctactcccctcacccttcccta

SEQ ID NO: 174317 - DNA, 98 bp, Homo sapiens
ctgcgccccacccgcaccccatctggaccgcatcgctgaatgtgcccggacctgcgccttctggataaatttgcgcctcattttggtaagcggaaaaa

SEQ ID NO: 174318 - DNA, 100 bp, Homo sapiens
tttctccgaagatgtcaaacggcccccagcgcccctggtaactgacaaggaggccaggaagaaggttctcaaacaagggataagaagcatgtagactggg

SEQ ID NO: 174319 - DNA, 75 bp, Homo sapiens
tggcttctcccatgcctgcaggtcaccctgcggtccccaccaagcctgtgggggtaaagcaaaaagatggccaag

SEQ ID NO: 174320 - DNA, 98 bp, Homo sapiens
ggcgagaaggcggcgcgcgaggtcaagctgctgctgctcgttgattcgatgtcatcagtcccgtggtggagcctgtggagacaacattcagtcttata

SEQ ID NO: 174321 - DNA, 100 bp, Homo sapiens
aagacattggagcatggcagcccatcatgcaaggaatagcaattctggctgtggtgaccaataattccttgtgtggatatcagatccggatggaatctcg

SEQ ID NO: 174322 - DNA, 90 bp, Homo sapiens
tggaccctgcggaatccaccggcgcagtttcatctagcgactgcaatcatttggggaagaatctacagttgctgatggacagagtggatg

SEQ ID NO: 174323 - DNA, 73 bp, Homo sapiens
gaagctttactggtgttccagccctaagggtgtcaaattgagaaccaggtagatccccaccacctacagtaaa

SEQ ID NO: 174324 - DNA, 75 bp, Homo sapiens
gacagcttcaaaaaattgtttagaaaaattgttcgaagaagaaaatggtgagagccgccttcaagcacaaaacca

SEQ ID NO: 174325 - DNA, 98 bp, Homo sapiens
ttggactcatacaggtcggagaggtcagcaacagggacatcgtggagacggtgctcaacctgcgctttgaacttcaagattcaggaagctctctactt

SEQ ID NO: 174326 - DNA, 121 bp, Homo sapiens
agaatgtttttgaccagaaaaccgacaaccttcccagaaagtccaagctcgtggcaagagcggtgagcggggcgcctatgcctccttcgggagagacgcaggcgtgggcggcctgactcag

SEQ ID NO: 174327 - DNA, 83 bp, Homo sapiens
ttcctcctgacggctgtacttgagcagtcacctggcacaggagcaggccatagaggtgctgacccgctccagcctagaagttg

SEQ ID NO: 174328 - DNA, 100 bp, Homo sapiens
tggggatcaccatagcttttctagctacgctgatcacgcagtttctcgtgtataatggtgtctatcaggtttcacatttggcaaagctggagagatcctc

SEQ ID NO: 174329 - DNA, 80 bp, Homo sapiens
ccaagtatggcaacatgacagaggaccatgtgatgcacctgctccaggccagcattgaaacaggggaccgtgtctggagg

SEQ ID NO: 174330 - DNA, 83 bp, Homo sapiens
gtccctgagaaggaggggtatgagccacacatccccgaccacttgcggcctgagtatgttatgcaaagggtgacctggacata

SEQ ID NO: 174331 - DNA, 100 bp, Homo sapiens
atgttggagaactacagaaacctggtctccctaggccaggagtggtggctcacacctgtaatcccagctctgggaggccaaggccagtggattgcttgag

SEQ ID NO: 174332 - DNA, 82 bp, Homo sapiens
ctcgcgcctcttcgccgtcatccgcttcgaaagcatcatccacgagttcgacccgtgcgtttgcctcagcatggagggcggg

SEQ ID NO: 174333 - DNA, 104 bp, Homo sapiens
ttcagtcaaaagcctgaatttcaggatctttcagggcaggcacatcatggacaagtttcatacatttctccgccaattcaccttgactctgagctagaaagacc

SEQ ID NO: 174334 - DNA, 90 bp, Homo sapiens
tgaatcttgacaagaccatagagagttgcaaagcacaattaggaagctgaatatggtgggcatgatcagatagatttgtatgacgatgtc

SEQ ID NO: 174335 - DNA, 96 bp, Homo sapiens
tgggcatcatcaccgccgccgtcctgggggccttcaaggacatgagatcctgaaggagctagacgagtgctacgagcgcttcagtcgcgagacaga

SEQ ID NO: 174336 - DNA, 97 bp, Homo sapiens
cacagagaaacacagctggacattaaagtgggtcagccagcagccggcccggggtgtcagccaccccacccaagtccccggtctacctggacctggc

SEQ ID NO: 174337 - DNA, 100 bp, Homo sapiens
aaacattgagctcgggctgagtgaggcccagatttccaaatctgaagtctgtccgagaactcattttgaaacgtggacaagccaaggtcaagaataagac

SEQ ID NO: 174338 - DNA, 82 bp, Homo sapiens
atcgttttgatggatatatcttccttgacagcaaaggtgcctcgagtctttattggtaaagattgtataggcggatgcagtg

SEQ ID NO: 174339 - DNA, 75 bp, Homo sapiens
agccgcacgcactgccgtgttctccctgcggctcgtgtactaatggtcacttgatgtgcgctggctgttttatcc

SEQ ID NO: 174340 - DNA, 82 bp, Homo sapiens
cttcaatttggtaggataactgcacataaggattttgagggtgttgatgatgccttctatacattagttcgagaaattcgaa

SEQ ID NO: 174341 - DNA, 74 bp, Homo sapiens
gcagaatgtgttccctgtctacttgaaacacagatcatcatggcaaaaccagctggtgggcccaagcctccaag

SEQ ID NO: 174342 - DNA, 100 bp, Homo sapiens
gtgcttcagccaagtgaaaggcactatcgagattggaaccacagaagggggccgaaggccagagaccaggatttggctacggaggcagagcgtccgacta

SEQ ID NO: 174343 - DNA, 50 bp, Homo sapiens
gtctgcgagccaggattcccgcattgtcccagatatagccgttggtacaa

SEQ ID NO: 174344 - DNA, 100 bp, Homo sapiens
ggacctttactgtgcagctcctgaaaggagagacacttgtgaacattcaagtgaagcaaaagcctttcatgattatttcatccatgagctcggatttccc

SEQ ID NO: 174345 - DNA, 96 bp, Homo sapiens
gccatggcggggaccgcgctcaagaggctgatggccgagtacaaacgtggcccatggcgccctcagtgatggtgccattgatgctgtggagacaca

SEQ ID NO: 174346 - DNA, 75 bp, Homo sapiens
cgaagcttacattgacagcacttatttcatggttctatcaaagcagcagtaaaaaaaatactcttgacgcatgaa

SEQ ID NO: 174347 - DNA, 82 bp, Homo sapiens
agtaggtgcgggtgaagatggcggcagccgaggccgcgaactgcatcatggaggaaggtgctcgggtcttcggggcactggg

SEQ ID NO: 174348 - DNA, 83 bp, Homo sapiens
ctggctaccatggaccatcctgctggtcagcactgcggctgcgccctcacaaagccaatgctgaggagatgaccaagtaccac

SEQ ID NO: 174349 - DNA, 100 bp, Homo sapiens
ctctgtatggcacagaagaatatttgtggtggctgaatacattttggaagagagtttttcatcttagagattggtgaacaagtgtgagggtgtgagaaac

SEQ ID NO: 174350 - DNA, 100 bp, Homo sapiens
tgaatgtctgaagaaactgcaaaagcgctttgaacttcaagattcaggaagctctctacttcctaaagagattgtaaaagtagagaagatgatggaaaac

SEQ ID NO: 174351 - DNA, 88 bp, Homo sapiens
acggccagaccggctgcatcatggacgagtgcacgtggtcgaggagatgcctcataaatttgtgatagccgtgctgatggaatacatt

SEQ ID NO: 174352 - DNA, 119 bp, Homo sapiens
gtcgctggctctgctgctgccgccggcgaaggaggaggcgttgccggacaatgcagatcttcgtgaagactctgactggtaagaccatcaccctcgaggttgagcccagtgacaccatc

SEQ ID NO: 174353 - DNA, 75 bp, Homo sapiens
ccgcccgccgcgcgccgcccacgccccgggaccggaccctcgcgccgcccgcgcttttcctccgcaaccatgtct

SEQ ID NO: 174354 - DNA, 82 bp, Homo sapiens
tttgccaaccacttctacagtcattgatggcagtctttattccacaagtaaaagacttcacaaagcactatggctctgacta

SEQ ID NO: 174355 - DNA, 71 bp, Homo sapiens
aagcgagaccgcgtgcgaggaccgccctgccaggagcccggaagtgggtccgcacgagacagaatagacta

SEQ ID NO: 174356 - DNA, 80 bp, Homo sapiens
ccatggttgccggctcccctctcaggacaacccagatgtgcaacaaagtgcgatgatgccttcaattaagttgcagagtt

SEQ ID NO: 174357 - DNA, 83 bp, Homo sapiens
aggtactgacagatccgtagggaggacaccgtgacttcccggacgctgggaaatgtgttaaccttgatgcctgaaagaactgg

SEQ ID NO: 174358 - DNA, 132 bp, Homo sapiens
cctctctggccactatggaattctaatttgaaccatgtttggattgaagccgcctctgtattacttaccaggcattggcagtggcaggcctgagccccctcctccagagaagccattcccctgcctcattcc

SEQ ID NO: 174359 - DNA, 75 bp, Homo sapiens
ggctggccgggcccaggtcccttcctccagagggagactggtggctggcccactcgctcagcacaggacagacag

SEQ ID NO: 174360 - DNA, 73 bp, Homo sapiens
gagatttgggtctcttcctaagccggcgctcggcaaggtcccagcatttgagggtgatgatggattctgtgtg

SEQ ID NO: 174361 - DNA, 50 bp, Homo sapiens
agcactattttggattagtcaatgaatgtcgttgtctgctgggtcttccc

SEQ ID NO: 174362 - DNA, 75 bp, Homo sapiens
cctggaagatgcgcccattggctggtgaaattgcaggtgctgcagtgtctgaaatttccgggcctttctcaacag

SEQ ID NO: 174363 - DNA, 98 bp, Homo sapiens
ttcatcagccgtctgctggccatcgtggcagacctctacgagcaggagcagtacagaaagccctggagatctaactagaagtccagagatggataaac

SEQ ID NO: 174364 - DNA, 100 bp, Homo sapiens
cccttgcacatcccatcagtcaggaatacctgaaagacacgctgcagaaatggatccacatgacctcagcatggccctgccctcagggcaggtctgccac

SEQ ID NO: 174365 - DNA, 74 bp, Homo sapiens
cgaggaggataaacccaggcaggattcaacacaactgcaatcaaaatcccagcaggctattttgtagaaatcga

SEQ ID NO: 174366 - DNA, 75 bp, Homo sapiens
gccatcactcatgtccataaggagtttttcagttatgggacaaaaatattatatcaaaacactgaagctttgcaa

SEQ ID NO: 174367 - DNA, 75 bp, Homo sapiens
agaaaccatgtgctgaaatgtttgacgacactgatggtttgtttaaggaagaaatctctaaacgttttaaatcac

SEQ ID NO: 174368 - DNA, 82 bp, Homo sapiens
tcagcggggcgctccaggaggcactcacaggtgcgcgcggagccatggttatcatgtcggagttcagcgcggaccccgcggg

SEQ ID NO: 174369 - DNA, 100 bp, Homo sapiens
ccaactggtccctcagtcacacatgccagagattgctcaggaagcaatggaggaactccttgcctttgccgattggaagcattaacaatttcatcctttc

SEQ ID NO: 174370 - DNA, 83 bp, Homo sapiens
gccagctgcaggcctataggaagccgtaagaactaaaatggtctactgcaaaattgatcagacccagagaaaagtagttgtca

SEQ ID NO: 174371 - DNA, 74 bp, Homo sapiens
aaatatttgcggtttcagcctcaacccagaggaatcgttactctttcagcatgtggatgccatggagactggaa

SEQ ID NO: 174372 - DNA, 100 bp, Homo sapiens
gtgccagcccctggatgtgctgaagactcgcctgatgaactccaagggggagtatcaggtgggagatgccatcccagcagtggaggtgtttgaaggggag

SEQ ID NO: 174373 - DNA, 100 bp, Homo sapiens
ggaaggcatatgaacttgcgtgggctactgcttgtagctttgggacacagcattgttggttttgccatgtactattttacctatgacccgtggattggca

SEQ ID NO: 174374 - DNA, 82 bp, Homo sapiens
gaggagccgcgggcggcgcggcccagctcgttccagttcctccgtgtcacaaagcagtacctgccccacgtggcgcgcctct

SEQ ID NO: 174375 - DNA, 100 bp, Homo sapiens
ctctgctgcccttgttgcctctcagcaggtggctgcccaggcatctgcatctggaatgtttcctggacaaagaaggagatggaataaactgagactgcag

SEQ ID NO: 174376 - DNA, 104 bp, Homo sapiens
cactctgttccctcctcaggaagtccttttattaccaggaggagtacaagcgcaagctagccagagtttccctggtgcgcaaagaactcaggtcccggatccag

SEQ ID NO: 174377 - DNA, 50 bp, Homo sapiens
tcggaggcgttcagctgcttcaagatgaagacgccacaggtcatcatctg

SEQ ID NO: 174378 - DNA, 102 bp, Homo sapiens
cagctgctccccggtgcacccgcaacaggcgttttgcaatgcagatgtaggctctgacgcccgctctgcggcttcggtgtttgaacaggccacagtccagga

SEQ ID NO: 174379 - DNA, 83 bp, Homo sapiens
agaggaaatcaagtcgggcaccacagcacccttgggcagaagtcaattcatctggaaagactatctctgagtcagacttaaac

SEQ ID NO: 174380 - DNA, 50 bp, Homo sapiens
tctacaatgaggcctccaatctgcaggattctcatcgctttggaaggcac

SEQ ID NO: 174381 - DNA, 82 bp, Homo sapiens
ggcccgggcccgcgtccgctcccgcgcccggtgagaagccctaccactgcaactgggacggctgcggctggaagtttgcgcg

SEQ ID NO: 174382 - DNA, 78 bp, Homo sapiens
gctactcagtttacagccactgcagtatcacagccaggtctctaattaacagaagatggcaaagcccagccacagcag

SEQ ID NO: 174383 - DNA, 100 bp, Homo sapiens
agatcatgatgtttaagaacatgacgccgtcacccttcctgcgattctacttagagtgtgaacatggctacgcctcttcattcccgtccatgccgagccc

SEQ ID NO: 174384 - DNA, 74 bp, Homo sapiens
tttccagggcagctcctgataagaggacactttgccaccatcaccttgaccttcatcgacaagaacggagagac

SEQ ID NO: 174385 - DNA, 85 bp, Homo sapiens
acagacataaacagaaagtcttacatgacacaatggatctgaatcatctcttgaaaggtggtggacataatgcgagttaacgtgg

SEQ ID NO: 174386 - DNA, 75 bp, Homo sapiens
ggttccagctgcagcacgtggacgctgactcggaagtgcagctcaccatggatgatgatatcgccgcgctcgtcg

SEQ ID NO: 174387 - DNA, 100 bp, Homo sapiens
ggcttttatcacctttcccatggatggctgcattgactggtcagtggatctcaagacatacatggctttggcaggtgaaccagtccgagtgaaatgtgcc

SEQ ID NO: 174388 - DNA, 75 bp, Homo sapiens
atactgaaagagaaaggctatgccactggactcattgggtgtccgcaatgttgccagtgtctgtctgcagattgg

SEQ ID NO: 174389 - DNA, 74 bp, Homo sapiens
catgaagaaactcaatgatcgtgtcatgagagtagaaaattatggcatgccgtttagcagaactgaagatggga

SEQ ID NO: 174390 - DNA, 75 bp, Homo sapiens
tgcaaagtagcaattaactggtctggagggtggcatcatgcaaagaatgtcacggactttctgttgaagggtttg

SEQ ID NO: 174391 - DNA, 100 bp, Homo sapiens
ctgcccacgggggctccgcggcgtcctcggcgctgaaggggttaattcaacagttcaccaccattaccgatggatactatgatgctgaatgtgcggaatc

SEQ ID NO: 174392 - DNA, 75 bp, Homo sapiens
gagtctcccattagaatatcagtatccacagaaggagcaaatacttcttcatggtgcaaatagctatgggcaact

SEQ ID NO: 174393 - DNA, 100 bp, Homo sapiens
atggccgccctgtcctgggcacccagaagacctaccagtgggtgcccttccatggggaaaggacccaggagcgataacagtaaatcaaataagatatttg

SEQ ID NO: 174394 - DNA, 76 bp, Homo sapiens
aaactcattcgaaaagctaaagaggcaccattcgtacccgttggaaccctaaggactctgcaatatgaataattcc

SEQ ID NO: 174395 - DNA, 90 bp, Homo sapiens
gggaggagttcagccgcgctgccgagaagctttacctcgctgaccctatgaagagaagatggcgaattagaagatggtgaaatagacgat

SEQ ID NO: 174396 - DNA, 100 bp, Homo sapiens
gtccagttactctaacaagtctggagctgctcatgtttcccacctggagaatgtgtcagaggaagaaatgaacagactcctgggaatagtattggatgtg

SEQ ID NO: 174397 - DNA, 83 bp, Homo sapiens
aaaagcagaatggaatgggccttagcattgttgcagcaaaggtgctgttggcagcagcggtctgcacaaaagcaggaaaggct

SEQ ID NO: 174398 - DNA, 100 bp, Homo sapiens
gcactgactttcagctatggaatcgattgtaaaccatggctgtgtggatacaagctcagcagctccaaggagaagcccttcatcagatgcaagcgttata

SEQ ID NO: 174399 - DNA, 75 bp, Homo sapiens
tgtaaagccttgggctcccttgcaggattcagaagtgtatttagcatctctagctcgaattacatctttacaaga

SEQ ID NO: 174400 - DNA, 75 bp, Homo sapiens
ggtttgccacaaaatcctctttccaggaagggactatatttgtcaggatacgaatcaggttctcttcaagtgctg

SEQ ID NO: 174401 - DNA, 101 bp, Homo sapiens
tgcctaaatcagccaaacacagggcattaactgaacgtctggatgctcttcttctggaaaaagcagagactgagcaacagtgtctttctctgaaaaaggaa

SEQ ID NO: 174402 - DNA, 75 bp, Homo sapiens
cagagagaaggcattgccatggatcagttgctttcccaaagcaccacaccccactctggccggagcacgccaagc

SEQ ID NO: 174403 - DNA, 98 bp, Homo sapiens
ccaggactccagaaaattcagcaaagaagaagcttttaaggtggcacgtctctgagcttcctggtgttggtgacaggctgcacatctgtgggcagaat

SEQ ID NO: 174404 - DNA, 75 bp, Homo sapiens
caagaccctgccctctaccacctggagctcgaggccatgagcagatataccagcccagtgaacccagctgtcttc

SEQ ID NO: 174405 - DNA, 75 bp, Homo sapiens
tggcaggatgaggcgtgcaggcctgggaaagcagatggtggagctgaatatgccacttaccagactaaatcaacc

SEQ ID NO: 174406 - DNA, 105 bp, Homo sapiens
gaaggaggatggaggctggtgggagggacagatcaacggcaggagaggtttgttccctgacaactttgtaagaggccagatattcgaagcttacaacatggcagc

SEQ ID NO: 174407 - DNA, 75 bp, Homo sapiens
tgccagaacagaacactattcacaaagattgcctgcagtttattggcaacaaggaacgcggctggaacgacccgc

SEQ ID NO: 174408 - DNA, 82 bp, Homo sapiens
gaactggcatgccaagcccctcacgctcagggaggtcgaggggaaggagttcgagacacgactgaaggagaagaagccagga

SEQ ID NO: 174409 - DNA, 100 bp, Homo sapiens
gctgtcgtgaagaagcaggaggctaagaaagtggtgaatcccctgtttgagaaaaggcctaagaattttggcattgaaagctgacttcatgagaccgagg

SEQ ID NO: 174410 - DNA, 87 bp, Homo sapiens
cgcgcagggcctgcagcgggagctggacggcgagcgcgagcggcgcgagaaaacccaacatgagtgaagtttcctgcaagaaacggg

SEQ ID NO: 174411 - DNA, 88 bp, Homo sapiens
aaagagcgtagtaggagatcaactcagtgaaccagccaagatattaataaggcagcggaaagaagaaatatgaatacggctccatcaa

SEQ ID NO: 174412 - DNA, 83 bp, Homo sapiens
ccccatcctagaaccagagaggacaatggagccggtgattccagttttccatcttggctgaagtccctcatgactatttgctg

SEQ ID NO: 174413 - DNA, 100 bp, Homo sapiens
acagacctcaggggaagaagctggacttcagccgtccaagtaacaaatgtggcaattattttggatctatcacctgtcatcataactggcttctgcttgt

SEQ ID NO: 174414 - DNA, 101 bp, Homo sapiens
accgggcccagcacagccagcaccgcacgccctgcaagggagatgtcatccatactgtagggccaatagccaggggccatattaatggttcccacaaggaa

SEQ ID NO: 174415 - DNA, 110 bp, Homo sapiens
tccgtcgcggagccggagggcgggaggaacatgacatcgcggagccgtgctatcaagactaatcaggaccttctcccagaaactccatggacgcacattttctacaatga

SEQ ID NO: 174416 - DNA, 100 bp, Homo sapiens
agtggtgtgctttggacctgtgtacccacccaaggctaaaggcagagccagatctaccttctgagatatcatccttcttcagggagataaggaaaaaaag

SEQ ID NO: 174417 - DNA, 109 bp, Homo sapiens
agagactttttgtacttacaaagtccatgctaacctactatgagggtcgagcagaggtaatcgtgctgtccacacgactcctgaagccacttaacattcctgagctgtt

SEQ ID NO: 174418 - DNA, 152 bp, Homo sapiens
tcttatattgaaatatataataattacatatatgatctattggaagaggtgccgtttgatcccataaaacccaagtatggtctgaatatgcgttgcttggcagctcgggtcaactataagactttgattattatctgcgcactcttcacttt

SEQ ID NO: 174419 - DNA, 100 bp, Homo sapiens
agtcatggcggcagcagccgctctgagggcgcctgctcagatgcttgtttgctactgatgggtgtgagcaagttagatattctataccggagacttctcc

SEQ ID NO: 174420 - DNA, 95 bp, Homo sapiens
ccgagaggccgtgcgggacgcgggcgccaggaccggccgaacgcagaggtggtggtgcccacccgcgtggggcagggctatgtatacgaggccgc

SEQ ID NO: 174421 - DNA, 75 bp, Homo sapiens
gctcgagatgatgaggaattggtccatgataaaatggaccagttgctacagatgctgcaaagtacagaccccagt

SEQ ID NO: 174422 - DNA, 82 bp, Homo sapiens
tgaagatgaggaagtctgggggccgagaccacacaggtctttaagatgctcagcaataaggagtctctggatcagatcattg

SEQ ID NO: 174423 - DNA, 98 bp, Homo sapiens
agaacgtgattgggaacctgctgacgtgcactgtgcccctggctgggggctcgcaggtacagcagggtcccggggagtccaggaggcggcggagtgcg

SEQ ID NO: 174424 - DNA, 100 bp, Homo sapiens
atcaacctggaccttatatcatgtatacaactgtagatgcaaatgggtatctgaaaaatggatcagctcttgaggctagtgcgcctctaggcaagatgtc

SEQ ID NO: 174425 - DNA, 76 bp, Homo sapiens
cacacgtgttcaatacacctcccacctgtcctcaggcatatcaaagtcccttcaaggtcaaggtccttcccacata

SEQ ID NO: 174426 - DNA, 75 bp, Homo sapiens
caactgcccgaagccagttctaaatttttatgaagccaatttccctgatgtgttcagagcaacattgttttgttg

SEQ ID NO: 174427 - DNA, 78 bp, Homo sapiens
aagtctttcaatgatgatgctatgctgatcgagaagtttgtagacacaccgagggtgtcaaattgagaaccaggtaga

SEQ ID NO: 174428 - DNA, 75 bp, Homo sapiens
gtgagcacatctgatatggcagaggaaactgaggatgcctggccgggccagctctcaatgttgcaagaaaaaata

SEQ ID NO: 174429 - DNA, 75 bp, Homo sapiens
ttccatgcagcctgccttaccgccataccagaatttcacaaaaagctgtctttgctgtcattctggaccaagtgc

SEQ ID NO: 174430 - DNA, 75 bp, Homo sapiens
tttgggtcatggcagcagtggtgctgtgcacagcacaagattactctcgtggctttggtggccggtacggggtgg

SEQ ID NO: 174431 - DNA, 50 bp, Homo sapiens
ccgggacacctggaagccgagaaatgacggagtctcactctgttgcccaa

SEQ ID NO: 174432 - DNA, 95 bp, Homo sapiens
gaacgcaagaacagaatgaagaaagtcagggggactgcaaaggccaatgttggtgctggcaaaaaggtgacttaagagattaaaattaatttggt

SEQ ID NO: 174433 - DNA, 100 bp, Homo sapiens
cagcgattgcgtggtcagtgattgcgagggttacacatcattttggaatgactgtatatcatctggattacgtggctgtatgttaattgaattagcattg

SEQ ID NO: 174434 - DNA, 75 bp, Homo sapiens
gccggccgcaccaccgccctctggccgttgcctcaccggggggggccctcagcctcttggccttgaacgggctgt

SEQ ID NO: 174435 - DNA, 80 bp, Homo sapiens
accagggcagaagaagtctaaaaatggaagcgctattggaatcagatgcaaagatggtgttgtctttggggtagaaaaat

SEQ ID NO: 174436 - DNA, 74 bp, Homo sapiens
gagaacccgcccatgaagccagatttctcccagaaacttctgcagcatccagaactgagtaatagtcaacttct

SEQ ID NO: 174437 - DNA, 100 bp, Homo sapiens
acatctgacgacgtgaaggagcagatttacaaactggccaagaagggccttactccttcacagatcgatgatcaagcggtgctgattcacgagagtggaa

SEQ ID NO: 174438 - DNA, 82 bp, Homo sapiens
aagaagagcccagctagcaccttcgccctctccagccaggcagaagctcctcctggggtagagacagatcttattgatgttg

SEQ ID NO: 174439 - DNA, 75 bp, Homo sapiens
ctcatcaaggctacaattgctggtggtgcactattggaaataattatgaaaaatggaagcacggctggaaatagc

SEQ ID NO: 174440 - DNA, 100 bp, Homo sapiens
atacagaatgcctatgaccggcgtcgagaatttcaactgggtccacatatagcctcagttacattagctgcttatgaatgcaattcagttaattttcccg

SEQ ID NO: 174441 - DNA, 100 bp, Homo sapiens
ccgctacgctcgccggggctgcggccgcccgaggaggagccgaggaaggtctgcttcacctacgacctgttcctgaacctggaaggcaacccgcccgtga

SEQ ID NO: 174442 - DNA, 100 bp, Homo sapiens
tgtgacctgcatgtactgggggattcgcagggaggatgtcgggacaccccggaagctgggaaatggagggtgtgaagacagagaatgaccacatcaacct

SEQ ID NO: 174443 - DNA, 75 bp, Homo sapiens
ccaattttgctcaacttattgtgagagggcgaactttctgaccaagtatacaactacccagagggcctaggagaa

SEQ ID NO: 174444 - DNA, 73 bp, Homo sapiens
agaattcggtttgtaggtcgtcagaaagagaacctgctaaggctgcctcagacctgactgcctggttcagcct

SEQ ID NO: 174445 - DNA, 82 bp, Homo sapiens
caaggatgtggggcagatgctgatgggcaaactagggagtcgtcgcatggtggatgtcatggacgtgaacacacagaaaggc

SEQ ID NO: 174446 - DNA, 51 bp, Homo sapiens
ccgagaagactatcgacagattgccaaatggagtctcgctctgtcgcccag

SEQ ID NO: 174447 - DNA, 83 bp, Homo sapiens
aagacttgtaacctggagaagagattacaccaccaccttcactgtcagatccacttaaagagctttttcgacaacaggaagtt

SEQ ID NO: 174448 - DNA, 75 bp, Homo sapiens
ggaggaggaagcggccgccgcggggtccgcggcgcgcccggcccgggatactggtatcgggatgacacaggaaga

SEQ ID NO: 174449 - DNA, 74 bp, Homo sapiens
agagtggaccaccccatgaacctcggacagtcattttgtttactcattcagccctgttgcaggtcccaataaac

SEQ ID NO: 174450 - DNA, 75 bp, Homo sapiens
ggcagcttcccgctggatcacttagaattgtgggagagagactctttgaaagtaaagaaggtcatcagcatggag

SEQ ID NO: 174451 - DNA, 73 bp, Homo sapiens
cctgtgtgatgtgctatctatggatttcccttttgagggtgaatttgtgaatgagtatgtgggtgagcttata

SEQ ID NO: 174452 - DNA, 100 bp, Homo sapiens
cagagacgacgcctgcagcaaggagaccaggaaggggtgagacaaggaagaggtgctggagaatctggtaaaagcaccattgtgaagcagatgaggatcc

SEQ ID NO: 174453 - DNA, 76 bp, Homo sapiens
tttcatgagtgttcctgtggtctctgcacctcctttctgtcttgagagctgatgacaataacatgggcaatggctg

SEQ ID NO: 174454 - DNA, 50 bp, Homo sapiens
cgaaggtgctaccatcgtgagagtaagctggatctaccatgaaagacttg

SEQ ID NO: 174455 - DNA, 75 bp, Homo sapiens
cacagacagaatccctgctaccaatatgtacgaccaagtgctgaagtttggtgcttacattgtggatggcttgag

SEQ ID NO: 174456 - DNA, 82 bp, Homo sapiens
ccttcggaacgctcctctgcattgccattgttctgagggtcaaagaattgactgtagatccaactgctgctggtgatgttcg

SEQ ID NO: 174457 - DNA, 98 bp, Homo sapiens
attagtctggctgagatgcttgaagaccttcatatttcccaagatgccactggtgaagaaggtatgatctcgtgaaatcttgagagaaactgaatgac

SEQ ID NO: 174458 - DNA, 100 bp, Homo sapiens
ctcacaatgggaacatgtacacctcatccctgtacgggtgcctggcctcgcttctgtcccaatcttaaatctgacccaggccttgaaagacaacaagagt

SEQ ID NO: 174459 - DNA, 101 bp, Homo sapiens
aagtttagcaatggaaaagataaagtgttttggttttgatatggattatacccttgctggtgctggagaatctggtaaaagcaccattgtgaagcagatga

SEQ ID NO: 174460 - DNA, 100 bp, Homo sapiens
ctgcctcagcctcccaaatacctgggattacagatactgtggaacactccctagacaataaagatggtcctgtctgccttcaggtgaagccttgcactcc

SEQ ID NO: 174461 - DNA, 100 bp, Homo sapiens
agactggataagaaatcaaaaatctggtgaaattgccggcaagagggagttaaggacattccaggcagaggcaagaaatgcactcggtgatggaaagaga

SEQ ID NO: 174462 - DNA, 104 bp, Homo sapiens
gtgaggcctccctagccatgtggaactgcacggcatatcttcccaaagatcttggccactatggactacgatctttatttttcttggagtggcggcaatcttgg

SEQ ID NO: 174463 - DNA, 98 bp, Homo sapiens
gcagtacaatgcgggcttgtgtcatgagcatggcagaggcacccccagggacattagcaaggtcttaattacagagcacggtgacctgggtaatagca

SEQ ID NO: 174464 - DNA, 90 bp, Homo sapiens
aggtcgctgctgcacccaaactttgcaaggaattcggtccagaggattacggcgaagagagtacaggggctcaggtccaggtggcagggg

SEQ ID NO: 174465 - DNA, 113 bp, Homo sapiens
accccgtactggcaggcatggagccaacaaggagaacctggagctcaacggcagcatcctgagtgttcttcagattattaaggaatcccagcagcagcatggtttacggcatg

SEQ ID NO: 174466 - DNA, 74 bp, Homo sapiens
ctcggaatcgcgggacggacccacctggccgccctgcctcccttccaggtccctgtgcgttttattgcgacctg

SEQ ID NO: 174467 - DNA, 75 bp, Homo sapiens
gaccatcgtcgtgaggatcgtgtgcattacaggagtcctccacttgccactgggaaatggtgttcacactggccc

SEQ ID NO: 174468 - DNA, 100 bp, Homo sapiens
tgctcgtgccccagctcggccccggacggcccggctgctgtgcagagaggaggccgagtcgagcattggctgtgatgactacttaggctccgacaaagtc

SEQ ID NO: 174469 - DNA, 100 bp, Homo sapiens
attgggagagatcgttggttcacagggaagtcgcctggaaaaaccaatagtgaccaaaagatctcagattgctataactgaaggtatatttgaacttcca

SEQ ID NO: 174470 - DNA, 82 bp, Homo sapiens
gcaccggagtattaaatccagctagagaatggcatgtgcaaagatacagaggtaagaatgattgatgttggctgatattgga

SEQ ID NO: 174471 - DNA, 83 bp, Homo sapiens
tcccagagctttcacgaaggcaccgacgtcatcatgctgaccaccaatcagatccgtaagctatgcccggacctccatcagag

SEQ ID NO: 174472 - DNA, 75 bp, Homo sapiens
ggaaaatgttttgccacgtggatgtgaagatttcctctaaaaggtttgatattaaactgctctcagaattttcct

SEQ ID NO: 174473 - DNA, 75 bp, Homo sapiens
caaatgcgattagttgatgtggcctgcaaggaaggaagagggaatggtttaaaatagaagacgccataaaagtgc

SEQ ID NO: 174474 - DNA, 73 bp, Homo sapiens
gaggaccccggtacatctgaaagccgggaaatgaaggtggtcttctgccctgttaaagaagccctggaggtgg

SEQ ID NO: 174475 - DNA, 82 bp, Homo sapiens
tctcatcgctctcggcctccgacacggcacaaatcctgaagagcccgtgggcgtggactgctcatctgtaaagaaagtggag

SEQ ID NO: 174476 - DNA, 75 bp, Homo sapiens
aaggaacttggttccccctccctcagcttccgccccaaaaggcacgcggaataaaagatgctacagaaatcatct

SEQ ID NO: 174477 - DNA, 51 bp, Homo sapiens
gtgactaccctggttacctcatataagcctggctacagataagggaccaaa

SEQ ID NO: 174478 - DNA, 51 bp, Homo sapiens
aatccgggggcaaggccaaaaagaagctgacagcagccatggcgagcggca

SEQ ID NO: 174479 - DNA, 100 bp, Homo sapiens
caggaactgaagctcttagaagaatgtttacccttgcggaagttgcatcacttaatgacattcagccaacttaccgaatcctgaaaccatggtgggatgt

SEQ ID NO: 174480 - DNA, 100 bp, Homo sapiens
atttttccagaaggaacttgtacaaacaggacctgcctaattaccttcaaacctggttgcagccccacccacgtcacggtgtacagcgagtatggcgtgg

SEQ ID NO: 174481 - DNA, 100 bp, Homo sapiens
catcaacaacgacgccgagctctggggcgtcttgcagccctatgagcatctcatctgcggcaagaacgccaatgagctccagagattatattggggttgc

SEQ ID NO: 174482 - DNA, 75 bp, Homo sapiens
cgctttacccgactctttgggccgttatctcaccggagcgtgctttggacaccatgaattttgatgttataaagg

SEQ ID NO: 174483 - DNA, 98 bp, Homo sapiens
tcgcagcccccgcgggcgcagccctttgcgcagccgccgggaccctggcccctgtcgaggtacctgcaccagtcaggggccctgaccatggaggccct

SEQ ID NO: 174484 - DNA, 100 bp, Homo sapiens
cgtgggcagcaacgatcgagtccagggagtgatcagccagctggaagacacctgcaaaactatcgaggtcaatgtgacggtggactacattagaccagcc

SEQ ID NO: 174485 - DNA, 76 bp, Homo sapiens
agacgaggatgatgcggaaattaaccccaagaattaaacaaccaccatgtcgagcaaaaaggcaaagaccaagacc

SEQ ID NO: 174486 - DNA, 100 bp, Homo sapiens
cgaagtggttgagaagcctgtacctgttttatacttgcttttgcttcagcgttctgtggttgtcaacaggtgcagtgctacccctggcgctgggtttggc

SEQ ID NO: 174487 - DNA, 101 bp, Homo sapiens
aggaagtgggggttatggtgggaggagccgatactgagcttcttcctatttgccatgggtggaagttaaacgagctgagcctcgggacagcaagagccaag

SEQ ID NO: 174488 - DNA, 100 bp, Homo sapiens
ccgcgcaccacagcccatccccagaagatcctggtcccctgctttaaccatcgaaaatgaggttgcccccaagtttcctggcagtgtgtgatactgagga

SEQ ID NO: 174489 - DNA, 75 bp, Homo sapiens
agtagaaaaacactatctcttctatgacggagaatccgtttcaggaaagtttattgcagggaactgacaagatca

SEQ ID NO: 174490 - DNA, 100 bp, Homo sapiens
tggccgtggctctcttggcagccttcctgatttctgcagctctgtgtgaagtttgcagaaaaaacttcagcatgtgccaggaacacaacctcaccttgat

SEQ ID NO: 174491 - DNA, 83 bp, Homo sapiens
gcgggcgcggatcgaccggagcagagagctggcgagcaaggatggagaagagttcctgggaaatacatgagaggagaatgaag

SEQ ID NO: 174492 - DNA, 75 bp, Homo sapiens
tgaatggcagcaaggtgggcccggacggcacaccctacgttaccgtgctcaagctattgcagcatctgaagagga

SEQ ID NO: 174493 - DNA, 98 bp, Homo sapiens
tttacatcagcgcccagacttgaatctaagcccatccaccgctaaaaagtgtccatcattccaatattcctcaatagcacgtggtgaggtgtgtatgg

SEQ ID NO: 174494 - DNA, 75 bp, Homo sapiens
caaagctattctgggggcaacagaggtgtattccagagcaaatgaaaaagagccttgctgttggtggttagctaa

SEQ ID NO: 174495 - DNA, 101 bp, Homo sapiens
atgtccccctggatcttcacacagctgcttccattggccagtatgaagtggtgaaggagtgtgtgcagcgatgctgtacccctcaaggatttaaactaacg

SEQ ID NO: 174496 - DNA, 100 bp, Homo sapiens
ggaatatccatgtcggcttgtagagagattgcagatgtgatcttcgtggtggaaagctaaattttaaaaccaccccaatggatgcagacagtgatgttgc

SEQ ID NO: 174497 - DNA, 100 bp, Homo sapiens
cgaaggcccgcggcgccccgtgctgcagcgcaaatctgtccaaggctgcctggggagcattggagaagaatggcacccagctgatgatccgctcctacga

SEQ ID NO: 174498 - DNA, 100 bp, Homo sapiens
cgctgttcgactgcccaacctgcttctccccagacctggctctggactcaccaggcactgaccactttgtcatcattgcccaactgaaggaagaagtggc

SEQ ID NO: 174499 - DNA, 101 bp, Homo sapiens
gagcgagctgagtggttgtgtggtcgcgtctcggaaaccggtagcgcttgcagcatggtaagaatgattgatgttggctgatattggagtgctcattcaca

SEQ ID NO: 174500 - DNA, 100 bp, Homo sapiens
gaaggccgacacgctggccctgaggcaacggctcatcagtttttagccagacgccaattctccaggcgctgcagcatgtccaagcgagctgtgacgaagc

SEQ ID NO: 174501 - DNA, 100 bp, Homo sapiens
ctcgaggctgctaagagactaaatctttaatctcatgaagtacgacagctacagccgcttcttaaagtctgacttgtttttaaaacacaagcgaaccgag

SEQ ID NO: 174502 - DNA, 50 bp, Homo sapiens
cggatagatatcatacataatctgaagggttttgacccaccacatcagag

SEQ ID NO: 174503 - DNA, 50 bp, Homo sapiens
cgggttcatctgcaagtgccctgcgttgtatgaagcatgtcgttaccttg

SEQ ID NO: 174504 - DNA, 51 bp, Homo sapiens
caaaattctgaactcaggacttggcaatctgctttacaagaacttgaagaa

SEQ ID NO: 174505 - DNA, 100 bp, Homo sapiens
ggatggtggactcagagaccaataaaaataaactgcttgaacatcctttgactggttagccagttatgccccgtggtgccctgcttgtcaaaatcttcaa

SEQ ID NO: 174506 - DNA, 115 bp, Homo sapiens
tgctaaactgtgtggggcgcggatgggatccagctgttagtcgggtaggcataggttccatcataatgaatggatccaatatggcaaatacatcaccgagtgtaaaatccaaaga

SEQ ID NO: 174507 - DNA, 80 bp, Homo sapiens
acgtctgtgcggctgcgtggggctcggccgcgcggactgaaggagactgaaggcgatcagtgggtgaccgcggctgcgag

SEQ ID NO: 174508 - DNA, 100 bp, Homo sapiens
gagaagacaagctaaaaatgattcgggaatatcggcaaatggtttgttgataagccggggcccttcgtgggaccctgcggtcactggatcaggccctcag

SEQ ID NO: 174509 - DNA, 100 bp, Homo sapiens
cctgcccttgccagaatttcctgcgctgttccacctcattcaacttcaggttcgagaacttgtcttggacaattgcaaatcaaatgatggaaaaattgag

SEQ ID NO: 174510 - DNA, 100 bp, Homo sapiens
caccgggtggctggtgcagccgaggtcttcgggaattccagcgagggaatccaaatgagactcagaacaatagcacaagctggcctgtcttcaaaagcac

SEQ ID NO: 174511 - DNA, 75 bp, Homo sapiens
attgacatttaattttagggtcctttatatagaagggagagtaggatctatctggttcaatagatgacctcccca

SEQ ID NO: 174512 - DNA, 82 bp, Homo sapiens
agtctcagtgttgccctgttcagtctgaggtttggtgcacctcgatttggaggaagtagggcagggcccttatctggaaaga

SEQ ID NO: 174513 - DNA, 89 bp, Homo sapiens
gggctacccgcactggccggcccgggtgattgcccacagtgagtatcaaaagtccaaaagaatttccatctttctgagcatgcaagatg

SEQ ID NO: 174514 - DNA, 75 bp, Homo sapiens
agagcgcgaatatcgtcatcgttagaaggatgatgaggatgataatgcaggcacggagatgaagatactgcgggg

SEQ ID NO: 174515 - DNA, 82 bp, Homo sapiens
ggtaactgacaaggaggccaggaagaaggttctcaaacaaggcatccgtgtcattctggaccttactcccaactaccggggt

SEQ ID NO: 174516 - DNA, 82 bp, Homo sapiens
ggaggcgacgctaagttgctgatcgtggcgccctgctggtttaccgtgtcttcaggaacgaagctaaacgcaccaccaaggt

SEQ ID NO: 174517 - DNA, 100 bp, Homo sapiens
gttgcagatctagtgaatgctcagaaagacagtatgcaagatgagtcaagtcagacttcattacagaaagtttgcatttatgtcggatcctcagtgaaaa

SEQ ID NO: 174518 - DNA, 82 bp, Homo sapiens
cacccaccgccgccgcctcccagtcctcgcagtccgcctgagagagtagagaagaccccctcccagaaccttcctgtaaggt

SEQ ID NO: 174519 - DNA, 101 bp, Homo sapiens
gattcaccaaataagctatatactttggttacctatgtacctgttaccactttcaaaaatgtacttgaaggatataatggaacaatatttgcatatggaca

SEQ ID NO: 174520 - DNA, 82 bp, Homo sapiens
gtcgcggggcccgcgcccggagctggcgccaggaagtgggaaaactcttgcctttgccatcccaatgattcatgcggtgttg

SEQ ID NO: 174521 - DNA, 100 bp, Homo sapiens
atttctccgccaattcaccttgactctgagctagaaagaccctctgttaaaggatgttggttcctgcaaacaagaactgaccctatcacctctgcctcac

SEQ ID NO: 174522 - DNA, 98 bp, Homo sapiens
tcctctcccggccctctcgcgctgcactgtctctccgacgcaagactgtcccggcccggggatcatagacggtatttctatgtaaacgaacagtcggg

SEQ ID NO: 174523 - DNA, 82 bp, Homo sapiens
ggcttcgcgctcttcttcttcttccagggactcagcacctggcagagatcctgagtcatgtgttccagtggcttgggttcac

SEQ ID NO: 174524 - DNA, 80 bp, Homo sapiens
aagactcgaaggcagcacaggacctggaaaaattacatgctgcagttcatggagctcgtttcaaagggcaagatctaaaa

SEQ ID NO: 174525 - DNA, 88 bp, Homo sapiens
aatcttctggagtactcttattttgaaaagtttggcaatgaggagcagcagctggcgtgggccaagcgggagagcgagaaggcggaac

SEQ ID NO: 174526 - DNA, 90 bp, Homo sapiens
ggattccaagtaactcttatttgcagcaaagtctctcgcgacaccctgtacgaggcggtgcgggaagtcctgcacgggaaccagcgcaag

SEQ ID NO: 174527 - DNA, 75 bp, Homo sapiens
gagcagcttcgtactagtcgagggctattcttatgttaagctgctctccagcctacgaggacaagcagaaactca

SEQ ID NO: 174528 - DNA, 100 bp, Homo sapiens
gcacagagggcgggggccttggcgaatggctttcttgctggccacttgcggagcttacagcttcgccatgggctgctggcccaagaatggacttctagac

SEQ ID NO: 174529 - DNA, 51 bp, Homo sapiens
gttagcgtgagtgatcactctcaatcccggcattagtgaccagaaggatcc

SEQ ID NO: 174530 - DNA, 90 bp, Homo sapiens
attccagaagataatgctgacatggccagacttgatttcaatcttataaggctccgagctctgtccagtggtgggagtattacatcccct

SEQ ID NO: 174531 - DNA, 74 bp, Homo sapiens
aatttggacctcaagtccacctcctgactccgcagagaaccagtactacgagatgtcctacggcttgaacatcg

SEQ ID NO: 174532 - DNA, 83 bp, Homo sapiens
gagggatccttcacccgtgtctggacggggaggtttactgcatcgacgcgcggttctacgggaacgtcagccggttcatcaac

SEQ ID NO: 174533 - DNA, 132 bp, Homo sapiens
ccggactggagggagacaaagcagcgcccgtctgcttcgggcctctggaatttagcgctcgcccagctagccgcagtttggtgccctggttgtcagatgttggaaagcagtaggacggaacatactcttcgt

SEQ ID NO: 174534 - DNA, 88 bp, Homo sapiens
taggccagcggctcggcggtgagatcgtcagcgctgactccatgcagggactttgaacatgtcggggatcgccctcagcagactcgcc

SEQ ID NO: 174535 - DNA, 100 bp, Homo sapiens
caggcctcaggccccctcaccatcctagaggtcaagatcagctctggctaggaggttctgggggaagagaagctgaaggagatactgaaggagcgggaac

SEQ ID NO: 174536 - DNA, 96 bp, Homo sapiens
gatgaatacttggatagctggaatgaagaagataaatgcttgctgcataaagtttgtgatacaggcatacttttttgatgcaccagagatggacca

SEQ ID NO: 174537 - DNA, 88 bp, Homo sapiens
cccggaatcagttccttgatgagctcatggaggaacgggctacctgtgcaggctgatggccaccgtgtccaccagtccccagatggca

SEQ ID NO: 174538 - DNA, 100 bp, Homo sapiens
gatgggcaagcaaacaggagcagtccgaccccaagagaggagaaggcagagcccccccaggctatgaatgccctgatgcggttgaaccagctgaagccag

SEQ ID NO: 174539 - DNA, 88 bp, Homo sapiens
ttcaagaatgatcaggatacttgggactacacaaaccccaatctcagtggacaaggcatatccccccacgtccatgtccaggagcccc

SEQ ID NO: 174540 - DNA, 74 bp, Homo sapiens
gtctatggtgttttctccaacccctggtgatagagaaggacctgccccactatttctagctccacaagtgtgtg

SEQ ID NO: 174541 - DNA, 100 bp, Homo sapiens
gatgcagtgtgaggaattgatagcgtatctgcgggacaaaactttcggtttgaagaataagaaaggagcaaagcaacagaagtttatcaaggctgtcaca

SEQ ID NO: 174542 - DNA, 98 bp, Homo sapiens
gaaacaatggcatttacagaaagagtcaacagcagtggcaacaggtttattcttcagtccaaggaagcaattcacagtcagctgttagagaagcagaa

SEQ ID NO: 174543 - DNA, 90 bp, Homo sapiens
ctagcccagtggaccttctgaagaaataagcgggttttgaaaacaaaaaaaagaaggagtggaagagggggccaggatccaggcctccat

SEQ ID NO: 174544 - DNA, 100 bp, Homo sapiens
ctcacctaccacaaacagccaggtaggccgttgctccagggagaactgcaaatatcttcatccacccccacatttaaaaacgcagttggagataaatgga

SEQ ID NO: 174545 - DNA, 83 bp, Homo sapiens
ctccttcggcagtccacccaccgccgccgcctcccagaccatgtcgcctgaagaatggacgtatctagtggttcttcttatct

SEQ ID NO: 174546 - DNA, 100 bp, Homo sapiens
agcggcctcacagtcatggatctggaagctgagggcacgtgtttgcggttcagccctttgatgaccgcagcaggctccagcccccttttggacatcgttg

SEQ ID NO: 174547 - DNA, 75 bp, Homo sapiens
tttgctacatgacaatgagctgtcagtgataacaatccatattcctcatttggagcaactctggtgagggatgat

SEQ ID NO: 174548 - DNA, 100 bp, Homo sapiens
gctccgggcgcggggaagtcatgctcgcttcacggaggcaatagctagccggcatgaaagaattactgatgtccttgatcaaaaaaattatgtggaagaa

SEQ ID NO: 174549 - DNA, 97 bp, Homo sapiens
gctgatcaccaagccgcagaacctgaatgacgcctacggaccccccagcaacttcctcgagatcgattgagaaagatcagtctaaagaaaaggagaa

SEQ ID NO: 174550 - DNA, 73 bp, Homo sapiens
cgcctgagcgcaactagcggcgggtcgtgggcacctccaggacttgaaaatactggaaatctgtccggatcca

SEQ ID NO: 174551 - DNA, 75 bp, Homo sapiens
ggtattcttaagtacaaaccttcaggaaatgccacagatatggttgaaaaataccggccacagaccctgaatgat

SEQ ID NO: 174552 - DNA, 92 bp, Homo sapiens
ggcggatggccccaggtgtaagcgcagaaagcaggcgaacccgcggcgcaataacgatggtcagtaggacagaaggtaacattgatgactcg

SEQ ID NO: 174553 - DNA, 90 bp, Homo sapiens
gtgggcaaagcctggaacaaaccttgtgaaccatgcccaactccaggaacaggaacaaatgctaagcatggactgcgctgcaaagcctgt

SEQ ID NO: 174554 - DNA, 100 bp, Homo sapiens
cagcaaggccaagaggcgggcactgatgctgcactcagaccccagcatcctggtatggcatgcagctgtaccagaattatatgcatccatatcaaggtag

SEQ ID NO: 174555 - DNA, 75 bp, Homo sapiens
cggagctggagaagaggaagctggagaacgaggatgccacaccacatgaagcccttgccatattacagctatgac

SEQ ID NO: 174556 - DNA, 75 bp, Homo sapiens
tggcattgacctctcagatcccaaacaactggcagaatttgctaggaagttctccagcagctgattgtaatgaat

SEQ ID NO: 174557 - DNA, 82 bp, Homo sapiens
atggctctcagaggcaaggatgcgactgcaaaattcaaaatggggctcaaggtattcgtttcatctacaccagagaaggcag

SEQ ID NO: 174558 - DNA, 80 bp, Homo sapiens
cgcggacatggtcatgagctttgtgaacctggaatcctaatgtacctggctagctggtggtgagtaggggctttggggcc

SEQ ID NO: 174559 - DNA, 100 bp, Homo sapiens
atcaagctctatgatttctacctcttcaaatgcaaatgatggctcagacattcattctgctgtgctctccacaattagaaaactagaggatggatatttt

SEQ ID NO: 174560 - DNA, 75 bp, Homo sapiens
agttgagcaccggaaagaacgtatatgactgatgggatgttacttcgtgaagctatgaatgatcccctcctggag

SEQ ID NO: 174561 - DNA, 100 bp, Homo sapiens
ctggaattgagcaagggagtgatgccggttatctctgtgaatctcaggagggaacctgtatgacaaaatccttcgtcagaaggacaagttgtttgaggaa

SEQ ID NO: 174562 - DNA, 100 bp, Homo sapiens
gattcaggctccggacccataccagagaattatgatcaacttcaaccctcacttcgatttggaggacagagactgcaaggaaagggtgccacactgggaa

SEQ ID NO: 174563 - DNA, 145 bp, Homo sapiens
aaacgcgctggctgactggggtcggcgtttagttcagcgcagcgactcggggacctggagctgacgcctagtattccgttatcaagtgttggcttgctagaaaaagaatgcctcatgaagtcactcactcaatggaagaaattaa

SEQ ID NO: 174564 - DNA, 78 bp, Homo sapiens
acttcatcacctctttgtacatcttctgcaattactcggctgctgcatctgaagccccccaggatgtgacctacgccc

SEQ ID NO: 174565 - DNA, 75 bp, Homo sapiens
ccgggccctcctgaagaggcggcgctcagacagaggagaaggcagagcccccccaggctatgaatgccctgatgc

SEQ ID NO: 174566 - DNA, 100 bp, Homo sapiens
cggaggtggcagccatctccttctcgaaaaagcttgtggtgaaggggggcaaaaaaaagaagcaagttctgaagttcactcttgattgcacccaccctgt

SEQ ID NO: 174567 - DNA, 100 bp, Homo sapiens
gttggaccttccggagcttctcagaagacagagggttttcttttgagcctcaagtactacagccttccagcagccttcccagacccacagatcacaccca

SEQ ID NO: 174568 - DNA, 100 bp, Homo sapiens
cgcggtcatgggcggctcagcctccagccagctggacgagggcaagtgcgcttacatccgagaatccttgagcttgatttgattgtcagagatgaagacg

SEQ ID NO: 174569 - DNA, 100 bp, Homo sapiens
actaagcaaaccataagcctcttcaaggagggaaaagaaagaatgtatgaggagaattctcagcctaggtggtatggtcaggaaaaagactacaatgtac

SEQ ID NO: 174570 - DNA, 115 bp, Homo sapiens
agctctgcgaggcagcggctggagagggaaccatggggactgtgcacgcccggtctctcatcacttttgtgaacaagcacctgaacaagctgaatttggaggtgacggaactgga

SEQ ID NO: 174571 - DNA, 85 bp, Homo sapiens
ttgatgaacagtaccaggaagaggcagaagaggagataatgagtgtgtatatggcaactaccctgaaatacctttggaagaaatg

SEQ ID NO: 174572 - DNA, 73 bp, Homo sapiens
gacctcggtcgagcatgttcaccagggcccagatactgggtcgtcaggatggagttttgcaagactgggtcat

SEQ ID NO: 174573 - DNA, 104 bp, Homo sapiens
agaaataccagtccccagtgagggtgtacaaatacccctttgaattaattatggctgtgagccctattcccagaggcaggtggtgctgaccctgtaacccaaag

SEQ ID NO: 174574 - DNA, 75 bp, Homo sapiens
cagacgctgtgctcgctggcaccccgaacgggttgcttcccccgctgcgaggaagcaatgaggctccccaagaac

SEQ ID NO: 174575 - DNA, 100 bp, Homo sapiens
attacatgggccagcactgcttcatccgggaagtgcttggggatggagtgcctccaaaggttgctgaggtacaggacatctgcttcagccatgactgtcg

SEQ ID NO: 174576 - DNA, 83 bp, Homo sapiens
ctgagtggtttttcggatcatgtctggtggctccgcggattataacaggtgtgttccagagaacaagccttcagacatttgct

SEQ ID NO: 174577 - DNA, 100 bp, Homo sapiens
gttgctggtctctggctccctcctcccagggccaggcgccgctcagaacgattcccaacctgctgagcatccgcacacccactcaggagttggggcccag

SEQ ID NO: 174578 - DNA, 100 bp, Homo sapiens
acaagtcctgcgcttggggatcctctgtacgcccgttcactggtaaagagaaatgtgtatgaccttacaagtatccccgttcgccaccaattatgggagg

SEQ ID NO: 174579 - DNA, 127 bp, Homo sapiens
cgggtccccaaccgacgatggagggagacgtgctggacacactggaggcgctgggatcgccaaactgaggcagcaactacaacgcagtaaacagagtagtcgtcacagtaaggagaaagatcgccag

SEQ ID NO: 174580 - DNA, 72 bp, Homo sapiens
gggagtgtagagactcggaggccgagaacaccttccaccatgaccacctcagcaagttcccacttaaataaa

SEQ ID NO: 174581 - DNA, 76 bp, Homo sapiens
ttgcctcaggccagtcgcctccaggccaagagggatccttcacccgtgtctggcacagttggcgggcagctcccag

SEQ ID NO: 174582 - DNA, 78 bp, Homo sapiens
aggaacatgtggctgctcccagctctactccttctctgcctctcagatgccatggacaatattaccaggcagaaccaa

SEQ ID NO: 174583 - DNA, 50 bp, Homo sapiens
cctcccgagtggctgggattacaggcattgaacctggccacatcccaggt

SEQ ID NO: 174584 - DNA, 100 bp, Homo sapiens
gtgtcccgagactgcagaggcgaagtgcgcggcgcccaggcctcccagcagcagtcccgagcagaggaaatctgaaatagagtactatgctatgttggct

SEQ ID NO: 174585 - DNA, 83 bp, Homo sapiens
ccgagtcccagaggaagatcctgatgacgctgacagtcaaggatgcttaaatggcagaggccaagcccagactccagacggac

SEQ ID NO: 174586 - DNA, 75 bp, Homo sapiens
gagcgtgaccgagagcgcgaatatcgtcatcgttagaaggcggttcaggaccatcatcctccatagccatagcgg

SEQ ID NO: 174587 - DNA, 76 bp, Homo sapiens
atctggtgtaccaggcgaagctggccgagcaggctgagcgatacgacgggcaagttaaagtcttcagagccctgta

SEQ ID NO: 174588 - DNA, 75 bp, Homo sapiens
agctggtggaagctatcaggaccaattacaatgacagatacgatgagatctaaattgaaccaagtgtttttacat

SEQ ID NO: 174589 - DNA, 80 bp, Homo sapiens
cgaaaatctctgcccctggaggagaaatagaaggatccaaggattctgtagctacaatgttgtcaagactttttcgaatg

SEQ ID NO: 174590 - DNA, 73 bp, Homo sapiens
cggtgccggagagccacgcatgcgcactgggacgtccagatcggtgacatcgtcacagtgggcgagtgccggc

SEQ ID NO: 174591 - DNA, 100 bp, Homo sapiens
cagcattggacacagccatcaccagcaggctctccccaacaccacgttgggggaagaaaggcagagccgtggggagctggaggatgaacctgccacagtg

SEQ ID NO: 174592 - DNA, 82 bp, Homo sapiens
agtgaagtggtgagcctttttgtcactggtgtggtggacacaggcctattcatcaacatggctgagagagtctactttggga

SEQ ID NO: 174593 - DNA, 83 bp, Homo sapiens
caggccaagcgcagcctccaccagcaattctgtggtgttcttggtcacacatttatggagtttctgaagggcagtggagatta

SEQ ID NO: 174594 - DNA, 51 bp, Homo sapiens
ggccgagcaggaggcgccatcatgggtgtccgcaatgttgccagtgtctgt

SEQ ID NO: 174595 - DNA, 76 bp, Homo sapiens
cttcaggatgacaaaaaccaaagtctcttctgctgggaaatcccagtacagatcagatggagtttcaccatgttgg

SEQ ID NO: 174596 - DNA, 106 bp, Homo sapiens
ttacctcacctctaattagggacgaattggagaagaaggatggagtgcagttcccaaagataaggacagacagtgctttaaactacgccaaggaattgataagaag

SEQ ID NO: 174597 - DNA, 82 bp, Homo sapiens
cggcagaagccgcccatcatccacagggacctcaaggtcagcccaaggctgccccctcggtcactctgttcccgccctcctc

SEQ ID NO: 174598 - DNA, 100 bp, Homo sapiens
ggcggcttcggctcggtctactcaggcatccgcgtctccgacaacttgccgctcaccatggatgatgatatcgccgcgctcgtcgtcgacaacggctccg

SEQ ID NO: 174599 - DNA, 100 bp, Homo sapiens
ctcatggtttttctttgatgtactgatcaaatctatggctcagcatttgatagagaactccaaagttaaggtccaagcatctcattttgaaggcctaatc

SEQ ID NO: 174600 - DNA, 90 bp, Homo sapiens
gtcgccatcttggatccgcgggacaagaaaattcatgcgaaatgggcaagttcatgaaacctgggaaggtggtgcttgtcctggctggac

SEQ ID NO: 174601 - DNA, 100 bp, Homo sapiens
tatggaggacttgcttttgttgaactggtgccagtcacgaattgcccgaacattacctgctgatcagaagccagaatgtcggccatactgggaaaaggat

SEQ ID NO: 174602 - DNA, 50 bp, Homo sapiens
ctgactttcagctatggaatcgagatcatgatgcagccgtccttttggat

SEQ ID NO: 174603 - DNA, 80 bp, Homo sapiens
aacgtcagcaagaagaagaagcagctgctcagatgaaagaggtgagagacttcagaggctgccctttcttttcatctgct

SEQ ID NO: 174604 - DNA, 100 bp, Homo sapiens
gcatcccggacggtacttctgccactgctgctccgtggagatcgtcccgcgcctgccgcgggaagggtcaagagggaaaaatataatcctgaaagggcac

SEQ ID NO: 174605 - DNA, 75 bp, Homo sapiens
ttcactgcagagctcacttggccaatcatgatgaactaatttccaagctttaccaacagggacgcttatgtcaac

SEQ ID NO: 174606 - DNA, 75 bp, Homo sapiens
aaacaatggcatttacagaaagagtcaacagcagtggcaacaggcactgcctccttacctgtgaggaatgcaaaa

SEQ ID NO: 174607 - DNA, 75 bp, Homo sapiens
gggagctgtgcagctccttatcatggttcagcttgttggtttagatgaggagagttcagagtttatttgcagaaa

SEQ ID NO: 174608 - DNA, 100 bp, Homo sapiens
cccgctgtctggccctgagtagggtgtgacctccgcagccgcagaggaggagcgcagcccggcctcgttgatgcggatgaaattaaaaggctaggaaaga

SEQ ID NO: 174609 - DNA, 128 bp, Homo sapiens
agttggagcagggagaggagctgtggataacgggaggtgaatttccatgtcaacatagtcctgctgagatgaatcactttcacagtaaccggatctatgattacaacagtgtcatccgcctgtacctg

SEQ ID NO: 174610 - DNA, 98 bp, Homo sapiens
gccacccgcgcaccgggcaggcgcggagaccggcgtgggacagccacctggagcgcagctgccaggtgatgcaactgtgacaatagctcacagataca

SEQ ID NO: 174611 - DNA, 100 bp, Homo sapiens
ctggaaacacagcctgtcagagctcatcgatatcagcatcgcacagaaaacggccatctggaggctgtatggccgcagacaggtgcagttcaggagcaga

SEQ ID NO: 174612 - DNA, 75 bp, Homo sapiens
ttttgcagcctgcaccggccaacgcctggagcattggtaagcgtcacactgccaaagtgagagctgctggagaac

SEQ ID NO: 174613 - DNA, 96 bp, Homo sapiens
ttcaaatgactatggttatgggggacaaaaaagacctttagaagatggagacagcatgagtatctatgacgatattgatgctgacgtgctgcaaaa

SEQ ID NO: 174614 - DNA, 100 bp, Homo sapiens
ccagattacgtttcacaagaaatggcagataaaacgtcactgtgcagagccttttacagaatattggacttgcattgattatactggccagcagttattt

SEQ ID NO: 174615 - DNA, 75 bp, Homo sapiens
ctcaagctcccttgccacctgggattccatatggctctcatatcattccattccatctctgccaagatttggata

SEQ ID NO: 174616 - DNA, 100 bp, Homo sapiens
tcaaagaaaagtttccacgagctacagctataaaagtcactgacatttcaggttgggggccgtcccgctcctaaggcaggaagatggtggccgcaaagaa

SEQ ID NO: 174617 - DNA, 114 bp, Homo sapiens
ggcgagtttccgatttaaagctgagctgcgaggaaaatggcggcgggaggtcaaaatgcagatcttcgtgaaaacccttaccggcaagaccatcacccttgaggtggagcccag

SEQ ID NO: 174618 - DNA, 100 bp, Homo sapiens
aactatctccagatggtggcaaaatacccaaaggatccattctggaacagaatgaagaagccactgcaccttttggattgtatacatgtattattgataa

SEQ ID NO: 174619 - DNA, 111 bp, Homo sapiens
aaccatctgggagccttcctgatccgggagagtgagagctccccaggggagttctctgtgtctgtgaaacccaacatgagtgaagtttcctgcaagaaacgggacgactat

SEQ ID NO: 174620 - DNA, 107 bp, Homo sapiens
agacgatctgcacttcgcattttggcattgacatttaattttagggtcctttatatagaagggagagtagggtaagcaggaagagaacgacgtggtggagaagctga

SEQ ID NO: 174621 - DNA, 75 bp, Homo sapiens
ataaaataaccgtccccgccagtcagaagttgagtttaatagaaaatggtcagcttgaaattgtgacaggtggct

SEQ ID NO: 174622 - DNA, 74 bp, Homo sapiens
ggcctttccctccagctctgtctatcctaccaagatatttccatggaaatgtcagagcacccagagggacttat

SEQ ID NO: 174623 - DNA, 100 bp, Homo sapiens
ctgtgcagtggcacctgcgcgaagctggccaaagcctgcccagacggctcacctgtgcgggatggaacaaaagccaccacaagggcccgggccaccagga

SEQ ID NO: 174624 - DNA, 82 bp, Homo sapiens
ttggcgaaggagtctgtttttcaacccaggaagttcaggcatctcaagatgaaaattttggtaatactacaccaagaaacca

SEQ ID NO: 174625 - DNA, 98 bp, Homo sapiens
ttggattggcagtgactgctctcaacgtatctcaacagcaaccgagtcacatcaatggaacctgggtattttgacaatttggccaacacactccttgt

SEQ ID NO: 174626 - DNA, 96 bp, Homo sapiens
tgaaccacagcatgagctccgggtccggatccctgcgaaccaatcagaaacgctccctctacgtcaggaagaggagttgtacgcatgtcagagagg

SEQ ID NO: 174627 - DNA, 83 bp, Homo sapiens
ggaggtcctgccgtccatgcggaagatcgtcgccacctggatgctggaggttaatttggagtggcccctggagtcagtttcct

SEQ ID NO: 174628 - DNA, 75 bp, Homo sapiens
acattcaggagaaaattcaagcattgcaaacggcatgccctgacttacagtgacctgaccaacggtgcagatggg

SEQ ID NO: 174629 - DNA, 90 bp, Homo sapiens
cgaaaagttcctccaggtttgccatcttcatccaagtggtaagaagttcagaagcaagcctcagttggcaaggtacctgggaaatactgt

SEQ ID NO: 174630 - DNA, 83 bp, Homo sapiens
ccacagctaagtttcccaggactccagaaaattcagcaaagaagaagcttttaagtattcaataggtgccggggacattgctt

SEQ ID NO: 174631 - DNA, 102 bp, Homo sapiens
atattatgtgtactttatcacaatgaaaaaagctgctgcgtgggccaagttacttgtgcagctgtggggccatccatccagacattgcccacatggagcggc

SEQ ID NO: 174632 - DNA, 88 bp, Homo sapiens
gcaaaaacccatccatcaaaaatactttacaaataataccacttctggttttgctagtggaagactcagaaaaatatgaaatattcag

SEQ ID NO: 174633 - DNA, 75 bp, Homo sapiens
gaacgagtaaatctgtctgcagcccagacactgagagccgctttcatcaagaataagacctggaagtttgttgaa

SEQ ID NO: 174634 - DNA, 75 bp, Homo sapiens
ggatctcaggtcctcgggggcggcggccacgccaaggacgggttttaatataactgcaggagttgatgaagaaac

SEQ ID NO: 174635 - DNA, 101 bp, Homo sapiens
cttaactgaggcacccaaaatggaattacatgaatgacagtcttcgaaccaatgtgtttgttcgatttcaaccagagactatagcatgtgcttgcatctac

SEQ ID NO: 174636 - DNA, 100 bp, Homo sapiens
cggtggcgtcgttgtcgccccctcctcgtcgggaagaatcgtttggtctcctgccgtgcccgggttcatagtggcgtcatgcacgcagactcctgcaagt

SEQ ID NO: 174637 - DNA, 100 bp, Homo sapiens
aagaaatccgaggaccggcgacgcctagaacaggtcatcatcagatttgaaatatttaaagtggatacaaaactatttcagcaatgcagacaattaagtg

SEQ ID NO: 174638 - DNA, 80 bp, Homo sapiens
taatgacaatctcctcagggaaggggcagcacagagagtggaattcgtgacctgataccaggttctgtcattgatgccac

SEQ ID NO: 174639 - DNA, 100 bp, Homo sapiens
catgtcagattttttttggaatcactgcctgcctttctcaggtcaatgagtggtcattgaagataagaaaggaaatgagagttgttgacaggcaaataag

SEQ ID NO: 174640 - DNA, 100 bp, Homo sapiens
gcgatggtgcgacctcagactgatccctctacttcattcgcgcttctctcagtatgtgcccggcacagatttgagtcgaaatctccaaattggacatcca

SEQ ID NO: 174641 - DNA, 75 bp, Homo sapiens
gcacccagaagatgagaccgcaattcgagaatcaaagggccgggagcgatgacaaatttacatgtattggagacc

SEQ ID NO: 174642 - DNA, 82 bp, Homo sapiens
gctccacgcagttcaacaagggcccctcgtacgggctgtcggccgaggtcaagaaccgggtcacctcatcatctcaaggagg

SEQ ID NO: 174643 - DNA, 75 bp, Homo sapiens
aaaaactgaagacacaggagtttgctcaaagaatgctgaaatagatctccaggttcagcagactgtacaggatct

SEQ ID NO: 174644 - DNA, 82 bp, Homo sapiens
tggagccggagctgggcgcggattcgccgaggcaccgaggcactcagaggagggcgaactttctgaccaagtatacaactac

SEQ ID NO: 174645 - DNA, 50 bp, Homo sapiens
caagctcgtagcctgccactccgtgcaacaccgaaaagctttggaggatt

SEQ ID NO: 174646 - DNA, 75 bp, Homo sapiens
ccaacaaccccggggtgcgagaggtggtgtgcatgacactcctggaaaacagatgactcttctacaaaagtggac

SEQ ID NO: 174647 - DNA, 100 bp, Homo sapiens
gtgaagatctgcaatatctgtcacagcctcctcatccagggagccagtgggctaggcccatgctttggttcaaagcgtttggagaacatcttcttgctcc

SEQ ID NO: 174648 - DNA, 80 bp, Homo sapiens
tatccgcagcgagatggagcagctcaaggaggtgaaagaacttgtcctggacaacagtcggtcgaatgaaggcaaactcg

SEQ ID NO: 174649 - DNA, 80 bp, Homo sapiens
atggcgtggagatatggcgcaactgcggcgcgtttaactatagatcaacacatcatcttgcatctcatgggttctatgaa

SEQ ID NO: 174650 - DNA, 82 bp, Homo sapiens
tcatgtacttcgcctttaccaggatttttagactctgaggagcagttggagctaatccacattatggaaatggaaaccaccg

SEQ ID NO: 174651 - DNA, 100 bp, Homo sapiens
aatacatgatttaaacaagagatttccacagaagctgcatatctatgtgagactgaattttcctcttagacttcagctaaaactgtgtattgcatcaggc

SEQ ID NO: 174652 - DNA, 90 bp, Homo sapiens
caggagtgaattcacagtctaccatgaattggaagaggtgtgttgcagtcactcattgaaaaacattttcctgctccagacaggaaaaaa

SEQ ID NO: 174653 - DNA, 100 bp, Homo sapiens
agctgaaatggcagacgatctcggagacgagtggtgggagaaccagccgactggagcaggcagcagcccagggtttttaatgaccacaacaagcaagcat

SEQ ID NO: 174654 - DNA, 90 bp, Homo sapiens
ttatggcggcggtggatatccgaggtgcatgaatacctcagaagtaaactctgttcactgtatgaaaatgactgcatatttgacaaattt

SEQ ID NO: 174655 - DNA, 74 bp, Homo sapiens
cagagattcaagatgtatgttcagcagttggacttaacgtatttcttgaggcctccaagcctttgggagtagct

SEQ ID NO: 174656 - DNA, 83 bp, Homo sapiens
aaactcaagcagcgagtcatccagacaatgcagatcttcgtgaagactctgactggtaagaccatcaccctcgaggttgagcc

SEQ ID NO: 174657 - DNA, 73 bp, Homo sapiens
cgtgcccgagaagctaaacaaccagctcctgagcctcccaaaccttacagggtttgaacatcctcatccctgt

SEQ ID NO: 174658 - DNA, 76 bp, Homo sapiens
gcctcgctcttctctgctctggccacggtgctgtgtgaggccgggggcataatcaccagcaacacccgggacaata

SEQ ID NO: 174659 - DNA, 97 bp, Homo sapiens
tacactcaggcaccctggtgcccagccgggaactccccatcgcgttttgccagcgataatacgcctcaggtcttgagagctgatgacaataacatgg

SEQ ID NO: 174660 - DNA, 100 bp, Homo sapiens
caccaaaccaatttctcctgcaaaccagggtatcagaggttacgaaggtgagaatctgatgaaaattctaaaagacattgaaaacagcacagaaatcatg

SEQ ID NO: 174661 - DNA, 98 bp, Homo sapiens
ctcttttgtctgcccctattgtaagtgcagatggaacacaacaggtgggatgtgtgtgggctgaaattccgagctgcggttgtgcatgagaatacacc

SEQ ID NO: 174662 - DNA, 100 bp, Homo sapiens
gccaaaggccagtgactaccaacgtttggaccagaaggttactgtgcagtatatgcaggatcgaggtgctgtgcttcccatcagagtccacacaattgtt

SEQ ID NO: 174663 - DNA, 90 bp, Homo sapiens
aaggaaaccaaggggcagacccaaaaaactggatctatcttgggatcccatggctttctttactgggctctggggccccttcacctgtgt

SEQ ID NO: 174664 - DNA, 100 bp, Homo sapiens
ggtgattccctgcggtgtgcaagtccgactggaacagcctggaattgtctcgccatttaaacgagtattcctaaaaggtgaaaagagtagagataagaaa

SEQ ID NO: 174665 - DNA, 99 bp, Homo sapiens
acaaccccgccacggtcttcttctctgtcttcatggccctctgggcgtggggtagagcagcggctgccatgctcttctgtggcttcatcatcctggtga

SEQ ID NO: 174666 - DNA, 100 bp, Homo sapiens
gcaggctctggggagtcgccatgatgatgaaacatgcttgggataactataggacatatgggtggggacataatgaactcagacctattgcaaggaaagg

SEQ ID NO: 174667 - DNA, 100 bp, Homo sapiens
tgggtctccaggcccgcgaccgtccgccagtcgtcccgaggtctggtgaagctgggggttcactgcgtcacctgccagaaggtggccatcaagatcgtca

SEQ ID NO: 174668 - DNA, 82 bp, Homo sapiens
gatctgcgcctggatgcagctcttggcagtgctgctcacggccgtgaactgctacagcgtgaaggccgccacccgggtccag

SEQ ID NO: 174669 - DNA, 98 bp, Homo sapiens
tagaactacccagagcaagaccacagctggtgaacagtccagacctgattcctcagacctctgccctatcggaagggaagcagaaaatgatcaggtct

SEQ ID NO: 174670 - DNA, 73 bp, Homo sapiens
aaattggcgtttgtcatcagaatcagagggccaacagagcacttatggcaaggcatctcgagggggtggcaat

SEQ ID NO: 174671 - DNA, 90 bp, Homo sapiens
cccagacatgtcagtgaccaaggtggtcgtccaccaggagaccgagattgctgatgagtgagctcaggcataatcaccagcaacacccgg

SEQ ID NO: 174672 - DNA, 75 bp, Homo sapiens
aaactgaggcctggaatttgattaactcattcaaggttacccagttgggtgttgcaattaataacacctttctcc

SEQ ID NO: 174673 - DNA, 75 bp, Homo sapiens
gagaactcctgactgattagcattcacaccaggagaagatggtataaactggtccatcagtgacaaagacattga

SEQ ID NO: 174674 - DNA, 100 bp, Homo sapiens
ctttgcgcaacgccaacctcaggcgagatgaatgacagggagagagtttttctctcgtttcccagaactctatccttttcttctcaaacagttggaaact

SEQ ID NO: 174675 - DNA, 90 bp, Homo sapiens
gcccgcctgccctgaggagtccccgctgcttgatcagccaaatggccgatgacacagtggcagaactggacaggcatctggcagtgaaga

SEQ ID NO: 174676 - DNA, 82 bp, Homo sapiens
ggggaaactaggtcgatggtcggcggcgcccggatgggcagctgaggggtgagcccctccagactccgaataggagatcaag

SEQ ID NO: 174677 - DNA, 75 bp, Homo sapiens
gggaaatgggaatgtacacgataattaaagagtaaagttgtgctcaacgatgtgaactatgaagactttactttc

SEQ ID NO: 174678 - DNA, 75 bp, Homo sapiens
gccgatgaagtgcagaggtttttttctgatcctccaggtcctattgacaatactaagattgcagtcactaaatgt

SEQ ID NO: 174679 - DNA, 75 bp, Homo sapiens
tgacagtctgcatgtgcagttttcaggaaaatgagcgtaccaaggatctaatcattgagcaaagatttcatcgca

SEQ ID NO: 174680 - DNA, 100 bp, Homo sapiens
cgaactgttgtaagaggtcagacgaacgtggggcaggatggacggcaagctgagtcatcactagagagtgggaagggcagcagcagcagagaatccaaac

SEQ ID NO: 174681 - DNA, 98 bp, Homo sapiens
cagcttgcaaactccagctttgcctgtgagaggaacaagcgtccctgatccagaaggtggtgtgatcccctgggcccgtttgttgtcgggggagaaga

SEQ ID NO: 174682 - DNA, 90 bp, Homo sapiens
ccgaagttggaagtgtctcttagcagcgcgcggagaagaacggggagccagggtcctgggcccagtctgccctgactcagcctgcctccg

SEQ ID NO: 174683 - DNA, 88 bp, Homo sapiens
agttgtctacgctgcgaatgggcaggcgtatgccgtgccctaccagtacccatatgcagggaaacagtgcttcttagtcctacgtcag

SEQ ID NO: 174684 - DNA, 100 bp, Homo sapiens
cccgcagttcccggacatgatcctctccgcctctcgagagggtaaaactgattattatgctcggaaacgcttggtgatacaagataaaaataaatacaac

SEQ ID NO: 174685 - DNA, 50 bp, Homo sapiens
gagctggagcggcagcagaaggaggcagcagtgaggatgccagagttcat

SEQ ID NO: 174686 - DNA, 89 bp, Homo sapiens
ccttagctgtgctcgcgctactctctctttctggcctggaggctatccagcatgccgctcctacgaggactgctgtggctccaggtgct

SEQ ID NO: 174687 - DNA, 76 bp, Homo sapiens
aacagcctcctccaacaaatccctcaacttgctaaaaatcaactgaaactagaggaccgttctgtggtgccccgag

SEQ ID NO: 174688 - DNA, 100 bp, Homo sapiens
attctactctgcttttatcctttggagcctgggagactccccaaaaaggatagctggaatggccttagtcatgaggcttttagacttgtttcaaggcggg

SEQ ID NO: 174689 - DNA, 82 bp, Homo sapiens
cagcatgaccaagcgcctctactacctctggatgtggtctggaacagaatctgacagtgatgaatcagtaccagagcttgaa

SEQ ID NO: 174690 - DNA, 74 bp, Homo sapiens
gccatttcggtgtagaagtggcagcacggcagaaagtgactgagaccgaagatgatagtgatagtgacagcgat

SEQ ID NO: 174691 - DNA, 100 bp, Homo sapiens
cggaggagcaggtgcagagcactgcgctgtcagcgatagcccagtggatggccattccagacatcgctattgcggttccgaggcagtgggaagagatgcg

SEQ ID NO: 174692 - DNA, 96 bp, Homo sapiens
tcagagttcattggccaaggagtgccccctttcacagaaaaaggtagcagcactgcctaaacaagaggttatacaagaagaggaagagataatcca

SEQ ID NO: 174693 - DNA, 83 bp, Homo sapiens
gggctgaagcgactgagtccgcgatggaggaactctttgctgaatttggaacgctgaagaaggcggctgtgcactatgatcgc

SEQ ID NO: 174694 - DNA, 75 bp, Homo sapiens
agaaaaagcagcgccccttgataaagctccctcgtgaaagatgcttctgttcctctgattgatgttacaaacctc

SEQ ID NO: 174695 - DNA, 100 bp, Homo sapiens
atcgtgctattcctggtctacatcctgcgggtgcctttgaaaatcaacgacaacttgagcacagggacatctctacaccgttcccatccgggaacagggc

SEQ ID NO: 174696 - DNA, 78 bp, Homo sapiens
taagagcccatagcagtctgccagacaatagagcatatgggtcacgactgctgaatatgagacgatctgcagcaccaa

SEQ ID NO: 174697 - DNA, 51 bp, Homo sapiens
acacatgtagagacctttgtatggcttcgtgggacacatatgcaacatgcc

SEQ ID NO: 174698 - DNA, 88 bp, Homo sapiens
ggtgcgttgtagcagcagcgggagccaggactaaggacaagcaggagctgggagccccagacgccgtttcccatggaacatcattctg

SEQ ID NO: 174699 - DNA, 51 bp, Homo sapiens
agggcatcgtgcgtgccaagcggcgaggtttgttcggacagtgttaccatt

SEQ ID NO: 174700 - DNA, 88 bp, Homo sapiens
gtcctggagctgctgcagcggccggggaacgcgcgctgcgcggactgcggcgccccgggacgccaggaaagcatgtgcagatgcaact

SEQ ID NO: 174701 - DNA, 98 bp, Homo sapiens
ttccagttttttaagaagggacaaaagccatcgcgctcctcaaggaccaggagccgggggccttcatcatccgcgacagtcactccttccgaggcgcg

SEQ ID NO: 174702 - DNA, 95 bp, Homo sapiens
gcctgaagcagctgctgtcccgggcctaccccctggactccctggagaagcagatggaaaagaattcgacaccaaattttggaacttaaaaagaa

SEQ ID NO: 174703 - DNA, 83 bp, Homo sapiens
ttgatcgcctggactgtgcagtatttccagtctgtctcagtttctggcccccaaagacaaaccaagtggagacacagcagctg

SEQ ID NO: 174704 - DNA, 98 bp, Homo sapiens
cgcttgcgacgctccggaagtgacgtgctttcccgagccggtctgcaattaaggccttacgtcctggagggatacttgtatactctacatgcacgctt

SEQ ID NO: 174705 - DNA, 82 bp, Homo sapiens
aacagggccttgcctagtgggccttccttcccagcatcaagatggtgctcatgtggaccagtggtgacgccttcaagacggc

SEQ ID NO: 174706 - DNA, 100 bp, Homo sapiens
ccacccccgagatctccttggaagcagaacccatagaactcgtggaaactgggatccagcaccggctcctcctccggcaaccacggtgggagcggcggag

SEQ ID NO: 174707 - DNA, 87 bp, Homo sapiens
tgagaagatctccattcctgaggaggagtttaattggttggggtcagataagaagaggagtgacaatcaagccaacagtagatgatg

SEQ ID NO: 174708 - DNA, 100 bp, Homo sapiens
gaggagcaccccgtgctgctgaccgaggcccccctgaaccccaaggccaaccgcgagaagatgacccaggcctcttcaccctgctcgtggaagatttcgg

SEQ ID NO: 174709 - DNA, 100 bp, Homo sapiens
ggagaatctgctgtcgcctgcagctgctcgcctgtctccgtcggaagggagcccaagctttgcagagattacaattcctagaccttctgtggcatctaca

SEQ ID NO: 174710 - DNA, 100 bp, Homo sapiens
gaacggcgacctcaagaagcagctccacgaaaggcagccgcggatcgccgcgctcagcgacaaacaactgtgttggggtggaagaggaggaggcgcccga

SEQ ID NO: 174711 - DNA, 98 bp, Homo sapiens
caaggaccggcacaaggacgttctcaagtggggcgatgagaaaaatggctactggacaggatcgagtggttgctctcgtggacatggactgttttttt

SEQ ID NO: 174712 - DNA, 98 bp, Homo sapiens
aaacattaaaccaagcgaagggctgatatacacagaagttcctgctcttcgctacaatgagggaaaaaagtggcaacatcgatagaggctagaggcag

SEQ ID NO: 174713 - DNA, 100 bp, Homo sapiens
ggccctgaggttgctcctcccggggcccttcccgggcaagggtattttaagcctggaatattgtgtgggtattattggtggcaaacctaaacagtcatat

SEQ ID NO: 174714 - DNA, 83 bp, Homo sapiens
gtaaatgcaccaatcagcatgctgtgtctagctcaagaacattctagtatgccagtagaaaaaaatatcactttagaaaggcc

SEQ ID NO: 174715 - DNA, 51 bp, Homo sapiens
gtgatttctgcatttccatctgaggggcaacatattgctcagagaattccc

SEQ ID NO: 174716 - DNA, 74 bp, Homo sapiens
ttttggcgagagatgtattcagtggaggaagctgagtggtgcacgtatcaacatctcagaagggaattgtcctg

SEQ ID NO: 174717 - DNA, 97 bp, Homo sapiens
acgcaagaaagatttaacacagactgcttcaagcaccgcaaggaccatttcagagatgtcttccagaagtaccaaagatttaattaaaagtaagtgg

SEQ ID NO: 174718 - DNA, 100 bp, Homo sapiens
gctcacacaaagcctgtttggtggtctcttcccacggacgcgcgagacaatgaggaggcctgaccgccgctgcctacagagtcacactcaatcctccggg

SEQ ID NO: 174719 - DNA, 100 bp, Homo sapiens
ggggatttacaagagtctttaaagcacggacttacacctattgaacactcctatgccaccttcaccagctgtacaagtgcagggccagcctaacagttct

SEQ ID NO: 174720 - DNA, 98 bp, Homo sapiens
tctcatgggggcccccaggactctgaccgggcaagataacccctgtgacagaaggctactgttgctgtaacaaagggcatacatacattttcaagaac

SEQ ID NO: 174721 - DNA, 76 bp, Homo sapiens
ctgtgtttcacttaccagaatactacgttcagctaaattaagaggacagagctgcccagtccttactcaacaagct

SEQ ID NO: 174722 - DNA, 75 bp, Homo sapiens
ctacaacctcacagtcgaggctacagatggaaccaccactatcctcactcagaatagttctgtcccaagaagaac

SEQ ID NO: 174723 - DNA, 100 bp, Homo sapiens
gcctgcgtcccagaagtgcctgcagttcagacccttctctcccctccactttctcccggatcatgagcgtcttgttgttcatcgagcactcagtagaggt

SEQ ID NO: 174724 - DNA, 75 bp, Homo sapiens
atcagctgaatcagagtttgcattgttaacaaggacttaaccaccaccatgtcgagcaaaagaacaaagaccaag

SEQ ID NO: 174725 - DNA, 83 bp, Homo sapiens
gttggaagcagccgatccagcctgcggagcctgtggggcaggaaccaataaaatcacgtgctccacagcttcatttagagtac

SEQ ID NO: 174726 - DNA, 89 bp, Homo sapiens
gaggaaatttaagaccatttatatgttcaactgatgaaaacactgtggtatgtgtgcaacagagagaaattatgcgaatcactccaggc

SEQ ID NO: 174727 - DNA, 49 bp, Homo sapiens
tcatcacgccctttctcttgctcaaggtcccattctatgagtggctgga

SEQ ID NO: 174728 - DNA, 71 bp, Homo sapiens
agatgaagacattcaaggaacccagaacctgttaacttcggtagatgatgagctggagatcaaggcctact

SEQ ID NO: 174729 - DNA, 75 bp, Homo sapiens
aggcacccatccttattgctacagatgtagcctcccgtgggctagatgaatgatttcggaatcaagaatatggac

SEQ ID NO: 174730 - DNA, 85 bp, Homo sapiens
ccagactgaggtaccatggctctgggaggatggatcaacattctcttctaacttagtttcgctcttgttgccccggctggagtgc

SEQ ID NO: 174731 - DNA, 80 bp, Homo sapiens
gaatcgtgtgctgggctggtcccccttgataacaacgaacttgatgcaagtgataggtttgccaaggtcagacctctcat

SEQ ID NO: 174732 - DNA, 89 bp, Homo sapiens
ccctgcaggaaggacggacttcaggggcaggcagaggaacgaggacgcctgaaggaagagctggaagaggctcgggacatagcccggcg

SEQ ID NO: 174733 - DNA, 101 bp, Homo sapiens
ctcaaggcctgagtagccggtaacaaacgagggttcccgggattggaccgacgcagccatgacaaatttacatgtattggagaccagaccagaagcccttc

SEQ ID NO: 174734 - DNA, 74 bp, Homo sapiens
caagacggccgagagccactgctggccagagcccccttcccaggcagagatttccagtacctgacagtgtgctg

SEQ ID NO: 174735 - DNA, 100 bp, Homo sapiens
agaaaagctgtggcaaccgaaatgagactccctcagatccagtgataattgacaggttatatcttaagtgtggtgctgctaacattgcccaggcagcatc

SEQ ID NO: 174736 - DNA, 90 bp, Homo sapiens
aaagagattgagccaccacacgagcaattcacaaaggacacagagtctgggatctaataattcagtcattttggatggactaaaaagaag

SEQ ID NO: 174737 - DNA, 88 bp, Homo sapiens
gatgcccggtccccatcaccggcacacattgtctatgcaggaagcaggcggtcaatgcctctgggagcaaggatccttttccacggtg

SEQ ID NO: 174738 - DNA, 75 bp, Homo sapiens
agccaggccgactacctcaacctggtgcagtgcgagacgctagaggatgactttcacacgacctgccaatcacag

SEQ ID NO: 174739 - DNA, 90 bp, Homo sapiens
tcctcagcagacttctcgttgaaatgcttccagactgcacacttttacttagaggacagtacatcccctagagttatatccacacctcca

SEQ ID NO: 174740 - DNA, 101 bp, Homo sapiens
caaacacccgtggccagcatccagcaagttgcctctgcttcccagcaggactgagcagctaggcgcgagcgaaaacaaacagctggggctgcgagcgcccc

SEQ ID NO: 174741 - DNA, 85 bp, Homo sapiens
cctaaaatcctcttttcattcctagtcattctctgtaaagtgccggtggtggtgtgcacattgagccccggtatagacagttccc

SEQ ID NO: 174742 - DNA, 82 bp, Homo sapiens
ccggtcgctctcaggaacagcaggaaaaatatattcagggggaagagatgtaatagatttcacattatggcagttactaaag

SEQ ID NO: 174743 - DNA, 83 bp, Homo sapiens
ccgccatgcaaggctggcgcgtctccatggaggcccatccaagccagattgctggccctttctggtcctggtggaggtagagg

SEQ ID NO: 174744 - DNA, 75 bp, Homo sapiens
aaatgaagccactgattagcaatttaaagatcctctccaaggtgtccctggccagtgtccttccacctgtccaca

SEQ ID NO: 174745 - DNA, 82 bp, Homo sapiens
ctggctttgcaggagaccagattcccaaatactgtttcccaaactaacaatgcagatcttcgtgaagactctgactggtaag

SEQ ID NO: 174746 - DNA, 98 bp, Homo sapiens
atttgggactccagagtttgtcggaaattcagttcatgaagataagaagtttcttgacaaatacatgccccagttcatgaaacatcttcattatagaa

SEQ ID NO: 174747 - DNA, 90 bp, Homo sapiens
tgattgcagcccatggcaacagcctccggggcattgtcaagcatctggagggcaaacctctactctggagccccttcttgcagaggcctc

SEQ ID NO: 174748 - DNA, 87 bp, Homo sapiens
acggtaaccgggacccggtgtctgctcctgtcgccttcgcctcctaatccctagccactatggtggcaagaagaagccactgaaaca

SEQ ID NO: 174749 - DNA, 100 bp, Homo sapiens
attgccatgcaagtgatgggcgaaaggaaccatcactgttgctggaggcacctgacaaatcctagcgaatttttggagcatctccacccaggaacctcgc

SEQ ID NO: 174750 - DNA, 98 bp, Homo sapiens
gcgcacctggtgcgggccctctggaccctggagtacaccccgcagcacagccgcgacttcaaggaatacggttggacagaatgaactgaagattacaa

SEQ ID NO: 174751 - DNA, 73 bp, Homo sapiens
aaagcgaggcgacggcttaaagatggagaacgacccccaggagccgtactctgacagctgtgcacgatgccat

SEQ ID NO: 174752 - DNA, 100 bp, Homo sapiens
ggcgcggcgcagaagaaacccgcggcgaccacagccaaagcgggcatcctgggaagactctgcctgaagcccttgattattgcactgtttggctacagac

SEQ ID NO: 174753 - DNA, 96 bp, Homo sapiens
gtctgaaacaattgaggattctagtaatcaagcagcagccagagaatgggaggtagaggaccgaaaacactttggagctgtagaagctaaaccaga

SEQ ID NO: 174754 - DNA, 101 bp, Homo sapiens
aggcgggcgcctaccagccggcagctccggagctgcccgcgccatgtccgcgcacaatcggggcaccgagctcggaacttacaatgtctcagaaaaatggt

SEQ ID NO: 174755 - DNA, 51 bp, Homo sapiens
gttcgagaaattcaagccgccattaagatggagctggaggagacagaaccg

SEQ ID NO: 174756 - DNA, 100 bp, Homo sapiens
gctggaggtggacgccatcgtcaacgccggtgaggtgataaagcacggggacctgagatgcgtgcgcgatgaaggaatgcccatctacaaagcacccctg

SEQ ID NO: 174757 - DNA, 131 bp, Homo sapiens
cctggatgttcttgccgatgcttctcaccgaaggtgttcaccagcacactgctctgccagcctgcctagggtagttaaaagacgagtgaatgctctcaaaaacctgcaagttaaatgtgcacagatagaag

SEQ ID NO: 174758 - DNA, 95 bp, Homo sapiens
acagcgtgaattagcaaaaagggctgaacaggttttgattcatggattcacccagtcattacttctagatgatgctggctcagttctggccacag

SEQ ID NO: 174759 - DNA, 50 bp, Homo sapiens
aaaaagaagaattgcacttacacacaggaaactactaaagttcctgggga

SEQ ID NO: 174760 - DNA, 100 bp, Homo sapiens
gattttgatgtggatgatgccaaagttttattaggtatagtggaggattacaagccaccgttctacgatgtggttcccaatgacccaagttttgaagata

SEQ ID NO: 174761 - DNA, 83 bp, Homo sapiens
caggaattctcctgccaccgcgtggtgcttgccgcagccagcaactatttcaggtgtttcccattaaacactaccaggacaaa

SEQ ID NO: 174762 - DNA, 97 bp, Homo sapiens
gcacaggcttgtccggggagcagtatgccggaagctggttttcaggccacaaatgctttcacaggacactttcttcatgagcaacaaaccccaaaga

SEQ ID NO: 174763 - DNA, 100 bp, Homo sapiens
tgtaaaaagggatggatggacccgcagagcaaagatactacccggcctcgacgtgataatgaggtggatggacaagactaccactttgtggtgtcccgag

SEQ ID NO: 174764 - DNA, 75 bp, Homo sapiens
tttaatgagataacaaaactcacctcccttatagatggcaaagttccaaaaggtgtcattccacacatccacaaa

SEQ ID NO: 174765 - DNA, 90 bp, Homo sapiens
ctcacccgcgcctgcgacctcgatactatcaaatcagcctgggaagcatcttttcgctcagcaagttcaagagaacaaatatgttacaat

SEQ ID NO: 174766 - DNA, 82 bp, Homo sapiens
aacgtccactgcgggccggcgaaagctgattcccaacttcttctggagcctggggatcggtcacactggtgcgtggtggcat

SEQ ID NO: 174767 - DNA, 100 bp, Homo sapiens
attggaatattggtgggccagcaatcctcagacgcctcacttaggacaactccctgtgctgtcaggaatctacaggacttggctcgtatttacattcgac

SEQ ID NO: 174768 - DNA, 80 bp, Homo sapiens
agaccagcgacaaatttagagaaacctcggcagcaaatgatgtgcttgcttttggaacattggtcagtacttccaatacc

SEQ ID NO: 174769 - DNA, 76 bp, Homo sapiens
gcgtcaccgccgcccccccagacaagatggacaccgcggaggaaggaacatcgtgatcaattagccactgccaaag

SEQ ID NO: 174770 - DNA, 98 bp, Homo sapiens
ctgccatgtgcctctggctcaagcccaggctttggtcaccagtgagctggagaagttccaggctaggtcctttcacaaaactgttcctgtgaaagcat

SEQ ID NO: 174771 - DNA, 74 bp, Homo sapiens
ccaaacagaactacgtcaagcacatgttcgtacacacagagcgtccagttgtaaatgccaatgtctcagtgcca

SEQ ID NO: 174772 - DNA, 100 bp, Homo sapiens
agcttctggactgagggccgcggcggtggaagcagggcagagccgaagcagcccgctcctcaagaggccggtgcggacccaggcggtgctggaccagtca

SEQ ID NO: 174773 - DNA, 90 bp, Homo sapiens
cacattgagagcaaaatctacaagatgatgcagggaggaggtgctggagaatctggtaaaagcaccattgtgaagcagatgaggatcctg

SEQ ID NO: 174774 - DNA, 98 bp, Homo sapiens
ccggcgagctgcacctggagatctgcctgaaggacctggaggaggaccacgcctgcatccccatcaagaaaaaaccgggaagatcctgacggagttcc

SEQ ID NO: 174775 - DNA, 75 bp, Homo sapiens
gacattgctagcaatgagctcccaaagccatccagtgtactaatggtcacttgatgtgcgctggctgttttatcc

SEQ ID NO: 174776 - DNA, 100 bp, Homo sapiens
cgcccagcccaaaccaggagattgcgagggagcgatgcggtgcagcgcggtccggacactgtttgtcagcggcctccctgtggacattaaacccagagaa

SEQ ID NO: 174777 - DNA, 83 bp, Homo sapiens
ggccggagcaggcgaggtggccggagccgtgtggaccaggaggagcgcttttggtgccctggttgtcagatgttggaaagcag

SEQ ID NO: 174778 - DNA, 75 bp, Homo sapiens
gaaagaggcacgcatttttgacaggccataaaattttgagtagaaaaatccagaaatttgaaaatcagtatcgtg

SEQ ID NO: 174779 - DNA, 76 bp, Homo sapiens
agttctcaatgcatcatgtcaggcagcttatgatgccaatttgtcccatggaactctaatgaatcattgattgacc

SEQ ID NO: 174780 - DNA, 95 bp, Homo sapiens
tcgtccttcacctgatatctgtgccagagaatggacagtcattttgtttactcattcagccctgttgcaggtcccaataaactcttcataaggtt

SEQ ID NO: 174781 - DNA, 98 bp, Homo sapiens
ctttttcagtgttcttggaggtgtggggtgtgagaacttgatcagtttgtgtcagccaccttgttctctaaagaaagcctgacaggtttcttcggaaa

SEQ ID NO: 174782 - DNA, 100 bp, Homo sapiens
ccttgtaaagaggttcgtgcagcacttcggaagaggcctgaagaggagtgcctgttgactggggctgcttttaaccctttcctatttgctgagaatgcag

SEQ ID NO: 174783 - DNA, 98 bp, Homo sapiens
ctatttgaagtatttgacgaaaatagactgaaaaaggtagcagcactgcctaaacaagaggttatacaagaagaggaagagataatccatgaagataa

SEQ ID NO: 174784 - DNA, 100 bp, Homo sapiens
gatggtcgaggccatctcctgggccgcctggcggccatcgtggctaaacaggtactgctgggtggccaaacaggagaagaagaagaagaagacaggtcgg

SEQ ID NO: 174785 - DNA, 98 bp, Homo sapiens
tcagggcggaaggcgcgctaagagcaggtatattgaagcaagtcaaagattacattaaacagtgtagcaaatgccaggagaaactagatcgatcccgt

SEQ ID NO: 174786 - DNA, 100 bp, Homo sapiens
acccacgagatcatggggcccaagaaaaagcacctggactatttctccacccaggtgaactcctccctcacctccccgacggggcgaggctccatggctg

SEQ ID NO: 174787 - DNA, 96 bp, Homo sapiens
gaagtggttggaaatggcacctatggacaagtctataagcttgcagtgagctgcatactccatcgctagatcgaaagccaaatagttttgttgcgg

SEQ ID NO: 174788 - DNA, 80 bp, Homo sapiens
agaggaagacggggcggaagaccaagatcatcgagatgcctagatgacttactcaggtgtggagtgacttttgctgctaa

SEQ ID NO: 174789 - DNA, 96 bp, Homo sapiens
ttagagacctgcgttgtaaatattgctttaccaaacagtgattcgcctttgccagtctcatctcgtgtctgctttgttaagttccatgatccagac

SEQ ID NO: 174790 - DNA, 90 bp, Homo sapiens
ttactcgtattcaggatccacagagaggagaggtcatggctattggtcgtacctttgaggagagtttccagaaagctttacggatgtgcc

SEQ ID NO: 174791 - DNA, 95 bp, Homo sapiens
tcttcaattaaaaaatttattaaaggaagcacacctaagggggcagtacccaaaggaaacgctacgaaagaatacatggagagcttgcagctgaa

SEQ ID NO: 174792 - DNA, 100 bp, Homo sapiens
cagggcggtgttctgcccaacatccaggctgtactgctccccaagaagactgagagtcaccacaaggccaaggacaatactgtcagagttcaagacacag

SEQ ID NO: 174793 - DNA, 97 bp, Homo sapiens
ctaatgtcagggcagaccccttcaaagaactaaggtctacttccagtggaggtgagaatgggggtggacgaaaagagaaatccctaatcaccagagg

SEQ ID NO: 174794 - DNA, 100 bp, Homo sapiens
gcggaaggcggcggaggcggcggtcgccccggggctccggcggcggacaatgcagatcttcgtgaagactctgactggtaagaccatcaccctcgaggtt

SEQ ID NO: 174795 - DNA, 50 bp, Homo sapiens
gtggaatccacatatctcctctaccagatacgtgcttttcaacatgcctt

SEQ ID NO: 174796 - DNA, 117 bp, Homo sapiens
tcagcattgttttcttctacttcattgcttgcaaggaggagtttttacaagattttctctgtgggcagttctttttgttttgggaagacttctgactttaattctttcagtactgac

SEQ ID NO: 174797 - DNA, 90 bp, Homo sapiens
ctcctggtcgatgaagaggatgatgtttttggtgaagatccattacaagattttggcttttctgttgaaaagtgttccaagcaattaaaa

SEQ ID NO: 174798 - DNA, 76 bp, Homo sapiens
gggcggctgagacaaaggcgacggacctcagcagccatgtcgaagccccatagtgaagccgggactgccttcattc

SEQ ID NO: 174799 - DNA, 75 bp, Homo sapiens
gggagctgcagagacacaacaagactctgaagagctggactggccattatggaggaggagctgcagcattcccat

SEQ ID NO: 174800 - DNA, 83 bp, Homo sapiens
ggtgcctgcggtgcctgagctgagtgaggccgaggccgggaggccgtgcccggaggtatcatgaactgatcactaaatatggg

SEQ ID NO: 174801 - DNA, 75 bp, Homo sapiens
ctcaccgaggccttcaagtactttttgcagggaatgggctacaccggctgtgaccacaaggtgacatccaccagt

SEQ ID NO: 174802 - DNA, 75 bp, Homo sapiens
tgatgtcaagagtcatgtctacattgtggatatcaagcctgccaatatggaagagctaacagaggtgattacagc

SEQ ID NO: 174803 - DNA, 100 bp, Homo sapiens
gaaaatggagaaccaggcacccgtgtggttgctaaggatgggctgaagctggggtctggaccttctatttgatcggctgaaacttcaagattcctccaag

SEQ ID NO: 174804 - DNA, 100 bp, Homo sapiens
agcgacccggggggagcgcggggcgacgctggctgcagggacccggtgacagcgtgagagatcgagcctgcgtgctgccgaagcagggcgccgagtccat

SEQ ID NO: 174805 - DNA, 102 bp, Homo sapiens
cagcagcccaccagggagctcctgcaggttgtgctgttggatgagagttcaggaccaccaagccagctgctttggacccgccaggatacccagctccctcag

SEQ ID NO: 174806 - DNA, 74 bp, Homo sapiens
tgagatgtacgctaagactgaacaggatattcagagaagttctgtaatattaacggctgctatttgaactatta

SEQ ID NO: 174807 - DNA, 96 bp, Homo sapiens
aaattatccgaaaccgcctcactgggttgcttttaactttgacagaggaagaattttccaagacgccctataccatagaaaacagcagccacagga

SEQ ID NO: 174808 - DNA, 90 bp, Homo sapiens
gtggactcagatgatctccccttgaatgtttcccgcgagactcttcagcaacataaactgcttaaggtacaaaatgaggccaagacaccc

SEQ ID NO: 174809 - DNA, 85 bp, Homo sapiens
gtccggcatgcaccaaatgggaggcctttctttattgaccacaacactaaaaccaccacctgggatgaaaactttcggaagagaa

SEQ ID NO: 174810 - DNA, 100 bp, Homo sapiens
ctgaccttaaagatgctgaagctgttcagaagttcttccttgaagaaatacagcttggtgaagagttactagctcaagagacggagtttcaccatgttgg

SEQ ID NO: 174811 - DNA, 75 bp, Homo sapiens
tgaagtcggcggatgtggagaaaaatatggctacacacacctttctgcaggagagctgcttcgtgatgaaaggaa

SEQ ID NO: 174812 - DNA, 75 bp, Homo sapiens
cttactgcggccgcccggctcttgggaaccaaggcctccaagactgcagagaatgccaccagtggggaaacatta

SEQ ID NO: 174813 - DNA, 95 bp, Homo sapiens
gataccagtttgcgtcaggagacacagcatccatgagtatgttttctgatttcctgcagtcttttctgaagcactcttcgagtacagtttttgat

SEQ ID NO: 174814 - DNA, 100 bp, Homo sapiens
agcttactggtgaaggaatgggacaagacccatctttatgcaaagccagcgttacagtaatgttccaggtgtactttcggctccatgcttccatcctgaa

SEQ ID NO: 174815 - DNA, 48 bp, Homo sapiens
ggtgttttgctaccgtgaccgtttaggcttttatcttgagaacatggt

SEQ ID NO: 174816 - DNA, 100 bp, Homo sapiens
gacagtttgaatatgcactctttggaaaattcccttatcgatattatgagagcagagcatgatcctcttaaggccaaaccaaacaggaagcttacttttc

SEQ ID NO: 174817 - DNA, 50 bp, Homo sapiens
ggcactccagaatatctggcaccagaggatcttcaagatgaagttcaaag

SEQ ID NO: 174818 - DNA, 75 bp, Homo sapiens
acgtgatgctggagaattataggaacctcgtctccctgggaaaatatatgcagatgatgaacattcttaagccaa

SEQ ID NO: 174819 - DNA, 83 bp, Homo sapiens
ccccatcttcggcatgtccttcgcctgccagtctgggcgacagatgcgaaagaaacgagttccagtgccaagacgggaaatgc

SEQ ID NO: 174820 - DNA, 74 bp, Homo sapiens
tcatggccatggaagacgaatttgagacacctgtgcatagcagatcatcttcacctattcctctgactcctagc

SEQ ID NO: 174821 - DNA, 98 bp, Homo sapiens
acactgagagccgctttcatcaagctccaaatagattgggagaaaatcaaagccaaaattgagatggaaattacaaaagaaagagagcaatcatcaag

SEQ ID NO: 174822 - DNA, 96 bp, Homo sapiens
gccgccactggattgacagccccagagcagcgggatcaggccacgcggacgaggagctatgtgttctcatttcacccaagaccattggccagtgca

SEQ ID NO: 174823 - DNA, 135 bp, Homo sapiens
ggcggcaggagcgggtagtgccagctacggtccgcggctggggttccctcctccgtttctgtatccccacgagagtttattaaccacttaacctctcagaactgaacaaagacaacattgttcctggaacgccct

SEQ ID NO: 174824 - DNA, 85 bp, Homo sapiens
atctggtgaagtggaaaggatggcccccaaagtttttagaacttcagccataaaaatgggcagaattttccttgatcatatcggt

SEQ ID NO: 174825 - DNA, 97 bp, Homo sapiens
ttggtctcttcccatggcgatgtccatctgccaccgtggcactggtattgctttgagtgcaggtgatactgtgcttgtccaccgagttcacagttat

SEQ ID NO: 174826 - DNA, 76 bp, Homo sapiens
ctcagccctgaagaaaagggaaaacttgctgcggttgctcaaggagaatcagatgagagggaacaatcaaaattgg

SEQ ID NO: 174827 - DNA, 98 bp, Homo sapiens
tcatgatccaaagtacaggaaatgggcctgggaagccgtagaggtaatatatgctttaaacactaaaaatgatgagcatgaatctgcaattcaagccc

SEQ ID NO: 174828 - DNA, 75 bp, Homo sapiens
ggacgccggaacaccctggaagccgagaaatgaagggatggaaaccctattttcttttctccaagaccatggttg

SEQ ID NO: 174829 - DNA, 100 bp, Homo sapiens
gtagccccaacagaagctcgccaagcataatatgtatgccaaagcagcagccttctcgacagccttttactgtgaacagaaatgcactcggtgatggaaa

SEQ ID NO: 174830 - DNA, 98 bp, Homo sapiens
cagtgacctggagctgcacccccccagctatccgtggtctcaccgtggcctcctctcttccttggaccacaccagcgtcgtctcggagatgcagccaa

SEQ ID NO: 174831 - DNA, 75 bp, Homo sapiens
cctaggggcagcgagcaagacagcaagcaggagccttcacgtaaatgggtccagtcatgcctcccagtaagaagc

SEQ ID NO: 174832 - DNA, 73 bp, Homo sapiens
gttggggcggcctggctccctcaggacaggaagataatatgacctcagtaacaaaccacttttctcaatcaaa

SEQ ID NO: 174833 - DNA, 100 bp, Homo sapiens
aagaaattcaaaggagacctggcctacagacgacaagagtatcaggtagctacagcaagctgggtagcaggcagatccaaaggatatcatgaagtttcca

SEQ ID NO: 174834 - DNA, 100 bp, Homo sapiens
ctgggaactgctgatggcactggaggaaaacaaaggccgagagaccctgatgcccacagcccccagcctggcagctgcgattcagccacctcgtggggta

SEQ ID NO: 174835 - DNA, 75 bp, Homo sapiens
tcagctggcctggtttgatactgacctgtaaatcatcctttaggctgctgatactttggctgtgaggcaaaaaag

SEQ ID NO: 174836 - DNA, 83 bp, Homo sapiens
taatgtattccaccacctccgccagttaagaggaaaaaggtattgaagcccctgggtgataatttgatggaggaaaacataag

SEQ ID NO: 174837 - DNA, 100 bp, Homo sapiens
ctcgagtcctgccgcctcccgggagtgccgtgcgccgcagcccgggcccaggccccggcagcgcctgggacaaggtggatccataaagaacccagccaac

SEQ ID NO: 174838 - DNA, 100 bp, Homo sapiens
cacagttgctgatatagaaagtgaaccagtggtagaaagcacagaaactgaggggacataatcatcactcagtaggcaactactctaagagtgaggaaat

SEQ ID NO: 174839 - DNA, 83 bp, Homo sapiens
ggataattgggatgatgacaatgtagaggatgacttctctaatcagttacgcacactgatttatgtcagtacatggacaagca

SEQ ID NO: 174840 - DNA, 100 bp, Homo sapiens
cactgagaagtgtatatcaagccacaatttccatcaaaaagtgattaagcagagaatggagaagaaggttgattccagccagctgaggtgggtgtcctgg

SEQ ID NO: 174841 - DNA, 100 bp, Homo sapiens
tcttgttacaactgagtccgggttggaggaggtgtggggccgctgccgccaggaatgattggtaacagtgcttctcggcctactatgccatctggagaat

SEQ ID NO: 174842 - DNA, 82 bp, Homo sapiens
gaagagctgccgtcgctgcagagaccccgctatggcttcttcccaagggattgttgaagaaacttctgaagagggaaactct

SEQ ID NO: 174843 - DNA, 87 bp, Homo sapiens
ataaactgcctggccgaatcagccttttcacgctcaaggtcaacgtattgaaacttactgttgaagacttggagaaagagagggatt

SEQ ID NO: 174844 - DNA, 75 bp, Homo sapiens
cagccttttccccatggcagcccctgttctggtgctttacaaggccaagtacggtccaatgtggatgtcctactt

SEQ ID NO: 174845 - DNA, 74 bp, Homo sapiens
ccaggctgatggagagctgaacattactcttccagaagagtttgaaaatctgaacacagttgctgagtgtctgt

SEQ ID NO: 174846 - DNA, 90 bp, Homo sapiens
gaatgctttggttaaacgaatcaaagagatgcaatctccctcctttgtcaagtgaatacactaaggatgttggatccaaaagtcagttag

SEQ ID NO: 174847 - DNA, 96 bp, Homo sapiens
tgccagcaagccggagcctgccagagccaaggccaagctctccaagttcagcatccccaagcagggggagatccttccgctgaggaattgagaaaa

SEQ ID NO: 174848 - DNA, 82 bp, Homo sapiens
atcggatcggtggagtgcagcaggacactatcctggccgagggccttcacttcaggaagaaggtagataatgactataatgc

SEQ ID NO: 174849 - DNA, 90 bp, Homo sapiens
gggacggccccagaatggcatgagaaatggaataatcgtatcgctgatctacgtaaacaaattgaagaattgtctgaaagaaaatatgtt

SEQ ID NO: 174850 - DNA, 98 bp, Homo sapiens
ggcacaaaaactaccattcgcctgatgaactctcagttgttgtggaattataagctgaacctaactacagatcccaaatttgaatctgtggccagaga

SEQ ID NO: 174851 - DNA, 100 bp, Homo sapiens
gagttgctcagctttattttggatcatgtcttcattgaacaggatgatgataataatagtgcaggcctgtgatacttgggctgtgatcctctagagccag

SEQ ID NO: 174852 - DNA, 96 bp, Homo sapiens
cttatctactggatttccgtagtattgatgacatatctgaagagatggattaagaatgctttggattaaggattgtggagcacatttcaatcattt

SEQ ID NO: 174853 - DNA, 100 bp, Homo sapiens
ccgggctttagctatggcagcggcagcaccgggagtcagcagagtgaagggtcacggagactcaccagttggcagaattaaatgagaagaagaatgaaag

SEQ ID NO: 174854 - DNA, 97 bp, Homo sapiens
ggacacacctccattggatttaaaagacagtcctcgtcagcactgactttcagctatggaatcggtgcacaaaaagctttaaacaagttaaaatcta

SEQ ID NO: 174855 - DNA, 100 bp, Homo sapiens
gcggcgtctggtgtgcgggcgctggggcggagatgctgatgaaaccaaagaatggattgaagagaagaatcaagctctaaacacagacaattatggacat

SEQ ID NO: 174856 - DNA, 96 bp, Homo sapiens
gcgactcttttcctcggcacactggataccattttcctcttctcctatgctgtggcatcctctggtatcacgattccaaaacccccaaagccacca

SEQ ID NO: 174857 - DNA, 83 bp, Homo sapiens
ccgtcgttgacgttagtcgcagtcttcgctgctaacggagaaaagccttacagatgctcatgggaagggtgtgagtggcgttt

SEQ ID NO: 174858 - DNA, 115 bp, Homo sapiens
ccgctccgccgcgctccagcctcgctctccgccgcccgcaccgccgcccgcgccctcaccaggctttatcctgtggataaacgcagagtgaacgagtttggggagtcctacgagg

SEQ ID NO: 174859 - DNA, 74 bp, Homo sapiens
ccagcggaggaggagctctcaaaagtctctcatcacttttgtgaacaagcacctgaacaagctgaatttggagg

SEQ ID NO: 174860 - DNA, 98 bp, Homo sapiens
tgcgatatagctacctcagattggagaaaatttgcctcaaagcgagtctcaaaggtgttcctggatttggatgtaaatgaagaccctggagaagatgt

SEQ ID NO: 174861 - DNA, 100 bp, Homo sapiens
gaggagccgcgccgcgcccggcgccccactccgcgcagcgggttgcctccgctccccatacggcggccccagatgactctggggacgacgacgaggctac

SEQ ID NO: 174862 - DNA, 89 bp, Homo sapiens
ggattgcactgcctccatggaaccttcagcaattgaactcccagattatttgatggttgaaaaataccggccacagaccctgaatgatc

SEQ ID NO: 174863 - DNA, 75 bp, Homo sapiens
gtgaccccctcagcaactcctgatgaacaggagctggtggtgtctgtcgattgactgagtgctggagctggcagc

SEQ ID NO: 174864 - DNA, 96 bp, Homo sapiens
gctgccagaagtatcaaatgcaaaccctggaactttggtcaggctgatgtggtcatcaagttccctgaggaagaagctccctcgactgtcttgtcc

SEQ ID NO: 174865 - DNA, 82 bp, Homo sapiens
ccgaaccgtgaagggctggaggccccggcggctagctcagttcctacccccggttgcgagaggagacagagcgaatcgtcac

SEQ ID NO: 174866 - DNA, 100 bp, Homo sapiens
tcctggtagaccagtgcccgtggccaccgagaccagcaggcatatctcacagatttcctctgccagtttgctcagcagccctgctacataatgttttcag

SEQ ID NO: 174867 - DNA, 100 bp, Homo sapiens
tcagcgccgcctccctgcttcttaacagatatggatcagaaactttcgaagttggtagaagagctcacaacttcaggagaaccccgactaaatcctgaga

SEQ ID NO: 174868 - DNA, 83 bp, Homo sapiens
cgagttcttattccaccaggcagcaagaatacgatgccatcagtggtcagcccaaggccaaccccactgtcactctgttcccg

SEQ ID NO: 174869 - DNA, 96 bp, Homo sapiens
ttctcggcgggctgtggggcctccgcgccgcggccgttagtcatgtcggggaatgtgaaaaaacttggagacacatacccaagtatctcaaatgcc

SEQ ID NO: 174870 - DNA, 100 bp, Homo sapiens
ctgctggaccctgccaagaagtcgcccatcgcagcagctcggccgccatggcatcagatgaaggcaaactttttgttggagggctgagttttgacaccaa

SEQ ID NO: 174871 - DNA, 100 bp, Homo sapiens
atgaaacgggcagccatggccctccacagcccgcaggcagtttttcaggaactccaggcagtgtaaagtcatcttctggaagttcagtgcagtctcccca

SEQ ID NO: 174872 - DNA, 80 bp, Homo sapiens
gcagatcctcatttccatcatttcctgctaagccaaacagagaaggcatttttagatgaattcactaactggtcaagaat

SEQ ID NO: 174873 - DNA, 100 bp, Homo sapiens
acctgggttcgctcgccttcctaggcgctgacaccgctcggttggatgtcgcgtcggagtttcgaaagaactgtaaaggtgcctcccactacggcctgac

SEQ ID NO: 174874 - DNA, 100 bp, Homo sapiens
caccgggtgagctcaccgcccagcccaaaccaggagattgcgagggagcgatgcggtgcagcgcgatcatcaatgctgtggtactgttgattttattgag

SEQ ID NO: 174875 - DNA, 50 bp, Homo sapiens
agccagccgtcccgagctaccagcaggcatttgaccaagccgtgaccaag

SEQ ID NO: 174876 - DNA, 73 bp, Homo sapiens
cctttcactgaagaagtggggaaaacaaggctcagacaggcaaaagctggcaggctgacagaggcggcctcag

SEQ ID NO: 174877 - DNA, 82 bp, Homo sapiens
ctgcgcatcttcgagagggacgccatcgacaaatttaaaagcctgttgattcaagaactttctaaagtatttccggaagaca

SEQ ID NO: 174878 - DNA, 100 bp, Homo sapiens
ccaagatggagttcctcctggggaacccgttcagcacaccagtggggcagtgcctcgcaggggaaatgctgtctgtagctgagcacttcctggagcagca

SEQ ID NO: 174879 - DNA, 75 bp, Homo sapiens
ataacactaagtttagatctcatgagcacccttacccttctgaagaacagaaaaagcagttggcacaagacacgg

SEQ ID NO: 174880 - DNA, 83 bp, Homo sapiens
attggatttgatcttccatatggataaggtgacttaagagattaaaattaatttggttgctgttggttctgaacaaataatga

SEQ ID NO: 174881 - DNA, 99 bp, Homo sapiens
ctggtggagaaggaggaggcagaatgtctgcattgttacaccatacagctcaaacttcagaagattttggtccacaggtcctggctaccctgggaagag

SEQ ID NO: 174882 - DNA, 98 bp, Homo sapiens
cctgactccataaactattggattcataacctgctccatgcttgaaaacatggggattggaattcgttttcggctttgtgagaaaccttaccatcaaa

SEQ ID NO: 174883 - DNA, 75 bp, Homo sapiens
ttgcggaggtacggatactcagttgtggagagctgattcccaaatctaaagtagagatggggtttcgccatgttg

SEQ ID NO: 174884 - DNA, 100 bp, Homo sapiens
ctgccctggggcagctgaactgagcgtatgtgccacgccgcccaggagacccctctgctgcaccacttcatgcgtttgctgccaattgatggggcaaatg

SEQ ID NO: 174885 - DNA, 98 bp, Homo sapiens
cgagctgcagcaggagaagagcaaggcacattcaggaccccgcgagccagcggctgacgtggaacaagtccccaaagagcgtccttgtcatcaagaag

SEQ ID NO: 174886 - DNA, 87 bp, Homo sapiens
accattgaagactctgggattaatgctaaatttgtgaatgctgtgtatgataccttacttaatactcaactttcatcctttgaaacg

SEQ ID NO: 174887 - DNA, 101 bp, Homo sapiens
gtccaaggcggtgcgctgggggccggggcgcgtcgcagacaatgcagatcttcgtgaagactctgactggtaagaccatcaccctcgaggttgagcccagt

SEQ ID NO: 174888 - DNA, 50 bp, Homo sapiens
cgtgcaacctggaattggaacggagacaaccaggattggagttgctgtta

SEQ ID NO: 174889 - DNA, 105 bp, Homo sapiens
attttggataggcctttctcggccccagactgaggtaccatggctctgggaggatggatcaacattctcttctaacttatggagtctcgctctgttgcccaggct

SEQ ID NO: 174890 - DNA, 75 bp, Homo sapiens
tatgaacaaaaccagtctgatgtatgagcaaggtgtggaacgacctgaggcccaagctcagctgcctctttgcgg

SEQ ID NO: 174891 - DNA, 83 bp, Homo sapiens
gatactcttgcttatttattggcttaaggattaaggatccccaaagtctcagacttcagccaagatgctgaattatcagggac

SEQ ID NO: 174892 - DNA, 80 bp, Homo sapiens
cctgttccccgcgctgcggcctggcggcttccaggcgcactaccgcgttaaacgagaagattcatcaccgctttgatggc

SEQ ID NO: 174893 - DNA, 75 bp, Homo sapiens
agagaactcagcgaggattctgagaatctgagagaggccgagtggagttcggtccttctctgaacacttttagct

SEQ ID NO: 174894 - DNA, 75 bp, Homo sapiens
gccgcctcctagcggcgcggcgctcgctcctacgcaatcatcctcttccagtggtagcgtgtttgggtctggaaa

SEQ ID NO: 174895 - DNA, 100 bp, Homo sapiens
ggccatctgatctataaatgcggtggcatcgacaaaagaaccattgaaaaatttgagaaggaggctgctgaggtatccgtacttgaaaactggaaggaga

SEQ ID NO: 174896 - DNA, 100 bp, Homo sapiens
tggcaaagcagctacacaaagagggtcatctcttctattgtacctgcaggatctggggactttgatgattttaacctggaggatgcagtgaaagaaactt

SEQ ID NO: 174897 - DNA, 83 bp, Homo sapiens
ctattcacaacactgctgctaccgaggcctagatacagccttttcctccctctccatgaactctggaaacagtacatcaggga

SEQ ID NO: 174898 - DNA, 90 bp, Homo sapiens
gccgccgcagccgccggcgctgtggaggcagacatctggtccctgggcataacagctattgaacttgcaagaggggaaccacctcattcc

SEQ ID NO: 174899 - DNA, 100 bp, Homo sapiens
gtgaccctgatgatggatgccaccaatatgccagctgtcaaagccatcatatatcagtatatggaagagagcctggcccaactagagaatctgtgcaaac

SEQ ID NO: 174900 - DNA, 75 bp, Homo sapiens
gtcaactcgctccggagcgcggcgccgagcgcagggatacggcgcccagcggggacacaatgtttgcacgaggac

SEQ ID NO: 174901 - DNA, 50 bp, Homo sapiens
accctggaccagcagaaacctagagtgcgcttctctgaagtagctttgga

SEQ ID NO: 174902 - DNA, 51 bp, Homo sapiens
tttgatccctgtgtgctgaagagtggactgcatggaccccacatgttcagg

SEQ ID NO: 174903 - DNA, 100 bp, Homo sapiens
aagaagtcctctcctgggtccttcagtattaccaggtccctgaaaagctaccccccaaagtcctggagctgtgctcagagtcaagatctccactgaagtt

SEQ ID NO: 174904 - DNA, 83 bp, Homo sapiens
ggtagcgaaggtcgccgaacccgcctggctagccggcgagttgagtggcgatcagagcaccataacatggtgtgggaagtgaa

SEQ ID NO: 174905 - DNA, 100 bp, Homo sapiens
gaagacgttatttaccatatccagtatgatgaagtctccttggaggtgacatggatatgggcaacccaggaaccctttcgcccaccaaacctggttccca

SEQ ID NO: 174906 - DNA, 75 bp, Homo sapiens
gccttacctcgctgaatcatcacagccctaggaggccatcatctgtgcgatctctgcggtggacgaggtggacta

SEQ ID NO: 174907 - DNA, 73 bp, Homo sapiens
ggaggagccatggactgcagcctcgtgcggacgctcgtgcacagatacatgggcaccaacaaatgcgccagcc

SEQ ID NO: 174908 - DNA, 100 bp, Homo sapiens
tcccgacccgccgccggctccggccgcgtttcccgggtaaagggagaatttggatggagagacccggaactgccggaagtgattcagatgttgcagcacc

SEQ ID NO: 174909 - DNA, 100 bp, Homo sapiens
gtgggaactgaggaagcgcccaagctgtctgtgatcctggaaacatacgtgtgactgaagctcccaaacacccaatctctgaagaactggaaactcccat

SEQ ID NO: 174910 - DNA, 82 bp, Homo sapiens
ccttcaagtctttgtggtgcctcattcccataacgacccaggtatcctgaagaacttgcctggcacacaaatttaagtcgaa

SEQ ID NO: 174911 - DNA, 74 bp, Homo sapiens
gataatccggagaaaaagaaactgcaagaacagctgatgggagcgagaacccgagcagcgccatgagcaacact

SEQ ID NO: 174912 - DNA, 82 bp, Homo sapiens
gaaggaacgaggcaaggagctaaagcagcgtgcgttcagccctggggagtctcgctctcagtcaaaatctccaacgggaact

SEQ ID NO: 174913 - DNA, 71 bp, Homo sapiens
tggataaagatgcgcctctgcgatttgcagctgaaccttcacctagccccaggattacaaggaaaagcacc

SEQ ID NO: 174914 - DNA, 75 bp, Homo sapiens
tttcatcaacttccataccgggagatggagcatttgagacagttccctgttcttcaggacaatttagaagtttat

SEQ ID NO: 174915 - DNA, 85 bp, Homo sapiens
aagttggacgctatgctggaagaatttaagaaagccttgataaatttgctgaagttccttatgtcaaatgagactgtacttttgg

SEQ ID NO: 174916 - DNA, 98 bp, Homo sapiens
ggacccacctgcagccgccgccgcgatgcccaccatgcggaggaccgtgtcggagatccgctcgcgcgccgaaggttttcttccacccctgagatggc

SEQ ID NO: 174917 - DNA, 71 bp, Homo sapiens
ccaagctccctgcggggaagaacgtgctactgctgggtttaagaaaatctacgaagaaacgcagtgagtct

SEQ ID NO: 174918 - DNA, 130 bp, Homo sapiens
agtaaagcgaattgtccaagccctgaatgccaatgtgtggtccaatgtagtgatgaagaatggtccctggatggccggttgcaggtgtcccatcggaaggggctccctcatgtcatctactgccgcctgt

SEQ ID NO: 174919 - DNA, 82 bp, Homo sapiens
gggacgatcatcctggggacctggtacatgtgcagagcagagcgggcggaggaccccgggcgcgggcgcggacggcacgcgg

SEQ ID NO: 174920 - DNA, 100 bp, Homo sapiens
agtagaaagtctcagcagacccttcctgagggccgagcaacagtgtagtggcgtattccacatagcaaacagcatatgtaagtggaactcagaaggcaac

SEQ ID NO: 174921 - DNA, 90 bp, Homo sapiens
cggcgttatttttattaactggaggcgacggcggctgcggcggcggcgggacccgggtacacatctttctggaatgactgcatatcatca

SEQ ID NO: 174922 - DNA, 110 bp, Homo sapiens
tgcgcccagccccagagcctgaggctgagggctcagctgtgaagaggatgcggcttgatacctggacttccaagtgctggccttcatctccccgcaagatgcgccccctc

SEQ ID NO: 174923 - DNA, 101 bp, Homo sapiens
agtttggtgtctcgttttgaggtgaaaaatgaatgagataagtgctttttaaaaaggtctgtagcatctctgtctgttggagaaggcacaggtgtcagagc

SEQ ID NO: 174924 - DNA, 89 bp, Homo sapiens
gttaaggattccaagtaactcttatttggagagctcaaaggatggctactgacatgcagaggaagagaagcagcgaatgccttgatggc

SEQ ID NO: 174925 - DNA, 50 bp, Homo sapiens
cggggtgctgcagatcctgttccaggtcgcaatggaagaagagatcgccg

SEQ ID NO: 174926 - DNA, 101 bp, Homo sapiens
ctagccactttgcattgactggaaacaatggcatttacagaaagagtcaacagcagtggcaacaggttaatgttcgtgaagaaattgaagagttttttcca

SEQ ID NO: 174927 - DNA, 90 bp, Homo sapiens
tttgtgatgaagcaggctctaggaggaacctagaaagattgtacaatgaatggtgattctcgtgctgcggtggtgacctcaccacccccg

SEQ ID NO: 174928 - DNA, 51 bp, Homo sapiens
tgcattcaacattcaggctatcaggtcggcagataggatcaccattcagga

SEQ ID NO: 174929 - DNA, 100 bp, Homo sapiens
gtctatgccaggcgcatctcaggctccaccgaggacaccgcgtccagcttgtgtggcgaggaggacacagaggacgaggagctggaagccgcggccagcc

SEQ ID NO: 174930 - DNA, 82 bp, Homo sapiens
aataaagccaagctcatctctgagacccggaggaggttcgaagctgagtatgtgacagagtctcaccgtgttgcccaggctg

SEQ ID NO: 174931 - DNA, 82 bp, Homo sapiens
tcttcctgggaccaggtcttcaggacagtgtgagctaggtccagaacacatattacataatggagccgggagacagactagg

SEQ ID NO: 174932 - DNA, 50 bp, Homo sapiens
gtacctgctttgcttctctgcagagtgtgccctggaggatgaaacgtatg

SEQ ID NO: 174933 - DNA, 82 bp, Homo sapiens
cggccggccagccgaagatggtggcggctactcctcctgcccagctcaacattggcaatgtgctccctgtgggcaccatgcc

SEQ ID NO: 174934 - DNA, 74 bp, Homo sapiens
gcagatagccagcccatacaagatcgtgaaaatgtttataggaggccttagctgggacactacaaagaaagatc

SEQ ID NO: 174935 - DNA, 74 bp, Homo sapiens
aagggacttgcacttatcttctgcattttgcagtctttggcattgacgtggatttgttaaggattccaagtaac

SEQ ID NO: 174936 - DNA, 75 bp, Homo sapiens
gtgactgctcaggaaattttccaagacaatgataacaatccatattcctcatttggagcaactctggtgagggat

SEQ ID NO: 174937 - DNA, 83 bp, Homo sapiens
ctgaaggacgcgcaggagaagctggagctcacggagaagaaggcctccgacgcgtctacggtgacgtgcagcgcgtgaagatc

SEQ ID NO: 174938 - DNA, 119 bp, Homo sapiens
cttacaggcgcctgcccccgcaaccgattcgaccactccctagatttggtttttcgttggaatatacgttgcacatttatggcgattctgagtgtgagggcagacttctgccaggctca

SEQ ID NO: 174939 - DNA, 87 bp, Homo sapiens
gaggattgtaaatgcaccaatcagcatgctgtgtctagctcaaggcaaattggcccaagaactttggtgtggtctgagaaagagcag

SEQ ID NO: 174940 - DNA, 73 bp, Homo sapiens
taccttgcccaccaacttcagagatttgtccaagggtattgcaggcaacaaggacctttcatacagggcagcc

SEQ ID NO: 174941 - DNA, 100 bp, Homo sapiens
tgggagacaagaagcccccggagtcggcggatgtgatgctggtacaacccagagtagaatttattctgtctttcattgaccacattgctggagatgagga

SEQ ID NO: 174942 - DNA, 98 bp, Homo sapiens
acagcggcggcgagaggatgaacaacaagttcgacgcgagtcggagaggatggcaggggccggaggccagcaccaccctccgggcgccgctggaggag

SEQ ID NO: 174943 - DNA, 98 bp, Homo sapiens
gtcataagaccgcgaccagacaggcggcgccatcttcgaacttagacttccggaaggactttggcgagggtgatcaatgttgatgggacgaagaggcg

SEQ ID NO: 174944 - DNA, 82 bp, Homo sapiens
acagggacatggccacctgggacgaaaagtgagagggtccaagcctggtaagaatgtccagcttcaggagaatgaaatcaga

SEQ ID NO: 174945 - DNA, 75 bp, Homo sapiens
aggggaccctgaaagaatacgaggaattggtggagagaaggcgcaccatgatggaagatttccggaagtaccgga

SEQ ID NO: 174946 - DNA, 100 bp, Homo sapiens
aacaaccacaaacaaaaagcctggccagatactatttctctggctagtgctcaagaagattataatgccccggactgtagattcattaacgttaaaaaag

SEQ ID NO: 174947 - DNA, 100 bp, Homo sapiens
ataaagacctaacaagcctagaaaccacgtcagaaatggaagcaggaagtcctgatccggacaaaggacagagtctttgacagtatcagccacctcatca

SEQ ID NO: 174948 - DNA, 100 bp, Homo sapiens
tcctattttttattatgttgcacggagggcgtctctggccgagcctctttttgtggaaaacgacagcagcagcagtggcctggaagacgccaccgctaac

SEQ ID NO: 174949 - DNA, 83 bp, Homo sapiens
caacgcctggctcggagcagcagcctctgagtgagtgacctgcaggaagaaggcaagaatgccatcaactcaccgatgtcccc

SEQ ID NO: 174950 - DNA, 82 bp, Homo sapiens
ccggaacccgagctggagctgaagcgcaggctgcggggcgcggagtcgggaggtgctggagaatctggtaaaagcaccattg

SEQ ID NO: 174951 - DNA, 134 bp, Homo sapiens
ccagggcttgggaaggggaaggaaacctctctgaaatctgacacctgctctcccggcaaggaaacttcgcaggctggtctatgctccatcagcaagcactgccgactacaatagggactcgccaggctatcctt

SEQ ID NO: 174952 - DNA, 75 bp, Homo sapiens
tttcagatgacaacgcccgcctcccctgcttcaacggaagggtggtatcctggcttctccaggcagccaccaact

SEQ ID NO: 174953 - DNA, 100 bp, Homo sapiens
tcccacggtcaagcgatctgctggcctcggcctctcaagggtaaactagcgctcctttccgtaaccacgggaggcacggccgagatgtacacgaagacag

SEQ ID NO: 174954 - DNA, 98 bp, Homo sapiens
ctcagatgatgatgaacagagaacctttcaagatgaaggacagaataacgggctcccagattcacaagccccaccaagaggatcaccccaggaacgct

SEQ ID NO: 174955 - DNA, 75 bp, Homo sapiens
cactgtcgctggacaaggacgatcaacgcactttcagggatgtggtcaggctggagtacaatggcacgatctcgg

SEQ ID NO: 174956 - DNA, 83 bp, Homo sapiens
tcccgcgggacggcgcggcagcagctgacctcgcaggtttctgagtcccttcaacatgatcctgggaggaatcgtggtggtgc

SEQ ID NO: 174957 - DNA, 100 bp, Homo sapiens
tgaacacccatgggaggtcatgcctgatctgtacttctacagagatcctgaagagattgcaaaagttgagaagctcaaaccattagaggtagagctgcga

SEQ ID NO: 174958 - DNA, 75 bp, Homo sapiens
gtagaaatgccgccaagaggatgcgtctggagagacagcagactctgggacatctggagaaagctgtagtcttgg

SEQ ID NO: 174959 - DNA, 100 bp, Homo sapiens
cacgggtggtgaggaaccaacggagtacaagcgcaagctagccagagtttccctggtgcgcaaagaactcaggtcccggatccagagcctgccagactta

SEQ ID NO: 174960 - DNA, 74 bp, Homo sapiens
ttatgaatctcaggaacaccaccttctgtcagacaaagaggcagctgaacgtctttcaaaaacagtagatgaag

SEQ ID NO: 174961 - DNA, 136 bp, Homo sapiens
ttaaaaccaaagtgtcagcacctcaacaacatttttttttggcttaacaaaacatcaaacggcatacaaatggaaaataattgctgccttttgcatccgcgttggctccgtccccaggatcttcccggttcaggga

SEQ ID NO: 174962 - DNA, 100 bp, Homo sapiens
agacattgatcctgtccagcgctatgtcccactaaaggatcaacgtaacgtgagcatgaggttttccaatcagtttgtgaatagcacaatggaagaagct

SEQ ID NO: 174963 - DNA, 100 bp, Homo sapiens
gctgattcggtactgctttctgctgccgctcagctatatcgagaagtttactgactttcttcggctctttgtgagtgttcacctaagaagaatcgagtct

SEQ ID NO: 174964 - DNA, 83 bp, Homo sapiens
ctgaaggccctacgggagaaaaccgggcgcaaggtatggcctcacaagtcttggtctacccaccatatgtttatcaaactcag

SEQ ID NO: 174965 - DNA, 100 bp, Homo sapiens
aagctcgacttctcaatcccaagtggccaaaggatttaagtgccctgtatgctcaaaatttgtatcctcagatgaaatggatttgcatcttgtaatgtgt

SEQ ID NO: 174966 - DNA, 83 bp, Homo sapiens
ctcgctgtcatcctcattgctactgccctctgcgctcctgcatctgcctccccatatcatgtttgagaccttcaacaccccag

SEQ ID NO: 174967 - DNA, 100 bp, Homo sapiens
tgaagctgaacttgagaaactgtccttatcagagggaggtccgggttgactctgccaccatcccccggcaggacgaagttccccagcagacagtggcccc

SEQ ID NO: 174968 - DNA, 75 bp, Homo sapiens
tcaattaatccagaagatagtactttccctgaaggacagaataacgggctcccagattcacaagccccaccaaga

SEQ ID NO: 174969 - DNA, 100 bp, Homo sapiens
gacctcgctgtacgccgagcacccaggcgactgcctcatcttcaagggaaccttctgaccagcctcatgggctcctcagagcaggaggatggggaggaga

SEQ ID NO: 174970 - DNA, 98 bp, Homo sapiens
aacaccaggaggaccagctggatcgacccccgggacaggacatagttgacggcaaggaaaaagaaggacaagaacttggaactgcggattgctctgtc

SEQ ID NO: 174971 - DNA, 75 bp, Homo sapiens
cagccacctcgcgcgcgcctccaggagcaaggatggagaggctggtgattttacaacgagatgctgctctccata

SEQ ID NO: 174972 - DNA, 98 bp, Homo sapiens
gaccgtgcctcaccagatctttggccagaacaatgtatcccatgtataaccgattgtgtaatggctgaaattgagaaattggggcagaagtatcgagt

SEQ ID NO: 174973 - DNA, 100 bp, Homo sapiens
tagaatcaactgagagagatgcttaaaaatcaccagttactttaatgaatcaaacatctggaaattaccttaatatgcaagactctcaaggagtactttc

SEQ ID NO: 174974 - DNA, 88 bp, Homo sapiens
gggacgtgccacagatcccatcagaggcaccccagacacaacttaattcagtgcacaaatgagatgaatgtgaacatcccacagttgg

SEQ ID NO: 174975 - DNA, 100 bp, Homo sapiens
gtctcatttctatgcacagtgtttctcaggaggatggagctagttagctgtctgttgtctgtagcccagatggcaccgaaagcgaaggaagctcctgctc

SEQ ID NO: 174976 - DNA, 98 bp, Homo sapiens
gtaaatggtcttaaaatggttgatgagccaatggaagagggagaagcagattcttgtcattggctggaatggctggtactgcacatatcgatggagac

SEQ ID NO: 174977 - DNA, 101 bp, Homo sapiens
gcgagagctggacacagtcaccttggaggattcttgccagctctcattactgcagttctgaccaatcatcttgcctgggttccaacagtcatgccaaatgg

SEQ ID NO: 174978 - DNA, 88 bp, Homo sapiens
aagggaccagatgcttggaaaatatggaatgtcatctacgaagaaaactgttttaagaagaggagcaggacttggatggtgagaaggg

SEQ ID NO: 174979 - DNA, 97 bp, Homo sapiens
tgcgggctggtccgggctcctcaggttcagacccgaccgttatccagtcggttcgtggagaggagagatgtcatttgtcagagtgaaccgctgtggt

SEQ ID NO: 174980 - DNA, 54 bp, Homo sapiens
agacctgcgtggtgcactacaccggatgccgcagctgagcctgtcctggctggg

SEQ ID NO: 174981 - DNA, 75 bp, Homo sapiens
aagaagtaaaaacttcagccttggacaaaaacactagcagaactatttccgagcccctgccactgatggacctgt

SEQ ID NO: 174982 - DNA, 75 bp, Homo sapiens
aaagacccagtgaacaaatccgggggcaaggccaaaaagaagtttggaaactctggaggtcccctggttaacctg

SEQ ID NO: 174983 - DNA, 75 bp, Homo sapiens
gaaatgattgaatctggtgttatcaacttaaaagatgccacctctaagtctctagtgatccctgaaaagttccag

SEQ ID NO: 174984 - DNA, 100 bp, Homo sapiens
ctctttcctgctggctttggagcctgagctcgaggcccggctggcgcacctgggcgtgcagatgaaatttgtggaatctattctgagcaacaatacaaca

SEQ ID NO: 174985 - DNA, 101 bp, Homo sapiens
cggcaaagttttgcagatcttcaacaagaggacccaggagaaattcgccctcaaaaatgtctgtaaacctgtggaggagacacagcgcccgcccacactgc

SEQ ID NO: 174986 - DNA, 127 bp, Homo sapiens
ccctctttgagcaacagccacgctggctgctctaccacgaacttgtcttgaccaccaaagagttcatgagacaggcccccccaggatgcaatggcgcagcccccccggctgagccgctctggtgcct

SEQ ID NO: 174987 - DNA, 50 bp, Homo sapiens
aggggtatagacagagcatgccacacaagagttttgctcttgttgcccag

SEQ ID NO: 174988 - DNA, 75 bp, Homo sapiens
ctggtcttgctcggccgatgaagtgcagaggtttttttctgattcacagagttcaacagcgtgttacaattaaga

SEQ ID NO: 174989 - DNA, 100 bp, Homo sapiens
caaagacaaatggaaagttcctattgctcagctacctctgaaacttgaatctgaagtgatggagaatggggataacttctcagtgggggaacggcagctc

SEQ ID NO: 174990 - DNA, 106 bp, Homo sapiens
gcctcgcccgccgtgagcgcccggagcggtccgcgagccaccgaggcccaggaaagaccacagcaagattctttcattcgtctcctcctagcctgggggaccaggc

SEQ ID NO: 174991 - DNA, 83 bp, Homo sapiens
cgtctctcccgccatcatcttcgtgggaggaggagctcgccaagcgcatgaaccttcagaccatggtggacacgctgcaggag

SEQ ID NO: 174992 - DNA, 101 bp, Homo sapiens
tgcttctcctggccgcagttgtaggagtggcttgctttctctatggatatcttaatcaagataactgtacatggagtggagcacatgatccagaagaacca

SEQ ID NO: 174993 - DNA, 117 bp, Homo sapiens
gtcaacgacctggcggtggggctgcggcgcctgggactgcaccgcaccgagggcgagctccagcaggaagggcccagcctcacctacgagacctgcagccccccgaccagctgaggc

SEQ ID NO: 174994 - DNA, 82 bp, Homo sapiens
ccgcccgaaaacccggagtgccccgcacaggtcgaaatgagaaggggcagctgggacatggtgacaccaagagagtagaagc

SEQ ID NO: 174995 - DNA, 75 bp, Homo sapiens
ggactccggaacagcaagaactgcaccgaaccagaaggacagaataacgggctcccagattcacaagccccacca

SEQ ID NO: 174996 - DNA, 99 bp, Homo sapiens
gctgtaaactctacaaagggctgtcggatgcactgatctgcacagatgacttcattgccaaagttgttcaaaggaagccattaatttgctagaaccaat

SEQ ID NO: 174997 - DNA, 51 bp, Homo sapiens
tttttgatgaaattgtagagaactattcaagtcaatctgaaagtcccagcc

SEQ ID NO: 174998 - DNA, 74 bp, Homo sapiens
cttcaccctggggctccccactggagcttctaagtaggacatccttagaaactcagaagttggatctgatggct

SEQ ID NO: 174999 - DNA, 100 bp, Homo sapiens
aactgaacaacaatgaattggagaccattccaaatctgggaccagtctcggcaaatattacacttctctccttgatgcatctctcatggttgaagaagtg

SEQ ID NO: 175000 - DNA, 100 bp, Homo sapiens
gatggttcagttgactattgcaaagtaatagtagacgtcgccatgaaagtgaagaaggagatagtcacaggagacacaaacacaaaaaatctaaaagaag

SEQ ID NO: 175001 - DNA, 101 bp, Homo sapiens
cgagctgcggctcggacgccagcggacacgcgggcgaggacttggatgttgtgggtgatggtatgcagtgtcctccttcacctttgctttttgatccttca

SEQ ID NO: 175002 - DNA, 51 bp, Homo sapiens
cccgagttatcgggaccctgttggatctccaagaaggagaagcttctctcg

SEQ ID NO: 175003 - DNA, 82 bp, Homo sapiens
gggaaccctggtcaccgtctcctcaggtagctacagcaagctgggtagcaggcagatccaaaggatatcatgaagtttccag

SEQ ID NO: 175004 - DNA, 83 bp, Homo sapiens
ctcgtgagcgacccggacaccgacgcgctcatctgctggagcccgcccagctcaacattggcaatgtgctccctgtgggcacc

SEQ ID NO: 175005 - DNA, 98 bp, Homo sapiens
ccacagaaacccggactgagaggcagcgagagggaagcccagaacctcatggccctcaccaatgtggacaccccattgaaaggtggacttaatacccc

SEQ ID NO: 175006 - DNA, 87 bp, Homo sapiens
atggccgacttcgatgatcgtgtgtcggatgaggagaagattcatgttacatgtaaagctgtcctcatttgtgactatggacctatg

SEQ ID NO: 175007 - DNA, 100 bp, Homo sapiens
gaacaggggcagaaaatagcacacttttactctacgcaactgttgctttttcatgatacaaggcagatccaaccatccccaccgtggtcctacgatcagt

SEQ ID NO: 175008 - DNA, 75 bp, Homo sapiens
aagctgagaggattcctaaccttcctcttcagagagcctcaggtctccaccagctcctggccgggttcgaggaca

SEQ ID NO: 175009 - DNA, 77 bp, Homo sapiens
gaagagcgagccagcgcccggagcaagcggagctcccccaagagccggaaagacaatgcagatcttcgtgaagactc

SEQ ID NO: 175010 - DNA, 98 bp, Homo sapiens
tgtatcctacaagttgaaaattcctaagaatccagaacttgtgccacagaactacatgctgggattacaagcgtgagctaccacacccagcgaggaag

SEQ ID NO: 175011 - DNA, 75 bp, Homo sapiens
gaagtgcagaggtttttttctggtcgttccaggggtagaggaggcatgaaggatgaccgtcgggacagatactct

SEQ ID NO: 175012 - DNA, 100 bp, Homo sapiens
cagtttgccaagtgaaaaagagcgatacctctcaagtcaaagcagcaggaagataccacaatcagaccctccgcggagtttaagagagctgtgaaagtag

SEQ ID NO: 175013 - DNA, 100 bp, Homo sapiens
gctgctgatggaggaagcagaaagaatagctagagaagaacatgggtctgggaaaatcgctgtgatatcaggatacaagaccctcctgaaaggaatttcc

SEQ ID NO: 175014 - DNA, 50 bp, Homo sapiens
cgctggacagcgaggaggaggcaacgaagctcttcgtgggcggtcttgac

SEQ ID NO: 175015 - DNA, 99 bp, Homo sapiens
aagagtttgcgacgtggtaaagaaataaggcgagtacacaagcgaagactttccagctcagagagtgaagaacaaggacagggggacatccctacattt

SEQ ID NO: 175016 - DNA, 100 bp, Homo sapiens
tgagaagtacagggagcgagagctggagaagctgggattggagattccacccaaacttgctggtcactgggaggtgccaacatcgcctctggtgaggaag

SEQ ID NO: 175017 - DNA, 97 bp, Homo sapiens
caccgcggctctggatgccttctacaacgcggagtgtgaacatggctacgcctcttcattcccgtccatgccgagcccccgactgcagcattcaaag

SEQ ID NO: 175018 - DNA, 75 bp, Homo sapiens
aggatcgcaatattgccattcaggattcttggactatgtctgttacagaatgaactatgtcctatcacattgaat

SEQ ID NO: 175019 - DNA, 83 bp, Homo sapiens
ccgggggcgcagggaaggagggcgtccgagtcaacaaccgcttcgagctgacctcctgccccccgaggtctgcagtctcctga

SEQ ID NO: 175020 - DNA, 75 bp, Homo sapiens
gagccctggatggttgtgagggaagagacaggaagatggtgcccaggattcagtccccgtgggggtggctttggc

SEQ ID NO: 175021 - DNA, 82 bp, Homo sapiens
ccctgctatccccaacaagaggaaagacacacctaccaagaagccagtcaagcggccaggttaaccccaaagattggctttc

SEQ ID NO: 175022 - DNA, 49 bp, Homo sapiens
ccgagaccgcggccgggaccgaggatttctccacccaggtgaactcctc

SEQ ID NO: 175023 - DNA, 97 bp, Homo sapiens
ggggaaaactcctgaggagattcgcaagaccttcaatatcaaaaatgactttactgaagaggaggaagcccaggtgattaaaccccctctgattttt

SEQ ID NO: 175024 - DNA, 98 bp, Homo sapiens
cgaggccaagttgccatggttcaaacaagctcaagagctagaagaaggagctgctgtgtcagaggagccctctgtttctacacctgtgggttatgaca

SEQ ID NO: 175025 - DNA, 75 bp, Homo sapiens
gggaagaggcccaccctggagtaaccctcactggagaatccagagaaatttctgaataaattggcagaagaacgc

SEQ ID NO: 175026 - DNA, 85 bp, Homo sapiens
cggggcgcgggcggcggacagattgaccttcagagcgaggtgtggacactgccagcggctgcagccgacttggaatgacctggga

SEQ ID NO: 175027 - DNA, 100 bp, Homo sapiens
ccgccctggccgctcgccgcccgcccgcccgacggagacgacgccagcatgtctccggacgccaccaagccgagccactggtgcagcgtggcgtactggg

SEQ ID NO: 175028 - DNA, 97 bp, Homo sapiens
agcctcaggcgtgcgcggacggtgtgcgggtattgttgcagcatctggcagtgagactgaggatgaggacagcatggacattcccttggacctttct

SEQ ID NO: 175029 - DNA, 75 bp, Homo sapiens
catggggaaaatctccccggtgactttcagtgcaaagagccgtctcactcttctctctgaacgacccggccctga

SEQ ID NO: 175030 - DNA, 90 bp, Homo sapiens
cccgcaaggagtttggaggccctgatggaggggacggaggcaacggtggacacgtcattctgagaggtcgcaatggaagaagagatcgcc

SEQ ID NO: 175031 - DNA, 88 bp, Homo sapiens
atatactctgcaaggcagaagcaatttctctacagatggtaaaatgcaagggatttaaggacaatgtctatcgacagagaagaaagta

SEQ ID NO: 175032 - DNA, 95 bp, Homo sapiens
cttcccagtagctggaactacagctgagcttcagtcattgtctattcctggaacttaccaagagaagatcacccacctgggacattctctgatga

SEQ ID NO: 175033 - DNA, 80 bp, Homo sapiens
cacgaagttcagcccagaggagaaactcgctcgccttcagaagacagtggacagtttgcggttgtgaagaaatgccgtga

SEQ ID NO: 175034 - DNA, 83 bp, Homo sapiens
gttcacgcacgggatccagagcgccgcgcacttcgtcatgttcttcgcgccctgcttgtgctgcattgcacctgtcctcgcgg

SEQ ID NO: 175035 - DNA, 90 bp, Homo sapiens
gcgtttggaagatctggatacctgtatggtggatgaaccgcatcaaagacttccagaagccactccagtgaccataagataaatgtcaga

SEQ ID NO: 175036 - DNA, 101 bp, Homo sapiens
cgccagcgccggcctcctccgtgcggagaagaagctgcggccgcacctggccaagggctacttctacaagtccgaacagccagtccagcaaaatgaacagc

SEQ ID NO: 175037 - DNA, 100 bp, Homo sapiens
gatcgccttgctgtcaaagtcacccagctggattcaacagtggaagagggtctcatcacaactacgtcaaggaagctagaccgagaacagcaagatgaac

SEQ ID NO: 175038 - DNA, 51 bp, Homo sapiens
aatccaaaatgcaatcaatatagctcagtcaagtccatcatctccagaacc

SEQ ID NO: 175039 - DNA, 96 bp, Homo sapiens
agataacaaggcactttatgatactttttctgcttttggaaacatactgtcctgcaagccaatggagatcttcgtggatgatgagacgaagttgac

SEQ ID NO: 175040 - DNA, 83 bp, Homo sapiens
ggaatccctacgcgtccctttgggtttagcacgatgagctcaatcggcactgggcaccctgatatgtatgagagagcagtgct

SEQ ID NO: 175041 - DNA, 76 bp, Homo sapiens
tggagctactgtactggctattggaaggaggagattctgaagataaggaggatttccagatgtgacttgcactcag

SEQ ID NO: 175042 - DNA, 51 bp, Homo sapiens
gcgcgagctggtggacaaagcgagatggggaagaagatgaaggtgatgaag

SEQ ID NO: 175043 - DNA, 129 bp, Homo sapiens
cgcaaccattgacgccatgtcgggttattcgagtgaccgagaccgcggccgggaccgaggcttccccgggcgctgcctggacaggcctgcctgcgtgctgggacatgtctggcctccaaggaccgtcgg

SEQ ID NO: 175044 - DNA, 75 bp, Homo sapiens
ctacgaccacctcttcaagctgctcatcatcggcgacagcgagctcccagctcctccagcagccgacaggaggcc

SEQ ID NO: 175045 - DNA, 101 bp, Homo sapiens
agggctgaggaaccatgtctccatccccgaccgccctcttctgtcttggaagctgaagagggaactacccttttcattccgatcaattaatacgagagaaa

SEQ ID NO: 175046 - DNA, 50 bp, Homo sapiens
cagaagcggacccagaaatgatcaaggcatccagggcattgtggatgcct

SEQ ID NO: 175047 - DNA, 98 bp, Homo sapiens
ggcttcctatgctatctctcttccgaggttctcacagagttcaggaaagtggagaatgaggacatgaataaagaccagatcttgctggaaaaagaagc

SEQ ID NO: 175048 - DNA, 90 bp, Homo sapiens
atttattcaagttacttctgattggcgactcaggggttggaaagtcttgccttcttcttaggtttgcacgcctttgacctgaggatctca

SEQ ID NO: 175049 - DNA, 57 bp, Homo sapiens
ttctgctcaggagcgcctaataccacttgacacgtacaggaatgcagaactggaccc

SEQ ID NO: 175050 - DNA, 74 bp, Homo sapiens
attcttgtggctgtcctctatatcgctcatcacaacaagcggaagatcattgctcctcctgagcgcaagtactc

SEQ ID NO: 175051 - DNA, 74 bp, Homo sapiens
gcgaggttcgagtgttgcagagcctgcggggcaagatctgtgctaactgccaaagaaaggaaaactcaaattga

SEQ ID NO: 175052 - DNA, 75 bp, Homo sapiens
ccaaggtccagggggcaaggtcgtggtaacagcatcagagaagacaaagggagcaacttcccctggacagaaggc

SEQ ID NO: 175053 - DNA, 97 bp, Homo sapiens
cccccaggcggtccttcctggcccgaccctgcccgccctggactggcagctgccgtcccactcaggcccgtatgagcttcggattgaggtgcagccc

SEQ ID NO: 175054 - DNA, 98 bp, Homo sapiens
tgccgttacggccatcacggcggccgcagtggcgtcctggagccctcctcagatgccaaggggctgagcgatccagggaagatcaagcggctgcgttc

SEQ ID NO: 175055 - DNA, 74 bp, Homo sapiens
tgcttgggtggctgaactctgatcttgacctagagtcatggccatggcagttatttaggattgaaggagtaaaa

SEQ ID NO: 175056 - DNA, 100 bp, Homo sapiens
ggctggaacgtcatggacttcgtggtcgtcctcacaggctgctgtggtctgtgtgacacttctcgacagactcgactgtgatcagatcaacttgcctcat

SEQ ID NO: 175057 - DNA, 75 bp, Homo sapiens
tcagattgaggaaacaatggaagaggttgatgagaaagctctgaagcacataacggaaatgggcttcagtaagga

SEQ ID NO: 175058 - DNA, 114 bp, Homo sapiens
gtagcctcaaactcccaggctcaagcagtcctaccatgtcagccttcccagtagctgggaccacaggaccctgatgctcccataagacagaaaatgccccttgatgatctggat

SEQ ID NO: 175059 - DNA, 75 bp, Homo sapiens
ctacatggatgccatggctgagaagggtgtgtgaagtggaattcgtcttctctgagggctccgaggcatctggac

SEQ ID NO: 175060 - DNA, 90 bp, Homo sapiens
gtacctcatcttcaccactggctgcctcacctactccccacaccagatcgacatgagcaccagcctccaggaaggccaggaggacgggcc

SEQ ID NO: 175061 - DNA, 100 bp, Homo sapiens
ttcaagcgaaaacatgaccgctgagcccatgagagatcctgaaggagctagacgagtgctacgagcgcttcagtcgcgagacagacggggcgcagaagcg

SEQ ID NO: 175062 - DNA, 108 bp, Homo sapiens
tcatgctcgcttcacggaggcaatagctagccgttttcggctttgtgagaaaccttaccatcaaacacgatggccagcaacgttaccaacaagacagatcctcgctcc

SEQ ID NO: 175063 - DNA, 75 bp, Homo sapiens
ctggccttagcacatgcagatgagaagtccttagcttcttggacacttaatgattgttggcaagaaatgtgctgc

SEQ ID NO: 175064 - DNA, 90 bp, Homo sapiens
ctcctgatattattatagcctcaatactgaggctgattggtaaagaatctcatttggacacattgagtcgggcacaactgacccaacttt

SEQ ID NO: 175065 - DNA, 74 bp, Homo sapiens
gttcgagaagttgtgaacagactcgatcgttagggaatggaaaatggctttgtaaagaagtttgaacctaaatc

SEQ ID NO: 175066 - DNA, 100 bp, Homo sapiens
tgatccgggacctgtgccaggcagacaaggtgatacccatcgccttgctgagcctcctattccggtgctcgatcactgaggctcaggcacacctggctgc

SEQ ID NO: 175067 - DNA, 75 bp, Homo sapiens
tgtggagctttaccaaaaaggcctcgcacattcagttggacagcacccagtcagcttgaagagtttcaaatggac

SEQ ID NO: 175068 - DNA, 132 bp, Homo sapiens
caattttttgcatagcttcaacatccctatgcagttaaaaatatacaacattgaagatcggacacggggggcagctggcattttatgctatgtgggagcctatgtcttcatcacttatgatgactatgacca

SEQ ID NO: 175069 - DNA, 100 bp, Homo sapiens
aggatctggtgtaccaggcgaagctggccgagcaggctgagcgatacgacgattttgatccaaacaatatcttcaaggcattctttggcggtcctggcgg

SEQ ID NO: 175070 - DNA, 90 bp, Homo sapiens
tcggggttctgaagttcataccacctccgcagacgcccccaaacaagccaggtcagagcagcccaccatgggatggggagggggtggagg

SEQ ID NO: 175071 - DNA, 101 bp, Homo sapiens
gaattttcatctattgaagaaaaattcaaaattattgagagagctgaaaaatttggactcccgccagtgaaaataatgttgagtttccatgaagaacagga

SEQ ID NO: 175072 - DNA, 100 bp, Homo sapiens
gggccctgcgccggaggaggaggaccaggcccgcgggctcagctctcgccgccagcgggccgcagaattcctagaggacctgtgcaacaacctcttgagg

SEQ ID NO: 175073 - DNA, 51 bp, Homo sapiens
gcgagcccgaggacatggagatggaagcaaagtgcctgcattcgtgaggat

SEQ ID NO: 175074 - DNA, 100 bp, Homo sapiens
ctgctgcccgtgctgggcgtggccaagcaggacacggtgcgcgtggccttctgctccgtccctgaagaggaaggagaaggaatatgagcatgaaatggag

SEQ ID NO: 175075 - DNA, 75 bp, Homo sapiens
tggctaatggcatttacaggaggtttgttgataagccggggcccttcgtgggaccctgcggtcactggatcaggc

SEQ ID NO: 175076 - DNA, 50 bp, Homo sapiens
agcctccagagtagctgggattacagcttgaagctcaactagagaaaaag

SEQ ID NO: 175077 - DNA, 50 bp, Homo sapiens
cagtgctcaaactcaccgaccagcagtgtttggccagcgcttggatgaga

SEQ ID NO: 175078 - DNA, 83 bp, Homo sapiens
cgcccatgctggagaaggagaagtttccgcaggactacttccccgaggctatgactttgcagccgtcctggagtggttcgcgg

SEQ ID NO: 175079 - DNA, 110 bp, Homo sapiens
ctacagtgagggtttggagaagctgaaggacatgaaagtgctgtacaccaaccgagcccagatgagtgatgtgtctgcaggaggagccactgtttttcctgaagttggag

SEQ ID NO: 175080 - DNA, 50 bp, Homo sapiens
cgacagaagcgactttggtgagactctgacggtgatcgttggctcctact

SEQ ID NO: 175081 - DNA, 100 bp, Homo sapiens
cggcgacagtggcggcggcgccatggcagggcttgcaggtcgccactgggacactgtgaaccaggagtgagtcggagctgccgcgctgcccaggccatgg

SEQ ID NO: 175082 - DNA, 108 bp, Homo sapiens
cagtttgatctcagactgctgtgctagcaatcagcgagactccgtgggcgtaggaccctccgagccaggaccaacacttgtcagcatggcacaatcaggcatttctct

SEQ ID NO: 175083 - DNA, 82 bp, Homo sapiens
cgagctgctggaggacgagggccagctgacggagatggtgcagaagatggaggagacccaagaaactcgagagatcttacat

SEQ ID NO: 175084 - DNA, 51 bp, Homo sapiens
aaataattgaaggcactgaagttgtccagatcgaacggttggaagtaagca

SEQ ID NO: 175085 - DNA, 49 bp, Homo sapiens
agaagtagaagatcctcataaagccaaatacagtttatgtaacttgatg

SEQ ID NO: 175086 - DNA, 88 bp, Homo sapiens
ggcccgctgcccgcggcgccagcaccatgaagcatcagatggtgaaggagaaggagacacagaagtgatgcagcaggagacagttcca

SEQ ID NO: 175087 - DNA, 100 bp, Homo sapiens
tgacctttaggtgcttttatattcatctcaaaaacaaaattctgaactcaggacttggcaagtgatctttgcagagctgtttcaacttccagcaccccct

SEQ ID NO: 175088 - DNA, 50 bp, Homo sapiens
tcattgatgtactcctgctgagcaagaaaatatttacaccagcagctcca

SEQ ID NO: 175089 - DNA, 50 bp, Homo sapiens
atattttggaaagcagtttttaagacaacccttcccagcctggatcagaa

SEQ ID NO: 175090 - DNA, 82 bp, Homo sapiens
ctcctccgtcaccagccacatctaccaggagggtgaggacaaaatcttcttaatcaacaagcttcactccatctacgagagg

SEQ ID NO: 175091 - DNA, 97 bp, Homo sapiens
ccgctgctgggagatgggcctactcgcccgccaccctgcgctgccgccgctctgaggagttaaaggttgctgcttttgctcagaggacatccatgac

SEQ ID NO: 175092 - DNA, 100 bp, Homo sapiens
tttgaagagaaaatggaggaagcagaaaccagaaactttaaatcttgagaaaagaagattgtctatcatgaaggagggctacaggggaagaattgaaagt

SEQ ID NO: 175093 - DNA, 95 bp, Homo sapiens
agaaaggtcccactgcagccctccaagcagtgaacttcgaccacttccagatccttcgggccattgggaagggcagctttggcaaggtaaggcag

SEQ ID NO: 175094 - DNA, 98 bp, Homo sapiens
acagttatgagcctcagtccgatgagaagccaaattggcagagaatgcttgtaccctggctgacctgacagagggtcaggttggcaagctactcatcc

SEQ ID NO: 175095 - DNA, 100 bp, Homo sapiens
atccaaagcatgtctgcaacccagccattttcaggtgtatgtggaatttgatgatcttgaatgggataaacgagagtgggttaaagtttatgaagatttt

SEQ ID NO: 175096 - DNA, 50 bp, Homo sapiens
tggctctcttggccctcctgaaatgggtcttactgaagtaacacaaagct

SEQ ID NO: 175097 - DNA, 75 bp, Homo sapiens
cggatattcagttgcacatccccacatcaatgcactgccaatggtatggcccatctcctgtacgcttggagcgac

SEQ ID NO: 175098 - DNA, 75 bp, Homo sapiens
cctctcaaaatgctgggattacaggagcatgttaaatgggttcatgctgaaatggtaaataaaaactccgagtta

SEQ ID NO: 175099 - DNA, 50 bp, Homo sapiens
agggcttcctggcccgaaaggagagcctgccataggaaaaggatacagag

SEQ ID NO: 175100 - DNA, 98 bp, Homo sapiens
agaggatctggtgtaccaggcgaagctggccgagcaggctgagcgatacgacggtaccagcgtggctgccgatctttggctgcaaatctgcagctcct

SEQ ID NO: 175101 - DNA, 101 bp, Homo sapiens
acaagactatgaacaagcagtgtttcatttacagcagcttttagaacgtaagccagaacttcagtgaagatttcatacattggcctcatgacccagagctc

SEQ ID NO: 175102 - DNA, 75 bp, Homo sapiens
tggccgtcaaggagctggacctctacctggcctacttcgtgcgtgagcgagtgacctgaccaacggtgcagatgg

SEQ ID NO: 175103 - DNA, 100 bp, Homo sapiens
gttgcaaactgttgcaaagaaattcgacttcagtaatttgagtagtagggccatgctatgatagtggaagcttatccaaaataatagatccagaagaagt

SEQ ID NO: 175104 - DNA, 100 bp, Homo sapiens
ccaggctgtctttcacaatccaggctaacaacagaatatccaggtcactatggtgaggaaatggacatgatttcctacaattatgattactatatccgag

SEQ ID NO: 175105 - DNA, 99 bp, Homo sapiens
ccggaggcggccgccagcggatttgccacccagtcactcagcctctgaagaagcttcgggttcagactcaggcagtcagtcggaaagtgagcagggaag

SEQ ID NO: 175106 - DNA, 96 bp, Homo sapiens
gccgccgtcggcagcaagaacagagagagaggtggacagatctgagagatactgaggacctcagcagccatgtcgaagccccatagtgaagccggg

SEQ ID NO: 175107 - DNA, 75 bp, Homo sapiens
gtcgcgcggaggcggaggcttggggaactgtggctgcaccatctgtcttcatcttcccgccatctgatgagcagt

SEQ ID NO: 175108 - DNA, 100 bp, Homo sapiens
ggaaaactccttctacgtggacaccgtgcgtgccttccgggacaggcgttacgagttcaaagggctccacaagctgcctcaagggctacgtcaaccacag

SEQ ID NO: 175109 - DNA, 74 bp, Homo sapiens
gctgaggacttcaccagcgctggcttgtccagccggaagccctgagggcagctgttcccactggctctgctgac

SEQ ID NO: 175110 - DNA, 101 bp, Homo sapiens
cctggctagaagcagagacaccaggacagaaaagacagtgttctgctttcatggagttcacagaagagtcgaggagttgctgatgtatattcaagatgagt

SEQ ID NO: 175111 - DNA, 100 bp, Homo sapiens
ggtaaaatgggtgacagcactttagaagagaaacatgattcccgtgacagaattccggcagttctctgagcagcagcctgccttccgagtgctgaagcca

SEQ ID NO: 175112 - DNA, 98 bp, Homo sapiens
tatttgtgagaggagtcggcgtttgaagaggtggaactcctagggcttttttgagagtgttgaagactgggatagtttccaagctattttggatcata

SEQ ID NO: 175113 - DNA, 75 bp, Homo sapiens
ggggcgatgcttgtgaccctgcagctcctcaaatacctggagtagaacagaaaaattattatgtctgtgttccct

SEQ ID NO: 175114 - DNA, 90 bp, Homo sapiens
gggtacgggggctggtcccagaagatggcggaggcggggcagtctgagctatcagctgaagaaagtccagaaaaattaggaacctcccag

SEQ ID NO: 175115 - DNA, 75 bp, Homo sapiens
tggtccaagctgatggggcattcacaacttagagctagtcagactttagagaatcagatgggtgactcaaatatc

SEQ ID NO: 175116 - DNA, 138 bp, Homo sapiens
caaaaaccctgcaggagaacttcttgaaccaaacgcaacagaatagaaaaggaatgcaggataacccagttaatgactttacaccaaatctcagaagattcagaacttagatgagtggggcccaggacaggaaccctg

SEQ ID NO: 175117 - DNA, 75 bp, Homo sapiens
catgcccagacctttttggccctctgtgctacaggtcagaccgggaagctgatgtatgtgatgcacaactcagag

SEQ ID NO: 175118 - DNA, 100 bp, Homo sapiens
agctgacatatgaaggactcattgatgaaatttatggcattcagaacaaagtgacagtgtgttcgtgttcttctgaggtgtcagcaaagtttgttctaca

SEQ ID NO: 175119 - DNA, 124 bp, Homo sapiens
tttatcttttgttcagccaccatgaggatgcacaagatttttcggacactctgacctggtcacagccagagacacttggaaatcctccatctccccggcatggtcatgtgatggtggcagcagg

SEQ ID NO: 175120 - DNA, 100 bp, Homo sapiens
cccggttccccggcccacagtgggggtgtgcaaacccgagagaactgggttattcagcttctcaaggctggaaaagcgaaggaagtttcctacaatgcac

SEQ ID NO: 175121 - DNA, 85 bp, Homo sapiens
ctcagcctcctgagtagttgggattacaggaaacttgagatggaagcaaagagaaaacaagaagaagaagagagaaagaaaaggg

SEQ ID NO: 175122 - DNA, 74 bp, Homo sapiens
cgacaaaggtcgcctttgctactaccgcgactggctgctgcggcgcgagtgtcagagatggctttggattcccc

SEQ ID NO: 175123 - DNA, 88 bp, Homo sapiens
aggagaaattatgttctacaagaaaaacgctgcttttctaacccaaactgtatgtcttgatgacactacagtaaagtttgaaatatgg

SEQ ID NO: 175124 - DNA, 50 bp, Homo sapiens
cgggcgggaagatggcggctgggttcaatgtgccgcatactaagtccctg

SEQ ID NO: 175125 - DNA, 82 bp, Homo sapiens
ccaagagggtgttcgactgctagagccgagcgaagcgagtggagtcaacatatcaatggagcaagtcacagtcgtcgatgcc

SEQ ID NO: 175126 - DNA, 83 bp, Homo sapiens
gcccgactgccccaactgcaactacaggagaaggcaactttgtccctaacaaaatgtggaagggattagtcaagaggaatgca

SEQ ID NO: 175127 - DNA, 83 bp, Homo sapiens
aagacctcattcaattgatgggagagtagttgagccaaaacgtgctgtagcaagagagatcgtccagtgacttatctgtataa

SEQ ID NO: 175128 - DNA, 97 bp, Homo sapiens
cttcggagtgcttatgccaagaggaacagcagtgtaaatgactcagtgcaccaggtggcggagcgggtggaggccctggggcagtttgtcatgaaga

SEQ ID NO: 175129 - DNA, 100 bp, Homo sapiens
ccagggactctttggggtgaaatgtgaggcgtgtcaccagtttatcacagggaaagtcctggaggccttcccttcttcttggtggtgttcttgagtaaga

SEQ ID NO: 175130 - DNA, 98 bp, Homo sapiens
gccacccccaggacgccttctgcaactccgacatcgatcaggagaacctcagtctgacgacattgaagctagccgaatgtaagtgtaacttggttgag

SEQ ID NO: 175131 - DNA, 75 bp, Homo sapiens
ttcagatccaacgaggaggaggaaggcgtgtgctgtggactgccaggaactcctgccaccgccaccggctcccat

SEQ ID NO: 175132 - DNA, 75 bp, Homo sapiens
ggaaatgaggcaagttatcctttggaaatgtgctcacactttcacagacattgggaccttcgagacagtgtggca

SEQ ID NO: 175133 - DNA, 101 bp, Homo sapiens
cagtgtgctgctgtctcatggggtcttactgatgaaggcaaatattattgcacttcttgccacaatgttacagaggatggctgtgactttgtctgccgttc

SEQ ID NO: 175134 - DNA, 88 bp, Homo sapiens
aatagctgaagaagaagaggaagtagccaaagagcaactaactgatgctgacaccaaagatgtcctcctcgcactttcttaccagccc

SEQ ID NO: 175135 - DNA, 80 bp, Homo sapiens
ggcgagcggctgtgtggatgtcggcgaagccgcgggcgagagacaagaggagcagcagcggcaccgcccctcaccctgga

SEQ ID NO: 175136 - DNA, 104 bp, Homo sapiens
cgccatgagggccctgtgggtgctgggcctctgctgcgtcctgctgaccttcgttacagatgtagagctaaaacgactgaaggatgctttcaagaggacctgtg

SEQ ID NO: 175137 - DNA, 50 bp, Homo sapiens
ctttgggaaagccactcgaaaaggtggaataacactcccatggatgaagc

SEQ ID NO: 175138 - DNA, 100 bp, Homo sapiens
aaagtctgagcgaggagtgactgccaaaaaggagtatgtgtgccagggaagtgttcgccagttactacatgaaaagataagagatgcttatactcaccca

SEQ ID NO: 175139 - DNA, 100 bp, Homo sapiens
ccaggcctgacagctctgcggctcgggccctgaggaatgtgttccagaagatctagaactgaagaagaagatttttgctcagttagattccatcattgat

SEQ ID NO: 175140 - DNA, 75 bp, Homo sapiens
ccataaagcattgcaaatgctcctgagccagtcgccactgggacactgtgaaccaggagtgagtcggagctgccg

SEQ ID NO: 175141 - DNA, 101 bp, Homo sapiens
cggtggcagcgccatggagccgggggaggtgaaggaccggatcctggagaacatctcgctgtcggtgaagaagagggctggtttttaagtttggccgcact

SEQ ID NO: 175142 - DNA, 104 bp, Homo sapiens
agaacatccacagaatagacctgaagacaaaaatccagaagtacaagcagtctgtgtctccagaacgctatagctatggcacctccagctcttcaaagaggaca

SEQ ID NO: 175143 - DNA, 99 bp, Homo sapiens
ttctcagggtggagatgtcagcccttcagaaacagtattacaagttctcccagcagagatgtgggtccttccctgggtctgaagaagtcaagctcgttg

SEQ ID NO: 175144 - DNA, 50 bp, Homo sapiens
cgggattggaccgacgcagccatgggaaagaaaccttccaaggaaagatt

SEQ ID NO: 175145 - DNA, 100 bp, Homo sapiens
tgaaactcagtgagagcccagagcctggcaggagtccagaaagccagatggctgaacatcagaatcgggaccagtattcacatctgctaagtgatcattt

SEQ ID NO: 175146 - DNA, 97 bp, Homo sapiens
gtgctgtttttgattggcgcctttctcattattataggctccctcctgctgtcaggctacatcagcaaagggcagttctcagccctgacagaggtgc

SEQ ID NO: 175147 - DNA, 99 bp, Homo sapiens
ccacttttgcaagggcgaggtcagccccaaactaccgacaccattcgcttttcacccaagatgatttgatgtcttataaaactctgatgaaccatgatg

SEQ ID NO: 175148 - DNA, 88 bp, Homo sapiens
catcctttcattgagtgggctcggccaccccaaccttctgactctgaacaggaagtgcctcctggaaccacagagtcggttcagtctg

SEQ ID NO: 175149 - DNA, 80 bp, Homo sapiens
actgtctctgtcctggaagcagaaggagtctttgaaaaagcaaatccagtttgctgatgacatgcaggagttcaccaaat

SEQ ID NO: 175150 - DNA, 75 bp, Homo sapiens
agagatcctggccacaggcagtacggcatggtgctcgttcacagccatgaatgaaccacagtgcttctacaacga

SEQ ID NO: 175151 - DNA, 82 bp, Homo sapiens
caagagcggcggtagcgcaggggagattacttttctggaagcggaaggagagttttacatggaagtggcttacagaaacttg

SEQ ID NO: 175152 - DNA, 100 bp, Homo sapiens
cagccccgtcctcttgtcctcctcagcctcgaatagctgaaacctttggacttcaagaaaattatatcaaaattgtcataaataagaagcaactacaact

SEQ ID NO: 175153 - DNA, 82 bp, Homo sapiens
cggctccctgctgttcgagtacctgcccagaggggcccactcgctgtccctgcagagcagagcgggcggaggaccccgggcg

SEQ ID NO: 175154 - DNA, 50 bp, Homo sapiens
ttcaccaagcgcttcgctacaagcacaggtgcagcagtgatcaatggctc

SEQ ID NO: 175155 - DNA, 82 bp, Homo sapiens
ctactacgccaaggaggtcacccgcgtgctaatggtggaaacccacaacgggcaagatcttcagctggaagggggtgccttg

SEQ ID NO: 175156 - DNA, 100 bp, Homo sapiens
ctgcaatcacggcttactgcagccttgacctcctgggctcaagtgatcctcccacctcagcttcaccaagcaatatcatttatgctggctgaaatggcaa

SEQ ID NO: 175157 - DNA, 75 bp, Homo sapiens
ccattgtactgcaaaaaccagatccagtttgtgtgttctctgtgcaaataccggaccttctatgaggacgagatg

SEQ ID NO: 175158 - DNA, 100 bp, Homo sapiens
ccaagatgcaggaatcaggagagcaaactataagtttcctagaggaagttctggcttctggactgcacagccgaagcaaggagagctctcaagtcacatc

SEQ ID NO: 175159 - DNA, 96 bp, Homo sapiens
ctgctggctacagccctgcaggacagaagcccgaggctgtcgtgcatgccatgaagtgccctctgctgtccctgtggtgcaccaggtgagccgggc

SEQ ID NO: 175160 - DNA, 96 bp, Homo sapiens
taacagagatagagcgtttggaagatctggatacctgtatgcttggattccttagcaccaccacagctcagccagaacagaaggcctcgaatctca

SEQ ID NO: 175161 - DNA, 82 bp, Homo sapiens
gacaagccgctggcagccgcggatctcaccgccgctcaggaggacgtcggtgatgaaggagaagaagaaaaagaattcattt

SEQ ID NO: 175162 - DNA, 75 bp, Homo sapiens
ctaagaacagactgtaccgggaaaatgactgcatgttcccctcaaggccataaaattttgagtagaaaaatccag

SEQ ID NO: 175163 - DNA, 75 bp, Homo sapiens
aacacagtggatgtcgagaacggtgcttctatggcaggatatgatgtaaagacgaccgtggtttaccctgccaca

SEQ ID NO: 175164 - DNA, 100 bp, Homo sapiens
catcaacacttatttcagattggatttccagcaacaggaacagtcatggctccgatcttcatcttgaagaagagtgacattgggtgactgctgcttggaa

SEQ ID NO: 175165 - DNA, 83 bp, Homo sapiens
atggctttggcccccagcgcagtaaggcggtgagcctctccgtcactgattttaccaaatgttgcaagaactctggagttctt

SEQ ID NO: 175166 - DNA, 50 bp, Homo sapiens
gcggagcccgacgcgggcgaggccacgatgtaaaaaaagattggtctgac

SEQ ID NO: 175167 - DNA, 100 bp, Homo sapiens
aaggacccgcagggccccgggccagatttttgccactttccaggtggtcgttctttgtcctcctgagcttgggcctcgctccttgggacccctggaccag

SEQ ID NO: 175168 - DNA, 100 bp, Homo sapiens
ggagaaatgatgaagctatcagaagaaaatcggcacctgagaatcaaattttctccggtggctaaaaagttgtttgtggtaactgcagtgagtgctatat

SEQ ID NO: 175169 - DNA, 90 bp, Homo sapiens
accattttaaacaaagccgtctgtagaggatcctttccccattggagcatttggtgcccttcagaagatttgtgaagattctgctgagat

SEQ ID NO: 175170 - DNA, 83 bp, Homo sapiens
ctggagcctcagttggaagcagccgatccagcctgcggagcctgtggggcagggtgttcagacttacatctcttggatatgtt

SEQ ID NO: 175171 - DNA, 75 bp, Homo sapiens
tcagctgtgtgtccagaacgtgccatggagacgcttaacgcttttgtctggtcctctgagccccagtgagagttt

SEQ ID NO: 175172 - DNA, 82 bp, Homo sapiens
tcaatgcatcatgtcaggcagcttatgatgccaatttgtcccatgggactggtgattgcagctggaagtgcccatgaccgag

SEQ ID NO: 175173 - DNA, 100 bp, Homo sapiens
tgggtgtcacggggagtgtcgcagccctgaagttgcctcttctggtgtcaaagcttttggacattcctggggccacagttgctggtttggaaggatccgg

SEQ ID NO: 175174 - DNA, 90 bp, Homo sapiens
ctgggagctgaggaaccagatatcttgaaaagctgccagaaaggtgtctgtgacctttgaggatgtggctgtgacattcacccaggagga

SEQ ID NO: 175175 - DNA, 83 bp, Homo sapiens
cggaaacaaagttattttgctcgctcttttggtacaccagaaggccagaatggaacgacttcaaagagaacttgagattcaaa

SEQ ID NO: 175176 - DNA, 75 bp, Homo sapiens
tcctgaaccgcgcggccgaaccctccggcccgaaactgagtgcactggagtgccttgagggcatggcggccggcc

SEQ ID NO: 175177 - DNA, 82 bp, Homo sapiens
gggcggcagagcagggcggcggcgactcggtagtaaacctattgatggcaattttgctgactgtggaagtgactcatccaaa

SEQ ID NO: 175178 - DNA, 100 bp, Homo sapiens
gaaaccttccctaacactgaaaccaatggtgaatttgggaaagaatatggcaaagctgatgcaagatgggtttattttgatccaaccattgtgtctgtgg

SEQ ID NO: 175179 - DNA, 95 bp, Homo sapiens
taccttcacctggaacatcaaccacgcccggctgatggtggtggaggtgaaccctgtgcgcagggctgagatcaagttctcctcctacagaaagg

SEQ ID NO: 175180 - DNA, 110 bp, Homo sapiens
cctcgggagtcggcgtccaggctcggagcgcgacacggagactaggtggcaggtgtggacactgccagcggctgcagccgacttggaatgacctgggagacaaatacaac

SEQ ID NO: 175181 - DNA, 94 bp, Homo sapiens
gaacgaccaagagggtgttcgactgctagagccgagcgaagccaattctgtggtgttcttggtcacacatttatggagtttctgaagggcagtg

SEQ ID NO: 175182 - DNA, 75 bp, Homo sapiens
atgcaggcccagcgctccacagacaaggaggcacaggtggtggtcaccaatacaattccacatgaagtccagaag

SEQ ID NO: 175183 - DNA, 74 bp, Homo sapiens
aagcatgccctgaaaaagtatcgtcgagaagcctatcatcgattgaaatcatggcaggtccagaaagtgatgcg

SEQ ID NO: 175184 - DNA, 97 bp, Homo sapiens
agccaaatcttaccttctggaccatggtatcctggatacagccatcgttgatcgggggaggaatgtggtgtctgcttctcgagatgggacagcacga

SEQ ID NO: 175185 - DNA, 90 bp, Homo sapiens
cggagaggagcatgaatggagcaaaatggcggatcatgtgcagatcaggatcctcatgaccagccaaagagaagaagaattaggaagcat

SEQ ID NO: 175186 - DNA, 99 bp, Homo sapiens
atcgccaaatatgacttcaaagctactgcagacgacgagctgagcttcaaaaggggggacatcctcaagcctgacaggacatttgaaattaagattgga

SEQ ID NO: 175187 - DNA, 90 bp, Homo sapiens
gaactccatagatgtttctcagttggtaaatcctgcctttccaggtgccttggaacactatgttaattgcctggatctggtaaacaagag

SEQ ID NO: 175188 - DNA, 100 bp, Homo sapiens
tcctgtacagcctgcagaactccacagccacctatattgaggaagatgatgttaataattactctatccatgatgtggtaatgcccttgcctggtttcga

SEQ ID NO: 175189 - DNA, 50 bp, Homo sapiens
gagtaaccctcactggagaatccagaggtaccaggatcatctatgaccgg

SEQ ID NO: 175190 - DNA, 83 bp, Homo sapiens
gaacagaacaagaggacaggaggtgtcgttccaggtgctcttacagcctgttccaagtgtggcttaatccgtctccaccacca

SEQ ID NO: 175191 - DNA, 81 bp, Homo sapiens
cccagtctggaagagtgccagaaagctcagattttcacacagatgcagatcataaggcagcagtttcctcagttaaccacc

SEQ ID NO: 175192 - DNA, 90 bp, Homo sapiens
gaggctgcgtcactgagattgacactcagcactttgcgccaccttactctaaccaggtagttacttttggtgacgctgtccagttcccac

SEQ ID NO: 175193 - DNA, 101 bp, Homo sapiens
tttgattctaaatatggagagtatgaatgggtccataaggtgttcctccaagaaaagctggttatattgaagacctggttttgatgctgcctcagaacatt

SEQ ID NO: 175194 - DNA, 74 bp, Homo sapiens
atgaaaagtttaaaacaagaaaaagcaccagtttcaaaaacttacaaggaaggtgatgaagacgtatacgggga

SEQ ID NO: 175195 - DNA, 96 bp, Homo sapiens
gactcacccagggagaagatttactatgtatttgaaaggcttccccaaaatgggcaacttcagcttaaggtgcgcctagtagatgggaaaggcgtc

SEQ ID NO: 175196 - DNA, 112 bp, Homo sapiens
ccgggcgcggggaagtcatgctcgcttcacggaggcaatagctagccgctacattattgagcagggggtgtgtgatttggttttatgtgaagctgccttccctaagacgttg

SEQ ID NO: 175197 - DNA, 100 bp, Homo sapiens
acgcgagcggcgagccggagcgcggagcccggctcccgcaccatggaggaggacgacagctacggtacaccaggggttggaaaaaccacactaggcaaag

SEQ ID NO: 175198 - DNA, 48 bp, Homo sapiens
tcggagatgcctggaatacagtaagaaaaccagtctatccaagaccag

SEQ ID NO: 175199 - DNA, 100 bp, Homo sapiens
cgccatgccggcccggcggctgctgctgctgctgacgctgctgctgcccggcctcggggaatcatattgacaggtcatgaaaatgagaccaaaagatctc

SEQ ID NO: 175200 - DNA, 100 bp, Homo sapiens
gccgggattcgcggcccggagctcgggaccggactaccgaccagactcccggaaatcatgttggtaggatcccagtctttttcgcctggagggcccaatg

SEQ ID NO: 175201 - DNA, 98 bp, Homo sapiens
tggtgtctttgtaaaagtcaccccccagaatctaaaaatgctgcgtatagtggaaccttatgtgacctggggcacttttctgtagaaggtcagttgga

SEQ ID NO: 175202 - DNA, 75 bp, Homo sapiens
acgatgacgatgaggaagatggcatttataagacgctgtttggcatatcgaaaagaagatcgatttgatgtgcac

SEQ ID NO: 175203 - DNA, 115 bp, Homo sapiens
agtcaccacaaaaacctatcgttagagtcttcctgcccaacaaacagaggacagtgggtattataggtctctatatttgttgattaacagcaagcttccatcaagtattgaatat

SEQ ID NO: 175204 - DNA, 75 bp, Homo sapiens
ctctggctggcgttgctgcgctccgtggccggggagcaagcgccagtaagttcttggagacgtgctgatgacagg

SEQ ID NO: 175205 - DNA, 100 bp, Homo sapiens
aaaaagaggcgaaaggaagcaagcagttcagaagagccaaggaataaacatgcaatgaacccaaaaggagaaagctctgggcttgtactcctctccagct

SEQ ID NO: 175206 - DNA, 76 bp, Homo sapiens
caaaatgtcaacaaattgatgggtgtgctgatgtatcgggactaccccctggaactattcatggcccagtgctatg

SEQ ID NO: 175207 - DNA, 77 bp, Homo sapiens
ctgaaggagatcaacctgaggccgcagatgtcccagtgatctacgtggataaagaaaacaacaaagcaaagagagac

SEQ ID NO: 175208 - DNA, 75 bp, Homo sapiens
taggagaaggatgtggactgcagtgctgcagtgccaggctaaatttggccgaagatggaccaaaatttcaaagct

SEQ ID NO: 175209 - DNA, 100 bp, Homo sapiens
cacgcccgagcggcctcgcctgagctccgggggtcgtcgccccgcagggagctgacatggacccaaatcctcgggccgccctggagcgccagcagctccg

SEQ ID NO: 175210 - DNA, 145 bp, Homo sapiens
gcgccggggaccatggtgctgccggcgcctcctccgcgggcgtgaaggcggcgctcctactccctccccggactccgcggagctccactggttcaacagcctctcctccagtttcgaccccagtcacaggacacaagagaatggt

SEQ ID NO: 175211 - DNA, 98 bp, Homo sapiens
cagcccattgcaggaatgggataccaagtctcccaacaacagagacagaaatcatgttgttgatgtcagtgttgcggtcagtactcctgcaggactca

SEQ ID NO: 175212 - DNA, 75 bp, Homo sapiens
cagaaaatggacatccctttccttggggaaatgcccgcagagattctttcttgtggagaagttattcatgtgaag

SEQ ID NO: 175213 - DNA, 100 bp, Homo sapiens
tctggatggaccagaatacgaggaggaagaggtggccataccgttgaccgctcctccaactaaccaggctcattgtcatccccaagccaggccagttctc

SEQ ID NO: 175214 - DNA, 100 bp, Homo sapiens
tcctgagattccaggaggaagtactggcgaagtgctccatgtcagaaaaagtggacagggcagtgctgaaggaactgagtgaaaaactggaactggcaga

SEQ ID NO: 175215 - DNA, 96 bp, Homo sapiens
gcggacaccatgcagtcggatgatgtggtgttcccactgatgaagagcaggcgactgggttggagagggagatcatgctggctgcaaagaagggac

SEQ ID NO: 175216 - DNA, 82 bp, Homo sapiens
cttctatcagctgctgcacaagcctgattacatcaaccccagagccgtgcagctgggctcccttctcgtccgcggcctcacc

SEQ ID NO: 175217 - DNA, 100 bp, Homo sapiens
tacctttgatccagaacttgcagcaacaatagatttgaacatggaattcaatccttcagatcatcctcgggccagcacaatattcctcagtaaatctcag

SEQ ID NO: 175218 - DNA, 97 bp, Homo sapiens
aggccgtgaagaccttcaatagcgaggagaggagttcattacttcggaagtggtacaatttaatgatacaaaataaggatgaccttgccagaataat

SEQ ID NO: 175219 - DNA, 96 bp, Homo sapiens
ttgagacctttaaagacttccctcagatgggtcgtttcaccttaagagatgaggaataatccagaatggctactctgatctatgttgataaggaaa

SEQ ID NO: 175220 - DNA, 105 bp, Homo sapiens
aaaatacttatcagtatcttatatgttagcttgacctatgcagatcttattccaggtgaccaagaatatggcccaggtgaccaaagccctggacaaggccctgag

SEQ ID NO: 175221 - DNA, 50 bp, Homo sapiens
gaaatgtttgacgacactgatggtttgattgcagagggaatggcatacat

SEQ ID NO: 175222 - DNA, 89 bp, Homo sapiens
ttacagttgcgctgcccagggaccgatgttgcgcgaggaaaatgcgggacgcccaggctcagctgtcgcaggccctggaggagctggga

SEQ ID NO: 175223 - DNA, 100 bp, Homo sapiens
tcgcagcagcgtgtcgcctccggggggcgtagcaaggtaatgaaagcatgggatgctcatgtgacagcagtttgctcccaagatgccagtgaacttgtaa

SEQ ID NO: 175224 - DNA, 110 bp, Homo sapiens
ctaaagctcccattcctcccccaggtccagcccagctgccgacgcccaggaagaaaacctctatgctgccgtgaagcacacacagcctgaggatggggtggagatggaca

SEQ ID NO: 175225 - DNA, 105 bp, Homo sapiens
ttctgacagctggtgcgcctgcccgggaacatcctcctggactcaatcatggcttgttggagatgtgcctgcttcccctttgccttccaccatggtgtaagttta

SEQ ID NO: 175226 - DNA, 85 bp, Homo sapiens
aaggaagcttgcgtccacaagatattacgtcaacagcaggtgatctgtgaaaatggttcgctattcacttgacccggagaacccc

SEQ ID NO: 175227 - DNA, 75 bp, Homo sapiens
agatcctttctattcaggataacacaagtcccttgccggattttctgccgtctcttggcaaaaatggcaaataat

SEQ ID NO: 175228 - DNA, 100 bp, Homo sapiens
accagggtgggggctacggaggtggttatgacaactatggaggaggctgttctgagatgttgatggctcatgctgtgacacagcttgccaatagaacacc

SEQ ID NO: 175229 - DNA, 99 bp, Homo sapiens
gccgccggccctgagcgggacccgcgtcctggccagcaagaccgcgaggaggatcttccaggagcccacggagccgcaatggctgccatccggaagaaa

SEQ ID NO: 175230 - DNA, 122 bp, Homo sapiens
cttggtttcggcatccttcttacgtcgggtggttttactggagtattggaactcaggagcagtttttgcaagaaaggatcaaagtgaacggaaaagctgggaaccttggtggaggggtggtg

SEQ ID NO: 175231 - DNA, 96 bp, Homo sapiens
gacggacggtgatggtggtcgccgcggcggcgtgtgcgcccctcaggaggtgctaatgatgctggataactatgtaagagatttcaaagcattgat

SEQ ID NO: 175232 - DNA, 100 bp, Homo sapiens
gttgatatcggtggtaacgacggcctcagcaggcggggaagatgaaaggtccgtggtggatgactggattgaatcatataaacaagacagggacatcgca

SEQ ID NO: 175233 - DNA, 82 bp, Homo sapiens
cttcttgtatgcatactccacagcacctgcactgccagtgaaagatgtagaagataaacctgaacaacaaaccagaacaaga

SEQ ID NO: 175234 - DNA, 100 bp, Homo sapiens
ctttttcctcaatgaagttgaggttcaggaaggattcctgagattccaggaggaagtactggcgaagtgctccatggaaggaattttacagaagctacag

SEQ ID NO: 175235 - DNA, 83 bp, Homo sapiens
ttgcaggagatcgagagcaccgacaccgcctgtgtggggcccaccctccggtcaaaatgcagatcttcgtgaaaacccttacc

SEQ ID NO: 175236 - DNA, 75 bp, Homo sapiens
agtaatcacctatttcagatagttcctgtgtttcagaaagtgctttctctctgtggacatgaggattggattaga

SEQ ID NO: 175237 - DNA, 96 bp, Homo sapiens
attcaccatcaacaaagaagaccacacactgggaaacatcattaaatcggtcttactgaagtaacacaaagcttaaaaatggaaaatgaagagttt

SEQ ID NO: 175238 - DNA, 100 bp, Homo sapiens
agaagaaaaagaaggccctgagtcaaagaagatgcctcgaactaaacaaattcatcccagaaatctaagagtgttcagactgcatcacagtgcttccgat

SEQ ID NO: 175239 - DNA, 75 bp, Homo sapiens
cgagcgaacgaccaagagggtgttcgactgctagagccgagcgaagcttttgggaggtcatcagcgatgagcatg

SEQ ID NO: 175240 - DNA, 100 bp, Homo sapiens
gtgtttcaagaccaaaaaacacaataccaggcatacatttggcagaataaatgaaccagataagccaatggacacgtcagtgttatctgaagaaggagga

SEQ ID NO: 175241 - DNA, 74 bp, Homo sapiens
cctcgcaaaaaatgccaaaacttataatgagcctggctctcaagtattcaagatgatgtctaccgtagaaaagc

SEQ ID NO: 175242 - DNA, 83 bp, Homo sapiens
agtgcagctgcctcagttcttagcgcagcatccagagctgctgttggcggattgtacccacggggagatgattcctcatgaag

SEQ ID NO: 175243 - DNA, 101 bp, Homo sapiens
gcctttgttgattaactggacaaattcagcgatgacaaaaagtgatctccagccacctaattactacgaggtaatggagtttgatcccttagctcctgctg

SEQ ID NO: 175244 - DNA, 105 bp, Homo sapiens
agaaaagtaagaacaaacaaagaaacactggagatattcagaaggaacctagaaaagttgttcttcatcgtggctcaacgggccttggtttcaacattgtaggag

SEQ ID NO: 175245 - DNA, 90 bp, Homo sapiens
aaaaattatccgactcctcggaccagcaggacagacctagaggatcaagacataatgggagcatttttagacaagccaaagatggaaaag

SEQ ID NO: 175246 - DNA, 90 bp, Homo sapiens
tactgacccaaagtcacacaggatatcttctaaccataccgatgattctccgtatagctggtcttttccaccttatcatccttcctctga

SEQ ID NO: 175247 - DNA, 100 bp, Homo sapiens
caatgaatgggttgcagttaacatgactccttgagtgaactatgtgaaaataagcgtgacaatgtagtcctggcatttaaacaattgagtcaaacctttt

SEQ ID NO: 175248 - DNA, 98 bp, Homo sapiens
gaaaatttccagtatccatattcgttatgaagatgatgagtccttcaataatgttaaacagtggctgcaggaaatagatcgttatgccagtgaaaatg

SEQ ID NO: 175249 - DNA, 101 bp, Homo sapiens
cactgctctgctgtctcctgcaagaactggctcaagaaatttgcctcgaaaaccaagctttttctcctccgtgacagccagagtaatccaaaggcatttgt

SEQ ID NO: 175250 - DNA, 87 bp, Homo sapiens
gtccctgctcagtcggccaagaagccctgcccagataacaacgaacttgatgcaagtgataggtttgccaaggtcagacctctcatc

SEQ ID NO: 175251 - DNA, 75 bp, Homo sapiens
ccagaaaagaagcgaaggaagtcaaatactcagagctgtgacttgtggtccctaggggtgattatctatgtgatg

SEQ ID NO: 175252 - DNA, 100 bp, Homo sapiens
cagcaagacccgcgccgccgggacccccaggacgacgtgtacctggacatcaccgcttattttgggagaggccagccgccatgtcatgaagacactcaag

SEQ ID NO: 175253 - DNA, 75 bp, Homo sapiens
gtgcatggaaagaactttcacctgatccaggccaacaagacaatgcagatcttcgtgaagactctgactggtaag

SEQ ID NO: 175254 - DNA, 100 bp, Homo sapiens
tttcccaatatcgaactgaagaaaggagggaaggatataccagtcactatccacaatttagaggagtatctaagagacaaagcaggacctcataaggaaa

SEQ ID NO: 175255 - DNA, 122 bp, Homo sapiens
agaaggcggcggctctctggtccgcagcggcaacagtaacgaaaaacagggctgtgctggagaatctggtaaaagcaccattgtgaagcagatgaggatcctgcatgttaatgggtttaatg

SEQ ID NO: 175256 - DNA, 96 bp, Homo sapiens
ggccggagtcagcgatggtgcccggcgaggagaaccaactggtcccgaaagagattctgacaatggagatattaattatgattatgttcatgaatt

SEQ ID NO: 175257 - DNA, 75 bp, Homo sapiens
ttagaagggggtcatattagtgcttatctttttaaacaaggactcttcaggtcccgaacccctggtaatagaatt

SEQ ID NO: 175258 - DNA, 82 bp, Homo sapiens
tccgctaccctgagcaaatgacttacgctccattggattttccgtctggcccctctttgtgaaaatatgcccagcggcaagg

SEQ ID NO: 175259 - DNA, 100 bp, Homo sapiens
acacacctgttgccattatagagctggaattaggcaaatatggacagttaaatcgtcgatctgaaattgttgctaatagctctggtgaattcatcttgaa

SEQ ID NO: 175260 - DNA, 100 bp, Homo sapiens
gaggaagaggaaagaaaaggagtcaggaatgcctcttagctggagctccgttactctcatggggactttgagaatggtatctgggtgttatggatcatgg

SEQ ID NO: 175261 - DNA, 82 bp, Homo sapiens
cacctttccaaaggacgcgaccataactctaaaagggtggcccagttgaaatccttcccttcctctaccttggaagtgccta

SEQ ID NO: 175262 - DNA, 51 bp, Homo sapiens
caggaacccctggaagcctagaaatggctggagtgtaatggcacaatctcg

SEQ ID NO: 175263 - DNA, 100 bp, Homo sapiens
ttggagcacttcctattccactggattgggaaagaccatggcagctccccaggtgtgtcctggtagacaactgctcccaggagctggcatagaagcaaac

SEQ ID NO: 175264 - DNA, 147 bp, Homo sapiens
agaattgcatagcctggacccacgacggcaggaattattggaggccaggtttactggagtaggtgttagtaaggatttatgaagctgggtcggagaacaacacggcagttgtagcagtagaaactcacacgatacacaaaattgaag

SEQ ID NO: 175265 - DNA, 75 bp, Homo sapiens
tatggcttcatgggtcatgttaggaataacttatagaagttttggtatcaggatgacgctggcctcataaaatga

SEQ ID NO: 175266 - DNA, 122 bp, Homo sapiens
gttctgatgttcatgaccctccttcactttgacgccagcttcttttctggacccgagtgtatagccctccagagtggatccgctaccatcgctaccatggcaggtcggcggcagtctggtcc

SEQ ID NO: 175267 - DNA, 75 bp, Homo sapiens
cttgagcccaggagtttgagaccatcctggacaagtgagcaacggggtgctgcagcagctgtccccggcctctga

SEQ ID NO: 175268 - DNA, 75 bp, Homo sapiens
tccccgttcctggagattctgattgaggagaactacgatgacccgcacaaaacccctgcctccccagttgtccac

SEQ ID NO: 175269 - DNA, 90 bp, Homo sapiens
aaatttcagagctgcaaaattatcagcaccagcagacgtttttgaatcaactgagagaaattacggggattaatgacacccagatactac

SEQ ID NO: 175270 - DNA, 82 bp, Homo sapiens
cggaagatcggcagcggctccttcggagacatctatctcgcctgacatttaccccggtaactgctgggcatttaaaggctcc

SEQ ID NO: 175271 - DNA, 101 bp, Homo sapiens
cgaggcagctgtactaggactgggaacggagcattggggagtcagcaatgtccgttgtgttaaatcagctgctgcccatgattaagcctgtaacccagaga

SEQ ID NO: 175272 - DNA, 75 bp, Homo sapiens
gccgcgccgccaccgtctgaactaggatgtcccgacatgaagtccaatatcagatggaaatgatgcggagccttc

SEQ ID NO: 175273 - DNA, 80 bp, Homo sapiens
acacagtatacaatctgtcacctaagtcttatcgaactgccaagtttcacagccggaaacatgatcaggggcaagtcttg

SEQ ID NO: 175274 - DNA, 101 bp, Homo sapiens
agtcttttgagatcgtgattatggtgctgaaggacaaattccagaacattaaccaggtggtatttgttggaaatttcttgagaattaatacgatcgccatg

SEQ ID NO: 175275 - DNA, 100 bp, Homo sapiens
gaaccaaagactctgggactcttggtgccaacagagttactctgctgcaagaaagcgtaagattgccattcgaaaagcccaggggaaaaatgtggaggcc

SEQ ID NO: 175276 - DNA, 90 bp, Homo sapiens
cgctgcggccactgtgtgaggagaatggatcatcactgtccatggctatcgccccattccagcggagacttatgtaggagggaccttccc

SEQ ID NO: 175277 - DNA, 51 bp, Homo sapiens
catcctggaagctgggaaatggtgacatgatgacattgctaatgaagaaag

SEQ ID NO: 175278 - DNA, 50 bp, Homo sapiens
caatgagtaaacatattcctatagccgcaatggctgaaaatggtgataat

SEQ ID NO: 175279 - DNA, 50 bp, Homo sapiens
cctggtggatggcgaggatgagagatttggagcaagaggtggtggtggcc

SEQ ID NO: 175280 - DNA, 100 bp, Homo sapiens
aaacagagccgtatcataattaccgagatgccgaggaatgtgacagggctgggagtgtggccacctgccaggccgtcatgcgtgccgtgattgggattgg

SEQ ID NO: 175281 - DNA, 90 bp, Homo sapiens
cgcgcggacccaggcgcggatggcgaggccagcagtttttggctttcacccccaaccagtgaccaaagacttgaccactcaaagtccagc

SEQ ID NO: 175282 - DNA, 82 bp, Homo sapiens
cagacagcgagtggcgacgatgtgtccctggccagtgtccttccacctgtccacaagcatggggaacatcttcgccaacctc

SEQ ID NO: 175283 - DNA, 108 bp, Homo sapiens
ccgctcgtcagactccagcagccaagatggtgaagcagatcgagagcaaggtgaatgaaaactttgccattgatttgatagcagagcagcccgtgagcgaggtggaga

SEQ ID NO: 175284 - DNA, 51 bp, Homo sapiens
cgaccatctgaagcatctgcttacaagcagcattggggagtcagcaatgtc

SEQ ID NO: 175285 - DNA, 100 bp, Homo sapiens
aattctggaagcgcagcaacagcaagctcccgggcaggttgtgaccgagattcccgacgagagagactgaggggaagagaggaaggaggggcgggctcct

SEQ ID NO: 175286 - DNA, 80 bp, Homo sapiens
acccaaggaagtgactcaaactgtgagaacttcaggttctgcggcatgaggaatttgaagaaggctgcaaagctgcctgt

SEQ ID NO: 175287 - DNA, 75 bp, Homo sapiens
gaatccagaacttgtgccacagaactacagttttgatgatgatggttcagaatttcatgaacatatatttctgga

SEQ ID NO: 175288 - DNA, 75 bp, Homo sapiens
gctgttccttggccatcccaaagctattctgggggcaacagaggttgttctgttgtccccagttccagaactgag

SEQ ID NO: 175289 - DNA, 111 bp, Homo sapiens
actgaagaaaataggcacaggatcagtaaatattcacagactgaatcacaacagacccctgttcagattaaggaatttggtgcagtttcaaaagtagacttttctcctcag

SEQ ID NO: 175290 - DNA, 75 bp, Homo sapiens
gactggtcttacattgctgcatcaagaaacccaagctgctgagattaaatgccttaatggataaagaaaaattgg

SEQ ID NO: 175291 - DNA, 75 bp, Homo sapiens
aactgtatggtggagaaagaagtgggaaggatctgcgcggcaataccaagtttccaggcccgaagagcatcccag

SEQ ID NO: 175292 - DNA, 99 bp, Homo sapiens
tgatggcatctttcatctaacactcactcagcctctgaagaagcttcgggttcagactcaggcagtcagtcggaaagtgagcagggaagtgatccagga

SEQ ID NO: 175293 - DNA, 100 bp, Homo sapiens
gataactgcgcggcattctttgagggacccccattcaagttcaagttcacaattggcgtacggcttcaggtccagagcgtggagaagcctcagtaccgcg

SEQ ID NO: 175294 - DNA, 78 bp, Homo sapiens
agatccagatcgggatttacgtggagatcaagcgcagcgatgacttcccaagtaagaagcggaagaggagccgctgga

SEQ ID NO: 175295 - DNA, 85 bp, Homo sapiens
gtctccattatttgagatgagttacatcttggagatcttggagaaattcattcaaggcttttggatcacagaccagttattcaag

SEQ ID NO: 175296 - DNA, 83 bp, Homo sapiens
gcaaacctcctctccatgctcaaggccgacgtcaacctgtcccacagcgaaagatccagagacaatggccccgatgggatgga

SEQ ID NO: 175297 - DNA, 83 bp, Homo sapiens
tctggaagctgccaatccttggacagtgtgcaggatgacagaattcgagtcgaaaggatggataacatttattttgaatacag

SEQ ID NO: 175298 - DNA, 82 bp, Homo sapiens
tcagtactggcatgtgccttatgaccctcgacagtcattttgtttactcattcagccctgttgcaggtcccaataaactctt

SEQ ID NO: 175299 - DNA, 100 bp, Homo sapiens
cccacatccctggaaaccccctcggcccctctgctgagccgctgcgtctccatgccaggggacatctcagagctatgccaagaccaagacgagagccgag

SEQ ID NO: 175300 - DNA, 75 bp, Homo sapiens
gaaaaatctgttacttgatgaacttcagaaggcctgagacctgggaggaagctggagaaaagatgccctctgaat

SEQ ID NO: 175301 - DNA, 100 bp, Homo sapiens
ctgttcagacttcagcttggtgtctcactgccacccagtctggagtgcagtgtaggaggcaacctctgcctcccaggctcaagcagtcctttcgcctcag

SEQ ID NO: 175302 - DNA, 50 bp, Homo sapiens
cgaaggaggaggcgttgccgggtgtgatcccctgggcccgtttgttgtcg

SEQ ID NO: 175303 - DNA, 99 bp, Homo sapiens
atggaagatatagataagaatgctgatggtttcattgatctagaagagtatattgagctggaagtcgagtgtgctactcaactcaggagatttggagac

SEQ ID NO: 175304 - DNA, 75 bp, Homo sapiens
gcagagggcagtgaccggcaccttctgtgcgtcctggactcctctgagaaacagaaagacgcttctggggccagc

SEQ ID NO: 175305 - DNA, 100 bp, Homo sapiens
gctcagtggtcgccgcaggacccggcactgcaaggcgtaggacagcccacagtcctgacacagctctccctgaggagcagccacattccagctcccagtg

SEQ ID NO: 175306 - DNA, 80 bp, Homo sapiens
gctaccaatattctactttctgtctctatgaatgtgactaccctggttacctcatatgggaggaagttgccttgtactgt

SEQ ID NO: 175307 - DNA, 83 bp, Homo sapiens
acgaccctttaggaccccttgatgggcaggacggcccgattccaactctgaaaggatccgagccagagacaacaacggctcct

SEQ ID NO: 175308 - DNA, 82 bp, Homo sapiens
gcggctggccgggcccaggtcccttcctcctacctttgtgttggatgaatttaagcgcaagtactccaatgaggacacactc

SEQ ID NO: 175309 - DNA, 101 bp, Homo sapiens
tgccgctgtcgtctttgcttcagccgcagtcgccactggctgcctgagtgtcaacagcatctccaccctggagcctgtgagccggtgccagcgcctgagtg

SEQ ID NO: 175310 - DNA, 51 bp, Homo sapiens
agggccccgagccggcccgggtcgagactggtcgaattgacaaatcttacc

SEQ ID NO: 175311 - DNA, 75 bp, Homo sapiens
gagaaaagtaactcagagtgcatatgcccaattcctgaaattcgtgcggcagattggcgaagggcaggtgtccct

SEQ ID NO: 175312 - DNA, 100 bp, Homo sapiens
agctatttcagaactgttctcaggactcattattttaacatttgggagaaacacagccagaaggcatcaagcatgatggaaccatgtgtgatacctgccg

SEQ ID NO: 175313 - DNA, 100 bp, Homo sapiens
gaaaacctgtgtgttctccaccatagctttggactctcttgttcttgaaaacttaagtacccaggtttctaccatgaatgaaatgaagagttattctcaa

SEQ ID NO: 175314 - DNA, 100 bp, Homo sapiens
agcagcagctccactgaacagataagggtgaaaggtgtagcagtcactcggcctacacccacagcatcgaccttgtgaacccagcgacctgactgccttg

SEQ ID NO: 175315 - DNA, 100 bp, Homo sapiens
tggaaccgggatggcgacgtctacactgagtcggaggcgaaggaacggcagagtcgaaacaaacaatgagggcgaaccagtttcttacatgttctaacgt

SEQ ID NO: 175316 - DNA, 88 bp, Homo sapiens
ctggacgccgcgatcgtggggcccgcgaggcgggcagccggggcgtccaggtgatttggggaactggtcagctctttcaagctcagca

SEQ ID NO: 175317 - DNA, 98 bp, Homo sapiens
ctacgaggaatggcggcggctgccgcaggacctgcagcatcccagaggtgtacctgaaggaaatcttaaaagaaattggtgttcagaatgtaaaaggg

SEQ ID NO: 175318 - DNA, 74 bp, Homo sapiens
agccaagaagggaatgctgaagggcttgggagacatgttcaggtcaatgtgacggtggactacattagaccagc

SEQ ID NO: 175319 - DNA, 75 bp, Homo sapiens
catggatcccagcaactggagcagcttcatcttccaggtgttcaaggccaagttcaagaattgggacgatgtgtt

SEQ ID NO: 175320 - DNA, 99 bp, Homo sapiens
gaaaaatccgcagagaaattcagaacctcaagcttttcaggcatcctcatataattaaactgctgtgtttgatgtggacaagaagaaagggttgactct

SEQ ID NO: 175321 - DNA, 101 bp, Homo sapiens
ctgaagacaagtgagccagatttcacctctgcaaatatgagagattctgcagaagatggcagagcagctcatgaccttggcctatgataatggcatcaacc

SEQ ID NO: 175322 - DNA, 100 bp, Homo sapiens
gtttgtcattgagttggaccttagcccatctactggcattgtggacaatctctatgggaagcagaaggcaaggaccccggtcattttaggtagaaacaac

SEQ ID NO: 175323 - DNA, 100 bp, Homo sapiens
gcaccggtggcgaggagctctacttgctctgcgacaaggtgcagaaagaactcctctttcctaaaatggagtcgagtaaaaagatggactctcctggcgc

SEQ ID NO: 175324 - DNA, 83 bp, Homo sapiens
gatctggggatcttcgcactatcccaagagctcaggccccggggcctccagcggcaccagcggagaccacggtgagctcgtcg

SEQ ID NO: 175325 - DNA, 100 bp, Homo sapiens
ccaagcgcgaaaaccccggatggtgaggagcaggtgttttattccaaacgtctatgctgctttgttcactgcagctcttgttcctttgacgtgcctcgtg

SEQ ID NO: 175326 - DNA, 100 bp, Homo sapiens
aggacaatgattgcggagcccgctcacttttacctgtttggattaatatgtctctgttcagggactgcagtacatggagctcatccccaaggagaagcag

SEQ ID NO: 175327 - DNA, 82 bp, Homo sapiens
ttcagtgactgaattaaaaggtgtcaagaagctcagaatgtcattatttagaagcaaggtccttgaatgagcgagattatcg

SEQ ID NO: 175328 - DNA, 80 bp, Homo sapiens
gaagcagttctacaaggcgagccagtttgatgaaggccggaacaactttgaaggggaggtcaccaaggagaacctgctgg

SEQ ID NO: 175329 - DNA, 100 bp, Homo sapiens
atatacctaatccaccaaggatagccaatcggaccaaaaattcactcactttgcaatggaaggacagaactgtaccgctctctttttggccagctccacc

SEQ ID NO: 175330 - DNA, 90 bp, Homo sapiens
cacttgttccctccaagacaactgaatgatggagtttcactcttgtctcccaggctggagtacaatggcatgatctcagcttactgcaac

SEQ ID NO: 175331 - DNA, 100 bp, Homo sapiens
aaattattgaaaacttacagcaagatggttcatcttttgccctagagcaattgaaggtggaccctgatcaggacgcctctcgaagtaggttgcggaatgc

SEQ ID NO: 175332 - DNA, 82 bp, Homo sapiens
ccaacatccctctcctcctctaccctcaggacggcccccgcagcaagccccagccaaaggaacttcatgcccacttgaatgg

SEQ ID NO: 175333 - DNA, 100 bp, Homo sapiens
gtagctgaatccagtaccaaaaacgtcaacaacagttttacgggtggagagattcaaccagttagcgtgaaagttggagataaagttcttctcccagaat

SEQ ID NO: 175334 - DNA, 75 bp, Homo sapiens
acagcttaagcacttttaccgaaaaccttctccccaggtgttacagggtcttgattatttacataccaagtgccg

SEQ ID NO: 175335 - DNA, 74 bp, Homo sapiens
cgcagcaacaacagcagccggcccttgttaactacaacagaccatctggttcccctccagactctttgcaccaa

SEQ ID NO: 175336 - DNA, 82 bp, Homo sapiens
gccagggccggttctgcaccatcttcaggtcctactccaggggcgctcaggaacaagatcactcaaggtgaaggataatcta

SEQ ID NO: 175337 - DNA, 80 bp, Homo sapiens
ttctgcttcaccagtgtgttcaccactatcagattcctacaggaagcaagtagtaattgatggagaaacctgtctcttgg

SEQ ID NO: 175338 - DNA, 75 bp, Homo sapiens
aaagctgccaaaagtgacatgcagacacatcatctcagagttggagcacctgacgtttgtcaacacggatgtggg

SEQ ID NO: 175339 - DNA, 100 bp, Homo sapiens
cctagatgtagaaataatctttaatgaacgtggctctaagtcctacggagccccacggggggacaaggaggagctgacaccccagaagtgctctgaaccc

SEQ ID NO: 175340 - DNA, 75 bp, Homo sapiens
gaatttgttagtgctgtgtgctggagggcactaccagatgggcgctcctggttgcagccagaatgcatgacttca

SEQ ID NO: 175341 - DNA, 101 bp, Homo sapiens
atgaaagccgccatgcagggtcgaacggactgcatccgagccctgatgctagcagacaatgcagatcttcgtgaagactctgactggtaagaccatcaccc

SEQ ID NO: 175342 - DNA, 98 bp, Homo sapiens
gtatgcataatatggaatgttcttaacccagaagtagctgaatgtgttactccattgctgaggagtggttggtcaaagaaaaagtgatgtatgaaaaa

SEQ ID NO: 175343 - DNA, 83 bp, Homo sapiens
gcagaagtcgcgtgtctaggtgagtcgcggtgggtcctcgcttgcagttcagcgaccacgaacttcatggaggaacacggagt

SEQ ID NO: 175344 - DNA, 75 bp, Homo sapiens
ggcccaggagcagcttgtggtgggagtagcagacaaagatctgttgaagagtgacaccggctccgacacgccgct

SEQ ID NO: 175345 - DNA, 98 bp, Homo sapiens
gaaaccccgttgacaaggcactgctttttcatgacggagctggtcaggctcaccatcgagaagcagggacgtccgtctccgacgagccccgtgaagcc

SEQ ID NO: 175346 - DNA, 88 bp, Homo sapiens
ctttggactgctccagatttcttgtggaggccccccatgactgggatttagaggagatgtggcaccatttattgagtttctgaaggcc

SEQ ID NO: 175347 - DNA, 83 bp, Homo sapiens
ctgcgacctgcagatcaccaatgcgcagacgaaagaagtgacagacatcacacctccagtgcaatccctgttcctaagagaca

SEQ ID NO: 175348 - DNA, 98 bp, Homo sapiens
gaattccttgcattcctggaaaaatcaatgtggatcgacgtggaaatattgtctatattcacataaggattacagtttaaagacaatttctgtgatca

SEQ ID NO: 175349 - DNA, 83 bp, Homo sapiens
gttttgtaacacagaagatgaggagactatgtatctgcggagcggaaaatccgccagagctactttgcctctgtgtcatattt

SEQ ID NO: 175350 - DNA, 100 bp, Homo sapiens
agctgtccctgctggaggagcgcttccgggaaaggccgagggggacggcaagatgcacatcaccctctgtgacttcatcgtgccctgggacaccctgagc

SEQ ID NO: 175351 - DNA, 100 bp, Homo sapiens
catctgcgaagtggttgagaagcctgtacctgttttatacttgcttttgcttcagcgttctgtggttgtcaacaggtgaaagaactcttttcttctttgg

SEQ ID NO: 175352 - DNA, 75 bp, Homo sapiens
cttcaagcgttctcgaacccttgaggggaagttaaagtgggctcgggatgagtttgaaggcctcttcaagcagcc

SEQ ID NO: 175353 - DNA, 101 bp, Homo sapiens
tgctggggaagggaccatgtggctgccttgggctctgttgcttctctgggtcccagtgcacttggaggctcctcagctcttcatatcccagcttttccagg

SEQ ID NO: 175354 - DNA, 82 bp, Homo sapiens
tcaaggacacggtctacaccgacttcgacgggcgccctgcgtccggcagaggaggcgagcatcccgctcaggtgatgaggaa

SEQ ID NO: 175355 - DNA, 75 bp, Homo sapiens
gccgacatcgcggccttcttccgatccggccgaggacgatgatcccgccgggggagtgcacgtacgcgggccgga

SEQ ID NO: 175356 - DNA, 100 bp, Homo sapiens
aaaagaagcccaaggatagcacaacccctttgagtcacggaaatgcttccagactgcacacttttacttagaggacagtacatcccctagagttatatcc

SEQ ID NO: 175357 - DNA, 90 bp, Homo sapiens
atctcactagggagtgccagacactgggcgcagcccgccgccgccatgcccttctccaacagccacaacgcactgaagctgcgcttcccg

SEQ ID NO: 175358 - DNA, 82 bp, Homo sapiens
ataaaattggactcagagtttccattgacactgatatgaaccttccagtctgggaacagatacagatataccaatggatatt

SEQ ID NO: 175359 - DNA, 83 bp, Homo sapiens
ccttcgccaaggagatcgtctctctcatcgaggcccaaaccgccaaggattgtgctcatggacgatgccatggactgcttgat

SEQ ID NO: 175360 - DNA, 95 bp, Homo sapiens
tgggagcaccaggatctcgggctcggaacgagactgcacggacctcagcagccatgtcgaagccccatagtgaagccgggactgccttcattcag

SEQ ID NO: 175361 - DNA, 98 bp, Homo sapiens
gtcgttccgcgacggcctggctttctgcgccatcctgcaccgccaccggcccgacctcatagacacctatggctgccgatgaaggctcagcagagaaa

SEQ ID NO: 175362 - DNA, 97 bp, Homo sapiens
tggggatggctataatggatttggtaatgatggaaaagccttgaagcatactgctcagaaattcttcacggtagatgctggagtaagaaaagggatc

SEQ ID NO: 175363 - DNA, 75 bp, Homo sapiens
ggcccctggagatgattgagccgcgcacgctacagtacaaggatcatccagcagctcgtcaacggcatcatcacg

SEQ ID NO: 175364 - DNA, 82 bp, Homo sapiens
agaggaatctactctcaccaccgcttacaaacacgcagatggcaagaagattgatggcaggagggtccttgtggacgtggag

SEQ ID NO: 175365 - DNA, 74 bp, Homo sapiens
ccgccgtccccgggaaaacgttcgtcaacatcacggataaagtggccagtgtgtacgaagccccgggctttttc

SEQ ID NO: 175366 - DNA, 90 bp, Homo sapiens
aggtacctgtggatgtggtcgagatgaaagtgagtgagatcattggccgagacctgagtggcttccctgcacctcctggagaagagcctc

SEQ ID NO: 175367 - DNA, 96 bp, Homo sapiens
ctcaccgtcaccaacgacaacgacctcagctgcgatgctgtccccttttctgggactattcaaggaggtctccaggacggacttcagatcactgtc

SEQ ID NO: 175368 - DNA, 100 bp, Homo sapiens
gagctcctgagctgctcccgtgatgacttgctaaaagttattgatctccgaacaaatgctatcaagcagacattcagccaagaagtatgatgcgtttttg

SEQ ID NO: 175369 - DNA, 75 bp, Homo sapiens
ctggagatggagttcgactgcgagggcctgagacggctgcttggcaaggctttacaggaagtatggtgctggcat

SEQ ID NO: 175370 - DNA, 78 bp, Homo sapiens
tcattctccttcaagggaataaaattttctaaggttaatttggagtggcccctggagtcagtttcctacaccatccga

SEQ ID NO: 175371 - DNA, 100 bp, Homo sapiens
tcctgcccaacaaacagaggacagtggtgaatggcatagatgttgttcagatttactttgaaagaatcaagtatgtgaatggatggatgaatggaattgt

SEQ ID NO: 175372 - DNA, 82 bp, Homo sapiens
gcagaagccgcccatcatccacagggacctcaaggcgtccgacctccgatcatgaacgggcccctgcacccgcggcccctgg

SEQ ID NO: 175373 - DNA, 125 bp, Homo sapiens
ggctgaggaggggccccagcagcccccgaaggccctatcaggacatggagtatgaaagacggagcaatttacagcaatgagggatttatacatgaaaaatggacaaggatttgcattagtttatt

SEQ ID NO: 175374 - DNA, 50 bp, Homo sapiens
attgatatctgcttctaagatgaccaggagtttatccgagaacaatccgg

SEQ ID NO: 175375 - DNA, 98 bp, Homo sapiens
aaaaattaagtgaattgatttggttggaatgctcttttaccgatgctttaacatacagccactaggttggaatgttgcatcagcaggtagaagaacat

SEQ ID NO: 175376 - DNA, 75 bp, Homo sapiens
ggaggagatgctgcccaattgcgaggttgatgagctgcggagccgcatccgggaattggaggagagggatcgaag

SEQ ID NO: 175377 - DNA, 85 bp, Homo sapiens
gtcccccagcgccgacaccaacaagcgcaagagagacgaaggagaagatggtataaactggtccatcagtgacaaagacattgag

SEQ ID NO: 175378 - DNA, 100 bp, Homo sapiens
gcaggtgccttgagagcttcaggggaaatggcttcagcgcagtatattactgcaggaaatgggtcctgatgaatatgaagagatggaagaagaggaggag

SEQ ID NO: 175379 - DNA, 75 bp, Homo sapiens
tcgagaagcagcttcacggacgttttcatctctacacgttgaacgatgtctgcctaccctcctaggctgagctgg

SEQ ID NO: 175380 - DNA, 99 bp, Homo sapiens
aaatgcgcacgaggaggacactgcgggggcacctggccaagatctacgccatgcactggggcacagactccagattgattttgatgatgtggctgcaat

SEQ ID NO: 175381 - DNA, 98 bp, Homo sapiens
gggagccagagtcgccgccggcgtcggcgccgacctcaagcatctgcaagacagccgtgcacgcgggagtcatcagcaacgagagtgggggtgacgtg

SEQ ID NO: 175382 - DNA, 86 bp, Homo sapiens
gcgacaagccgctggcagccgcggatctcaccgccgctcaggatctctggaaacatggctacagaacatgttaatggaaatggtac

SEQ ID NO: 175383 - DNA, 74 bp, Homo sapiens
tggcgtccaaagtcacagatgctatagtctggtatcaaaagaaggggccagtgtcattcaaagatgtggctgtg

SEQ ID NO: 175384 - DNA, 75 bp, Homo sapiens
aatattcccaagtccttcacccgggtagttcgaggacactacaaaggtcagcaaattggcaaggtagtccaggtg

SEQ ID NO: 175385 - DNA, 100 bp, Homo sapiens
gaataggaacagctccggtctacagctcccagcgtgagcgacgcagaagacgggtgatttctgcatttccatctgaggaagtgaggagcgtctctgcctg

SEQ ID NO: 175386 - DNA, 100 bp, Homo sapiens
ggcggcggagtcggcgctccaagttgtggagaagctgcaggcgcgcctggccgcgaacccggaccctaagaagaattcctagaggacctgtgcaacaacc

SEQ ID NO: 175387 - DNA, 74 bp, Homo sapiens
tttattcttccctttgtttctgtggctaaagagaagaaatactacctccagctcgatgcattctatttctcatc

SEQ ID NO: 175388 - DNA, 74 bp, Homo sapiens
ttaaagtcttcagagccctgtatacgtttgaacccagaactgaccttttttctatcagtgcttatgtttatgct

SEQ ID NO: 175389 - DNA, 80 bp, Homo sapiens
agacctaaagccacagtcttcaagagcccacggacaccacctcaacggccataaagaatgctgatgggagaaccattttc

SEQ ID NO: 175390 - DNA, 88 bp, Homo sapiens
ctcatttcccaacttcaggaagagctgcctgtgaacttatgaatcaaggcatcttggccctggtcagctccattggctgcacgtcagc

SEQ ID NO: 175391 - DNA, 100 bp, Homo sapiens
ttaaaaagcagtctaaacctgtgaccacccctgaagaaattgcacaggtatataaagaacaggttttagaacctatgctaaatggaacagataaaacacc

SEQ ID NO: 175392 - DNA, 100 bp, Homo sapiens
gtcagcaagagtgacataggagaagtgattcttgtgggtggcatgactaggatgcccaagcaagggcaagtattttgtaaccttcccatatccatatatg

SEQ ID NO: 175393 - DNA, 100 bp, Homo sapiens
ccagtcagctcaaaccactagttatacaggactctgacaccaccataccaatggacgaatcactgcagtttaactcctccctccagaaagttcacaacgg

SEQ ID NO: 175394 - DNA, 90 bp, Homo sapiens
tgagaatgagcggagccgccaaaaatatgctgaggaggagttggagcagtgcttagatgagtacgaagatgatgaagcagggcagaaaga

SEQ ID NO: 175395 - DNA, 75 bp, Homo sapiens
cctgaacctgcggcctgacccagagccacttctcaccgagatgattcatgaagccttggacaagattcgctatga

SEQ ID NO: 175396 - DNA, 74 bp, Homo sapiens
agagcttcaagaaacctagcgacctggtgagggccggtttaccatgagaactgtgactgtcctctgcaagatag

SEQ ID NO: 175397 - DNA, 88 bp, Homo sapiens
gtatctaagactctgggacactcctgaagtcgggaaatggtcatcatcagatttgaaatatttaaagtggatacaaaactatttcagc

SEQ ID NO: 175398 - DNA, 100 bp, Homo sapiens
aagtcggcgctcaccatccagttcatccagagaaactggagagtgagaagctaaatgtggctgaggtcacccagtcagagattgctcagaagcaaaaact

SEQ ID NO: 175399 - DNA, 100 bp, Homo sapiens
tagacatttacgcggatgtcggcgaagagttcaaccaggccctgagcctgtgcaattatttcgagagtcaaaatgtggatttccgaggcaagaaggtgat

SEQ ID NO: 175400 - DNA, 89 bp, Homo sapiens
cggggccctcatggacggttggatcagggccgaagggctgatgcaaatcgtactgcccctagtggaagtgaataccgacatcctggggc

SEQ ID NO: 175401 - DNA, 83 bp, Homo sapiens
gggcttcaccatggacaagctggtgcagaacattgcgcggcaggccgccatggcatcagatgaaggcaaactttttgttggag

SEQ ID NO: 175402 - DNA, 100 bp, Homo sapiens
gctgctgagccgggtggccgccctgttccccgcgctgcggcctggcggcttccaggcgcactaccgcgagtgtgaacatggctacgcctcttcattcccg

SEQ ID NO: 175403 - DNA, 75 bp, Homo sapiens
tgctcccctagcaacgctcgccacacccttgttttgagatcctctctaagaccgcggccttcagtgtcacagcgt

SEQ ID NO: 175404 - DNA, 101 bp, Homo sapiens
agagaacagaagacacagacacgtacgtctactacccttgttagaaggaagctttggatcttcggtgggttgttatggagttgatggagagagtgactcta

SEQ ID NO: 175405 - DNA, 100 bp, Homo sapiens
gaaaaagaagcaatatataaagaacgttggccagattatgtaagggaactgcgaagaagatcagatccagactgtgaagacatgaaaagataatagttgg

SEQ ID NO: 175406 - DNA, 80 bp, Homo sapiens
tttcagaattgtcagatttcgctttgatgaatcaggtcccgaaagtgctaaaaagaaacagcgggagccacggaagggcc

SEQ ID NO: 175407 - DNA, 99 bp, Homo sapiens
cgctgcacctcccgcgccgcacggtggacgaggcacaaatcctgaagagcccgtgggcgtggactgctcatctgtaaagaaagtggagacatgaccttg

SEQ ID NO: 175408 - DNA, 90 bp, Homo sapiens
aaaaggcagaaatagatatagaggccatcagtggcagagtgcaaatatatacagagcttcataatcagcccaagaccacatagagcaaac

SEQ ID NO: 175409 - DNA, 104 bp, Homo sapiens
caaataccaggctaccatggtctacaagactctcttcgctctttgcatcttaactgcagactacatgaggaaataattgacttttataacttcatgtccccttg

SEQ ID NO: 175410 - DNA, 110 bp, Homo sapiens
tccctccgccgccgccgccttgctgctgctcaaagctgctgccgccccttgggctaaaaggtgtcgtgaaaactacccctaaaagccaaaatgggaaaggaaaagactca

SEQ ID NO: 175411 - DNA, 82 bp, Homo sapiens
atttcctccgcctcttccaaagcgacagcaccttgtattctggcctagatgaagtggccgaggagcagacgcagctcttccg

SEQ ID NO: 175412 - DNA, 95 bp, Homo sapiens
tgaaaagtcgaattcatggtcgtggaagctgagcccatattaagagatgtcaggtgtcgtgaaaactacccctaaaagccaaaatgggaaaggaa

SEQ ID NO: 175413 - DNA, 100 bp, Homo sapiens
caggagttcatctacccggagaagcaggagccctactcggcagagctccacgcaggagatcggtgaggagctgatcaacggagtcatctactccatctcc

SEQ ID NO: 175414 - DNA, 100 bp, Homo sapiens
ctggtggcccagatgattgatgagatcaagatgaccgacgacgacctgtttgtggacttggggagcgacgttggacctctcgaacaaccagctgagcgag

SEQ ID NO: 175415 - DNA, 51 bp, Homo sapiens
gcgaaaacatgaccgctgagcccatgagctgtcattcttctctacagaaga

SEQ ID NO: 175416 - DNA, 100 bp, Homo sapiens
caataactatgcccgagggcactacaccattggcaaggagatcattgacctcgtgttggaccgaattcgcaagctgacaagcactggaaaagtattcagc

SEQ ID NO: 175417 - DNA, 80 bp, Homo sapiens
tagagagaactgaacgaatgaagaagactatggcatcacaagtgtccacccacatgcaggatctccaggaggtgacccag

SEQ ID NO: 175418 - DNA, 100 bp, Homo sapiens
cctagcgccgctgggcctgcaggtctctgtcgagcagcggacgccggtctctgttccgcaggatggtcctcagaatggttggaatgaccctccagctttg

SEQ ID NO: 175419 - DNA, 83 bp, Homo sapiens
ctccttcggcagtccacccaccgccgccgcctcccaggtggatggtctgaagcatttgctggagacaggggcctcggtcaacg

SEQ ID NO: 175420 - DNA, 90 bp, Homo sapiens
ggccagactctacaactttctccagaaggtcttgcgatcagtggaccgctggtcagcagggactctggagaactccatcctcaatgccta

SEQ ID NO: 175421 - DNA, 74 bp, Homo sapiens
aaaggatcatccccttcctcccagggacagaattggatgatgttaagcgtttgctcaaggggagtcgatcggca

SEQ ID NO: 175422 - DNA, 74 bp, Homo sapiens
aggaattcgccgtgcccgagaatagctccgtccagcagctattccttgagcgagagcgggcagcccagctagca

SEQ ID NO: 175423 - DNA, 83 bp, Homo sapiens
caagaacaagactctcggctatggagtccccatgttgatgacgggtctaagccgacacccacgatggagacccagccggtgtt

SEQ ID NO: 175424 - DNA, 100 bp, Homo sapiens
ctgggaaacccacaggaggcaaccacactagtttagaaatgggatttgaccgatacaaaatggtggtgcaagtagtgattggagaacaaagaggtgaagg

SEQ ID NO: 175425 - DNA, 74 bp, Homo sapiens
ggacgggctttaggctggaagcgccttagaggagccatttttccagatgtgttcagagcaacattgttttgttg

SEQ ID NO: 175426 - DNA, 96 bp, Homo sapiens
ctcaatctgattgaggagagaaacaggtagcaaataatggcagcagagcatgttgtcacgtgtgtggatttgagaccgagctcaatgtccagtttg

SEQ ID NO: 175427 - DNA, 118 bp, Homo sapiens
gctcctcaagaatctcgtgctcaccggtttctcccacatcgacctggtgcagcggaactgctgcctgacgctctgcaacttcagcatccccgaggagctggaattccagtaccgccgg

SEQ ID NO: 175428 - DNA, 74 bp, Homo sapiens
aggatctggtgtaccaggcgaagctggccgagcaggctgagcgatacgacggcagttgtgaaaaacttcaggac

SEQ ID NO: 175429 - DNA, 90 bp, Homo sapiens
cctgtcttcagatcttcacagcacagttcctgggaaggtggagccaccagcctctccctgctgatacgcctcctcctgcctatatgccac

SEQ ID NO: 175430 - DNA, 83 bp, Homo sapiens
cccgcgcctgggctgccggcacttcgcggcaggttgtgaccgagattcccgacgagagagactgaggggaagagaggaaggag

SEQ ID NO: 175431 - DNA, 100 bp, Homo sapiens
attacagaggagcccatggcatcatagttgtgtatgatgtgacagatcaggaaatcatgactctcaagacaaatgagctattccagacaatgcagcgagc

SEQ ID NO: 175432 - DNA, 101 bp, Homo sapiens
cccccgagggtcaacgagaaagagatcgctggccagctcagcgtccctggaagggaagggacaactgaagttcacctcaggacggtggagcccacatcata

SEQ ID NO: 175433 - DNA, 80 bp, Homo sapiens
gaagaaggtcagtgtgcttgcttggagatcaggacgcaaaggaagaaatgttggctatttggcgatgagaggtggtgaac

SEQ ID NO: 175434 - DNA, 90 bp, Homo sapiens
agtgatgatgaagagcctagcacctcttatactgatgaaacatcccagttatctggactccctgagtttgttaaaatagtagaagttggg

SEQ ID NO: 175435 - DNA, 78 bp, Homo sapiens
tggcctagacctgaactcttcagataatcagagtggaggaagtacagccagcacagccttggaagtggagtttactct

SEQ ID NO: 175436 - DNA, 83 bp, Homo sapiens
tgattttcaagctcttgcattagaatctcggggaatgggagaggtactttagattgattgccgagcggggcagttttgtgagc

SEQ ID NO: 175437 - DNA, 75 bp, Homo sapiens
ttaatggaaaatcgcttggttaaaacctgacacttttaacagactctaaaatagagctcaagcttgagaagagag

SEQ ID NO: 175438 - DNA, 90 bp, Homo sapiens
taaaaattatttatccaacagctcctcccagagagttggaaactcaactattggaacaatgtactgttgacacaagtgttgctaaagaac

SEQ ID NO: 175439 - DNA, 82 bp, Homo sapiens
cctgcacacctggatccaggataacggaggctgggcgatcagtgggtgaccgcggctgcgagggactttgtcatccgtcctc

SEQ ID NO: 175440 - DNA, 50 bp, Homo sapiens
tggacactgatctgtttccccatttaggttcaccatcattaatagcaaac

SEQ ID NO: 175441 - DNA, 103 bp, Homo sapiens
gccgggcggcgcttctgtcctcctactcggacccgcagttttcggctttgtgagaaaccttaccatcaaacacgatggccagcaacgttaccaacaagacaga

SEQ ID NO: 175442 - DNA, 112 bp, Homo sapiens
cgccaaacgaagtcgtggaggtggcgaaacgaggaggagataacgcggccttgggctctgacaatgcagatcttcgtgaagactctgactggtaagaccatcaccctcgagg

SEQ ID NO: 175443 - DNA, 75 bp, Homo sapiens
ctactgcatccggaactcctctaccaagtcggggaagttctggaggccagaagtttgaaaacaatatcactggac

SEQ ID NO: 175444 - DNA, 100 bp, Homo sapiens
aatgtgacattacatgttccctccaaactagatgccgagaaacttgttggtagagtgtaagaagaagcttgggaagctgccacctcagtatgccctggag

SEQ ID NO: 175445 - DNA, 74 bp, Homo sapiens
ctgcttgtagaatatgacttaccagcactcctggaccaagagctctttgagaggtaggaaaagtaattggaatt

SEQ ID NO: 175446 - DNA, 100 bp, Homo sapiens
ggcgtctcgggcgaggagaggaggtgaccccgcgaaaggtatcgatatcctgaagcttgtagcagcccaagtgggaagccagtggaaagatatctatcag

SEQ ID NO: 175447 - DNA, 75 bp, Homo sapiens
caaggagctaaagcagcgtgcgttcagccctgggacagagctgtgaaccaaccccgctcacggctaacaagccca

SEQ ID NO: 175448 - DNA, 90 bp, Homo sapiens
agaggctgggcatcaaaccagagagctcctttggtgaagattaaacagagcttaacaaaactgaagcaagaaactgtagagatggacatt

SEQ ID NO: 175449 - DNA, 74 bp, Homo sapiens
ctggaggagccttctcaagaacagagataacaacgaacttgatgcaagtgataggtttgccaaggtcagacctc

SEQ ID NO: 175450 - DNA, 97 bp, Homo sapiens
gcgaaagtgggccagaggttctgcgacaccacctcggggcataattggaatatcatttggagaaagtgtcatggaagttctgcgtccacagcttata

SEQ ID NO: 175451 - DNA, 75 bp, Homo sapiens
agaaatctacaggtcattcctggagatcctgcacacgtaccagggagatgcgctggaacaagggcaccatcctga

SEQ ID NO: 175452 - DNA, 50 bp, Homo sapiens
ggcggcggcgctgctcccgggggcgacggaagaagaagaggacagtgctc

SEQ ID NO: 175453 - DNA, 98 bp, Homo sapiens
gctgaagcgtgttggggaaggagctgtaaagagaagacaaagcatggaggacacaagaatgggaggaaaggcggactctcaggaacttcattcttcac

SEQ ID NO: 175454 - DNA, 98 bp, Homo sapiens
tgttcaccagcaccggctccagtgggctcttgtgctggaattgatgttcgtctgtgtgatgttggtgaggccatccaagaagttatggagtcctatga

SEQ ID NO: 175455 - DNA, 100 bp, Homo sapiens
gcaggactatcttggtaccatggagtcatgggattgcttcatcctcaaccaatagaatcccttctatgggtgctgactgggttacttttttaaacactag

SEQ ID NO: 175456 - DNA, 97 bp, Homo sapiens
cagaaaggcttcactacccttatcccggagagctgacaatgatgaatctcagtttactcctggcttgggggcattaggaagcactggaggctcttcg

SEQ ID NO: 175457 - DNA, 51 bp, Homo sapiens
attgtactggcctgctgctggcccgcaggctgtgttcaattacaaaaaaag

SEQ ID NO: 175458 - DNA, 90 bp, Homo sapiens
gaaagacctccaggagaagatcagtgggaagctatctcccctggttcgaggtattttataagctgcttaacatcctggcagattacacga

SEQ ID NO: 175459 - DNA, 90 bp, Homo sapiens
tcagttacatactgattctttaagaaaatcagataacttgtactggagagaaatcctacaagtgtgatgcaagcctcccctatccagccc

SEQ ID NO: 175460 - DNA, 100 bp, Homo sapiens
caagaacatgtcggatagtgggaaacttatctctccccctgtccctccaagacccacacagactggactttttttatgaagacatggagtccttgacgca

SEQ ID NO: 175461 - DNA, 90 bp, Homo sapiens
gtacagaatggaaaagtaattggtgtaaaatctgaaggagaagctatcagctgtactctgaactgtagttgccaaagtttcaaacccggg

SEQ ID NO: 175462 - DNA, 101 bp, Homo sapiens
ctgccgcttcgcgcactacttcgtgctgtgcgggatcgacgcggacagcgggctggagcctgacgagctggcgggtttaccgacaagactgtgaaactttc

SEQ ID NO: 175463 - DNA, 80 bp, Homo sapiens
gggcagtttggggaagtctggatgggatctcatagatcagaacatactggagcctgtaacccgtgcacagagggtgtgga

SEQ ID NO: 175464 - DNA, 100 bp, Homo sapiens
tggcatgctacgtgctctttagctactccttttcctacaagcatctcagtcttctggccgctggtaccgacagagggcgagtagccatgtggaggaaagt

SEQ ID NO: 175465 - DNA, 50 bp, Homo sapiens
ttcgaccgctacggggaggaaggtcaaaatgcagatcttcgtgaaaaccc

SEQ ID NO: 175466 - DNA, 100 bp, Homo sapiens
gctgtttgtggcacagatgggaaaacatatgacaacagatgtgcactgtgtgctgagaatgctgacgaggaattgacaatggccatgtcctacgtgaagg

SEQ ID NO: 175467 - DNA, 100 bp, Homo sapiens
aagaagataactacaaaagactcagagactatataagtagcttaaagatgacaccttgcattccctatttagggcaaagcccaacaccttcccccactgg

SEQ ID NO: 175468 - DNA, 83 bp, Homo sapiens
cctgcaacctgtccggggatcccagggagtttggcaatgaggagcagcagctggcgtgggccaagcgggagagcgagaaggcg

SEQ ID NO: 175469 - DNA, 82 bp, Homo sapiens
acccacacgggcgagaagccctacgagtgcaacatctgcaaggtccgcttcaccagctcaccatggatgatgatatcgccgc

SEQ ID NO: 175470 - DNA, 82 bp, Homo sapiens
ttgtcgacatgcctactgataatcctgtttcttcaggattgaatgaaaacctcactgtcaatggaggaggctggaatgaaaa

SEQ ID NO: 175471 - DNA, 90 bp, Homo sapiens
gagcggcccttggagacagattctgacctcagatttctgacattcgattccccagaggggaaagcagaatccggagatgatgagtatcaa

SEQ ID NO: 175472 - DNA, 74 bp, Homo sapiens
cccggagcaagcggagctcccccaagagccggaaaggaactttatattgctgttggaatatctggagccatcca

SEQ ID NO: 175473 - DNA, 75 bp, Homo sapiens
ggccatgtctcctatcgtgcagtataatgactggctggaagaggagctgcatggctacttggagaatgagccgct

SEQ ID NO: 175474 - DNA, 75 bp, Homo sapiens
actacttaataatgacaatctcctcagggaaggggcagcacaattgccacggcagtgaagtttctacagaattcc

SEQ ID NO: 175475 - DNA, 100 bp, Homo sapiens
attggatatagaacttaaagtaaaacaaggtgcagagaatatgatacagatgtattcaaatggatcttcaaagaaaccgaagctgaaagactggcatcct

SEQ ID NO: 175476 - DNA, 101 bp, Homo sapiens
ttttgagcacctgcctcacataggtgtaggtgtgggccatgtttgaggattgccccagcattcagttctatgagtaataaatatccacaggctgttttctt

SEQ ID NO: 175477 - DNA, 115 bp, Homo sapiens
cagaacctcaagcttttcaggcatcctcatataattaaactgtgtgatgaatgcagactctgctaccattttggctgtttggatcctcctttgaaaaagtctcctaaacagacag

SEQ ID NO: 175478 - DNA, 100 bp, Homo sapiens
aggatctttccaagcaggcctgcgaaggaaacttacccaaagggaagtctgctgcgatggatagtgctcggcttagtgctgccaaatcttctccaatgat

SEQ ID NO: 175479 - DNA, 54 bp, Homo sapiens
gcggagatcctggtccggaggcccacagtagagacggggtttcactgtgttagc

SEQ ID NO: 175480 - DNA, 100 bp, Homo sapiens
catggggaagcgggacaatcgggtgggaattggctcgggaaaaggtaatgcgagaagttaaagccttagccaagcttgaacacccgggcattgttagata

SEQ ID NO: 175481 - DNA, 82 bp, Homo sapiens
catgagcaagctgatgaagatctgctctctcaatatgaaaatggtagctccacagtagactaaacttcagtggctctgtgag

SEQ ID NO: 175482 - DNA, 98 bp, Homo sapiens
actttgacagctttcaaaccgcaatttctgagaacagaataatcggagccatggccatattttttcaatgtgacaaaattaggcaagaacgagatgaa

SEQ ID NO: 175483 - DNA, 98 bp, Homo sapiens
cgtgccgttacggccatcacggcggccgcagtggcgtcctggagccctcctcaggatatgaacgagactgccaaacaagaagatattttggaatccac

SEQ ID NO: 175484 - DNA, 107 bp, Homo sapiens
tgaatgatgttgatgtatctggaactatgaatagggtctcttgcaacgtgtgagctgcctcttgccaagagtgagtggcaaaagaaactaaccccggagcagttcta

SEQ ID NO: 175485 - DNA, 95 bp, Homo sapiens
tagctgtgctcgcgctactctctctttctggcctggaggctatccagcacccaacatgagtgaagtttcctgcaagaaacgggacgactatttgg

SEQ ID NO: 175486 - DNA, 101 bp, Homo sapiens
gcactgcggacgcgactcgagggtgacgctcgctccgctcgtcccgctcgtcatggcctacccgggatacggaggagggcctggaagctccgaccccagga

SEQ ID NO: 175487 - DNA, 75 bp, Homo sapiens
ttgaatccttccttgatgatgaagaggaaatctgagaatgaagatgacagcgagtgggaagatgtggatgatgag

SEQ ID NO: 175488 - DNA, 114 bp, Homo sapiens
gccgcagctgcgggtccgggattcccagccatggcagattcctccgggcagcagggtgatgtgtccaatctagatcccaacttctcatttgaaggcaccaaactggatgtgggg

SEQ ID NO: 175489 - DNA, 80 bp, Homo sapiens
ttcttgcctcaggccagtcgcctccaggccaagagggatccttcacccgtgtctggcgcatattaaatttcctattgact

SEQ ID NO: 175490 - DNA, 75 bp, Homo sapiens
caagttcatcaagcaaagggactaccaccagcagatcaccatccatcttcaagaagctactttgaaagtctggcc

SEQ ID NO: 175491 - DNA, 90 bp, Homo sapiens
agcagatctccactctcatcaacaccaccgacagatgctatccctgtaccctgcgccagtacctttgtgtgaacacacccagcccccgcc

SEQ ID NO: 175492 - DNA, 51 bp, Homo sapiens
atccgccagctcaagtggaaggagatgtacattgaagatgtcagtttctac

SEQ ID NO: 175493 - DNA, 101 bp, Homo sapiens
cctgtaatgtttggcgagtctgggtattcctagttcttctcatgtaagtaataacatgagtacaccagttttgcctgctccgacagcagccccaggaaata

SEQ ID NO: 175494 - DNA, 98 bp, Homo sapiens
gggcgagctcttcctcaccgtgctcctcaatcctattatgtttgagaccttcaacaccccggccatgtacgtggccatccaggccgtgctgtccctct

SEQ ID NO: 175495 - DNA, 98 bp, Homo sapiens
atggagtgaagcggatcacagcaacaaagagagaaacagcagcaacatttttgaaaaaggaaacatgccctgaactgtcacagaatgaaaccagcgct

SEQ ID NO: 175496 - DNA, 98 bp, Homo sapiens
tggccttgagggagagctggggcctgctcccggagagatacggctatgtcgatcgaaatcgaatcttcggactttctgaaacaaaggtcttcactgcc

SEQ ID NO: 175497 - DNA, 100 bp, Homo sapiens
agccggccctgctcactaccgcgcccacgtgtcctgttgtgcttcattcccacaggccgcataaggaatagcgggttttgcagcaattgttgcatatgga

SEQ ID NO: 175498 - DNA, 50 bp, Homo sapiens
gttaaggattccaagtaactcttatttgtcctattttgtaacggattatg

SEQ ID NO: 175499 - DNA, 82 bp, Homo sapiens
catggtgatccttcgggacaagattcgcttctatgagggctcttcagaggtgttcctgcccccagaccccatctttgcctcg

SEQ ID NO: 175500 - DNA, 74 bp, Homo sapiens
aaatttattcaagtcaattaccatcctttaccaggccaataggagctctgaacccaaaaagagcagcattcttc

SEQ ID NO: 175501 - DNA, 98 bp, Homo sapiens
tttagggtcctttatatagaagggagagtaggcagattttgcagtagaagcattggcaaaagctacctatgagcggctctttcgctggctcgttcatc

SEQ ID NO: 175502 - DNA, 101 bp, Homo sapiens
ctcgttcaagttaatccaggtgagactttcacaataagagcagaggatggaacacttcagtgcattcaaggtaagaatgattgatgttggctgatattgga

SEQ ID NO: 175503 - DNA, 75 bp, Homo sapiens
cacggtcctggtaacccccctgggcgcccttggagtaccgttcggccttacgaaggatgaatccaaaaggccaaa

SEQ ID NO: 175504 - DNA, 83 bp, Homo sapiens
gcagtttgggatcatccagaagcatctgaagaccatggatcacaaccggaaccgcagggtactggctgtgatcgaacttctca

SEQ ID NO: 175505 - DNA, 82 bp, Homo sapiens
ctaaaaatgattcgggaatatcggcaaatgcgagcagctgatgcagctgtacagtgcgcgccagcggcggcggctgaaccgg

SEQ ID NO: 175506 - DNA, 83 bp, Homo sapiens
gagaagtcgaaggggtgctggcgagacgggggtgatgcccacccgggcgagaaagatcatggaagggaagtggttgctgtgta

SEQ ID NO: 175507 - DNA, 75 bp, Homo sapiens
agagcacctggaagcagtaacatgcaagattccagacagcattggaaaagacatagaaaaggcttgccaatctat

SEQ ID NO: 175508 - DNA, 89 bp, Homo sapiens
ccatgatgggcagatgctagtctcagggtgacttaagagattaaaattaatttggttgctgttggttctgaacaaataatgagttcttt

SEQ ID NO: 175509 - DNA, 82 bp, Homo sapiens
gacctgctaacagaactggaccttttcggattatatgcgtcaggcaggagaagtgacttatgcagatgctcacaagggacgc

SEQ ID NO: 175510 - DNA, 90 bp, Homo sapiens
atcatccagctgcctcaaatcgtcgtagtgggaacgcagctatgcctccaacaaagcaagtaaagctgcttccgtccttctgtattctct

SEQ ID NO: 175511 - DNA, 100 bp, Homo sapiens
ccactattaagtgggaacgggcaggtgaggaaaatagcagctgaatactatgacaacctccctcactacaattcctggataaaagtactgtatgattttg

SEQ ID NO: 175512 - DNA, 83 bp, Homo sapiens
aaagtcggccaagaaagacaaagacccagtgaacaaatccgggggcaaggccaaaaagaaggggacggcaaaacagaacagaa

SEQ ID NO: 175513 - DNA, 91 bp, Homo sapiens
aggcaaggagctaaagcagcgtgcgttcagccctggggctgctgagcttcgtgcttatctgaaatctaaaggagctgagatttcagaagag

SEQ ID NO: 175514 - DNA, 98 bp, Homo sapiens
atctctgcatgcatgtctgtgtcaaaatgcagatcttcgtgaaaacccttaccggcaagaccatcacccttgaggtggagcccagtgacaccatcgaa

SEQ ID NO: 175515 - DNA, 101 bp, Homo sapiens
ttttaaatcaagatttaacattccaacacataaaaattatttatccaacagctcctcccaggtggcgtgtttgtctcacatagctgcaaattatcttattg

SEQ ID NO: 175516 - DNA, 90 bp, Homo sapiens
tgcctagatcggctagaaaactggttattcctccctgaaggccatgagacctcatcctgggcgaccattcttccacacccagcctagaag

SEQ ID NO: 175517 - DNA, 100 bp, Homo sapiens
ggcggcagcgtgagcgcgaggaggcggaggctgcggcggggcggacggtcgcgcggcggcaggcacagtttcattcattggctcccatgtactatcgagg

SEQ ID NO: 175518 - DNA, 100 bp, Homo sapiens
acgaggaagaggaggtttctgaggctggaatgataaaaagtgataatgaagagtatttcattgaacccttggaaagaggtaaacagatggaggaagaaaa

SEQ ID NO: 175519 - DNA, 82 bp, Homo sapiens
ctgcagccgcagcaggaatgaaggtatgatgatgtcaaacgtgatgctgatgctacagttacagcccctgctggcgcagcct

SEQ ID NO: 175520 - DNA, 87 bp, Homo sapiens
cttccagacactggaaaactggatgctgcagacactgaacgaggagccagtggagaatgactatcttcaagactgcctcgatgccat

SEQ ID NO: 175521 - DNA, 83 bp, Homo sapiens
cgcgacgctgctcaaaacctcgctccggaaaggggacacctgctgatgttctaatcatgtcagataaagatgatattgagact

SEQ ID NO: 175522 - DNA, 75 bp, Homo sapiens
gttggcggaagcacttggaactcctttataagtgtcagctgtgaggtcctaggcctacttacaagcctccagtct

SEQ ID NO: 175523 - DNA, 100 bp, Homo sapiens
tgaaagtgtgatgttcgcgtatttcttgacaggattcattattcctaatgagcttggtggcgtagcttcaataccatttgaacactaaagccattatcag

SEQ ID NO: 175524 - DNA, 100 bp, Homo sapiens
agccgacactgggggcagtccgcgagccccgcactctctcgatgagtcggagaagtcccataccccacagacaaatgttactcatgtaacccaactggag

SEQ ID NO: 175525 - DNA, 96 bp, Homo sapiens
tgctgagctacccgagcggcggcggcggcagcagcggcagcggcaagcaccgttgtaacctccatttctgacatccccactggtattccagttcac

SEQ ID NO: 175526 - DNA, 100 bp, Homo sapiens
ttggaagtacccgcatgctgcagcttatgaccatcaatatgtttgcagtacacaactcccagctgaaaggtcaaaatgcagatcttcgtgaaaaccctta

SEQ ID NO: 175527 - DNA, 51 bp, Homo sapiens
tttgccaggtgtttgttaccttgatgggaacgttgtctgtgtgcagtctaa

SEQ ID NO: 175528 - DNA, 82 bp, Homo sapiens
ctgctccggcctagcctggcggagctccacgacgagctggaaaaggccagattacctgtccctaatactgagcagaagctgg

SEQ ID NO: 175529 - DNA, 75 bp, Homo sapiens
gtaattacattctctcggccagcgcctccgcgcttcgagagctgtgcccaggagtgaacaaccagccctacctct

SEQ ID NO: 175530 - DNA, 100 bp, Homo sapiens
tctgcgtacaaaacgattgaacaccagattgcagttcaggaaacctgtccagtttaagtcgtcttggtctgagatataacagactgtcagcaatacccag

SEQ ID NO: 175531 - DNA, 100 bp, Homo sapiens
ggcgccctttcttggcccttgttcccccaaatgtctgactctgactctcggactgagaaacgcaagtaattcgccaaaatgacgaacacaaagggaaaga

SEQ ID NO: 175532 - DNA, 75 bp, Homo sapiens
accaatgttatgggtacctctcttactgttaggggtgcaatatgtgacttctgtgaagcttgggtttgccatggt

SEQ ID NO: 175533 - DNA, 100 bp, Homo sapiens
agaggaaggcgatactctcgctcacgcagcaggagcaggggacgaaggttcttgcacgcattgcaaatgccacgaggccaactattcatctgtgtgagat

SEQ ID NO: 175534 - DNA, 90 bp, Homo sapiens
gggaaaggagcgggactccggacctccaggagaaactcccatcaagactgaagcagacgttttggcagaaaaccaggttcttgatagcag

SEQ ID NO: 175535 - DNA, 100 bp, Homo sapiens
agatgatctccacccagcagctgatgatcgaggccaaagccaactattaccaggtatcgcaggacttccctttcctccaccccagtgagaccagtgtcct

SEQ ID NO: 175536 - DNA, 98 bp, Homo sapiens
gtagaagaacaacgtagtgtcatcctacatctcttgtcacagcttaagctgggcatggatttaacaagatttgaatcagcttgggtactgacaaatat

SEQ ID NO: 175537 - DNA, 75 bp, Homo sapiens
gaactcataaacttggcttcctcgcttctgctcctcaggttttcaaatggaacattttgatgcatcacttagtac

SEQ ID NO: 175538 - DNA, 100 bp, Homo sapiens
cgtggagcacctcagtaagagggtgttagaaaggatttattacagatttggacttgcattaggctgctgcactgaataatgattccagccagaatgtctt

SEQ ID NO: 175539 - DNA, 101 bp, Homo sapiens
ccacatcaatgcactgccaatggtggcagtgctccttttggacttttctctaggtttggcgctaaactcttcttgtgagctcactccaccccttcttcctc

SEQ ID NO: 175540 - DNA, 100 bp, Homo sapiens
ttgcagatcttcaacaagaggacccaggagaaattcgccctcaaagatgagggagtggtgggtccaggtggggctgctggccgtgcccctgcttgctgcg

SEQ ID NO: 175541 - DNA, 50 bp, Homo sapiens
ggaagcgagggatggaggttgtgcagatttgaggcttaagcaacttcttc

SEQ ID NO: 175542 - DNA, 51 bp, Homo sapiens
ctatgagaccttctacaagctggtgaagaactgggcacctccgggctgtga

SEQ ID NO: 175543 - DNA, 100 bp, Homo sapiens
gtcaggttgtctccagctgtattgcttcaaggactggctgaagtcccaatcccaaccaggaaagatctaggagagagggagaaattgatgctgccagaaa

SEQ ID NO: 175544 - DNA, 124 bp, Homo sapiens
ctgggtcagtccgccgctcaccccgcggccgcaccttcccgccttctcagaacccttaggagaaatcttgagagtggacagcaattgtgaagatcgccagagagttctgtgtttcatcaccgcc

SEQ ID NO: 175545 - DNA, 74 bp, Homo sapiens
cccaagtagtccgatggctgcggctgcgccgaggcgccctactcagtttcaacgaaccaaacttttaaatggac

SEQ ID NO: 175546 - DNA, 100 bp, Homo sapiens
tgagctgccctcggcgggcggcgacggcggcaaatctaagaaatttgcatttcagaatttgctacctctccagagaaagtcagtgattacatttctccac

SEQ ID NO: 175547 - DNA, 75 bp, Homo sapiens
ctcagggttcaggcaatgcaaataagtgagacggtttaagcggaagcatcttactgccattgactgccagcattt

SEQ ID NO: 175548 - DNA, 50 bp, Homo sapiens
gccattccctctcacccaagagacagaaagaatttactttcaggttttct

SEQ ID NO: 175549 - DNA, 121 bp, Homo sapiens
tcccgcctcagcggccggaggacatgcgggagagagaatgagccagagggacacgctggtgcatctgtttgccggaggatagatcagatactgattcatcagcaaattgaacttctggaag

SEQ ID NO: 175550 - DNA, 100 bp, Homo sapiens
caatccattcaggatgggaaaccacgcaggcaaacgagaattaaatgccgagaaggccagtacgaatctcatctgttctgagtgtggggatgagtttact

SEQ ID NO: 175551 - DNA, 98 bp, Homo sapiens
gaaaaagctgtggaaggctctggataaggaccagtacctgcccaggaaactgtcttcaggcagtgacagtggtgggagcagcagcagcagcagcagca

SEQ ID NO: 175552 - DNA, 74 bp, Homo sapiens
cagtcttcccgagtgagggatttcgccgcccgctttcaggcccgtagccccccaagatgaacccagtggtggag

SEQ ID NO: 175553 - DNA, 88 bp, Homo sapiens
gcgccgctgctggttgctgtccctgtacatggactggacctgcctggagcccagcccagagcatctcctcagtgctcatctctatcca

SEQ ID NO: 175554 - DNA, 82 bp, Homo sapiens
gaaaattggagatttgataacactggagatcagcaccaaatcccacagaggcatctgaggcatcataggcgagtattagtgg

SEQ ID NO: 175555 - DNA, 95 bp, Homo sapiens
tcccatgaccagtttgtggctcaagaatgctgcttctaaattacttgggcaaaattgggtccaaaacgcctttgatggcagctgcaactttttcc

SEQ ID NO: 175556 - DNA, 100 bp, Homo sapiens
ctgcactttatccagcacgagtgggcgcgcttcgaagccgagaaagcccgctgggaggccgagcgcgccgagttacaggggaacgcccttttgcttgtga

SEQ ID NO: 175557 - DNA, 75 bp, Homo sapiens
gtggtttcggtgggaatgacaacttcggtcgtggaggaaacttcagtggtcgtgctgctagcagaagaaagtctt

SEQ ID NO: 175558 - DNA, 98 bp, Homo sapiens
caccatcatcaagacggaaaaagtcgatctggagcttttcccctccccgggtaagaatgattgatgttggctgatattggagtgctcattcacatgaa

SEQ ID NO: 175559 - DNA, 80 bp, Homo sapiens
cgacagtgccctgagggccttcgagagctaccgcgccagacagatcgacgacatcgcggatggcgccgtgaagcccccac

SEQ ID NO: 175560 - DNA, 76 bp, Homo sapiens
ctctgcggctggtccaggccttccagtacacagacgagcatggggaaggtgctgatattgatgcgttgtgtgttgc

SEQ ID NO: 175561 - DNA, 99 bp, Homo sapiens
ggcttctaagaagttgggtgcagattttcatggttttaggagaagttttagcacaacttctgcttcttcccaaaaggagattaacagaagaaatgcttt

SEQ ID NO: 175562 - DNA, 75 bp, Homo sapiens
aggcatgttgtataaatgtacagttataaatgtcactctgcccgatgaaaagcaaaactacgtacatcgaattgg

SEQ ID NO: 175563 - DNA, 98 bp, Homo sapiens
ctgagcccgtgcctgtcttcagatcttcacagcacagttcctgggaaggtggagccaccagcctctccctggcaaacagaccttgctgactgaaggca

SEQ ID NO: 175564 - DNA, 96 bp, Homo sapiens
cggtgatcggggaagcatggggatccgggagaagcacccacaaaactagcatcctcctggaggagctcggggttttacatatgtggctccatctgt

SEQ ID NO: 175565 - DNA, 74 bp, Homo sapiens
gggagccctgtgaggcggacacttaactccagtttcacagcttcgagagctgtgcccaggagtgaacaaccagc

SEQ ID NO: 175566 - DNA, 100 bp, Homo sapiens
gtggcgggcgcagctgctgtgacagaattaaacaaccaccatgtcgagcaaaaaggcaaagaccaagaccaccaagaagcgccctcagcgtgcaacatcc

SEQ ID NO: 175567 - DNA, 100 bp, Homo sapiens
caatattggaagcgctttgatttacagcagctgcaggaagagcctaggctggatgtcttgatcaataacgcagggatcttccagtgcccttacatgaaga

SEQ ID NO: 175568 - DNA, 100 bp, Homo sapiens
cgtctccatgagcatctcctactgcccgtacgccctgctgggccagtaccatgacatcaagcaggctgtgtggttccggtgctggtgccgtggaagtggc

SEQ ID NO: 175569 - DNA, 83 bp, Homo sapiens
gaagaatcaaggctgggccggacccggtggcctggcaacaggcctgtaccagagattaaagttgtgtcaaatctgccagccat

SEQ ID NO: 175570 - DNA, 75 bp, Homo sapiens
cagcccatgcccctgaaggcctcgctggagatcgagtaccaagtgcaaattgagcatgacccagaattagaaaaa

SEQ ID NO: 175571 - DNA, 51 bp, Homo sapiens
atcatggaccgggagcgagaagcaacaggggcaagtgtccgagtggtgaat

SEQ ID NO: 175572 - DNA, 100 bp, Homo sapiens
gaaagacttggaccgccatctcagaatccacacgggtgctggagaatctggtaaaagcaccattgtgaagcagatgaggatcctgcatgttaatgggttt

SEQ ID NO: 175573 - DNA, 120 bp, Homo sapiens
cgtgaagaagcaggaggctaagaaagtggtgaatcccctgtttgagaaaaggcctaagaattttggcattggctctgtgtgctccgggatggagcaggtgtgcagagggtgagaacccag

SEQ ID NO: 175574 - DNA, 75 bp, Homo sapiens
ctccctatgccttctcccatgaccaaacagtgattgctgaccactcgctgagcgccagccacatggagaccacca

SEQ ID NO: 175575 - DNA, 98 bp, Homo sapiens
caaggaccagaccgtcgggaacagccatgcaaaggcaggggaggaagccacctcgagagtgatgttagaactccaaaaagcactaaacatgtccattc

SEQ ID NO: 175576 - DNA, 50 bp, Homo sapiens
ccactcagagtcgcccgagaaaacatccagtcatggataaaaatgagctg

SEQ ID NO: 175577 - DNA, 100 bp, Homo sapiens
cagtttaacgggtgccggaaagtttatacaaaaagctcccacttaaaggcccaccagaggactcacacagggaagcagctcgagagtgtcgtagaaagaa

SEQ ID NO: 175578 - DNA, 100 bp, Homo sapiens
aggacagcacccacacacggctgctggtagaggggtctccgtctctccaccgggggcttcatccttccagggaggagaagagggactccagaatggctga

SEQ ID NO: 175579 - DNA, 98 bp, Homo sapiens
gggaaaccacgcaggcaaacgagaattaaatgccgagaaggccagtacgtgatccgtatgtgaaactttcattgtacgtagcggatgagaatagagaa

SEQ ID NO: 175580 - DNA, 89 bp, Homo sapiens
aataaccacggagccggcagcggcgcgggaggccgtgcgggtgtcaaagtcgtgttctcaggccactaccacaggaatgccgggggtac

SEQ ID NO: 175581 - DNA, 100 bp, Homo sapiens
gctgttccttggccatcccaaagctattctgggggcaacagaggctcgtgctgtcttggaaagagaatttaacaaccttttggtcatggggactgataga

SEQ ID NO: 175582 - DNA, 73 bp, Homo sapiens
cagcttcaagcttaggaccacccaccatgcctatccagctaggtcttgactccactaacggggacttctcata

SEQ ID NO: 175583 - DNA, 95 bp, Homo sapiens
tacctccggacaccattactaagaagtgattcgcctttgccagtctcatctcgtgtctgctttgttaagttccatgatccagactcagcagttgt

SEQ ID NO: 175584 - DNA, 76 bp, Homo sapiens
gaagccaggagcacccggcgtcccagacaacattttgaaagcgaagcagaagccgtagaatcagcggcgagcctgt

SEQ ID NO: 175585 - DNA, 100 bp, Homo sapiens
tgggagatccacagctaagacaccgggacctcctggaagccaaaaatgcattttgaaagcgaagcagaagccgtagaatcagcggcgagcctgttgaaag

SEQ ID NO: 175586 - DNA, 100 bp, Homo sapiens
ggacgaccggctctactgcgtctaccagagcatggtgctcttcttcttcgagaattacaccggggtccagatctcccttgagtttagaaatctggctgag

SEQ ID NO: 175587 - DNA, 49 bp, Homo sapiens
ctgctgtaaaacaggaaatgagaataaaagccgccctcattctagggga

SEQ ID NO: 175588 - DNA, 90 bp, Homo sapiens
agaaaggggagtcctattggtattcagttaccgcctccgtagttacaaggattgtggagaatattgaaatggtgggcagtggtggtgctg

SEQ ID NO: 175589 - DNA, 75 bp, Homo sapiens
gtcgccgcgtccttggctggcgtcatgggtggtaaagtaccacctgctactcagaaagctaaatcagaagaaaat

SEQ ID NO: 175590 - DNA, 88 bp, Homo sapiens
cagaagaggagtcctttaggaagcaattcacagaagctgtgagtccttcagtgctacccccttcagctttgccactggacctgcttaa

SEQ ID NO: 175591 - DNA, 98 bp, Homo sapiens
caagagcacctggctgatcctgcaccacaaggtgtacgatttgaccaaatttctggaagaggttgaaggggcccggccaggactcggggaagggtggc

SEQ ID NO: 175592 - DNA, 100 bp, Homo sapiens
gggatgtgaagtagatgataaagatgatgatatccttctcaaccttgtgggatgtgaaaactctgttactgaaggaggtgaaattgactgtgtggataag

SEQ ID NO: 175593 - DNA, 100 bp, Homo sapiens
agctcagtggcttcataaactgtaccaggagaaggtttgagtacaagctcagcttcaaaggcccaaggctggcattgcctggggctggaatacccttctg

SEQ ID NO: 175594 - DNA, 75 bp, Homo sapiens
acctactggtgcatgagcaagctgctggatggcattcagtatccatttgaggccctcttccgcagccagcactac

SEQ ID NO: 175595 - DNA, 82 bp, Homo sapiens
cagagcgccgcgcacttcgtcatgttcttcgcgccctggggaacgcccttttgcttgtgactggcagggctgcgacaagaag

SEQ ID NO: 175596 - DNA, 83 bp, Homo sapiens
gtaacacacagctgggtgggggcacaggagcatcagatccatgctgctgctgactcggagccccacagcttggcacaggctct

SEQ ID NO: 175597 - DNA, 75 bp, Homo sapiens
aagggaaaatggggtgaggaagattttgaagacaatcgtcacttatacagatggagtgaaggtacctgagcgcag

SEQ ID NO: 175598 - DNA, 98 bp, Homo sapiens
tcagatctaagcccaagagcaagtggcggcctcaagccttggacactgtggacaagattagatgcaccccggttggaaacaaagtccctgagcagctc

SEQ ID NO: 175599 - DNA, 75 bp, Homo sapiens
ggctcacctgtgcgggatggaacaaaaggttcgagaacttgtcttggacaattgcaaatcaaatgatggaaaaat

SEQ ID NO: 175600 - DNA, 100 bp, Homo sapiens
agctgggattacaggcacgcgccaccactcccagaatcagttgctcaactaccgttctgccatttcaaatcatggatcaaaaatagaaggcctggaaaga

SEQ ID NO: 175601 - DNA, 101 bp, Homo sapiens
aaacccatctccaaaagacctgttcgtcccagcctgcctagaagaaaaggctgaggaggtgtatcgtctgtatcagaactcgcccctctcctcccaccccg

SEQ ID NO: 175602 - DNA, 90 bp, Homo sapiens
cagaggggagtcatcatgagcgatgttaccattgtgaaagaaggttgggttcagaagaggggaagaccaacactgtcatctgaagttgga

SEQ ID NO: 175603 - DNA, 100 bp, Homo sapiens
gctggtccaggcgcggccgctaagaggagaccaagaggcgggggctgcacttgacaaccagcatgccgagatggtcaagggctcagaggtttgcagggcc

SEQ ID NO: 175604 - DNA, 75 bp, Homo sapiens
tattgttaaggcagcggggtggaatggcagagcttgatattgaagcacagattcgagaaattcaaggcaagaagg

SEQ ID NO: 175605 - DNA, 75 bp, Homo sapiens
cagcaagatgcggaggctgcctcggcggagcagaggaaccacacgctgatcatgattcaaccctatgaaaagata

SEQ ID NO: 175606 - DNA, 83 bp, Homo sapiens
gaaaaagaggctcttcctcctcctcccgcgacgatgctcagcctacagaaggagagagagaaatctggaaccagatcagcgcc

SEQ ID NO: 175607 - DNA, 74 bp, Homo sapiens
cgcaaggaggagcaggccgaggccatatccgagcgacataatgaagcctacacctggaccaaccccacctgctg

SEQ ID NO: 175608 - DNA, 74 bp, Homo sapiens
ctgggtccagtgtggaatttccatgaagatcttaaattccctcaagaatttcctcctagaccgacttctgcagt

SEQ ID NO: 175609 - DNA, 100 bp, Homo sapiens
tgcgactccgcgttcagaggcgtcgggctgctgaacaccgggagctactatgagcacgtgaagagctctcgatgttctgaagtatgaggaagttgacatg

SEQ ID NO: 175610 - DNA, 100 bp, Homo sapiens
ctcagcctcccaagtatctgggattacaggtcaaacactgctgaagataagtttgtgttctgcaatggacttgtcctgcatcgacttcagtgccttcgtg

SEQ ID NO: 175611 - DNA, 117 bp, Homo sapiens
ccgctcaggtgctgcaggcacagcccgagaaaccgcagcactacacgttttgaacgaagaatgtgatcagaactggtacaaggcagagcttaatggaaaagacggcttcattcccaa

SEQ ID NO: 175612 - DNA, 75 bp, Homo sapiens
tccttgctgaagagactttccgttacatgacttttcatgcaacacccaacacttataagcggaagaacacagaaa

SEQ ID NO: 175613 - DNA, 80 bp, Homo sapiens
gctgcctccgcctcccagggctccgcctctgctgctgaaggcctgaccgccgctgcctacagagtcacactcaatcctcc

SEQ ID NO: 175614 - DNA, 90 bp, Homo sapiens
accagatgaaagaatgactgcatgagtaagacataagcagatgttcaacccaacagaggaaagccagacatttcttcagctgaccactct

SEQ ID NO: 175615 - DNA, 97 bp, Homo sapiens
ggaccctacctacatcctgagctacatggccccctggtttagggaggggtttggattcaggatttgttcctagtgtccaagattttgataagaaact

SEQ ID NO: 175616 - DNA, 100 bp, Homo sapiens
cacgtccacacctactcctcctcaggtatcagtcagagccggatctctcattggctgttgcagcagggatcagacctgagtgaacagaagaaaagagcat

SEQ ID NO: 175617 - DNA, 50 bp, Homo sapiens
gattacgccccctatcctatccgcaaacactccaaaaggaattcttcatt

SEQ ID NO: 175618 - DNA, 88 bp, Homo sapiens
caacatctcggtgtccttatctgcagcttgaagaggctccatgatgcgttatctgggtctggaaacccaaaccctcaaggatggcctg

SEQ ID NO: 175619 - DNA, 96 bp, Homo sapiens
cccacccattcctttaaatccggagggggaaaaaatcccaaggtctgcaaagtcactcagcctctgaagaagcttcgggttcagactcaggcagtc

SEQ ID NO: 175620 - DNA, 100 bp, Homo sapiens
gcccgggaggccggagccaagccagcgacccaccatggagacccgctacaacctgaagagtccgggttcatctacgagacggagcatcacaacgggattg

SEQ ID NO: 175621 - DNA, 98 bp, Homo sapiens
tcgtgactgacctgcgcgcccgcctcggcccgcacgccaagcacgtggtgggctatggccaccttggctctgacgcccgctctgcggcttcggtgttt

SEQ ID NO: 175622 - DNA, 93 bp, Homo sapiens
gaggccgtgcgggacgcgggcgccaggaccggccgaacgcagagatctctggaaacatggctacagaacatgttaatggaaatggtactgaag

SEQ ID NO: 175623 - DNA, 82 bp, Homo sapiens
tttccggaaaacttggccgagggggagacgcgaatgagaggatgtgcacgacgccagctcccttctggggggccggggcctg

SEQ ID NO: 175624 - DNA, 83 bp, Homo sapiens
cgggggcctctcgtccgatgctcaggagagcttggaagactaatgagaacatggagatcaccagcgcactgcagtcggagcag

SEQ ID NO: 175625 - DNA, 75 bp, Homo sapiens
gtgcagctggcgccagtgagtgaccacacggccggggcacagcttgctatggcatcgttcaggtgccaacgggac

SEQ ID NO: 175626 - DNA, 50 bp, Homo sapiens
atactacatggcaaaatgggaaagtctggctcttgctgattgaattcctt

SEQ ID NO: 175627 - DNA, 90 bp, Homo sapiens
tgaacgtctccggaaagagttttctccatttggtacaatcactagtgcaaaggaaactagcagagttgttcacatcatggattttcaacg

SEQ ID NO: 175628 - DNA, 100 bp, Homo sapiens
gcaggggcagatggcaagtggagacagcaatctcaacttcaggtttgatctgtggatgaaatgaatcatgattttcaagctcttgcattagaatctcggg

SEQ ID NO: 175629 - DNA, 97 bp, Homo sapiens
ataaatcagacagaacagttaatcctcaatttaagcctgatctaacccctagaaacagaccagcatgttttggaaatttgatcttcactcatcatcc

SEQ ID NO: 175630 - DNA, 75 bp, Homo sapiens
gcagcacccgccaccgtcgccggccgcccgcacgtccgtccgcctgaactctttgcttccggaatccgggattgt

SEQ ID NO: 175631 - DNA, 98 bp, Homo sapiens
gctgggccgaccccagagcggcgctggacagtgttctaagaacggaagcatctgggctggatggaatttagcatcaagcagagtcccctttctgttca

SEQ ID NO: 175632 - DNA, 80 bp, Homo sapiens
caactctggatgggattgcaaaatgtactatactggcaattgctggagaagattttgcaattgttgcttctgatactcga

SEQ ID NO: 175633 - DNA, 78 bp, Homo sapiens
gcggagcgccagctcaatgaagctttggtgttaagatgttgagtactgccaacatgaagagcagtcagtacattccga

SEQ ID NO: 175634 - DNA, 99 bp, Homo sapiens
agaacttcaacatccatggaacggttggatggcaagcatgtggtgtttggcaaagtgaaagaaggcatgaatattgtggaggccatggagcgctttggg

SEQ ID NO: 175635 - DNA, 100 bp, Homo sapiens
atgaaagcccgaccagagaaatctgtaaataagatgcaggaagccaccccatctgcacaggatatgaacgagactgccaaacaagaagatattttggaat

SEQ ID NO: 175636 - DNA, 100 bp, Homo sapiens
ttgatcggtgatgccgcaaagaatcaagttgcaatgaaccccaccaacacagtttttgccagcgactctgcggacgatggctggtctccatggtccgagt

SEQ ID NO: 175637 - DNA, 100 bp, Homo sapiens
ctgaacaatggacagatggttttgcatttcagaatcttgtgaacttcagcgcctgctcctggtcatcactaaccagatttacttggagtacatgtgaaag

SEQ ID NO: 175638 - DNA, 74 bp, Homo sapiens
ctctgtgtggctgtaacttacgtgtactttaccaacgagctgaagcagagccagataacagtgaatggaaactc

SEQ ID NO: 175639 - DNA, 75 bp, Homo sapiens
cttttggcttagagatcactaatccatcttcagcttcaattacaaaaacctccacagctgttgagaaaaaggaga

SEQ ID NO: 175640 - DNA, 75 bp, Homo sapiens
gacagaagcagatggattcgtccttttagaacaggacgcaggccttgatgccctttcctctatcataagtcgcca

SEQ ID NO: 175641 - DNA, 90 bp, Homo sapiens
agtggaacatggctagcaggaatgcttactgttgcgtggttcgttattaacagaacctcaagaaggcatgaagccagcccctgcagtgcc

SEQ ID NO: 175642 - DNA, 75 bp, Homo sapiens
ccatggctccaagtttaaaagaactacgtgttttatccaacagatggctgcgcaccatctctgtgatcctgttcc

SEQ ID NO: 175643 - DNA, 74 bp, Homo sapiens
ttttaattggtaataaagcagatctggatcatcaaagacagaatgtttccattggaattgttggtaaagacttg

SEQ ID NO: 175644 - DNA, 100 bp, Homo sapiens
gcaatggccgctgagaacagcaagcagttttggaagaggagcgctaagctgccggggaggtgggccatgcacagacacagctcatgtctcattaatcaca

SEQ ID NO: 175645 - DNA, 100 bp, Homo sapiens
ccagcctggaggcagtggggacagcatccccatcacagccagcagaggcctcggaggtggcgggtgggacccaacctgcggctggagcccaggagccagg

SEQ ID NO: 175646 - DNA, 50 bp, Homo sapiens
cttctgcttcaacatcctgtgcgtgggcccaccgtttccatggtcgaagg

SEQ ID NO: 175647 - DNA, 100 bp, Homo sapiens
atgctgccaaaattatcaacaccaaaaagctttctgctagggcttcgagattcaacagaacaatttcaagaatattataggcaaagattacgctatcaac

SEQ ID NO: 175648 - DNA, 80 bp, Homo sapiens
ggcagctgcggtggcagctgctgagttctcggtgaaggtcaaaatgcagatcttcgtgaaaacccttaccggcaagacca

SEQ ID NO: 175649 - DNA, 80 bp, Homo sapiens
aaatcctaatgacagtctccaaattcgcctccatctgtaccatgggctggtgaattaccatatctccgtcaagtgcagta

SEQ ID NO: 175650 - DNA, 82 bp, Homo sapiens
cgggttagggggccggcgcccgcggttcagataccatggagtagtttgaaacaggaacaaaatcttctgaaagctcggagca

SEQ ID NO: 175651 - DNA, 74 bp, Homo sapiens
taccagttcagagaactgtgtgaagaaaacctggacttaaccaccaccatgtcgagcaaaagaacaaagaccaa

SEQ ID NO: 175652 - DNA, 78 bp, Homo sapiens
tcccacgctgctactgcctgggggctgaggatgacaaaaaagccttcatagataagaccatcatcatgtggaaactga

SEQ ID NO: 175653 - DNA, 75 bp, Homo sapiens
gctgtcggccgaggtcaagaaccggggattacaattctgctccccaagaggccccctaagaccacagaagataag

SEQ ID NO: 175654 - DNA, 100 bp, Homo sapiens
gagactatcacctatcgccaagtgaggggtgtttgatgcttccctcaaaatggctggcttctatggattgtatacctggctgactcatactatgtttggc

SEQ ID NO: 175655 - DNA, 90 bp, Homo sapiens
agtgcctgtaaccaggtcgtcaagccacaggttttccagtcgcactgcggccccttcacagatgtagtcactacaaatcttaaattgcga

SEQ ID NO: 175656 - DNA, 100 bp, Homo sapiens
ttacaagacaagtggctcagtgcaaatgtgcaaaaaggtttcaggtggagcagatcggagagaataaataccgggatggggaatttagcatggatcttcg

SEQ ID NO: 175657 - DNA, 100 bp, Homo sapiens
cggctgcagcacgcatcgaggctatggaccctgccactgtcgagcaggatcctttcaagtatagctatccaccactagtagatgatgacttccagacccc

SEQ ID NO: 175658 - DNA, 97 bp, Homo sapiens
ttgctcccaaaggcgcaccaatgaccaacatttgccccccggaggaaagaactggaaccagcttcctgcctgacacagctcacttcaagaagtgcac

SEQ ID NO: 175659 - DNA, 100 bp, Homo sapiens
cggatatcctctgttgggggagaagaggtggagaaaacccggtgccagcacgagcgagaacacattctcggggcagcgggggcgacagacccacagcgac

SEQ ID NO: 175660 - DNA, 75 bp, Homo sapiens
agacgtgccagtgaagtacagaaaggagttagccctgcgtagccagttaccaacactggagcaggatggtgggac

SEQ ID NO: 175661 - DNA, 98 bp, Homo sapiens
gggctgggctcgccagtcttggggacagtgtcagcgatatgttcaaggaatgagtgatttactttcccctcttttatatgtgatggaaaatgaagtgg

SEQ ID NO: 175662 - DNA, 75 bp, Homo sapiens
aggctcagagcttggagacagacggagaattgacatctcaccaagtaccctgaggaagcatacccgtttagcagg

SEQ ID NO: 175663 - DNA, 95 bp, Homo sapiens
tacctggttcacagaccgagttagcaattgtcaccgcagactttgttaaggaatcagagatcattgatttcttcctgggggcctctctcaaggat

SEQ ID NO: 175664 - DNA, 80 bp, Homo sapiens
caccatcaacaatgagtacaactaccgctgctggaccacaaaccgctgccagaaaagctgaccaactgactgaagagcag

SEQ ID NO: 175665 - DNA, 82 bp, Homo sapiens
gaagctcggggacagagtgcagctcctaaacctgctggtgacacgactcagacagaaggattatatctgtccaagatgcgag

SEQ ID NO: 175666 - DNA, 83 bp, Homo sapiens
agatccacagctaagacgccgggactccctggaaacctagaaatgatgccatggacaatattaccaggcagaaccaattctac

SEQ ID NO: 175667 - DNA, 100 bp, Homo sapiens
attaggaaacatgctagaattacctggaacttcatcatcatctacttcacaggaattgccatttacgttccatcctcagagcagcctgaactgttcctaa

SEQ ID NO: 175668 - DNA, 100 bp, Homo sapiens
cggccgcagtggcgtcctggagccctcctcaggtgagctggagctgcccggctcggcagcgggaagttttttcaagggggaacatggcaaaggtgttcag

SEQ ID NO: 175669 - DNA, 50 bp, Homo sapiens
ctttagtgatgtggtggtaagatgtatggaaccaaccggtgagccctctc

SEQ ID NO: 175670 - DNA, 82 bp, Homo sapiens
cgacttagccctgctccaggaatgggacctcgagtcactgtggtctcggcgcggaagatggccggcggcgtggacggcccca

SEQ ID NO: 175671 - DNA, 80 bp, Homo sapiens
caagctgtgcagaacacattccagtttttattagaaaactccagcaaggtcatcatcagatttgaaatatttaaagtgga

SEQ ID NO: 175672 - DNA, 50 bp, Homo sapiens
cgggacatagaacaggtgccacaggaagtaaccggttttgtgaggattgg

SEQ ID NO: 175673 - DNA, 51 bp, Homo sapiens
cttcaatgagtaaacatattcctgttaacacagaaatctgcctcctgggcc

SEQ ID NO: 175674 - DNA, 90 bp, Homo sapiens
ctggaagtgatcaatgcacacatggtactaagcaaagccaacagccaggagcatggggaagtgattgactgtgtgcaggagctgagccac

SEQ ID NO: 175675 - DNA, 75 bp, Homo sapiens
catcaccaaggccaagaacgggcacctggctgtggcggcttacagggagaacacagttggcctccaccgtttctg

SEQ ID NO: 175676 - DNA, 83 bp, Homo sapiens
ctcgtgtgtaacccagtccacagagtatgcagagaacatcggggacggccggagcccggagttccgggagaacgagcaaaagc

SEQ ID NO: 175677 - DNA, 97 bp, Homo sapiens
ttagccacaatggcatcgaggtcatcgagggcctggagaacaatgtcgcatatctgtgcctattgatttgcagaaagtggaccagtttgatccattt

SEQ ID NO: 175678 - DNA, 100 bp, Homo sapiens
atgcccttttagtggggacacagactaatcttttggcttatgatgtctacaataattcggatttgttctacagagaggaagatgagaatgtgcctactgc

SEQ ID NO: 175679 - DNA, 96 bp, Homo sapiens
gcgccagcaagcggggccggtggcgcccgtgtcggagaccccgcgccggaccctgaggcagcgatggtccatgctgtggacggcaccgccgagaac

SEQ ID NO: 175680 - DNA, 100 bp, Homo sapiens
ggatctgctcaggacaccattatttgaccagatcattgatatgctgagagtggaacaggtatggagagtcggcttgactacactgtgtggagcaagtttt

SEQ ID NO: 175681 - DNA, 100 bp, Homo sapiens
ccagacactcaaccccgtctgggacgagaccttcatcctgaagctgtctcgtgcagacttgaccgagtacctcagcacacattacaaggcccctcgaatg

SEQ ID NO: 175682 - DNA, 100 bp, Homo sapiens
cagacatctacaaccttcgatctcctgacgaccagatcaagtcaaatttacgttctgaagtatgtccaaggaaattaagagctggtgcatgaaaagatag

SEQ ID NO: 175683 - DNA, 100 bp, Homo sapiens
gccggagggctgtcgcttctgcagtgcgtaggagcggccggggcgggaggctccgcggagccgaggcgtggaggtgctggagaatctggtaaaagcacca

SEQ ID NO: 175684 - DNA, 101 bp, Homo sapiens
gtccagtctcatttctgtaattccatgattgatcctgacatttacctgttacaggtcttcttcgtgatccacctgcacgctgggcctgtcatcaacaccct

SEQ ID NO: 175685 - DNA, 96 bp, Homo sapiens
cgctgcctccgccttcctgccccgcgtcgggccgggcgccacctcccccctgcctccctctccgctgtgagtgatagattcgtgtggcctttcaaa

SEQ ID NO: 175686 - DNA, 75 bp, Homo sapiens
aaacaagcaaatctggctatcttctccatccaggtctacatgttcaagtgcgtgtggcggtgctacagattgatc

SEQ ID NO: 175687 - DNA, 95 bp, Homo sapiens
aacaactggtgccgtagcaacagctctaggactcaatgcattgaccaagaattcgacaccaaattttggaacttaaaaagaagattcttaaaact

SEQ ID NO: 175688 - DNA, 75 bp, Homo sapiens
cctctacttagctcagcaattcttacctttcacattaactttgctctagaagacaactttacaaggatctaaaag

SEQ ID NO: 175689 - DNA, 112 bp, Homo sapiens
aaatgtttttctgttttgcctgaatacatgatttaaacaagagatttccacagaagagatccagttgtcatcggtatccaggaagctctcctcttcctcctcctgacgtcta

SEQ ID NO: 175690 - DNA, 88 bp, Homo sapiens
cggagcgccagctcaatgaagttgcaattgtagctcaagacttggcagcattccatactgcctcatcagaaatggggcaccagcagca

SEQ ID NO: 175691 - DNA, 78 bp, Homo sapiens
gccgcgctgcagaagagcaggcacctcctggaccaggatgtgctgggtggcgtcctgatcaccgcactcctcatcgtc

SEQ ID NO: 175692 - DNA, 101 bp, Homo sapiens
aagcctggatgaaatagatctctcggctctgaggatggactcaccctgtcacccaggttggactgcactggcctcaacctcctgagttcaagtgatcgtcc

SEQ ID NO: 175693 - DNA, 90 bp, Homo sapiens
agtcctgtggagtgggccagggtcatgcagaaaaccaatgtggtgacctgagcatctctgcagaccgcctgagtgagaagcgctctccca

SEQ ID NO: 175694 - DNA, 75 bp, Homo sapiens
ggctgtctcggaacccgtggtcctccgcttcatttgaatccttggcctgaatatatttacacacgtcttgagatg

SEQ ID NO: 175695 - DNA, 75 bp, Homo sapiens
ccttggaagtggatccttcccccgaaagcccggctttcagggaaagaatatggcaaagctgatgcaagatgggtt

SEQ ID NO: 175696 - DNA, 100 bp, Homo sapiens
tactcagaagaacttgtacagagatgtgatgttggagaactatagcaatctggttttcttggagctggtccctgcagaagagacggaacaggataaagag

SEQ ID NO: 175697 - DNA, 100 bp, Homo sapiens
ctcattggttgtccagtttggagtctactcattggttagaacatatcaagattaaaactttggaacagactaaagccattgaagatctaaacaaatccag

SEQ ID NO: 175698 - DNA, 100 bp, Homo sapiens
ggatgaaatgaaacagattctaactccaatggcccaaaagtttactcctggcttgggggcattaggaagcactggaggctcttcgggaactaatggatct

SEQ ID NO: 175699 - DNA, 100 bp, Homo sapiens
attggaccctcctcccaactgtagcacttttccagccattaactccaggctctcgagaatttgaagatgttgtaaatattctccattcttcttaccttga

SEQ ID NO: 175700 - DNA, 75 bp, Homo sapiens
gaaaacaagcaaatgctgccttccttgttggatgctacatggtctctaattaacagaagatggcaaagcccagcc

SEQ ID NO: 175701 - DNA, 76 bp, Homo sapiens
gcagacctcctgaaaaccaagccgaggactgcggggtccggtgtccacgcagagacctagatgtgaaggctggtgg

SEQ ID NO: 175702 - DNA, 96 bp, Homo sapiens
ggcgtggacaccgcctggaacggctacgcggccgcggagccgggggcgggggccgggcgcgcacagaccggccgccatggcatcagatgaaggcaa

SEQ ID NO: 175703 - DNA, 73 bp, Homo sapiens
gattgagccctactttttattggactccacaggtggcttctggcacagcagcttaattgaccggaacctcatt

SEQ ID NO: 175704 - DNA, 101 bp, Homo sapiens
ggaggccgacctgaaccacgaattcaatgaatccctggtggattttttatcaagcagaaatgcatcgaacaacgagaatcaagatcactgagctaaatccc

SEQ ID NO: 175705 - DNA, 82 bp, Homo sapiens
gcgcgcggcgcgagggaggctacacgtgcgtctgccgcccgcgcttcaccggccctgtttgtgctcttcgtcctggcctaca

SEQ ID NO: 175706 - DNA, 90 bp, Homo sapiens
gccacgggggccgccgcagcaccatggcgaccaccgtcagcactcagcgcgggccggtactctctgaagatggcagaagctcaccaagct

SEQ ID NO: 175707 - DNA, 82 bp, Homo sapiens
aagacgtctgcgtgagaatagagaccaccgagaaaccaaggtgtatgttggtaacctgggaactggcgctggcaaaggagag

SEQ ID NO: 175708 - DNA, 100 bp, Homo sapiens
gcgagtcctcggtctggtgctgctgcgaggggagaatctggtctcaatgacagtagagggacctcctcccaaagataagtctcaggggatccagaactgc

SEQ ID NO: 175709 - DNA, 92 bp, Homo sapiens
cagggagcaggagcttcaggttgtccgagcatctgggaaaattatatccagatcgagagacagaagattctgaaagggttcaatgaaatgag

SEQ ID NO: 175710 - DNA, 82 bp, Homo sapiens
gggacgtccggcttcggagcgggagtgttcgttgtgccagcgactaaaaagagggatggatgaatgagatttacaactatga

SEQ ID NO: 175711 - DNA, 95 bp, Homo sapiens
cgcagaaaccccgttgacaaggcactgctttttcatgacggtcctcagaatggttggaatgaccctccagctttgaacagagtacccaaaaagaa

SEQ ID NO: 175712 - DNA, 100 bp, Homo sapiens
catgccctcccagggccagatggtcaacggggctcacagtgcttccaccctggacgaagccacccccaccctcaccaacaggatacagacgtccctcacc

SEQ ID NO: 175713 - DNA, 50 bp, Homo sapiens
ggatctggggatcttcgcactatcccaagaactttgcagaaaacaccatg

SEQ ID NO: 175714 - DNA, 51 bp, Homo sapiens
accaccatttcaaattttcacactcagattcgctttgtggtggaactcgtg

SEQ ID NO: 175715 - DNA, 100 bp, Homo sapiens
ggcccaactctaagtgcccacttctgaaggatgacctcgttttgatggacagcttcttctgcacggtacctgagatcctggtgcacaacatagtgatctt

SEQ ID NO: 175716 - DNA, 90 bp, Homo sapiens
gcacctacattgacaagaaatgccccttcactggtaatgtgtccattcgagggcggatcctctctggccaaacgtaccaagaaagtcggg

SEQ ID NO: 175717 - DNA, 90 bp, Homo sapiens
ccctgcctactatctatgttgttacccccacctatgccaggtatcttggagatggccgcttccatctggagtctgtcatgattgccaacc

SEQ ID NO: 175718 - DNA, 100 bp, Homo sapiens
gcgatgacgcgctcactgttcaagggaaacttttgggaactttatattgctgttggaatatctggagccatccaacatttagctgggatgaaagacagca

SEQ ID NO: 175719 - DNA, 88 bp, Homo sapiens
gatcctcgcgtgagacagatcaagatcaagaccggcgtggtgaagcgtgtgcaggatgacagaattcgagtcgaaaggatggataaca

SEQ ID NO: 175720 - DNA, 102 bp, Homo sapiens
gctgattggatttccctctgtgggagtgtggccatctggggccgtgtggtatttgccactcaggagacatgtccctatgacatagcagtggtgagcctggag

SEQ ID NO: 175721 - DNA, 100 bp, Homo sapiens
gcgaagggaatcgcaaggctcttccctgaccattttctactgtccctgcgcgagccaaaagaatgcaatggtgtaaagattccagttgatgccagtaaac

SEQ ID NO: 175722 - DNA, 100 bp, Homo sapiens
ccacgacccacgagatcatggggcccaagaaaaagcacctggactgatttaagtgccctgtatgctcaaaatttgtatcctcagatgaaatggatttgca

SEQ ID NO: 175723 - DNA, 100 bp, Homo sapiens
cccacaggaagtgtcacacagcagtcaagtatgtcccaaacgtctatgaagcctgcaggacaccagctgacagtggaaggactgaggaaggttgtataat

SEQ ID NO: 175724 - DNA, 100 bp, Homo sapiens
cgcttctttaagggctacgggaagatcctggaggtggatctgaagaacgggtgaaatgacaatggatgctctgttggctcgattgaaacttctgaatcca

SEQ ID NO: 175725 - DNA, 127 bp, Homo sapiens
acaatctttccttctgtcaacggcaggggcaggcctagtttgactctgacagtcctcccactaaggtacgtgaacacactcctgaaactcatcccgctggtgctgggtctgcaggaacaactgcggc

SEQ ID NO: 175726 - DNA, 99 bp, Homo sapiens
tggtgaaaaatgaccctgaactggaccagcagaactgttcgtcagttggcacaggagcagttctttttaatgtgcaccagatgttgcatgggacacagg

SEQ ID NO: 175727 - DNA, 74 bp, Homo sapiens
ttatcaccaacagtgtcattggccccggctgccacattgagcactgcagtttcctcctgaaggctggctccggc

SEQ ID NO: 175728 - DNA, 98 bp, Homo sapiens
aggcaggcattgtgcccaacaccatcacctatggctactacaataagaggtcactccccagaatggtacagcaaaggctttggacatctgtgtgcagc

SEQ ID NO: 175729 - DNA, 75 bp, Homo sapiens
gaaagcaactcagcgggatctcccgccgacatggagctcgattcaggtgccattgttacatgaggtgaacagtga

SEQ ID NO: 175730 - DNA, 80 bp, Homo sapiens
atttccttcgtacccacagtgcttcatgagagtgtgattcgtcatcgagatgttcgatcctgtcactatggtgtaataga

SEQ ID NO: 175731 - DNA, 100 bp, Homo sapiens
tgggcgtggttgctggtgctcagcttcgtgtttggatgcaatgttcttaggatcctcctcccgtccttctcatccttctaatgttgcaggtcagtggaat

SEQ ID NO: 175732 - DNA, 100 bp, Homo sapiens
aaccattctaaagccttttatgctcagacagtctccattctggagcagcggttgacactgacagaagacaagctgaagcagtgtctggagaaccagcagc

SEQ ID NO: 175733 - DNA, 75 bp, Homo sapiens
cagccttcagaaattgccggtctgggagttgggggcaaggagaagatcctggatggacagattcctggtgaaagg

SEQ ID NO: 175734 - DNA, 75 bp, Homo sapiens
gtgaacatccagtttcctgataaggacgatgggaaccagatcacccggaagttcaggctgaattctgaaggcaaa

SEQ ID NO: 175735 - DNA, 75 bp, Homo sapiens
cttacgtctgcggaagtgcagctgcctcagttcttagcgcagtgccttcaatgaagattatgttggaagtgggtg

SEQ ID NO: 175736 - DNA, 100 bp, Homo sapiens
atttaccagttggtcatctgctgtgctgcaggaatgaatgtagctactgtgggtggtattaaagataatcaaacattatcaagaagaaggacaaggaact

SEQ ID NO: 175737 - DNA, 50 bp, Homo sapiens
tcttcacttggcaaactcaacaagatgtatcctccactcctcgctggcca

SEQ ID NO: 175738 - DNA, 100 bp, Homo sapiens
aaaagctgccaagttgaaaatggacgagtaatcgcctgctttgattcattgaaagtgtatgtggaatttgatgatcttgaatgggataaacgagagtggg

SEQ ID NO: 175739 - DNA, 83 bp, Homo sapiens
gctgtgctcgctggcaccccgaacgggttgcttcccccgctgcgaggtttttagaacttcagccataaaaatgggcagaattt

SEQ ID NO: 175740 - DNA, 89 bp, Homo sapiens
gagagcgacagcccaagtcaccagtactctttccattccttaccccagtttttgaagcattaaatgtctctctgtttccaaaagatacc

SEQ ID NO: 175741 - DNA, 50 bp, Homo sapiens
gccccaccccgccagctccagagccacggtggtgattccactgaagcaac

SEQ ID NO: 175742 - DNA, 100 bp, Homo sapiens
caagtacaagcccacctgcaaccaggccatggagaagtgtaaggatgcaggattggccaagtccattggggtgtcaaacttcaaccgcaggcagctggag

SEQ ID NO: 175743 - DNA, 100 bp, Homo sapiens
ctaattttgacacagaaattcctttcctgctagaactttcagaatctcaggcgggtgaggataaaagactcagatcatgctgaacgtaactgtgcaatgc

SEQ ID NO: 175744 - DNA, 100 bp, Homo sapiens
ggaaagtcggccaagaaagacaaagacccagtgaacaaatccgggggcaaggccaaaaagaagattgaggcagcactaagcaggatgccttctcctggag

SEQ ID NO: 175745 - DNA, 83 bp, Homo sapiens
gcagtcgccgtgaagatggcgtctaccagccgtgcctccggagccagcgtggtggccatagacaacaagatcgaacaggccat

SEQ ID NO: 175746 - DNA, 100 bp, Homo sapiens
cagcagcgccgggggtattgccgagtgcttcgtgcagagggttcgttccaccagtcataaaccagatgaaatctatggcatgattgaaagactatctcct

SEQ ID NO: 175747 - DNA, 75 bp, Homo sapiens
ctcgggagtttcaccagaaggctgctgacctacacggtattgagaaggggcaaatcctgtcttcagcagcagaca

SEQ ID NO: 175748 - DNA, 83 bp, Homo sapiens
cagcactttcttgcattgctgaatctttaaaattctatcacaaagggattgcttccttaacatgaagaaaaaatgactgctgc

SEQ ID NO: 175749 - DNA, 50 bp, Homo sapiens
ggacaccttcacagatcataagttcacagcaacccaatggacatgcctgg

SEQ ID NO: 175750 - DNA, 75 bp, Homo sapiens
cctggacaaggtggccgacaacctggccatccagcttgctttgcctcttgaagtggatttaactaaagcgaagag

SEQ ID NO: 175751 - DNA, 100 bp, Homo sapiens
tatgagatgaacaagagactgcagtctcgcacagagggtatatttacttctggcacatgggaagagaaatcagatgaaatttcctttgctgacttcaagt

SEQ ID NO: 175752 - DNA, 75 bp, Homo sapiens
gtatcgtcgagaagcctatcatcgcccctcgctcctgcatcatcgacaaggatgagctgaaggacggcctgcgtg

SEQ ID NO: 175753 - DNA, 83 bp, Homo sapiens
ctgacgtccatcagactgcacggcggccgcctgtggtgctgttccgccaggtgcggctgaaacaccggaagctccgggaacaa

SEQ ID NO: 175754 - DNA, 100 bp, Homo sapiens
agggtcgtgccgccggcgggtcgggccgggcaatgcctcgcgggcgcaatgaatccgcggcagtgtgctggaattgatgttcgtctgtgtgatgttggtg

SEQ ID NO: 175755 - DNA, 101 bp, Homo sapiens
atggtctttgtggaaacgtctccaggttacaaacccagatctcacacaagtggtcagtttggttgtggaaagcaatcatttggggaagaatctacagttgc

SEQ ID NO: 175756 - DNA, 98 bp, Homo sapiens
cgatcacctttcaaggagtcctgtgatccatcactcggattggcaggacctggggccaaaagccaagacacatcatctcagagttggagcacctgacg

SEQ ID NO: 175757 - DNA, 100 bp, Homo sapiens
gccacctgcctccacgtctggaataatgggtactctttcctcgtggaatttgaagattctacagataaatcaggacaactacacctttgcccaacctggg

SEQ ID NO: 175758 - DNA, 82 bp, Homo sapiens
aaggaagaaaagatcacgttgatgaactcgagcctgagcgacataaggctctacagattctcccctgcccctggagaaggag

SEQ ID NO: 175759 - DNA, 75 bp, Homo sapiens
tgaatcccctgtttgagaaaaggcctaagaattttggcattgggagagtcccgtattctcagagtaaaagttgtt

SEQ ID NO: 175760 - DNA, 75 bp, Homo sapiens
ctggctgactggatccacagcagtgggggctggctttgtcacccgaaagaaccgccaagtgtgtgccaacccaga

SEQ ID NO: 175761 - DNA, 100 bp, Homo sapiens
tcctgtaacccagcctgtttcacttcttggtgcaaaatgagttgataacaaccagaagttgacttgttagtgctgtgcttctactcgagcttggaaaaat

SEQ ID NO: 175762 - DNA, 83 bp, Homo sapiens
ccaactcgggtcgcccccaccattatttcggttacgggcaggacttgagtggcttcggacagggcttctcagaccccagccag

SEQ ID NO: 175763 - DNA, 82 bp, Homo sapiens
cgtgtcccggggccgacccggcccgtagtgtggaagcagcttcaggctaggtcctttcacaaaactgttcctgtgaaagcat

SEQ ID NO: 175764 - DNA, 100 bp, Homo sapiens
catgattgcatttttcttcatcatcatttacctgggaccaatggttttgatgataatcgtctggtccgagagcaggaggctgggctgctgcagttcctcc

SEQ ID NO: 175765 - DNA, 112 bp, Homo sapiens
ggagttgtctgtctttaaggacagactgtatgaactggacatctcgttccctcccagatggccgaacagacccaattttggatgatgttggtgaagctttccagctgatggg

SEQ ID NO: 175766 - DNA, 141 bp, Homo sapiens
ttttatgcagaactgcgatttccaaatcgatagttttagagcctatctattggaattcctcgaactccaatgtaaacaggaacatcgataagtagtgtaaaaacttgcacaatgaaatccgaagccaaggatggagaggag

SEQ ID NO: 175767 - DNA, 98 bp, Homo sapiens
gtctcggagaccccgcgccgacggctgctcaaacatcaggctgagatctgtatctgtggacctgaatgttgatccctcgcttcagattgacatacctg

SEQ ID NO: 175768 - DNA, 76 bp, Homo sapiens
gctagaactcagttgtgcgttgcggccagtcgccactgctggtgagaactctgtctcagtcgacgggaagtgcagt

SEQ ID NO: 175769 - DNA, 98 bp, Homo sapiens
agatggcggcgcgatggagcagcgaaaacgtggttgtagagttccgtgactcccaggcctgccttgctctgccaggaaccatgagtgaggcccgcagg

SEQ ID NO: 175770 - DNA, 100 bp, Homo sapiens
aagctctagcagaggaaaataagaacacagtggatgtcgagaacggtgcttctatggcaggatatgttgcagaggaaagtggtcgcttatggtcagagga

SEQ ID NO: 175771 - DNA, 97 bp, Homo sapiens
cagggcggagaggagcggccggagtcagcgatggtgcccggcgaggagaaccaactggtcccgaaagaggagtgacagttcatttagattctttgta

SEQ ID NO: 175772 - DNA, 85 bp, Homo sapiens
aacttgaaactgtttgggaaatgcaacaatccaaatggccatgggcacaattataaaggctttaaatgaagaaattgttaataga

SEQ ID NO: 175773 - DNA, 98 bp, Homo sapiens
gaccgagagcgtgaccgagagcgcgaatatcgtcatcgttagaaggcaccacactgtaactcgaggcatcaccaaaggcgtgaaggaggactttcgcc

SEQ ID NO: 175774 - DNA, 60 bp, Homo sapiens
tcctgcgcttggggatcctctgtacgcccgttcactggaaaatctacttcctcatcaagc

SEQ ID NO: 175775 - DNA, 75 bp, Homo sapiens
tgaacatcctttgactggttagccaggtcaagtcatcagcccacaaagtagcagtagtggcacggatctgacggg

SEQ ID NO: 175776 - DNA, 75 bp, Homo sapiens
gtttggaccagaagaagccgaaggaagtcttctaaggacaagctcagtgggagcaggccccggtgagtactggga

SEQ ID NO: 175777 - DNA, 50 bp, Homo sapiens
tgaagacaccaaagatgggggaggggaagcggccaaaaaggcccccaaag

SEQ ID NO: 175778 - DNA, 101 bp, Homo sapiens
cggccggggcagcgctcctggcgctgctggctgcgctctgcccggcgagtcgggctctggaggaaaagaaagaggatgtaggaagaagctggtctgctgac

SEQ ID NO: 175779 - DNA, 87 bp, Homo sapiens
ggatgactgtatcttgattacccggagtgagaaagatcagtctaaagaaaaggagaagaaagtgaaaaaaacaattccttcctgggc

SEQ ID NO: 175780 - DNA, 100 bp, Homo sapiens
gaagcagaggtggtcatgttggagcaaggaaaggaaccatgggcactgcagggtgagaggccacgtcagagctgcccagcctcgtctcctaagcccctcc

SEQ ID NO: 175781 - DNA, 83 bp, Homo sapiens
ctggcactgtggttcctgcatgaagacagtggctggcggtgcctggacgtacaagtgtcttcagtgccctgggtttgcctgtg

SEQ ID NO: 175782 - DNA, 100 bp, Homo sapiens
tgctcttctatcacagacgtccggacaaccacagccctggagatgcctgaccgggagaacacgtttgtggttaaggctgcgctgaacatcttaaagttgc

SEQ ID NO: 175783 - DNA, 99 bp, Homo sapiens
gcggacgctcggtcccgcgctgcgcatccccgcggacgccacagcgctagtttatgtggccgaggcagacaagtggaattaggccttgctgcaggggac

SEQ ID NO: 175784 - DNA, 82 bp, Homo sapiens
tccggattggcagtggttttgacaacatcgacatcaagtcggccggggatttagggtcggcactcttcaccctcccgagccc

SEQ ID NO: 175785 - DNA, 50 bp, Homo sapiens
gttccacctcattttagagtatcaagcagcttcagtatcagacacagcac

SEQ ID NO: 175786 - DNA, 82 bp, Homo sapiens
tccgtgtgcagccccaaactggaaagaagatgctaattaaagtgaaggaggactttttgtaaatagcccagaagagcccagc

SEQ ID NO: 175787 - DNA, 100 bp, Homo sapiens
gttcttcagccacatactttccttccactggccagcattctcctctattagactagaactgtggataaacctcagctacagaagtcaagattccaaaacc

SEQ ID NO: 175788 - DNA, 100 bp, Homo sapiens
agtcttgctcagctctcacaggagagggcgttcaggtttccgcagacatgcagctccagttacaagaaggcagttcccacacggtgcacacaggatggat

SEQ ID NO: 175789 - DNA, 78 bp, Homo sapiens
agggcccctccgcaagagctccctcaagaagggagggaggctggtggagaaggactcagaattcatgattgaagaaat

SEQ ID NO: 175790 - DNA, 90 bp, Homo sapiens
ggcggcgccacgcggcccgccggccacgcgccctgggacaaccacgtctccggccacgggtgtcaaattgagaaccaggtagatccccac

SEQ ID NO: 175791 - DNA, 98 bp, Homo sapiens
aacttccagaccaccaaagacagtgtccagctaaaggagaatcaggaaacccaggcccaacggcaggtggatgcaagaagaaatgttccccaaaacga

SEQ ID NO: 175792 - DNA, 90 bp, Homo sapiens
ggcggcggccgcgcgggtctggcgggaccggtttggaagactttgccggcctgcagccttgccaacattccactaacccccgagactcag

SEQ ID NO: 175793 - DNA, 83 bp, Homo sapiens
gtccacccaccgccgccgcctcccagggcagtcagggcgacagcaagaatgccaagaagaagaacaacaagaaaaccaacaag

SEQ ID NO: 175794 - DNA, 74 bp, Homo sapiens
gcgaccgccctgcgcttcgtgcaccggggcggtccgttgccaaagccagaatttggaaattaagactgatacag

SEQ ID NO: 175795 - DNA, 49 bp, Homo sapiens
gtacctgttaccactttcaaaaatgccaagattcgcatttttgacctgg

SEQ ID NO: 175796 - DNA, 50 bp, Homo sapiens
gacatctaatttcattgctcggcaggtgagcacattcgattgggtgcgag

SEQ ID NO: 175797 - DNA, 75 bp, Homo sapiens
tcgaaaaaataagaaggaacccaaagaaccatctcccaaacaggatggccagctgcgggccgtccagcggctgtg

SEQ ID NO: 175798 - DNA, 98 bp, Homo sapiens
ggaatagtagcaggcggcggcggcggaacgccaggcagatgaagttggagcccttgtttttgacattggatcctatactgtgagagctggttatgctg

SEQ ID NO: 175799 - DNA, 75 bp, Homo sapiens
gaggtctccaacaagcttccaaaatggcctgtaggagagaagtttgctgaggaatgccttcaagcacaaagtgat

SEQ ID NO: 175800 - DNA, 80 bp, Homo sapiens
ctacggacctgtctgggtctcagccgccaaagaccccgtccggtaggtttcccaccgttttcgagaactcatgcagctct

SEQ ID NO: 175801 - DNA, 83 bp, Homo sapiens
ccaatgatcttttcaatgctgcgaaagctgccaaaagtgacatgcagaaatgctttgtggtctacagccacaccaccccaaat

SEQ ID NO: 175802 - DNA, 98 bp, Homo sapiens
gcgacagaaaacttggaactaagctggaggacaccgagtactcttatgcagtccccatggacttccgggacccatggggcctccagggcttcctggga

SEQ ID NO: 175803 - DNA, 76 bp, Homo sapiens
ggaaggagcatcccaggacctaccagaatctgggaaatcctcattgacgattcaatttgttgaaggccaatttgtg

SEQ ID NO: 175804 - DNA, 90 bp, Homo sapiens
cacggtctgtggctacggatcccaggaccctcttcgcgggcgattcgcgtagcctcaggtgcccgtggttgacacgagctgtgtccccag

SEQ ID NO: 175805 - DNA, 98 bp, Homo sapiens
gacagtcatcaccatgggccgggatcacattctgattatacagttgtctcctccagctgctgtaccagtttagactacatcgtcacctacctcttcaa

SEQ ID NO: 175806 - DNA, 76 bp, Homo sapiens
ggttattcgagtgaccgagaccgcggccgggaccgagggatgttttagaagaatgtatgtctcttcccaagctatc

SEQ ID NO: 175807 - DNA, 100 bp, Homo sapiens
gtttcttatatgtgatgccattccagcactggactcatggaggctgagcatttattcaggtctctgctgctgatgaagctgtgaccaaacgcacccaacc

SEQ ID NO: 175808 - DNA, 90 bp, Homo sapiens
cagggatacttttctacaacagaaagctcaatcacttaccaaggattgcttggcattttgtacagaaccagtttttgccagtttagccaa

SEQ ID NO: 175809 - DNA, 75 bp, Homo sapiens
tgtcactccacctcgaacagctaatccgccgaagaaaagcttcctgcctgacacagctcacttcaagaagtgcac

SEQ ID NO: 175810 - DNA, 100 bp, Homo sapiens
cgagcggggacttcactgctctgctgtctcctgcaagaactggctcaagaaatttgcctcgaaaaccaagactcacaccacccggcaagaactgctcact

SEQ ID NO: 175811 - DNA, 100 bp, Homo sapiens
gaagctgtaactcttttaaagtatatgtatgacttttaaaagagagagcttgtgaaactgagggaatagatctttaaatggatgagatggctaccactca

SEQ ID NO: 175812 - DNA, 140 bp, Homo sapiens
ggcatttggctttgattactgctactggtcagtcaacccagaggatccccagtatgcatctcaagatgtgctcttcgtgcgagaacctgagaagaggctgggcgtgaggggagacatccgccagcaccctttgtttcggg

SEQ ID NO: 175813 - DNA, 100 bp, Homo sapiens
cggcggcgcccgcgggtggtataaaatggcggatttcgaagagttgagggttgcccgaagctcagcagagagtcggaggctgctttttaaacctgatgcc

SEQ ID NO: 175814 - DNA, 100 bp, Homo sapiens
cggaggggcgctgtgtgtacatcacccccatggaggccctggcagagcagtccagggaccttgacccagcccctctcagcagacgcttcatgataggaag

SEQ ID NO: 175815 - DNA, 100 bp, Homo sapiens
caggcagcggcggatcatattccttcatctaccatggctcagccgggaactctgaacctcaataacgagcctgtgcctactacactggcacaagtggata

SEQ ID NO: 175816 - DNA, 88 bp, Homo sapiens
aggattcgatggcaattttttgtggaacagaattggagcaggctgaggcagctaaattagttccaatgggtttcaccactgcaactga

SEQ ID NO: 175817 - DNA, 90 bp, Homo sapiens
agagaatggactgaacaggagacccttctactcctggaggaagagagaagggcacagttacctaagtatcaacgtaatcttcctcggcca

SEQ ID NO: 175818 - DNA, 97 bp, Homo sapiens
ctgtgtcacaggaggccttacatcaggatatgcctgaggagagctctgaggaggattcactcaggagaaatcatagcccactaatgagttttggagc

SEQ ID NO: 175819 - DNA, 75 bp, Homo sapiens
gcagctgcctcagttcttagcgcagaagtttcaggcacctgcaagagagacctgcgtggaatgtcagaagacagt

SEQ ID NO: 175820 - DNA, 90 bp, Homo sapiens
tttaattttagggtcctttatatagaagggagagtagaaggacagaataacgggctcccagattcacaagccccaccaagaggatcaccc

SEQ ID NO: 175821 - DNA, 100 bp, Homo sapiens
accaatccagaggagatcctcagaggggagacccctcgggtggaagaagtggggccatacacctacagagagaacgaggtgctcaaagtccaactgaaga

SEQ ID NO: 175822 - DNA, 98 bp, Homo sapiens
agccaggttgctgaaggatgtgtctcacaaaggactcagcccaaaaccatgtttgcccaagttgaatctgatgatgaggaagcaaagaatgagccaga

SEQ ID NO: 175823 - DNA, 98 bp, Homo sapiens
tctgattggccggtgtacttcagtttccgtccaaggtccgcctcctacctccttctgcttcggaaatgagccgtcagactgctacagcattacctacc

SEQ ID NO: 175824 - DNA, 100 bp, Homo sapiens
tgaaaaacagtaaagatggaaaaccagttattgaatatcaagaggaggagttgttggtagctgctgtaagtaccatagtaaatagagggataacacccaa

SEQ ID NO: 175825 - DNA, 75 bp, Homo sapiens
ctgcaggacttggtccgcggcatccgtaaccacaaggaggacgaggtactccaaagattcaggtttactcacgtc

SEQ ID NO: 175826 - DNA, 100 bp, Homo sapiens
tggactctgaccgcaaacaaggagagcctactgagcagcctgagtggtatgttcatgcggatgctcctaccaataaaacactggctgggctggtggtgca

SEQ ID NO: 175827 - DNA, 83 bp, Homo sapiens
ctggctcttgccctcatcctggttctggaatcctcagttcaagggaccatggctaaacctcctggatcattagccagaagcag

SEQ ID NO: 175828 - DNA, 75 bp, Homo sapiens
gcagcatattgtactggcctgctgctggcccgcaggctccctgatggctcggagatcccgctccctcctattctg

SEQ ID NO: 175829 - DNA, 101 bp, Homo sapiens
agaggtggaagtccaagtcaaacgcagaaggactgcctcactgagcaaccaagaggggcgccatatccaacatgtacagcatcatggctgctcgctacaag

SEQ ID NO: 175830 - DNA, 75 bp, Homo sapiens
gatgatttgatgaaggtcctgaacgagctctactcggtagaaaatctggtgtattaactgtgaaaattttagagc

SEQ ID NO: 175831 - DNA, 97 bp, Homo sapiens
cacaccgctgtccgacctgcagcaagagcttctcccgcctggagaacctgaagatccacaaccggtcgcacacagtattatcagaaaatccacccag

SEQ ID NO: 175832 - DNA, 101 bp, Homo sapiens
tgaggtgatggcaacggccaacttcggcaagatccagatcgggatttacgtggagatcaagcgcagcgatgtgtacaagtccccagagtatgagtcccttg

SEQ ID NO: 175833 - DNA, 96 bp, Homo sapiens
tgcgaccccagtcggtgctccggggaggtcacctgacgaggagtgcaatttgagggctctttgggaaagcttaccgtttctagtgtgaataatccc

SEQ ID NO: 175834 - DNA, 128 bp, Homo sapiens
tgcagcggccacagtggtgcggccggcggccgagcgttctgagtcacccgggactggaggggagaagcagaatttgcccgcatcatgagcattgtggaccccaaccgcctgggggtagtgacattcca

SEQ ID NO: 175835 - DNA, 78 bp, Homo sapiens
cttcaggaaactcaacgcctttggcaacgccttcttgaacaggaactgtggctgcaccatctgtcttcatcttcccgc

SEQ ID NO: 175836 - DNA, 85 bp, Homo sapiens
cctagacatctaccatcaggaggatctggggactttgatgattttaacctggaggatgcagtgaaagaaacttcctcagtaaagc

SEQ ID NO: 175837 - DNA, 75 bp, Homo sapiens
tgaagtaaaaattgtcagtaagggaagagatgggaaatggaagttccagtattaccgaaaatctctctaccgatc

SEQ ID NO: 175838 - DNA, 96 bp, Homo sapiens
gttaccaccaagcaaacgcagaaaatctccctcaaatacatcgaggtcagcgccaaactggaggggaatgaaacactaaaagttgtagaactcgac

SEQ ID NO: 175839 - DNA, 83 bp, Homo sapiens
ccccgacgcacaaatatgtccgtattctaccttgtaaatactgttatttgtatatactgtaaatgatgacatcggtgggcact

SEQ ID NO: 175840 - DNA, 116 bp, Homo sapiens
tgctaatccagtatttgcggatagctccaaactgggatatgtgccttatgcccgctcagaggcccacctcacagagctgctggaggagatatgtgaccggatgaaggagtatgggg

SEQ ID NO: 175841 - DNA, 100 bp, Homo sapiens
ccagaagattgatcatcatatgggttctcgttcgaccagtcaccatggtgcctagtgttccaggaatcccaggtccttcctctccccaaccagtacagtc

SEQ ID NO: 175842 - DNA, 89 bp, Homo sapiens
gaagaatcagaaatctttactgattccaatggtacccagtgtgttgaacaaattcaagagttggttctacgcttctgtgagaagaactg

SEQ ID NO: 175843 - DNA, 74 bp, Homo sapiens
gcccatttgagccctggataacaagggataaagtggagcgggttgctgctgactcagccattctagaagttctt

SEQ ID NO: 175844 - DNA, 83 bp, Homo sapiens
aacaaacagatcatccgcaaacacgcgcagaccttcgttgccctctgtgccacagaaaccaaggtgtatgttggtaacctggg

SEQ ID NO: 175845 - DNA, 100 bp, Homo sapiens
ctggaggctggtcctgctggctctgtgggtgtggcccagcacgcaaggttctgatggtcctttggctaccagcaaaccagtccctgcagaaaagtcaggt

SEQ ID NO: 175846 - DNA, 83 bp, Homo sapiens
gcttcgaagaaaagctgaaagggagacgtttgcagaggatacgaagcgttttcggcttcctgcccggagctgtgcagcaaaca

SEQ ID NO: 175847 - DNA, 97 bp, Homo sapiens
ttgagaaagacaaagatgatgatgaggtttttgagaagaagcaaaaagagatggatgaagctgctacgattgcccccgaggaattagcacttgttca

SEQ ID NO: 175848 - DNA, 100 bp, Homo sapiens
aggcgggggtgctgcagaggacacgaggcggcgggctggagacatggaccgcggcgagcaagagggataaccaattggctggcaaagtaacaaatgaaaa

SEQ ID NO: 175849 - DNA, 100 bp, Homo sapiens
agcagcccagccaagcactgtcagggatgctctgcacacgttcccacagctgcaagtggagcagagtggggagggctctccggaagagggggctgtgcgg

SEQ ID NO: 175850 - DNA, 95 bp, Homo sapiens
cccaccccagctgcaggagtgcctggcagtctacaaacacagagtttgcagactctctgggcatccccttcttggagacgagcgccaagaatgcc

SEQ ID NO: 175851 - DNA, 51 bp, Homo sapiens
accacgataatgcagttcttattactagaatgttggctcaattaagaaaca

SEQ ID NO: 175852 - DNA, 75 bp, Homo sapiens
cctagcacctcttatactgatgcacaacagcaacgccatgaaagagacttggccctcttgaaactaaaggctgaa

SEQ ID NO: 175853 - DNA, 51 bp, Homo sapiens
ggtctctggagacatcttcagcaggatttgttaaggattccaagtaactct

SEQ ID NO: 175854 - DNA, 111 bp, Homo sapiens
gaagtgcttggggatggagtgcctccaaaggttgctgagcatgctacaagtgaaaactgatgagaaactgaatgtgtctgatgagaatacagcaagttgccctttgagccc

SEQ ID NO: 175855 - DNA, 100 bp, Homo sapiens
gccaggagaaggagttcgtgcaggcgtacgaggatgtgctggagcggtacaaaggagtggttattattgagtcgagaatttttgggaaaagtaacacgtg

SEQ ID NO: 175856 - DNA, 82 bp, Homo sapiens
ccgacttgccggcagaacttacgctgcgggaccccgggcactgttgctgctgcgggaggtggagccttttgccagcttgacc

SEQ ID NO: 175857 - DNA, 100 bp, Homo sapiens
cctgactgacctgaccatgcttgacactgcccttcaggactacatcgagccaattccactgatcctgtgaaggctgcccaatttgagatgagtaatccca

SEQ ID NO: 175858 - DNA, 76 bp, Homo sapiens
gggaaatcgggctgaagcgactgagtccgcgatggaggctgacattcacgtttcattctgccacactcgggaacgg

SEQ ID NO: 175859 - DNA, 100 bp, Homo sapiens
ttcacaatgtccatatatagaatttgaatcatttgacaagcttttgcctctaatgacagagcagctacagtggatgccatttgtgaatatcaaacttcac

SEQ ID NO: 175860 - DNA, 90 bp, Homo sapiens
gggtctggcttgccaacaatatagtttggtgtttcggaagccaagtatccggagttactcgtggcttcctataacaacaatgaagatgcc

SEQ ID NO: 175861 - DNA, 90 bp, Homo sapiens
cggaggctgcctcggcggagcagaggaaccacacgctgatcatgaagaggactgtcagaaggacgtagaaggcacggttttactgtgagg

SEQ ID NO: 175862 - DNA, 139 bp, Homo sapiens
tgcagcagatatgcctgctaacatggataagcatgccctgaaaaagtatcgtcgagaagcctatcatcgccattggaaaagaagtttgttcgagtttcaggagaagcaactattggacatgtagaaaaattcctcagaa

SEQ ID NO: 175863 - DNA, 80 bp, Homo sapiens
ggctgactacctgctgtacaccctcaacaaacaccagcgctttggtggaatgcagtagccctctgggcctgggatattgt

SEQ ID NO: 175864 - DNA, 96 bp, Homo sapiens
gtgatatgtgttgactgaagagctaactacaatctaccctgacatttgcactatcagccttgtagcagtgagtgatgtgaataaacatgctgatag

SEQ ID NO: 175865 - DNA, 101 bp, Homo sapiens
cgcgaggccagcccgcctgcccagcccgggaccagcctccccgcgcagcctggcaggtgcaatggatgagcttcatagtctggatccaagaaggcaagagt

SEQ ID NO: 175866 - DNA, 100 bp, Homo sapiens
tccttctcctggagacgcaactcaagcaaagtgtgggatgctgtctcaggagatgaattgatgaccctggctcataaacacattgtcaagactgtggatt

SEQ ID NO: 175867 - DNA, 50 bp, Homo sapiens
tttgaattcacgcttatggtagtggatgatgctgaataatcccctatttg

SEQ ID NO: 175868 - DNA, 100 bp, Homo sapiens
aaaaagaagaccagcgacaaatttagagaaacctcggcagtgtttgtcaggttcaactccagccatggtttcccagtggaggtcgattctgacaccagca

SEQ ID NO: 175869 - DNA, 82 bp, Homo sapiens
aggtggtggtgcacaagaagatgaggcccaccattaaagatcactggttgaaacacccggcttcttttggaagttcgagccc

SEQ ID NO: 175870 - DNA, 75 bp, Homo sapiens
tcctgctgcttgctgaccaaatggattgaaagaaggtggcaagaggaagaagcagaagcagagagaggagtcgaa

SEQ ID NO: 175871 - DNA, 75 bp, Homo sapiens
cagatgttgatcactgaaaatgatttatgcaagtttaagaactgctttctccaggggttaaaaataagaatttta

SEQ ID NO: 175872 - DNA, 98 bp, Homo sapiens
gatgtcagaccagagaagagcacagaatgtaccagagagatagggccagatttgagtgtgtgaatttttgagtgaaacctggaacccaaatgagaaga

SEQ ID NO: 175873 - DNA, 50 bp, Homo sapiens
atggaagaggatcaggagctggagaggggacggcaaaacagaacagaaag

SEQ ID NO: 175874 - DNA, 80 bp, Homo sapiens
gatgtttatcaacttcatccaagcttgaagagaacatttttattagtggatagcgttgttggaattcaaaaaacagacaa

SEQ ID NO: 175875 - DNA, 90 bp, Homo sapiens
ggatgttcgaaaacgtcggcaggttctaaaagatctagttaaagttattcaacaggagtctgcagtttctgggagcagtgaacggtgccc

SEQ ID NO: 175876 - DNA, 74 bp, Homo sapiens
caagcgactgcaggcagaagctgagacggctaagatgtgtgttaaaagagctagaaacattgggaaaggactta

SEQ ID NO: 175877 - DNA, 100 bp, Homo sapiens
gggaactatgcctgggtcaaccgctcttccatgaccttcttaacccgtcagcaaggcgcacagaacatcagctgaagcaatttaccgaagattggtcaga

SEQ ID NO: 175878 - DNA, 83 bp, Homo sapiens
cgcagtgaagtggtgagcctttttgtcactgtgttctaagaacggaagcatctgggctggatggaatttagcatcaagcagag

SEQ ID NO: 175879 - DNA, 100 bp, Homo sapiens
ccttgggcctcgcgccggctatggccgtgccctggggctgagccctcagtacctttgtgttggatgaatttaagcgcaagtactccaatgaggacacact

SEQ ID NO: 175880 - DNA, 82 bp, Homo sapiens
cctggcctgggcgctccggtggcggcggagttgggccggtgcacaaacagcgtggtcaagtatgagctgatgcgcccctcca

SEQ ID NO: 175881 - DNA, 75 bp, Homo sapiens
atttttcttcagctttatcagaggagaaccagcagaaatccaccaatgtagtctatcaggcccaccatgtgagca

SEQ ID NO: 175882 - DNA, 100 bp, Homo sapiens
gaccacaatggggaggacaacttcgcccgggacttcatgggaaatcctcattgacgattcaatttgttgaaggccaatttgtggactcctacgatccaac

SEQ ID NO: 175883 - DNA, 75 bp, Homo sapiens
ctagacatgagagacatcttggccagtgatgctgttgctgtgagttgatctctctaatgtattagatcttcatgc

SEQ ID NO: 175884 - DNA, 96 bp, Homo sapiens
atcacatgatccgcacccccagcatgaggcaggaggagcgctacctgatcggtcgcttggttatcggacagaatggaatcctctccacccctgctg

SEQ ID NO: 175885 - DNA, 51 bp, Homo sapiens
cgtcatcacggcattttattgggctggtgaattaccagatctctgtcaagg

SEQ ID NO: 175886 - DNA, 75 bp, Homo sapiens
ggcatggccccgcaggtcttcacccaggccctggagtgcatgcgcagaagttttcagcaaactcggattatctcg

SEQ ID NO: 175887 - DNA, 100 bp, Homo sapiens
cgactggaccgggaaggagcatcccaggacctaccagaatctgagacctgtcggccatggagcctaatgatagtaccagtaccgctgtggaggagcctga

SEQ ID NO: 175888 - DNA, 75 bp, Homo sapiens
tagcattcattgacctcagacaaatcaaaggtccatcatcaaaacaccaaagactcaagacacagaagatgatga

SEQ ID NO: 175889 - DNA, 100 bp, Homo sapiens
cttctacatcggtttctacctcaaggacatggagcgcttgaaagagtggcctcatcctgcatgactcgcctgtcccggtctcgtacagcctctctgacca

SEQ ID NO: 175890 - DNA, 100 bp, Homo sapiens
tttgacttcctgccaaaatcctgttaccctagcaacagttccacttacttacatgatcatttcgagagatgtaatgttgattgctgctgttttttatgtc

SEQ ID NO: 175891 - DNA, 98 bp, Homo sapiens
ttgcagctactgctgctgttactgcagcagtaaaggtgaatatactgagtaaaatagtgagtcgagcaacacctggacttcaaaaattttcaaaaaca

SEQ ID NO: 175892 - DNA, 82 bp, Homo sapiens
gaaggaacagattttagctgtggccagcattttgaaagcgaagcagaagccgtagaatcagcggcgagcctgttgaaagaac

SEQ ID NO: 175893 - DNA, 144 bp, Homo sapiens
acgctcctgctcctgactcaccgctgttcgctctcgccgaggaacaagtcggtcaggaagcccgcgcgcaacagccatgtctctagtgatccctgaaaagttccagcatattttgcgagtactcaacaccaacatcgatgggcg

SEQ ID NO: 175894 - DNA, 96 bp, Homo sapiens
gcagatcctaattctggccaatcgtggtattttcttggaaggttccagatgtggaatctcgtgaagacttaattaaaaatcactacatggcaagga

SEQ ID NO: 175895 - DNA, 88 bp, Homo sapiens
ggcggcggtcgacatgttccaggtcccggatagcgagggcggccgcgccggctccagttcaaaaggtgatgacctatcaacagccatt

SEQ ID NO: 175896 - DNA, 100 bp, Homo sapiens
cggggccgccttcagccaagcggcctaaactctcatctccggccctctcggcgtccgccagcgatggcacagcatgcttttcacttccactgcatctctc

SEQ ID NO: 175897 - DNA, 82 bp, Homo sapiens
cgggttgggctgtgacgctgctgctggggtcaggattctgtaaagcctggtgcccatctaacagtgaagaaaatttttgttg

SEQ ID NO: 175898 - DNA, 76 bp, Homo sapiens
cgggtggaggttcgagcgctgttctcgctccggagccgctgcacatttcgaacattctagtatgccagtagaaaaa

SEQ ID NO: 175899 - DNA, 85 bp, Homo sapiens
tcgacgtgcggcccgaatgccagcgcctcttctaccggggcaagcaggtatgctatacctccggagcatggaaaacgacttgaaa

SEQ ID NO: 175900 - DNA, 97 bp, Homo sapiens
cccttcggcacgctggtctacaccatcaagcagatgaaggcctcgggggacacccccaccactccaaagcaccccaaagacagccgagagaacttct

SEQ ID NO: 175901 - DNA, 100 bp, Homo sapiens
gagctgggtcagtccgccgctcaccccgcggccgcaccttcccgccttctcaggaccatgaatggcacctacaacacctgtggctccagcgacctcacct

SEQ ID NO: 175902 - DNA, 104 bp, Homo sapiens
agagaagaaggcatatgttcgactggctcctgattacgatgctttggatgttgccaacaaaaaaaagcttgtggtgaaggggggcaaaaaaaagaagcaagttc

SEQ ID NO: 175903 - DNA, 88 bp, Homo sapiens
ctagcggccgggactctgaactatggcggttggtggcactaaggctggtgtagtccggtttcttggggagaccgactttgccaagggg

SEQ ID NO: 175904 - DNA, 75 bp, Homo sapiens
cgcagtggtcgcttcttctccttgcaccacaccccactctggccggagcacgccaagcagctccccatcgctccg

SEQ ID NO: 175905 - DNA, 75 bp, Homo sapiens
caggatgatgaagcagaagagggaaggaatcgtgtctcctagtgacctggaccttgtcatgtcagaagggttggg

SEQ ID NO: 175906 - DNA, 88 bp, Homo sapiens
gccctccctgcgagaactccagtccgggctccacaaagggcgcgacaatgcagatcttcgtgaagactctgactggtaagaccatcac

SEQ ID NO: 175907 - DNA, 100 bp, Homo sapiens
tcggcggttcctctgcggtgtggtggaagttaccggtattgtaagaacaagccgtacccaaagtctcgcttctgccgaggtgtccctggtaagtagtgga

SEQ ID NO: 175908 - DNA, 75 bp, Homo sapiens
tccaagttcaaccaagccattgttgtacgtggacactataaaggtcagcaaattggcaaagtagtccaggtttac

SEQ ID NO: 175909 - DNA, 97 bp, Homo sapiens
aaacaaattcatcccagaaatctaagagaaatcatgaggtccaatggattttgtttagcaaataccgaaacaatagttattgaccacagtataccaa

SEQ ID NO: 175910 - DNA, 83 bp, Homo sapiens
ccccactctttccgccctaatggaggtctccagtttcgaaccacgaagctgccctgagacgctcactcacgctgtggggatgt

SEQ ID NO: 175911 - DNA, 75 bp, Homo sapiens
agtggttggaaatggcacctatggacaagtctataagtaaacctatgatggacttgttgatattcctttgtgcac

SEQ ID NO: 175912 - DNA, 75 bp, Homo sapiens
gtcaccagcatgacacatgtcaccctgctcatctaccattgcccccgaggaattagcacttgttcacaacttgag

SEQ ID NO: 175913 - DNA, 75 bp, Homo sapiens
ttgcatctagaggaattgaaagaactagaacctctggttggtgaacagttgctccagttatgggaacgtcttccc

SEQ ID NO: 175914 - DNA, 88 bp, Homo sapiens
acgtgggggccaaggtgtacttcatctacgagggtatcttcatcaaagattccaactcactggcttactacaacatggccaatggcgc

SEQ ID NO: 175915 - DNA, 87 bp, Homo sapiens
taaaggctgtgctgaagaagagccgagagggaggaaagggaggcaagaaggaagcagatggctattcatatgaaaaggaagcaatgg

SEQ ID NO: 175916 - DNA, 74 bp, Homo sapiens
agctaacccgggatgctattgagttaaatgcagccaattatacagtgtgattataagcgccatggctatggcta

SEQ ID NO: 175917 - DNA, 95 bp, Homo sapiens
tgctggagacctggatctcgcgccacaaggagatggtggtctttgggaagaagcttcctgcctttgccaccatccccatccaccagctgcagcat

SEQ ID NO: 175918 - DNA, 100 bp, Homo sapiens
gctgatgacctgctgctcgtgctgatctcagggttgggtttggcactcaacttccagccctcgctcatcatgctgaaccgctacttcagcaagcggcgcc

SEQ ID NO: 175919 - DNA, 50 bp, Homo sapiens
ggcgcgcgaggtcaagctgctgctgctcgaacaatcaaccatgacgaccg

SEQ ID NO: 175920 - DNA, 90 bp, Homo sapiens
ctcactcggccaaggaaactcccagggcccgcccaggacccccaagccgccgcggacgcaggtccattttagcttcctatctcctgaagg

SEQ ID NO: 175921 - DNA, 125 bp, Homo sapiens
ctgcagctccaggagcaagtactccaggaagcacagagctgtaccagtacacggcccacgttgccagactttgcaaatgggcatcaaacacttctctgggctctttgtgctgctgtgcattggat

SEQ ID NO: 175922 - DNA, 99 bp, Homo sapiens
gaggtttgaaagcgccgccgccaactcgacagcgcgtcccagatcatggaagggaagtggttgctgtgtatgttactggtgcttggaactgctattgtt

SEQ ID NO: 175923 - DNA, 90 bp, Homo sapiens
gcagcccagacgcggcacagagagggcctgggagcttgctgcagcttcaggccccccggacagaccacccagccctgtacagggacctgc

SEQ ID NO: 175924 - DNA, 82 bp, Homo sapiens
cactggccctggtggggattgacagccacgggaaggtacatgtcccagagcaagcacacggaggcccgggagctcatgtact

SEQ ID NO: 175925 - DNA, 100 bp, Homo sapiens
caggactctagtaacccgcgaaatgatgggatagcgttgcaaatccttaaaagagtcttaacgagttttatggacgaggagccccctacaatgccttgac

SEQ ID NO: 175926 - DNA, 90 bp, Homo sapiens
gaacctgaggagagaatggcatgccagatctaccttctgagatatcatccttcttcagggagataaggaaaaaaagccacagggtcccgg

SEQ ID NO: 175927 - DNA, 75 bp, Homo sapiens
gagctctgatcgccgggaacccttgccgctgctgtcctgcgaccccaagcaggcactgccgccctgcactgtagc

SEQ ID NO: 175928 - DNA, 82 bp, Homo sapiens
cctgatcaagaacaggagcgcagagcttcgtgtcctatgtgaaatgacaatggatgctctgttggctcgattgaaacttctg

SEQ ID NO: 175929 - DNA, 88 bp, Homo sapiens
tggtccgcgcgttgctgcgttgtgaggggtgtcagctcagccttgttagatgacttggataaagaactaaacaactacattatgcgat

SEQ ID NO: 175930 - DNA, 91 bp, Homo sapiens
ttctcgactcggtcctgtttcgacagcgaacatgtcgcggcctgtcagatgcttcaggactgccccaaggcccgcagggaggtggagctgc

SEQ ID NO: 175931 - DNA, 96 bp, Homo sapiens
cttgctgtgagtgtctctagggtgatacgtgggtgagaaaggtcccagcatttgagggtgatgatggattctgtgtgtttgagagcaacgccattg

SEQ ID NO: 175932 - DNA, 100 bp, Homo sapiens
ttggttacctatgtacctgttaccactttcaaaagtccaatgatgcatcagcagcctccttctcagcaatacaatatgccacagggaggcggacagcatt

SEQ ID NO: 175933 - DNA, 75 bp, Homo sapiens
gaggaggaagtgatccattgtgtaagatatgaagcaacagcatgtcatagaaaccttgattggcaaaaagcaaca

SEQ ID NO: 175934 - DNA, 82 bp, Homo sapiens
gccaagcagcccaccgacatggcccggaggcagcagaaggtgatgcaggttctgaatgctgatgccattgttgtgaagctga

SEQ ID NO: 175935 - DNA, 74 bp, Homo sapiens
ggcaacagaacttgaacactatcacctatgaagcttacctatttctactccatgtaccaccataaacaaagttt

SEQ ID NO: 175936 - DNA, 100 bp, Homo sapiens
ccttgaagtatttggctgaggagttttcaatcccaggagttgaccacatttggccatttcccagaagggccccaccccaagggtgagtggccaatgggga

SEQ ID NO: 175937 - DNA, 83 bp, Homo sapiens
gggcggcgctgtgtccgtcgccatgacaggtgctgccttcacctgcctggagactgccttccgcctggacgccctgcaccggc

SEQ ID NO: 175938 - DNA, 100 bp, Homo sapiens
ggagctgcgctggcagaagttcgtcatgttctacgacagcgagtatgggctaccttttcatctctgtgttggtgaactcaaacagtgagctgatccgcct

SEQ ID NO: 175939 - DNA, 101 bp, Homo sapiens
agaggatgacaaatccagtgaaaagtcagaccgctcatcacgaacatcatcgtctgatgaagaagaggaatataaagatgaagcgcagctgtataaagaag

SEQ ID NO: 175940 - DNA, 98 bp, Homo sapiens
cgaattggagaaaaagttcagtgggaagcatgtcgtctttatcgctcaggctttatcctgtggataaacgcagagtgaacgagtttggggagtcctac

SEQ ID NO: 175941 - DNA, 75 bp, Homo sapiens
cgcagctggatgggatcatttcggacttcgaagggagtgcatccgccccaacccttttccccctcgtctcctgtg

SEQ ID NO: 175942 - DNA, 82 bp, Homo sapiens
agccaatcggatgctgaagcagatgcttttcagcaccgaacaagatttgtgatgaaatggagcctggaacaaactcttttcg

SEQ ID NO: 175943 - DNA, 100 bp, Homo sapiens
ttggcaggcaaccccaaggccaccccaccccagattgtcaacggggaccaggcttggggcagcaccaggctggggcagaggaggaaagcaagaggacaga

SEQ ID NO: 175944 - DNA, 111 bp, Homo sapiens
ttggtgggagacgggtgaggtacaggctcagtctgcggccaagactccgtcctgcaaggtcgacagccaaaagcgggaggtatccaaagctgcaagagaagagaaaatggc

SEQ ID NO: 175945 - DNA, 100 bp, Homo sapiens
cagggtcaaaggagagcacaaccatcgcagttggaagcccatggggcaggtcctggaagccatacgggtgacccgtcacaagaacgccatggcagagcgc

SEQ ID NO: 175946 - DNA, 82 bp, Homo sapiens
gcccaggagcctcaaggcggcccggcgggcgactggacggccggacagataacgaaggaggcccaacttcattcaataagga

SEQ ID NO: 175947 - DNA, 98 bp, Homo sapiens
ggatttgcagttgataaaatggctggagaggttaagtggtacaggagctgcagcaggccatctccaagctggaggcccggctgaacgtgctggagaag

SEQ ID NO: 175948 - DNA, 100 bp, Homo sapiens
aggaggaggaggaggggctccggctggtctgtggtgagcacctacaggacttgggctgcttcaggctgaacgctgggagaccacttcctgtgctgacaca

SEQ ID NO: 175949 - DNA, 75 bp, Homo sapiens
gtcccgacactctgccaccttctccagcattgtgaaagcggatgtgatgctggtacaacccagagtagaatttat

SEQ ID NO: 175950 - DNA, 74 bp, Homo sapiens
aacgatcggaacgaaacttggctgtgcttcaccgtggaaggttggactccatgaaagaattgcacaaaacaaat

SEQ ID NO: 175951 - DNA, 98 bp, Homo sapiens
cagtgcaggcactggcaacttctatttgaggtcctgctgtactagccaccaaagcagctgctggtactaagaaatatgatcttagtaaatggaaatat

SEQ ID NO: 175952 - DNA, 83 bp, Homo sapiens
gagaaaaggcaacatcctgtcacaggccatgctctggcaaaaacgtaaagaaactgcggcaatgaaagctgatctcctgaggg

SEQ ID NO: 175953 - DNA, 98 bp, Homo sapiens
ctttggtctcttcggaaagactgttccaaaaacagtggataattttgtggccttagctacaggagagctttcttggactccgtactgttggtgtaacc

SEQ ID NO: 175954 - DNA, 98 bp, Homo sapiens
gctgagtggttgtgtggtcgcgtctcggaaaccggtagcgcttgcagcatggttaaacccatccagagtaatggctgcggccttacccaggaccctgg

SEQ ID NO: 175955 - DNA, 83 bp, Homo sapiens
cagcaacgtgcggcgagtcatggccgagttggatttggtctagggagtcccagaaagaagtagaaaaagagagagaagcctac

SEQ ID NO: 175956 - DNA, 82 bp, Homo sapiens
agaaggatgtggtacagctccatgctcctcgatatcagtctatgagaaggcaaagtggaagatgctttctacaaaggtgaac

SEQ ID NO: 175957 - DNA, 96 bp, Homo sapiens
ccaaataagctatatactttggttacctatgtacctgttaccactttcaaaacaaaagctggcaggctgacagaggcggcctcaggacggaccttc

SEQ ID NO: 175958 - DNA, 96 bp, Homo sapiens
cggattctgtgggtgtaaagcaaagaacaaaatgaagtgtgattcaaggtgggaaatagccgcttcaggcaaagcgaaggctggagctaggagaaa

SEQ ID NO: 175959 - DNA, 75 bp, Homo sapiens
ctcagatcagtggccgaggccccagagacgttatgacagtgttataaatcgactgtacactggtattcagtgtta

SEQ ID NO: 175960 - DNA, 100 bp, Homo sapiens
catgacaatgactttgagccctaccttactggacagtcaaatcagctgccactgcagagccccgccatggaagacacgccgttggtgatatcgaagcaga

SEQ ID NO: 175961 - DNA, 78 bp, Homo sapiens
tcacaggcccagagatgcccagctgtgaccagtgctccgcttgcagattcacaatgacatcctttcaagaagtcccat

SEQ ID NO: 175962 - DNA, 102 bp, Homo sapiens
aagatgttcagcgtagagtcgctggagcgggcggagctgtgcgagagcctcctcacttgggacctcagcagccatgtcgaagccccatagtgaagccgggac

SEQ ID NO: 175963 - DNA, 89 bp, Homo sapiens
agaatatacaaagacaaaaggagattctgatgaagaagttattcaagatgcctggagaacagctccctccagagatgactgtggcaaga

SEQ ID NO: 175964 - DNA, 98 bp, Homo sapiens
agacattaagctcagcactctctaaaggagcaacagtttacagcccttccagatacagctaccaggaatctgagaattgctctcacacaccaacccag

SEQ ID NO: 175965 - DNA, 126 bp, Homo sapiens
atgacacaaaatcccagatctacctgacgggcctgcgagggttgaagattgtgaagcaatagcctaaggctaccaagcagtttctcgaagagattaacaagtggacagttcagtacaatgtttccc

SEQ ID NO: 175966 - DNA, 74 bp, Homo sapiens
ttcattaagacttcccagcattcctacagatataaatagcctccctctgcgcttctgggtgaacgtgattaaga

SEQ ID NO: 175967 - DNA, 71 bp, Homo sapiens
accctggggaggacgagtatgagaaggatagccattttccaggaggccgtgcacaagcagaccagtgtggc

SEQ ID NO: 175968 - DNA, 100 bp, Homo sapiens
gcttgaagagtttggctgggccagttcccagaagaagggagttaagccccaagccaaggcagccaaagctcctcctaagaaggccaagagctctgattct

SEQ ID NO: 175969 - DNA, 95 bp, Homo sapiens
gccgccgccgctgccgctgccgctgccgcacctccgtagctgactcggtttttcgttggaatatacgttgcacatttatggcgattctgagtgtg

SEQ ID NO: 175970 - DNA, 90 bp, Homo sapiens
ccctgcctcaggcctgcccggacggtgtgcgggttgcttttaactttgacagaggaagaattttccaagacgccctataccatagaaaac

SEQ ID NO: 175971 - DNA, 100 bp, Homo sapiens
ctgtctcctggtgaccgagcacccgcctccgggcatcttcaactcatcaagatggtgctcatgtggaccagtggtgacgccttcaagacggcctacttcc

SEQ ID NO: 175972 - DNA, 98 bp, Homo sapiens
ctgaagcaagtacaccacaaagagaacacagagccggaagggaagaggaagaacgtctgagaaataaaattcgagctgatcatgagaaggccttggaa

SEQ ID NO: 175973 - DNA, 83 bp, Homo sapiens
ccagagatggacggtcactcagcctatggagacctgcctagagctggaacgttacctccagagcgagccctgctatgtttcag

SEQ ID NO: 175974 - DNA, 100 bp, Homo sapiens
agatacaaacatgtggagcagaatggtgagaagtttgtgctgttcgggggtcttgtctggattttggttgcctcctccaatgttcctctacctctactac

SEQ ID NO: 175975 - DNA, 100 bp, Homo sapiens
agctcctcaatggccagcgccagctgcagccccggctgcccactcgcctcacctgagcctggtgtctcagtttgaaactgaattctacatcagtggactt

SEQ ID NO: 175976 - DNA, 75 bp, Homo sapiens
gtgcaagcagctgtccgagtcccaggtcaagagcctctgcgagaagggtgtcttttatgaataatcaaaagcagc

SEQ ID NO: 175977 - DNA, 74 bp, Homo sapiens
aaacaagactggggctgctcccatcattgatgtggtgcgatcgatgcctgaggaagtgcaccatggagaggagg

SEQ ID NO: 175978 - DNA, 75 bp, Homo sapiens
cgcggacggtgctggccccgggcaacgatcggaactcggacacggtgacctctgagaaggatgtgcaaacagctc

SEQ ID NO: 175979 - DNA, 75 bp, Homo sapiens
gactcatatcaacattgtcgtcattggacacgtagattcggccatccaggggtctttaaccagaagagagaggag

SEQ ID NO: 175980 - DNA, 82 bp, Homo sapiens
acatttctcttgactgagaatggtgccacgtgtggtctgtaagtaggtggtatcacggaaaacttgacagaacgatagcaga

SEQ ID NO: 175981 - DNA, 101 bp, Homo sapiens
ctgcaaagctgtacaagagatcatgcagagtgaaatggtaaaggagctggatggtcatgtgctcaaatgtgtgaaagatcagaatggaaaccatgttgtac

SEQ ID NO: 175982 - DNA, 100 bp, Homo sapiens
tagaagggatacccttccatttcaaagaacagaatgctaaggaagctgtggcaagtggaagatgcaatgctgatgtttgataaaactaccaacaggcaca

SEQ ID NO: 175983 - DNA, 93 bp, Homo sapiens
cggggacttcactgctctgctgtctcctgcaagaactggctcaagaaatttgcctcgaaaaccaagtttggaaggcgctttgagtccccgctg

SEQ ID NO: 175984 - DNA, 82 bp, Homo sapiens
ctcaactttctgggcgttcatgatcctggccagcctgctcatcgcctactgcagtttacccaaggtccagcctagcccctag

SEQ ID NO: 175985 - DNA, 100 bp, Homo sapiens
gcttccagactcagagtgtgagaaaaaaataaactcctatttgtttatggcaagcagacggttgatgatgaagcgccggccgtgtaaatgaagatcgggt

SEQ ID NO: 175986 - DNA, 50 bp, Homo sapiens
gagcctcaggcggacagatggactgtaagtagagacggggtttcgccgtg

SEQ ID NO: 175987 - DNA, 98 bp, Homo sapiens
ggtattgggagatccacagctaagacgccaggacccactggaagcctagaaatggtcctacaacgtgactttaaaaagacagcagaaagcaaaaatgt

SEQ ID NO: 175988 - DNA, 83 bp, Homo sapiens
ccgcggatctcaccgccgctcaggcaccaaggatgacattgatcttgatgccttggctgcagaaatagaaggagctggtgctg

SEQ ID NO: 175989 - DNA, 100 bp, Homo sapiens
ggaataacacaccggagacttttggggggaaactaggtcgatggtcggcggcgcccggatgggcagctgagatacactctgtgcagttttagagagagac

SEQ ID NO: 175990 - DNA, 90 bp, Homo sapiens
cgccccttcgcgtcccctgcaccatgagctggggcaccgagctctggagttgttgcctgcaatctctatccctttgtaaagacagtggct

SEQ ID NO: 175991 - DNA, 100 bp, Homo sapiens
cacctatgagatccagtttgggcacctgcagcgacctacccactacaatacctcttgggactgggctcgatttgagcacctgaaggggaagaacgtgatc

SEQ ID NO: 175992 - DNA, 100 bp, Homo sapiens
acagatgaattaagttcagctattggaggctgtggccaggccagctgggctcggggagcgccagcctgagaggagcgcgtgagcgtcgcgggagcctcgg

SEQ ID NO: 175993 - DNA, 74 bp, Homo sapiens
gccatgaaggcctcgggcacgggcgagaaaaatcatggctttgaggtcctgtaccacagcgtgaagcaggggcc

SEQ ID NO: 175994 - DNA, 100 bp, Homo sapiens
gcgccaatgtccaaaacgtgaccactgaggatgtggagaaggccacaggtagcctttccagtaaatatatgactcagggaaaagcctcagcgaagaggac

SEQ ID NO: 175995 - DNA, 75 bp, Homo sapiens
ctcccactgattctacattatggctgaccagtgcaccggtcttcagggcttcttggttttccacagctttggtgg

SEQ ID NO: 175996 - DNA, 75 bp, Homo sapiens
ctggcaaccgccccgtctgagaagtccacaatctgcaggagctccggcgaagtgcctcactggccaccaaggtct

SEQ ID NO: 175997 - DNA, 100 bp, Homo sapiens
tgcatgtccaaaatgggagacaggcgcctgagtaacccggggcaaggtgtgatgaatgcagactctgctaccattttggctgtttggatcctcctttgaa

SEQ ID NO: 175998 - DNA, 75 bp, Homo sapiens
ctgctgttctcttaagaaagattccaacccaatgtcactgtgtgcccagtattctgcagacaaacgagaagatga

SEQ ID NO: 175999 - DNA, 101 bp, Homo sapiens
aaacaggctgattctggaagttctgaggaaaagcagatgcaagtgctgctggaccaggcgggctgctgtatcgtgggtcagagtgagcagctggttcctgc

SEQ ID NO: 176000 - DNA, 100 bp, Homo sapiens
aatggcggcacatgccatatgctcagccgggatacctatgagtgcacctgtcaagtcgggtttacaggctgaataaatcctttgtggattatggtgatac

SEQ ID NO: 176001 - DNA, 100 bp, Homo sapiens
taaaatattactactgggttattaatcctgctgacagtagtggcattacacctaaaggattagaaatctatcaaatgtggaagaaattgggacttgctcg

SEQ ID NO: 176002 - DNA, 75 bp, Homo sapiens
tagttatgcatcatggtttgattataactgatgatccagtattcctggaagaagcagggaaagcagaaaaaattg

SEQ ID NO: 176003 - DNA, 100 bp, Homo sapiens
ggcgggtggagctcagaccggtgggctagttcctctgctggtctgggttctaattcggcgcctcccatccctgactcaaggctcggagaagagaacaaag

SEQ ID NO: 176004 - DNA, 82 bp, Homo sapiens
acaaaataaacctcaaacagcagctaaaatatgccgttcagatttgtaaggaggatgatgaaattccactgtatctaaaggg

SEQ ID NO: 176005 - DNA, 74 bp, Homo sapiens
gttccctgagcttgctgtcagcaaatgtttgattctgaaggaagatttccattaggtaatttgtttaatcagtg

SEQ ID NO: 176006 - DNA, 100 bp, Homo sapiens
gccgtatgcctgttatgaacttggctgtcttctattagacaaaccagagaattatatccagatcgagagacagaagattctgaaagggttcaatgaaatg

SEQ ID NO: 176007 - DNA, 75 bp, Homo sapiens
tctgtgccatcatcgtggtagttattgtaacagagaagcctgtgttcttcccagccttcgcagccgaggcccaga

SEQ ID NO: 176008 - DNA, 98 bp, Homo sapiens
agcattgaggaaggactgaagatacaggccatgaacagttgatactccagatccctatgtggaactttttatctctacaacccctgacagcaggaaga

SEQ ID NO: 176009 - DNA, 88 bp, Homo sapiens
aaacctacttattggttttctgcccaccttcatgtgaagtttgccgccttgatgcagcatcagattataagcacaccacagagactaa

SEQ ID NO: 176010 - DNA, 51 bp, Homo sapiens
caagcctaactcaagccattggcacacagcttgtaaatgcactgaaaacag

SEQ ID NO: 176011 - DNA, 75 bp, Homo sapiens
gggaacactggagacctgatttctaactgacgctaccgtcgcggccgccgggctgaagaagatgcagagcagcct

SEQ ID NO: 176012 - DNA, 51 bp, Homo sapiens
cttcgtatggagtcctttcctatcatcaactttcatcctttgaaacgtgtg

SEQ ID NO: 176013 - DNA, 82 bp, Homo sapiens
cggcgctcgccatggccgacgaaaagcccaagggtggactccattatgctggtggaagagggcttcagtgtgacgagtgtgg

SEQ ID NO: 176014 - DNA, 95 bp, Homo sapiens
ccgtccacgtgaaggggcccttctcggtggaggccgacccatccagggatgtttcagcagcccctgagaaggaagaggaggaagctgagggcccg

SEQ ID NO: 176015 - DNA, 96 bp, Homo sapiens
acttcttttttgagaaaggaaggaatatatcctgactgattgggccacctacagatgctcctgcagtggacacagcagaacaagtctatatctctt

SEQ ID NO: 176016 - DNA, 76 bp, Homo sapiens
agacatgagatggtagacaaaaccccagctcgacacttcatgcaccagatcatcacagggatgttgtatcttcatt

SEQ ID NO: 176017 - DNA, 100 bp, Homo sapiens
tgcccgacagtcctagctaaacttcgccaactccgctgcctttgccgccaccatgcccaaaacggtattgtcttctaagaactctgaagcaatgtcagac

SEQ ID NO: 176018 - DNA, 75 bp, Homo sapiens
cgattatcatgttgacggaccaattgcaactctagaagaaccacacctcttttggaatatattaaaaatagaaaa

SEQ ID NO: 176019 - DNA, 90 bp, Homo sapiens
tgctgattttggctgacatggcagatgtctacaaattacttgttcagctgaaagtttctctgctggatgaaccgaatcctaacagtccag

SEQ ID NO: 176020 - DNA, 97 bp, Homo sapiens
tttctttggtctgcctgccaatatcgctcgctcatctcagcgcatgatcagttctcaggtcctgatgaagttgtagggccagaaggaatggaaaaat

SEQ ID NO: 176021 - DNA, 95 bp, Homo sapiens
gaagaaaaggtgtacttgcaagaaacctcaggacttgagtaacagcaacatggctgaaaggttccctgagtcgaggtgactggtacaagacaaag

SEQ ID NO: 176022 - DNA, 101 bp, Homo sapiens
gaggcgctcatccacagagccacatctgttaggcagtatttggcagtcgtattcagagataaacccctggagctatgggatgttaggacttgtacccttct

SEQ ID NO: 176023 - DNA, 101 bp, Homo sapiens
agtgtttccacaatggaaccaattgttttacagtctgttccacatgatcattgtaataaggaaggatctgagtctctccctgcggagacagccctgaagaa

SEQ ID NO: 176024 - DNA, 75 bp, Homo sapiens
tgcatgtaccgaccttctgaacaaggccaacacctatgcagcaacttgagttggtggaaccaagtggctggattc

SEQ ID NO: 176025 - DNA, 100 bp, Homo sapiens
ctgcctagaagactttgatcagatcttctggggccagaagagtgccctggctggaagcgtcagcccccgtagcacctctgttaccacgacttctagtgcc

SEQ ID NO: 176026 - DNA, 82 bp, Homo sapiens
aggaggagctgctggcgcccgcagatgtaaggtacctgccgtgggcagatctgagctttcttcttggacaccccatacccac

SEQ ID NO: 176027 - DNA, 75 bp, Homo sapiens
aagaaggacaaagagatcatagccgagtatgaaagtcaagtcaaagggggaaatttgcagtggtgagaaaatgta

SEQ ID NO: 176028 - DNA, 100 bp, Homo sapiens
accatgcagtggataaggggcggatcgggaatgatcactggggtgatcctgctggctgttggagtctggggcaaacttactctgggcacctatatctccc

SEQ ID NO: 176029 - DNA, 129 bp, Homo sapiens
gcatgtctccaaggaggaaacccccaagttctgcagccagtgcggagagaggctgcctcctgcagcccccatagcaggcatgtgagcagcagtgacagagtgggcaagccttaccgtggcgtaaagcct

SEQ ID NO: 176030 - DNA, 100 bp, Homo sapiens
cggggctgtccaggcacgcgaggcccctcagttactccacaggatccgctgaacataggatgttgccacaaaatctacctcgtgtatttttctctttcac

SEQ ID NO: 176031 - DNA, 117 bp, Homo sapiens
tcaggctaaagaacaatacgagcagatccttgcatttgtccaagtttccaagccagcgccctactgggaaggaacagctgtgatcgatggagaatttaaggagctgaagttaactga

SEQ ID NO: 176032 - DNA, 75 bp, Homo sapiens
gacttggtccgcggcatccgtaaccacaaggaggacgagggcttccgagtggacctgccaatcaagtcggcccgc

SEQ ID NO: 176033 - DNA, 100 bp, Homo sapiens
ccgccgagtcgcgcggaggcggaggcttggggaaaaccagtagattcccagacatcgcgaagtgaatctgaaattgtgccaaaagttgctaaaatgactg

SEQ ID NO: 176034 - DNA, 73 bp, Homo sapiens
ggtggagaaagaagtgggaaggatctgcgcgggttcacgcaaagaatctgctccacaagttttgcttccagaa

SEQ ID NO: 176035 - DNA, 75 bp, Homo sapiens
ctcagagaccaataaaaataaactgcttgaacatcctttgactggttagccagtttttggctttcacccccaacc

SEQ ID NO: 176036 - DNA, 75 bp, Homo sapiens
cagagggtggcccatgagccggttgcgccacccgaggacaagctttctaaaaccaatttttccaacaacaacgat

SEQ ID NO: 176037 - DNA, 83 bp, Homo sapiens
gcctaatcctcccaaagttcttagattacaggtaatgatcaataatggctttacaccagataaaaatgattatgaattttgtg

SEQ ID NO: 176038 - DNA, 82 bp, Homo sapiens
tgaacgcagcccgccctccccaagtcgacgccgcaacccggggaaagcagggactggtgattgcagctggaagtgcccatga

SEQ ID NO: 176039 - DNA, 75 bp, Homo sapiens
accgttgcctccagcccacccacctccagaaactatgttccaacttcctgtcaacaatcttggcagtttaagaaa

SEQ ID NO: 176040 - DNA, 89 bp, Homo sapiens
cgccgccaagagtgagcgagcggacccgcgatggctccagaacctgggtatcaacccagcaaacattggcttcagtaccctgactatgg

SEQ ID NO: 176041 - DNA, 75 bp, Homo sapiens
gccgccaccgcggccgagaccgcgcagccggcgggtgctggagaatctggtaaaagcaccattgtgaagcagatg

SEQ ID NO: 176042 - DNA, 75 bp, Homo sapiens
ttgtgaagaagaatttcgatctccgccctggggtcattgtcagttaccggtattgtaagaacaagccgtacccaa

SEQ ID NO: 176043 - DNA, 75 bp, Homo sapiens
ctctgtctcgctcagaggagatgcaccggctcacggaaaatgtctataaggctgttttggagtcagcggaagatc

SEQ ID NO: 176044 - DNA, 82 bp, Homo sapiens
cgggcggcgctgtgtccgtcgccatgacaggcaactcgagatgtggtgctgagccgggtgccggagcaggaggaggaccgga

SEQ ID NO: 176045 - DNA, 50 bp, Homo sapiens
acagaaggctggaggaaacgtcagtgcaggtcgtaatctgaaggagtggc

SEQ ID NO: 176046 - DNA, 98 bp, Homo sapiens
acagaggtcaaaggaaaaagaaaaaggggtcgtcctggccggcctccagtttcctagaacttgacttgcgtcacacgatcattcctgcaaaatcacca

SEQ ID NO: 176047 - DNA, 101 bp, Homo sapiens
aggaagaatgccggtcacagcccaggaggttccatgcctctgcagcggtgcctcatgtttgctgtgtagttgctgtcctaacagtaagaattccacggtga

SEQ ID NO: 176048 - DNA, 100 bp, Homo sapiens
taacaaacgagggttcccgggattggaccgacgcagccatggcttgtgagaaggttggcatgcagatccctcgattctgttatcatgaaaggttgtctgt

SEQ ID NO: 176049 - DNA, 87 bp, Homo sapiens
agccggggccggggctgcggggcgaggactccctggcactggggaaaacagaggaggaggcactgaagcacttccgagtgaagttta

SEQ ID NO: 176050 - DNA, 100 bp, Homo sapiens
tctacacagagcacgcccatcaggtggtggtggccaagtatgcgcccagcggattctacattgcctccggagtgcctccggagccagcgtggtggccata

SEQ ID NO: 176051 - DNA, 100 bp, Homo sapiens
gcgcaggctcaacatacccgtactacaggatgatggctttctcttcctctgggtcacaggcagctgctgaatgccatggtggcaaaactggggaaccggg

SEQ ID NO: 176052 - DNA, 100 bp, Homo sapiens
ctcctgctcagtgtagcattaaggatttaggtcctgaatatgaaggtatatttaacacttcattgcagtggatcttagaaaatggaaaagatgttggaat

SEQ ID NO: 176053 - DNA, 50 bp, Homo sapiens
cagagctcatctgacgtggcatcaggatttacttaaatccattgtttcaa

SEQ ID NO: 176054 - DNA, 101 bp, Homo sapiens
tgcacatcgaattaagagagcagaaggatgggaggaaggtcctcctacagttttagaaagagcgttttcgctacgtaaagcacattcgataaaggatatgg

SEQ ID NO: 176055 - DNA, 97 bp, Homo sapiens
gtcctttttcgtttttcggatgatgccttcaatactacctttatttccaccataggctgtggaaaatctctgttctcacaaagtctccccaatgctc

SEQ ID NO: 176056 - DNA, 73 bp, Homo sapiens
ttggaaagcagtttttaagacaagaaacagtgacattcaaggatgtggccatggactttacaccagaggagtg

SEQ ID NO: 176057 - DNA, 100 bp, Homo sapiens
aacatggaatcatcaaggaatgcacactcaccagcaacaccaagtgcaaagaggaaggtgatctgtgaaaatggttcgctattcacttgacccggagaac

SEQ ID NO: 176058 - DNA, 100 bp, Homo sapiens
ggtgcagtgagagcagcttcagggcgaaaagcgaatgagaaggagcggcaggcagccctgcaggtggccgagggcttcatctcgcgcatgcagtacgccc

SEQ ID NO: 176059 - DNA, 75 bp, Homo sapiens
ggaaagcaaaggagtcagggatggctcttcttcagaaagtgactgagaccgaagatgatagtgatagtgacagcg

SEQ ID NO: 176060 - DNA, 73 bp, Homo sapiens
tgggcaaccttttcctgaatgaagatctggaggtgaaaatagatttaagcgagtggtattgcaggaagtccat

SEQ ID NO: 176061 - DNA, 82 bp, Homo sapiens
agcaccaggatctcgggctcggaacgagactgcacgattcagcattcccatatttgaaatgggaagaagtttcatgtccatt

SEQ ID NO: 176062 - DNA, 74 bp, Homo sapiens
aaacccacttcgttcaagacaggtgtttaagcatgacctcattccacctatggacttgcttgaaatgattgtca

SEQ ID NO: 176063 - DNA, 90 bp, Homo sapiens
cctgctgctgacttccatccctctggatccggcaaggtacactggctttctcaaaggactattgcaagtctttgcacacatagctggagc

SEQ ID NO: 176064 - DNA, 87 bp, Homo sapiens
caggtggccgacgtgcctgagaagcccaggaatgtatcctgtcaggtataatgtcagtgaatggcaagaaagttcttcatatggatc

SEQ ID NO: 176065 - DNA, 106 bp, Homo sapiens
cgcttcctcgaaggccccagcccggctcagtcggccgagagcgagggaggagccccccgacccaggacacaactcagatgggaagttcatcgcccgggcacagcgg

SEQ ID NO: 176066 - DNA, 74 bp, Homo sapiens
taccaatcgtgaaaactatattcacagggtggttctcttcccaaagtggaagccaaattcatcaattatgtgaa

SEQ ID NO: 176067 - DNA, 100 bp, Homo sapiens
gtggccttcgcggtggcgatgctcttcttggaaaaccagatccagaaactggaggagtcccgctcgaagctaggtttttcgttggaatatacgttgcaca

SEQ ID NO: 176068 - DNA, 100 bp, Homo sapiens
tccctgccgaagcccagcccctgatgtcccagcagctccaaaaccaacgccctcaatgtctcccagaagatgattgagatgttcgtgcggacaaaacaca

SEQ ID NO: 176069 - DNA, 100 bp, Homo sapiens
aaaaagacacttatactatgaaagaggactccagttcagttgtagaatggactcaggccccaaaagaaagaggtcatcgaggatcagaacatctgaacag

SEQ ID NO: 176070 - DNA, 100 bp, Homo sapiens
agttttggcaggagcgggagaattctgcggagcctgcgggacggcggcggtggcgccgtaggcagccgggacaggaacctgaagggccgagaagtcctgc

SEQ ID NO: 176071 - DNA, 83 bp, Homo sapiens
ggactctgctccctggggctgcttctagctcagcttaaagcttttcaagccaggccaagaagctgtgaagtaccagggtcctc

SEQ ID NO: 176072 - DNA, 50 bp, Homo sapiens
aacagtttaccgatctcaaagatcaaatatgcttttaaggctattaacca

SEQ ID NO: 176073 - DNA, 101 bp, Homo sapiens
ttggccagtgtggcaaccagatcggagccaagtggagtacgacaaggagttctcccctcgtcagcgacaccacaaagagttcaagttcaacttatcccaga

SEQ ID NO: 176074 - DNA, 74 bp, Homo sapiens
tgcgcctcgggagtcggcctgtgagactagacgcttgaagcaaagctgccatcccagaagacgacatgctctca

SEQ ID NO: 176075 - DNA, 82 bp, Homo sapiens
aggtcccggtgctcacttggacatgcttggaagtctttttgcatgttactgttccactgaagtcactcaggcaatatgggat

SEQ ID NO: 176076 - DNA, 100 bp, Homo sapiens
aggactgaggaataagatggtacaagttggactgcttcccaagctcactgcactcctaggtaatactgcattgcatgattgtgcagaatctggaagtttg

SEQ ID NO: 176077 - DNA, 75 bp, Homo sapiens
ctggcatcctggacaaagatctctcggaccgcagcaatgacattgttcacaagattcctttgcagttcacccttg

SEQ ID NO: 176078 - DNA, 100 bp, Homo sapiens
attgccgacaggatgcagaaggagatcactgccctggcacccagcacaatgaagatcaagagctccaagagtcaggatcgcaagtcagaaagcaaagaaa

SEQ ID NO: 176079 - DNA, 100 bp, Homo sapiens
cactttgcattgactggaaacaatggcatttacagaaagagtcaacagcagtggcaacaggtagttgatgtcacttggcgatattcctgcaaacatgaag

SEQ ID NO: 176080 - DNA, 60 bp, Homo sapiens
gccgtgcaagtttgccggccccagggcccagccctgaaggatggctgccatattgggaga

SEQ ID NO: 176081 - DNA, 75 bp, Homo sapiens
cagccttgtttttcagcagctttgaggaaaagtatagctctattaccaggttttaaacttcgccatgatcgtgtc

SEQ ID NO: 176082 - DNA, 100 bp, Homo sapiens
ctcgtctttggcgaggacggggcgccggcgccgccgcccccgggctcgcggcctgcaggttaaaaagatcaagtggcatgagcagccttttggggaaaat

SEQ ID NO: 176083 - DNA, 75 bp, Homo sapiens
tcctgggcatgaatctttcggactgcaaatggtggcttcccacacttctgactcggacgttccttccggtgtcac

SEQ ID NO: 176084 - DNA, 82 bp, Homo sapiens
ctttctgacaacaaactcgaagactggcatgaggtcctaaacatgcagctttcggatggaggacaaggagatgtccctgttg

SEQ ID NO: 176085 - DNA, 51 bp, Homo sapiens
tcactccccaggattatgcgcgttattaccccattcaagttgacaactgag

SEQ ID NO: 176086 - DNA, 137 bp, Homo sapiens
gtagccacagccattcttgtgacagtctatatgtatcaccacccaacatcagcagccagcatcttctttattgaggtgaaactgaaattggctgtatcatctgaaacttcatctgtgaagtccctggtggtttccta

SEQ ID NO: 176087 - DNA, 75 bp, Homo sapiens
cggactacaaggtcgcctacgtgcagctgtccccgcggttcattgggcgcaggcagagcctcatcgaggacgccc

SEQ ID NO: 176088 - DNA, 75 bp, Homo sapiens
cggacgctgctcgctcatctgcctctgcgcgctgcagttgaatggctattcaagtggacaagttcaactttgaga

SEQ ID NO: 176089 - DNA, 75 bp, Homo sapiens
gtcagaggcttcctaacgcagactcgagtgcgaagcgcgcagtcgccgggtttttctattgggaaagctactgat

SEQ ID NO: 176090 - DNA, 100 bp, Homo sapiens
agccgctcttccccacctgcccggtgcccgaggaggcagccaagctcgtagcctgccactccgtgcatgccatggacaatattaccaggcagaaccaatt

SEQ ID NO: 176091 - DNA, 96 bp, Homo sapiens
caggccggagctgaggagaacgactgggttcgcctgcccagcaaatgcgaaggttttgggatttgagattgacgcggtgaactctgtccagttttc

SEQ ID NO: 176092 - DNA, 100 bp, Homo sapiens
cgccgcccgcatgcgccgcgaccatggagcgccccgaagcggcataagctgtggccatgactactgaagtaggctctgtgtctgaagtgaagaaggactc

SEQ ID NO: 176093 - DNA, 83 bp, Homo sapiens
ggagcagtggagcccaaagacccctggagacatggtctaccccgagccccggagcgagagcgagtgcctgagcaacatccgcg

SEQ ID NO: 176094 - DNA, 75 bp, Homo sapiens
ctttttgcggagcataatgatctgcaatatgctgctccaggcggtcttattggttgttgaagattggaaattcat

SEQ ID NO: 176095 - DNA, 100 bp, Homo sapiens
cttcctacacagcctgctgaagaagcagcacgaaagagagaggtccgtctaatgaagaacaggtgtctgatgatttgtgagcctcaagtgactactctgt

SEQ ID NO: 176096 - DNA, 75 bp, Homo sapiens
cggcccgctactctccgggaggggcgcttcccgacgccaagggccaattcctgtccccccagcagcatggcatcg

SEQ ID NO: 176097 - DNA, 100 bp, Homo sapiens
caatgtgtcaaccgcattattactgaaaagctacctctgacttttgaggatgttgctatttatttctccgagcaagaatggcaggatctagaggcatggc

SEQ ID NO: 176098 - DNA, 97 bp, Homo sapiens
gattacacagaagcaaaagccttgatagcatggatttctgtgagctcactgttgtccttctattcaggccactcttcgttttccatgtactgcatgc

SEQ ID NO: 176099 - DNA, 80 bp, Homo sapiens
agatgttgtcaaggtggcctaccaggaggccaggggtgtcgccatgggggatatgagactttctactcggaatatcctga

SEQ ID NO: 176100 - DNA, 100 bp, Homo sapiens
tctgtgaccaacagctgcgcaaggaggaagagaatgcatcagtctattgaagacaatgaagtatatttgcctaatgatgaaatttggacctatgatattg

SEQ ID NO: 176101 - DNA, 127 bp, Homo sapiens
gatgatgggcttactgaccaacctggcagacagggagctggttcacatgatcaactgggcgaagagggtgccagtgaccgaagctggctttggtgctgacatcggaatggagaaattcttcaacatc

SEQ ID NO: 176102 - DNA, 100 bp, Homo sapiens
aggctgctctgaagcgcacgacctccgactactttctccttcaaggcgatatgaaaggtgaggtctatccatttggcatcgttgggatggccaacaaagg

SEQ ID NO: 176103 - DNA, 100 bp, Homo sapiens
tgaaagtggagaggtaccataatctatgtcagaaacaagttaaagcacaactcccaagcttttctcaatttcatggacttattactcactataaaattgg

SEQ ID NO: 176104 - DNA, 75 bp, Homo sapiens
cgagcacataacggggttcgggtgtctcgtgtgtgaacatcacaggtgttggagagcacaatggctgaacaagtc

SEQ ID NO: 176105 - DNA, 74 bp, Homo sapiens
gggacaggagagcctgggcaagactggagagatggaagtgctactgaaatgggaacaaccaaaaaggctgtaaa

SEQ ID NO: 176106 - DNA, 114 bp, Homo sapiens
ccgcgaggaggcgcgggaggtgttcgagaacgaccccgagacgggcgaagctgtgctcaggcccgggctggacgcagagccagagctgtccccagaggagcagagggtcctgga

SEQ ID NO: 176107 - DNA, 83 bp, Homo sapiens
ggcaattgtggctatgtcctcaaaccccagcaaatgtgcaaagattacaccaccaccttcactgtcagatccacttaaagagc

SEQ ID NO: 176108 - DNA, 90 bp, Homo sapiens
gagacagaagaagctggaggccggcaaagccaaggaactgcaagcacatgttgaccagataactgaaatggcagcagtaatgaggaaagc

SEQ ID NO: 176109 - DNA, 100 bp, Homo sapiens
ggagcctcccaggcttggggcaggacactttggtgccccccgtgtacactgtcagccaggcccatgtccctgagcaccattgcaatcctgaattctgtca

SEQ ID NO: 176110 - DNA, 90 bp, Homo sapiens
gctccatgctgtgcctgtgctccgcgtctctcatgcagaggaggaagatcaagaagtacgagaagctggagacggaggaggagcgtgtgg

SEQ ID NO: 176111 - DNA, 100 bp, Homo sapiens
cgaatctcttctccctccccttcttggatagagggaggaatcagcagcttggaaattcaagcacgtgatctggcgggatgggcgtttgcctaacgtattt

SEQ ID NO: 176112 - DNA, 75 bp, Homo sapiens
agagagcgccctgagagaacagggtggccgcttggtccagagtaatcaagtcagaggattatatgacttttatct

SEQ ID NO: 176113 - DNA, 100 bp, Homo sapiens
aagacatcattgtctatcatgaacttgtacagccatcaggatttggctcatttgtggaaaagactgtgatgccttacattagcacaacaccagctaagct

SEQ ID NO: 176114 - DNA, 155 bp, Homo sapiens
gcctgtgccgccctggggttgagggccctcgatgtgatacctgccgctctggtttctactcattccctatttgccaagggtctccaactgaattccttgaagagaaaatggcctaccaggaatacccaaatagccagaactggccagaagatacc

SEQ ID NO: 176115 - DNA, 100 bp, Homo sapiens
ctgaagaagccatccctgcttgggggcgcctgccacccctggctgtttatcgaggaggcaagctggtcattaaagaccacgacgagccgattgttttgcg

SEQ ID NO: 176116 - DNA, 89 bp, Homo sapiens
cctcccagctacgagctgccccagatggagtcccctgtttccacaccagcagtgctgccaatacaccttttggtgccagtggtcaacaa

SEQ ID NO: 176117 - DNA, 75 bp, Homo sapiens
gtacctgcaggcctcctacacctacctctctctgtactgtaagattgatgttaaaggcatggtgttcaccccact

SEQ ID NO: 176118 - DNA, 88 bp, Homo sapiens
tgggagtgggagtctgactggtacgtggatgagaattttggaggtgaacccactgagaaagggtggaggacctggagaggaatgacgg

SEQ ID NO: 176119 - DNA, 82 bp, Homo sapiens
acgtcaccgccgaatggcagcctccagaaagccaccgcgagtaagggggatatgagactttctactcggaatatcctgagtg

SEQ ID NO: 176120 - DNA, 100 bp, Homo sapiens
agcaagaaggccctggacacagcaatatctctgggctttcacagggctagtgccacgaggtttacttgactgttgtgtgaaaagctgataagaaaaccat

SEQ ID NO: 176121 - DNA, 97 bp, Homo sapiens
aggaattaaatcaattgtaaagtcatcgttgggtggagccgccaccaaaatgcagattttcgtgaaaacccttacggggaagaccatcaccctcgag

SEQ ID NO: 176122 - DNA, 75 bp, Homo sapiens
gagaagccacaggaagtctgtgtggctgtatggttttcctttggaatatggataaatacaccatgatacggaaac

SEQ ID NO: 176123 - DNA, 90 bp, Homo sapiens
cgatgtggtaatggcggcgaccgagccggagctgctcgacgaccaagaggcgaagagcttccttcaaaatgtctactgttcacgaaatcc

SEQ ID NO: 176124 - DNA, 83 bp, Homo sapiens
aagcgctcggcgcctggcgctggcgctggccaaggctgtctctgtcccacctggtgctctggactgctgggtgtttctgagct

SEQ ID NO: 176125 - DNA, 75 bp, Homo sapiens
acatcgtggtggtcggatttcaccacaagaagggctgccagactgaaatcgccaagagattgaatacgatttgtg

SEQ ID NO: 176126 - DNA, 55 bp, Homo sapiens
ggcatggatatctctactcgctccaaagaatttaagggacgctgtgaagcaatca

SEQ ID NO: 176127 - DNA, 82 bp, Homo sapiens
gaaaacctctcaccccgtcgttgcctccacttggcccgtccatagagccagcctcccgcgacgatgcccctcaacgttagct

SEQ ID NO: 176128 - DNA, 80 bp, Homo sapiens
ccaataaaaataaactgcttgaacatcctttgactggttagccagtggtccatgctgtggacggcaccgccgagaacggg

SEQ ID NO: 176129 - DNA, 83 bp, Homo sapiens
cgagcacatgaagcgccacacgctgacaatgcagatcttcgtgaagactctgactggtaagaccatcaccctcgaggttgagc

SEQ ID NO: 176130 - DNA, 83 bp, Homo sapiens
aattgccggcaagagggagttaaggacattccaggcagaggcaaggaacatccaatacttgggcaacccttttttgtacttca

SEQ ID NO: 176131 - DNA, 100 bp, Homo sapiens
ccggcactgttggcaccaggtcaccaggacccgcttcagcacaaggaatgtcatcaagaggaactcctccactctgaacacctgggtcccagtgaattgg

SEQ ID NO: 176132 - DNA, 98 bp, Homo sapiens
cccttctcagattgcaaacagtggttctgctggattgataaacccagctgctacagatgaggacacaagggattgtagagcttatgtgacagctaatt

SEQ ID NO: 176133 - DNA, 50 bp, Homo sapiens
ggaggacgagcggaaaaacggagcctacgacaagttggatggcttgagga

SEQ ID NO: 176134 - DNA, 50 bp, Homo sapiens
agcagaagtacgaccggcagctgaggaccctttagatcctacaagatcag

SEQ ID NO: 176135 - DNA, 98 bp, Homo sapiens
ctgggtggtctggagaccatggagaccctcacggagctgggcgacgagctgaccctgggagacatcgacgacatcgggctggggagtgactccgtgtg

SEQ ID NO: 176136 - DNA, 96 bp, Homo sapiens
caagaaggtccagcagcagctgtggctccagtatcagaaagaccggtaccgggagtaccagtggatcggactcaacgacaggaccatcgaaggcga

SEQ ID NO: 176137 - DNA, 75 bp, Homo sapiens
cgcttgcgtcagggacctgcccgactcagtggtttactcctggcttgggggcattaggaagcactggaggctctt

SEQ ID NO: 176138 - DNA, 76 bp, Homo sapiens
cgccgctgcgggcccgctccgacgcggaagcggagctggagtttgttcagatcatcatcatcgtggtggtgatgat

SEQ ID NO: 176139 - DNA, 100 bp, Homo sapiens
aaaacagcctaagaaaggccagggaacggcagcaacagcaaacggggattcagcgtccgatcctttggaacagggactcacgtgaagcttccaggaccag

SEQ ID NO: 176140 - DNA, 75 bp, Homo sapiens
agatacttctcaggagtcaaagcgcattttggaggaccaggaggaaaacccgctgcccgccgccctggtccagcc

SEQ ID NO: 176141 - DNA, 101 bp, Homo sapiens
agacgatctgcacttcgcattttggcattgacatttaattttagggtcctttatatagaagggagagtaggctcgattccttttgtccaaagtgaacccat

SEQ ID NO: 176142 - DNA, 75 bp, Homo sapiens
catatgattggctctttagctgaaatacttctgaaggatgatggcttggaaaaaagtccaatgaaaaaaaaacag

SEQ ID NO: 176143 - DNA, 82 bp, Homo sapiens
cttttataagacaaaagaaatagcaagaactgaggagcaccaggagacgcaactcatcgggagaacatcgagctggcgtttg

SEQ ID NO: 176144 - DNA, 97 bp, Homo sapiens
cttccagaatgacgagtttgatgtgttcagcagggactcagtagacctgagccgggtgcacaagggcaagagccgcataaccgcgaatgaaccaaag

SEQ ID NO: 176145 - DNA, 100 bp, Homo sapiens
cactgagtacatcaagggcggcacgctccggggcatcatcaagagcatgactctgttacggcatggtgcaaatccagatctgagagatgaagatgggaaa

SEQ ID NO: 176146 - DNA, 100 bp, Homo sapiens
cctcagcctcagagtcagatgcaggttcctacaacagcagccagtacccctgatgccgttgacaagtatctcgagacacctggggatgagaatgaacatg

SEQ ID NO: 176147 - DNA, 83 bp, Homo sapiens
cccagaccctggagcctcagttggaagcagccgatccagcctgcggagcctgtggggcaggagtggttaatgtgttgctaaca

SEQ ID NO: 176148 - DNA, 50 bp, Homo sapiens
ctggcttacaaattggattgaggtaaagcagctgagcagccattttcaga

SEQ ID NO: 176149 - DNA, 75 bp, Homo sapiens
cggtttcggacgatcacaacggcctactacaggggtgcaatgattcagagcattcttcactccagaataatgagc

SEQ ID NO: 176150 - DNA, 100 bp, Homo sapiens
ggacccacaggtgatggctggaccggcggaggaggcgggagcccattgtcccgagagcctgtggcctctgcctccgcagaccacgtgaccagagagaagc

SEQ ID NO: 176151 - DNA, 82 bp, Homo sapiens
aagaaaaagaagacttgcttcagcatttctcagtatggctttcccaacgaaaggctaagaattcaagaacggtcttaactga

SEQ ID NO: 176152 - DNA, 98 bp, Homo sapiens
tggagcccaggctgtgatgcaccggctcagcgagcggagtggaaagccaaggtccgcaggatctgagctgtccaagggggggccctcagcctcttggc

SEQ ID NO: 176153 - DNA, 76 bp, Homo sapiens
cctgtaccgccggcttgccacagtccacatgtcccggatcacagttgcagattatatttctagagctgagtctcag

SEQ ID NO: 176154 - DNA, 82 bp, Homo sapiens
acactctggggaaggtggccagtggcatctgtgacaacttgcttatagtacacatcctaaatatgacttctgcaaagataat

SEQ ID NO: 176155 - DNA, 75 bp, Homo sapiens
gagcttaaaaagctgcacgcaagtgttaaacttctggtggggagcattaagcgggaaatgaccttcacatttcag

SEQ ID NO: 176156 - DNA, 100 bp, Homo sapiens
ttttccttgagctgaacgtcttgcaacagtggccgcacgcatagaatatgtgagatccaggctgttgactgtactacaatatcctcatttacagtgaggg

SEQ ID NO: 176157 - DNA, 100 bp, Homo sapiens
ctcaaacaggagctggagcagctcaaagaggtatcatgatattagctggtttgacatcaagtcatttgtgagtcatcagatcttctcctgaaaatgggag

SEQ ID NO: 176158 - DNA, 75 bp, Homo sapiens
gtcagttacctgagagccaagagcttctttgatgctcttccgccctctctggatgagggaacagaagtggaggaa

SEQ ID NO: 176159 - DNA, 98 bp, Homo sapiens
cgagaaggagagatgcctcgctgacctgaacatctttccagaactgttaagttgcccgaagctcagcagagagtcggaggctgctttttaaacctgat

SEQ ID NO: 176160 - DNA, 82 bp, Homo sapiens
gtgagcggaaatgaggaggagatggtggaggaggctgaagggcgtgatggtgggcatgggtcagaaggattcctatgtgggc

SEQ ID NO: 176161 - DNA, 96 bp, Homo sapiens
atactgggctgaagaactttgaaagagctctctacttttatgaacagatgatgtctttctacctaaagatattgacctagacagtgtggatatgga

SEQ ID NO: 176162 - DNA, 50 bp, Homo sapiens
cgggccccgcccgtcgcctcaggtgattgcagtggtcatggacgtgttca

SEQ ID NO: 176163 - DNA, 50 bp, Homo sapiens
tgaatttcaagagagtaccattggggagtgatcagcagctggactgtgcc

SEQ ID NO: 176164 - DNA, 82 bp, Homo sapiens
cagtggatgtaaaccccttccagatttcgatggggtcctctatcatatttcaaatcctaatggagacaaaacaaaagtgatg

SEQ ID NO: 176165 - DNA, 100 bp, Homo sapiens
ctcagcgccgcggggatgggggcctcgggcgccccgcagccccccaacatcctgctcctgctcatggacgaccgtccgtctccaagagagtatgaagaga

SEQ ID NO: 176166 - DNA, 98 bp, Homo sapiens
gaacagtatgcttgggagtcttctgctggaggttccttcactgtgcgtgctgaccatgatgtatcggcaagcagtgtaaacggaggacttggggaaaa

SEQ ID NO: 176167 - DNA, 83 bp, Homo sapiens
atttggcttttcggagtgatggatctgttagttacactggatttcatctagaatacaaaggacttcgcaggtgagcagtaacg

SEQ ID NO: 176168 - DNA, 80 bp, Homo sapiens
ccctggaggagattctggggcagtatcaacggagtctccgggtctgaaccggacggcttttctcatttccacttgtacgt

SEQ ID NO: 176169 - DNA, 100 bp, Homo sapiens
gtggatctttctcatccaggtgtttcagaggatgaccaagggaagagaacaccaaaggcgaaggagaagaggaacaagaaaaagaaaaggaagctgatag

SEQ ID NO: 176170 - DNA, 83 bp, Homo sapiens
cggaggtgtaggtaggaaccggaatacctcggaagccgggaaatggactcagtggcttttgaggatgtgtctgtgagcttcag

SEQ ID NO: 176171 - DNA, 100 bp, Homo sapiens
cacgcagtgacgagcggccgaagcagctttgcgcctgcttagacgcctggtgactctcatttcgcagcaggccacgctgctggcctccaatgaagccttt

SEQ ID NO: 176172 - DNA, 90 bp, Homo sapiens
ggaatgacagagctgtacttccagttaaagagcaaggacttcgttcaagtcatgagacatagatgtgaaggaatggacaagagttgagca

SEQ ID NO: 176173 - DNA, 136 bp, Homo sapiens
caaaggagcagggaagaaggaatcatcgaggcatgggggtccacactgcaatgtttttgtggaacatggtgggcactacatcgcctactgccagaacgtgatcaatgggcagtggtacgagtttgatgaccagtac

SEQ ID NO: 176174 - DNA, 82 bp, Homo sapiens
gatgcctgaagctcaagggactgtgtccaccctcagaaagtgccagcgatgccgcccctctgcagaggtcccagtctctccc

SEQ ID NO: 176175 - DNA, 82 bp, Homo sapiens
ctgagggtctcggggcgggcgccgcgggacctctccgggccatggatggcagaaacggtggacacaagcgaaatggtcaacg

SEQ ID NO: 176176 - DNA, 75 bp, Homo sapiens
cgagagtatatgcgatgagtttgattctgaaaaagagttccacgtcctcccttatcgagtctttgttccccttcc

SEQ ID NO: 176177 - DNA, 75 bp, Homo sapiens
gccgacccttcctgtcgctgacggcgactgcgggaggccagaaattccaacagaatgggtttcctgaaacggatt

SEQ ID NO: 176178 - DNA, 100 bp, Homo sapiens
ggattctaaggcaacacttccttgaagaaacaagcttacaggtgtttcaagaggtattccagatcctctctgaatcggcagcaagatctatctcattgtc

SEQ ID NO: 176179 - DNA, 95 bp, Homo sapiens
ctgtccaacgccttccagctccggctcccgctgcctgcaccatgtccgccagagattaaaccacaggttccattatgggtcgacttgatgggaaa

SEQ ID NO: 176180 - DNA, 89 bp, Homo sapiens
ggcggcggcccagccggggccccgaagaggacagagcccgcggccgcgccgagcggggtgactccccggacagctcaacaccaaagctt

SEQ ID NO: 176181 - DNA, 100 bp, Homo sapiens
ggaacgtggaaagcgcatacaggaccctaaacaggaacgactgagacggctaaaccacagtgttgccaaggaaacagcccgcaggagagcaatgctggat

SEQ ID NO: 176182 - DNA, 75 bp, Homo sapiens
aaatcagtgattctacatctcaagctcatattttgaagtgtttacggtttcaccagtgatcattaaagaatgggc

SEQ ID NO: 176183 - DNA, 100 bp, Homo sapiens
cagacccaggctcttcgagactttgagaagaacaccttccaccatgaccacctcagcaagttcccacttaaataaaggcatcaagcaggtgtacatgtcc

SEQ ID NO: 176184 - DNA, 97 bp, Homo sapiens
ggtctcgcgcagggcggccccggttctggtgtttggcgtcgggactacaaagctgatgaagacccagcattattccagtcagtcaagaccaagagag

SEQ ID NO: 176185 - DNA, 50 bp, Homo sapiens
ggcttcctggcccgaaaggagagcctgcttcattgaggaccctgagagga

SEQ ID NO: 176186 - DNA, 85 bp, Homo sapiens
gggacttcactgctctgctgtctcctgcaagaactggctcaagaaatttgcctcgaaaaccaaattctgaggttgggaccaagaa

SEQ ID NO: 176187 - DNA, 75 bp, Homo sapiens
cccagattccaaaacttatgtcaagtgaaaggtgtagcagtcactcggcctacacccacagcatcgaccttgtga

SEQ ID NO: 176188 - DNA, 50 bp, Homo sapiens
ctggagctgccgcggcgcagccaggccctgggaggagcggggacactgag

SEQ ID NO: 176189 - DNA, 96 bp, Homo sapiens
aagtccacctcccttcagaggcagaaacacagcaatggatgcacaggaagctttagctagaagcttcttggacacttaatgattgttggcaagaaa

SEQ ID NO: 176190 - DNA, 74 bp, Homo sapiens
cgccccgggaacaaggaccggagctggatccgcggtgcggctgtgggcctgggctctaacatcttccgcctgct

SEQ ID NO: 176191 - DNA, 80 bp, Homo sapiens
atgtatccgcagggcagacatccgggggatatgagactttctactcggaatatcctgagtgttgcgtggatgtaaaaccc

SEQ ID NO: 176192 - DNA, 82 bp, Homo sapiens
caagaaggcaacgacgttccatctgtggaaggacctaccaaccaggaaataatgcaaaaggtgtcccaaggctcctgaccag

SEQ ID NO: 176193 - DNA, 50 bp, Homo sapiens
gtctggacatcaatgcctttagggttcttgtcacaatctatgctgattat

SEQ ID NO: 176194 - DNA, 75 bp, Homo sapiens
agtatcgtgggacagaagctgctatgatacttgggtccatagtaatgatgttgatgctgaaattgaagatccacc

SEQ ID NO: 176195 - DNA, 50 bp, Homo sapiens
tctctgctgcctgcattgaggggctgaggttcaactatgctacctggaag

SEQ ID NO: 176196 - DNA, 73 bp, Homo sapiens
gttggtgggggagccctgccctcctggttcggcctccccgcgcactagaacgaagccctacaggtggcaacta

SEQ ID NO: 176197 - DNA, 83 bp, Homo sapiens
ctggtctccggggccgctggattctgaggaccagcagatggccagtcacgagaacccagatggttggcaatggctgataaatg

SEQ ID NO: 176198 - DNA, 82 bp, Homo sapiens
ggagagtccggccgcgacaggacggtgaccatggaggaagaagatgagtctcgagggaagacagaggagtcgggggaggatc

SEQ ID NO: 176199 - DNA, 100 bp, Homo sapiens
atgggcacactgtgggggtgtcctggtgcacccccagtgggtgctcacagctgcccattgcctaaagaagtatacactgaatatcctcgaagaaattggt

SEQ ID NO: 176200 - DNA, 130 bp, Homo sapiens
caaggactcgccctccgtctgggccgccgtccccgggaaaacgttcgtcaacatcacgacaatgcagatcttcgtgaagactctgactggtaagaccatcaccctcgaggttgagcccagtgacaccatc

SEQ ID NO: 176201 - DNA, 85 bp, Homo sapiens
atatgctgcattagacaaacgagaggtcactcctggaagcaaggcggctctagctaatttatgtattggagatgtaatcacagcc

SEQ ID NO: 176202 - DNA, 100 bp, Homo sapiens
caaatgcagaggaagaatttttctatgaggaaacagagcaaatgcagcgttacaatcaaagacttattgaggaattgaaaaacagacagactcaagaaag

SEQ ID NO: 176203 - DNA, 82 bp, Homo sapiens
gtaaatactcaggagtgggattgctggatcatatgtctcttgcatggcaccaagaatgttaccaattcaagcagtttaagat

SEQ ID NO: 176204 - DNA, 75 bp, Homo sapiens
gatagctccaaactgggatattgcctggaagcagcgagccctttatgacgcaaggacagatgcccaacagcagca

SEQ ID NO: 176205 - DNA, 100 bp, Homo sapiens
cagcaccttcggcatctgcccctgccatgaccactgtggagaacaaatccaagattagcacagatgaataatacggcagctagtccaatgtctactgcaa

SEQ ID NO: 176206 - DNA, 51 bp, Homo sapiens
ctagaacaacgcaatatattgcaacgatttgttaaggattccaagtaactc

SEQ ID NO: 176207 - DNA, 75 bp, Homo sapiens
gaagataggatgtgggaacttcggagagctcagattagcttagcctgcgacgcttatgattagagccaacaattt

SEQ ID NO: 176208 - DNA, 100 bp, Homo sapiens
cagaacaattagtgttcaatttaaccagctatttcttagaccaaataaagagaaaatagactttcttcttgaggctgtggatgagatgaacggaaaggag

SEQ ID NO: 176209 - DNA, 75 bp, Homo sapiens
aacttctaagagaagcaatgggaatttacatcagcaccctcaaaacagatggccgccaagaacgagtcatgtttg

SEQ ID NO: 176210 - DNA, 82 bp, Homo sapiens
attcttcttatggccagagccagaacataatttcctgcccaagaagacccccttgggtgaagagatgacacccccacccaag

SEQ ID NO: 176211 - DNA, 90 bp, Homo sapiens
cacctcctcgccagcagccgtccggagccagccaacgagcggatgatgactttgagttcactggcagccacctgacagtaaggaatggct

SEQ ID NO: 176212 - DNA, 82 bp, Homo sapiens
cctcactaatgagctctccagaaaattgatgcaggcattttttactgtctacagaaacttattgtaattcatttttcctcac

SEQ ID NO: 176213 - DNA, 100 bp, Homo sapiens
aagcagctcagatggctcgcgagcaaaaccaccatacctgggaccagggcgccaataacagttattttaccaagaaaatggtttgcacgactttgaacat

SEQ ID NO: 176214 - DNA, 82 bp, Homo sapiens
gacctggcacccagagcacttcttctgctctcactgcggagaggtgtttggtgcagaagtcctgccattgactctaccagag

SEQ ID NO: 176215 - DNA, 75 bp, Homo sapiens
acacagtggccaccagcaggatcataaaatacatgatctgggccagaacacaaagcgtgaatccggaagaaaagt

SEQ ID NO: 176216 - DNA, 73 bp, Homo sapiens
acagatgcgcacgcacagcatcaacgcgctgctgatcatcggtggattcgagcagcagtgttgtactgctact

SEQ ID NO: 176217 - DNA, 80 bp, Homo sapiens
gcaacagtggccgcacgcatagccacgccgcaatgaagagcttcttacagtgaaagcaaagtaggtcgagtccactgaaa

SEQ ID NO: 176218 - DNA, 100 bp, Homo sapiens
gacattttgagaatggagactacagagagagagaatccagaagctgaaactgtatctgtgggttgatagttcttggggaggtacctcccccagagcatac

SEQ ID NO: 176219 - DNA, 50 bp, Homo sapiens
caaggcactgctttttcatgacgaccttcacggcatggtgcaactcccac

SEQ ID NO: 176220 - DNA, 74 bp, Homo sapiens
tgggacaccgcggaagtcgggaaatgaaccgcgcggagatcaagaatggcagcatcctgtgcctcagcacggcc

SEQ ID NO: 176221 - DNA, 100 bp, Homo sapiens
catcaaaaaacgacttaaggattcagagaaagagaactctttgttaaagaagagaataagatttttggaagaaaagatttgagttctgtgaacctgcatt

SEQ ID NO: 176222 - DNA, 75 bp, Homo sapiens
atttttgcttcagagtaatccatatgtaaaggtttgctgtaatggcacaagagtatttgtgcagaaagaaattct

SEQ ID NO: 176223 - DNA, 50 bp, Homo sapiens
tccgcctgtgggacacctaccaggtctggaaatctctccaggcaccctgc

SEQ ID NO: 176224 - DNA, 76 bp, Homo sapiens
ttccttacctgtttttccagctcacccactgccagcagagacaaagccacagacccaagcatgtcggaacaggatt

SEQ ID NO: 176225 - DNA, 82 bp, Homo sapiens
cctaaaatgacgacacgccccacaggtcttgggaggattaagtgaggggacatgagcttcaggatgagttagagaaaggtga

SEQ ID NO: 176226 - DNA, 75 bp, Homo sapiens
gtcccaggtactcaggaggctgaggtgggatgcagatcttcgtgaagaccctgactggtaagaccatcactctcg

SEQ ID NO: 176227 - DNA, 98 bp, Homo sapiens
gtgagaacgtcagcgggctgcagcgcgccaaaaccgggacggacaagaccctggtgaaggaggtcgtacaggagaactacgatgacccgcacaaaacc

SEQ ID NO: 176228 - DNA, 117 bp, Homo sapiens
gacaagccgctggcagccgcggatctcaccgccgctcagggccaaacaccagagcaccctagaaggtttaactaaaagaatgctcatgtttgacccagttcctgtcaagcaagaggc

SEQ ID NO: 176229 - DNA, 88 bp, Homo sapiens
gaccgagagcgcgaatatcgtcatcgttagaaggtattaatctctggagaagacacatccacagttagcactttcttcagatgctgac

SEQ ID NO: 176230 - DNA, 100 bp, Homo sapiens
tgcggtagacagttggaatgccattgtggcagatgttagaaacaagattgcattcctcaggatgagcacctctgaggagttggatgaaatgccagtgccg

SEQ ID NO: 176231 - DNA, 83 bp, Homo sapiens
cctctcctgggatcggcccaaggccagttctccgcagggcaacaggtttgtctatgctggctctaactcgggcgtggtccagg

SEQ ID NO: 176232 - DNA, 48 bp, Homo sapiens
cctcctctggattcaagttaaaggatctatacctgctaattatgaagg

SEQ ID NO: 176233 - DNA, 75 bp, Homo sapiens
cttctattcagtgcaagctctatcagtactacttagatcacttaacagccttcccaccatggattgccaagaaaa

SEQ ID NO: 176234 - DNA, 75 bp, Homo sapiens
gttgtaatcagctgaggccatgtcaggagacggagccacggagcaggccaaagctgtcttgaaatttatcgaggg

SEQ ID NO: 176235 - DNA, 90 bp, Homo sapiens
ggctttaggctggaagcgccttagaggagccatttttccagggtaagcttgatgattaccaggaacgaatgaacaaaggggaaaggctta

SEQ ID NO: 176236 - DNA, 100 bp, Homo sapiens
gatggggcctttcttatccgagagagtgagagcgctcctggggacttctccctctctgtcaacgctggctgacagagcagagagctcaatgtcctcattg

SEQ ID NO: 176237 - DNA, 100 bp, Homo sapiens
agtgctgccaggagaaactaagttgctgaacgggaatgtgttccagaagatctagaactgaagaagaagatttttgctcagttagattccatcattgatg

SEQ ID NO: 176238 - DNA, 137 bp, Homo sapiens
gcgcggcggcgcggctgccggctgccctgtgaatgggaagttacgcgaagtccacccagcgtttctgagctggagcaggctctgcggctggagcctggggagctggagacgcaggagcccagggggctggtacggca

SEQ ID NO: 176239 - DNA, 100 bp, Homo sapiens
agggagcccccaacccagaccacacccttgagcctgagcccgacattattcctgagaattttgagactgaagaagtagaactttccttctccaagaatgg

SEQ ID NO: 176240 - DNA, 75 bp, Homo sapiens
gccatgaatgaggagtacgacgtgatcgtgctgggcaccggcctgacgtggaatgcagtagccctctgggcctgg

SEQ ID NO: 176241 - DNA, 100 bp, Homo sapiens
cctgatctggcctcatctgttccagggaggtgggattgaagctattctcaagctggaataactgagactgaatggacaagtggatcttcaaaaggcggac

SEQ ID NO: 176242 - DNA, 100 bp, Homo sapiens
gttgctgtagtcatctacaataataaatccaaagaggagccagttaccatgactcatccaggcagtgatgaagcagtggctgacactagcaggcgtgtgg

SEQ ID NO: 176243 - DNA, 101 bp, Homo sapiens
gctggcagcgctgtgtgcgagagggtgctgtgctctacatcagactccccccaggtacagtgccttcgagcctacaagccccgagagaatgatgaattggc

SEQ ID NO: 176244 - DNA, 98 bp, Homo sapiens
agcgcattgcatcacatgattttgaccccacagacagcaccagttgcccttgaagcagaaaacagaggtgaaatgaaactagctctccagtatgtccc

SEQ ID NO: 176245 - DNA, 75 bp, Homo sapiens
gacgatgtggaacccagagatgactccagccccagccccaagggcagagcctgacatttaccccggtaactgctg

SEQ ID NO: 176246 - DNA, 98 bp, Homo sapiens
ttacttcagttgaaatcgtctccaggcagttgcagtggtgcagaatggctgacctcagtcttgcagatgcattaacagaaccatctccagacattgag

SEQ ID NO: 176247 - DNA, 100 bp, Homo sapiens
gcgtgtgggcattgtggcctggcacaccacagcccagaacgtgctgctcagtgcaggagggcaccagtggtaagacagcgctgcacctggctgtggaaac

SEQ ID NO: 176248 - DNA, 95 bp, Homo sapiens
gtcctgacttctttccaggtgatgtcaagagtttttctaatatgggcagtaacacatagcgtcaaagagctcaccagcgactggaaccagcaact

SEQ ID NO: 176249 - DNA, 100 bp, Homo sapiens
ggccgctaccgctcaggtgctgcaggcacagcccgagaaaccgcagcactacacaattcctagaggacctgtgcaacaacctcttgaggatcgaatcttc

SEQ ID NO: 176250 - DNA, 90 bp, Homo sapiens
tcctgctaccccatgaagaaggtgcctgcttctcctttgccttctaccacgattgtaaataccagctgtcccctacagtgaatatgcccc

SEQ ID NO: 176251 - DNA, 100 bp, Homo sapiens
ttgagaaattttgagtcctcgagtgaatgggcggatctcatatcttcacttggcaaactcaacaagccccccgggaccctccaggtcaggccaagccgag

SEQ ID NO: 176252 - DNA, 90 bp, Homo sapiens
gaagatatttatcaaatagttggagagcacgttttcaatatcataggagcatttgatattccacgctttgtgtacaattcagaaagaaaa

SEQ ID NO: 176253 - DNA, 82 bp, Homo sapiens
ggagcattttgcagcactccagagcctgctcaagatttgaagaccttgcttctcatcacccactggattatgccccaggctt

SEQ ID NO: 176254 - DNA, 73 bp, Homo sapiens
aatagtggcaggtgacagtctgcatgtgcagttttcaggtaagaatgattgatgttggctgatattggagtgc

SEQ ID NO: 176255 - DNA, 125 bp, Homo sapiens
gaaggtccggggcttgccctggtcttgctcggccgatgaagtgcagaggtttttttctgggtctccgtctctccaccgggggcttcatccttccagggaggagaagagggactccagaatggctg

SEQ ID NO: 176256 - DNA, 75 bp, Homo sapiens
cttcatttacagagcaacttgatgaaggtacacccaatagagaggaacatcaggagagcattctgggtaatacca

SEQ ID NO: 176257 - DNA, 82 bp, Homo sapiens
ctcagagtgtgagaaaaaaataaactcctatttgtttatggcaaggatccagtggggatattgtgatgactcagtctccact

SEQ ID NO: 176258 - DNA, 82 bp, Homo sapiens
gtggcgcctgcggacctaactagctccaggttaggccgagctttgcgggaaagcagcgccttatgccagcctggaccatctt

SEQ ID NO: 176259 - DNA, 74 bp, Homo sapiens
caaccacaataacaggcggagggtcggcgtaggtaccttgtggtctataatcctttagaacaagaccgaatctc

SEQ ID NO: 176260 - DNA, 98 bp, Homo sapiens
gaggtgaaggcgccgcgccaggccgggcgggcggtcccctcttgctgttggctgcacatcaggaaggctgtgatgggaatgaaggtgaaaacttggag

SEQ ID NO: 176261 - DNA, 98 bp, Homo sapiens
cgtcaaggagctggacctctacctggcctacttcgtgcgtgagcgaggtctcggcgcggaagatggccggcggcgtggacggccccatcgggatcccg

SEQ ID NO: 176262 - DNA, 100 bp, Homo sapiens
ggagctggctgcggagcggcgagggacctcgcagggagccatccgatcatgcacttaatgaagttgatcctggtgactggcagaaattcgtgaagaaggg

SEQ ID NO: 176263 - DNA, 100 bp, Homo sapiens
gtgatttctgcatttccatctgagacagagtcttgctctgtcgcccaggctggagtgatgaggcgcgatcatcactccacctgggctcactgcacctccg

SEQ ID NO: 176264 - DNA, 76 bp, Homo sapiens
gagccggtgctgttcagtggcactgtcagtatgcttcagaagatgcagagcttctcttagttggaaataagttgga

SEQ ID NO: 176265 - DNA, 100 bp, Homo sapiens
gcgcgctgctcctgctctgctacctgatccctgcatgtcactgagtccaccatgctttacagaagaagacagatttagtctggaagctcttcaaacaata

SEQ ID NO: 176266 - DNA, 51 bp, Homo sapiens
tgagcttgccgcacaaaaagctagagaggaaaactacatctcagacccaac

SEQ ID NO: 176267 - DNA, 83 bp, Homo sapiens
cgccgagcggccgaggcgccgcggtcggctctgggactcgtctggcgtccctcagacaatgcagatcttcgtgaagactctga

SEQ ID NO: 176268 - DNA, 82 bp, Homo sapiens
agttcgaggccctgcggagctgcttcgccgctgcgatttggtcgtattgggcgcctggtcaccagggctgcttttaactctg

SEQ ID NO: 176269 - DNA, 75 bp, Homo sapiens
tccagctgtggatgaacaccgtgaacctcagttattgggctttatcagacctaaacaaggatgggaagatggatc

SEQ ID NO: 176270 - DNA, 100 bp, Homo sapiens
aagcagagctcatatagccagcaaccatataataaccagggacagcagcaaaacatggaatcatcaggaaggggtagatgtgattaatggggccctcgag

SEQ ID NO: 176271 - DNA, 90 bp, Homo sapiens
tgtggagtggtttgaatatcgtaagcgcacgtttaaacatctcaagctgttgtcaacttcagataccactggagaagaaaatgctgaccc

SEQ ID NO: 176272 - DNA, 90 bp, Homo sapiens
gccatgcccctcaggctggaacttgccctgtctcctcgcagatgaggacctcagcagccatgtcgaagccccatagtgaagccgggactg

SEQ ID NO: 176273 - DNA, 75 bp, Homo sapiens
tggacattacccaagattttgaagaagcttgtcgaggatgagaacaagttgagcagtgccaacggccatgaagaa

SEQ ID NO: 176274 - DNA, 90 bp, Homo sapiens
tcactgtgcaatgaccgtgaactgtacagttacctccgtgtgtcacaggaagactcttgtaaaccccagtgataggtaccatcttatgcc

SEQ ID NO: 176275 - DNA, 100 bp, Homo sapiens
ttcgaagtctcagcggtattctggtgcttatggtgcctcagaggctgtgacaacactgaaaacagtattggatcagcagcagaccccttctaggttagca

SEQ ID NO: 176276 - DNA, 98 bp, Homo sapiens
ctgcagccgagatgccgggggagcggggccttccacaccccctccgtgggtgtgtggcacaaatcctgaagagcccgtgggcgtggactgctcatctg

SEQ ID NO: 176277 - DNA, 88 bp, Homo sapiens
aacagctgaggcagctactggagaaggtgaatgtcctatactccataattcccagccagtaagccagcttccttccctgaggcctgaa

SEQ ID NO: 176278 - DNA, 100 bp, Homo sapiens
agtaatacagcagccaacttcttcgccaaattaaagttttacaagatttaacctgtcatcaagacctgggattttggtgtgcacttgcaggaaagacatg

SEQ ID NO: 176279 - DNA, 50 bp, Homo sapiens
caagaagtccttcgcccacagtacatgatattgatgatgttaagaagttc

SEQ ID NO: 176280 - DNA, 100 bp, Homo sapiens
agcaagaaggccctggacacagcaatatctctgggctttcacagtcaacaagtggaagaagctgtactcgaccccactgctggccatccctacctgcatg

SEQ ID NO: 176281 - DNA, 90 bp, Homo sapiens
caaagctattctgggggcaacagagtacgtagagaaatcgacactcttaatgaacgtttagctgctgaaggacaagcgattgatggagca

SEQ ID NO: 176282 - DNA, 87 bp, Homo sapiens
atgaagaggatgatgtttttggtgaaggttgaaaggattgttgacaaaaggaaaaataaaaaagggaagacagagtatttggttcgg

SEQ ID NO: 176283 - DNA, 101 bp, Homo sapiens
caaattcagtcccttctccatgaaatggtacacgcagaacatgacaatgcctgtggaagacaagtcagaccccccagaggggtctgaggaagccgcagagc

SEQ ID NO: 176284 - DNA, 100 bp, Homo sapiens
ccgtgcgctcattggtcgggatgtgtcggctcagcagcctccaacttctcccgaatcccactggctcagaaatcctggatagaaagagcattttataaaa

SEQ ID NO: 176285 - DNA, 98 bp, Homo sapiens
gacagggttttggttactgagactcaggttattcgggaaaccctatggaagcgagcagctgcaaagcatctaatagaacgctactaccaccagttaac

SEQ ID NO: 176286 - DNA, 82 bp, Homo sapiens
gctggattctgaggaccagcagatggccagtcacgagaacccagctcagagcccgggcgctgtggaagagattctagaccgg

SEQ ID NO: 176287 - DNA, 75 bp, Homo sapiens
cgagtccagcagatgagaaggggtagttggcaaaaaaggagaaagccactaaggtacaaaagacactggacaacc

SEQ ID NO: 176288 - DNA, 112 bp, Homo sapiens
atcctgccgtccttctccactttcgccagcccgtgccgcgagcgcggcctgcaggagggcgaccattgacgaggtggagacggacgtggtggagattgaggccaaactggac

SEQ ID NO: 176289 - DNA, 75 bp, Homo sapiens
ctcattctaagagacttaaagttaaactgactattcagaaagaggagcatggcctgttcttattgatgactttgt

SEQ ID NO: 176290 - DNA, 96 bp, Homo sapiens
gcgacctggtcttcgccaagatgaagggctacccgcactggccggcccgggtaaagaacaagcacctttggagatgagtatgcatccagcggcaag

SEQ ID NO: 176291 - DNA, 83 bp, Homo sapiens
ggcggcgaaggtcagcgccgacggcagccggcacctgacggcgtgaccgacccgagccgtactgtcaagatgataagcatgga

SEQ ID NO: 176292 - DNA, 75 bp, Homo sapiens
ggcgccatcttcgaacttagacttccggaaggactttggcgaggggattaaagcctgtggtttccacagaagcac

SEQ ID NO: 176293 - DNA, 75 bp, Homo sapiens
cagcaccaaggaccagcaattcaacacaacattctgaaattttttggttattgtaatgatgttgatcgggagttg

SEQ ID NO: 176294 - DNA, 50 bp, Homo sapiens
cagaaagagtcatacctggagcagcagggtgctgttggcccaaaggttgc

SEQ ID NO: 176295 - DNA, 82 bp, Homo sapiens
cggactgcagccgcgagctcctggaggcggcgggatggaggcggcggccggtgatgtgtccaatctagatcccaacttctca

SEQ ID NO: 176296 - DNA, 83 bp, Homo sapiens
tctctccctgtcctagctctgtaactgtttacagtgtacaaagataatcaatgctgattcggaggacccaaaatacattatca

SEQ ID NO: 176297 - DNA, 75 bp, Homo sapiens
tcatctcaaaaacaaaattctgaactcaggacttggcaacaaaagctggcaggctgacagaggcggcctcaggac

SEQ ID NO: 176298 - DNA, 83 bp, Homo sapiens
agcagatggcggatgccctgcagtacctgcagaaggtctctggagacatcttcagcagcaggagtcctggcaaaataagcatg

SEQ ID NO: 176299 - DNA, 85 bp, Homo sapiens
gcctaggcattttgctgtctcctcctaatacgcattgtgatgaccacctgctccaccttctgtgcccttggcatgatgcctctcc

SEQ ID NO: 176300 - DNA, 86 bp, Homo sapiens
cctcccgggctccgggaaaactacactggccaggattttttatcaagcagaaatgcatcgaacaacgagaatcaagatcactgagc

SEQ ID NO: 176301 - DNA, 98 bp, Homo sapiens
ccagcgccggcctcctcagtgcgaagaagctgcagccgcacctggccaagggaatttgctgacacaatatcttccgcctggtgctgggcatatcctaa

SEQ ID NO: 176302 - DNA, 95 bp, Homo sapiens
actgggactcatgtccctgcagctacaggaggattttggagatggaggtgcttttccagagatccatgtggcccagtatccactggatatgggac

SEQ ID NO: 176303 - DNA, 75 bp, Homo sapiens
cgagtcgaggtcctgcaggtggagctccggcagccgccctgaaatcatgcccaagttcaaacaacgaagacgaaa

SEQ ID NO: 176304 - DNA, 100 bp, Homo sapiens
cagggcggtaaggatttcaacatgcctctgacaatctctagtgggtggcactgaatcaacaagacaagcaactcaattgattaatgctttgatcaaggat

SEQ ID NO: 176305 - DNA, 82 bp, Homo sapiens
attggccccaggttgccatcctcagtcgtctattgtgtcaacagcatctccaccctggagcctgtgagccggtgccagcgcc

SEQ ID NO: 176306 - DNA, 75 bp, Homo sapiens
cctgcctgagccactgcgtgaggctagcactcatccgcttccgggtcaagttccaggttcctgtaatacttacct

SEQ ID NO: 176307 - DNA, 75 bp, Homo sapiens
agtgtgccaggcccgcagtcctaccccattgtgacagttggaaaatggatataccttatttgattatgatgttgg

SEQ ID NO: 176308 - DNA, 75 bp, Homo sapiens
tcttgtccataaggctgaaccggcaaatctttggatggattatatgaaagaagaattgaaccacccccttggtag

SEQ ID NO: 176309 - DNA, 110 bp, Homo sapiens
gacaagaccatgctggcaagtctgaaggtcaagtgtgcaactgaggaacatggctcaagaaactaatcacagccaagtgcctatgctttgttccactggctgtggatttt

SEQ ID NO: 176310 - DNA, 90 bp, Homo sapiens
ccgcccagcccaaaccaggagattgcgagggagcgatgcggtgcagcgcgggccaattcctgtccccccagcagcatggcatcgtgtgct

SEQ ID NO: 176311 - DNA, 100 bp, Homo sapiens
cggcgaggagaacgtcccgctggatctgacccgaggtaaaaaagctccagttttatttaataaagaaatgattgagtcaatgaaggaaggttcagttgtt

SEQ ID NO: 176312 - DNA, 75 bp, Homo sapiens
atccttgtttaatgactttggtgccctcaacatctctcagagacgaaaggatatcaatgcttacaattgtgaaga

SEQ ID NO: 176313 - DNA, 108 bp, Homo sapiens
cgcaaacccaaagatccccgttcctggagattctgattgaggttatgatgtgattgctcaagcccaatctgggactgggaaaacggccacatttgccatatcgattct

SEQ ID NO: 176314 - DNA, 75 bp, Homo sapiens
gtcaaaatcaagactatagaggtggaaagaatagcacttggagtgcttcttggacacttaatgattgttggcaag

SEQ ID NO: 176315 - DNA, 83 bp, Homo sapiens
cgtaactttctcccttgatccgggagtctttccactggcttcctgcctgacacagctcacttcaagaagtgcacaatgtcaga

SEQ ID NO: 176316 - DNA, 87 bp, Homo sapiens
aaagaattgaaaaatcccaacatcgttaactttttggacagtgaacagcagagaatttcaaaggaccttgctaatatctgtaagacg

SEQ ID NO: 176317 - DNA, 99 bp, Homo sapiens
gggggaaagcagcgggacgaggatgacgaggcctacggaccaagaatcgccttcagccctgtctggtgcatccttggcagaaagtgaggaggaaaacac

SEQ ID NO: 176318 - DNA, 51 bp, Homo sapiens
ggccatgaatgcccaacaagataatttttgcaggctttggaggtactccca

SEQ ID NO: 176319 - DNA, 84 bp, Homo sapiens
ttcagccttctgcatctggatctcttgttggaagagaaaatgaggatgtaattggctgtactcaggagatggatttcattcttt

SEQ ID NO: 176320 - DNA, 50 bp, Homo sapiens
ctgagccaggccagcgccgacctggaggtggcagatatctacctagcatc

SEQ ID NO: 176321 - DNA, 87 bp, Homo sapiens
tctgtgtggattcttcagaaagtgaacttggcattttagatctaattcaaaagtgagcttgtagtggacaaaacaaagaggaaaaaa

SEQ ID NO: 176322 - DNA, 83 bp, Homo sapiens
ggggcctgggacgcgccccgaggaggagcggggcggcgcaggcgatttggtgcttccagatgtgagttatcaggtggaatcca

SEQ ID NO: 176323 - DNA, 100 bp, Homo sapiens
cgggacgacaacgagcagctcatcacccagtacgagcgggagaaggcgctgcgcaagcacgctgaggagcatgcttttcacttccactgcatctctcgct

SEQ ID NO: 176324 - DNA, 100 bp, Homo sapiens
gaccctgtgccgggacccgaaatccttcctgtaccgcttatgccaggccgatcccgacctggactcagacaagaggtacagccccgtggtggaggccggc

SEQ ID NO: 176325 - DNA, 90 bp, Homo sapiens
tggctttcacaagtacagtctacaaaaagacctgctagagccattattgccccaaagtggagctgttccaaaaagaaaagaccccttaac

SEQ ID NO: 176326 - DNA, 100 bp, Homo sapiens
cttttcaagttctgaactgggaggtgactttgagttcatggatgatgccatttcgccgtgaggaagatgcggaaaaggctgtgattgacttgaataaccg

SEQ ID NO: 176327 - DNA, 90 bp, Homo sapiens
agcagattctaatcaaaatatgcagtctcttttaccagcagtgcagctaaatcaagtccagcagctaaaccaggatccacaccttctcga

SEQ ID NO: 176328 - DNA, 101 bp, Homo sapiens
attctggtggggagatgaacccaacctagtgggtgtaatacatcatgaactgcaggctctcctccgagtggaaaccagagatcaggctcccgtctggcagt

SEQ ID NO: 176329 - DNA, 153 bp, Homo sapiens
gtgacccaataccggatgctctacagcgacacagggagaaactggaaaccctatcatcaagatgggaatatctggctcttccgcaatattcttctttggaatggactccttacagatgacaccttgcaagaactaggactagggaagctgcta

SEQ ID NO: 176330 - DNA, 80 bp, Homo sapiens
ggccctgatccagacctgggcagacaatgcagatcttcgtgaagactctgactggtaagaccatcaccctcgaggttgag

SEQ ID NO: 176331 - DNA, 100 bp, Homo sapiens
tttttaagtaaaaattttcagaagcacatgtattataacagtgagggtcgctgtctgcccattgatagaggccagattgtcttggaagttccaaagttgc

SEQ ID NO: 176332 - DNA, 50 bp, Homo sapiens
ttatcctggtcatcttctatttccaaagacaaccctccatatgataaggg

SEQ ID NO: 176333 - DNA, 100 bp, Homo sapiens
ctccacagctccagggaaggcactcaaaagtggggggcaggaaaggacccaggaccacccccaccttctccattactaggtttgaaaccactgcagttat

SEQ ID NO: 176334 - DNA, 51 bp, Homo sapiens
tcatactaaagaacacatctggaagggtgtccggtggagagctgtttgacc

SEQ ID NO: 176335 - DNA, 100 bp, Homo sapiens
gcgggtttgctcccaacatcctggagaataaagaaggccctcctggaataaaaggagagaagggtttccccggattccctggactggacatgccgggccc

SEQ ID NO: 176336 - DNA, 100 bp, Homo sapiens
ctgctgggcagcactagcactctggagaaggtctgccgctgtctgcactttcctggccaaacgtaccaagaaagtcgggatcgtcggtaaatacgggacc

SEQ ID NO: 176337 - DNA, 100 bp, Homo sapiens
gaaaaatgtactctgacctgaatcctgaattttccttgatggtcaaaagattaagtgtttgccagctctgagcctgtgccaggattccagggggataccc

SEQ ID NO: 176338 - DNA, 73 bp, Homo sapiens
tcattggcttctttgagactgaaatggcagacttaattcagtgcacaaatgagatgaatgtgaacatcccaca

SEQ ID NO: 176339 - DNA, 60 bp, Homo sapiens
gaagagtctttgcagttcaacctggaaactttcagcttatgtggagaagtcgctgtgaag

SEQ ID NO: 176340 - DNA, 100 bp, Homo sapiens
gtggatttccgaggcaagaaggtgatcgaactgggtgcggggacaggcatcgtggggatcttggcagcgctgcagggcttatcaggagggcagacttcaa

SEQ ID NO: 176341 - DNA, 74 bp, Homo sapiens
tactcatctactaggcaagcatggagttggcaccccaaaagaaagcacccatatatctcccatcagcatcctac

SEQ ID NO: 176342 - DNA, 75 bp, Homo sapiens
tttagggtcctttatatagaagggagagtagtacagctttatggcggtcatccactttgcggggctcaaggccgt

SEQ ID NO: 176343 - DNA, 82 bp, Homo sapiens
gggatttgagattgacgcggtgaactctgtccagttttcaaaccacacaggtgggggaccttaggcttgcattgcagcgtac

SEQ ID NO: 176344 - DNA, 100 bp, Homo sapiens
ataggcgcatctctggagttgatcgttactatgtgtcaaaggtgttcaagcagccctggccagggatcatgcgcacagtctatgggaaccacgaacgctt

SEQ ID NO: 176345 - DNA, 90 bp, Homo sapiens
tcatgagccctttggatcgaattgccaatgtctccatcctgaaggccaagcatggggatcagcacgagggtcagcactacaacatctccc

SEQ ID NO: 176346 - DNA, 82 bp, Homo sapiens
cagcaatctcctcctccactgccactacagggaagtgcatcacatgtcagggggatatgagactttctactcggaatatcct

SEQ ID NO: 176347 - DNA, 98 bp, Homo sapiens
gtcccaggccgccccgcccaacccctcctcccagtgctgaagtcccaaggagccgccctgcaggaaacatgccctgaactgtcacagaatgaaaccag

SEQ ID NO: 176348 - DNA, 100 bp, Homo sapiens
gtttgatgaaggtggaggcagcgcggctctcagattccatcacccagcacaaggtctgtgcccctgaaaactacctattgtcacaatgacagtgacctca

SEQ ID NO: 176349 - DNA, 82 bp, Homo sapiens
ggagctcatgccactggtcaccctccccaaaggttgtccgagcggaactgcattgagattgttaataaattgattgctcaga

SEQ ID NO: 176350 - DNA, 75 bp, Homo sapiens
ctgcacaccgaggaaatgcgcttcctgagggagtgggtggagagttttgatggcgacgactttgatgatgtggag

SEQ ID NO: 176351 - DNA, 100 bp, Homo sapiens
ctggtcgagccggaggaagccaccagtttcacgctatggatacattgtatagacacagctatgatttgagcagtgccattagtgtcttagtaccactcgg

SEQ ID NO: 176352 - DNA, 75 bp, Homo sapiens
ggaggccgagaaccgcagggactggccgaggagtgctaacaggaatgaatgaaacttctgctgtaatcattgctg

SEQ ID NO: 176353 - DNA, 75 bp, Homo sapiens
ggcaggaaccgggaccgccagcgcaggagggggctgttgtggttccgactataaacagtacgtgtttggcggctg

SEQ ID NO: 176354 - DNA, 50 bp, Homo sapiens
ttggaattcaagaatgatgaaactgtgtgtttcatacaaagaatacaagt

SEQ ID NO: 176355 - DNA, 75 bp, Homo sapiens
tcatagagaaacggccggaattattaacaaatgaggacctacagggcagaaagggcctgagcgcctgcgaacaga

SEQ ID NO: 176356 - DNA, 110 bp, Homo sapiens
ccaggaggaagcaggagcagcccaagcgccttccctcacgtgctggagaatctggtaaaagcaccattgtgaagcagatgaggatcctgcatgttaatgggtttaatgga

SEQ ID NO: 176357 - DNA, 50 bp, Homo sapiens
gcgcggtggcggtggcgcgcagccagggtgataaaagaaaatgtggctga

SEQ ID NO: 176358 - DNA, 75 bp, Homo sapiens
ctctccaaagagctgcaggccttcaacagccttattaggcttgcagccaatttactggagcagggatgacgtagc

SEQ ID NO: 176359 - DNA, 98 bp, Homo sapiens
tttggacgccggcggagacgcgggcgagaggctgggaggcggcagaatgcagccagaggagggcacaggctggctgctggagctgctgtccgaggtgc

SEQ ID NO: 176360 - DNA, 98 bp, Homo sapiens
agcttcgtgggctcctactacctgtgcaaaggagatgtgggttccttcgtgctgaagttagtggagggccttcagggccagacctgggccccagactg

SEQ ID NO: 176361 - DNA, 100 bp, Homo sapiens
gttaatgcacctggtggttgaaagttttccttcttacagagatgtgactctgtttgagtttggcaacaatcccttctcttccctggccgggaactccgac

SEQ ID NO: 176362 - DNA, 100 bp, Homo sapiens
ccaccatgtgagatgtgcctttcatcttctgccatgattgtgaggcctccccacccacgcggaactgaaatgattgaagccatccgcgaagcggtggtct

SEQ ID NO: 176363 - DNA, 100 bp, Homo sapiens
ctcaggtggaggtaggacctgtgctggccgcgggagaggtaaacagaacaccaggacatcccagagtctgggaaatgtgccagttgccagctgacggtcc

SEQ ID NO: 176364 - DNA, 97 bp, Homo sapiens
ggcttgccctggtcttgctcggccgatgaagtgcagaggtttttttctggaatcaagagagacccggccaaggcttttgtgcccaggactgttatga

SEQ ID NO: 176365 - DNA, 82 bp, Homo sapiens
agagaaggaaggatcttctcatgcacagaggcaacaaatggcaactttctgagactgctgtgtaagctatggtggcatgtgg

SEQ ID NO: 176366 - DNA, 100 bp, Homo sapiens
tgaacaaccaagtgattcattccaaggacaggcagcccagtctggtgtttggaatgacgacagtatggtaaagcagctgagcagccattttcagatttac

SEQ ID NO: 176367 - DNA, 50 bp, Homo sapiens
agcccgcaactgggggcatcatggagggatcaccattaacaaggacacca

SEQ ID NO: 176368 - DNA, 100 bp, Homo sapiens
gtgtctgtccccagagcctcagtttgtgcaggacaccgacatggaacagggactcactggggaaactggaggaagcagcatctcgtgcagcagaagagga

SEQ ID NO: 176369 - DNA, 85 bp, Homo sapiens
attttaagagccccatagaccagtgcaatcctgttcatgcgtgccggtggtggtgtgcacattgagccccggtatagacagttcc

SEQ ID NO: 176370 - DNA, 83 bp, Homo sapiens
tgctgctccgtggagatcgtcccgcgcctgccgcatcaagatggtgctcatgtggaccagtggtgacgccttcaagacggcct

SEQ ID NO: 176371 - DNA, 74 bp, Homo sapiens
gaggaggccatcagatggttattgatgttcaaacaggacttcagaaatgggcttgggaaccagctgagttcagg

SEQ ID NO: 176372 - DNA, 74 bp, Homo sapiens
aaaacctaaagtatttgccgttggtgattcaaggctggagaatgctggaggagaccttaaggatggccaccacc

SEQ ID NO: 176373 - DNA, 90 bp, Homo sapiens
tcacaacctctgtggtccgtaggagccactatgaggagggccctgggaaggtttgcacatccttatcaatatgaactaaatcactttacc

SEQ ID NO: 176374 - DNA, 88 bp, Homo sapiens
gcgcactcggattgaagatgaatatagaacccatcacacagtacaactaccagagactgctgctactttgaaacgtacgatagaggcc

SEQ ID NO: 176375 - DNA, 75 bp, Homo sapiens
tttctggcaaagatgagggggattcttaagtctgaaccaatcagagtccttgtgactggagcagctggtcaaatt

SEQ ID NO: 176376 - DNA, 100 bp, Homo sapiens
atggccaaatcctgtgctgctgaagcaaccagaagaaagcaatttgaatttgcctgtctgggatcctcgggcacagaaaactgaatctgtagataacgag

SEQ ID NO: 176377 - DNA, 100 bp, Homo sapiens
agaagataattccaatcatcttacaaaactggaaactgaggcatctaatatgaaggccctggagagtgaatttgtttcctgccagcttcaccaatggatt

SEQ ID NO: 176378 - DNA, 82 bp, Homo sapiens
tgggagctgaggaaccagatatcttgaaaagctgccagaaagttccagggtcacccccgagaggacaacaggcatctggaag

SEQ ID NO: 176379 - DNA, 51 bp, Homo sapiens
atgcacctcctgcaagacgagctgctgctcctgctgccctgtgggctgtgc

SEQ ID NO: 176380 - DNA, 100 bp, Homo sapiens
ctctgcgttttgttttcccctcggcactaggcagcggaggagcccgaccgacccgtaagactttgaccccgacgcaggcttcagtgattgccgcggatca

SEQ ID NO: 176381 - DNA, 98 bp, Homo sapiens
tgtgcctccaggttatatctcacagaataactgaagtgaagtgatggactccgatttggagagtagtaagacgtgaaaggaatacacttgtgtttaag

SEQ ID NO: 176382 - DNA, 87 bp, Homo sapiens
cgccataccgggggacctggatcccctgacggcttacctgaggaggaagccaagaatctggtgagcgaagccatcgcagctggcatc

SEQ ID NO: 176383 - DNA, 75 bp, Homo sapiens
ctggaagatgggaagaaagaagcagctgccagtggccattctggagaagaagtacagttatgcagtaaagccatt

SEQ ID NO: 176384 - DNA, 82 bp, Homo sapiens
cgaacgggttgcttcccccgctgcgaggtggacgacccaccggagcccgtgtacgcgaacatagagaggcagccccgggcca

SEQ ID NO: 176385 - DNA, 75 bp, Homo sapiens
caagccatgttaaggcgctggtttgtggaagtggaaggaacagtgaaggtggaaaaggattattcatacctgaag

SEQ ID NO: 176386 - DNA, 89 bp, Homo sapiens
gcctggcgttgatccccgataagcctgccactcagtgtatttcagacggcaaggctgtcattatttgtatcaaaaacaaagaatttgaa

SEQ ID NO: 176387 - DNA, 100 bp, Homo sapiens
tcagaatcgaatctcttctccctccccttcttgccgcagcaatggcgctgagttcctctgctggagttcatcctgctagctgggttcccgagctgccggt

SEQ ID NO: 176388 - DNA, 83 bp, Homo sapiens
ctgtataaagatgtcatgatggagaattatggaaacctggtctcactgggaggagatgttaaagtaacccatcttgcaggacg

SEQ ID NO: 176389 - DNA, 75 bp, Homo sapiens
gcgccgtccagcccggagggacctggcttatgtacagaagtacgtcgtgaagaattatttctactattacctatt

SEQ ID NO: 176390 - DNA, 100 bp, Homo sapiens
ttcctgctgttcccagaagcgaagtggagagcgccagagtaatgggcaggcagtggttaaaggttcccttccacatccttttgccttgacgttatttgag

SEQ ID NO: 176391 - DNA, 75 bp, Homo sapiens
gccgaatcgctcctgcagcagaggagtggagtcaacatatcaatggagcaagtcacagtcgtcgatgccagcttc

SEQ ID NO: 176392 - DNA, 50 bp, Homo sapiens
gcgggctttgccagcaaaaccgaaacagaagaacatgtgatcatccaggc

SEQ ID NO: 176393 - DNA, 98 bp, Homo sapiens
gggagcgcggcggagacgatgcctgagatcagagtcacgcccttgggcgagaaggttttgggattcgaattcagtgggacaagcaaagtcgtccttcc

SEQ ID NO: 176394 - DNA, 51 bp, Homo sapiens
agaaaacctgtttaaactcattgtcaagtcacagggattatggacccagaa

SEQ ID NO: 176395 - DNA, 98 bp, Homo sapiens
gagcagagccgccgaggatgataaacacccaggacaggagagaacattgaaagtattctctaagctatttgaagagagtgactaaatgcacctgggtc

SEQ ID NO: 176396 - DNA, 75 bp, Homo sapiens
gattggaggaaggacctccacacactaaaaactggagaatatgaacatcgacatttctgccttctcctgcattgc

SEQ ID NO: 176397 - DNA, 97 bp, Homo sapiens
gcgctgccctgtcctgcgcgagtggagctctgaagaagctctgagcggagttgtgttcttccccagagtttccaggatggcttctgcatcaacttct

SEQ ID NO: 176398 - DNA, 100 bp, Homo sapiens
gtctatcccggccctgtcattactccactgggttctgcggggccttttccgaagtggttttagctgaagagaaggcaactggcaagctctttgctgtgaa

SEQ ID NO: 176399 - DNA, 88 bp, Homo sapiens
ctgagatctcctaagcggcactcagtgcaaataacaatagcaactcccccagcaggtttgatcccatataatttcatctgtgtgcaga

SEQ ID NO: 176400 - DNA, 119 bp, Homo sapiens
agaacagaaaaatgaagatggaacatggccaaggggtccttctactcctaacctttctgagaaaagtctacagcattctttctctgcaggttctcttaactacagtgacttcaacagtt

SEQ ID NO: 176401 - DNA, 82 bp, Homo sapiens
cgctgccgcacctccgtagctgactcggtgccgcggccaggtgggacctctgcattgatcaggctgtggtcttcatcgaaga

SEQ ID NO: 176402 - DNA, 100 bp, Homo sapiens
ttcatcttactcttcttgctctcctttctgtaaacacagggtgtggaacgtccgctacaaccactctcatgaccagctggtcctcacgggcagcagtgac

SEQ ID NO: 176403 - DNA, 100 bp, Homo sapiens
aagattcaccaaataagctatatactttggttacctatgtacctgttaccactttcaaaaggaacctcagaacctgttctggatccacagcaaatccaag

SEQ ID NO: 176404 - DNA, 100 bp, Homo sapiens
gtgggcttggccatggtcagcgtgaacgcgcccctcggggctccagtggagagttcttacgatccaggagatggtccactcggaagtggctgcctatgac

SEQ ID NO: 176405 - DNA, 75 bp, Homo sapiens
ttagaactgcagaggttcctctacagcaagcttcttggacacttaatgattgttggcaagaaatgtgctgctgat

SEQ ID NO: 176406 - DNA, 82 bp, Homo sapiens
acgcttctcatcctggacatctgttcaaggagcagggacaagttacaggaatgttctccaagcagcaatccaaaagagtctc

SEQ ID NO: 176407 - DNA, 80 bp, Homo sapiens
tgatcgagaggatctggtgtaccaggcgaagctggccgagcaggctgagcgatacgacgatgtctttggtggacttggga

SEQ ID NO: 176408 - DNA, 75 bp, Homo sapiens
acaggtgaatttaaaggagcagccctggtgtcacctatcagtaaaagatattgttattcctggactcaacagctc

SEQ ID NO: 176409 - DNA, 101 bp, Homo sapiens
ccgggcctgcaccatgagcgtcccggccttcatcgacatcagtgaagaagatcaggctcttgtcaggatggtgaagctgttcatcggaaacctgccccggg

SEQ ID NO: 176410 - DNA, 50 bp, Homo sapiens
cagcttatctacaatcatatcacatgccccatcctgtccctccaggacgt

SEQ ID NO: 176411 - DNA, 75 bp, Homo sapiens
agaatgccccatcactgccctccagaacatgctacaaaactgctccaggagcagtgaggagaatgaataccttcc

SEQ ID NO: 176412 - DNA, 90 bp, Homo sapiens
gcttggagttcgcctcagacgcggtggagccgccggagtctgagaaggtgcagaccatgaattacgtggggcagttagccggccaggtgt

SEQ ID NO: 176413 - DNA, 100 bp, Homo sapiens
ggcgggacgccaggacgcggcgagcaaggtcctgcaaccctggttccagtctggcaagcattgtagacctggctgctgaagactgacggggcccagggtc

SEQ ID NO: 176414 - DNA, 96 bp, Homo sapiens
ctacctcgctgcttcccagagctttcacgaaggcaccgacgtcatcatgctgaccaccaatcagatccgtaaggatcctggtgcacctgagccgtg

SEQ ID NO: 176415 - DNA, 100 bp, Homo sapiens
ctaaagtctgagagagggaagtcgcctctgtgctcgcaaacgaagcggatgctgtgacactggatgcaggtttggtgtatgatgcttacctggctcccaa

SEQ ID NO: 176416 - DNA, 83 bp, Homo sapiens
cataggactagaagcaggagtaggacaaggagtaggagtcgagttaaacatgaagtttctggagagacagtggtatttcaagg

SEQ ID NO: 176417 - DNA, 100 bp, Homo sapiens
tcctgggatggaagtaaaagacaatgctggcaactgggctctaatctcctaaagatagacagctcaaatgaattgtactgccaaatctgtcgaaagggag

SEQ ID NO: 176418 - DNA, 100 bp, Homo sapiens
agataccttcatcgctgacctggttgtggggctgtgcactgggcaggcaactctcacggcccaagagtgcggagccaccccgttcaccactactcaagag

SEQ ID NO: 176419 - DNA, 90 bp, Homo sapiens
ggatttctccgcctcagcccaacggggagctggagcagatccgcagggacatccgagacttccggtctagcgcggggctggacaaagtca

SEQ ID NO: 176420 - DNA, 100 bp, Homo sapiens
gcccaagccacactaccttggggtagacgtggcacagggcctggagcccaggccaaacgtaccaagaaagtcgggatcgtcggtaaatacgggacccgct

SEQ ID NO: 176421 - DNA, 100 bp, Homo sapiens
ttctctccctctgcccccccttccccacgcaaccccagatccatttacactttacaggtggcccagttgaaatccttcccttcctctaccttggaagtgc

SEQ ID NO: 176422 - DNA, 96 bp, Homo sapiens
tagtgcccgaacgctctctggggaacgagcaatgggaattcacgctggatcacacgcgctgcaacgtgtggattctggatggagacttgtaccaca

SEQ ID NO: 176423 - DNA, 75 bp, Homo sapiens
tttgcctcagtgttgaagccattgaaagggcgcaaaccagaagaagagggtgtggaagataacgggctggaggaa

SEQ ID NO: 176424 - DNA, 82 bp, Homo sapiens
cgggatctgcaccgcgaccagggccgcaggaagacgcagatctcccagccatccagccccggctagtggcggtcagcaaaac

SEQ ID NO: 176425 - DNA, 100 bp, Homo sapiens
gcggaaggccctcaacatcccggagcagctgccacaatgggacatgtgcaagtgcagttagagcggatccggcaagctgactccttggagagaatccggg

SEQ ID NO: 176426 - DNA, 75 bp, Homo sapiens
gatgaaagcaaacagaaatttgtgctcaaaacccccaaggtattacatgaaacctttcctaaacatacatttctg

SEQ ID NO: 176427 - DNA, 51 bp, Homo sapiens
cggcggcggcctcggctgaagaaagaaggtcgctgtcaagatggagtttcc

SEQ ID NO: 176428 - DNA, 83 bp, Homo sapiens
cgcggatctcaccgccgctcaggcatcacaggacatggccccctcagccacctagctggggcccatctaggagtggcatcttt

SEQ ID NO: 176429 - DNA, 82 bp, Homo sapiens
agaaggggaacggatctgtgtgcccacagctcctggagccccacagctcattgctatggacagtgctatcaccctgtggcag

SEQ ID NO: 176430 - DNA, 95 bp, Homo sapiens
gtcggggccgaggcgcgaggaggcactcaaggagttgcccctggtcctgtaattggacttcaggcaccatctactggtcttcttggcgcccggcc

SEQ ID NO: 176431 - DNA, 100 bp, Homo sapiens
cagaaagcaggcgaacccgcggcgcaataacgacatccacgacagcgatggcagttccagcagcagccaccagagcctcaagagcacagccaaatgggcg

SEQ ID NO: 176432 - DNA, 76 bp, Homo sapiens
ccccttccgggagcctagatcctgtgctttactctgaagactcgctaaagaattacctccaaagccattgtcaaga

SEQ ID NO: 176433 - DNA, 83 bp, Homo sapiens
cccacactgaccccgggggagcggcagcagttcctccaggccaaggatttggagtcccaccaggtggagcaggcttttctggg

SEQ ID NO: 176434 - DNA, 74 bp, Homo sapiens
agatatggtttgaatatgaaggcacaccactgaaatgcaattctgtggtgttcttggtcacacatttatggagt

SEQ ID NO: 176435 - DNA, 98 bp, Homo sapiens
ttgcaaatgcagaggaagaatttttctatgagattctggatgaaattgaagaacataacatcaaaatctatcacttacctgatgcagaatcagatgaa

SEQ ID NO: 176436 - DNA, 75 bp, Homo sapiens
agccgccgacccgccgagcaaaatggattttgtgtcatgtatagagaactacagaagaagaggacaagagctata

SEQ ID NO: 176437 - DNA, 100 bp, Homo sapiens
ctcaggttgtggtagaggcggaggctcaggcagcttgagactctgatgccagtatggactggagatgatgggagccagttggatagccccatggaaatcc

SEQ ID NO: 176438 - DNA, 88 bp, Homo sapiens
aatttgagtggcctaagaatatgatgccgtctagttttgccatgaagggtccaccaaaatatactaaatctgttctgaaaaagggaga

SEQ ID NO: 176439 - DNA, 75 bp, Homo sapiens
aatgcatacttggaatgaatccttctagagacgtccacgaacaccttccaccatgaccacctcagcaagttccca

SEQ ID NO: 176440 - DNA, 90 bp, Homo sapiens
tttaaaaaaactagaaatgtgttcagaaattaaaggtccacagaaggaggtaacacaagtggcaagacagccgggaacccctaccccatc

SEQ ID NO: 176441 - DNA, 89 bp, Homo sapiens
tgcggacgctcggtcccgcgctgcgcatccccgcggacgccacagcgctgattatatctgtccaagatgcgagtctggttttatcgagg

SEQ ID NO: 176442 - DNA, 100 bp, Homo sapiens
cgcagcaaagcgcccagcctgccgcctcgctgtccctgcggcttctgggggttatttggaaatagcggtgcttgcagcgcttgcggacagtcgattcctg

SEQ ID NO: 176443 - DNA, 74 bp, Homo sapiens
aagaaacttcctcagtaaagcacctcagtgtgaacagggctgtgtgggatggaggagggtgcatctcccaaggg

SEQ ID NO: 176444 - DNA, 75 bp, Homo sapiens
gaggtgaaagactatgtggccaagggaactctaatgatccaggacaaagaagttaccctggagtatgtatcaagc

SEQ ID NO: 176445 - DNA, 101 bp, Homo sapiens
ctgcagcgaagcacctctttacggggaaaaaaatagtggctttgatgtcctctaccataatatgaaacatggacagatatcaacaaaagaactagcagatt

SEQ ID NO: 176446 - DNA, 75 bp, Homo sapiens
acctttccaaaggacgcgaccataactctaaaagaaagaagatgctgatatgctacaacacggatgaacctggag

SEQ ID NO: 176447 - DNA, 100 bp, Homo sapiens
attcaacaagaaatcacagtgctgagtcagtgtgacagtccatatgtaaccaaatattatggatcctatctgaagggaggttatattcaaaagaaaaagg

SEQ ID NO: 176448 - DNA, 82 bp, Homo sapiens
cgcagagcattggcaggaggggcaaggtggaacaggaagtactagccggacatcatgagtggctgtcgggtattcatcggga

SEQ ID NO: 176449 - DNA, 100 bp, Homo sapiens
gtctggggggaccccaactccactgcacagtacacaccccgctcccaaaagacttcaggcattgggcgcctgatggtgcatgtcattgaagctacagaat

SEQ ID NO: 176450 - DNA, 100 bp, Homo sapiens
aggccccgcggctagccccttcccacaggctctctccgctcgattttgtcaccgttatgtgggaagcgaatccagtttaccttccagaggctggcaatgc

SEQ ID NO: 176451 - DNA, 74 bp, Homo sapiens
cccagatgtctgacagccctgtgtgacaccaagataagtaactctggatgtggatagtgaagctaagaaactat

SEQ ID NO: 176452 - DNA, 100 bp, Homo sapiens
ctcccgccaccgcaaggaggtggactacagcgactcactgacggagaagcagtggctcaagatgacgtccggttgtttgccttcgtgcgcttcaccaccg

SEQ ID NO: 176453 - DNA, 90 bp, Homo sapiens
aagtattagaaatgagctgaagaccattcacagaggtggccatccttacctgacaggcttggcagtggccggtggagcatactacctagg

SEQ ID NO: 176454 - DNA, 100 bp, Homo sapiens
cggcgacctcaagaagcagctccacgaaaggcagccgcggatcgccgcgctcagcgacaaacaacttgctcacttccgacagagaaaaacaaaaggtgac

SEQ ID NO: 176455 - DNA, 98 bp, Homo sapiens
agttttagagcctatctattggaattcctcgaactccaagtactaggttttgacaagcttgcatcatgcgtgagtataagctagtcgttcttggctca

SEQ ID NO: 176456 - DNA, 75 bp, Homo sapiens
caaggtggcctaccaggaggccaggggtgtcgccatggacagagcgggatgccaccagcttgtccaaagggaagt

SEQ ID NO: 176457 - DNA, 74 bp, Homo sapiens
ctagagatgtgggcatggcagacaaatctgtagcccaagaagatgaaaggattgttcttgttgacaacaaatgt

SEQ ID NO: 176458 - DNA, 83 bp, Homo sapiens
gacagtcctcgtcagcactgactttcagctatggaatcgaacatcgatatattgaactcttcttgaattctactcctggaggc

SEQ ID NO: 176459 - DNA, 74 bp, Homo sapiens
gactatgaagcaggggatattccaacagaatgggaaggtgcgggagatgttaaagatgagggactccaatgggg

SEQ ID NO: 176460 - DNA, 112 bp, Homo sapiens
cggcgcgggcactgctttccactcggctcctgtcgtccgttctctcaggctcccgttcagggggatatgagactttctactcggaatatcctgagtgttgcgtggatgtaaa

SEQ ID NO: 176461 - DNA, 90 bp, Homo sapiens
cagacgaagacagtccctggatcaccgacagcacagacagaatccctgctaccaccaaggctaagtcgaaatgtggcccaaccttcttcc

SEQ ID NO: 176462 - DNA, 50 bp, Homo sapiens
ttggactgtgaagcaaggcattggcatgcaatgatgctacctgttctgac

SEQ ID NO: 176463 - DNA, 100 bp, Homo sapiens
ggaaacatcaaagctggattagaacatctgcggacaaggcaaaatctcagcaagttcggacctctagtacaataaggcgaacctcctctttggatacaat

SEQ ID NO: 176464 - DNA, 100 bp, Homo sapiens
taagctggctgtcctgaaatattataagtcactctctgaaagagaacaaagtaattttctgaagggaagctgcagaatatggaaaacatatattggagct

SEQ ID NO: 176465 - DNA, 90 bp, Homo sapiens
ctgttctaatgaggtcctatctattactgctatgttgtcagacttaattcagtgcacaaatgagatgaatgtgaacatcccacagttggc

SEQ ID NO: 176466 - DNA, 75 bp, Homo sapiens
cccacttctggaaggttccatcccctgcaggccagataaacacttactgccagaacatcaaggagttcactgccc

SEQ ID NO: 176467 - DNA, 100 bp, Homo sapiens
gctctgctccacactgccaaccggccagaggacgagtgtgggagcggcaccgggggggcgtggccccgggcttccaggtggtgcacctcaacgctgtgac

SEQ ID NO: 176468 - DNA, 75 bp, Homo sapiens
ccagtttgcacagccggagatcttaataggaaccatcccaggtggccagacgggagttccagaccagtgttgtct

SEQ ID NO: 176469 - DNA, 83 bp, Homo sapiens
gcggggctgagctggtggatgctcttcagttcgtgtgtggagacaggggcttttatttcagaataactcaagtcacctgtact

SEQ ID NO: 176470 - DNA, 100 bp, Homo sapiens
ctctaccataatatgaaacatggacagatatcaacaaaagaactagcagattttgtaagggaacgatttggacacctcccacactgagtccccaaccccc

SEQ ID NO: 176471 - DNA, 90 bp, Homo sapiens
tcttcagcggtgatccagaggagatccggatgctcatccataaaactgaagatgtgaatactctggctggcagtgatggtgaaagcatag

SEQ ID NO: 176472 - DNA, 75 bp, Homo sapiens
cggggagacgctgtggtgtgactggggcaggaccatcaggggaaagtgcagtgttgcccttctgaatgagacaga

SEQ ID NO: 176473 - DNA, 100 bp, Homo sapiens
aacaaggcctaccagaaaccagcacaatccagcattcagatggatgataaaatcctcaagacaaccacacggggtactagcaaaggccagacgtcttact

SEQ ID NO: 176474 - DNA, 100 bp, Homo sapiens
ctaacctactggttcctcttcagaaagaaaaaagaagaagtccccgagttcaccaaaattcagacattattgtacctgagcctggttctggggaacgtca

SEQ ID NO: 176475 - DNA, 100 bp, Homo sapiens
gctgcatgctcttgtcgtaggacctggcttgggtagagatgatgcgcttctcagaaatgtccaggcctccggtgtggctgtctctgatggtgtcatcaag

SEQ ID NO: 176476 - DNA, 95 bp, Homo sapiens
tatgtttaccttcaacttcttgttctggctgggaagttatcaattccaaaccagatgaaagacccaggctcagccactgtattgcagaatcatgg

SEQ ID NO: 176477 - DNA, 100 bp, Homo sapiens
tgcagctaccagcaacgtccatatggtgaagaagattagcatcacagagcgaagctgcgatggagcagcagtgcacagccagagaacaacacatcacaca

SEQ ID NO: 176478 - DNA, 89 bp, Homo sapiens
aatgtctcatgttcgagtctggggctgtcgctgtgctctatgatgccagaagtccggggagccttgtttggtgcaaatgccaacaggaa

SEQ ID NO: 176479 - DNA, 88 bp, Homo sapiens
tgggctggcgcctcgggagagcgaatcgagggcggcggtattggtaaaggttttcaaggtgtcatgaaaagatggggatttaaaggcc

SEQ ID NO: 176480 - DNA, 50 bp, Homo sapiens
ggcggcccagctctctctgacacaggtggtggtatcatggatacagaaat

SEQ ID NO: 176481 - DNA, 78 bp, Homo sapiens
gagcctgttcagaaagtccttagcaacaggaatttcgctaaggagtttgtgatcagtgatcggaaggagctggaggaa

SEQ ID NO: 176482 - DNA, 75 bp, Homo sapiens
gcgatgtccccatccgccgccgagaggaggcctatgagaatcagagacgagttgtactgctgtcacaggaaatgg

SEQ ID NO: 176483 - DNA, 82 bp, Homo sapiens
ccgggaccctcgcgcgcgaccgccgaatcgctcctgcagcagaggccaagactaaggggctgcagagcggggtggacattgg

SEQ ID NO: 176484 - DNA, 100 bp, Homo sapiens
ctctgggaggcttaccgagagtttgaaagtgcgattgtggaagctgctcgggggtggcctatgtatgcacagctactgattgatttattcaaatatttag

SEQ ID NO: 176485 - DNA, 98 bp, Homo sapiens
ctggccacttgcttgggatcctttatcctggtcatcttctatttccaaacatcagaggctccttgaaatgctagatacagagaaggaactgttaaaag

SEQ ID NO: 176486 - DNA, 87 bp, Homo sapiens
tcccacttgattacccgttaagtcccccaaagatgagatttacctgtgagatgtttcatcccaacaatatgtgtcacaaagatgtct

SEQ ID NO: 176487 - DNA, 98 bp, Homo sapiens
gttgttggaggaacactttccagggcccagcgtgtgaggcggccgataccagggtcagatcagaccacaacgatgagtgggggggaaggagagcccgg

SEQ ID NO: 176488 - DNA, 100 bp, Homo sapiens
ctcgttgctgacagtcagaaagcgactgataacgttcaatgaagcggacgaaagtgtgaactataagactggtcctaagccagttagatttttgggccct

SEQ ID NO: 176489 - DNA, 83 bp, Homo sapiens
gcccgggtcctcctagaaattccccccgaagaagactcccccacatctggaggactactgagcccagccaggctgtatgccat

SEQ ID NO: 176490 - DNA, 100 bp, Homo sapiens
gcatgttgcagatttacatgcaagtagtgggtttactgaagaatttgaggaagtggcagtgaagctagaatctcagaaggccaggcatccccagttgctg

SEQ ID NO: 176491 - DNA, 149 bp, Homo sapiens
ggaagagattctagaccgggagaacaagcgaatggctgacagcctggcctccaaagtcaccaggctcaaatcggtatttcaggacagccaggagggggcgcacatccgccgcgaaactgtgagcaagagcgtctgtgctgaaccatggc

SEQ ID NO: 176492 - DNA, 80 bp, Homo sapiens
tggtgtattctctaccatctctactgctgttcagagcacagtcagtttaggggctggtgcaaaggatgagttgcacattg

SEQ ID NO: 176493 - DNA, 100 bp, Homo sapiens
gagctgagcgctcggaagaaccaagtacaaaactttttaccaacaaaaaaaagcaagtagttatactcaggaagaacttcaagacacttacgggtttctt

SEQ ID NO: 176494 - DNA, 96 bp, Homo sapiens
accatccttcaagtgaacaattggaggcaggtggaagtcatcataaagtttctgtttcacccgtcgtccatgttcgaggactctgtgaatctgtgg

SEQ ID NO: 176495 - DNA, 107 bp, Homo sapiens
cctgccacacagtgtgcctgcaacctgtccggggatcccagggagacaatgcagatcttcgtgaagactctgactggtaagaccatcaccctcgaggttgagcccag

SEQ ID NO: 176496 - DNA, 75 bp, Homo sapiens
aaggattccaagtaactcttatttgcactgccagtgaaagatgtagaagataaacctgaacaacaaaccagaaca

SEQ ID NO: 176497 - DNA, 74 bp, Homo sapiens
ggaaatatttatgtttttgacttacatggaaacagggatggggaaagacaccatagtcataaaagaagaaagca

SEQ ID NO: 176498 - DNA, 75 bp, Homo sapiens
cagctgcccttagccctctgggaactcattatacaatgacaaatggaggcagcattaacagttctacacatttac

SEQ ID NO: 176499 - DNA, 91 bp, Homo sapiens
ctgcagcgggagctggacggcgagcgcgagcggcgcgagaaattttccaagagataacttcaccaagatgtccagtgataggcaaaggtcc

SEQ ID NO: 176500 - DNA, 87 bp, Homo sapiens
attaagattctgcttaatgctggggcagaaattaattcaaggcattgatcatctcctggcccagcatgttgctcatctctttattag

SEQ ID NO: 176501 - DNA, 80 bp, Homo sapiens
ccttggggacggagcagcgcgtcgtggggcgagcggcaggtaactaggatttctacctcaaccgcgagacctatgcaagg

SEQ ID NO: 176502 - DNA, 51 bp, Homo sapiens
aacaagggccgcgatgtggaaatctttgtagaatttgatggctgtaactgg

SEQ ID NO: 176503 - DNA, 75 bp, Homo sapiens
cacccataccttttgggcttcagaatgcagtgttttcgaacatccatgatagcagtcttctgtaaatcgaacttt

SEQ ID NO: 176504 - DNA, 100 bp, Homo sapiens
gaagacagcattggtactaatggccaactcaagcaatggcaccagcatgatatcattgatcattcctcccaaagaccagatttcacgagtggcaaaaatg

SEQ ID NO: 176505 - DNA, 115 bp, Homo sapiens
tcgatcgctgcccgccgccagcatgttgggcgccccggacgagagctccgtgcgggtggctgtcagggacatgagagatggctttagaagaaaaagtttctactcttcccattat

SEQ ID NO: 176506 - DNA, 90 bp, Homo sapiens
tgagagggttgccttttcgtgcaactgaaaatgacattgctaatatctctccagcgaacactgaatgagttaaaagagtatcaaaagcag

SEQ ID NO: 176507 - DNA, 76 bp, Homo sapiens
tttggcattgacatttaattttagggtcctttatatagaagggagagtagggaaagcgctctagcgagtgctgatt

SEQ ID NO: 176508 - DNA, 100 bp, Homo sapiens
caagaatatttagaaaaagaaatggaggaagcaaagaaaatgatatcaggactacaggtcactgcagccagaggggtccagaagagagaggaggcactgc

SEQ ID NO: 176509 - DNA, 90 bp, Homo sapiens
gtcttcgcccaggtggccggcgcttcaggttatttgctttccaaagtcgaagaaaaagttggctccccagaacgtccactctcagatctg

SEQ ID NO: 176510 - DNA, 100 bp, Homo sapiens
cttatacccctacctgtgtcattggccttaacaaggacttaaaggtaccgaaagcacagtaatcactggtgtcgatattgtcatgaaccatcacctgcag

SEQ ID NO: 176511 - DNA, 90 bp, Homo sapiens
ggcaaatggaagcctcctatgattgacaatcccagttaccaggtgattgtagagaaggctccaaaagccagggtgcctgatctggacaag

SEQ ID NO: 176512 - DNA, 113 bp, Homo sapiens
agaaggcggtggtggcgggtggaggttcgagcgctgttctcgctccggagccgctgcacatttcgtttaatagaaaatggtcagcttgaaattgtgacaggtggctgggttat

SEQ ID NO: 176513 - DNA, 74 bp, Homo sapiens
attcaaggccaaggaagctgcggtcccggctgaccagtacaggagcttggctgagagtgccctcttggagcccc

SEQ ID NO: 176514 - DNA, 100 bp, Homo sapiens
ataggaatctgacttcctccagtctgaatgacatttctgataaaccggagaaggaccagggtttaaacttgaaaagactagagacagtacaaggagggag

SEQ ID NO: 176515 - DNA, 90 bp, Homo sapiens
gctcagcatggtgtttggaaacaggggaggagctgctgaagatgagtgaggaggacgagcagggctggtgccaaggccagttgcagagtg

SEQ ID NO: 176516 - DNA, 100 bp, Homo sapiens
aacggaagccccgggcctcatcccaggggtgcagcagttggaggaagaaaatacagagcttagaacaacagtgactcggctcaagtctcaaacagagaaa

SEQ ID NO: 176517 - DNA, 100 bp, Homo sapiens
gagaggcgttaggagtccgggggttcgcccgcggaggccggggagcagccgaccatggagccccagaccctggcttgaaaaacagtccaattgatgaaag

SEQ ID NO: 176518 - DNA, 128 bp, Homo sapiens
agatcctgatctggtccattcagcagaggactgcagaagtctgaggagccttaagatatcaacttaaaggttggacttgttgaaataatcctgatacattcctacaatggccactgctcagctttctc

SEQ ID NO: 176519 - DNA, 100 bp, Homo sapiens
atagtttggcatcatgggatggtattttagacttgccagaacagaacactattcacaaagattgcctgcagtttattgctctttacaatattggagacat

SEQ ID NO: 176520 - DNA, 82 bp, Homo sapiens
ggcagacatcagctcctggttcaacgaggccattgacttcatagataatcttgtgccgtggaaatcagaagggcaaaacgaa

SEQ ID NO: 176521 - DNA, 88 bp, Homo sapiens
agccccagcaccagtcacctccagagcagagtaattctcagagcttctctacatcacatgaaggcttggaagaagataaagaccatcc

SEQ ID NO: 176522 - DNA, 101 bp, Homo sapiens
gatgacttcaagaatgtttttgaccagaaaaccgacaaccttcccagaaagtccaagctcgtgaataatccagaatggctactctgatctatgttgataag

SEQ ID NO: 176523 - DNA, 75 bp, Homo sapiens
gcaagagctaccagaagctggtctctgaggtctggcataagaaacgctgtgatccggaactatgggaacctcctg

SEQ ID NO: 176524 - DNA, 100 bp, Homo sapiens
cgcatgagttcctgcggtacaccatcgacgccatgcagaaagcctgcctgaatggctgtgccaaacaatgcagatcttcgtgaagactctgactggtaag

SEQ ID NO: 176525 - DNA, 75 bp, Homo sapiens
cagtgacacctcccagagaagttggacatctctacaccgttcccatccgggaacagggcaacatctacaagccca

SEQ ID NO: 176526 - DNA, 87 bp, Homo sapiens
tttggactatctgacaagtaaaattaaaagtcgtcttggagacaaggaagcagttctcaacaggtggggtggaagacaacccgtgag

SEQ ID NO: 176527 - DNA, 75 bp, Homo sapiens
gggaaacaggcagtgacggccgctagggaaggactgggggccaccagcccctcgggttccaagatgcagctactg

SEQ ID NO: 176528 - DNA, 100 bp, Homo sapiens
ggggacgagcaccatgtcgaatctgagcaaaggcacgggcagccggaaggacaccaagatgcggatccgggcctttccggtttaatagactacaacttcc

SEQ ID NO: 176529 - DNA, 90 bp, Homo sapiens
gtttgaccacaacaagggccggattctcacccagagagagagtggtgctacaatcccctcattcatgaatataatccccacaaaagaaac

SEQ ID NO: 176530 - DNA, 100 bp, Homo sapiens
attcagaaaagttgtcttaatatgttgattcagtccttattgtgctatattgactcccaaactgatggtggaatcccttcttactgttttgctttaatgg

SEQ ID NO: 176531 - DNA, 83 bp, Homo sapiens
cattcagaatgctaaggcttacctgctgaagactagcagcaattcgggctttaatctgtcgggaaagaggttaaagaagacac

SEQ ID NO: 176532 - DNA, 50 bp, Homo sapiens
agcagccaaggtgaagcagaaaggttttgagcaaaattttggactgtgaa

SEQ ID NO: 176533 - DNA, 100 bp, Homo sapiens
cattggccacctacagaaacaaaatgtcaacaaattgatgggtgttacacataatattgcattacttcgagaggtgataatcaactcacgctttgtaaaa

SEQ ID NO: 176534 - DNA, 82 bp, Homo sapiens
aaaacaaaccctgaaaaaacagaagacgctctgcaaaagtttaaggaagaaatctctaaacgttttaaatcacatactgacc

SEQ ID NO: 176535 - DNA, 96 bp, Homo sapiens
gcacaggcaggaggcatggccaagaaatgagccgtcagactgctacagcattacctaccggtacctcgaagtgtccaccatcccagagggtgcctg

SEQ ID NO: 176536 - DNA, 74 bp, Homo sapiens
acccccaaggagtctcgctgcttttgtggtccccagcctgggtaaagatggccccatggcccccgaagggccta

SEQ ID NO: 176537 - DNA, 97 bp, Homo sapiens
aggagcttttggatacggttttagtaaatctggtacctgctcataaggaaggcccttttgtctacttgtctttagtaggaaacgttgcaaattccga

SEQ ID NO: 176538 - DNA, 100 bp, Homo sapiens
tggcaactatgtttggatgttggatctacactttctcaagcactgtgatcttcaaatgtgattttcttccacccccacctccacctctagatgattccag

SEQ ID NO: 176539 - DNA, 83 bp, Homo sapiens
accacgtggttcgatggctgccgcggctacgctgaggctctccgctcagggcactgtgttggcactcactgaaaataacttcg

SEQ ID NO: 176540 - DNA, 100 bp, Homo sapiens
tctggcattgttcaatccagatgtttggttttgtgtacagcttgggaatgaaaaggttgattgtaaacccacagtatctagcagcgttgtgccaaattgc

SEQ ID NO: 176541 - DNA, 100 bp, Homo sapiens
agtctatcaacctgctcactgctgttggcaccaccacccgagactccttaaccgagatcaacctgtctggagtctactcttcatcttgtgttgagacttc

SEQ ID NO: 176542 - DNA, 75 bp, Homo sapiens
tgacatttaattttagggtcctttatatagaagggagagtagttgccagagtctgccctccgagacctcatcgta

SEQ ID NO: 176543 - DNA, 82 bp, Homo sapiens
tcgccccctacccgcttctcgtagtcctgggagcacagcagaagtccgattacacctcaacaagaaggcaactgacaaacag

SEQ ID NO: 176544 - DNA, 98 bp, Homo sapiens
tccgccgtctcttcgagttcttcgtgctgctcaagtctgcgggccaggcatcgacatccgcaacgactatcagcagctgaagcgcctggagaactgca

SEQ ID NO: 176545 - DNA, 76 bp, Homo sapiens
tggggctgctcccatcattgatgtggtgcgatcgcaaaagcggcgccaggaaattgaacaaaaacttgaagttcag

SEQ ID NO: 176546 - DNA, 74 bp, Homo sapiens
tcgtggacgtcactggccctggtggggattgacagccacgggaaggcgaagttcttctgtgttgtgcaggcgga

SEQ ID NO: 176547 - DNA, 97 bp, Homo sapiens
tatatctggcctaccatccttctgctgctgaaccaatgccaacagagtggagactgctgcacggactctggaaccatgaacatatttgatcgaaaga

SEQ ID NO: 176548 - DNA, 75 bp, Homo sapiens
ggttctgaactaagtgaagagacctcatggcctgcttttgaaagtgtttcctgaggttataggcgggtgtttgag

SEQ ID NO: 176549 - DNA, 85 bp, Homo sapiens
aaggtgcgcaagtcattctttctcttccagttgcgcctcttctccttggtggtcttcttaagcaacagactcttccacaagacag

SEQ ID NO: 176550 - DNA, 90 bp, Homo sapiens
ctggcgagcctgcaggatggcgcggccgagtccccgtacggccacccggcggacaatgcagatcttcgtgaagactctgactggtaagac

SEQ ID NO: 176551 - DNA, 100 bp, Homo sapiens
acggagtttgatgaggatttcgaggaggaacccacatcccccataggtcactgtgtggccatctaccactttgaagaagcgaggaaaagccacagccccg

SEQ ID NO: 176552 - DNA, 100 bp, Homo sapiens
cgagacgaggttcctgtgcaactcttcacaggtaagaccattgcaattggaaaagttctgaaactggttccagagaaagactaagcattttcttgatgac

SEQ ID NO: 176553 - DNA, 101 bp, Homo sapiens
cgcgctcgcccgggctgcgctgggcgctgccgctgctgctgctgctgctgcgcctgggccaggtatgggaggacatggctatggtggagctggtgatgcaa

SEQ ID NO: 176554 - DNA, 82 bp, Homo sapiens
atcgtcccctggactctctcaatttgtcccgctggctggaagcctggcagtgacacgattaagcccaacgtggatgacagca

SEQ ID NO: 176555 - DNA, 55 bp, Homo sapiens
gaatgcgccaagaggagctcatgaggcagaatgttgacaaacaaactctgagatg

SEQ ID NO: 176556 - DNA, 73 bp, Homo sapiens
gcggccgagggccgggcggccaagaggtgcgagaagacaaaagctcagtatgagcagacgctggcagagctgc

SEQ ID NO: 176557 - DNA, 82 bp, Homo sapiens
agaagcgggcggcgcgggggagatggttctgggccggagaaggggcgacgttcgggcaccccccgaatggacaatctttcct

SEQ ID NO: 176558 - DNA, 100 bp, Homo sapiens
tgttgctgcaacatagagctgacattaactgtcagcacttttcaggattagaagaggctgtgtatagaaacatacaagcttgcaaggagcttgcccaaac

SEQ ID NO: 176559 - DNA, 100 bp, Homo sapiens
ctccttctggtgtggggcccgagcaacagccaactcagtttataaatccagaaacacctggctatgttggatttgcaaacctccccaatcaagttcaccg

SEQ ID NO: 176560 - DNA, 83 bp, Homo sapiens
ccccgcgcggccctggaggccaggctgtgggagaccgagtttggtgccctggttgtcagatgttggaaagcagtaggacggaa

SEQ ID NO: 176561 - DNA, 100 bp, Homo sapiens
tcagaaggagctggcggacatcactttagaccctccacctaattgcagattttaggtgatgggcaagtcagaaagtcagatggatataactgatatcaac

SEQ ID NO: 176562 - DNA, 100 bp, Homo sapiens
gggttaaacttcggctgaagcacaggatgaagaattaattcacttagatggaaagtgttgtcctgaatgcatttcaaggaatggttattgtgtttatgaa

SEQ ID NO: 176563 - DNA, 95 bp, Homo sapiens
tggctgttgacccagaaaaggcggcccagatgaaatcccaggatattgtgattcagcaggacgatgagatccgcttaaagattgtggggacccgt

SEQ ID NO: 176564 - DNA, 100 bp, Homo sapiens
caggacctgtctgacgatagtccaaaaactgaagaagatggtggataagcccacccagcctttggccaccactcaacctgcaaagacttcaacatcgaaa

SEQ ID NO: 176565 - DNA, 73 bp, Homo sapiens
gacggagccccaccaagtctatgtgcaaatcttgcaggcgcagttgtgtagcagttgagtaatgctggttagc

SEQ ID NO: 176566 - DNA, 83 bp, Homo sapiens
ctcacaatgaggctccctgctcagctcctggggctgctaatgctctgggtctctggcatcaagcatgatggaaccatgtgtga

SEQ ID NO: 176567 - DNA, 100 bp, Homo sapiens
tttctccccacccttgccctacttggactcttgattggaatgttctccctgcagcagtcagcccaaaggaaggatttggtgctatggagaaatttttggt

SEQ ID NO: 176568 - DNA, 75 bp, Homo sapiens
gctggctgcagggacccggtgacagcgtgagaggttcgcagagtaagaatgattgatgttggctgatattggagt

SEQ ID NO: 176569 - DNA, 90 bp, Homo sapiens
cgccgctccgcggagagtccgtggatctcacatgtctttacatccaaaatgcaaagcagacaaatgggcatatcagggaagaacatgaca

SEQ ID NO: 176570 - DNA, 90 bp, Homo sapiens
cttcagagggaaaaaggagaaagttaactgaattggtgacacttcgggtctctcacagaggaagtacgtaggaagcctggacgtgccaag

SEQ ID NO: 176571 - DNA, 98 bp, Homo sapiens
agtgcagcggcggccgccgaggagccgtgctggtatagaggactctaagaagtggggcatgctgtttctggtgaaccagctgtttaaaatctacttca

SEQ ID NO: 176572 - DNA, 115 bp, Homo sapiens
gatgagcgacttcaaagtggagttcctgagaaatgagctggagattcccgtactatactggcaattgctggagaagattttgcaattgttgcttctgatactcgattgagtgaag

SEQ ID NO: 176573 - DNA, 82 bp, Homo sapiens
cggcggaaaaccgaagttggaagtgtctcttagcagcgcgcggagaagaacggggagccagagctcccccatccaggaatcc

SEQ ID NO: 176574 - DNA, 80 bp, Homo sapiens
ggcttctcccctacgcgctacacaagtggagctccttttcctccacctaccttcccgagattttttatcaagcagaaatg

SEQ ID NO: 176575 - DNA, 100 bp, Homo sapiens
gcatcatgtccgggcagctggagcgttgcgagcgcgaatggcacgagctggagggagaatttcaagaactgcagaatagcctaacatggcagaccagaga

SEQ ID NO: 176576 - DNA, 83 bp, Homo sapiens
cacagccaatgagcgccgcctgaaggaggactggaatgaaattgaccccattaaaaagaaagaccttcatcacagcaatggag

SEQ ID NO: 176577 - DNA, 74 bp, Homo sapiens
tggaatagaagagaatgacctagcaaaagttgatgatcttccccctgggagaaaaaagggcatcatccccattc

SEQ ID NO: 176578 - DNA, 98 bp, Homo sapiens
tgagaaagcaaaggctgctctgaagcgcacgacctccgactactttctccttcaaggaattgattatggattaagtttaccacttggagaagactatg

SEQ ID NO: 176579 - DNA, 75 bp, Homo sapiens
ctgtcgacggctatgacagttctgacagtactactggtatgacgagcgggggaagaaggtcaagtgcacggcccc

SEQ ID NO: 176580 - DNA, 83 bp, Homo sapiens
ggccgggagaggcgcgcgccatggcttctggagccgacaagaggtggaaacatacagaagaagcaaggaaattacagttagag

SEQ ID NO: 176581 - DNA, 98 bp, Homo sapiens
gagaagaagctgaaggatgtgctgctgcaggtggatgacgagcggaggaacgccgagcagtacaaggaccaggccttccactcccgagatgaagctca

SEQ ID NO: 176582 - DNA, 100 bp, Homo sapiens
agaactactgggacgtcagagcttctccgtgaaagacccaagatatcatggaaatcaggacagtggcagttggaattgtggcaatcaaaggggtggaaag

SEQ ID NO: 176583 - DNA, 74 bp, Homo sapiens
accgaaactcaaagttaatggagccaaatttaataaagagactaaggtgtcagtatgttcttcaagctgctctg

SEQ ID NO: 176584 - DNA, 100 bp, Homo sapiens
aagctcctggaggtcagaggccctttcatcatcagaaacattgctgaggctcttgtcagcaaaggtctagccacagtgatcagataccggcaggatgatg

SEQ ID NO: 176585 - DNA, 100 bp, Homo sapiens
gaagcaagtgcagatagatggccttacattcacggcatggtgtaactcccacctccggaaggcggggacacagatcgagaacatcgaagaggacttccgg

SEQ ID NO: 176586 - DNA, 120 bp, Homo sapiens
gcgccttgtcactggagtgcaagaagaaattcccacctgtcaaagaggccactgtgagcatgcatttcaggttgttggcgcagctctgctccatgatgtcgatctgaaacccagattttc

SEQ ID NO: 176587 - DNA, 90 bp, Homo sapiens
gtcccatttcgcccctcgcgtccggagtccccgtggccaggctcgtggtcccaagaagcatctgaagcgggtggcagctccaaagcattg

SEQ ID NO: 176588 - DNA, 101 bp, Homo sapiens
tttcaaagagggtctctgctgtcccagttcagccatcatcatgttgtagtgttcctgctcactttcttcaggagagaagtggatgggccctatacctccag

SEQ ID NO: 176589 - DNA, 75 bp, Homo sapiens
acaattgtccatgctgtgcagcgaatagtggttagcaggaagaagatgagccttaagtctgaacgccgaggaatt

SEQ ID NO: 176590 - DNA, 83 bp, Homo sapiens
caagaacagagggattctttgactcagaaactacaggtgaatcccagaccttgctggcagcagcagttgagagagaacgtgca

SEQ ID NO: 176591 - DNA, 91 bp, Homo sapiens
ctaaaagtgaaattagcagttggaattcctggaaatgacaataaactctttcaccatgcctggatcacttcctttgaatgcagaagcttgc

SEQ ID NO: 176592 - DNA, 100 bp, Homo sapiens
ctcagacttgagggaggaaaagtaattaatggaggtgataacctttatgatggtattgaggacatgattggctatcggcccgggccctggatgaagtaca

SEQ ID NO: 176593 - DNA, 100 bp, Homo sapiens
gggcgccgtgggtgccagagaggcggaagaggaggcctgatggggggctgcatcttcttcccagtttcaaggcttaccttcccgcagtgcaatctttcag

SEQ ID NO: 176594 - DNA, 76 bp, Homo sapiens
acgcagtctgcttcagtgcagtgaaggagaacttgcgcctgtcaggggctggatccagaaacctgtggtgcctcct

SEQ ID NO: 176595 - DNA, 90 bp, Homo sapiens
ccagttcagaggacaccctgctgaaggaaggatttgatgccctggatccctttattcccatcctggtttccaactataacccaaaggaat

SEQ ID NO: 176596 - DNA, 111 bp, Homo sapiens
aaaaggagcttcatctttcaagataacccgtggaattgaagcagttggtggcaaattaaggttgctccttgagggcaggacagttcttatggctttatccgttgcgtaagc

SEQ ID NO: 176597 - DNA, 82 bp, Homo sapiens
gagatcctgatgaagttcgagcactaatatttaagaaagaagatgttaactttcaggtgccttccagttgagcttagtggag

SEQ ID NO: 176598 - DNA, 100 bp, Homo sapiens
atgacaggcatgttgtataaatgtacagttccacaggcgcatgggccacgtttccagtgcttggtggccatgtggggctgacgtgcgaaaccttagagcc

SEQ ID NO: 176599 - DNA, 96 bp, Homo sapiens
acccaggatgaagaggttggagatgggaccacatcagtaattattcttggtatgttctcctacgtcatgctggccagcagccctctcttctgctcc

SEQ ID NO: 176600 - DNA, 82 bp, Homo sapiens
acccaggaagctttggatcagacttttgtgttgcagttcgggcgctttgacttccgtccaaaacctgatccttattgtcaag

SEQ ID NO: 176601 - DNA, 98 bp, Homo sapiens
ttgacttagaatcttcccttttttactccattcaagagcagcattcataaatttccaggaatcctttgctgaacacctaggctattcaaatggggtca

SEQ ID NO: 176602 - DNA, 100 bp, Homo sapiens
tgttgaattgccttatgtataaaatgtcatactacagatttggagaaatgcagatactggtagacacagtctgggccctctcttaccttactgatgctgg

SEQ ID NO: 176603 - DNA, 83 bp, Homo sapiens
gacatcttgacgaggctgcggtgtctgctgctattctccgagcttcgcaatgccctcaggattctctctcggaccaggagggc

SEQ ID NO: 176604 - DNA, 78 bp, Homo sapiens
cctcgtgcccttcgccttcgtgcgcttcgaggacccccgctgctgcggactctggagcgtgagaaccagcgcctggag

SEQ ID NO: 176605 - DNA, 51 bp, Homo sapiens
agcgtagcccgagtcggtcagcgccggaggggattagtgatggtattccac

SEQ ID NO: 176606 - DNA, 84 bp, Homo sapiens
gaagttatataaagtcttgaagtctcctaagtgtaaactacaagttctaggacatgaagagtatttctggagaagaatcatccc

SEQ ID NO: 176607 - DNA, 126 bp, Homo sapiens
ggccttggtcccagcgccttcccacggagcagcactcttcaccctgcacagccttgttaggtgctggagaatctggtaaaagcaccattgtgaagcagatgaggatcctgcatgttaatgggttta

SEQ ID NO: 176608 - DNA, 74 bp, Homo sapiens
cagtgggcacctgtatgctatgaaggtgctgaagaaggcaacgctgaaaggggagggccccaaagctcatattc

SEQ ID NO: 176609 - DNA, 90 bp, Homo sapiens
tgcagctgaataacccttttaacgagtattccaaatttgatggcaagaattcctagaggacctgtgcaacaacctcttgaggatcgaatc

SEQ ID NO: 176610 - DNA, 75 bp, Homo sapiens
ctgaatgctgtgaaatcactaggaactccagaggtggtcagaatggcttcaacattcctcaagtcaccccatgcc

SEQ ID NO: 176611 - DNA, 98 bp, Homo sapiens
tgcaagcaatggtggcctgggtcacccaggagccgccagatagcggtgaggagcggctgcgctacaagagacgcaggtgcccgcgctgctggaggccg

SEQ ID NO: 176612 - DNA, 139 bp, Homo sapiens
aaacagagttccacaggcgtcgttgccctccgccttcagccctccgcgggttcgatcccggccacccaggtgtaccttgaaagacttttaacatacgcagagatagatatctgtccggccaactggaagcggattgttt

SEQ ID NO: 176613 - DNA, 75 bp, Homo sapiens
ctttcacttccagccagctgtgaagaagcacaagctccgggtggataaggcagctgctgcagcagcggcactaca

SEQ ID NO: 176614 - DNA, 83 bp, Homo sapiens
atctactactcctcctccggcagaacctgtttctctgccacaagaaccaccaaagccatcactggtgcaagctatatttaacg

SEQ ID NO: 176615 - DNA, 83 bp, Homo sapiens
caacgatggtgaaaagggtcctcctgctcacagtgtgaataacaggtgctcttacagcctgttccaagtgtggcttaatccgt

SEQ ID NO: 176616 - DNA, 98 bp, Homo sapiens
atttacagaaagagtcaacagcagtggcaacagccaaggccacctttgatgccatttctaagacctacagctacctgacccccgacctctggaaggag

SEQ ID NO: 176617 - DNA, 100 bp, Homo sapiens
gaccctggaaaacctggccctcttcaatttctgacaaaaggtactccaaagattcaggtttactcacgtcatccagcagagaatggaaagtcaaatttcc

SEQ ID NO: 176618 - DNA, 50 bp, Homo sapiens
ggatgtgaaacttaaatttgaagagatgggggctccggaggtggcgccca

SEQ ID NO: 176619 - DNA, 100 bp, Homo sapiens
cagccgagacggagccggacccgccgcctcccgggcatgtactggcattgaaaacattgacgaagctattacattgcttgaacaaaataattgggactta

SEQ ID NO: 176620 - DNA, 95 bp, Homo sapiens
atacttcatatttggcttcaatgtcatattttggctccatgatgcgttatctgggtctggaaacccaaaccctcaaggatggcctggcgcatggg

SEQ ID NO: 176621 - DNA, 75 bp, Homo sapiens
gtagtccttttgcagggatgctctttggatgctgatatgctaactggtgatgagcaagtatggaaggaagttcaa

SEQ ID NO: 176622 - DNA, 74 bp, Homo sapiens
gggaaggaagatccggcgcggggcacaggatccggagctggagcccccagacaagatctcactctgttgcccag

SEQ ID NO: 176623 - DNA, 100 bp, Homo sapiens
catcaagctggactcgggagtggtgaaacgcctgtacacgttggatgggaaacagcgctttgaacttcaagattcaggaagctctctacttcctaaagag

SEQ ID NO: 176624 - DNA, 82 bp, Homo sapiens
cgagacgcgcgtgtgtgagcgcgccggaccaagcgggcccagaagcgggtgtcgtgaaaactacccctaaaagccaaaatgg

SEQ ID NO: 176625 - DNA, 75 bp, Homo sapiens
cggagatcttcaatatgcccgccatcaccggaacaggggttatggttttgtgaaattcacagatgaactggaaca

SEQ ID NO: 176626 - DNA, 80 bp, Homo sapiens
cacctgcagatgaaacttattgaacaggatctgtgtcgagacaatgcagatcttcgtgaagactctgactggtaagacca

SEQ ID NO: 176627 - DNA, 76 bp, Homo sapiens
ctttgaagtagaagaagctgatggcaagaaggctgcttgatcttgccacggtgaaagcgaatggattggctgcctt

SEQ ID NO: 176628 - DNA, 75 bp, Homo sapiens
cggggttcgggtgtctcgtgtgtgaacatcacagaagaagctcattcacacagaagacccatttaatgatgaaca

SEQ ID NO: 176629 - DNA, 83 bp, Homo sapiens
tgaagctagaaggagatctcagaagaagccagcgagcctgtcaacaactggatgtccagaaaattcaggcttcttcaggagaa

SEQ ID NO: 176630 - DNA, 99 bp, Homo sapiens
cgaagccgtcgcggcggggaccatgttgcttccgaacatcctgctcaccgtctttcccagggaactccgatgaagtgttccaacaaaatgagcgagtga

SEQ ID NO: 176631 - DNA, 76 bp, Homo sapiens
cctctgagaagggagacgacgctgctgggtccgctgagcggggcgacccgaggtatcgtcagatcctggaaaaagc

SEQ ID NO: 176632 - DNA, 82 bp, Homo sapiens
gttgtcgtggccggagcggcccgcgcctgggctgccggcacttcgcggcaggctgaaggtgatgtggccgccctcaaccgac

SEQ ID NO: 176633 - DNA, 100 bp, Homo sapiens
catgctttcaaggacctcatgtatggctgatggcaagcattgtacttttccacatctgcctggcaaaacctttgtctataatgcttctgaagatagactg

SEQ ID NO: 176634 - DNA, 100 bp, Homo sapiens
gctaatttgggaaaaagctccaggattctgacagggatgttgcgaagtaacaaatgtggcaattattttggatctatcacctgtcatcataactggcttc

SEQ ID NO: 176635 - DNA, 78 bp, Homo sapiens
aataattctccattgagaagagagaagaacattctcgaatacctagaatgggatacccattgacaacatgaccaatga

SEQ ID NO: 176636 - DNA, 51 bp, Homo sapiens
caagtgataaccacaaatggacccagacctttccaaagtgaaactgatgag

SEQ ID NO: 176637 - DNA, 102 bp, Homo sapiens
gaccgctttccgggagactggagtcgaaggccgtgaggtatttttctaaggcttctcgtcagtgcctcgcaggatggtaaacttatcatctgggacagctac

SEQ ID NO: 176638 - DNA, 115 bp, Homo sapiens
attggactcatacaggtcggagaggtcagcaacagggacatcgtggagacggtgctcaacctgatcatttgctccagaagaagctggttgccatgtcttgaggacagtaaaccct

SEQ ID NO: 176639 - DNA, 100 bp, Homo sapiens
atgtggaccagcattcgcccatctcaaggttggcgtgggacatcggttggatgcccaggcttctggagtacttggtgccgtgagcgatgtggagatgcag

SEQ ID NO: 176640 - DNA, 75 bp, Homo sapiens
acgatatgataaagacgatgaagccccctctgatggtcctcttcctgatggatgggaacaagccatgactcagga

SEQ ID NO: 176641 - DNA, 51 bp, Homo sapiens
gttcttacaacatggcagacattgacaagtggtcttcaagctgacagagaa

SEQ ID NO: 176642 - DNA, 82 bp, Homo sapiens
tacaagaggggacaagtacctttatgaaccagtgtatcccaattctttatagctccaagctctacagattcttcaaatatat

SEQ ID NO: 176643 - DNA, 75 bp, Homo sapiens
gttggaccttccggagcttctcagaagacagagggttttcttttgaggcatggccgcctttgccaccgcccacct

SEQ ID NO: 176644 - DNA, 100 bp, Homo sapiens
ctggggggcccggggcctcgcgctggggacgttgcgtctgcagctgcggcgcggtcaaagcatgaagaaattgatctggtcagtttagaggagttttata

SEQ ID NO: 176645 - DNA, 124 bp, Homo sapiens
aggacacttaagttgagtgttcagcgcatctttcaaaacaaagagccacttataaggccaactgctaggctgattcaccccaagagtggccgttcctaccacgaggagttcaaccctccaaaag

SEQ ID NO: 176646 - DNA, 49 bp, Homo sapiens
taagccgattttccggaaaaagttggcgagctttagcccctctcctcct

SEQ ID NO: 176647 - DNA, 100 bp, Homo sapiens
ggaatgcttttttatctcatattagtgcctgtgatggcatctttcatctaacacagaaactccagaaaatcttgccaaacttctgaccaggatgtattta

SEQ ID NO: 176648 - DNA, 75 bp, Homo sapiens
attcaccaaaggacccagtcctcccaatgaaattttttacacaacctgaaaagagggaccagatggcatacttag

SEQ ID NO: 176649 - DNA, 90 bp, Homo sapiens
cgacgtggaactcagcagcggaggctggacgcttgcatggcgcttgagtatggtttgaagtggtgaacatggatttttctcggcttcaca

SEQ ID NO: 176650 - DNA, 82 bp, Homo sapiens
cggcccgcctccctggccggggcgcagttcggaggttcaggtcgcaatggaagaagagatcgccgcgctggtcattgacaat

SEQ ID NO: 176651 - DNA, 100 bp, Homo sapiens
cgaaaagggcctgatgtctgctttgataacaatgtcttgagagaaaaggaacagttccgtaagctctttattggtggcttaagctttgaaaccacagaag

SEQ ID NO: 176652 - DNA, 97 bp, Homo sapiens
ccatcacggcggccgcagtggcgtcctggagccctcctcagaaaagagtctgccgcctgcagcaacagggcctggagctgatgggcagcctgcgcca

SEQ ID NO: 176653 - DNA, 139 bp, Homo sapiens
cgccgccccagcctggcgggagaaggaggaggagcagcaggcctccgggcccggcgccgccgcccgcaggatagagcctcctcaaatccaaatgctaccagctccagctcccaggatccagagagtttgcaagacagag

SEQ ID NO: 176654 - DNA, 116 bp, Homo sapiens
ggcggcgctgccccctctgcgggaagcgggcggccccggccgcctccgcgagggcaccatggaggtgaatgcagaattcagaaggagctggcggacatcactttagaccctccacc

SEQ ID NO: 176655 - DNA, 90 bp, Homo sapiens
gacttggtctgttccactttggggatgaagcccaatgggagcagccaaggcaaggtgcacaacccattccttcccaccccaatgttgcca

SEQ ID NO: 176656 - DNA, 100 bp, Homo sapiens
agccaattgtaaaagactgcaaagaggtcagatggcaaaaatcaagcaaacccttctagacagccggggagtgttcctcgacatgtttctccagtgacac

SEQ ID NO: 176657 - DNA, 100 bp, Homo sapiens
tgtatactctcgttctgcgacttataaaggaccagacaaatcaaattagtggttttgacccgttcttcggccaacgctatatccacatcctgggccggcg

SEQ ID NO: 176658 - DNA, 99 bp, Homo sapiens
gtagaagccagtctctgcaggcggccagcggttagagatgtttatgattacttccgagctgtcctgcagcgtgatgaaagaagtgaacgagcttttaag

SEQ ID NO: 176659 - DNA, 95 bp, Homo sapiens
cgcgagctgcatggcgcctggctggcgctgcccttccacgacccctaccggcactgaaccttagccggccgatcgaggagcagggccccctggac

SEQ ID NO: 176660 - DNA, 83 bp, Homo sapiens
acccgggacgacgagtacgactacctattcaaagatctgccttctggagactgcgccgtcctcccgggagagccagaaagagg

SEQ ID NO: 176661 - DNA, 83 bp, Homo sapiens
ccacctgctgcacccacgaatctgcccacccctcctgtaacccagcctgtttcacttcttgctgcacagaagagatcacagaa

SEQ ID NO: 176662 - DNA, 74 bp, Homo sapiens
cctagcaccccgagaaccgtcagtttgagccagatgatcggcttcagctccccaggaatatgattgaaaacagc

SEQ ID NO: 176663 - DNA, 100 bp, Homo sapiens
cggatgagtacgataccgaagcgggctgtgtgccccttctccacccagagggaaaggagcctctgcttcacattttgatgggagcatctgaggacctcat

SEQ ID NO: 176664 - DNA, 98 bp, Homo sapiens
tcccattcacctgaggcacccgaagaagagaccatccatatttccagaacagctttgctgagccatcaaggtctaatggaagcatggttcggcattct

SEQ ID NO: 176665 - DNA, 75 bp, Homo sapiens
ggacccagagcaggacagcggcccggaggacctgcctctcgtcaggaagggatgagaccatgcagcctgcgaaac

SEQ ID NO: 176666 - DNA, 75 bp, Homo sapiens
atcgttgctgccttcttcgtcaagctgcacataaatcaactcctcctctgtaatggaacagctagtgcagctacc

SEQ ID NO: 176667 - DNA, 98 bp, Homo sapiens
ccacatttgttcagtctcctgcagatgcctgcacacctcctgtggccctcagattctcagcttgattctaaggaactttcagctggttctcaatttgt

SEQ ID NO: 176668 - DNA, 82 bp, Homo sapiens
gctgacctcggtttcctggacccattccgactcagatgaggaaactgaggcttggtgaagttacgaaacttgtccaaaatca

SEQ ID NO: 176669 - DNA, 95 bp, Homo sapiens
ccgggccgcgccgccgctgccgccgccgcgcgcgggtgtaattgaaaagtgatcctctcttcagagatgtcaaaaacaaacaaatccaagtctgg

SEQ ID NO: 176670 - DNA, 100 bp, Homo sapiens
tccgttacaagaaggagccttccgggtgcccggtgtgtggcaagcacctacaggacttgggctgcttcaggctgaacgctgggagaccacttcctgtgct

SEQ ID NO: 176671 - DNA, 100 bp, Homo sapiens
gaaggtgaagcaggcggccaaggagaagaatgccagctgatgaagaccgagaggccgcgacccaacacctttgtcatacgctgcctgcagtggaccacag

SEQ ID NO: 176672 - DNA, 88 bp, Homo sapiens
ttattctcttagaatacaactacgtgaaggttgctgaaaagccaggagtcaaaatgactgagcgctttgactgccaccattgcaacga

SEQ ID NO: 176673 - DNA, 101 bp, Homo sapiens
atttggagttcttacaacatggcagacattgacaacattgcagtgtcgagatggctatgaaccctgtgtaaatgaaggaatgtgtgttacctaccacaatg

SEQ ID NO: 176674 - DNA, 100 bp, Homo sapiens
cgccggttgccaggccaaggagtggactagggtcgccggggaagcgggcaatgaatcgctccctggctaatgtgattcttggaggctatggcaccacttc

SEQ ID NO: 176675 - DNA, 75 bp, Homo sapiens
aatgttgcaaactgttgcaaagaaattcgacttcagtaatttgagtagtaggtgtaccttcagttgaatttttag

SEQ ID NO: 176676 - DNA, 74 bp, Homo sapiens
gtttctcatctttatactcttccaggaggctactcacagtcgaactacaactccccggggtccggccagaacta

SEQ ID NO: 176677 - DNA, 124 bp, Homo sapiens
agagttcttctgtatgtttgtgctcacactgcgatcatctacaacgtgttcaggaacaatcaataccaccttcagaaattaaagcttaccatcggcaggatcccaaattcagagacattccatg

SEQ ID NO: 176678 - DNA, 100 bp, Homo sapiens
gctatgttcaatataagaaatattggaaagacgctcgtcaccaggacccaaggaaccagccacgtggtgcttgcgcagtgccgagtgctgatggccagtg

SEQ ID NO: 176679 - DNA, 100 bp, Homo sapiens
gagagattcctctgccatggagtcctacgatgtgatcgccaaccagcctgtcgtgatcgacaacagtaaagctaaaacattttgagaaatttcaggatac

SEQ ID NO: 176680 - DNA, 50 bp, Homo sapiens
caaaaacgtcaacaacagttttacggaaaatggctttgtaaagaagtttg

SEQ ID NO: 176681 - DNA, 97 bp, Homo sapiens
agaaaaataaagaagaggctgcagaatatgctaaacttttggccaagagaatgaaggtgtcagctgtgatgcatgtttaaaaggaaattttcgaggt

SEQ ID NO: 176682 - DNA, 74 bp, Homo sapiens
gtgggcgcatatcctgggtagcctctaggaagcgctagacacatgagtgattggggcagatgtgagagggcacg

SEQ ID NO: 176683 - DNA, 75 bp, Homo sapiens
aagctgcccatgctgcaaaaactgttaaacatggccaaatgcccagcacaccagggtttgtgggatacaatccat

SEQ ID NO: 176684 - DNA, 100 bp, Homo sapiens
tctgtcatcagaagaaattcaacagagagctcaccagattactgatgagatattttatgacctggtcagacagataaataggaaaacaccagtggaaaag

SEQ ID NO: 176685 - DNA, 139 bp, Homo sapiens
ccaggaactgcgcagcctcttcgagcgccgcggacgcgtcatcgagtgtgacgtggtgaaagtacctggagtagaacagaaaaattattatgtctgtgttcccttgggactcattggaaattgtacagtgacatcttct

SEQ ID NO: 176686 - DNA, 82 bp, Homo sapiens
tcgccgtggcgccatgggtgttgtccgcagccgcagagctgaggcttcgaagacctcagaggacttctctcagcactcacag

SEQ ID NO: 176687 - DNA, 100 bp, Homo sapiens
ccaccatgacaacacctacacagtcaagtacacgcctgtccagcaggaggtggagctgtataaaagcagccaccgggacaagctgggcctgatggtttgc

SEQ ID NO: 176688 - DNA, 82 bp, Homo sapiens
cgcaagagctccctcaagaagggagggaggctggtggagaagcgatgactacctgtccctggagggttcccgctggccacca

SEQ ID NO: 176689 - DNA, 88 bp, Homo sapiens
tcagggagctccctcgcctggctctcggcggcctgatggagtaagaggggttggctgtgaatcctcctgacaaggtgatccgggcggg

SEQ ID NO: 176690 - DNA, 100 bp, Homo sapiens
ggcgggaccttggcggcgcccggagccggcgtggcgctcatcgagggacgcccggcccaagtgagatggcatagaatttgcttttaaagagcctaatccg

SEQ ID NO: 176691 - DNA, 75 bp, Homo sapiens
cggcgccgcttctgtggccacggcaggtgatgtgtccaatctagatcccaacttctcatttgaaggcaccaaact

SEQ ID NO: 176692 - DNA, 100 bp, Homo sapiens
ggagaccagatcaaaggaccggacaaagaggaggctatgactttgcagccgtcctggagtggttcgcggagcgtgtggaccgcatcatcctgctcttcga

SEQ ID NO: 176693 - DNA, 87 bp, Homo sapiens
acgtcaaagtatgatatctacgcaaaatcaatatagtacactatccaaaccagcagcactaacaggcacgtgtggttctcaaatata

SEQ ID NO: 176694 - DNA, 101 bp, Homo sapiens
agcagatccgatggagaggctgagctgctccaggacttgggggtgctgataagactgtgaaaggcccagatggactgaccgcctttgaagccactgacaac

SEQ ID NO: 176695 - DNA, 89 bp, Homo sapiens
acaggagccaaaaagtgtctagtcaacttaattgagaaggcacagttggcgggcagctcccaggtctccatgagtacggcgccgtcggg

SEQ ID NO: 176696 - DNA, 100 bp, Homo sapiens
gctgctcatcaccaaggccaagaacgggcacctggctgtggtatcttggagatggccgcttccatctggagtctgtcatgattgccaaccccaatgtccc

SEQ ID NO: 176697 - DNA, 75 bp, Homo sapiens
tggggccatgccaaggactatgtggagggaccatggctaaacctcctggatcattagccagaagcagcagcctgt

SEQ ID NO: 176698 - DNA, 74 bp, Homo sapiens
tgcacagttgtggagaagcctcagtgaaaggtgaactatggaaaagtttgtaataacagtaaaaaaggattgaa

SEQ ID NO: 176699 - DNA, 78 bp, Homo sapiens
cgacgacttcatccagggctgcatcgtcctgcaggtcttcgccttgatcgtgttctcctgcatctatggtgagggcta

SEQ ID NO: 176700 - DNA, 82 bp, Homo sapiens
agcatacctggatggaggatgctgacagtatcatggaagggaagtggttgctgtgtatgttactggtgcttggaactgctat

SEQ ID NO: 176701 - DNA, 90 bp, Homo sapiens
tgatgatgaaccatgcaaaaaatgtggccttccaaaccatcctgagctaggcaagtgtccagagaatggctgggatgaaagtacacttga

SEQ ID NO: 176702 - DNA, 73 bp, Homo sapiens
cagttcgctacacagcaatgcatcgagagagcagtcatgatggcctgcactccacacaatgcaacagagtgaa

SEQ ID NO: 176703 - DNA, 75 bp, Homo sapiens
cccggccccagccctagcgctggccgcgaccccggcgttatcaggaactgttgccgttattacatcagatgggag

SEQ ID NO: 176704 - DNA, 82 bp, Homo sapiens
aattgagcaagcagcaagtcggctttcagatcaggcagaagtcaattcatctggaaagactatctctgagtcagacttaaac

SEQ ID NO: 176705 - DNA, 100 bp, Homo sapiens
cccagatgtcccaggtgcaggagctcttccatgaggcagcccagcagaaagctacatccatattggaattttaccgggaacttggattgccgccgaaaca

SEQ ID NO: 176706 - DNA, 100 bp, Homo sapiens
ctttcccgaccgggccactggaagttggagcctccgccgagtcgcagacaacgcctccgggagggctgaccggttccctgatgtgttacctgcttctgct

SEQ ID NO: 176707 - DNA, 83 bp, Homo sapiens
gctccagctcgcagcccgctgctgggtgatgtgtccaatctagatcccaacttctcatttgaaggcaccaaactggatgtggg

SEQ ID NO: 176708 - DNA, 96 bp, Homo sapiens
caggccttcgccgagctgtgcagaacacctgaaggataaattggaagaatacatggcccgattttccaaagtgaggattgttcgcaccaagaaaag

SEQ ID NO: 176709 - DNA, 100 bp, Homo sapiens
gtgggattttgggactcgcctttgccctggcaaacactggaatcctactttttctgtattcaaagcaatgagtatcccacagatcagaaatccttcgctg

SEQ ID NO: 176710 - DNA, 82 bp, Homo sapiens
gccaccggaggagcagctcacctgagagacggagccccggctcgcccgtgtgcagagcaatgtctcaggctgtgcagacaaa

SEQ ID NO: 176711 - DNA, 82 bp, Homo sapiens
gggcccggacggcacaccctacgttaccgtgctcaagtgtactaatggtcacttgatgtgcgctggctgttttatccaccta

SEQ ID NO: 176712 - DNA, 82 bp, Homo sapiens
cgcctagcaaagactattaccagttactggtcacccggtctcagataatcttgtgccgtggaaatcagaagggcaaaacgaa

SEQ ID NO: 176713 - DNA, 100 bp, Homo sapiens
tggattctatccctcctggtcagtacatggattcttcacttgttaagctttccagttctcagggaacaatagaaaccagtcttcaggatatcgacagcag

SEQ ID NO: 176714 - DNA, 100 bp, Homo sapiens
gtggatcaaagagaagtggggcagcaaagcccacccgtcgccaggcatgggtagaggaggtcagtcagccttgcgttttgcccgtttaagaatggaaaag

SEQ ID NO: 176715 - DNA, 88 bp, Homo sapiens
caagagaaggaagctctttatgccttaacgatgatgagagttcactggttgaccctgatgacatcatgaaacacataggggatgacgg

SEQ ID NO: 176716 - DNA, 82 bp, Homo sapiens
cgccagcggccgagcgggcggcttcctggcctgggcgctccggtggcggcggagtgagtgatggattggaactgagaccgaa

SEQ ID NO: 176717 - DNA, 75 bp, Homo sapiens
ggggcaggggcggaggcggaggcagaggtggaggcgctttgaaagtcaaacatcatcgcctggctgcggaaagcg

SEQ ID NO: 176718 - DNA, 75 bp, Homo sapiens
ctcttcttggtgctgtggctgatgcatttcatggctatcatctacacgcaagacatctgtatagattctgcttca

SEQ ID NO: 176719 - DNA, 90 bp, Homo sapiens
gtggtgatctggactgtcccgactgggtcctggcagaaatcagcacgctggccaagatgtgccctggttcccaagaaccattcaagagct

SEQ ID NO: 176720 - DNA, 100 bp, Homo sapiens
ctttgcagagccatacaaagttaggaagaagaggtggataagatgatggaacagaagatgaaggaagaacaggagagaaggaagaaaaaggagatggaag

SEQ ID NO: 176721 - DNA, 100 bp, Homo sapiens
gcaggactcgtccggggactacagcctggcgcacgtccgcgagatggcttgctccattgtcgaccagaaggatatttctttaatgggaaaaatgtacctc

SEQ ID NO: 176722 - DNA, 82 bp, Homo sapiens
ctcctgctgctcatcccggtggccgccgcgcaggagcctcccggagctggaggctactcacagtcgaactacaactccccgg

SEQ ID NO: 176723 - DNA, 51 bp, Homo sapiens
tttgaattggattatcccaaagagcggctcttatgcgagagcgagacatgc

SEQ ID NO: 176724 - DNA, 75 bp, Homo sapiens
aacctccagatccatcacgtggggcaggacggtcaggtcctggtgcttgatggtcgaggccatctcctgggccgc

SEQ ID NO: 176725 - DNA, 50 bp, Homo sapiens
gccccaaggtggactccaccgtgacatcacggctgcagccctggctacgg

SEQ ID NO: 176726 - DNA, 88 bp, Homo sapiens
cgccgagatgacgggctttctgctgccgcccgcaagcagagcggacaaggcaaaatctcagcaagttcggacctctagtacaataagg

SEQ ID NO: 176727 - DNA, 82 bp, Homo sapiens
ccgggaggaaggaacgaggcaaggagctaaagcagcgtgcgttcagccctgggatcatgagcgtcttgttgttcatcgagca

SEQ ID NO: 176728 - DNA, 83 bp, Homo sapiens
cccggcgcccggcgagggcgcgcggctggtgtccgccccgcccgaaaggacctcagcagccatgtcgaagccccatagtgaag

SEQ ID NO: 176729 - DNA, 100 bp, Homo sapiens
ggaaaaaagaattttaagaaacgatggttctgcttaacaagcagagagctcacctaccacaaacagccagtgcaagtggtgacccaggatgaaagagagc

SEQ ID NO: 176730 - DNA, 75 bp, Homo sapiens
gcccatgagccggttgcgccacccgaggacaagctgtgattgggttattatacccctgcattgacagacatctag

SEQ ID NO: 176731 - DNA, 75 bp, Homo sapiens
ccagtggctccacaggcaaacccaagggtcttactgaagtaacacaaagcttaaaaatggaaaatgaagagttta

SEQ ID NO: 176732 - DNA, 100 bp, Homo sapiens
cctagcagctcgggcaaggatggtggaggcgagaacactgaggaggttggacgtgataagtatgagcctgcagctgtttcagaacaaggtgataaaaagg

SEQ ID NO: 176733 - DNA, 80 bp, Homo sapiens
gaacgtgagggtgtaacttacaaaaagttcagagaagccgaactgggattaccatgcagaaatacaagcttttggacatc

SEQ ID NO: 176734 - DNA, 100 bp, Homo sapiens
ggaaggaggagattctgaagataaggaggttggtcaaagaaaaagtgatgtatgaaaaagaggcaaaacaacaagaagaaaagattgaaaaaatgagagc

SEQ ID NO: 176735 - DNA, 96 bp, Homo sapiens
gagaaaccagtccccgaaccaaaatcacgattgatatgctgctgaaagaatatttactctctggagacatatctgaagctgaacattgccttaagg

SEQ ID NO: 176736 - DNA, 100 bp, Homo sapiens
ctttgtccaggggctgactgtgggcagagaagttgcaaaccgagtttccaagttacatgagcatgcagcataccttgtggatagcatgtgggactgtgct

SEQ ID NO: 176737 - DNA, 100 bp, Homo sapiens
gaccccgcggctgggcgttcatctaccacgctttcgtgcaattccgttccttgtgctcagatgacacaccaatggtacgacgtgctgctgcttccaaatt

SEQ ID NO: 176738 - DNA, 100 bp, Homo sapiens
cttgcccgaggacagagatggcgagcgcccggattggggatgagtatgcggaggacagctctgatgaggagattttcatcttcattggagagaccctcct

SEQ ID NO: 176739 - DNA, 75 bp, Homo sapiens
ggcggcctgggaggaagcgcaagcaccccccggcctttcctaagaagcttgtggccttctcaacttggattgacc

SEQ ID NO: 176740 - DNA, 90 bp, Homo sapiens
agccgcatgagcgagcggcagctggctctctggaatccggagccagcaccgctctttgaccttgccatgcttgccttagatagtccagag

SEQ ID NO: 176741 - DNA, 75 bp, Homo sapiens
agttcctctattggagcagagaaaccaagggtgtcaaattgagaaccaggtagatccccaccacctacagtaaaa

SEQ ID NO: 176742 - DNA, 75 bp, Homo sapiens
tgctgccagatggacaaggagaccaaagagaacaacctctctgaagaaggaagggatgagaccatgcagcctgcg

SEQ ID NO: 176743 - DNA, 51 bp, Homo sapiens
acaaaataagctggaaaaatctgagggaggtggggaagacagggctccagc

SEQ ID NO: 176744 - DNA, 85 bp, Homo sapiens
aaaataagatggaacccatccacataagccactctgcccaagaactggctggctccaggattggtgccttctcttatggctctgg

SEQ ID NO: 176745 - DNA, 75 bp, Homo sapiens
ttggtttcgggatctcggtgctgcagacggcgagacctcctgcacaggttccccctaaaggactcaaaacgtcta

SEQ ID NO: 176746 - DNA, 74 bp, Homo sapiens
gtcatgaaagagattccttgcagagacagctcaacacggcacttccacagtttggtgaggattcatcaacctcc

SEQ ID NO: 176747 - DNA, 100 bp, Homo sapiens
gccttctccaaggaccacgagcaactctacatcatgtcagagaggcagagcacaatcattgtggagaagacagttcaagacctcctgaacctgatgcatg

SEQ ID NO: 176748 - DNA, 100 bp, Homo sapiens
gttcaacatcagataatctctgagtgttcagcaaatggttatgagccttagagtttctgaactccaagtactgttgggctacgccgggagaaacaagcac

SEQ ID NO: 176749 - DNA, 83 bp, Homo sapiens
ggaaagaaaaaaagtcttggatgatctaaccaagtaaaggcatgacttcctggcaccacagggaaaatcgggtgcaagcccag

SEQ ID NO: 176750 - DNA, 75 bp, Homo sapiens
tagtgacaatgaccagcctcctgactactccttctccaagagattctgcctgatcaatgcaggagtcctgtacct

SEQ ID NO: 176751 - DNA, 50 bp, Homo sapiens
agcgtggttgctgaccagttgaaaggccggatcacctcaacagtcacgtc

SEQ ID NO: 176752 - DNA, 82 bp, Homo sapiens
acagtgtttgcctctggttcagctcatacaacagcttcttagggctgggtataagtaagcaagaagagggcctgggagaaga

SEQ ID NO: 176753 - DNA, 98 bp, Homo sapiens
tgtcgcaagagaaaacttgactgtatacagaatcttgaatcagaaattgagaagctgagtacagaacaggtggccgcattttgccgcagtttgcatga

SEQ ID NO: 176754 - DNA, 100 bp, Homo sapiens
ccgcgcacgccatgggagccgtgactgacgattttaccaaatgttgcaagaactctggagttcttatggtagtaaaatgccggaaagaaaattctgcatt

SEQ ID NO: 176755 - DNA, 100 bp, Homo sapiens
agaagaccccaaaggaattcctgaattttggttaactgtttttaagaatgttgacttgctcagtgatatggttcaggtggccggcattcacaagaaggtg

SEQ ID NO: 176756 - DNA, 82 bp, Homo sapiens
agtcattcaagcaacatttctaaggttgaaatcacaaagattagacacctttttagataggtgttcttcagcaccactgaca

SEQ ID NO: 176757 - DNA, 96 bp, Homo sapiens
tgtgtacaagatatgtgcctggatgcagctcacctccggtacaccaggggttggaaaaaccacactaggcaaagaacttgcgtcaaaatcaggact

SEQ ID NO: 176758 - DNA, 100 bp, Homo sapiens
tcacctacagcaagccaacatccaggtgggctaccctaatgttggtaagagttcaacaatcaacaccatcatgggcaacaagaaagtatctgtgtctgcc

SEQ ID NO: 176759 - DNA, 51 bp, Homo sapiens
cgcttggttggggagatcggcgcttggccgtgccggtggtggtgtgcacat

SEQ ID NO: 176760 - DNA, 75 bp, Homo sapiens
agccgatgctgtggccgttacaatggggccaaagaaggacctgggttacctgcagcagtggctgaaggcctttgt

SEQ ID NO: 176761 - DNA, 100 bp, Homo sapiens
accggcctggagctgtatgacgagcgaggagaaaaaatccccttgtcggaaaacacacggatgataccatcggggaccttaagaagctgattgcagccca

SEQ ID NO: 176762 - DNA, 101 bp, Homo sapiens
cggcgatggagctgttatttttagatacttttaaacacccgagcgctgaggttaaaaagatcaagtggcatgagcagccttttggggaaaattggtgccaa

SEQ ID NO: 176763 - DNA, 74 bp, Homo sapiens
acgctcaggagtgtggttgttaggagagcacacaggtcttattatggaggactaactttgatgaattgcattgt

SEQ ID NO: 176764 - DNA, 98 bp, Homo sapiens
tttaagcctatactttctaccagaagcttgaagggtttggttaagctagagaccgttggatggcagcttaaccttcagatggctcactctgctcaagc

SEQ ID NO: 176765 - DNA, 101 bp, Homo sapiens
cggcacctacacttgcgaggcgtccaataagcacggccatgcgagggcgctctacgtacttgtggtctacggtacaggtttgcagattccgccagcagcac

SEQ ID NO: 176766 - DNA, 80 bp, Homo sapiens
tcagtcgggctccatccgtgtctgggacctggaagctgccaaaaagctagagccggtgcaggccacgcagaacaagacag

SEQ ID NO: 176767 - DNA, 100 bp, Homo sapiens
gtggcgaagtggagagtgacatgcagttggatggcggtgactgcgtgtgctgcttttgacacaaaaacggggttacgtgtggcagtgaagaagctctcca

SEQ ID NO: 176768 - DNA, 89 bp, Homo sapiens
tcagagagggtgctgagtgatgccaggaccatcctggaagagaacatccaggaccaagggtgtcaaattgagaaccaggtagatcccca

SEQ ID NO: 176769 - DNA, 74 bp, Homo sapiens
cgaattgaagggtctttctaaaatagaacgtgcaaatgcctgcaactcaaatcttgtggaagaagaatgaagtt

SEQ ID NO: 176770 - DNA, 98 bp, Homo sapiens
ccagtcctcatgaactcaaagctgcctcttgatgtcctgggcagggtactgaacgacacctgggtctccttcccttcctggtctgaggactccacgtt

SEQ ID NO: 176771 - DNA, 75 bp, Homo sapiens
ttttggggtagtgtctgggatccagtacgagttgaatcattgttcaaataagtactatactggcaattgctggag

SEQ ID NO: 176772 - DNA, 75 bp, Homo sapiens
tcccactggctctgctgaccttgtgccttgggagcgcatggagcttttggaagaagccaagaagatggagatggc

SEQ ID NO: 176773 - DNA, 83 bp, Homo sapiens
gaaggtctcacctgaggtgaaccttcgaccttggacttctcagcctccagaatgatgtagtatctaccccttggactgcagaa

SEQ ID NO: 176774 - DNA, 83 bp, Homo sapiens
ctgtcccgccctacaggctgcgggtgatcgcagaagcctacgctaccaaaggagccttcacgtaaatgggtccagtcatgcct

SEQ ID NO: 176775 - DNA, 100 bp, Homo sapiens
ctggcggctgctggtagttccatgctgtctgttcagacttcagcttggtgtgccgtgagcgatgtggagatgcaggaacactatgatgagttttttgagg

SEQ ID NO: 176776 - DNA, 80 bp, Homo sapiens
atggattgttttaaagcaacctataaacatcagctctcaacagagaaagatgctggtttcgagttttggagatccttgtt

SEQ ID NO: 176777 - DNA, 75 bp, Homo sapiens
caaaaactaccattcgcctgatgaactctcagatcgaagagctggagctccagtgggcatcttgggccctgagat

SEQ ID NO: 176778 - DNA, 83 bp, Homo sapiens
cgacagcgtcctcgaagccaccagctcccgggacccgctcagcgatgcaccatgactcctgtgaggatgcagcactccctggc

SEQ ID NO: 176779 - DNA, 90 bp, Homo sapiens
tgaaacttaaggatgggatacaggctcaaactgctttttctgcaaaccctgccaatccagcaattttgtcagaagcttctgctcctatcc

SEQ ID NO: 176780 - DNA, 101 bp, Homo sapiens
aaagtcgtagtgtcataaggccaccattcaagaagttcagcaaaggtctctcctggagctgcacaagaggaggaaagccctgactgagcctgaggcccgat

SEQ ID NO: 176781 - DNA, 105 bp, Homo sapiens
gttccctccaggcatggaggaactgcaggcccagctggagaaggagctggagatgggtgttcctgataaagaagggttaccaagacgtcgacacctccctgcaga

SEQ ID NO: 176782 - DNA, 96 bp, Homo sapiens
cctcccaggtagctgggattacagaataagaaagccttgagttttgtgaaaaaccggagaagagaaactaaaaggacagtagaaaaggcttttcca

SEQ ID NO: 176783 - DNA, 88 bp, Homo sapiens
agagagacgtgaaacatgtgaacactcaagtgaagcaaaagccttccatgattacaatctacctgttactcgtattttggacaatctt

SEQ ID NO: 176784 - DNA, 75 bp, Homo sapiens
agaggcagccaagtgtaacctgctggcagaaaaggtatcactaccattaaagttaacattcgtaatgccaattcc

SEQ ID NO: 176785 - DNA, 50 bp, Homo sapiens
gcagaagtgggttacaatagggacagctccagaaatcctgaactatgatc

SEQ ID NO: 176786 - DNA, 100 bp, Homo sapiens
tggagggaccttctgccaccgccccagcctcatctccaggcttggctaagccccagatgcccccagatcccaccagccagcaagctaaagcatggcggcc

SEQ ID NO: 176787 - DNA, 50 bp, Homo sapiens
gccctctccttttcgtttccggaaacatgccgcttacaaacacgcagatg

SEQ ID NO: 176788 - DNA, 101 bp, Homo sapiens
gagcctcttccttggccagaaggaccgccgggagagcctgcccacctccccaccctggacgccgggcgcgtcccggccccccagcagcctagacggctggg

SEQ ID NO: 176789 - DNA, 51 bp, Homo sapiens
ccgcggagctggtttctgccgacaagggcaacttggtagtacccagagcca

SEQ ID NO: 176790 - DNA, 75 bp, Homo sapiens
tgcgtatccgcactgtccagcccaagcctgactatggcgcagttgtgtagcagttgagtaatgctggttagctgt

SEQ ID NO: 176791 - DNA, 87 bp, Homo sapiens
ccgcgcctgggctgccggcacttcgcggcagatcgacgacatcgcggatggcgccgtgaagcccccacccaacaagtaccccatctt

SEQ ID NO: 176792 - DNA, 74 bp, Homo sapiens
gagaatgaagccatccaatggatgcaggaaaactggaaggatcgagatcgagaccgggatcgtgaagatcggtc

SEQ ID NO: 176793 - DNA, 74 bp, Homo sapiens
tcagatgctgccagggtccctgaagagggaagacacgcggaaacagggcttccgttacaagatgaggtctgtgt

SEQ ID NO: 176794 - DNA, 100 bp, Homo sapiens
cagaacgatggagtatatggcagaatccaccgaccgcagccctggacacatgccggatcacctcaacagtcacgtcagacaagtgcactcaacagaacgg

SEQ ID NO: 176795 - DNA, 75 bp, Homo sapiens
ggcaggggaaattggggtgccaccagacggagacagcttggactaccaggtacagaggtgcagttccatggtaca

SEQ ID NO: 176796 - DNA, 79 bp, Homo sapiens
tcagagatccaagtgcgcgccctggcgggtccggaccaagggagaggctgtcgatgctgaggcacgagagaatttgctc

SEQ ID NO: 176797 - DNA, 83 bp, Homo sapiens
caccaatggaaagtgcgtcatcctaaggaacatcgacgtgccagaaccctgtggagcatcatgaactgggaagagtagctgag

SEQ ID NO: 176798 - DNA, 51 bp, Homo sapiens
cactccccctttggttttaccaggcttgtgcatcatgatgactgcttggat

SEQ ID NO: 176799 - DNA, 98 bp, Homo sapiens
acattgtggatggagatggaggattgaataacagattgatcaaactgtcccaagagtcctcgaatgccaccttgctgaccaatgcagagaagattgcc

SEQ ID NO: 176800 - DNA, 100 bp, Homo sapiens
gcttcgattgaagcacatcgaccggcgacagcagccaggagtcatgagcgacagcggcgagcagaactacggcgagcggtctgcgggccaggcatcgaca

SEQ ID NO: 176801 - DNA, 76 bp, Homo sapiens
gcaaaagaaatgcgtggacagcacctgcctagggtagttaaaagacgagtgaatgctctcaaaaacctgcaagtta

SEQ ID NO: 176802 - DNA, 74 bp, Homo sapiens
gggcagctgttcccactggctctgctgaccttgtgccttggttgtggcagcactgcctgaaggtatgagaccag

SEQ ID NO: 176803 - DNA, 101 bp, Homo sapiens
attattgaccagtggatctgcgcacacgccagatgtggacgagtgctcactagcagaaaaaacctgtgtgaggaaaaacgaaaactgctacaatactccag

SEQ ID NO: 176804 - DNA, 100 bp, Homo sapiens
gggcccagcacagccagcaccgcacgccctgcaagggagaaagcactccaaagacctccgccagctgcagccctgcccctgagtccccgatgagttccag

SEQ ID NO: 176805 - DNA, 80 bp, Homo sapiens
cagtgaagtggtgagcctttttgtcactgctatccagtcagttcgctgctattcccatgggtcacaggagacagatgagg

SEQ ID NO: 176806 - DNA, 150 bp, Homo sapiens
gttggagtcactatgaccaattgtggaatcacagatctagtgctaaaagactgtccaaagatgatgttcatccatgtttgaaaacgaaatcatcctgaagctggaccacgaggtagaagggggccgaggcgacgagcagtacatgcagct

SEQ ID NO: 176807 - DNA, 100 bp, Homo sapiens
actcttgcctgtcagaggagctgttgaatgtttatttgaaatgggctttgaagaggttgccatgtcaaatcttagcgaggctgtgcaggatgcagacctg

SEQ ID NO: 176808 - DNA, 83 bp, Homo sapiens
caaagacgctaaacgtgccctactctgccccgggggagagactacatgaggaaataattgacttttataacttcatgtcccct

SEQ ID NO: 176809 - DNA, 90 bp, Homo sapiens
tggaagaggcatgccagaggtagagcaggaccctgatgcttggtgtgacctgagtaaatttgacctccctgaggaaccatctgcagagga

SEQ ID NO: 176810 - DNA, 75 bp, Homo sapiens
gctacacacttatagatcttctgcactgtttacaggcacaggcctatggcatgtctgcgttacctttaaatctga

SEQ ID NO: 176811 - DNA, 100 bp, Homo sapiens
gaagcacttaaatactcatctactaggcaagcatggagttggcaccccaaaagaaagccctgatgatattgggacctgctggtatatccttctttctggt

SEQ ID NO: 176812 - DNA, 83 bp, Homo sapiens
ggagtctccaggagacccggggacagcatcgcccaggcccctgagtgctgatggcagagattggtgaggatttggataaatct

SEQ ID NO: 176813 - DNA, 100 bp, Homo sapiens
ctgaccccagccggcgccgagggcttggaatctcgagcgggaaaagagattattttgcagaggatgatggggagatggtacccagaacgagtcacacagc

SEQ ID NO: 176814 - DNA, 100 bp, Homo sapiens
ccaccgccaacctgccctcctacaacatggaccgggccgcggtccagaccaacatgagagacgatgaaaactttcggaagagaaagttgcctgtggtaag

SEQ ID NO: 176815 - DNA, 96 bp, Homo sapiens
acagttgaaccatgcctttcacacatgtggtgtattttccacattggctttcttcataagccttgaagaaccaatgtactgatgtggggattaaag

SEQ ID NO: 176816 - DNA, 74 bp, Homo sapiens
ctaatccctgctctgtcactaacaagctgcgtgatcttcgagaacggagaccaacctgggctgaagaaagaaga

SEQ ID NO: 176817 - DNA, 78 bp, Homo sapiens
ggggcttcacagtggtgcatgagacagagaaacatgagaagcagcagtggcggggccagcaggtcttcctcaagccgg

SEQ ID NO: 176818 - DNA, 50 bp, Homo sapiens
aaggatcatgaactagtgacctggaaagtttccaaaatttgggtattcga

SEQ ID NO: 176819 - DNA, 90 bp, Homo sapiens
actttgacgccctggtgaagatgggggagctggccagcgagagccagggctccaaagaactcgctctgtatgaaaaagctgatatcaagg

SEQ ID NO: 176820 - DNA, 97 bp, Homo sapiens
tacacaggaatgttgtcttctagatatgccactgatacatgagactaaggtgtcagtatgttcttcaagctgctctgctcctgggcccaagctattc

SEQ ID NO: 176821 - DNA, 100 bp, Homo sapiens
gatcactgtaacatagtccgattgcgttatttcttctactccagtggtgagaaggttcatgattacaaagaaggaaccccagaagagaagacctactaca

SEQ ID NO: 176822 - DNA, 48 bp, Homo sapiens
cagcccaagcgccttccctcacgaatactcccccagttgcaagaggcg

SEQ ID NO: 176823 - DNA, 98 bp, Homo sapiens
tgggagcggcggccacggaggcaccatgaagaagtcttactcagatatagccagtaccaacgtatgctgagcacgctgtctcaatgtgaattttcaat

SEQ ID NO: 176824 - DNA, 98 bp, Homo sapiens
aatctggatgtggaacccgctgacgtggatggctgactgtattcacttgcacctcctgcgccgccgccccccatccaaggatatgccttcaagcctcc

SEQ ID NO: 176825 - DNA, 74 bp, Homo sapiens
ccaaagatttgcatcagccatctcttagtccagcaagtcctcatagccaggcatgttgacatagcggctttatt

SEQ ID NO: 176826 - DNA, 75 bp, Homo sapiens
gggaaaatggcggtgtctacagtgttctcgacttcgtcgctgatcgcaaaagaggatgctgtcctaccagtagct

SEQ ID NO: 176827 - DNA, 75 bp, Homo sapiens
aattgaaaatattggggccatttagtaacttctttgcaagattgcttgtcttactcagctttgcaagtcctatcc

SEQ ID NO: 176828 - DNA, 100 bp, Homo sapiens
agtgtggcaatggacaggatccagcgtattgtaggtgttttgcagaagccacagatgggaggcgtagaggctccggtgttttttgtgccaattgcctgac

SEQ ID NO: 176829 - DNA, 100 bp, Homo sapiens
aggaagcaagcagttcagaagagccaaggaataaacatgcaatgaacccaaaaggagcgccagtggaacatgtggatcccaggatttggctctgaagaaa

SEQ ID NO: 176830 - DNA, 75 bp, Homo sapiens
ttgccaatgtgcaaagctgcagaaaccacagtggtagaggccttgaaccggggcattgctgctgtcaaggaggat

SEQ ID NO: 176831 - DNA, 80 bp, Homo sapiens
agacagcccaaatatcctcggaagagcgctcccaggagaaacaaatgtgaagttcatttccaatccgccctccatggtgg

SEQ ID NO: 176832 - DNA, 100 bp, Homo sapiens
attattagtgctgctcctccagggaccgatccgtatactgcagcaggattggctgcagcagctacattagcagagtgaagttcccagaccctacgccccg

SEQ ID NO: 176833 - DNA, 100 bp, Homo sapiens
tggagcctgtcaacttcccaagtcacttcttattaaggtggtgccaaggcgcagaaggtactatactggcaattgctggagaagattttgcaattgttgc

SEQ ID NO: 176834 - DNA, 101 bp, Homo sapiens
gtcagagggaaagactgtgcagtaattgtcacacagaagaaagtacctgtttggacttctcccactgagcatgacaagcactcgaaaggctaaatcaacca

SEQ ID NO: 176835 - DNA, 89 bp, Homo sapiens
taacgtactactgctgcaagaaggacctgtgtaactttaacgaacagcttgaaaatggctcctcctaggttgaatcagctgaggcagca

SEQ ID NO: 176836 - DNA, 50 bp, Homo sapiens
ccggataagctcagcgtggtgaagaagaaaacgcttttgctgtgcctcag

SEQ ID NO: 176837 - DNA, 98 bp, Homo sapiens
tccccgtacggccacccggcggtatggtttgaagtggtgaacatggatttttctcggcttcacatgtacagtcctccccagtgtgtgccggagaacac

SEQ ID NO: 176838 - DNA, 100 bp, Homo sapiens
ccgcattggcagcgggagccgtccggaggacctgggacaccgcggaagtcgggaaatggtctgtcatctcctataagacagaagaaaagcccatcttttc

SEQ ID NO: 176839 - DNA, 95 bp, Homo sapiens
ggaggagtcagctgtgtgtccagaacgtgccatggagacgcttaacgtgggtaattccagaattgattggccataccattgtcactgtattactg

SEQ ID NO: 176840 - DNA, 75 bp, Homo sapiens
ctggcatggaaggggtcctcagagttactgggcatgtttgtgagtctgaagacagggaagaagtggtggtgtgtg

SEQ ID NO: 176841 - DNA, 75 bp, Homo sapiens
gtctcagcttcaggtgaagaaggcagctctcactcaggcaaaggtatccaagcccaccaatgggatctgtctcag

SEQ ID NO: 176842 - DNA, 74 bp, Homo sapiens
agagactcaggtgcacactgccaactgcacatcttcccagaagctgaaggatgagattgcagatgtgtttgccc

SEQ ID NO: 176843 - DNA, 75 bp, Homo sapiens
tattgcctcaaatgctgctcatggaagatccaaatccggctgggctgggatcagatgggaagcggaagctcatca

SEQ ID NO: 176844 - DNA, 75 bp, Homo sapiens
cgtcgttcccgctgcgctaggggaagcgggcagatctcccttgagtttagaaatctggctgagaaataccaaaca

SEQ ID NO: 176845 - DNA, 98 bp, Homo sapiens
tggccaccatgttccagaacctgttcccctccatcaacgtgcacaaggtattgaaaaccttccctttgaattacagagaaactttcagctcatgaggg

SEQ ID NO: 176846 - DNA, 83 bp, Homo sapiens
ctaatggaatgatattaccagtgaccaaaaggtgtgtgcagtggcctcagggatccggaaagtctaggactgaacttctccta

SEQ ID NO: 176847 - DNA, 50 bp, Homo sapiens
cgccaaccccttcgagcaagacgtgggcctttttgcaaatgtgtaacttg

SEQ ID NO: 176848 - DNA, 138 bp, Homo sapiens
gcttccaactggctattgtggacagcccaagaaaggacatcttatctttgatgcttgctttgaaagtgaactgataaatttcaaacggaagagagtggcagcatttagaaagaatctaattgaaatgtctgaactgga

SEQ ID NO: 176849 - DNA, 100 bp, Homo sapiens
gagagtggattctcttggaaaaaggtagcatcgagtctctgcgaacattccttttaacctatgtcttacaaaggcccaattttgaatcaggaaattgaag

SEQ ID NO: 176850 - DNA, 100 bp, Homo sapiens
ggcgaatgggtgtataacaccttctgtatctgcaccatggctgaggaaacagctccagcagttcttgagcggcaccagggggccctgtactccctctttc

SEQ ID NO: 176851 - DNA, 100 bp, Homo sapiens
ggaccgtctcaaggtgtttgacggcatcccaccgccctacgacaagaaaccagactgtgatgactgggagagcgggctgaatgcaatggagtgtgcatta

SEQ ID NO: 176852 - DNA, 95 bp, Homo sapiens
gtgtaggtgaagggggcttcctgaccgaggaaccaggaaagcgttctcagctgtggaggatgacaggaacaggaatgctggcccatgagggctcc

SEQ ID NO: 176853 - DNA, 82 bp, Homo sapiens
ctgagattgagctttttgtaaaggtgtcttcagtgccctgggtttgcctgtgacccaatgcccactgggactgaatgccaaa

SEQ ID NO: 176854 - DNA, 112 bp, Homo sapiens
tgcacttcgcattttggcattgacatttaattttagggtcctttatatagaagggagagtaggcttggccttcgtgcctctgcagatctggtccaaagtcctggccatctca

SEQ ID NO: 176855 - DNA, 116 bp, Homo sapiens
ccgggagacgcgccggcagccccggcaccgcagcggtcgcaggatggccgaggatgatcagaagtgtgtggagactgtggagctgggcagctatgagaagtgccaggaccttcgtg

SEQ ID NO: 176856 - DNA, 96 bp, Homo sapiens
gacggctgtgtcgcagcctctcgggatgacaccactctgaatgcactgaacacatttaattggttggggtcagataagaagaggagtgacaatcaa

SEQ ID NO: 176857 - DNA, 82 bp, Homo sapiens
cgaattctgctggaggcagcgccatatcctggaggtgaagctccttccgcttccagccgttcgagtcctatgactccaggcc

SEQ ID NO: 176858 - DNA, 100 bp, Homo sapiens
cttccaatttctgttaaactgctgtgagccagggacaattcctgatgcctccatcctagcagctgccttggatctagaacggaaaacagttcttccttca

SEQ ID NO: 176859 - DNA, 100 bp, Homo sapiens
caacgtgttggaccttccggagcttctcagaagacagagggttttcttttgaggaactttatattgctgttggaatatctggagccatccaacatttagc

SEQ ID NO: 176860 - DNA, 51 bp, Homo sapiens
gagatttcttcaagttatgagttggacagccgctcaggaagcaatcttgca

SEQ ID NO: 176861 - DNA, 82 bp, Homo sapiens
tgttgccatcgcgtctccgcctgcagtgtcctcagcctgcgggggctgcgtggaggtggactcggagaccgaggccgtgtat

SEQ ID NO: 176862 - DNA, 82 bp, Homo sapiens
ctccgagcgcaaggacagcgcgaggtccgcgcagcccagcgcagccatgccccttcccagctgcctgcctgccctagccagc

SEQ ID NO: 176863 - DNA, 75 bp, Homo sapiens
gccgaacctgcctggctagccggcgacttgagtgacgagtatggacctgtctgccaatcaggacgaggagaccga

SEQ ID NO: 176864 - DNA, 100 bp, Homo sapiens
agaggttgaggagcttgacaactggcagccagcagtgcccttaatgcacatgctacacctttctggcccaggatgttttggtgcaggagatggaagtggt

SEQ ID NO: 176865 - DNA, 50 bp, Homo sapiens
gggcttcacagaagaggtgacagttgtcgacaacagtagcaactgggcag

SEQ ID NO: 176866 - DNA, 74 bp, Homo sapiens
tgtggagttcggaggaaaagggctcaggatcttttgccagaaatgagggcatactggcctgacgtaattcactc

SEQ ID NO: 176867 - DNA, 96 bp, Homo sapiens
cttcggaatgcactacaacaggaaaatcatattatagatggagtaaaggtttgaattttgggaagattttgaagaagaccatgggaaggggagaga

SEQ ID NO: 176868 - DNA, 75 bp, Homo sapiens
ttcaccagcaccctcccctcctcttctgcttctatctccaccactcagcaacccaccctgctggggcttcctgga

SEQ ID NO: 176869 - DNA, 100 bp, Homo sapiens
gaaatcagaagagagaatatagtaaaaatacgcagtacagtcccagggcactgtgaggtgaatgctattgtacacgttttatagatgaggaaactaaggc

SEQ ID NO: 176870 - DNA, 75 bp, Homo sapiens
aaatccattgctgctaagtactccggttcccagcttctgcaaaaggaacttagtgatttggcccgtgaccctcca

SEQ ID NO: 176871 - DNA, 100 bp, Homo sapiens
ctatggcaacaagtacaagcggcgggtgccccggacacagaatgttcagcttaacaaagaaatgacacttgccagcaaccggagcctggcagaaggaaac

SEQ ID NO: 176872 - DNA, 82 bp, Homo sapiens
gggcccttgcggagttccgcgtccgaggtgtgaagcatcaagatggtgctcatgtggaccagtggtgacgccttcaagacgg

SEQ ID NO: 176873 - DNA, 100 bp, Homo sapiens
gtcacaaagactacaaaaagggaaaagcgtgcactaacaccaaggtccttcacagggtggtccaggtcctcagtatcctaactacccacagggacaaggt

SEQ ID NO: 176874 - DNA, 100 bp, Homo sapiens
aggaggaggaccaggcccgcgggctcagctctcgccgccagcgggccgcaggtaagaatgattgatgttggctgatattggagtgctcattcacatgaag

SEQ ID NO: 176875 - DNA, 83 bp, Homo sapiens
ggtggtagagggcatggatatctctactcgctccaaagccttatgccagcctggaccatcttggaggcagtgtaggatcatgg

SEQ ID NO: 176876 - DNA, 98 bp, Homo sapiens
tcatgtccacatggcatgggagaaagaggaatgggcctggcctgtgggcagctgcaccacctcgtgagcgatgacgtctgcctgaaggtggtggagct

SEQ ID NO: 176877 - DNA, 75 bp, Homo sapiens
tacaaccttcgatctcctgacgaacctttccaaagtgaaactgatgagatttgatgatccactgttggggcctcg

SEQ ID NO: 176878 - DNA, 100 bp, Homo sapiens
cgtgatgcttaagctggtggagaaactcgggaaatcctcattgacgattcaatttgttgaaggccaatttgtggactcctacgatccaaccatagaaaac

SEQ ID NO: 176879 - DNA, 100 bp, Homo sapiens
ctcccaacctcatggtcagtggcaacatggacgggaggcaatttgaatcaacccatagaagtgacagcgctgtattcatttgaaggacagcagcctgggg

SEQ ID NO: 176880 - DNA, 101 bp, Homo sapiens
cagccctgggtgggggctgtctcggcaccttcacctccctgctgctgctggcgtcgacagacagaagccctgcagcagctgcagaaggactctgaggccat

SEQ ID NO: 176881 - DNA, 97 bp, Homo sapiens
tttttggttgcagttttaagcacagaggtctctaattaacagaagatggcaaagcccagccacagcagctatgtccttcagcagctaaacaaccaaa

SEQ ID NO: 176882 - DNA, 100 bp, Homo sapiens
cggaagcaactgccgccgccgcctctttcatctcttctggggcaggggccagggccaggaggcactggctacaattaggcttctcgacgtcctgtgcgaa

SEQ ID NO: 176883 - DNA, 99 bp, Homo sapiens
ccccctcgatgttcccactgcagtgtctgtgacaactgtgtggagaatcgaattctctgggttgatgagaacaatttgacagctcatgtagaggctggc

SEQ ID NO: 176884 - DNA, 100 bp, Homo sapiens
tcggcggcgttcttctgtgtggcccgcctgcaggtcatgtccatcctgttgcatggggatgctgcatttgctggccagggcattgtgtacgagaccttcc

SEQ ID NO: 176885 - DNA, 100 bp, Homo sapiens
gctgccccagcagtgtccgggctctcccggcagaaaaagcttgtggtgaaggggggcaaaaaaaagaagcaagttctgaagttcactcttgattgcaccc

SEQ ID NO: 176886 - DNA, 90 bp, Homo sapiens
gagctggcagaatacatcaagaaccacaaggaaacagacattgaaatttaaaagcctgttgattcaagaactttctaaagtatttccgga

SEQ ID NO: 176887 - DNA, 75 bp, Homo sapiens
ctgcctcagcctcttgagtagctgggattacagattgtatgcaggcccagaggtagatatatggagcagtggggt

SEQ ID NO: 176888 - DNA, 51 bp, Homo sapiens
ctgactttgcagccacggagagtgtgaagcctcagtttaggtcatctggtg

SEQ ID NO: 176889 - DNA, 88 bp, Homo sapiens
gcagtgagaggcatgcttccttagaccaggcgtgcaatggaattgagttttgccctggtaaatgggaataatatccgaggcatgatga

SEQ ID NO: 176890 - DNA, 50 bp, Homo sapiens
gagaataagatttttggaagaaaagtgaagaactgaatgtcatcatgtct

SEQ ID NO: 176891 - DNA, 75 bp, Homo sapiens
attttttacagaatccatcagagagcagtgagtggatatcttgacctacgtggcttggaagataagtggttttcc

SEQ ID NO: 176892 - DNA, 118 bp, Homo sapiens
cgccaaggtcgtggtcgtgctggtcctcgtgctgaccgcgctctgcctcagcgacgatcgacgacatcgcggatggcgccgtgaagcccccacccaacaagtaccccatctttttctt

SEQ ID NO: 176893 - DNA, 103 bp, Homo sapiens
tgcagtcggtgaccgcgcgactcggcgcccgcccgcggtgctggagaatctggtaaaagcaccattgtgaagcagatgaggatcctgcatgttaatgggttta

SEQ ID NO: 176894 - DNA, 100 bp, Homo sapiens
atcaccgacagcacagacagaatccctgctaccagcgtgtgcacaggcagctccactcggcacatcgtgacctttgatgggcagaatttcaagctgactg

SEQ ID NO: 176895 - DNA, 100 bp, Homo sapiens
atgcactacaacaggaaaatcatattatagatggagtaaagattgatctagtctttgcaagactggcaatacaaaccatatcagataatttagatctaag

SEQ ID NO: 176896 - DNA, 98 bp, Homo sapiens
aggtggcaaacagcttcgcagtcactaatgcttgcatttattaatacagcaaaagaaatttatgaaaaaattcaagaaggagtctttgacattaataa

SEQ ID NO: 176897 - DNA, 90 bp, Homo sapiens
tgtgaagagaccaccaaacaggctttgtgttagcatacgtatcaaggacagtaactaccatggctcccgaagttttgccaaaacctcgga

SEQ ID NO: 176898 - DNA, 88 bp, Homo sapiens
gaagttgctggttccacgtctgccaagacagcatgtctgcgacagttgcctgctgtcagtaagctggtacagaaggttgacgaaaatt

SEQ ID NO: 176899 - DNA, 85 bp, Homo sapiens
gaccgagaccgcggccgggaccgaggttggagagaggcgatttcctctcagaagagtggagggagcgaatcgccaacacgaggta

SEQ ID NO: 176900 - DNA, 99 bp, Homo sapiens
gagctgggcgcggattcgccgaggcaccgaggcactcagaggaggggacggcaaaacagaacagaaaggcggagataaaaagaggggtgttaaaagacc

SEQ ID NO: 176901 - DNA, 75 bp, Homo sapiens
cgcctgtctcgtcccgaggccgtggctgaggtgaagagcttgctgttttggagtcagcggaagatcaccaaggcc

SEQ ID NO: 176902 - DNA, 100 bp, Homo sapiens
cgcctcccagccgtgcttcctgttaagcctgtgaaactatgatgctgtgtatctggacaatgagaaagaaagagaagagtatgtcctgaatgacatcggg

SEQ ID NO: 176903 - DNA, 83 bp, Homo sapiens
gatccagagcgccgcgcacttcgtcatgttcttcgcgccctgatggcccactgcgtgaccttggttcagctgtccatttcctg

SEQ ID NO: 176904 - DNA, 50 bp, Homo sapiens
tgggagccgagggccagagactaagtatggaattggctgctctagaaaaa

SEQ ID NO: 176905 - DNA, 74 bp, Homo sapiens
gtctgttccacatgatcattgtaataaggtttgttcggacagtgttaccattttctcaggaatttcaaagagat

SEQ ID NO: 176906 - DNA, 75 bp, Homo sapiens
gccccaagcccgggcgccaccgctgccacctccgcgaggtgtcgtgaaaactacccctaaaagccaaaatgggaa

SEQ ID NO: 176907 - DNA, 90 bp, Homo sapiens
cagtacagacagagagaggatttctgtaactagagaagaactctataaaatgttagcgcatgagaacttcttggtatacatgaacaagca

SEQ ID NO: 176908 - DNA, 83 bp, Homo sapiens
cagaaatctttactgattccaatgcagaagctcctcctggggtagagacagatcttattgatgttggattcacagatgatgtg

SEQ ID NO: 176909 - DNA, 100 bp, Homo sapiens
gcgccgcggccgggcagggaggagaccggcacccagacaggtggcgacggcagaggagttcgtttaccaagcaaaagttgggggtcgctggttcccagcc

SEQ ID NO: 176910 - DNA, 100 bp, Homo sapiens
catgcaaatgagacaacggaaaggcactctctctgttaactttgcataatcaccagcaacacccgggacaataatacgggggccacctacccccacctga

SEQ ID NO: 176911 - DNA, 50 bp, Homo sapiens
tccgcccggcagctgccccgtctgagaaggtctcactttgtcacccaggc

SEQ ID NO: 176912 - DNA, 100 bp, Homo sapiens
ctgtggacaggccagaggggcaacctggcgccatgaccccaggcccagtctgggccgtgactctgggctattgagggcacctacattgacaagaaatgcc

SEQ ID NO: 176913 - DNA, 75 bp, Homo sapiens
tttaattttagggtcctttatatagaagggagagtaggtgtaccttccggtttcccagcacggccatcaagatcc

SEQ ID NO: 176914 - DNA, 75 bp, Homo sapiens
tctgcctgctgcccgatttctatttgactggcaatagtctgtgttatagttttgccgctggactcttccctccct

SEQ ID NO: 176915 - DNA, 51 bp, Homo sapiens
ctgtcttagcaaggctgtcatcacaaaggccaatgatgaggccaatcagag

SEQ ID NO: 176916 - DNA, 99 bp, Homo sapiens
cgccgccgctgtccggagccccacagaaaacgttgtgtgacgtgatcctcatggtccaggaaagaaagatacctgctcatcgtgttgttcttgctgcag

SEQ ID NO: 176917 - DNA, 82 bp, Homo sapiens
gatggatgcacaatcggagacaaagggcatgaaaatcaacatggacaagaatcggaggcgaaagccagcaagcgactccgtg

SEQ ID NO: 176918 - DNA, 50 bp, Homo sapiens
agatgcgcctctgcgatttgcagaccccacatcttgttaacctcaatgaa

SEQ ID NO: 176919 - DNA, 90 bp, Homo sapiens
ccaggcaaaaatagaagctttgcaagctgataatgatttcaccaatgaaaggctaacagctttacaagctgcgagcaagtcacaccagcc

SEQ ID NO: 176920 - DNA, 83 bp, Homo sapiens
tggcttttcatcagaagcgtctatgattccttcagataccagggactggtttctgtatacatagccttcaggactgcttttgg

SEQ ID NO: 176921 - DNA, 81 bp, Homo sapiens
atcaattcaggaggctccctccgggttacccccactccagagtatgaagtgaaggctcctgttccttctgcctgtttcagg

SEQ ID NO: 176922 - DNA, 95 bp, Homo sapiens
catgttcaagaaactgaagcaaaagatcagcgaggagcagcagcagctccagcaggcgctggctcctgctcagtgcccaccagaagtatgtccga

SEQ ID NO: 176923 - DNA, 100 bp, Homo sapiens
cacctgagtcaccagttaactatggtagcccacccagcattgatcatgtatcagttggaggacttggagacagcttctatgagtatttgctgaaggcctg

SEQ ID NO: 176924 - DNA, 50 bp, Homo sapiens
ggctccggggcagctccggcgggcgacctgatggacaccagaacaacctg

SEQ ID NO: 176925 - DNA, 75 bp, Homo sapiens
gttttcaggaccaaaattgtggaaaagtcactctggagctctgtgtgtcgtctgagcagtcgcgagaagatttcc

SEQ ID NO: 176926 - DNA, 96 bp, Homo sapiens
gaataccttgggcattgctgaatatgaaaaggcaaggcagtttccccggcatgaaccagagtggacttatggcttccagctctccctacagccagc

SEQ ID NO: 176927 - DNA, 100 bp, Homo sapiens
tatgcaattgacccccaaaccaacagagccatcgatagaaatgagctttttaactaagggagaacattgagcaattcttcaccaaatttgtagatgaggg

SEQ ID NO: 176928 - DNA, 80 bp, Homo sapiens
agccgatccagcctgcggagcctgtggggcaggaatccagatcttacataagatggaagtctctcacactagatactgaa

SEQ ID NO: 176929 - DNA, 75 bp, Homo sapiens
cgcagtggtcgcttcttctccttggactggggttcagactttccgcagagaccatgatcgtttctgggtcctagc

SEQ ID NO: 176930 - DNA, 98 bp, Homo sapiens
ggaaactgaagatgaggttgccatgggaactgctggtactgcaatcattcattttgtgccttgcagtttaagctatgaagaaggacatccctcacact

SEQ ID NO: 176931 - DNA, 99 bp, Homo sapiens
ttggggaaagtaattttgtttgccgaagtgacccccacaacgatgcgtctcctggatggggatgccagatgatatgaacttcagtgatgtaaagcaaat

SEQ ID NO: 176932 - DNA, 95 bp, Homo sapiens
gatacgaaatgagacttttgaagtgcctttgatttctggccttcatacaccgaattcgacatcagtggcaacgtcctcgctctgatcttcaacca

SEQ ID NO: 176933 - DNA, 51 bp, Homo sapiens
caccggtgctgccttctctgatccaggaactttgtgttaaagcatcatgta

SEQ ID NO: 176934 - DNA, 76 bp, Homo sapiens
ccgcgcgcacctcagccgcctcctagcggcgcggcgctcgctcctacgtgttcggtgaccagtgacttggattttc

SEQ ID NO: 176935 - DNA, 74 bp, Homo sapiens
tttctcaggtgaaaggagcagtagatgatgatgtagcagaaggagtatgctgctgctgttccgctttgcgtcct

SEQ ID NO: 176936 - DNA, 75 bp, Homo sapiens
cgagagcgtggagcgggctgggccagtacctgtttgaaaatggtagaatagataacatttttactgagccctatt

SEQ ID NO: 176937 - DNA, 83 bp, Homo sapiens
cccagctccgtctcggcggcggcggatgatatcatcaagttgaatcgaaaggaagggaagaagcagaattttccaagactaaa

SEQ ID NO: 176938 - DNA, 100 bp, Homo sapiens
ctgaggtgaaccttcgaccttggacttctcagcctccagaatgcatataatcaagtttcacagagcttctaaagcaaacaagaagccagttcagttacct

SEQ ID NO: 176939 - DNA, 87 bp, Homo sapiens
ggtgctgaaacgtgaagatgtgtttaaagcagtacaagtccagcggagaaaatatgaagcaacagcatgtcatagaaaccttgattg

SEQ ID NO: 176940 - DNA, 106 bp, Homo sapiens
gaccattcagatgggatctttccggatcaatccagatggcagccagtcagtggtggagatgtctttggtggacttgggaaagaggttgctagaagcagcaagaaaa

SEQ ID NO: 176941 - DNA, 124 bp, Homo sapiens
tggggaacatgtctgagtcggagctcggcaggaagtgggaccggtgtctggcggatgcggtcgtgaagatagtgacagcatccactaccagatggtgtattcttacggctctggggtggtgtgg

SEQ ID NO: 176942 - DNA, 100 bp, Homo sapiens
ggccctgagtcaaagaagatgcctcgaactaaacaaattcatcccagaaatctaagaggatttctctgcctcttccaaacttttcctccctgaacctgag

SEQ ID NO: 176943 - DNA, 90 bp, Homo sapiens
acatccatccagtgtgttctttatggtcctttctcagcctccagctgggctgtccccaagctgagctgaggctcttctcctccgatcccc

SEQ ID NO: 176944 - DNA, 74 bp, Homo sapiens
cccttcctgctagtcctggtggatctgcagtacgaaggcctggcagctgcgattcagccacctcgtggggtatg

SEQ ID NO: 176945 - DNA, 100 bp, Homo sapiens
cgcagccttcctggcgctgctgagtgttccttgcctgtatctccccttggttcaatagctaccagatttttggaagaggaggaactgaggtctcatcaca

SEQ ID NO: 176946 - DNA, 74 bp, Homo sapiens
gacattgccgtcgacggcgagcccttgggccgcgtctcctttgagggcgaagctgtgctcaggcccgggctgga

SEQ ID NO: 176947 - DNA, 108 bp, Homo sapiens
tttcaatattggaagcgctttgatttacagcagctgcagcaaacggggattcagcgtccgatcctttggaacagggactcacgtgaagcttccaggaccagctcccga

SEQ ID NO: 176948 - DNA, 75 bp, Homo sapiens
ccggaaggctccctcggtcgcgagtatctccgtttcctggatgtgaacgaagaagaacgattatccattcaaaat

SEQ ID NO: 176949 - DNA, 50 bp, Homo sapiens
accacagggtttacaaggacagcaacctactcgccctcctaatggtcaag

SEQ ID NO: 176950 - DNA, 100 bp, Homo sapiens
cgcgccatcttcagaatggaggatgagcagctgaaggacagagcgggatgccaccagcttgtccaaagggaagttccaggagctcctggtgggcatcgtt

SEQ ID NO: 176951 - DNA, 76 bp, Homo sapiens
cgagaccggctacttctcggcgctgccgtctctggaggagtactggcaacagaattcagaaggagctggcggacat

SEQ ID NO: 176952 - DNA, 75 bp, Homo sapiens
actgcactcgtgtactcagctgaggaagaccgccctggtggtgcaggctgtgaagaaagaccaggagggggattc

SEQ ID NO: 176953 - DNA, 157 bp, Homo sapiens
attatggctcactgcagtttcaacctcccagattccagtcatcctcctgcctcagccacccaagaagctgggaccacagacttgtgcaccatggacaattttgctgagggagatttcactgtggcggattatgccttgttagaagattgccctcacg

SEQ ID NO: 176954 - DNA, 101 bp, Homo sapiens
cccaaagctttgcctcctcaccatgaacggattgcagagggaatggcatacatcgagcggaagaactacattcaccgggacctgcgagcagctaatgttct

SEQ ID NO: 176955 - DNA, 82 bp, Homo sapiens
caataacctgcttggctcaaaggtttgtctgccattgtggatttcctgggcagagtggagtgaaggtgccaaaagccaagaa

SEQ ID NO: 176956 - DNA, 121 bp, Homo sapiens
ggcggcggtggccggggagcccatggcgtacagtcaaggaggcggcaaaaaaaaagtctgctactactacgacggccacaccgtagtcatagagcaagaggactcagatacagtttggttg

SEQ ID NO: 176957 - DNA, 100 bp, Homo sapiens
gcagctggagaaggtgtgcaggggaaaccctgctgatgtcaccgaggccaggtacagcctgtacacccgcacctggctcgggtacctcttctaccgacag

SEQ ID NO: 176958 - DNA, 101 bp, Homo sapiens
ctggtgcctgggagcggctggcgcggcggaatccagggccgacccgggccggaccgaccccaggcggcgacttaattcagtgcacaaatgagatgaatgtg

SEQ ID NO: 176959 - DNA, 50 bp, Homo sapiens
atgatttcagctgcaatggcaggtgggcttggattttacaggatatcttg

SEQ ID NO: 176960 - DNA, 82 bp, Homo sapiens
ccaaggacgggacgggatgggcaaacaagcaggatcagcaagacccaaagaggaaattcggcgccttcatcagtatgtgaaa

SEQ ID NO: 176961 - DNA, 76 bp, Homo sapiens
agaggaagaagcgggctttggacaccaattactgcttccggctttcttcgagagtcacccagctccttcagctgag

SEQ ID NO: 176962 - DNA, 100 bp, Homo sapiens
agaagaccaccatcaacaatgagtacaactaccgctgctggaccacaaaccgctgccagaaaagacgctgtgcagagctgcaagtccgtatcactgaggc

SEQ ID NO: 176963 - DNA, 90 bp, Homo sapiens
ctacactagagcagagtacgagtctgaggcggagggagtaatggtgtgatgaatgcagactctgctaccattttggctgtttggatcctc

SEQ ID NO: 176964 - DNA, 98 bp, Homo sapiens
tgcgtgcctgctacgaacgctccaacgagtaccagctgattgactgtgcccagtagtgcagcggaactgctgcctgacgctctgcaacttcagcatcc

SEQ ID NO: 176965 - DNA, 101 bp, Homo sapiens
acatggcaccagaccttcgccaggacttcaacatgatggagcaaaagaagagggtgtccatgattctgcaaagccctgtcaaaatgcagatcttcgtgaaa

SEQ ID NO: 176966 - DNA, 49 bp, Homo sapiens
ggagactcggcgcaaggcccgagccacggaagagctgaaggaattcttt

SEQ ID NO: 176967 - DNA, 100 bp, Homo sapiens
caaagaggatagatttatacttggcactgttatctgctgtttctgcttcaacagccatggcaatgacaggctcaacaccttgctcatccatgagtaacca

SEQ ID NO: 176968 - DNA, 100 bp, Homo sapiens
gttaaaacgggtcagttggcagccatcaaagttatggatgtcactgagacaccaaatcctactgcaagcgagtttattcctaaaggaggatcaacctcca

SEQ ID NO: 176969 - DNA, 82 bp, Homo sapiens
gtctccgcgttcccagcccgggtccccgcgttcacagccccagcgcaggtgacccggccctgtagctacagcaagaagtccc

SEQ ID NO: 176970 - DNA, 80 bp, Homo sapiens
ccggcaacgcggtcacggcccagcgcgttcggaatctatgcgaaagtcatttccccttaacctgggaggcagcgacacgt

SEQ ID NO: 176971 - DNA, 107 bp, Homo sapiens
tgtgcatcccggccgtctgggcggccgccgcgcttctgctctcagtgtcccggacttcagggggatatgagactttctactcggaatatcctgagtgttgcgtggat

SEQ ID NO: 176972 - DNA, 101 bp, Homo sapiens
ctgcgagggttgaagattgtgaagcaatagcctaaggcgccaagcccatctttgtgtgcttgcatccaactgtgatgagcctatgtatgtcaagttggtgg

SEQ ID NO: 176973 - DNA, 130 bp, Homo sapiens
agcaggctgccggtcgcaagacacagagcagtgggcctgggctgcagaagaataagctgtgggaacctttgcaagagccctagattgtagcagctccattcggcagccaagcttgcacatgagtgcagct

SEQ ID NO: 176974 - DNA, 100 bp, Homo sapiens
cattaataactgactttttttctcctttacagttgtgttcgatatatacagagacagtaggaataaaagccgccctcattctaggggagaatataatgtt

SEQ ID NO: 176975 - DNA, 140 bp, Homo sapiens
tttaataatgatagaatgaagaccacaataaaagagacctctacttagctcagcaattcttaccttattcaaccctatgaaaagataaaggccaggggcttgcctgataatatatcttccgtgttgaacaaactagtggt

SEQ ID NO: 176976 - DNA, 100 bp, Homo sapiens
atgaacgcacaggccgtcgctatgagcgggaccaccctgggcacagcaggcatcggagaacccagcgggtgccgcttctccacccgaggcttccacctcc

SEQ ID NO: 176977 - DNA, 98 bp, Homo sapiens
taaccagttctgtttgcctgttttggatagcaatgatcccaatttccagatgccttgttcaacaggttgtccgagcggaactgcattgagattgttaa

SEQ ID NO: 176978 - DNA, 100 bp, Homo sapiens
cagctatccaaagagccttctgcccgtctgctgaagcatgtagtgagatgttaccttcgactttcagataaccccagaaactgccaagttttggacctta

SEQ ID NO: 176979 - DNA, 80 bp, Homo sapiens
ctttgcaacatttcaggaaaacagagaaagaagtgataggagggctctgtagctgctgatgcaaggaatcccctgggctc

SEQ ID NO: 176980 - DNA, 100 bp, Homo sapiens
accatgcttaatgcaaaagaccttctacaggacctgaaatcatatactcctatgaaaggaggaatctccaatgtatggtttgacagatttaaaataacca

SEQ ID NO: 176981 - DNA, 75 bp, Homo sapiens
ttttttgtggaacagaattggagcagatgaggcctgcctgtgttaatacacctagtgaggagtggagctgaattt

SEQ ID NO: 176982 - DNA, 99 bp, Homo sapiens
cccactttcccctgagcctcagcacctgcttgtttggaaggtgaaggtgctaaaggagaagatagaagctgagaagggtcgtgatgccttccccgtggc

SEQ ID NO: 176983 - DNA, 96 bp, Homo sapiens
gctttcactctggaccacgagaccggattgcctcaaggatgtcatatctatgagtaccgcgagagcaacaagtacatgtcccagagcaagcacacg

SEQ ID NO: 176984 - DNA, 85 bp, Homo sapiens
aagaaaataaagaaaacgaacgcccttcggccggatcgaagtggcgcctactcgctgaccctgcaagggctgggcatcagctggc

SEQ ID NO: 176985 - DNA, 88 bp, Homo sapiens
tggcaatgaggatgacttgttctttgaagctgatggccctaaacagatgaaggtgtctgaatctccctggctccatgccccatctctg

SEQ ID NO: 176986 - DNA, 90 bp, Homo sapiens
ccgaagtctgcgagtgcagctgtgcacaggcctcattaaatccaaagatacaggcatgcagcttaagtgatgggtttattattgtagccg

SEQ ID NO: 176987 - DNA, 87 bp, Homo sapiens
aaggttcccagtggtgtgagtgacgggcggtggcactctgtgcaggtgcagtactacaacaaggggactcgctggccatggatgtgt

SEQ ID NO: 176988 - DNA, 90 bp, Homo sapiens
ggttgctgacccagaggagagttctccaaacatgatcgtttactgcaaaccccggccatggccccgcagaacgtgcaggtgaccccactc

SEQ ID NO: 176989 - DNA, 100 bp, Homo sapiens
gcctgagccaccaaagcacaaggcagaaaggagtggagtgtacctcacagccttctaggatctccagagtggacaggaatctcacttggagggaccatgg

SEQ ID NO: 176990 - DNA, 97 bp, Homo sapiens
tttcatatgttttagctacaaacatttatctaagtttggttgtaaatgtcatgcagagagactccatcccatcagaagtagactatgaaacaaggca

SEQ ID NO: 176991 - DNA, 106 bp, Homo sapiens
cgctggcgtggactgcggggacggggttggcgcccggcagcacgtgttcctggtttcaggacccagatgatgtggtaccagttggccaaagaagagcctggtgttg

SEQ ID NO: 176992 - DNA, 100 bp, Homo sapiens
ggatgacttctctaatcagttacgaggatgttaagcaagtttttggacagaccacaattcatcaacatattccatttaactgggattcagaatttgtgca

SEQ ID NO: 176993 - DNA, 100 bp, Homo sapiens
cagatggagaatatatggctggacagctagctgcttatggctataaaattacaggcaagagggcacattgggagattcagcttgcaagagtcctgaatct

SEQ ID NO: 176994 - DNA, 100 bp, Homo sapiens
tccgaggaagctaaggccgcgttggggtgagaccctcacttcatccggtgcagaaaagccctgtgttccggagggacggcgcagacatccactccgacct

SEQ ID NO: 176995 - DNA, 75 bp, Homo sapiens
ctgtagcattcaagacttcaaactgttcatagccctgatgaagcaagttactctgctctcctaataaatgcaaga

SEQ ID NO: 176996 - DNA, 75 bp, Homo sapiens
gctggactatcacaaggagcaggcggcccagctgcggaacctgcgtgctcttgctaaaactggagctgaatctat

SEQ ID NO: 176997 - DNA, 138 bp, Homo sapiens
gcacccaggccttctcgcgctgcctggtcgctggtgaagcccgcggcgcgcgcctctcccggaccctgcaggactgtgatcaaccactctatgattgtcctatgtgtgggctcatatgtacaaattaccatattcttc

SEQ ID NO: 176998 - DNA, 100 bp, Homo sapiens
caaagacaatattggctcccagtacctgctcaactggtgtgtgcagatcgcaaagggaataccttggcaagcagctccagtccgagcagccccagaccgc

SEQ ID NO: 176999 - DNA, 73 bp, Homo sapiens
tagactcagatgagagtgaggatgaagaagatgactaccaggtcacaaacatgtcagacaaaagtgaattaaa

SEQ ID NO: 177000 - DNA, 50 bp, Homo sapiens
tggggaattcagggtgcctgccaagcaacttaccaaccacattcgggata

SEQ ID NO: 177001 - DNA, 75 bp, Homo sapiens
cggggcatcgcggttccaacgctgagcttcagtcattgtctattcctggaacttaccaagagaagatcacccacc

SEQ ID NO: 177002 - DNA, 75 bp, Homo sapiens
gccctggacctggcagatccttcagcaaaagctgtccttacagcacatgctaggagaatactacagcagtctaac

SEQ ID NO: 177003 - DNA, 50 bp, Homo sapiens
atggaacacttcagtgcattcaagttacatccggtgatcaaggctttcct

SEQ ID NO: 177004 - DNA, 100 bp, Homo sapiens
tgtcttgtgatggaatatgctgaagggggctctttatataatggtgttcctgatccaagcagaaccctgttatttgaagagcctgagaaatcttatcccg

SEQ ID NO: 177005 - DNA, 100 bp, Homo sapiens
cctctaccataatatgaaacatggacagatatcaacaaaagaactagcagattttgtaagggaacgagaaagagatgacttgatgtctgcactagtttcc

SEQ ID NO: 177006 - DNA, 101 bp, Homo sapiens
tgtgccccgcttctactggaaggaccggctgctgaagatgaagatggctgggctgaacgccatccagactttaattggttggggtcagataagaagaggag

SEQ ID NO: 177007 - DNA, 83 bp, Homo sapiens
ctgcagctagcgaccagaagcaagggttacacatcattttggaatgactgtatatcatctggattacgtggctgtatgttaat

SEQ ID NO: 177008 - DNA, 80 bp, Homo sapiens
gttactgtggtggccctggggaccgcttacaaacacgcagatggcaagaagattgatggcaggagggtccttgtggacgt

SEQ ID NO: 177009 - DNA, 51 bp, Homo sapiens
cgggcggctgagacaaaggcgacgcatttgacattgtgcagcaaagaaatg

SEQ ID NO: 177010 - DNA, 119 bp, Homo sapiens
agatgtgtctggtgaacctgaagcttcaccgagtgcagatacaactatactgtttgtaaaaggagaagggatggggaaagacaccatagtcataaaagaagaaagcaaaaaatataaat

SEQ ID NO: 177011 - DNA, 101 bp, Homo sapiens
ttaccttggcaaactggatgtctcatttcaaagaggggtatagaacaggctatgcttacaggcatcctctcattcgagagaagcctaggcacaagagtgat

SEQ ID NO: 177012 - DNA, 100 bp, Homo sapiens
ttgagagaattctggatgcgttactactcttctcattacatgactttagtggttcaatccaaagaaaactttagaaactgttcctttggagaggaaaaag

SEQ ID NO: 177013 - DNA, 100 bp, Homo sapiens
ctgggcggcgcagacgaggcctgaggcggcggcgcgaggcagtgacatattcgatgccatgttccctgtcactcacatcgctggggagactgttatacag

SEQ ID NO: 177014 - DNA, 98 bp, Homo sapiens
cctcaatttgctggatttaagcactgctgcactttatgaggtgatctttgacgagactctacagaagtgcctggactcctacctgcgctatgtccccc

SEQ ID NO: 177015 - DNA, 83 bp, Homo sapiens
cgagaactgatcctggacctggagaagaatgagcaccacactgtaactcgaggcatcaccaaaggcgtgaaggaggactttcg

SEQ ID NO: 177016 - DNA, 75 bp, Homo sapiens
aaaatcacgagttcaggcgtctgagacttggtgggaacggaccttcctcttagaggactggtatgaacagttgta

SEQ ID NO: 177017 - DNA, 75 bp, Homo sapiens
attattggccctccagatacactttaagtgggaggctaagcaaagaactggatttagtaagtcaccatgtgagga

SEQ ID NO: 177018 - DNA, 134 bp, Homo sapiens
gcaagctgggatctatgagtggaaaggtgaccaagcccaaagaggagaaagatgcttctaagggctacaagatcaagctgcagagaccattgaagctctgcatgcagcaggcctgaaagtctgggtgctcactg

SEQ ID NO: 177019 - DNA, 98 bp, Homo sapiens
tctgtggattaactcagtggctcaacaggctgaagggagtatttgagaacacagtggctacggtgatggctctgcgcagggagaagatgttcgtggaa

SEQ ID NO: 177020 - DNA, 75 bp, Homo sapiens
gtcgcctccaggccaagagggatccttcacccgtgtctgtgtccaattgagtggtttcactttgcctgcgtggac

SEQ ID NO: 177021 - DNA, 100 bp, Homo sapiens
catttttgtcacctccaacaacatccgcgagatcgagaacccttaggagaaatcttgagagtggacagcaattgtgaagatcgccagagagttctgtgtt

SEQ ID NO: 177022 - DNA, 97 bp, Homo sapiens
tggccagtgtcatgcagaagattatacctcactattctcttgctcgatggctactctgtaatggcaggcagaatatgaagttgccgatgatgaggac

SEQ ID NO: 177023 - DNA, 100 bp, Homo sapiens
atggcggccatcgagaaagtgcggaaatggtggtttttgctcttacagactttgtgatagaaaatcttggaaaacagtttatagagacaccacctgtgga

SEQ ID NO: 177024 - DNA, 106 bp, Homo sapiens
acatgttttctgagaaacaggacatacctttcgtagagcaagaagatccatcgcagagtcctaaagaagaacccactgaaaaacttgagaatcatgttgaagctaa

SEQ ID NO: 177025 - DNA, 100 bp, Homo sapiens
cgtccccagagagcgccctgagagaacagggtggccgcttggtccaggaaagcgtctctagcagctgatatccccagacttggatatagttcctcatccc

SEQ ID NO: 177026 - DNA, 100 bp, Homo sapiens
gcacatctcggtgggagtcagcgtggtctgggctgtcaccaaggactggaagagtggtgtcttaactgtcaaactgggtggagatctaggaacctatgtg

SEQ ID NO: 177027 - DNA, 97 bp, Homo sapiens
aacaggctttcagccttgaggcaacattggatattattgagacacgatgaggcgagtggtacgacagagcaagtttcggcatgtatttgggcaagcg

SEQ ID NO: 177028 - DNA, 88 bp, Homo sapiens
ccacgcggctgcacaactgcaggaacaccgtcacgctgctggaggagactctggctgccctaacaagaaattcaataaatctgcttcc

SEQ ID NO: 177029 - DNA, 74 bp, Homo sapiens
agcggctgcgggacgcgaggtttccggcccgtggaccgggagcccgtggaccgggagccggtggtgtgccaccc

SEQ ID NO: 177030 - DNA, 50 bp, Homo sapiens
ccggcctggagctcccagggccgaggttttgagcaaaattttggactgtg

SEQ ID NO: 177031 - DNA, 50 bp, Homo sapiens
gacagaatgtcattggattgaagctcaccagaacaagctagaagaaatga

SEQ ID NO: 177032 - DNA, 88 bp, Homo sapiens
aagaagtcgtagggggtgagggtggaagctgggaaacccacaggaggcaaccacactagtttaggtccttgaattcctttgtagtcct

SEQ ID NO: 177033 - DNA, 80 bp, Homo sapiens
atgatgtctttaatgaaaagggatggaactacattcttgagtacaatgccagtgtttcagtcccagacagcagtggcccc

SEQ ID NO: 177034 - DNA, 100 bp, Homo sapiens
aggccttgaccagtgagattgcactgctgcagtccaggctgaagacagagggctctgatctgtgcgacagactgcgctgagcacagacccaagtgtgctg

SEQ ID NO: 177035 - DNA, 75 bp, Homo sapiens
gcccgcccaaggtctctcgcgggcgggagaacggaaaactcccaacttcctggtatgggcggagctgccattgcc

SEQ ID NO: 177036 - DNA, 83 bp, Homo sapiens
cgcgggggccgcacccgactcgcgcctggacactcgcggggcgccgacctggcaggggagtgcatccgccccaacccttttcc

SEQ ID NO: 177037 - DNA, 60 bp, Homo sapiens
tcttcatcctcggacatttgaggaccctgatgaaaggagatgtaagattcttgatttgca

SEQ ID NO: 177038 - DNA, 83 bp, Homo sapiens
gtggccgaggcccacctgctgacatctacctgccaggacgtgaccacgcagtctgtgatggggtttgatcctctgcctccttc

SEQ ID NO: 177039 - DNA, 95 bp, Homo sapiens
acaagtcctgcgcttggggatcctctgtacgcccgttcactggttcccgtgtcagtggctatgatgacacctcaagttatcactccccagcaaat

SEQ ID NO: 177040 - DNA, 100 bp, Homo sapiens
cgaaaagtggtgcagctcattacacagtctccaagccagagaggacaatctctatgggaagcagaaggcaaggaccccggtcattttaggtagaaacaac

SEQ ID NO: 177041 - DNA, 101 bp, Homo sapiens
gtcagtctgggatatggcatcgtcaatagtaccgtgaacaggaagctattcgcctttgcctaaaacacttcagacaacacaactatacagaagcttttgag

SEQ ID NO: 177042 - DNA, 96 bp, Homo sapiens
cgagtgcttaacctacctcccaacaccattatggaatacaaaactcacaccgacagcatcaacaacgcagtgtgcatattttatctggttctccga

SEQ ID NO: 177043 - DNA, 83 bp, Homo sapiens
gaaaagaaagagaaaaagcagaaagtagatgaagatgagattcagaagatgcagaggagatgttaaagtaacccatcttgcag

SEQ ID NO: 177044 - DNA, 100 bp, Homo sapiens
gggcagcatatgaaagtggattatggcaacagctgcgaatgcggatcaagcttacatataatcacaagggctcagcaatgcaagatctagcagaggtgaa

SEQ ID NO: 177045 - DNA, 100 bp, Homo sapiens
ggtttctctcaaggactactgcaccagaatgaaggagaaccagaaacatatctattatatcacaggaagacctgcaccactgtcgccttcacacaggtga

SEQ ID NO: 177046 - DNA, 100 bp, Homo sapiens
agagtgaacttggaatcttggacctcatccagaccccatgatggagctgacaggcactgacccttcagagctcgacggccagcaggagatggaggacttc

SEQ ID NO: 177047 - DNA, 100 bp, Homo sapiens
caagagagaaagagtggatttcagcctgcacggatggtcttgaaacacaaatggtttttggggttcatgtgtcacacaagtaggccttctggaaagcgtg

SEQ ID NO: 177048 - DNA, 100 bp, Homo sapiens
ggagattcaagtgggtccacaagaagaagttgggaacttcggacactaatcagccagagtaaagggcaattgaaggaacagactaaaaatcgtgtcctgg

SEQ ID NO: 177049 - DNA, 142 bp, Homo sapiens
cggcgctgcctgtggagatccgcggaggccgacaggattcgttggctgccgtccccgctgctgtgcattgggtttattcttcagtccaaggaagcaattcacagtcagctgttagagaagcagaaaatagcagaagaaaaaa

SEQ ID NO: 177050 - DNA, 82 bp, Homo sapiens
ttccttgactggagacaacctgcagcctcctggcaccaaagaaacgcttcgttaagggactcaggcagtacgggaagaactt

SEQ ID NO: 177051 - DNA, 90 bp, Homo sapiens
cggcacctgcacacctggatccaggataacggaggctggggagagtcccgtattctcagagtaaaagttgtttctggaattgatctcgcc

SEQ ID NO: 177052 - DNA, 49 bp, Homo sapiens
atggagcaggcttgcaatattaaagcggaccgccgctaccagagccggc

SEQ ID NO: 177053 - DNA, 98 bp, Homo sapiens
gacaaagatggcggcagggaccagcagttactgggaaggtgattgtgtccaggggggggcgctttctggaagcccccgtctcagggaatcagcagctg

SEQ ID NO: 177054 - DNA, 50 bp, Homo sapiens
cgggaaggaaaaccgcgcagagagttacgccccatggtgtccatcctgcc

SEQ ID NO: 177055 - DNA, 82 bp, Homo sapiens
ggcgctgcgccgcaacgccgagcgcaccgacatctgcctgctcaaaggaatgggtaccacagaccatgtcatcgtcctggcg

SEQ ID NO: 177056 - DNA, 115 bp, Homo sapiens
gacgatctgcacttcgcattttggcattgacatttaattttagggtcctttatatagaagggagagtaggaggggttggttcccgtcgtcgtacacgaagttgctggaagaaaat

SEQ ID NO: 177057 - DNA, 100 bp, Homo sapiens
aacatcaatctcatcgtgcagaaaagctgtctgagtggtggctcaagaccgcctacctccagtaccgccagcctgtggtcatctactcgagcccaggcgt

SEQ ID NO: 177058 - DNA, 75 bp, Homo sapiens
gccagctctgtccgctgcccacagcctagcagtcgggaccgtactgaggtgtttgctgactagcactttggagag

SEQ ID NO: 177059 - DNA, 75 bp, Homo sapiens
aggagccatcctgcccgcggggatcccgtcagccggaataggatgagtgataatccacccagaatggaagtgtgt

SEQ ID NO: 177060 - DNA, 101 bp, Homo sapiens
gcagactggagggaggtgatgatgccctattcgacagaactgatattttatattgaaatggatcctccagattgggctaatggatactacagacaacagag

SEQ ID NO: 177061 - DNA, 75 bp, Homo sapiens
caggaagagaggccgtgcccctcagccggagcggttgcagggcacacattactcggtgcagtcggacatctggag

SEQ ID NO: 177062 - DNA, 83 bp, Homo sapiens
agataatcaccagcagcatcaagaaaatcgcagactttctcaactcgttcgatttgggaatggatgatgaaggagatgatgac

SEQ ID NO: 177063 - DNA, 74 bp, Homo sapiens
gtgggggtagaggagaagttcatgaccatggtgctggccaaactgcaggccgctgtggtgttgaaccctggcta

SEQ ID NO: 177064 - DNA, 51 bp, Homo sapiens
aaggttgggttcagaagagggttgtggaagaaggactctgggaaaatggcc

SEQ ID NO: 177065 - DNA, 83 bp, Homo sapiens
gctagctacacacacgccctcacgcccggcgagcccgcgagacaatgcagatcttcgtgaagactctgactggtaagaccatc

SEQ ID NO: 177066 - DNA, 75 bp, Homo sapiens
gccacacagtgtccagatacgaggaaaatggacccaagtggggtcaaagtgctggaaacagcagaggacatccag

SEQ ID NO: 177067 - DNA, 90 bp, Homo sapiens
gatgcagtggagagagtgtagaactctggagtgaagagatctgcctggaaccctgactctatcactagcatctggaatcaagagacccat

SEQ ID NO: 177068 - DNA, 80 bp, Homo sapiens
catgtcgggttattcgagtgaccgagaccgcggccgggaccgaggccacgaaggaagacaggaggtccgaggagaaagcg

SEQ ID NO: 177069 - DNA, 100 bp, Homo sapiens
cagcattctttctttccttaggaaaaacttctgcagaaagccgtcattacacctgattttgaaaaaaaccactgtgttccaccatatagtgaatcaaagt

SEQ ID NO: 177070 - DNA, 98 bp, Homo sapiens
gtgtactgcctggacgacttctacaggtgtgagtgtggcaacgtgcatggccatcctccatgtgggtagtgcccagcaagtgcggacagggtccacga

SEQ ID NO: 177071 - DNA, 96 bp, Homo sapiens
aggccatctacctggacatcgatggacgcattcagaaggatggcggcctcgtggaagagcccacgccttcaccgttcttgccttccccaagcctga

SEQ ID NO: 177072 - DNA, 75 bp, Homo sapiens
tcttgtagcagcgcctcctcggttgggcccgaaggcatcctgcagaacggggctgtggacgacagtgtagccaag

SEQ ID NO: 177073 - DNA, 75 bp, Homo sapiens
tcacccgcgggggaccctactggcaggaggtcaaggccatgcacttggtgtaccgagccctggagaaggagcccg

SEQ ID NO: 177074 - DNA, 74 bp, Homo sapiens
cgcctctcccggaccctgcagggcaaaaggactcttgtggaagatggaactcattgtccattttccagaatgta

SEQ ID NO: 177075 - DNA, 100 bp, Homo sapiens
gttaatcctcaatttaagcctgatctaacccctagaaacaggcagcacacttctgcttttgttccttcatcaggacgaatttactcttttgggcttggtg

SEQ ID NO: 177076 - DNA, 75 bp, Homo sapiens
cgtcagcgctgactccatgcaggcctcattgctacgatttcagagtaccctggtaatagctgagcatgcaaatga

SEQ ID NO: 177077 - DNA, 75 bp, Homo sapiens
ccgagtccacggtggtgcgcgacgtgttctatgatggaaagaccggcagagaccaatgccaatgtggacaactcg

SEQ ID NO: 177078 - DNA, 90 bp, Homo sapiens
cggccgcgacgctatggcgcactggagtaccctgttcctggcatcctaatctatgaaccagaaaatcctgaggccaaggagtttttcaca

SEQ ID NO: 177079 - DNA, 75 bp, Homo sapiens
gaatgctcttttaccgatgctttaacatacagccactagcccacatatgacagtggacatagaggacaacgcaga

SEQ ID NO: 177080 - DNA, 75 bp, Homo sapiens
ggaattgaagaatattcccaagtccttcacccggattttcagctgaactctcatctctcaacactggcaaatatt

SEQ ID NO: 177081 - DNA, 100 bp, Homo sapiens
ctccctctacgccaccaatccgccctggatcttcacccaggaggccccggaggaggggaccgggggcttcgggatgacttgtcaagctcgaacatcatat

SEQ ID NO: 177082 - DNA, 97 bp, Homo sapiens
ttggtgcagatgtctgacacccagcggcacttgaactctgacctggaggtggtggtgctggaaacatgcatgaagagctgcggcaagcggttccacg

SEQ ID NO: 177083 - DNA, 74 bp, Homo sapiens
gggcgggcggtgagcgcccatatgggggttctggagagcggggtgtgggctgagctgactgctgcccactttgg

SEQ ID NO: 177084 - DNA, 75 bp, Homo sapiens
acccctcgtgtccaggttcctcatgggcagtgctcggggtgacaaagaaggaaaccactgattgcttgtgtggag

SEQ ID NO: 177085 - DNA, 100 bp, Homo sapiens
ccggaggagcaggacgcggaggccggggacgcggaggccgaggacgcggaggacgcggctctgccaggttgctacaagcctcaggaaaaatcagattact

SEQ ID NO: 177086 - DNA, 77 bp, Homo sapiens
aaggcccaggagctggaacacagtgactctgttaagcagctgaagggacagtagagacaggatttcaccatgttggc

SEQ ID NO: 177087 - DNA, 83 bp, Homo sapiens
ctcgagagacctgcgtacattcggggtgccagaaggaaagcataggttgtgaccgagattcccgacgagagagactgagggga

SEQ ID NO: 177088 - DNA, 100 bp, Homo sapiens
gctaagcctggggccaacagcaccacagacgcagtgctactcaacaaactgcaccttcacggtgatgatatggcatctgccagctctagccgggcaggag

SEQ ID NO: 177089 - DNA, 82 bp, Homo sapiens
ttctaaacagagcagcagcagcagagatgataacatgtttcagattttctctgtgggcagttctttttgttttgggaagact

SEQ ID NO: 177090 - DNA, 98 bp, Homo sapiens
gtgaaggagcagatttacaaactggccaagaagggccttactccttcacagatcgagctgctgcccaaagggagcaaggaggaacagcgggattacgt

SEQ ID NO: 177091 - DNA, 75 bp, Homo sapiens
ttgaagatgagaactcaagtgatgtagagtgtctttggtgcaacactaacaaggcttgtctggactacccagtta

SEQ ID NO: 177092 - DNA, 73 bp, Homo sapiens
caagttagatgccgattacccacttcgagtcctttattgtggaggttggaaagggcaaagaaattacaagaac

SEQ ID NO: 177093 - DNA, 75 bp, Homo sapiens
caccgcgggcgccaatggggagcagaaggactcggacacagcaaattgtggctactaatttgccccctgaagatc

SEQ ID NO: 177094 - DNA, 100 bp, Homo sapiens
gagcgacccggatttccagccagagctgagcggcgcgggctccagactcgccgtggtcaagttcaccatgagaggtttctgtagaaaatgtttcctgact

SEQ ID NO: 177095 - DNA, 97 bp, Homo sapiens
cccggctcgctgcaaaacgggcggcccgcgcggaggctcgcgagatccgcatgaaggagctggagcggctgcaggccgggaggtcgagagagacttt

SEQ ID NO: 177096 - DNA, 83 bp, Homo sapiens
ggcgctctggctctggctgtgcgcgctggcgctgagcctgcagccggccctgccggtcatcatcagatttgaaatatttaaag

SEQ ID NO: 177097 - DNA, 116 bp, Homo sapiens
cgcggctggctggggctggactacgtggcggcgctggaagggatgtcgtctcagcagtgctcgggcgcaggtaaggaagatactccctcattacttggcctctgtggatctctaac

SEQ ID NO: 177098 - DNA, 95 bp, Homo sapiens
actatggaattctaatttgaaccatgtttggattgaagccgcctctgtattacttaccaggtgagcgagtgctgtgctttcatgggcctcttctt

SEQ ID NO: 177099 - DNA, 98 bp, Homo sapiens
aaattcggagggtggccctggactcgttggtgctgcagacgagtacgtgtcttcctcccgctcgctcggcctccccatcgcagcctcttccgagggtc

SEQ ID NO: 177100 - DNA, 83 bp, Homo sapiens
gaggaagacgaatcgttaaacatctgaaagggtcagccttatgccagcctggaccatcttggaggcagtgtaggatcatggaa

SEQ ID NO: 177101 - DNA, 82 bp, Homo sapiens
gctgttagtcgggtaggcatagtctttcccagggaactccgatgaagtgttccaacaaaatgagcgagtgaaccaagaagag

SEQ ID NO: 177102 - DNA, 90 bp, Homo sapiens
ctgaaagatgagggactgcagtacttggagagactctatatgaaaaggaactccctgacatccttgatgacaggattggacattgagaag

SEQ ID NO: 177103 - DNA, 100 bp, Homo sapiens
gggaaaataatccagagatttccacagaaggactgggatgatacaccttttccacagggaattgagttgggggcagctggcattttatgctatgtgggag

SEQ ID NO: 177104 - DNA, 100 bp, Homo sapiens
gggcggcggcggcggcggctgcggcccaatataggtggtatcacggaaaacttgacagaacgatagcagaagaacgcctcaggcaggcagggaagtctgg

SEQ ID NO: 177105 - DNA, 78 bp, Homo sapiens
ggcaggctcaggtgcagccgctggtgtagaatgagccaaggagactcaaacccagcagctattccgcatgcagcagaa

SEQ ID NO: 177106 - DNA, 90 bp, Homo sapiens
cggagacgagtggtgggagaaccagccgactggagcaggcagcagcccagcatgcagccagtaaagatcccagagaagttcgagaagcta

SEQ ID NO: 177107 - DNA, 50 bp, Homo sapiens
gtgacctcagcagggcatccaggaaaaattccggaactgttggcttcggg

SEQ ID NO: 177108 - DNA, 82 bp, Homo sapiens
gggagcgaaggctgaggtggcagcggcaggagagtccggccgcgacaggacggtttggtgcacctcgatttggaggaagtag

SEQ ID NO: 177109 - DNA, 96 bp, Homo sapiens
cccacacaggaagtcagctagagagccgtctcccctctctggagccgagagaggccggtttcccccaccggctctgccagcagacagccttggcac

SEQ ID NO: 177110 - DNA, 90 bp, Homo sapiens
taaggttagaaggccttgtgctcacccaccaacaatttagtaggtgctctgtggatgtgtatagttttaaacccccactgcaagttggag

SEQ ID NO: 177111 - DNA, 96 bp, Homo sapiens
ctgcacttcgcattttggcattgacatttaattttagggtcctttatatagaagggagagtaggaacaagcacatcatgattgacttggggactgg

SEQ ID NO: 177112 - DNA, 90 bp, Homo sapiens
ggtagaccccaggcatcctactatgcttcctgagtgcttctttcttggagctgaccatggctcccctgcaaactttgctgtgtacactgc

SEQ ID NO: 177113 - DNA, 104 bp, Homo sapiens
gtctgtcttccgggaaagtatggaaaacccaaattgatatgtggtagatggtggctttgtgaagcagttaaatcacaaccccagattagggttggacatcctgg

SEQ ID NO: 177114 - DNA, 96 bp, Homo sapiens
agttcttcagcttctcagccccccaggtgtcatggagaaactccagctgggcccagagattctgcagcgggaaaatccaaggcttatttatgccag

SEQ ID NO: 177115 - DNA, 99 bp, Homo sapiens
ctggcttgggacgaaagtgtcaaggcattacggctcccattgagggacgcttgactttccgggatgtggctatagaattctcattggcagagtggaaat

SEQ ID NO: 177116 - DNA, 100 bp, Homo sapiens
cctacacttgcctatccagaaagcaacagcagaggtaaaaatgcatttgcaaagggagaaaatgaaggccaaacagaagcaggctccagcttctgcaaaa

SEQ ID NO: 177117 - DNA, 100 bp, Homo sapiens
gtccgcgtgcagcgccaagtcacagagccaacctcgtcggcccgttgctcaggtacctgaatattggctttgtgtctaaagtttctggaactttcctcct

SEQ ID NO: 177118 - DNA, 101 bp, Homo sapiens
cattgccacagttctaccacaacctatgacatcagctatggggaaaggaacagttgctgttcaagaaaaagcaggttaatttggagtggcccctggagtca

SEQ ID NO: 177119 - DNA, 100 bp, Homo sapiens
cagaagttacggcgacagctcctcgcgcagcagcatcaagcattgcacagttctctccaataacatagatcatctcttactgaatttaacactgtctgat

SEQ ID NO: 177120 - DNA, 100 bp, Homo sapiens
caggccgtcgctatgagcgggaccaccctgggcacagcaggcatcggagaatctatctaccgccggggagccagaagatggaggaagctgtaccgtgcca

SEQ ID NO: 177121 - DNA, 51 bp, Homo sapiens
tgggcagcatccagcacctgaagaaccggacgctggagatctatgtgccca

SEQ ID NO: 177122 - DNA, 101 bp, Homo sapiens
cctggagtccaggatcggcggagttcgaaaacgaacttcccacgtttgctatgttgccctttggagacaaaacaaggacccagatgatgtggtaccagttg

SEQ ID NO: 177123 - DNA, 97 bp, Homo sapiens
agagacagaggtcggtgctgaccgctgcacgtcgactgcctaccaggagcaggtgttctcagagctcggtttcccgccagccgtgcaacgctgggtc

SEQ ID NO: 177124 - DNA, 75 bp, Homo sapiens
ctcaagaaagaggtgggcaagatcctgtgcactgactgcgtgtatgtggtagaagaccaaagaagagatgagcta

SEQ ID NO: 177125 - DNA, 100 bp, Homo sapiens
cattttgcacaagggcagtcaccatgaaagaaaccttggctatgaaaggattaacattgaactgtttggggaaaaaggaagaagcttatgaattggttcg

SEQ ID NO: 177126 - DNA, 100 bp, Homo sapiens
caaggaccaaggacgagaccacggaaacctatccgatgtggggaagtactctttgcagcgaatagcacccagtcctgcctggcagaagatcatgcagttt

SEQ ID NO: 177127 - DNA, 98 bp, Homo sapiens
cgagcagtcgcacctggaggttcagctggtaggagtgggagaaggtgctgctgttttttcaaacgaaggaaaaggaaaaccatacagcgccacaaatg

SEQ ID NO: 177128 - DNA, 82 bp, Homo sapiens
caggatctcgggctcggaacgagactgcacggtgcccttgctcgtgtgaatgaacagaggccagagaattgcagaaacccac

SEQ ID NO: 177129 - DNA, 100 bp, Homo sapiens
gggccttccacaccccctccgtgggtgtgtggtgcacttacagagtgctacgatgaactggggaacagatatcagcttccagtgtattgcttggcaccgc

SEQ ID NO: 177130 - DNA, 82 bp, Homo sapiens
cttgagtcagtgcgccgctctccagcccgcttgaacgggaacggcaggagcagctgatgggatatcggaagagagggccgaa

SEQ ID NO: 177131 - DNA, 75 bp, Homo sapiens
acaaatgctccttctcctggagacgcaactcaagcttcccatcgacggtcagtgcgcacgttgtaatcagctgag

SEQ ID NO: 177132 - DNA, 112 bp, Homo sapiens
aaggaaatcatgtcaagcgaagccttgaaaaagctgccctgagacggtgtcccgccgaaagagttgtctgctggttctcagcttgaagaagattctgcagtccttattgatc

SEQ ID NO: 177133 - DNA, 83 bp, Homo sapiens
acgggctgggcgcccccagaagcccgggaacaaacgacgcagagggctctacgtgtttgcacctggctgccaagaaaggccac

SEQ ID NO: 177134 - DNA, 74 bp, Homo sapiens
tcagcggtgggcagtcctagtccgaggtgccaccgtggaaggacagaatgggcccagcactagaagatttcagt

SEQ ID NO: 177135 - DNA, 51 bp, Homo sapiens
tggacagaaagtcagcctcttgtgctcaaagattagaacgactccgaaaag

SEQ ID NO: 177136 - DNA, 100 bp, Homo sapiens
tcgatctgaagtctagaggagacaagtatggcaaattggtcggcgtggtccctggtccagtcggagagccagttctttattggtgaaaacatgaatccag

SEQ ID NO: 177137 - DNA, 88 bp, Homo sapiens
catcaccaagctggaggtggacgccatcgtcaacgccggaccaagaatcgccttcagccctgtctggtgcatccttggcagaaagtga

SEQ ID NO: 177138 - DNA, 75 bp, Homo sapiens
caacgaatcatccacgcacctgcagctctgctgagagagtgcaagccgtggggacttccaatagtagtcagacat

SEQ ID NO: 177139 - DNA, 83 bp, Homo sapiens
cgacacacaaagaatagagttgagcctgtgggacacttcgggtcaaaatgcagatcttcgtgaaaacccttaccggcaagacc

SEQ ID NO: 177140 - DNA, 50 bp, Homo sapiens
ccccggggtgtaataatgttaactgagctctgcagccagatggaacagct

SEQ ID NO: 177141 - DNA, 74 bp, Homo sapiens
tgaggctgatgaagaggaaaacaggtttctaagcatgaattgaggaacagaagaagcagagcagatgatcggag

SEQ ID NO: 177142 - DNA, 100 bp, Homo sapiens
acttcagaaacttcaggaagatgcagttgagaatgatgattatgataaagattcaagtcaatctgaaagtcccagccagccaagtgacgctgacattaag

SEQ ID NO: 177143 - DNA, 74 bp, Homo sapiens
aagatgatgagggcgcggcagtatccttggggcactgtgcagggtaacctgtgtatggtgactggaggtgctaa

SEQ ID NO: 177144 - DNA, 87 bp, Homo sapiens
aagaactgaatgaggctgttagacctctgcaggactatggaatttcagttgccaagtactatactggcaattgctggagaagatttt

SEQ ID NO: 177145 - DNA, 96 bp, Homo sapiens
gaagttatcaagacttttttgaagccatccgcagaaggggagacacattttatgttgtgtcatttcgaagggcatttgcctggtggcctgatttat

SEQ ID NO: 177146 - DNA, 82 bp, Homo sapiens
gagaagcacagcaagaacatcacccagcgcggcaacgtcgccaagacctcggtttatcaggtagaagatgtgtgtgaagaag

SEQ ID NO: 177147 - DNA, 82 bp, Homo sapiens
cggcgatgtgccaccgaggctgaggatgatggtagattgccaggtcttgagtcaccacgtccgaatataattcttgggttag

SEQ ID NO: 177148 - DNA, 71 bp, Homo sapiens
ccagcctgctcatcgcctactgcatttggcaatgaggagcagcagctggcgtgggccaagcgggagagcga

SEQ ID NO: 177149 - DNA, 82 bp, Homo sapiens
gcggggtcacccctcagcacatggtgggggccacaccatttgccgtggccaggctagagggtggcccagttgaaatccttcc

SEQ ID NO: 177150 - DNA, 100 bp, Homo sapiens
tgccgccaggtcatcacccaggaaggctgcacctgcaaaggatggtgccatgacaatggtgtgaactacaagattggagagaagtgggaccgtcagggag

SEQ ID NO: 177151 - DNA, 90 bp, Homo sapiens
acttgaaatgaaaggagattccaacctacttcagctgtgttggggtggaagaggaggaggcgcccgacatcgacatataccactgcccaa

SEQ ID NO: 177152 - DNA, 75 bp, Homo sapiens
gctgatcacttggagtgctgtcccttggaacaggaggagtaagattgagtttccaggttaactaaggtctcagct

SEQ ID NO: 177153 - DNA, 100 bp, Homo sapiens
tcctttctggagtattacgacttctacgaggtggcctgcaaagatcgcctgcaccttcaaggccaaactatgcagtttccagcagacatttccagcataa

SEQ ID NO: 177154 - DNA, 75 bp, Homo sapiens
ccagaggtctcggacgtggccatgaaagtactcaacagcatcgcctacaagtgtgcaccggcacagacatgaagc

SEQ ID NO: 177155 - DNA, 74 bp, Homo sapiens
gaaagcaaaggagtcggggatggctctttctcagattggtgctgaagacatggacggcttccaggcagacacgg

SEQ ID NO: 177156 - DNA, 98 bp, Homo sapiens
gggcgcgccccaccaccgccctcaccatgttcacacaaaagatgttggacaatttctacaattttgcttcatcatttgctgtctctcaggcccagatg

SEQ ID NO: 177157 - DNA, 100 bp, Homo sapiens
cacccgagggccaggctcaggcccgaatccggaacctggaagacagtttgttcacttggaatcgaagcctcttaaaatggcagatgacttggacttcgag

SEQ ID NO: 177158 - DNA, 75 bp, Homo sapiens
aaactgaccgtagggatggccaccagggtccggacagcttctatttggtttcagagtcaagtggtgagatcaaag

SEQ ID NO: 177159 - DNA, 88 bp, Homo sapiens
agtggaggactacagagccggtgatatgatctgtcctgaatgtggcttggttgtagatccagacctctctgatatgaagaataatgag

SEQ ID NO: 177160 - DNA, 50 bp, Homo sapiens
tctccgtttcctggatgtgaacgtggataattactgtaccttcctcatgg

SEQ ID NO: 177161 - DNA, 75 bp, Homo sapiens
caaggagaacctggagctcaacggcagcatcctgagtggttacatgttctctcgcattgaggaagagcatttgtg

SEQ ID NO: 177162 - DNA, 98 bp, Homo sapiens
gttcccggagatgcggcgcgcagttgtggaagctgatcgaggaagcctaagcaggctctgtgaagtgggaatagtggtatttgagtcaaggtttgctt

SEQ ID NO: 177163 - DNA, 100 bp, Homo sapiens
gaagaagatgaaatggaggagtccacaaatcgaccaagaaagaaacagaagacagaacagttgggactaacaagggtatctctgatgaatatataacacc

SEQ ID NO: 177164 - DNA, 100 bp, Homo sapiens
tccactccgtcccccgcgggtctgctctgtgtgccatggacggactcggtgaaatacctggagtgctcagctctcacccagagaggcctgaaaaccgtgt

SEQ ID NO: 177165 - DNA, 100 bp, Homo sapiens
gatttgggtcgcagttcttgtttgtggatcgctgtgatcgtcacttgatgaaccggacgacccccgaccaggagctggtgccggcgtcggagcccgtgtg

SEQ ID NO: 177166 - DNA, 82 bp, Homo sapiens
ggcgcgctggagcaggagcggggccggaactggagccgaggcgcaggtggcgctggcctgggctggaagctcttctacgtca

SEQ ID NO: 177167 - DNA, 90 bp, Homo sapiens
ccctcccctggcagtgtgacggctgggcgacttgcgaggatgagagcgacgaagccaactgtccagatcctggagccaggccgcagggag

SEQ ID NO: 177168 - DNA, 121 bp, Homo sapiens
atttgacaggaacatcgcctctttccatcgaacattccgagaatgcgagagaaagagcctccgtcaccacataggacgcttgactttcagggatgtggctatagagttctctttggaggag

SEQ ID NO: 177169 - DNA, 90 bp, Homo sapiens
tcagcggccgcgaccgagtcatggctgagacctacgagcccacacgatgaagacccccaggcagtgacgtatgccaaggtgaaacactcc

SEQ ID NO: 177170 - DNA, 88 bp, Homo sapiens
ttgagccaggccgaccccgacccggactcggacaagatcttgagccagatgattgtgcatccatttacatctttaatgtagatccacc

SEQ ID NO: 177171 - DNA, 90 bp, Homo sapiens
ccctgggccacctccacgactcataccccacagaccactatcacctcgatcagggaaatgaggcaagttatcctttggaaatgtgctcac

SEQ ID NO: 177172 - DNA, 100 bp, Homo sapiens
cctggacaccgggcgcaggagggcagcaccagaggccagtggcactcccagctcgaagctgttaaacaaggtgagcttgggccatgcggccaggtgtgca

SEQ ID NO: 177173 - DNA, 96 bp, Homo sapiens
aaaaacaaccattgaaaacatccagctgcctcatactttattatcaagtaatgttgcaggtcagtggaatccagtttttatgcagcctctgccaga

SEQ ID NO: 177174 - DNA, 100 bp, Homo sapiens
aaccggatatttaagtacaatggtgggcttaattttagttggtgagtttgtaagtgatgcccttctcgttcctgacaagtgcaaattcttacaccaggag

SEQ ID NO: 177175 - DNA, 82 bp, Homo sapiens
aacagcaggcacccaagcgggcggcagatggacagcaaatttgggagatggaagccacggtggataaggacaagagccagcc

SEQ ID NO: 177176 - DNA, 74 bp, Homo sapiens
ctcagcctctccccacagagaatgcatcccctggcaggggcttctgctcacagcttttgcctaccaaaaagttt

SEQ ID NO: 177177 - DNA, 100 bp, Homo sapiens
gaacaagttaaaggagtcagcacagtgcgtcggggacgaattcctgaactgtaagctggctaccagggccaagaccatcaacgcactgaaggggaggatc

SEQ ID NO: 177178 - DNA, 101 bp, Homo sapiens
ctgcgctctgcccggcgagtcgggctctggaggaaaagaaagggtgttttgaatgctgtatcaaatgcctggggggcattccctatgcctctctgattgcc

SEQ ID NO: 177179 - DNA, 100 bp, Homo sapiens
ccgttctccaaagccccgtggaaaagttaaagatgctcattttacttacaggttaactgaagtccaaaagatgtctaggagaacctggagatgtagctac

SEQ ID NO: 177180 - DNA, 51 bp, Homo sapiens
tggagtgaagggcgtgttctgtgcaggctatattcccaaagcttggattag

SEQ ID NO: 177181 - DNA, 75 bp, Homo sapiens
gcagcctggtgcagatcatctacgacgagaaccggagcaaatcatggaggaagataaaaaacatggtgcactggt

SEQ ID NO: 177182 - DNA, 100 bp, Homo sapiens
aaggcggagcagagttcttctcaggagaagtttgaagtgcagcactctgaaggctaccggcagatctcagccttggaggatgacctcgcgcagaccaaag

SEQ ID NO: 177183 - DNA, 99 bp, Homo sapiens
gcatcctcagcatggccaactccgggcccaacagcaacaggtctcaattacctgcctagagctggaacgttacctccagagcgagccctgctatgtttc

SEQ ID NO: 177184 - DNA, 75 bp, Homo sapiens
ctggagtacagaggatatgattctgctgtgaaattaaatggtggcagacatgtccaaggaatattgcggggattt

SEQ ID NO: 177185 - DNA, 49 bp, Homo sapiens
agcctgacgcgggccgcgcggtttggaaattttagcattcaggtgccag

SEQ ID NO: 177186 - DNA, 100 bp, Homo sapiens
tcaagatgaatatgaccctatggaagcagaagaagctgaggatgaagaagatggttgtactccaggatttagataaaaaagaaaatggattacgtgatat

SEQ ID NO: 177187 - DNA, 75 bp, Homo sapiens
atagtgtcatcggttcggtaaagtttctgttctctggttgcccgaagctcagcagagagtcggaggctgcttttt

SEQ ID NO: 177188 - DNA, 90 bp, Homo sapiens
ccctgtgtgacaccaagataagtaacgtactgggcctaatcgctacgtgcctctttggctatgatgcctatgtcaccttccccgttcggc

SEQ ID NO: 177189 - DNA, 75 bp, Homo sapiens
gttccatcggctgaggagcattggtcagggaagtcaaagatgcatccctgagttcttcctagcaggcaagcagcc

SEQ ID NO: 177190 - DNA, 90 bp, Homo sapiens
caaagcctcttctgtttccaatgggaatcccgtcacggggctgctgtcagccagccatgagcagaaggatgcctgggtgcgggataacat

SEQ ID NO: 177191 - DNA, 75 bp, Homo sapiens
tttgaactactgccggagcttctgccagatctctgacatctacattagtggagaatcaggggatatgtcagccaa

SEQ ID NO: 177192 - DNA, 82 bp, Homo sapiens
ggggcgctacggaggtagtcaccgccacatccaggactccttccacagaggggactcattctcacagttccggtttgctgag

SEQ ID NO: 177193 - DNA, 75 bp, Homo sapiens
aaattttgctactgtcagatggattgactatggaaaagttgccaaattggccaagcagatagaacttcagttcac

SEQ ID NO: 177194 - DNA, 82 bp, Homo sapiens
cgagaactatttgcctggggccgtggagacagcgttatgcaaagggtgacctggacatatcttacatcacatccagaattgc

SEQ ID NO: 177195 - DNA, 50 bp, Homo sapiens
ggattccaagtaactcttatttggttatgagtgccagtgagccgccttag

SEQ ID NO: 177196 - DNA, 98 bp, Homo sapiens
acaaatgcatttctagtggctacaaatgcccctcagttttcaatggttccagcaggtcaacacgggagaaggaacctgttcaaaaacacaaaagcaaa

SEQ ID NO: 177197 - DNA, 98 bp, Homo sapiens
ctgggacagcgccacattcgccggattgaagcactgaagtcattctcaaaatcagacctggtcaactggttcaaggcccatagagggccaggaagtaa

SEQ ID NO: 177198 - DNA, 89 bp, Homo sapiens
gaaagaagtggtcttggaaaaccagaagaagttagaaggtatccgaccggagagcccagcccagctctagaggacaaaatcccagtcct

SEQ ID NO: 177199 - DNA, 75 bp, Homo sapiens
taatgcaatagaagctgtggatgaatttgcttttctggaagatgcgatatggtagagcgcttcggtgaaagtaaa

SEQ ID NO: 177200 - DNA, 113 bp, Homo sapiens
gagcagcgccagcggccgagcgggcggcttcctggcctgggcgctccggtggcggcggagctacgagttccagggagctctgtcctggtgaccgtgcccgggttatgacgact

SEQ ID NO: 177201 - DNA, 75 bp, Homo sapiens
agtgtgcctgcaacctgtccggggatcccagggaggaacgaatgcaggaatttgggaactgagctgtgcaagtgc

SEQ ID NO: 177202 - DNA, 95 bp, Homo sapiens
ccgctgcgttacccggaaccgccgggccgaacagcatgacgtccgctttggagaactacatcaaccatttgctaatggtcgttctactgggctga

SEQ ID NO: 177203 - DNA, 100 bp, Homo sapiens
ggctgggcatcctcctgagactccggggtcagacgcccactccagcatgcccagcaagatcgggcccttacccagacagacaggaagatcgaaactgagg

SEQ ID NO: 177204 - DNA, 75 bp, Homo sapiens
tggtcccctgctttaaccatcgaaaatgaggtcctagctggactgctgcaccttggcaatatccagtttgctgcc

SEQ ID NO: 177205 - DNA, 75 bp, Homo sapiens
ggagattctgcagagcttcagccgattcacacggacagtggtgaccgaggattttagccacttgcccccagagca

SEQ ID NO: 177206 - DNA, 100 bp, Homo sapiens
ggaaagattgcaaggtgaataaagaagtggagcgtgtcctgaaggagttccaccaggccgggaagcccatcggtggagaccatcctgggcctcacaggag

SEQ ID NO: 177207 - DNA, 100 bp, Homo sapiens
gagtagaaggagcatcgatgcaggtaacacgtacacagacctctcggccggaatctccagggatgaccagcccctccccacgcatccagataatctccac

SEQ ID NO: 177208 - DNA, 100 bp, Homo sapiens
agttgccctcagaaaagaacttggaatatgatgatgaaaccatggaattgattctgccttctggtgtcatggagaaactccagctgggcccagagattct

SEQ ID NO: 177209 - DNA, 101 bp, Homo sapiens
gttttataaactgcctggccgaatcagccttttcacgctcaaggcctagccgcccgtgactctcacactgtctcctgcatgacgggtggcgcctcccgcag

SEQ ID NO: 177210 - DNA, 90 bp, Homo sapiens
ttcaaaacacagcattttgtcagtgcaaaaacaatgccagagctgtacgaccttgttaacagatgggtgaccacactgaagtcttgaagg

SEQ ID NO: 177211 - DNA, 75 bp, Homo sapiens
gccctcaaggccatgatcaaaacgctgttactgaggcggagacacgggtgatgattggctttctggggagagagg

SEQ ID NO: 177212 - DNA, 107 bp, Homo sapiens
aagatgaatacaaaaagcataggcggaccatgataatttccccagagcgtcttgatccttttgcagatgatgcaactgtgaaagttccttttcttaagaaatgcaag

SEQ ID NO: 177213 - DNA, 75 bp, Homo sapiens
ttggaatatctggagccatccaacatttagctgggatgaaagacagcaaggactggaaggatcaccagcacatat

SEQ ID NO: 177214 - DNA, 100 bp, Homo sapiens
gagggggcagtcccgggagaacctgcggcggccggagcggagttcaaagaaggacgcagagccagccacacagccccacaggtcctctttagccacaggg

SEQ ID NO: 177215 - DNA, 74 bp, Homo sapiens
tgaggatggtgattatcactggaccaccagaggctcagttcaagaaaacgttgtgtgacgtgatcctcatggtc

SEQ ID NO: 177216 - DNA, 100 bp, Homo sapiens
ggacctcaagcgttggaggtagcagacttttcagcagaaggtagcctttccagtaaatatatgactcagggaaaagcctcagcgaagaggacccagcagg

SEQ ID NO: 177217 - DNA, 83 bp, Homo sapiens
cgttcggccaagggaccaaggtggaaatcaaacgatgtccccgagcagcggagcatggagtaccctaagctgtatgagccggg

SEQ ID NO: 177218 - DNA, 75 bp, Homo sapiens
ttgaagcaaagctgcaggttttaaaggtaattaataaaatgtctccaacatctctaaagatcacactaaggcaac

SEQ ID NO: 177219 - DNA, 82 bp, Homo sapiens
caaccgaagatcaccatctctggaaaggtcctacaaaaaagagtataagagatctggaagtttgcattgagactccttgcat

SEQ ID NO: 177220 - DNA, 100 bp, Homo sapiens
cctacctgaagtatgccattagttcccaggttatcaatagtctggctgtctatcgtcatcgtgagactgactttggtgtaggagttcgagaccaccctgg

SEQ ID NO: 177221 - DNA, 74 bp, Homo sapiens
tggctcggatgcactgctgtgatgagctgcagaaccttggcctgaaaatgctacattatatcagcaattgaaag

SEQ ID NO: 177222 - DNA, 90 bp, Homo sapiens
catgagcaaagctcaccctcccgagttgaaaaagaagtcaaagtgaattgggcaacaacccctagcagtcaaaagaaagatacaagcagt

SEQ ID NO: 177223 - DNA, 82 bp, Homo sapiens
tggcatggacaatcacagtggtggtggtgggggtagcaggctcagcaggagttgatgaagcagctctccatccttcctcgtg

SEQ ID NO: 177224 - DNA, 78 bp, Homo sapiens
ctcaggcggcaccctgtccccgaggaggggaccatgacacagtttgtttgtaaaaacaatggtgtgttgtttgaaaac

SEQ ID NO: 177225 - DNA, 75 bp, Homo sapiens
attgttcctaaaccagaagaggaggttgcccagaagaaaaagttaagtgggcagaccaacatccacctcagcaaa

SEQ ID NO: 177226 - DNA, 92 bp, Homo sapiens
cgtcctggaattacttcaatcaaggcacctcaacacctttgcttcgaatagcctgggctcgaatcatattggatgaagctcacaatgttaag

SEQ ID NO: 177227 - DNA, 101 bp, Homo sapiens
gtggagccggggcgccgacaagatcgagggggccaatggcccactgcgtgaccttggttcagctgtccatttcctgtgaccatctcattgacaaggacatc

SEQ ID NO: 177228 - DNA, 110 bp, Homo sapiens
tttacgtgcacaacagcagcttgaacaagaatttaatcaaaagagagcaaaatttaaggagttatatttggctaaagagggtgaactgcgccaggccactgtggccatga

SEQ ID NO: 177229 - DNA, 78 bp, Homo sapiens
taaggattccaagtaactcttatttggcagtcatggatcaggtaatgcagtttgttgagccaagtcggcagtttgtaa

SEQ ID NO: 177230 - DNA, 80 bp, Homo sapiens
cgatccagcctgcggagcctgtggggcaggtgcctgagatcatcagctccatccgtcaggcggggaagatcgcccggcag

SEQ ID NO: 177231 - DNA, 80 bp, Homo sapiens
acgactcaacccatctgtgtggaagccttctctggtctgcggctcaggtgtcaggcccttgaaaggaaaaattctgcaat

SEQ ID NO: 177232 - DNA, 100 bp, Homo sapiens
atgatttatagctaagactccaggacacccctgaagccgagaaatgttactgtaaaatggggaaaggagaaatttgaaggtgtagaattgaatacagatg

SEQ ID NO: 177233 - DNA, 124 bp, Homo sapiens
gaaaggactgttttattgcatgtggatgcaggacaagccactcctccaggctgcattgcgtcagattactgataaagctcgtgaatttggagctggtcctttgtttaatcagattcttcctctg

SEQ ID NO: 177234 - DNA, 100 bp, Homo sapiens
aatgctcttggtgctgttcctgctgctgcctatcttgagttctgcaaaagctcaggttaatccaggtatgaatttcagccctttatttccttctaatttt

SEQ ID NO: 177235 - DNA, 100 bp, Homo sapiens
cacccaagatggagttcctcctggggaacccgttcagcacaccagtggggcagtgcctcgctttggtgtcatccccagcactcctctggccatccataca

SEQ ID NO: 177236 - DNA, 83 bp, Homo sapiens
cgaccccgtcccgaccctggccgccccgagcggagcctggagttggaatcgaagcctcttaaaatggcagatgacttggactt

SEQ ID NO: 177237 - DNA, 75 bp, Homo sapiens
ttgggaaacaaggcttccagtgccaagttcagaatgaccgaagaagcatgccgaacacggagtcagaaacgagcg

SEQ ID NO: 177238 - DNA, 80 bp, Homo sapiens
cgatattgatattgaagcaatgcttgaggctccttacaagaaggttgattgtacacagcactatgaactctgctccggaa

SEQ ID NO: 177239 - DNA, 108 bp, Homo sapiens
cccctctcaggacaacccagatgtgcaacaaagtgcgatgatggactcaccctgtcacccaggttggactgcactggcctcaacctcctgagttcaagtgatcgtccc

SEQ ID NO: 177240 - DNA, 75 bp, Homo sapiens
ctattatcagatcaaccaccaaagtgggaaacattgaaatcaaggcttgcagatcagatgagaatgttgaatttt

SEQ ID NO: 177241 - DNA, 50 bp, Homo sapiens
gggcgcaggaggcggtgcacagcgccaagagtgtggaaggagaacaccat

SEQ ID NO: 177242 - DNA, 51 bp, Homo sapiens
ccgggaccaggaccgggccccactttccataagaagatcttaaccttgggc

SEQ ID NO: 177243 - DNA, 51 bp, Homo sapiens
gagacgcgaaggagaggccctagaaccgtatcactggacaggccatggctc

SEQ ID NO: 177244 - DNA, 104 bp, Homo sapiens
gtggtcttcaaatctctcattacaactcatcatttgatggtgtatggaaatgagcttagcagtgtctgcaaaaacgaatcttttcctacaacctgttaactgac

SEQ ID NO: 177245 - DNA, 90 bp, Homo sapiens
ctgtgtgagggaaagaaaacaatttctcctgctctgcagcttctgttcaggcagtatttggcagtcgtattcagagataaacccctggag

SEQ ID NO: 177246 - DNA, 80 bp, Homo sapiens
tcccagagaccctgaagcggtggagagactctctggagttcagctgagtggatgaagccctttgactcacgtgccaccag

SEQ ID NO: 177247 - DNA, 100 bp, Homo sapiens
gttttcgcaaagaaacgaacaacgctgctattataaatttccatggtgtcagtgattcatattcctgataggacttataaactatcctgcagaatattgt

SEQ ID NO: 177248 - DNA, 51 bp, Homo sapiens
aaacatctcaccaatttcaaatctggtgaaatgacaatggatgctctgttg

SEQ ID NO: 177249 - DNA, 90 bp, Homo sapiens
tttgtccttctgctattgatcctgaagtttttggctttcacccccaaccagtgaccaaagacttgaccactcaaagtccagctccccaga

SEQ ID NO: 177250 - DNA, 100 bp, Homo sapiens
tattggagaaccacagccttctcagtatggaccaaagtacccaagcctgtgctggtgagaaacattgccataacagaaacctctgcgccatgagagccaa

SEQ ID NO: 177251 - DNA, 100 bp, Homo sapiens
tctgccagcaccttgatcttggtccagccttcagaactatatgaggccccaggattcctggcgaggtcctcctccccttttccagcagcaaaggtttgac

SEQ ID NO: 177252 - DNA, 110 bp, Homo sapiens
tctccgggctacatctggaaagaggccctccaacatgaagagggtggaacaggaggattttgtaatggaagggcatggcaagactccacctcctggtgaagaaagcaaac

SEQ ID NO: 177253 - DNA, 100 bp, Homo sapiens
gccgtctccccagacacggtgccctcgtacctcactgcctgagagaagtagaaggttttagatggagcaggattagatattgatttccatcttgcctctc

SEQ ID NO: 177254 - DNA, 100 bp, Homo sapiens
ctttccggatcaatccagatggcagccagtcagtggtggagttaacttaccaagactggttacacctggagctggaaattcaacctgaagctgatgctct

SEQ ID NO: 177255 - DNA, 98 bp, Homo sapiens
tttaaaaaaacagaaaactctgaaaacctcagtgttgatctcacctatgatattcagtctttcacagatacaggatctgccagagcatcttttggaga

SEQ ID NO: 177256 - DNA, 100 bp, Homo sapiens
tttagtggcagcatgaagcgcaccccgactgccgaggaacgagagcgcgaagctaaggttgcagttgttctgatggatacccagggggcatttgacagcc

SEQ ID NO: 177257 - DNA, 101 bp, Homo sapiens
gcattttggaacacatccaggaaaagataactttcgacacacctgtagacgttcgccaggtaaaggttgattcttcaccacactgaaaccattaggaaaaa

SEQ ID NO: 177258 - DNA, 100 bp, Homo sapiens
cttgtggtgcggcctcaccatacaggaacagggcagacgttagcgtgagtgatcactctcaatcccggtgccacaatagagtgatatttaagcaactcct

SEQ ID NO: 177259 - DNA, 100 bp, Homo sapiens
cagtctccgtgccgcccagaccggccaggtggacggcgagcttatccgtggtctggagcaggatgtcaagacggcaactctgtaccctggtgtggttttt

SEQ ID NO: 177260 - DNA, 80 bp, Homo sapiens
accacggccgcctgggcatcttccctgctaattatgtggaggtatggcgttgacggtggatgtggccgggccagcgccct

SEQ ID NO: 177261 - DNA, 89 bp, Homo sapiens
gactctggcatttaccaggtcaaggtggaggatgctgtggtcttctccacagaactggaggccagtgcccagctccatgaccttctcca

SEQ ID NO: 177262 - DNA, 74 bp, Homo sapiens
ccatcaaagagatcagagaccagggctcctgtggctcctgctggcagggggagttactaccagggctctttggg

SEQ ID NO: 177263 - DNA, 74 bp, Homo sapiens
aaccctgccaaatacatcagcttgtaggagacagagttcagattctgaaataataggttatgctttggacacac

SEQ ID NO: 177264 - DNA, 100 bp, Homo sapiens
gactgtctgaacgtgctgaacaagagcaacgaggatggcagtggcagcaccatgatgcaaaccaagaccttctcctcttcctcctcatccaagaagatgg

SEQ ID NO: 177265 - DNA, 100 bp, Homo sapiens
gaaccatggaccaggccctcaagtccctgatggcctcagaggaggagggagagaaatacatcgatctgaggcattagccccgaatcacttcagctccctt

SEQ ID NO: 177266 - DNA, 97 bp, Homo sapiens
tttatacacagagacattaaaccagataacttcctaatgggtattgggcgtcactgtaataagatacactgcctctaggactgggacagatagccac

SEQ ID NO: 177267 - DNA, 100 bp, Homo sapiens
cgactggcccagtatccaggtcgaggttctgcagaaggttgtgactttagtatacagtgatgatgtaaaatctaaagattacattgttgcactacagcac

SEQ ID NO: 177268 - DNA, 154 bp, Homo sapiens
tcgcgcccgcgtcgcggcagcacctgggcagccccgcacgccgtgcgcgtcccgagcccgcggggcagctaccgctcgtctctgaaagccactcggaatttctccatctcagattggagcaagaactttgaggttgttttccaggatgaagaag

SEQ ID NO: 177269 - DNA, 97 bp, Homo sapiens
tgtcctcaccagtcgggacttcagctgaacctctgagtgccaaggacaccactggaactcacaaagagaaaaaatgatccctatgctcttgcatccc

SEQ ID NO: 177270 - DNA, 75 bp, Homo sapiens
gccgaggctgttgctgttgatctgtgctaaagtctccagtgaatattgaattgctgaggattttgggaaaagaca

SEQ ID NO: 177271 - DNA, 83 bp, Homo sapiens
gttctggtttgacagcaccaggaatcctccatcatcaatgaggacacagaatgatatcatcaagttgaatcgaaaggaaggga

SEQ ID NO: 177272 - DNA, 50 bp, Homo sapiens
ttcaagaccagcctgcccaacatggtgatccacccaccttggcctcccaa

SEQ ID NO: 177273 - DNA, 100 bp, Homo sapiens
cagcaagggctctgtgtgcccaggatgcgccggcctccagttttgggaggtcatcagtgatgagcatgggattgaccccactggcagttaccatggagac

SEQ ID NO: 177274 - DNA, 114 bp, Homo sapiens
gcctggtgaacgggtccacgttcgtgctacagaagaagggcatcgtgcgtgccaagcggcgaggtttgaagactgcttcattctgcctctagtaccagcggtttctctgttctg

SEQ ID NO: 177275 - DNA, 100 bp, Homo sapiens
gtctttttgttcaagataaagtgattttttgcctttgttgattaactggacaaattcagagaaaatattctctttggaatgggaaatcctctgcttgaca

SEQ ID NO: 177276 - DNA, 78 bp, Homo sapiens
cgctgtcattaaaaattaagcgtggcttttgaggaagatgtgacaactaccggagaattgatgaattgcaagtttgtg

SEQ ID NO: 177277 - DNA, 75 bp, Homo sapiens
ccctcatcctggttctggaatcctcagttcaaggctcttctcaaccatctgtgagtccaggggaaccgtctccac

SEQ ID NO: 177278 - DNA, 75 bp, Homo sapiens
ttccacgtggattctccagacgagagaaatgggacgtcggtcatcagatactgaagaagaaagcagaagcaagag

SEQ ID NO: 177279 - DNA, 75 bp, Homo sapiens
ctcaccaaaactttctctcttgataaggttcaaaccttgtactactcagctgatcacaagctgcttgatgggaac

SEQ ID NO: 177280 - DNA, 101 bp, Homo sapiens
cgactcccccggctcttagactataccaaacgattccctggttatgattctgaaagcaaggaatttaatgcagaagtacatcggaagcacatcatgggcca

SEQ ID NO: 177281 - DNA, 75 bp, Homo sapiens
taagagctgggcaccaggaagcgaaggctggttgtgtcgccaggctggagggcagtggtgtcatctcggctcatt

SEQ ID NO: 177282 - DNA, 73 bp, Homo sapiens
gctcctgtgacttcaagtgtcggtgcaagctggcccaggccaatggttggggcgtcatggtgtctcatcgttc

SEQ ID NO: 177283 - DNA, 100 bp, Homo sapiens
gacggcggaacccgtgggcctgtggactgcagcctcggcggtcagcagaactgtttgaggcgaagagatgctggtttgttgaatcagttgcaagagcttg

SEQ ID NO: 177284 - DNA, 100 bp, Homo sapiens
tttatttctttggagacaaaactatgccagttatcaatactctggctgaccatcatcatcgtgggactgactttggtggaagtccttggttacatgtcat

SEQ ID NO: 177285 - DNA, 100 bp, Homo sapiens
caggggcagtggaggctggctgctgaaggatgaacggagaggaagaattctttgatgccgtcacaggggtcgggccccggctcagtggtcccaggcagct

SEQ ID NO: 177286 - DNA, 90 bp, Homo sapiens
ggaagtcggacgtgggcgaggggcggggtgtctggactggaacctctgggcccacgccccttcacagatgtagtcactacaaatcttaaa

SEQ ID NO: 177287 - DNA, 74 bp, Homo sapiens
cagtgggcgctgagagcagcaaggccagattcatgatgttgctatcaaaagttgagaaattgtcagaagaaatc

SEQ ID NO: 177288 - DNA, 75 bp, Homo sapiens
cacaaacactcagagtggaaaaagtaccatcatttgaaacagatactaaaatgtctgatgatgctggtgacacct

SEQ ID NO: 177289 - DNA, 75 bp, Homo sapiens
cgcgctgctgctggccgcacgcggggctgctgcccaagattcaagtcaatctgaaagtcccagccagccaagtga

SEQ ID NO: 177290 - DNA, 100 bp, Homo sapiens
agacagccgcccagaacctgtacgagaagacatacctgcccgctgtagatgagaaactcaggacctcaggcaccttcccgacctccgcagtggcccaggg

SEQ ID NO: 177291 - DNA, 82 bp, Homo sapiens
accatggcttccgaggagctgtacgagacttcccaagtaagaagcggaagaggagccgctggaaccaagacacaatggaaca

SEQ ID NO: 177292 - DNA, 100 bp, Homo sapiens
ggaaagagaagactgtttaaaacctgttgagaaggtactgatgacatggagattaatttgacaccagtccctcagagtggaagtagtggaggaagtggaa

SEQ ID NO: 177293 - DNA, 78 bp, Homo sapiens
tcgaggcccggctggcgcacctgggcgtgcaggatggagatgaagatgaggaagctgagtcagctacgggcaagcggg

SEQ ID NO: 177294 - DNA, 83 bp, Homo sapiens
catctacacaatgattaatccagtgccgcctggaggcagccggtccaacagctgttgcgcagccattggtacctgtattgggg

SEQ ID NO: 177295 - DNA, 82 bp, Homo sapiens
atccactcctcaagaggagcagaccaaagaggggaaggtgctgagctactggtgcttcagtcccggccacagcatgcacgag

SEQ ID NO: 177296 - DNA, 75 bp, Homo sapiens
gcggcttcgagctctcctctgatggcaggacctgccaaggagcaggccgggctctcgccatgggtcactgtcgcc

SEQ ID NO: 177297 - DNA, 76 bp, Homo sapiens
acggaccgcacgcctcttctaccgggcgccccacgggccgaagccgcttttggaaagaacaaacagtggatttgaa

SEQ ID NO: 177298 - DNA, 113 bp, Homo sapiens
agggcttgggaaggggaaggaaacctctctgaaatctgacacctgctctcccggcaaggaaacttcgcaggctggccccttcacagatgtagtcactacaaatcttaaattgc

SEQ ID NO: 177299 - DNA, 75 bp, Homo sapiens
ccaggggtacaggaggcctctgggtgaaggcagaggctaacatgggccctgaaggatggctgccatattgggaga

SEQ ID NO: 177300 - DNA, 96 bp, Homo sapiens
gcggatggcccccggtgcaagaggcgcaaacaagccaatcccaggaggaaaaacgcttggatttacactgggcaacgtggttggaatgtatctggc

SEQ ID NO: 177301 - DNA, 74 bp, Homo sapiens
ctgcagaggtgctggagctggcagacaagaagatgtttgaggtgaagcggcgggagcagctgttggcactgaag

SEQ ID NO: 177302 - DNA, 95 bp, Homo sapiens
agaggatataccagaccctggagtgaactggattccatgtagagacccctggagggatagctgggagtatggccaccctgctccacgatgcggta

SEQ ID NO: 177303 - DNA, 95 bp, Homo sapiens
ttccagaaagccaaagagaggcttgaggccaagcaccgagagagaatgtcccagatcatgtttgagaccttcaacaccccagccatgtacgttgc

SEQ ID NO: 177304 - DNA, 100 bp, Homo sapiens
tgcacttcgcattttggcattgacatttaattttagggtcctttatatagaagggagagtagtcctcatcaccgggggcatcgtggccacagctgggcgc

SEQ ID NO: 177305 - DNA, 100 bp, Homo sapiens
tatgcatgctgcttttgatgtctgacaacgtggatcgttgttttgaaactatcaccttttgccatgatagcatttctttcattggacagttccttacaag

SEQ ID NO: 177306 - DNA, 100 bp, Homo sapiens
gggagctaggccggcggcagtggtggtggcggcggcgcaagggtgagggcggccccagaaccccagggaagagcctaggttccaggtgccttttcagttg

SEQ ID NO: 177307 - DNA, 100 bp, Homo sapiens
ctttctttctctgtagttggaggctggcagcgaagaagatcgaaaattaaacctcaggttgatatccctgaaagtacttaatagcatcgtgctgttgggg

SEQ ID NO: 177308 - DNA, 100 bp, Homo sapiens
caaaaaccaactgaagcagctgacagagttccaggaatggatggaggtgctttaactgatacaagtctcacagattcctattttagcaccagctttattg

SEQ ID NO: 177309 - DNA, 100 bp, Homo sapiens
caggctcggcgccggtaggaagagtcagaggggtgaccagagagcccaacgcctggtgctcaagactttctccgaggaggaatgttattgaagccgttta

SEQ ID NO: 177310 - DNA, 80 bp, Homo sapiens
agagccgggtcctccagaacaccaggcacccgttcctcactgtcaaaatgcagatcttcgtgaaaacccttaccggcaag

SEQ ID NO: 177311 - DNA, 100 bp, Homo sapiens
ggagggccgtcaagatcctcaagaagaagaagttgcgaaggatccccaacggggaggccaacgtgaagaacgtccgtctccaagagagtatgaagagagt

SEQ ID NO: 177312 - DNA, 80 bp, Homo sapiens
ctggcccacacctatcaaagccccctgctctactgtgacctggaggaagctcttcgtgggcggtcttgactggagcacga

SEQ ID NO: 177313 - DNA, 88 bp, Homo sapiens
ggctcaagtactcccagagtgacctagaacagaccaagacacgacatctagccctgaatctgcagacggagtctcgctctgtcaccca

SEQ ID NO: 177314 - DNA, 75 bp, Homo sapiens
caggaatgggacctcgagtcactgtggtaagaatgattgatgttggctgatattggagtgctcattcacatgaag

SEQ ID NO: 177315 - DNA, 89 bp, Homo sapiens
gagcagtgggcgctgagagcagcaaggccagaggtactcaagacaattgacgagggagatgccgatgaggtgacgaagcagaggattca

SEQ ID NO: 177316 - DNA, 87 bp, Homo sapiens
tctcctatactgtgggctataaagaagggcttttatcttgtgatgttgatgatggagacacagtgacagatttcatggcccaagagc

SEQ ID NO: 177317 - DNA, 95 bp, Homo sapiens
ggagatgggcagacggattcatttagagctgcggaacaggacgccctctgatggaacccgagcgtcatgttagggtgaagcagaggacctcagtg

SEQ ID NO: 177318 - DNA, 100 bp, Homo sapiens
cgaaagtgctcgggaagagggagagcaaacttggctcagcccaaggaagaagcccctccagatggtgctgttgccgaatacagaagagaaaagcaaaagt

SEQ ID NO: 177319 - DNA, 100 bp, Homo sapiens
tctacgaggaactgaagacctccactgccatcctgtccactggcattggcagccattgctgtgaattacgtgagggaaagatattgaagaggagttggac

SEQ ID NO: 177320 - DNA, 83 bp, Homo sapiens
gaaaattaagcagatgctccagtttgagaaacctggatctgcgatctgtttgtggttaaatggaaaccacccttgggaactgg

SEQ ID NO: 177321 - DNA, 100 bp, Homo sapiens
ttgtcaccataggagacatggacgaagccttcaaatccatcaagctcatcaaaagattttcagctgaactctcatctctcaacactggcaaatattcata

SEQ ID NO: 177322 - DNA, 99 bp, Homo sapiens
agttttgtaaaatctggagtcttcaatgtatcagaacttgtaagagtatccagaaatggaagcccttacacttggtgggttggcaaagccaacgagaag

SEQ ID NO: 177323 - DNA, 100 bp, Homo sapiens
tcctccctcacgggcggcggcggggccgagcgcggccctgcaggcgatgtcgccgaaaccgggctgcaggcgggaaccacgtgaatgttgagggggcgac

SEQ ID NO: 177324 - DNA, 75 bp, Homo sapiens
tctgtcttctctgcagtgggagcagacgttatgaagaggacatgtactggaggagaatggaggaagaacaacatc

SEQ ID NO: 177325 - DNA, 100 bp, Homo sapiens
cagcacaaaattaatctcctgcagcaacagatccaggagggatttgttcgtgttgaccgagattatgtgctgaagtctgcagagctggcaaaagctggag

SEQ ID NO: 177326 - DNA, 100 bp, Homo sapiens
acagtagaggagctttaccgcaattatggcatcctggccgatgccacggagcaagtgggccagaattctgcttggtcagaatcgtgatggcattgtgttc

SEQ ID NO: 177327 - DNA, 75 bp, Homo sapiens
tgctgcaaactgtgaaatggtttttagagttcagatgcatcttctcactaggagacggtggctcagggagtaaag

SEQ ID NO: 177328 - DNA, 90 bp, Homo sapiens
gcgaggcgcagggctctcccacacttcgcgccgccaatggcaagttggagggagagatgcaaataccagagctgaaatatgctaataccg

SEQ ID NO: 177329 - DNA, 82 bp, Homo sapiens
gcgaagctgccaaagccttagacaaatggctctgagagattcctctgcgaatctgtttttagctatcaagtggcatccacgc

SEQ ID NO: 177330 - DNA, 75 bp, Homo sapiens
cggagtatcagccctgagtggaagcagcagaaatacccgcagcccaaagggcagaagaagaagaagatcgtcaag

SEQ ID NO: 177331 - DNA, 85 bp, Homo sapiens
gctaaactgtgtggggcgcggatgggatccagctgttagtcgggtaggcatagtctattgcgtctgcagacatggatttcaacca

SEQ ID NO: 177332 - DNA, 50 bp, Homo sapiens
cttggaccgtttttccccaaagaggcaatatggtagcaaaaatcgtgtct

SEQ ID NO: 177333 - DNA, 82 bp, Homo sapiens
tcctccgtcaccagccacatctaccaggtcagcccaaggccaaccccactgtcactctgttcccgccctcctctgaggagct

SEQ ID NO: 177334 - DNA, 100 bp, Homo sapiens
tgaagagcctcaagtcccgcctgaggaggcaggacgtgcccggccccgcgtcgtctggcgccgccgccgccagcgcgagtgtttgtatgacagaatagca

SEQ ID NO: 177335 - DNA, 98 bp, Homo sapiens
actttgtcttggtatactacatggcaaaatgggaaagcacaacattctgaaattttttggttattgtaatgatgttgatcgggagttgagaaaatgcc

SEQ ID NO: 177336 - DNA, 75 bp, Homo sapiens
cacgtggactccctttaatccagtgactgtcaggtcgatcatatgggaagctgctcgctgatctggccaggcgcc

SEQ ID NO: 177337 - DNA, 100 bp, Homo sapiens
ggacaggctgaggctgagtctcagtgttgccctgttcagtctgaggagtgtacctcacagccttctaggatctccagagtggacaggaatctcacttgga

SEQ ID NO: 177338 - DNA, 100 bp, Homo sapiens
caataccagcgtaagggctatggcaggtttctcatcgatttcaattgatcagggaccatgaaaagaaacttgtgcttcaccgaagaaaaatatctaaaca

SEQ ID NO: 177339 - DNA, 90 bp, Homo sapiens
agaaagatggcggagcaagagacctctggccatgtagacaaatttgctgacttcatggtgaaagacgtaaaaaatggagaatgttttcgt

SEQ ID NO: 177340 - DNA, 51 bp, Homo sapiens
ccactgagtgcggagcagccaaggtgaaatgacaatggatgctctgttggc

SEQ ID NO: 177341 - DNA, 100 bp, Homo sapiens
cgcggtcgtctgtaccctcccccgggagagcaagccgggcggcctgccccgccggagcagcatcatcaaggtcttcagaactactagcagataatttggg

SEQ ID NO: 177342 - DNA, 75 bp, Homo sapiens
gactacgctccaccaccacctccagagcagtgtctctctgatgatgaagcgcagttgtgtagcagttgagtaatg

SEQ ID NO: 177343 - DNA, 75 bp, Homo sapiens
aagtgcccatgccgcttgctccggagaaggaatcagaaggtcagggctgtcctttctgccgatgtgaaattaaag

SEQ ID NO: 177344 - DNA, 96 bp, Homo sapiens
tcaagaaagcctcagtgatcttggtgccatagagagtctccgggtccctggaaaggccagggagctggagagcagagaggcagagctaagacgccg

SEQ ID NO: 177345 - DNA, 75 bp, Homo sapiens
tatggtcctcctcacctatggccgctggcaggttcccgtgtcagtggctatgatgacacctcaagttatcactcc

SEQ ID NO: 177346 - DNA, 111 bp, Homo sapiens
ctgggatttttgagctggtggaagtggttggaaatggcacctatggacaagtctataagactatgcgaatggtattgaaaagtaagaggcgtgtcagcgttttgaagtcag

SEQ ID NO: 177347 - DNA, 83 bp, Homo sapiens
ttttccggtcccggcgcccggcgagggcgcgcggctggtgtccgccccgcccgaaaggcatattaatgaggataagagaaaaa

SEQ ID NO: 177348 - DNA, 50 bp, Homo sapiens
accatcaggtagatacagcaccaacgatcctggccaatttggagcaaggc

SEQ ID NO: 177349 - DNA, 83 bp, Homo sapiens
gcgtcgccgggaccctcgcgcgcgaccgccgaatcgctcctgcagcagaggccgagtatgaagtgaccccggatgacaagcgg

SEQ ID NO: 177350 - DNA, 101 bp, Homo sapiens
cccagctcagctcttactgcgggccgctccgacggcggtccatcctgcatgacagtgatatatcagcatatacttacgagcgcactttgatgatggaacaa

SEQ ID NO: 177351 - DNA, 51 bp, Homo sapiens
cactgcagcctccacctcccaggctgaggcaggagaatctcttgaacctgg

SEQ ID NO: 177352 - DNA, 100 bp, Homo sapiens
gacagaactcaactcatcagctgaaactcttcttcaagtgacaatttcacttagcaaagtagagcttagtgttggagaatctaaattcttcacatgtaca

SEQ ID NO: 177353 - DNA, 76 bp, Homo sapiens
tttctgaatgtctgaagaaactgcaaaagcttagcagtgtctgcaaaaacgaatcttttcctacaacctgttaact

SEQ ID NO: 177354 - DNA, 100 bp, Homo sapiens
aggctccctcgaaccgccccctgaatgagttgctaaccccccagggtcccagacatatctgaagagatggattaagaatgctttggattaaggattgtgg

SEQ ID NO: 177355 - DNA, 82 bp, Homo sapiens
gtgatccagcaaggtcggcagagcaaggggcttacgcagaaggacctggccacggaaagcggagggaaaggccacttccacc

SEQ ID NO: 177356 - DNA, 112 bp, Homo sapiens
cccatcctgccgtccttctccactttcgccagcccgtgccgcgagcgcggcctgcaggaggttctgcggggagtgtctccagccctgcctgcaggtgccatccccgctgtgc

SEQ ID NO: 177357 - DNA, 50 bp, Homo sapiens
cggtgacagagtggagccatggctagagagttcctatcagactgagattg

SEQ ID NO: 177358 - DNA, 100 bp, Homo sapiens
ctggccagcctgcaagatagccatttcctcaccgacgccgacatggtcatgagcttcgtcaacctcgaaactatgttccaacttcctgtcaacaatcttg

SEQ ID NO: 177359 - DNA, 88 bp, Homo sapiens
gaagtcattcaacgggaattgaatagaacaaaatccagtctcatagcagaggagaatataatgtttacagcaccttccagagccatga

SEQ ID NO: 177360 - DNA, 90 bp, Homo sapiens
cgcagatcctgagacccggacagtggcagtgaaacagaatagcctaacatggcagaccagagacagcgctcactgtctacctctggggag

SEQ ID NO: 177361 - DNA, 75 bp, Homo sapiens
cagatgttgtcaaggtggcctaccaggaggccaggggtgtcgccatggtcactgcttctgttcggaacagagatc

SEQ ID NO: 177362 - DNA, 98 bp, Homo sapiens
atgacgtcagcatgattcaggaatctgactgcggcgtgggagtggaaggaaagggtctaaaattcccaggactccacagctttgcaccagataagcct

SEQ ID NO: 177363 - DNA, 75 bp, Homo sapiens
agccacgctttctgtacagcctgcagaactccggcgcctttcggaacagctggctcataccccgacagccttcaa

SEQ ID NO: 177364 - DNA, 75 bp, Homo sapiens
agacgctacaaggaggacgcgccccatcgcaggacagagcgggatgccaccagcttgtccaaagggaagttccag

SEQ ID NO: 177365 - DNA, 51 bp, Homo sapiens
cctgcaagcaggctgaaggttgtgtggacttaaagcccagtaatatagtag

SEQ ID NO: 177366 - DNA, 100 bp, Homo sapiens
aagcaaggcaaagtcttttgtgctcccctcccccatcaaaggaaaggggaaaatgtctcagtcgaaaggtaagaatgattgatgttggctgatattggag

SEQ ID NO: 177367 - DNA, 75 bp, Homo sapiens
cgcgctgcaacccccggctcgggagtacaagcgcaagctagccagagtttccctggtgcgcaaagaactcaggtc

SEQ ID NO: 177368 - DNA, 106 bp, Homo sapiens
ctccccctcccggccaagatgtctgacatggaggatgatttcatgtgcgatgatgaggaggactacgacctggtttggtgcacctcgatttggaggaagtagggca

SEQ ID NO: 177369 - DNA, 83 bp, Homo sapiens
gttagcagtcacgacctccagcacaggtggccggggaaaggacaatgcttggatcattacgtttccagaaaactgtaatttta

SEQ ID NO: 177370 - DNA, 83 bp, Homo sapiens
cctccttgaaagttgaaggagttctcgggagaccccggagaaggtactccaaagattcaggtttactcacgtcatccagcaga

SEQ ID NO: 177371 - DNA, 82 bp, Homo sapiens
gaatctgtttttagctatcaagtggcatccacgcttaaacaggtgaaacatgctctctgatgtaaaggatggagtaaatcaa

SEQ ID NO: 177372 - DNA, 98 bp, Homo sapiens
gattattgagcggctggaccacctggagaatgtcatcaagcagcacattcaagaccttcaatattgatgtacggcagttacattgggcagaatatata

SEQ ID NO: 177373 - DNA, 88 bp, Homo sapiens
cttatgggacttgaggccctcaagggaaaatttgttggcagattgtttgcagggttgttttgtggtgacgtgcacactgtgtgcattc

SEQ ID NO: 177374 - DNA, 98 bp, Homo sapiens
actgagaatgagcggagccgccaaaaatatgctgaggaggagttggagcaggtgtgagagggtccagcagaaggaaacatggctgccaaagtgtttga

SEQ ID NO: 177375 - DNA, 50 bp, Homo sapiens
gccgccgtcctggaatacctgacagtcaagtccatcatctccagaaccag

SEQ ID NO: 177376 - DNA, 74 bp, Homo sapiens
ctgaagcagtggccgacatcaagttttcctctgcagaataatggctttcaatgagttcctatgtggatttttaa

SEQ ID NO: 177377 - DNA, 75 bp, Homo sapiens
cctggtgccaatcattgacaatattatggtatgagaatctcgtcgtagctttggctgaaaacacaggtcccaaca

SEQ ID NO: 177378 - DNA, 100 bp, Homo sapiens
gtcgcgctgtaagaagcaacaacctctcctcttcgtctccgccatcagctcggcagtcgcgaagcagcaaccatgatggagtctcgctctgtggcccaag

SEQ ID NO: 177379 - DNA, 74 bp, Homo sapiens
cacgcctgatggctccacgcatttcccttcgtggaatttatctcactaatatcttgaaaacagaagaaggcaac

SEQ ID NO: 177380 - DNA, 99 bp, Homo sapiens
ctctgaaacagaaaccacctctgccatcctcgcctcagtcaaagaacagaatttcagaaactgtggaggagtgtcactgtagattccatggacgaggag

SEQ ID NO: 177381 - DNA, 75 bp, Homo sapiens
actggacacaggactggggaagactggatttcagcttaggagaaggaaaatgtttataggaggccttagctggga

SEQ ID NO: 177382 - DNA, 75 bp, Homo sapiens
caaagaacctctggtgttgaaagccattgagacccagagcagcagttctgaagagatagtgcccagccctccctc

SEQ ID NO: 177383 - DNA, 75 bp, Homo sapiens
agagggtgttcgactgctagagccgagcgaagcatattgaaatggattccaggcgtgtgcctcgagacaagctgg

SEQ ID NO: 177384 - DNA, 75 bp, Homo sapiens
tccctctgaaaactgaggaatttgaagtgaccaaaacagcaggaaaatatatgcagatgatgaacattcttaagc

SEQ ID NO: 177385 - DNA, 100 bp, Homo sapiens
caagcccaatgacgttgtccggatcctgccctgccgcaacttgagttggtggaaccaagtggctggattcatgttcccttaactgacaatcataagaagc

SEQ ID NO: 177386 - DNA, 100 bp, Homo sapiens
acacccatcatcacccagaatgagaacggaccctgccccttgctggccatcctcaatgttttgctcctggcctggaagaatttcacaaacttgtttggac

SEQ ID NO: 177387 - DNA, 88 bp, Homo sapiens
tcagacatatttgatggaacaatcattagttcagtgcagtgtctgacttgtgacagggccttgtatgaagcaggagaaaggagaaagg

SEQ ID NO: 177388 - DNA, 75 bp, Homo sapiens
atatttttcaacctgaacttgcagtagctagtggagaggcaggtgctggagaatctggtaaaagcaccattgtga

SEQ ID NO: 177389 - DNA, 75 bp, Homo sapiens
gaatttccatgtcaacatagtcctgtgtgtgcaggaacggagaataaactgagctctctctctgacctggaacag

SEQ ID NO: 177390 - DNA, 74 bp, Homo sapiens
caatgacaagctgtacgaaaagcggaaggtggcagcgctggagatcgagaaggccacccgttcatcgtgcagtt

SEQ ID NO: 177391 - DNA, 100 bp, Homo sapiens
ccgctggggactgcgggcggcgctgtgtccgtcgccatgacagcactctggcccccagaagcttctccacattgcccaggagctcctgcacaccgaggag

SEQ ID NO: 177392 - DNA, 83 bp, Homo sapiens
ggcagcagcccagacgcggcacagagagggcctgggagcttgctgcagcttcagacctcctgccccccgaggtctgcagtctc

SEQ ID NO: 177393 - DNA, 98 bp, Homo sapiens
aggaatctgcttttcaagtatgccaccaacagtgaagagatctgttacctaaagcaataaaaaatggccagaggatcagtgtccgatgaggaaatgat

SEQ ID NO: 177394 - DNA, 50 bp, Homo sapiens
cggagagtgaacgagaacgagatgttggtacgccttattacatgtctcca

SEQ ID NO: 177395 - DNA, 75 bp, Homo sapiens
ctgcctttgcctaaggcggatttgaatgtctgagagtcactggagctaccagaagcatcatggggccctggggag

SEQ ID NO: 177396 - DNA, 100 bp, Homo sapiens
gtttgagaaaaggcctaagaattttggcattgagattgagaatttatcacaagttgatggtcctcaagtggaagagcaacttctttcaaccacagttcag

SEQ ID NO: 177397 - DNA, 51 bp, Homo sapiens
aagtgctggaagctcatggacaaggaaattgaaaagatatggtcctcgccg

SEQ ID NO: 177398 - DNA, 75 bp, Homo sapiens
gaagatgaactttgcgaatgtatttattggtgccaatcccctggaaactaattctgaagcaagcccttatagttg

SEQ ID NO: 177399 - DNA, 100 bp, Homo sapiens
aaaaccgagtcgttgaggaaaaatgctcagaaattactctcagaagccttggaattaaagtttgtgaagaaatatgggaacctttttagcttggagcttg

SEQ ID NO: 177400 - DNA, 100 bp, Homo sapiens
aaccacaggctaatgttccttcagctctgccatcactccctgccgggtcagggtgggaaggatacgagcaagataaagcagcgagggatttaagtctggc

SEQ ID NO: 177401 - DNA, 137 bp, Homo sapiens
atggaatccaagggggccagttcctgccgtctgctcttctgcctcttgatctccgccaccgtcttcaggccaggaggtgtgattgcctatatcagttcttccagctcagcctcaagccctgcctcttgtcacagtga

SEQ ID NO: 177402 - DNA, 82 bp, Homo sapiens
ctggactcatggaggctgagcatttattcagcttcatcacgtttcgctcctgtgcctacctggacaagaagcataccatctt

SEQ ID NO: 177403 - DNA, 98 bp, Homo sapiens
atggcatggccccgcaggtcttcacccaggccctggagtgcatgcgcagcacctgtgcctgtgtggaatactatgggaaggctctggaagtgctggtg

SEQ ID NO: 177404 - DNA, 105 bp, Homo sapiens
gacttggcttccctcaagtctatccgagagtttgcagcaaagatcattgaagtctgtcattcgattgattgaagaagccaactctcggggtctgaaagaggttcg

SEQ ID NO: 177405 - DNA, 50 bp, Homo sapiens
cggagcttcgccaaggctggcgcagtcgaaggaaggggagttcaccctgc

SEQ ID NO: 177406 - DNA, 83 bp, Homo sapiens
gcaacgcggagtggagctcagccaggggcagccggctctggtgctcccagaagagcttaaagcttttcaagccaggccaagaa

SEQ ID NO: 177407 - DNA, 100 bp, Homo sapiens
aaaaaggtggaagaggtgctgcagctggtggacgaggtggtacgaggggtcgtggccgagaatggatcttctaaccaaagacggagatttaatccacagt

SEQ ID NO: 177408 - DNA, 75 bp, Homo sapiens
cagttatttgcctcagtaaaagacgataagttcacacggttttgccagtggaagaatgtggagctcaacatccac

SEQ ID NO: 177409 - DNA, 100 bp, Homo sapiens
ggcgatgtgtgattaccatggcgaggagtctctgtccgggggcctggctaaggaaaccctattacctccaggtgtctgcttttggggcagagttttcatc

SEQ ID NO: 177410 - DNA, 90 bp, Homo sapiens
accgaccatcagcttatacaactggtggacttgaagctgacagtggatgggctggagaaggaacgtgacttctacttcagcaaacttcgt

SEQ ID NO: 177411 - DNA, 90 bp, Homo sapiens
gcgcgcgctgtggtgcagccgccgcgacggcggcctccagctccgacccggctttgaagacaagattcccaaaaggagattctctgagat

SEQ ID NO: 177412 - DNA, 118 bp, Homo sapiens
gccagccgcaccatgccgctcctaagcctgcacagccgcggcggcagcagcagtgagagggggatatgagactttctactcggaatatcctgagtgttgcgtggatgtaaaacccatt

SEQ ID NO: 177413 - DNA, 51 bp, Homo sapiens
gaatctgctctaaaggagaccaagattcgagtgagggttgaaaaggatcca

SEQ ID NO: 177414 - DNA, 82 bp, Homo sapiens
gaacccagagatggtgaccgcgtggcaggggctctcggacatgctgccaacgacgcgagatataacacgtgggaaccggagg

SEQ ID NO: 177415 - DNA, 98 bp, Homo sapiens
cttatagttgagaatttatcctcaagagtcagctggcaggtggcattggaaggccttcggcctaccatcccaccaggtatttcccctcatgtgtgtaa

SEQ ID NO: 177416 - DNA, 87 bp, Homo sapiens
aaccagttccactagagacacaggtgctgccccagatcaacttggatcattactcggtgttaccggcaggcgaaggcgatgaggaca

SEQ ID NO: 177417 - DNA, 100 bp, Homo sapiens
gcgagaactcagaagtgttccacgtttcagaggcaggcagggatgttagcaccaggtaccagaagagacatctatgatcagaagctaacattacagccgg

SEQ ID NO: 177418 - DNA, 97 bp, Homo sapiens
tcggtgagcgcgtttcccgcctgagcgcaactagcggcgggtcgtgggcacctccaggtgtcatggagaaactccagctgggcccagagattctgca

SEQ ID NO: 177419 - DNA, 98 bp, Homo sapiens
cgccaccctgcgctgccgccgctctgaggagttaaaggctcttgtcaggatggtgaagctgttcatcggaaacctgccccgggaggctacagagcagg

SEQ ID NO: 177420 - DNA, 82 bp, Homo sapiens
acattcgggaagcgtcgggattaggtgaaagttggatttggtctagggagtcccagaaagaagtagaaaaagagagagaagc

SEQ ID NO: 177421 - DNA, 75 bp, Homo sapiens
tcggcgccgcggctcttttctaaaagtttggctggggaacagaccagggaattggtggatttggagaagagccgg

SEQ ID NO: 177422 - DNA, 83 bp, Homo sapiens
tccccgagttcgctgccagccccaagaaggagaccctcatccagctgatgcccttcttcgtggtggcccagttgaaatccttc

SEQ ID NO: 177423 - DNA, 100 bp, Homo sapiens
gttgtgaacgaagtcagaatttcctgtgttccctttgccgctcctggagttcactgggctgctaccctggaaaaggaagtggccgggttgcgggagaaga

SEQ ID NO: 177424 - DNA, 101 bp, Homo sapiens
ctccggcttccgtcccggacagagcccgtggtcgcgcaggtacgtgaacacactcctgaaactcatcccgctggtgctgggtctgcaggaacaactgcggc

SEQ ID NO: 177425 - DNA, 98 bp, Homo sapiens
ggaaaatggatgtagaaaatgagcagatactgaatgtaaaccctgcaggttcctggtacagttcagacaggacaaagtatgtgtgaagtttattcagg

SEQ ID NO: 177426 - DNA, 75 bp, Homo sapiens
tttaccctcatcgtggaggcctgggactgggacaacgataccaccccgaatgatccacctgtacacacgcggctg

SEQ ID NO: 177427 - DNA, 83 bp, Homo sapiens
cgacaagccgctggcagccgcggatctcaccgccgctcaggacgtccttctatggccgcttcaggcacttcttggatatcatc

SEQ ID NO: 177428 - DNA, 75 bp, Homo sapiens
tgtcagccgatgcaccgagtccagcccaggaaaatggagagttccaggaatggatggaggtgctttaactgatac

SEQ ID NO: 177429 - DNA, 100 bp, Homo sapiens
gcggaacgcaggagacacaagaagcggatccagccggagaattttcatccttgggccttctcatcatgtgcccctctctcgatgtgcactttccagtgtg

SEQ ID NO: 177430 - DNA, 100 bp, Homo sapiens
cgacctcggtacctcggaccagctctgtaaaagccccgcctctgccttcggataggaaagtggagaatgaggacatgaataaagaccagatcttgctgga

SEQ ID NO: 177431 - DNA, 90 bp, Homo sapiens
atcaaatgtggaacctatggaaaaggtggttgtgtcaaaccgattggtgacatctccatgctgtattgtcacaagcacatatggctggac

SEQ ID NO: 177432 - DNA, 100 bp, Homo sapiens
tcggttctccatacccgtgacctggggatcgctacggaccttaaaatacccgcaacagccccttcgtcccaagtaccagaggtttgaaaaggcatttctc

SEQ ID NO: 177433 - DNA, 114 bp, Homo sapiens
ctgctcacagaatcacagctaaggaactactagataaccagtggttaacagaaaattgggccgatttccacctatgatgcatcatcaccaggcaccctcagatggccagactcc

SEQ ID NO: 177434 - DNA, 111 bp, Homo sapiens
tggacctctacctggcctacttcgtgcgtgagcgaggtacaccaggggttggaaaaaccacactaggcaaagaacttgcgtcaaaatcaggactgaaatacattaatgtgg

SEQ ID NO: 177435 - DNA, 96 bp, Homo sapiens
ccctggccaccgcgcgcgcctcgccccggcagggctcagtttatgaacctcttaaaagcattaatcttccaagacctgataatgaaactctctggg

SEQ ID NO: 177436 - DNA, 95 bp, Homo sapiens
gaaaacgctaaacctgggagactaacatccctcttaggcttcaggaatagccaggtctggctgggtcggcacaacctgtttgagcctgaagacac

SEQ ID NO: 177437 - DNA, 100 bp, Homo sapiens
aagggactgaagagggtgcacgttggctgactgatgaggacacgagaaacctcaaggagatcttcttcaatatcttggtttgttttgagtgtggcgcgtt

SEQ ID NO: 177438 - DNA, 101 bp, Homo sapiens
gcgtcaattttatgatgaagcaagacagaggaattggcagtcttataaccagttcaggatgtccatcctggaacgactggagcagatggagaggaggatgg

SEQ ID NO: 177439 - DNA, 100 bp, Homo sapiens
gtcatgggcaccttctcatctctgcaaaccaaacaaaggcgaccctcgaaagaggggccgtatggggtctttgctggaagagatgcatccaggggccttg

SEQ ID NO: 177440 - DNA, 98 bp, Homo sapiens
tggtgcatctgtttgccggaggctggagaatgctggaggagaccttaaggatggccaccaccactatgaaggagctgttgtcattctggatgctggtg

SEQ ID NO: 177441 - DNA, 75 bp, Homo sapiens
caaatcttcagggaatggccaagtgacaaagactctcctggcgtccccccgagtgcaaacgctcatcacctgttt

SEQ ID NO: 177442 - DNA, 51 bp, Homo sapiens
aggcacccgaatgctgcccgggtgaggctcatgcacaattagttcgagaag

SEQ ID NO: 177443 - DNA, 100 bp, Homo sapiens
caaggtttgaaaagcagctggcctgcaaggattccccagctttccgttgcacaaacagtgaagtgacagtccagcccagcccctatttgagttaccggct

SEQ ID NO: 177444 - DNA, 100 bp, Homo sapiens
cagctcgatctgctcttcgtctgcttcttcctcttcagtcaagtgtggcttcctgttgtggtgcatggccccgagcccttctaatggggctgaactgctc

SEQ ID NO: 177445 - DNA, 98 bp, Homo sapiens
tggctttgtctcctttttcaacaaatgggacagtcattttgtttactcattcagccctgttgcaggtcccaataaactcttcataaggttgacagaag

SEQ ID NO: 177446 - DNA, 98 bp, Homo sapiens
tgacatcaaaactgttcggacttccccgttagaactcgcgtttccacttcagagatctgcacccagaggcctccattcaggctgttttttcagatgcc

SEQ ID NO: 177447 - DNA, 90 bp, Homo sapiens
ctaacatgactgataccactataatttagtttcgatcctttggtacagaagacagaccgacagatcgtccaataccacctcgagatgaag

SEQ ID NO: 177448 - DNA, 74 bp, Homo sapiens
acaagaatgaaattgtagtaacggacttccataaccattcagtgaagggcacccaggtatatgtcttcctgaca

SEQ ID NO: 177449 - DNA, 109 bp, Homo sapiens
ccagaaacaagaagaagagaaccctgcggaggagaccggcgaggagaagcagacaatgcagatcttcgtgaagactctgactggtaagaccatcaccctcgaggttgag

SEQ ID NO: 177450 - DNA, 100 bp, Homo sapiens
ctgatgtttctcagtgccattgtgatgatgaagaaccgcagatccagtctcggcgcggaagatggccggcggcgtggacggccccatcgggatcccgttc

SEQ ID NO: 177451 - DNA, 89 bp, Homo sapiens
gccgggcgcggcggcgcgcggagaagtgcggcggagcggcgcctgcattagcagtcatcttatcccatgcgtgtgaacagatgcaagga

SEQ ID NO: 177452 - DNA, 83 bp, Homo sapiens
cttatctcgaaagcctatcagcatagttaaggccactcttcacctccaccatgagcctggacatccagagcctggacatccag

SEQ ID NO: 177453 - DNA, 100 bp, Homo sapiens
ccagccaccttggaaagtactgagcgacttcgccttgcagagtgacatagatcagcctgcttttcagcaactggtcaatgtgacggtggactacattaga

SEQ ID NO: 177454 - DNA, 100 bp, Homo sapiens
gcttctccgggtctcagcatggtcactcctggaagcaaggcggctctagctaatttatgtattggagatgtaatcacagccattgatggggaaaatacta

SEQ ID NO: 177455 - DNA, 101 bp, Homo sapiens
gtgggatattacggaatgtgtccagcttgatagctacaaatgaggaccacagccatcactggtgcaagctatatttaacggagatcctgatgaagttcgag

SEQ ID NO: 177456 - DNA, 82 bp, Homo sapiens
atgatcatgatggaaatgacagacttcacaaggtcagcccaaggccaaccccactgtcactctgttcccgccctcctctgag

SEQ ID NO: 177457 - DNA, 90 bp, Homo sapiens
taaactcctatttgtttatggcaaggggaacgcccttttgcttgtgactggcagggctgcgacaagaagttcgcccgctccgacgagctg

SEQ ID NO: 177458 - DNA, 101 bp, Homo sapiens
atgccttcgtgaacagccaggaatggacgctgagtcgatctgtcccggagctcaaagtggctatcaatatgacggctgaagaaacagtgaatgtaaaagag

SEQ ID NO: 177459 - DNA, 82 bp, Homo sapiens
atcacaggcaacctggagacattccctagagatcctgagaaagctgttgtgcatttgatgaagcaattgctgaattggatac

SEQ ID NO: 177460 - DNA, 101 bp, Homo sapiens
tttgatccctgtgtgctgaagaggtggcttctggcacagcagcttaattgaccggaacctcattgattattttgttcccttcctccccctggaatacaaac

SEQ ID NO: 177461 - DNA, 100 bp, Homo sapiens
ggaaagtcaggctaaaagtgtctgctgctgctgccgccccccactccgcctccgggagagattgttcctcatgtggttaatttggttcattctttcaaaa

SEQ ID NO: 177462 - DNA, 100 bp, Homo sapiens
tattcatcaactttctttccttctgggccatgaaatagcacatgcagtacttgggcatgctgctgttgctgtcatggttgccaccagagaaggatctatc

SEQ ID NO: 177463 - DNA, 82 bp, Homo sapiens
ccccggcctgcgctcccatccacacgctcggcaacatgagtgagaatgaggaagaggaaatttctcagcaagaaggcagtgg

SEQ ID NO: 177464 - DNA, 90 bp, Homo sapiens
accttgaacgattccgctctgcggcgggtgtccctaaactagcagtttagggtgtcaggtttgaacttgttctggaagctgtgcgtcacc

SEQ ID NO: 177465 - DNA, 99 bp, Homo sapiens
ggacttcatgtctatatatttccccattcactgaatagcctaacatggcagaccagagacagcgctcactgtctacctctggggagtcattgtaccacg

SEQ ID NO: 177466 - DNA, 100 bp, Homo sapiens
ctgatgctggacgcctcaggccggctgtgcgtggctgataccccaatgtccttctttgactttgtggttgatcctcattctttcccccgtacagtggaaa

SEQ ID NO: 177467 - DNA, 98 bp, Homo sapiens
ttatacttgcttttgcttcagcgttctgtggttgtcaacagctttctaaaaccaatttttccaacaacaacgatttccgtgctcttctgcagtctttg

SEQ ID NO: 177468 - DNA, 83 bp, Homo sapiens
gaaatggaaggggcctccagggtctgcagacaaggcagggatggagctatgacattgaagagaggaaggttccaaaacccaag

SEQ ID NO: 177469 - DNA, 75 bp, Homo sapiens
cgaatcttctggatgtccctggattgaagctgaactcacgggaatcaaatggcgtaggtacaattttggagggca

SEQ ID NO: 177470 - DNA, 75 bp, Homo sapiens
caggacttgagtaacagcaacatggcacagatagatcattatctaggacttgcaaataagaatgttaaagatgct

SEQ ID NO: 177471 - DNA, 75 bp, Homo sapiens
gtgattttcctgcatggattgggagatactgggagtctcgctctcagtcaaaatctccaacgggaactcctgctc

SEQ ID NO: 177472 - DNA, 78 bp, Homo sapiens
gaaactctgaggattaaagctgagtatgaagggtatcactgggatacatcagattggatgccaagcgttcctctgccg

SEQ ID NO: 177473 - DNA, 100 bp, Homo sapiens
tcaccacggacgagatgatcaaacgcctgaagatagcagaccccacgttagctgaaatgggaaaaaacttgaaggaggcagtgaagatgctggaggacag

SEQ ID NO: 177474 - DNA, 83 bp, Homo sapiens
gaacagaacaggccctatggggcatacctatggctttattgacctcgactcccatgcgattcaccaggacacgagactcaccc

SEQ ID NO: 177475 - DNA, 83 bp, Homo sapiens
agacgaagaagcagaagcgtctgctcaggttgcagcaggagagaggtcaccgacgatgagggcgcacctgctgtcctggagct

SEQ ID NO: 177476 - DNA, 100 bp, Homo sapiens
aagcagaaatgagcagaaaggagttggggcttgatgaaggcgtggatagcctgaaggcagccattcaggggagagtacggtttccatgaatatacagagg

SEQ ID NO: 177477 - DNA, 100 bp, Homo sapiens
aaaacaggaagaatttgatgttgccaacaacggctcttctcaagacagaataacgggctcccagattcacaagccccaccaagaggatcaccccaggaac

SEQ ID NO: 177478 - DNA, 106 bp, Homo sapiens
aggtattgggagatccacagccaagatgccgggaccccttagaagcctagaaatggatctcgctctgctgtcacccggcctggagttcagtggagggatctctgca

SEQ ID NO: 177479 - DNA, 101 bp, Homo sapiens
tgtcagtggctctcttggccctcctgaaatggtaaattggcaggatgaggagcagcaaatcaaaagaggtgcctttaccaaatccaaggaactctcaaagc

SEQ ID NO: 177480 - DNA, 51 bp, Homo sapiens
ccatcattgatgtggtgcgatcgtctctcaagtcccgaggctacgtgaagg

SEQ ID NO: 177481 - DNA, 100 bp, Homo sapiens
ctcaaacgttgaaacacccacagactgccaagtgggacaactttctggcttttgaaaggctccttcttcaggtaagaatgattgatgttggctgatattg

SEQ ID NO: 177482 - DNA, 74 bp, Homo sapiens
agccgcgcgcctttgtgcgcgcgccgaggggaaggtgtggctcattgactttaatccatttggtgaagtcacag

SEQ ID NO: 177483 - DNA, 90 bp, Homo sapiens
tcaggacggcgagcctattcagacgtttcactttcaggcatctgcagcatgtggggcggctcccactattccacctttgacggcacctct

SEQ ID NO: 177484 - DNA, 100 bp, Homo sapiens
acacatccaagtctacatacagcctgacgcggaggatttcgagttctcccaaagaatatttggaaactttcatctttcctgttctgcttcccggaatggc

SEQ ID NO: 177485 - DNA, 75 bp, Homo sapiens
gtggaagcagcagtccaggaatgcagtcagtctgttgatgaaactattgagaaagatcagtctaaagaaaaggag

SEQ ID NO: 177486 - DNA, 100 bp, Homo sapiens
acgtgaaagacgaatttaggagacataagaccgttggttctgacgaggcacagcgtttcttgcaagaatgggaggctatggagttactagtagagaaagc

SEQ ID NO: 177487 - DNA, 51 bp, Homo sapiens
acagcagagacacagagggcagtcatgaggctgactcttgcttgtggtggg

SEQ ID NO: 177488 - DNA, 80 bp, Homo sapiens
agcagccttgttagggcgtggcctgaggcttggataagtggggtactccaaagattcaggtttactcacgtcatccagca

SEQ ID NO: 177489 - DNA, 90 bp, Homo sapiens
gtttgtggcaagacaagctcagaactgagaagctgtcaccacagggctacaccaagtccattgatatttggtctgtaggctgcattctgg

SEQ ID NO: 177490 - DNA, 100 bp, Homo sapiens
tggacgtggcagagggagaggggcaggaaggttctcaacccaaggcatggggaatcaaacagttatgttccagtgccttcataatctcatcagaattctc

SEQ ID NO: 177491 - DNA, 83 bp, Homo sapiens
ggccacagggatgtcttttactataggtgcgcgcggagccatggttatcatgtcggagttcagcgcggaccccgcgggccagg

SEQ ID NO: 177492 - DNA, 83 bp, Homo sapiens
cctgctgcgcttggagccgaacctgcaagcccagacccgtgcctgtatattccacgctttgcgcacctgctggaattcgggga

SEQ ID NO: 177493 - DNA, 74 bp, Homo sapiens
ggacctccagatttccttactggtgatagagaaggacctgccccactatttctagctccacaagtgtgtggccc

SEQ ID NO: 177494 - DNA, 75 bp, Homo sapiens
aaggattccaagtaactcttatttgttctggatagtaaagcaatagaccttatgaatgcactaatgaggctaaat

SEQ ID NO: 177495 - DNA, 110 bp, Homo sapiens
tacagggcagaggaaaatgcaagaagactgatggagcaggcttgcaatattaaagtgattcgcaaggggtggctcaccatcagcaacattggcatcatgaaaggcggctc

SEQ ID NO: 177496 - DNA, 74 bp, Homo sapiens
agggagatgggcagcagctcttaggtgcccacgggcctccggggccaagcgcttctgaaagtgtggggccgcgg

SEQ ID NO: 177497 - DNA, 82 bp, Homo sapiens
cggtcgggagggaggaaggtggcaagatggtgttggaaagcactatgatcaccgaagtggccttggagtacaacaactgtca

SEQ ID NO: 177498 - DNA, 76 bp, Homo sapiens
ggaagggacaaggaattggttcacaggagaactagtggctctgaagaaggtgagactagacaatgagaaagagggc

SEQ ID NO: 177499 - DNA, 100 bp, Homo sapiens
cttatccactcactcacccttccgaactcttaacatcaatgggcaaatccccacaggagaaggagatggacaaccggaaattttctacacattttggaat

SEQ ID NO: 177500 - DNA, 87 bp, Homo sapiens
acaaacaaatcaaccgccttgaggatctttctgcccgcctgagtgatcttgaaatgaatagtaagactttgaccccgacgcaggctt

SEQ ID NO: 177501 - DNA, 100 bp, Homo sapiens
tgaagttcgtggaaggctgtatgagcttctaactcattgtattcctcctgagataataatgaagggaagtgtgaaatcggctgggcctactactgcacgg

SEQ ID NO: 177502 - DNA, 75 bp, Homo sapiens
aaacaccatggctgcggcggcccagctctctctgacacagcttgaactcagtgaaaatagaatctttggaggtct

SEQ ID NO: 177503 - DNA, 90 bp, Homo sapiens
gaagatttccagcctggaccaactggtggaaggtggactgggtggttatggatcaggagacagtgaagatgagaggagtgacagaggatc

SEQ ID NO: 177504 - DNA, 90 bp, Homo sapiens
gaaggtcaggctcggtgtctggctcacctgggtaggcatatggaggcgctggagattgctgcaaacttgagacagggtttcgccatgttg

SEQ ID NO: 177505 - DNA, 74 bp, Homo sapiens
tctgtcaatggtctgtgctgaccctgtctacaaagtgtacgttgctgctttacttagcagtgtctgcaaaaacg

SEQ ID NO: 177506 - DNA, 82 bp, Homo sapiens
tgagcttgccgcacaaaaagctagagaggattggcagccaccatttgcatgtgatgttgataaacttcattttacgccacgt

SEQ ID NO: 177507 - DNA, 120 bp, Homo sapiens
agctgaggtccagatgaaagagaagtttctggtcactccccaggattatgcgcgggtcccgacggcctacacatggggcgctgtgggcgccgtggggctggtgtgggccaccgattggcg

SEQ ID NO: 177508 - DNA, 100 bp, Homo sapiens
gcgctgccgctccgagtgccagtgggagcggatccctgagctcgtcaagcagctgtcggccaagctcatcgccaacggtcacggagctgctggacgtctc

SEQ ID NO: 177509 - DNA, 100 bp, Homo sapiens
cccagatgcccaccgggatggagaaggaggaggaatcggtgaaaagaacggaggggagcccgatgacgctgaactagtaaggctcagtaagaggctggtg

SEQ ID NO: 177510 - DNA, 74 bp, Homo sapiens
gcctcggctcttccagccaccccctctccagtctgctcaggtgagaagccatttacttgtgaaatctgtggcaa

SEQ ID NO: 177511 - DNA, 74 bp, Homo sapiens
gtaatgctggtggtctgcatcaccaccggatcaacttcgacaaatagataagcacattgaagaagtgcggaaga

SEQ ID NO: 177512 - DNA, 82 bp, Homo sapiens
cttcagagtgtgaagtcaaatgcatgccaacattccagttttttaagaagggacaaaaggttcgagaaaacaactacaccta

SEQ ID NO: 177513 - DNA, 100 bp, Homo sapiens
cacttctgtttgcaacactgtacatcctctgccacatcttcctgacccgcttcaagaagcctgctgagttcaccacagaccatgaaatggaggctcaggg

SEQ ID NO: 177514 - DNA, 98 bp, Homo sapiens
aacggcgacctcaagaagcagctccacgaaaggcagccgcggatcgccgcgctcagcgacaaacaaatcatggaagggaagtggttgctgtgtatgtt

SEQ ID NO: 177515 - DNA, 96 bp, Homo sapiens
gaaagaggatggcgacctcgtcgatgccggagtcagagaggaacgtggctacgaaagcctcggctgctgataaagatgatagttcagaagacattt

SEQ ID NO: 177516 - DNA, 90 bp, Homo sapiens
gtggccgccgcgcaggagcctcccggagctgttccagatttcggaaggttcacgagtgttgccgacacgccctcccaactgcagacatcc

SEQ ID NO: 177517 - DNA, 100 bp, Homo sapiens
cgcccgcccaacctggtccgctgcctcttcggccatggaagctgccggcagccctgcggctacggagacagacctcctgacagtgagtgagactgccaat

SEQ ID NO: 177518 - DNA, 83 bp, Homo sapiens
gcgacctccaaggatgcccgtgagcctgttgtcggggccagtgaactttgaggcgctgatcatcaccatgtcggtagtcgggg

SEQ ID NO: 177519 - DNA, 83 bp, Homo sapiens
ctggaaaatatctgttaacagactgcttttacacctacgttgcgaggggcggtgttgaagaatgtgtgggcgaacatcctgtc

SEQ ID NO: 177520 - DNA, 71 bp, Homo sapiens
tgaggacgtggacctccgggtgaactttgccatgaatgttgggaaaggggcgtattcgtcgaggaaactat

SEQ ID NO: 177521 - DNA, 75 bp, Homo sapiens
cgcccccagaagcccgggaacaaacgggccattgacatttagggatgtggccatagaattttctctggaggagtg

SEQ ID NO: 177522 - DNA, 100 bp, Homo sapiens
tcagaacaaatattcagactttaccgtgccattggaaatatacccttagagatttgtttgattccatggataaaacttcttccagtattccacctattat

SEQ ID NO: 177523 - DNA, 75 bp, Homo sapiens
acgagaagccccaacagcacggcgtggcctctcagcctcgcagaaaaatatggctcaggagactaaccagacccc

SEQ ID NO: 177524 - DNA, 82 bp, Homo sapiens
ttggaagcagccgatccagcctgcggagcctgtggggcaggttaaccccaaagattggctttccttggagtgaaatcaggaa

SEQ ID NO: 177525 - DNA, 99 bp, Homo sapiens
gctggttccccaacatgcctcaccctcatctatatcctttggcagctcacaggtgctggagaatctggtaaaagcaccattgtgaagcagatgaggatc

SEQ ID NO: 177526 - DNA, 100 bp, Homo sapiens
ttccgctctgcggcgggtgtccctaaactagcagtttagggtgtcaggagagattatttcattcaatattttttatgaattatttaccatttgtacttca

SEQ ID NO: 177527 - DNA, 96 bp, Homo sapiens
caaacatgctccgccagatcatcggtcaggccaagaagcatccgagcttactgtaaaatggggaaaggagaaatttgaaggtgtagaattgaatac

SEQ ID NO: 177528 - DNA, 74 bp, Homo sapiens
aaacgcaagccaggctaaacagttggcagggagactcatgcatctgtatgccgtgtgcgtggactgcctggaag

SEQ ID NO: 177529 - DNA, 100 bp, Homo sapiens
ctacaccaacctgagccagggcgtggtggagcacgaggaggacgaggagagccggcggcgggaggccaaggttggatttggtctagggagtcccagaaag

SEQ ID NO: 177530 - DNA, 100 bp, Homo sapiens
tcgatgggctcgctccagaggacatgagcaaggagcaggtggataaattagatgcttcagaatcactgagaaaagaagaagaacaagctacagagacaca

SEQ ID NO: 177531 - DNA, 82 bp, Homo sapiens
tcaaaaccaggctgaacccagagagttcctgcaacaacaatacagcgtccagaggaccagaggttaatttattctgggaagc

SEQ ID NO: 177532 - DNA, 50 bp, Homo sapiens
caaacttgacactcaccctgaccggccaaagaggtgctgaaaaaatattt

SEQ ID NO: 177533 - DNA, 88 bp, Homo sapiens
caaccatcaacgctcaccagtggtctgagacggtccagccaattatggaagcacttagaggtgctggagaatctggtaaaagcaccat

SEQ ID NO: 177534 - DNA, 98 bp, Homo sapiens
tgtcgtttttccttgagctgaacgtcttgcaacagtggccgcacgcatagctgcagaaccttggcctgaaaatgctacattatatcagcaattgaaag

SEQ ID NO: 177535 - DNA, 74 bp, Homo sapiens
ggacacccacaggtcggccctgcggacccggcaggtgactttggtacatccagacactgaaggaccacaggccc

SEQ ID NO: 177536 - DNA, 75 bp, Homo sapiens
ctgggaaagaccttgatcccaacaatgttatcattgaaagcaatatccaaggcagtgtcatctgcaacaatgctg

SEQ ID NO: 177537 - DNA, 75 bp, Homo sapiens
tgttcgcaagcatcctagcagccttctccaaagccacattctcttccagttgcgcctcttctccttggtggtctt

SEQ ID NO: 177538 - DNA, 83 bp, Homo sapiens
gtggactccttcggcagtccacccaccgccgccgcctcccagagagagtcttgctctgtctcactgcagcctctgcctcccgg

SEQ ID NO: 177539 - DNA, 50 bp, Homo sapiens
gaaatggtgaacattgttgttggaggttaatgttcgtgaagaaattgaag

SEQ ID NO: 177540 - DNA, 100 bp, Homo sapiens
tcggcctcggcggcagcggctgcggagaaggcgagcgaagctgtgagccgtgagctttgaggcggtgggatgtgtcagcagaatgtctcctgcccccgag

SEQ ID NO: 177541 - DNA, 97 bp, Homo sapiens
gattgaccagaaccgtgatggcttcattgacaaggaggacctgcacgacatgctggcctcgctgggtctgggtcactacaatatcaccagctcgccc

SEQ ID NO: 177542 - DNA, 100 bp, Homo sapiens
gccgggacgcgttggccggggcgcgcggtgcttggctgcggtgctcacactcatgaggagccggaaggatatttggccttgacattaaaggcagagactg

SEQ ID NO: 177543 - DNA, 75 bp, Homo sapiens
gatgctaaaatggacccaatgaacatctgggatgacatcatcacaaatcgccctggtacctgacagtgtaaagaa

SEQ ID NO: 177544 - DNA, 100 bp, Homo sapiens
gtggagcgctgcgcggcgcggcggccgggccctcgagacggggacgggtgaccctggcccccctgggcccgccggcctcccgggcagcgtggggctgcag

SEQ ID NO: 177545 - DNA, 83 bp, Homo sapiens
gctgcagcacgcatcgaggctatggaccctgccactgtcgagcagcttctttgtgatattggccacagtgaagaaaaactggg

SEQ ID NO: 177546 - DNA, 75 bp, Homo sapiens
gaacgatgccagtcagcaaaccaagtctgttgcggttctcccacttttccataagcagaacaagaaccaaatcaa

SEQ ID NO: 177547 - DNA, 100 bp, Homo sapiens
cgaatggacggcgtgggaagaggtggaagaaaaggccaaatttgatgggatttttgaaagcctcttgcccatcaatggtttgctctctggagacaaagtc

SEQ ID NO: 177548 - DNA, 100 bp, Homo sapiens
caacattgttcctggaacgccctctttttaaaaaaggtcccttcaccgatgttgtcaccaccaacctaaagcttggcaacccgacagaccgaaatgtgtg

SEQ ID NO: 177549 - DNA, 50 bp, Homo sapiens
tgcacgagaagccaggctaactgacaacacaggcagttctacataccggc

SEQ ID NO: 177550 - DNA, 74 bp, Homo sapiens
gtatggtcaacattgatggaaaacaaatcaaactgcaaatctgggatacggtgcccctgggcgctgggattgct

SEQ ID NO: 177551 - DNA, 126 bp, Homo sapiens
cttttccggaccctgcagtggcgcctaaagtctgagagagggaagtcgcctctgtgctcgcagcggtagtagtggtgttcaattttgccatggttctgctcatttttcctgcaattctcagcatgg

SEQ ID NO: 177552 - DNA, 100 bp, Homo sapiens
gccagaggcttgaagtgtggggagaacttggtagttttgcggcctccaggtggtggatccaatttttcattaggttttgatgaaccaacagaacaacctg

SEQ ID NO: 177553 - DNA, 98 bp, Homo sapiens
cgagcggaggagcaggcgccggagatacactctgtgcagttttagagagagacacactcagtattcgagaaagtcgactttttggagctgttgtacgc

SEQ ID NO: 177554 - DNA, 100 bp, Homo sapiens
gtgcagcagcctggaactcgcgcaggtcctgcccccagatactctgcccaaccgcacggtcaccctctcggcttattccaggggtgtgtttcgtcgagat

SEQ ID NO: 177555 - DNA, 83 bp, Homo sapiens
cgcaccacctcctgctgccttcccgtcgccgctcccgaagcttttccaggcctgggttctgaggaaaacgcaatggtggccat

SEQ ID NO: 177556 - DNA, 75 bp, Homo sapiens
gtgctggacacactggaggcgctgggggcgaactttctgaccaagtatacaactacccagagggcctaggagaag

SEQ ID NO: 177557 - DNA, 85 bp, Homo sapiens
aggaggtgctcaagccatgttttggaaaagagaactcaaggtctggcagggagaaaggagcaagattttggatttagtaaagggg

SEQ ID NO: 177558 - DNA, 75 bp, Homo sapiens
tgtgtgagcgcgccggaccaagcgggcccagaagcggatacaaggcagatccaaccatccccaccgtggtcctac

SEQ ID NO: 177559 - DNA, 75 bp, Homo sapiens
caggagctgacagagtgatgggaaacgcgtgagccaggccgagaggcagaaggagaagacagcctgaagaagatg

SEQ ID NO: 177560 - DNA, 100 bp, Homo sapiens
agccagtgtgcagctccctaatgatgatgctcagtttgatgcgtcacactacgacagtgagaaaggaggttactgaagctaaaggagatgtttaactcca

SEQ ID NO: 177561 - DNA, 100 bp, Homo sapiens
tgaggaacgaaaacctttggaatgtctagatgcttttggagccactgatggctattcatatgaaaaggaagcaatggaaaattggatcagcaaaaagaaa

SEQ ID NO: 177562 - DNA, 87 bp, Homo sapiens
cacgcctcttctaccgggcgccccacgggccgaagccggttatcaatactctggctgaccatcatcatcgtgggactgactttggtg

SEQ ID NO: 177563 - DNA, 75 bp, Homo sapiens
caccgttcccccagccgggctgcaaccatgtccaagggacctgcagttggtattgatcttggcaccacctactct

SEQ ID NO: 177564 - DNA, 101 bp, Homo sapiens
gagaaggaaagcaccatgacgtccatccatttcgtggttcacccgctgccgggcaccgaggaccagctcaatgacagcattccttgaagaaaagaggaacc

SEQ ID NO: 177565 - DNA, 100 bp, Homo sapiens
aagcctactacgatggagtggccaagatcggtgagattgccactgggtcccccgtgtcaactgaactggctgctcactcccaaagcctgacaagttgatg

SEQ ID NO: 177566 - DNA, 100 bp, Homo sapiens
aatcgcaagcatattgatgaagtagtctatccaccacctgtggatcccaagaagctgattgattctttagaaactcagcagtaggccttgcctcagatcc

SEQ ID NO: 177567 - DNA, 73 bp, Homo sapiens
cgccctgcagctgcccaagcagttggcgctgtacgtttatgagtacctgctgcacatcggtgcccagaagtca

SEQ ID NO: 177568 - DNA, 100 bp, Homo sapiens
ccaaaaagtggcacacactggagagatatcagctttcttcgagagtcacccagctccttcagctgagcgtaccatccagcagtgttgtgaaaatattctg

SEQ ID NO: 177569 - DNA, 100 bp, Homo sapiens
gaagatgaacagggttcctggggcatcgacgatctccatatttcattgcaagtgtcttcaataggccgtgtttaagaggcgtcttacactccctgttgcc

SEQ ID NO: 177570 - DNA, 75 bp, Homo sapiens
acaagccagtgctaccccattcacagacatcaagtttcaggcagacactggaagaactttgccctggtccccctt

SEQ ID NO: 177571 - DNA, 100 bp, Homo sapiens
gatctccgaataactgaggcgtttctgtacatggattatctggtgctggagaatctggtaaaagcaccattgtgaagcagatgaggatcctgcatgttaa

SEQ ID NO: 177572 - DNA, 71 bp, Homo sapiens
atttttgacaatatgaaactccctgagcaactgtcagagatgtcttgaacaagtcagcaaagaaaaacagt

SEQ ID NO: 177573 - DNA, 87 bp, Homo sapiens
gtcatggagatccccgggagcctgtgcaagaaagtcaaactgagcaataacgcgcagaactggtcaaataaagtgcccgtggtgcag

SEQ ID NO: 177574 - DNA, 98 bp, Homo sapiens
tcagaaaacagctctggaaaatgacagccttcatttctctgaacatactgccttatgggacagatcaaaaggcattactgtacactgcggtaaatcag

SEQ ID NO: 177575 - DNA, 96 bp, Homo sapiens
aactctcatctccggccctctcggcgtccgccagcgatggcacagctcaccaaagctcatcgacaaggacacatggtgaaagtagattggctggat

SEQ ID NO: 177576 - DNA, 90 bp, Homo sapiens
gctcagtctcccaacacctctggtttttcttcccccagtccctcagctgctgctgctgctcaggaggtcagatctgccactgatggtaat

SEQ ID NO: 177577 - DNA, 99 bp, Homo sapiens
tggaccttctcagggagaaccagctcctcccagttaacaagcacaagccctggctggagcccacctaccacggcatagtcacagagaacgacaacaccg

SEQ ID NO: 177578 - DNA, 100 bp, Homo sapiens
tattattggccctccagatacactttatcactattccaggtcctcaggatatagccgtgacctaaacacagaaatctaccctggcggagctgatcttcta

SEQ ID NO: 177579 - DNA, 82 bp, Homo sapiens
aatgctccttctcctggagacgcaactcaagtgcacgatctgattttctggagagatgtgaagaagactgggtttgtctttg

SEQ ID NO: 177580 - DNA, 50 bp, Homo sapiens
ggaggagatcaaggagtacaagaatgatggtcgactgaggttgagccgtc

SEQ ID NO: 177581 - DNA, 83 bp, Homo sapiens
gcgtcgtgcgcctgggggtgcgcgcctgcgacctgcccgcctggcggggtcgcggccgtcaggggcactcagcgcgccgtcgg

SEQ ID NO: 177582 - DNA, 75 bp, Homo sapiens
aaaactaacagtctatgatgtcaaggataagtctcatgacaccttttcggctttgtgagaaaccttaccatcaaa

SEQ ID NO: 177583 - DNA, 100 bp, Homo sapiens
ccgggagcgcgacggcctggagcaggcgctgcggagggacgcccagctggagagcctgggggcggacaatgagccggagctggaagccgagatgcccgca

SEQ ID NO: 177584 - DNA, 119 bp, Homo sapiens
gaagtgcaaatcttccaagtctaatagacctaaagccacagtcttcaagagcccacggacaccacctcaacgcaatttcctgctgcagagagcattttaagaaaggacagcattcctgt

SEQ ID NO: 177585 - DNA, 90 bp, Homo sapiens
tggcggtgtctgccgggtccgcgcggacctcgcccagctcaggacttctgtttcctgctctcgacaagggctggtggcctgggaatcaat

SEQ ID NO: 177586 - DNA, 83 bp, Homo sapiens
cgcctggctcggagcagcagcctctgaggtgaccttatatccagctgtgaaaagtctgctgcaggagggcatttacctcatcc

SEQ ID NO: 177587 - DNA, 100 bp, Homo sapiens
gaggagtatgagtggtgtggacagaagcggatacgggccaccactctcctggaaggtggcttccgaggttaaggattcagccttcaagcccaccccccaa

SEQ ID NO: 177588 - DNA, 101 bp, Homo sapiens
acaaagacaaactggaggaaacctctggactgaaaattcttcaaaccggagtcgggtcggaaagcaatctcccgggcaggcctccagcatctggctcctgc

SEQ ID NO: 177589 - DNA, 80 bp, Homo sapiens
ctactacgtggtgcttggaaagggtcccgggattcttgagctgtgcccagctgacgagcttttgaagatggcacaataac

SEQ ID NO: 177590 - DNA, 98 bp, Homo sapiens
ccaagcttctctgtgaaagagcacagctgaagtctgagctggacatgctggttggcaagtgccgggaggaacccttggaaggtgatatgtccagcccc

SEQ ID NO: 177591 - DNA, 110 bp, Homo sapiens
acctggagcagctcttgaccctggctgtgtactagccaaaatgcaactggacaaccccagcaaggttcagcaggatgttggttcctgcaaacaagaactgaccctatcac

SEQ ID NO: 177592 - DNA, 74 bp, Homo sapiens
aacacctggcagactctgctccatgagagagcaaaatatgctgtgaattccatcaagaagaaagtcaacgacaa

SEQ ID NO: 177593 - DNA, 100 bp, Homo sapiens
gaattgcagagcttatgaaaaattggaatggtaacaaaaccagcaaatgaacaatcccaggacttctcaatacacaatgaagattttccagcattaccag

SEQ ID NO: 177594 - DNA, 78 bp, Homo sapiens
aagaatgtggagagttttctagaagcctgtcgaaaaatgggggtgcctgaggtcagaagttgagtagcaggggcctag

SEQ ID NO: 177595 - DNA, 100 bp, Homo sapiens
ggtgggctgcggagcgcggcgggcggcgccctgcacagcctggcgggtgaaattgccctcttggaaggcctgacagtggtatacaaaagcagtatagatc

SEQ ID NO: 177596 - DNA, 100 bp, Homo sapiens
ctgcactgtcgggtgcgctacagccagctcctggggctgcacgagcagacacctgaaagaccccgccgtggcatcccagggcttcctgatggccgcttcc

SEQ ID NO: 177597 - DNA, 99 bp, Homo sapiens
ttcctatgggctctcggccgaagtcaagaacaaggagtttccagatgtcttggaatgcactgtatctcatgcagtagaaaagataaatcctgatgaaag

SEQ ID NO: 177598 - DNA, 100 bp, Homo sapiens
tccagttcatctaactcttatttctccgttggcccaaccagtcccagcgctgtcgtgctcctctactcgagacgttttctttggaccaaagatctctttc

SEQ ID NO: 177599 - DNA, 78 bp, Homo sapiens
ggacatcactttagaccctccacctaattgcaggctgctggaaagtacagacaacaaggcagaaattatattgttgaa

SEQ ID NO: 177600 - DNA, 96 bp, Homo sapiens
gggagtattatgaaaagatcaggctgacccgcggctgattgagtccctctcccagatgctgtccatgggcttctctgatgaaggcggctggctcac

SEQ ID NO: 177601 - DNA, 83 bp, Homo sapiens
ccgggggaagctggccttgggacaatgcagatcttcgtgaagactctgactggtaagaccatcaccctcgaggttgagcccag

SEQ ID NO: 177602 - DNA, 97 bp, Homo sapiens
gatcccctgagcagtgcagaaaattccttgtctggaagctgccaatccttggacagagttttgcggcctccaggtggtggatccaatttttcattag

SEQ ID NO: 177603 - DNA, 100 bp, Homo sapiens
cagatttctactgatttgcaagatctggtcaaatttcagccatcagcaaatcatgcatgccccgcggtccagggacaggttcacagcgccgtccttcatc

SEQ ID NO: 177604 - DNA, 75 bp, Homo sapiens
gcgggaaggtgcggggagcggagccatggcctccggtcagcaaattaaaacgtcacattcgctctcatactggag

SEQ ID NO: 177605 - DNA, 75 bp, Homo sapiens
gttacaagaaccagataggacaaggccaactgctttccagccagagaaccaaataaatgttccagctctggatac

SEQ ID NO: 177606 - DNA, 140 bp, Homo sapiens
gtcctgagatcaaatggcacttcattggccacctacagaaacaaaatgtcaacaaattgatgggcagtttggtggttatgccaaggaagcagactacgtagcacaagccacccgtctgcgtgctgccctggagggcacag

SEQ ID NO: 177607 - DNA, 100 bp, Homo sapiens
gtggatgcaatttatatgccactgaagagggacccattaatattggtggattgcagcaatttgctactgagatatccatctctcctcgaacaacaaattc

SEQ ID NO: 177608 - DNA, 99 bp, Homo sapiens
cccgcgagcacagagcctcgcctttgccgatccgccgcccgtccacacccgccgccagtgcagggctcgcggcctggcaagaatgtacagctgacagag

SEQ ID NO: 177609 - DNA, 50 bp, Homo sapiens
gcaatccttggctcactgaggaggtttgatctcagtcatagtggattggc

SEQ ID NO: 177610 - DNA, 75 bp, Homo sapiens
ccaggagaggagcactttgaggacatggcctccgacgaggacatatcctccgagcggcggcgacggctgttgcta

SEQ ID NO: 177611 - DNA, 100 bp, Homo sapiens
tgaaaactctgagtgatgttcagaagtttgcagagataaatgatgcctgtgaggagccaccaacatttgaagctatggagctcattggtaaaccaaaacc

SEQ ID NO: 177612 - DNA, 74 bp, Homo sapiens
agacaagacacttttcagaaagacagtttggatttaggtggcgagtagaaaaagaagtaatttcaggaaaaggt

SEQ ID NO: 177613 - DNA, 74 bp, Homo sapiens
gtcggcggacgaggggcccccgggagacctcctgccccccgaggtctgcagtctcctgaacccagcagccatct

SEQ ID NO: 177614 - DNA, 97 bp, Homo sapiens
ttacctggaacttcatcatcatctacttcacaggaattgccatttgtcaccaaaaacagtggcatcatccctgggccagattccaatgcaaaggcaa

SEQ ID NO: 177615 - DNA, 100 bp, Homo sapiens
ctccgcaaggagggatggctgccttaaacatgagttctgcttggattctgctagacagacccgacaaagactgtctatcaactggtccaattttagcttg

SEQ ID NO: 177616 - DNA, 98 bp, Homo sapiens
agcgctcgcctctcgccctcgcttctccagcgctccttgctcgcaaggcgggggaggcggcggcccagccacgatgagatgtctctgagttgacggga

SEQ ID NO: 177617 - DNA, 100 bp, Homo sapiens
tgtaatggcctttcttatactctagaatatacaaagacaaaaggagattctgatgaagaagttattcaagatggaattgaatgatctggcacgggaccct

SEQ ID NO: 177618 - DNA, 142 bp, Homo sapiens
gccaggaggacgggccggcaggatggagagcgaatctgaagcccgtggacaggagaagcccagctgagagtggtggggtcagatgctgtggactctgggacctgcagctctgcctttgctggctgggaggtgcacacgcgag

SEQ ID NO: 177619 - DNA, 87 bp, Homo sapiens
tcaagatgccagcatcccagttgagaaacttccccggctgttgtagaatctgctcagccagggaggggaaaggagtcggcaatcagg

SEQ ID NO: 177620 - DNA, 98 bp, Homo sapiens
caaccctgaggggcggccgggcagcgccgccaccatgttcctgggcaccggggagccggccttggacacgttactccacaggatccgctgaacatagg

SEQ ID NO: 177621 - DNA, 100 bp, Homo sapiens
cagactggttttgaattcctggcctcaaacgatcctcccaccttggcttctcaacgtgctgggattatagggatctgactgcagccatgagcagcaatga

SEQ ID NO: 177622 - DNA, 83 bp, Homo sapiens
ctggggagtgtctgtctgtgcaggtggtcaactgcagccgtgtattcagccttagatctcttacctcagctagaagctccgag

SEQ ID NO: 177623 - DNA, 98 bp, Homo sapiens
tgaaaagtcagatcttctgattttagattttggtacatttcaggtgtatctacatcagcaatcaaaatggcatcaaccagacttccttcccccaaaag

SEQ ID NO: 177624 - DNA, 75 bp, Homo sapiens
tgttttcctcacattcctcaagcagctgcaggtggagctggagcaagaataccaagacaaattcaaaagactgcc

SEQ ID NO: 177625 - DNA, 100 bp, Homo sapiens
tcagagcgagtctcggagaagatgtggtggcttccgtttgttggtggaggaggtggcaggcctcggcgcatgcttttcacttccactgcatctctcgctg

SEQ ID NO: 177626 - DNA, 76 bp, Homo sapiens
ccaccctacaagtactgaaaaggcacaggccctagcacaaaacacagatcttaaagaacgcttacgcagaatccat

SEQ ID NO: 177627 - DNA, 100 bp, Homo sapiens
cctcctgcaacacctgcggcctcactgggacccccaggaggtgaccctgcagattacctctctagtgacccttcagctgttaaccctggttggccatgac

SEQ ID NO: 177628 - DNA, 99 bp, Homo sapiens
ctatggcaacttatgcaagaaactgttgaattagacccgtttcctatagatgagaaaccatacaagctgtggtaccatatggctctgactgaaacctgg

SEQ ID NO: 177629 - DNA, 88 bp, Homo sapiens
gtcgagacgccgtccgccatccagatctgccgaattttcccactgtaaaaaaccgagcaagtctggataagtgaggctggctccatgt

SEQ ID NO: 177630 - DNA, 100 bp, Homo sapiens
ctcctaccatgttgagggcacaggatatgacacttacctccgagacgctcataggcagcagcacaaagctcggctggaacgccgggtcactggctcaacc

SEQ ID NO: 177631 - DNA, 74 bp, Homo sapiens
tgacgaggaggcggatcccccggcgtcaggttgaaggtcgaggagctggaaggcgagcggagtcggctggagga

SEQ ID NO: 177632 - DNA, 75 bp, Homo sapiens
tgtgaagataccagtttgcgtcaggagacacagccccacaccagtgagaagcatcagcaccgtgaacttgtctga

SEQ ID NO: 177633 - DNA, 87 bp, Homo sapiens
atgttctttcaagttcacttgaggcagaacacagagagaacgaggtgctcaaagtccaactgaagaaatatgtaggagctgtccaga

SEQ ID NO: 177634 - DNA, 111 bp, Homo sapiens
ccaagagtgagatactggagactcatgggaccatgaactttctaggtcaatgggaaggatctttcaaaggccactcatgaagaggcagtggaagcttttcgcaatgccaag

SEQ ID NO: 177635 - DNA, 75 bp, Homo sapiens
gggacggccggtcaggctcgccgccgagctgaatagcctaacatggcagaccagagacagcgctcactgtctacc

SEQ ID NO: 177636 - DNA, 88 bp, Homo sapiens
agatgctgaagacaccatccaaagatagcttggatccagagatgaggtcttgctgtgttgtccaggctggtctgcagctcctggcctc

SEQ ID NO: 177637 - DNA, 97 bp, Homo sapiens
aagggcgctgttttcgacaggtgtgcaggtttcggcacatggagattgatgtgtctgacttccagcaactgctggcctgtgccagggtgcaagctga

SEQ ID NO: 177638 - DNA, 90 bp, Homo sapiens
ttggatgattcgtatctaagactctgggacactcctgaagtcgggaaatgtaccaaaagaattggtggagctccatttgaagctgatgag

SEQ ID NO: 177639 - DNA, 50 bp, Homo sapiens
atcaaaacaagccctccaggaactcacttaataaaggtatccatggagaa

SEQ ID NO: 177640 - DNA, 101 bp, Homo sapiens
actacaacatattgctgcaatcaggaccattgcaataaaatagaacttccaactactgctcacaaggagatacattcccagcaagtgaaggagcacaggac

SEQ ID NO: 177641 - DNA, 75 bp, Homo sapiens
agggggaggcagcggtggaggaggcaactaccgaggaggtgatggaggcctttgagcaggccgagcggaagccca

SEQ ID NO: 177642 - DNA, 87 bp, Homo sapiens
accgagggccatggggccctctccatttctcctctcagcagaagtccaggttcccatgcagacatatctgaagagatggattaagaa

SEQ ID NO: 177643 - DNA, 75 bp, Homo sapiens
gagaaagagcaggtggaaaagtctgcttatgagttttctgagcttcttaatgaagaggataactcagaatcatcg

SEQ ID NO: 177644 - DNA, 75 bp, Homo sapiens
attctctcccaggccacaagacatttcctgctcggaaccttgtttactaattattggcacttctctgtttgatga

SEQ ID NO: 177645 - DNA, 100 bp, Homo sapiens
aacatggagagaatcatgaaagcacaagcgtaccaaacgggcaaggacatctctacaaagtatgcagatgcattatttaagtcatccgatatcagatcag

SEQ ID NO: 177646 - DNA, 75 bp, Homo sapiens
ccggccgaggcggtgctgcaagagaaggcactcaagtttatgggtgtacagcaagctgtgattcctgggaaaact

SEQ ID NO: 177647 - DNA, 75 bp, Homo sapiens
ggactggaacctctgggcccactaagactttgaccccgacgcaggcttcagtgattgccgcggatcagaagcctg

SEQ ID NO: 177648 - DNA, 100 bp, Homo sapiens
gacaattatgacaactgaaatgagacatgcacataatatagaggagaaggcagagcccccccaggctatgaatgccctgatgcggttgaaccagctgaag

SEQ ID NO: 177649 - DNA, 75 bp, Homo sapiens
tcgccgccactgccgcaggaggcgtgagcatttaaatcaaacggtattgagatggattgggttatgaaacataat

SEQ ID NO: 177650 - DNA, 73 bp, Homo sapiens
ggaggccctggagctgatcaacggcttgctgggtacttcactatttttgtgaagtgaagttcaaaagtgatca

SEQ ID NO: 177651 - DNA, 100 bp, Homo sapiens
ctgccctcatccacgatggcctagcacgtggaattcgcgaagctgccaaagccttagacaaggtaagggactgttctgaagaacctttccatttagtgat

SEQ ID NO: 177652 - DNA, 75 bp, Homo sapiens
ctcgctggcaccccgaacgggttgcttcccccgctgcgagtaagactttgaccccgacgcaggcttcagtgattg

SEQ ID NO: 177653 - DNA, 90 bp, Homo sapiens
cagtgtgacagtccatatgtaaccaaatattatggatcctatctgaaggctgagtcatcactagagagtgggaagggcagcagcagcaga

SEQ ID NO: 177654 - DNA, 92 bp, Homo sapiens
gattcgcagtggtcgcttcttctccttggttttccctgatgaatttcacctccagactttgaatccttttcttcgggcctgtgctgagttac

SEQ ID NO: 177655 - DNA, 97 bp, Homo sapiens
ctcagcggtgttggaacttcgttgcttgcttgcctgtgcgcgcgtgcgcggacatggcctcaaacggtgccaagtcctgccctgccaacttcttggc

SEQ ID NO: 177656 - DNA, 97 bp, Homo sapiens
ggtacatgcagggacagatacaaacggagatatctttttcatggaggtgcgtatagcagcaaaattcatcattcatgcccctcctggagaatttaat

SEQ ID NO: 177657 - DNA, 95 bp, Homo sapiens
aagccattatgaacatgcaagaaaacagcatgcaggtgtctgcaaagatctgagagacctgctgtgtgaccctgagccctcgctgtgcatcatcg

SEQ ID NO: 177658 - DNA, 82 bp, Homo sapiens
ctttttcagaaatgcgcagagcaaacatctttcaaaggcctgttacatgaacagaatatggcaaaaatgagactacttactt

SEQ ID NO: 177659 - DNA, 98 bp, Homo sapiens
cagaggctgttagctatggctgacttaattcagtgcacaaatgagatgaatgtgaacatcccacagttggcagacagtttatttgaaagaactactaa

SEQ ID NO: 177660 - DNA, 96 bp, Homo sapiens
agaaggggctggatccgtgggtcagagaacacaggaccagtttgccatcccaaggccgaaggtctcggcgcggaagatggccggcggcgtggacgg

SEQ ID NO: 177661 - DNA, 75 bp, Homo sapiens
ctgagtcaccatgctagcactgtgcaggcactcgcgggtgagataagtccatttctgtgcagcggcagtcaccag

SEQ ID NO: 177662 - DNA, 75 bp, Homo sapiens
aggacaagctcctacaaggcaggcagtattgggtgcaggttttggatctatgctccgagcacttggtgctcagat

SEQ ID NO: 177663 - DNA, 74 bp, Homo sapiens
atcacagcagtgttccaagttctaaagagccctgggcatttccagctcgagagttccttcgaaagaagctgatt

SEQ ID NO: 177664 - DNA, 96 bp, Homo sapiens
ctgctttttcatcccagcagcaaccatttcagactcgagtttccacctcccacctgcaaggcccaagactgacgtcagcgctgacgtaccagatgg

SEQ ID NO: 177665 - DNA, 100 bp, Homo sapiens
gaaaatattctctttggaatgggaaatcctctgcttgacatctctgctgtagtggacaaagatttccttgataaatatttgatttaatggatgccaaagc

SEQ ID NO: 177666 - DNA, 87 bp, Homo sapiens
ccgccagcagcactgtggaggccgtcctcggatgggagtcccagcttctggagacggggttcctggggatcttcctgtgccctctgt

SEQ ID NO: 177667 - DNA, 101 bp, Homo sapiens
ctccttttcgtttccggaaacatggagggtgaggacaaaatcttcttaatcaacaagcttcactccatctacgagaggaaggagagggaggagaggagcag

SEQ ID NO: 177668 - DNA, 136 bp, Homo sapiens
tctgcatttcaagaacaacctaccagagaccttacctgtcaccttggctctcccacccaatggagatggctctaatgatcataaggcctatgggttttctgccccaaaagaccaacaagtagtcacagcagtagag

SEQ ID NO: 177669 - DNA, 101 bp, Homo sapiens
ctgttcaccagcactgtctccaccctagagtttttcaatcaagtcctggtgctgggaagatcatcagtaagtgatttgtcagaacatgtatttgatctgat

SEQ ID NO: 177670 - DNA, 100 bp, Homo sapiens
ggcccgcgcctagccccggcctcggccccggacccgattactgattttgggcactccaagattttgggagagacctctctcatgagaaccttatgtggaa

SEQ ID NO: 177671 - DNA, 82 bp, Homo sapiens
tctgatgctgtggaacttgcaaatcgaaggtatgggcgacattgaaggactgatagataaagtcaacgagttgaagttggat

SEQ ID NO: 177672 - DNA, 97 bp, Homo sapiens
gccatctttgccctgatgagctcctgtttagccactgcaggttgaagaaatatggagatcaacacaaaactgctcatcagtgttacctgtatcagct

SEQ ID NO: 177673 - DNA, 76 bp, Homo sapiens
ggctcccactgattctacattacgttgaccttcagggtcctctgtttcttggaactgatcgaaaacacatcacgca

SEQ ID NO: 177674 - DNA, 100 bp, Homo sapiens
atttgaaccatgtttggattgaagccgcctctgtattacttaccagacgtggctggaccccgaccctgccaacgctccctgtcggtgctcagcccccgcc

SEQ ID NO: 177675 - DNA, 100 bp, Homo sapiens
atgtctgtggggccgccggcggcccggcttcaggtatcatgatattagctggtttgacatcaagtcatttgtgagtcatcagatcttctcctgaaaatgg

SEQ ID NO: 177676 - DNA, 106 bp, Homo sapiens
ccttctccactttcgccagcccgtgccgcgagcgcggcctgcaggagctccttccgcttccagccgttcgagtcctatgactccaggccctgcctgccggagcaca

SEQ ID NO: 177677 - DNA, 100 bp, Homo sapiens
gatgccagacatcatgagggccgttaccattacgatccatctccgattcctccattgcatattacatcatctggctgccagtccataatctacatacccc

SEQ ID NO: 177678 - DNA, 75 bp, Homo sapiens
gccatttcctcaccgacgccgacatggtcatgagcttcgtcaacctcgccccccgtccagctccgacgccggcct

SEQ ID NO: 177679 - DNA, 101 bp, Homo sapiens
atctcccgattatcaaaaacaatgggcaagtctacacatacccagatggtaaatctggcatggggccatcactgtgcatgtccccatgccctcagcaggag

SEQ ID NO: 177680 - DNA, 82 bp, Homo sapiens
cggatgtgaggcgatccgctggcgctagtctgaccctccgccaggcaaaaggaaggtgtcagaaactatttaaaagaagcac

SEQ ID NO: 177681 - DNA, 50 bp, Homo sapiens
gggcatcccccctaaccctgaggacagaattccttgatctatgaactttt

SEQ ID NO: 177682 - DNA, 74 bp, Homo sapiens
caaggagtggactagggtcgccggggaagcgggcatgcatgtagggaataccggattcataaagagctggatca

SEQ ID NO: 177683 - DNA, 88 bp, Homo sapiens
ggccgttttcatggctgcttaaaatggtctatggtctgtctcttgtggtcccggaacagcaagcccgtgcacaccaccatcctgaatc

SEQ ID NO: 177684 - DNA, 100 bp, Homo sapiens
tcgcttcacggaggcaatagctagccgttggggaatggcggtcaatgtgtattctacctcgataacccaagagactatgagcagacatgacatcattgca

SEQ ID NO: 177685 - DNA, 100 bp, Homo sapiens
gcctttgcctcctccctaaactccaatgatgtctttctgctgcgaactcaggcagagcactacctgtggtatggcaaggatacagttgatatattagttg

SEQ ID NO: 177686 - DNA, 97 bp, Homo sapiens
aacactgccggatcaggatcgtagttctcaggcacggaatgggggcagctggcattttatgctatgtgggagcctatgtcttcatcacttatgatga

SEQ ID NO: 177687 - DNA, 100 bp, Homo sapiens
cagcggcgcccgccaccggctccctcgggagctcatcttcgtggggcgtgaggagtgtgagctcatgctacaggcacattcaggaccccgcgagccagcg

SEQ ID NO: 177688 - DNA, 88 bp, Homo sapiens
cgcatcaggcatgaagaagaatatctatggcaatatcgaggacctgaatctacctgttactcgtattttggacaatcttatggagatg

SEQ ID NO: 177689 - DNA, 98 bp, Homo sapiens
cacaggccggagagagccgtaggcaggaccccgggacaccctggaagccaggaaatgacaatgcagatcttcgtgaagactctgactggtaagaccat

SEQ ID NO: 177690 - DNA, 75 bp, Homo sapiens
aaaagcaggttttcacttctgagaaattcctggtcatggcttcagaggatgaataagaggctgatggaacctgca

SEQ ID NO: 177691 - DNA, 98 bp, Homo sapiens
ctgcccagctgcctgcccccggaggtgcccacgcagctgcctggacaagcaagaaactatattcagtctttgactcagatgccgaagatgaactttgc

SEQ ID NO: 177692 - DNA, 119 bp, Homo sapiens
cgcgtctctctgctgcggcgcggggaccgctgtgctctcggtgcaaacggcctcctcattgagtatgaagacatgtttccctacgagggccctctgaggctgctgagggccaagtacgc

SEQ ID NO: 177693 - DNA, 83 bp, Homo sapiens
tgaaaacagctcggcccccagagagctccgaaccttctatcatggaagggaagtggttgctgtgtatgttactggtgcttgga

SEQ ID NO: 177694 - DNA, 74 bp, Homo sapiens
gggcctttccagcccgtggtccttctccatattcgagcacacgtcacatggagatgggcgtcaagaagttacct

SEQ ID NO: 177695 - DNA, 82 bp, Homo sapiens
aactttctgggcgttcatgatcctggccagcctgctcatcgcctactgcagaaggtgctcgggtcttcggggcactgggtcc

SEQ ID NO: 177696 - DNA, 75 bp, Homo sapiens
ctagggctggagcctctccagcctcccgcgaagataatcaatatgcatttccaagccttttggctatgtttgggt

SEQ ID NO: 177697 - DNA, 75 bp, Homo sapiens
ggcgatcaaggccaagtatccgccagtcaataggaagtacgagtcgccctcacaaagccaatgctgaggagatga

SEQ ID NO: 177698 - DNA, 99 bp, Homo sapiens
cattagcgtgaaaaccacaagcaggtccaaagagagaggcactccagtgtttgtccatgctggcccgtttgccaacatcgcacatggcaattcctccat

SEQ ID NO: 177699 - DNA, 83 bp, Homo sapiens
ggccaaccagtgcctctcccaagtggattgtattacacagagcatgaatatacttctttaggttacacgcatggggagatact

SEQ ID NO: 177700 - DNA, 89 bp, Homo sapiens
ctttttccggcagattttggctctgactggatggggttaccgggttatcgctctttcaagatgttagaaagttcaagccagaagtttct

SEQ ID NO: 177701 - DNA, 80 bp, Homo sapiens
ccacttatgtttgtaaatgtgagtggaagccatgaggccaaaggcagttgtattgcataccataaagtctccaaaggatg

SEQ ID NO: 177702 - DNA, 95 bp, Homo sapiens
tgtggaccctcgtgagcgacccggacaccgacgcgctcatctgctggagcccgcggtggtgtctgtggatgggcggcccgtgagactccaactct

SEQ ID NO: 177703 - DNA, 100 bp, Homo sapiens
gagttgctgtcattctctctgtctgtcatgctcgtcctcatctgggttctcactggccattggcttctcatggatgctggacccgcaggccctgcaggac

SEQ ID NO: 177704 - DNA, 98 bp, Homo sapiens
tcaaaccagtcagagatggagttctcttcacttcaggacatggccatgttacaggagctgaattttggtgcatatttgggtcttccagctttcctgct

SEQ ID NO: 177705 - DNA, 89 bp, Homo sapiens
acgaggcgattgcgggggcctgggctagaaagatggatactatgatgctgaatgtgcggaatctgtttgagcagcttgtgcgccgggtg

SEQ ID NO: 177706 - DNA, 82 bp, Homo sapiens
ccatgagcgagtgcctgacatgcagacctatccaccactcccagatatattcttagacagaatcagcatgattcttcagagg

SEQ ID NO: 177707 - DNA, 50 bp, Homo sapiens
cggcgccggagacgatgccgttgagaagaaactgaggcctggaatttgat

SEQ ID NO: 177708 - DNA, 75 bp, Homo sapiens
gttgccttggaaaatgccaacgccgtgtctgaaggaatatattaaaggaatctgtgaacctgaactagaagaaag

SEQ ID NO: 177709 - DNA, 85 bp, Homo sapiens
acgggctcaaccagcgcgtgcgggtgctggacgagaggaaggcgctgatcccctgcaagagtattctgacaagtccctgtacacc

SEQ ID NO: 177710 - DNA, 100 bp, Homo sapiens
gactgaccctggagctgaaggccaggttttgcagtggtctgaggcagcctgcttctgcaaagtggtacgatcgaagggactatgtcttcattgaattttg

SEQ ID NO: 177711 - DNA, 95 bp, Homo sapiens
acaatatcgccaagaggacagcatctggtcacttcttcacgaacgatcctggatgcaaatgaagaatttaagtccatgtcgggcaccatccagct

SEQ ID NO: 177712 - DNA, 83 bp, Homo sapiens
caaggctgacgtggagcggtacatcgcctcggtgcagggctccaccccgtcgcctcgacagcagtgcctgatttgagatgggg

SEQ ID NO: 177713 - DNA, 100 bp, Homo sapiens
caagtctgccttctctccgcagaacgtggacgctaaaaccctgacttaccattttaagctttagaagagtgttatagttttgccgctggactcttccctc

SEQ ID NO: 177714 - DNA, 137 bp, Homo sapiens
gggtgggcaaggcagtggtcagcgacccgcagtccatctgactcctgcttcccgggtgttgctcgtcaactgaacgaggaagggatgctgttggcttcagagatcaaacacctgccccgaagactcctaataggtca

SEQ ID NO: 177715 - DNA, 145 bp, Homo sapiens
cgccatgacccgcagaccaccaacctcctgtatctggagctgggagacaagcccgcgcccaacaccttctatgtagatggagtctcattcactctgtcacccaggctggagtgcagtggcaccatccttgcccactgcagcctcc

SEQ ID NO: 177716 - DNA, 97 bp, Homo sapiens
tcagtacaaagccgtgaagtcagaggcgaacgccactcagcttttgcggcacttggagatgttccatttaagcagacctcttccatagctgtagctg

SEQ ID NO: 177717 - DNA, 100 bp, Homo sapiens
gctgggtcggtggcggaggctgaggagaaggaggagcgggccgtggaggcttcgccgcctagtatcccttttactattcagcgactatgtgaattgttaa

SEQ ID NO: 177718 - DNA, 50 bp, Homo sapiens
aagacgatgaagccccctctgatgtgtgttctaggtcagtggcttcaaag

SEQ ID NO: 177719 - DNA, 136 bp, Homo sapiens
atgttcctccccggctttctcctcctcctccagttaccaccctcctccctagcataaagactgcatcaaaacatgtaaacaaggacctcggtaatatggaagaaaacaaaaagttagaagaaaacaatcacaaaac

SEQ ID NO: 177720 - DNA, 50 bp, Homo sapiens
agagctggacctcaccagcaaggtctccacctctgggcaggagagttgcc

SEQ ID NO: 177721 - DNA, 83 bp, Homo sapiens
gtccgcatcgccacagctgaaggctgcgagggactaagagcagagttttaaaatcaaagatgggaaaatcggagaaaattgcc

SEQ ID NO: 177722 - DNA, 100 bp, Homo sapiens
gctgacagaggcagggtttgagagtgccgagaaagcatccgtggaaacgctgacagagatgctgcagagctgagaaatgctgcgcaagaaacgaagggag

SEQ ID NO: 177723 - DNA, 96 bp, Homo sapiens
aagccaagagactgcttttgagtgacatttatttagcagctagtaacttcacttatttcaggctcctggtaacgtttttatccatggatgacttgc

SEQ ID NO: 177724 - DNA, 75 bp, Homo sapiens
aggctctggactcctaaagctctggagcggcaaatgttctgaaaaagactctgcatgggaatggcctgccttacg

SEQ ID NO: 177725 - DNA, 97 bp, Homo sapiens
ttctagattgaagagtacttgtatttatggaggtgctcctaaaggtccccagattcgagacttggaaagagatgcttttcatcagatcattcgcgat

SEQ ID NO: 177726 - DNA, 74 bp, Homo sapiens
cgcgaacacctcactattgatggtgtagcgctttaggggaaggttttgaacgaagaatgtgatcagaactggta

SEQ ID NO: 177727 - DNA, 75 bp, Homo sapiens
actggattcgtggcgccacaagctcattcactgtgtaggttcagcagctggacatggagaaccaacgctcatcac

SEQ ID NO: 177728 - DNA, 99 bp, Homo sapiens
ctgcaatggcgctgtcgtgtacccttaacaggtatctgctcctcatggcgcaggagcatctggagttccgcctgccgacaaatcttcctattttcaagc

SEQ ID NO: 177729 - DNA, 100 bp, Homo sapiens
gaagccggcgctgctctgtggggctctggccgcgcctggcctggccgggaccatgggcgcggcacggtccaggcgctgcacgcgacgggcgcgcgggtgg

SEQ ID NO: 177730 - DNA, 82 bp, Homo sapiens
ttaaggaacaggaggaaaccattcagagaccatgaaatggaggctcagggggtgaagggactgatcaagatcattcagcaat

SEQ ID NO: 177731 - DNA, 100 bp, Homo sapiens
aggaactcacagagtggattccggtgttggagcgggccggagagaagtagagtgggctgcgaggagaaggaaacaggcctttcggaggctcctcatccct

SEQ ID NO: 177732 - DNA, 75 bp, Homo sapiens
tggaagagttctacagctttggcgagtctatgtgaattacatgaacgacagccttcgcaccgacgtcttcgtgcg

SEQ ID NO: 177733 - DNA, 51 bp, Homo sapiens
gagagggctaccttgtgaagaaggttaaagatcgaggtccggaagccacta

SEQ ID NO: 177734 - DNA, 80 bp, Homo sapiens
ctttattgatattgcctgcgatgaaattccagagcgctactacaaagaatctgagaagaatcctgcaaaaatgtctctct

SEQ ID NO: 177735 - DNA, 90 bp, Homo sapiens
cacaaagtcaagagacagcgattggacagaatttgtgaagtgctacacacgcagggccctgtcgatggcagcctttacgcgaaggtgagg

SEQ ID NO: 177736 - DNA, 82 bp, Homo sapiens
taggaggcacagggcgtcggacctgcacgagctgtctggtgatggctggaccggcggaggaggcgggagcccattgtcccga

SEQ ID NO: 177737 - DNA, 75 bp, Homo sapiens
cctcaatgtcacgctggtgccctacggaaacgcacaggaacgtttggaaattgctagtttgtcaaaccaagatca

SEQ ID NO: 177738 - DNA, 93 bp, Homo sapiens
ccctggagcctcagttggaagcagccgatccagcctgcggagcctgtggggcaggtgagatttgtggatttaaaattcacgggcagaatgtcc

SEQ ID NO: 177739 - DNA, 51 bp, Homo sapiens
ggactttccacaagcaagagctaactagggtagagacggggtttcaccatg

SEQ ID NO: 177740 - DNA, 101 bp, Homo sapiens
cagagcagaagaaccctcttggactggacgatttgggaattcaaaacttgggacaaactgtcagccttggaaattcgaaatgagtcccatgactatcctca

SEQ ID NO: 177741 - DNA, 78 bp, Homo sapiens
caaatccaagtcgttcttcgacaacatctcttctgaactcaagaccagcatgagtcaagacactgaagttagaagtcg

SEQ ID NO: 177742 - DNA, 75 bp, Homo sapiens
atctgtccagcatgactcatccccgggagtgttgagtgctggagaatctggtaaaagcaccattgtgaagcagat

SEQ ID NO: 177743 - DNA, 50 bp, Homo sapiens
ggaaacaaggcttccagtgccaagatagtagagctgaagctggagcatga

SEQ ID NO: 177744 - DNA, 100 bp, Homo sapiens
agactgctgagcccgtccgtccgccgccaccacccactccggacacaggttttttattggcacctcagtctcaacattttcttttcggattcatgaggaa

SEQ ID NO: 177745 - DNA, 82 bp, Homo sapiens
gctggtgcagccaccctcgctccctctgctcttcctcccttcgctcgcaccatgagccccacagtcttcgttataacctcac

SEQ ID NO: 177746 - DNA, 90 bp, Homo sapiens
aggaaatgataaagaatcaatgataacgttattaccacgggggtcagaccaggatccacccgaggaagggctgaagaagatgcagagcag

SEQ ID NO: 177747 - DNA, 74 bp, Homo sapiens
ggaaaacagtccagatccccgtgtatgactttgtctcccattcccggctcttcctggtcagcagcactgctatt

SEQ ID NO: 177748 - DNA, 98 bp, Homo sapiens
gagaggtctctgtgacgattttgaatatgcttttaaggctattaaccagggtggccttacatcagtagctgtcagagggaaagactgtgcagtaattg

SEQ ID NO: 177749 - DNA, 95 bp, Homo sapiens
tgacgtcatccttgaagccgaccagaatgatagccagtccctggagctggtgcacaggttccagatgcctgaggaaacccagacccaagaccaac

SEQ ID NO: 177750 - DNA, 51 bp, Homo sapiens
gatctccgccctggggtcattgtcaggaagctcttcgtgggcggtcttgac

SEQ ID NO: 177751 - DNA, 79 bp, Homo sapiens
tccggagatcccggcctcacttcgtcccactgtggttagggcctcctgacaaggtgatccgggcgggccccgcaggaat

SEQ ID NO: 177752 - DNA, 100 bp, Homo sapiens
cctaaccgccgaatgcgttcggagatgtgacagacaggaagctgactatggaagaagaggaggccaagaggatagcagagatgggaaagccagtattggg

SEQ ID NO: 177753 - DNA, 75 bp, Homo sapiens
taatgatagtgatgaagcttttgaatgtgtttcatgggactcccttccggatgagctgctcttgggaatcttttc

SEQ ID NO: 177754 - DNA, 117 bp, Homo sapiens
cccagaaggacctgtacagggatgtcatgctggagaactacaggaacctggtctcactgggctgctgacttgagtaaaccaatagataaaaggatatacaaaggaacacagcctact

SEQ ID NO: 177755 - DNA, 100 bp, Homo sapiens
cttcattctgcaaccaccagtcttccacccggtgaattcatcattggccgagttatcaaagccatgaataacagctggcatccggagtgcttccgctgtg

SEQ ID NO: 177756 - DNA, 87 bp, Homo sapiens
gagatcgacctggtcaaccgcgaccctaaacacctcaacgatgacgtggtcaaggccaaatttgagtttcatcatggtgactatgaa

SEQ ID NO: 177757 - DNA, 75 bp, Homo sapiens
cacgacaccatgcatctcctcggcccctggctcctgctcctggaacctcaagaaggcatgaagccagcccctgca

SEQ ID NO: 177758 - DNA, 75 bp, Homo sapiens
aaagaggagaggcacccgatatatgttctctaggccttttagaaaacatgattgaagccttcagctgactgtggc

SEQ ID NO: 177759 - DNA, 50 bp, Homo sapiens
gacgcgcacgctgtaggaaaactgcttcccagcagcggcttatggaccag

SEQ ID NO: 177760 - DNA, 90 bp, Homo sapiens
agaatctgctctacccgacttaacagctgttgaaggctggattctctttgtaactggagtccatgaggaagccaccgaagaagacataca

SEQ ID NO: 177761 - DNA, 100 bp, Homo sapiens
aggtgttctaatgacattagtctttgtcttgctgttggtgaaaagattcattccgaaggttcaaaccttgtactactcagctgatcacaagctgcttgat

SEQ ID NO: 177762 - DNA, 82 bp, Homo sapiens
ccggaaaagcagtgcctgtaggaggaacaacggtttcgctctttggaaaatacgggaatctgagaaaaaggggttgattgaa

SEQ ID NO: 177763 - DNA, 98 bp, Homo sapiens
atacagaattacgcatttccacttctaatggttgctccttgagggcaggacagttcttatggctttatccgttgcgtaagcacagagaggtctgcgag

SEQ ID NO: 177764 - DNA, 75 bp, Homo sapiens
atctctgttccaaatgctttgctgaacagcgatttcttgcgggagctcgtgatcaccatcgccagggagggcctt

SEQ ID NO: 177765 - DNA, 82 bp, Homo sapiens
ccatctcacaactgctcgcgtgacgaccgcattcgtggcagccgcttacaaacacgcagatggcaagaagattgatggcagg

SEQ ID NO: 177766 - DNA, 101 bp, Homo sapiens
ttacaggcacgcgccaccactcccagggtaaagcccacagcttgaagccaagcataaaggagaagctggcaggcagccccattcgtacttctgaagatgtg

SEQ ID NO: 177767 - DNA, 101 bp, Homo sapiens
atgctgaacgtcccttcccagtctttcccggcccccaggtcgcagcagcgtgtcgcctccggggggcgtagcaagggaaatcctcattgacgattcaattt

SEQ ID NO: 177768 - DNA, 90 bp, Homo sapiens
tgcgcgccgtgggcgccgagccccatttcttcgatcgcagctacgacaagggcctcgcttggtaccgagctgaagaagcaggtggagagt

SEQ ID NO: 177769 - DNA, 90 bp, Homo sapiens
ccgccaaggtgttcggtccttccgaggaagctaaggccgcgttggggtgagaccctcacttcatccggaaaccacccctactcctaatcc

SEQ ID NO: 177770 - DNA, 73 bp, Homo sapiens
gcgtgccgcggcgcctggttgcctgcagcggcccggacccgagagatacgtaggtaacctttccagagatgtg

SEQ ID NO: 177771 - DNA, 90 bp, Homo sapiens
aaagaagtttgtccttctgctattgatcctgaaggctcctgggtagaactgcacttcagcaataatgggaacgggggcagcgttccagcc

SEQ ID NO: 177772 - DNA, 74 bp, Homo sapiens
agtcacagggaagaaagcgatttcctccgcctcttccaaagcggctttgaacttggcctactccagcatttacg

SEQ ID NO: 177773 - DNA, 82 bp, Homo sapiens
ggagtttttagccttttaacattcaaggattaggtctatgaaggcctagacatcatcaccaacaaggtttctgcccaagagc

SEQ ID NO: 177774 - DNA, 90 bp, Homo sapiens
ggccgccgccgacgtcctggaggccctcagtgccatcattgcatcatggttaccccaaaggccaccccgaagcagggagctttgaggctg

SEQ ID NO: 177775 - DNA, 82 bp, Homo sapiens
gcgtgggggaccggctgttggcggatgagcagcaccagcagtaagagggctccgaccacggcaacccagaggctgaagcagg

SEQ ID NO: 177776 - DNA, 76 bp, Homo sapiens
cctacatcatcgacctgcagtccatgcaccagtttcgccaggacacaggtactccaaagattcaggtttactcacg

SEQ ID NO: 177777 - DNA, 75 bp, Homo sapiens
ctgggtgttgctgtccaccgtggccgcggtggtgctagtgtgggatgagttggcctactacgaagaaaacacacg

SEQ ID NO: 177778 - DNA, 98 bp, Homo sapiens
gctgctttaccatgtttgtgacctccctctccgtgccaggacaacacctgcagtgtactggaaagcaaattgaaccatctttgtatcctaagttgttt

SEQ ID NO: 177779 - DNA, 82 bp, Homo sapiens
gaggacgacatgttgcttttcgtggagatgttgtaaattttgatgacatagcttcctcagaaaacttgcttcatctcactgc

SEQ ID NO: 177780 - DNA, 100 bp, Homo sapiens
cctgcagtactcttggcccatggacctgaaggagaagcacctggtgaaaggtgtagcagtcactcggcctacacccacagcatcgaccttgtgaacccag

SEQ ID NO: 177781 - DNA, 100 bp, Homo sapiens
ccacaaaccaggccaagatccacgctgacgcagagcggaaggagcccctggcgaagcggtgctgcctccagcccagagatgccgccaagatgcccgagag

SEQ ID NO: 177782 - DNA, 100 bp, Homo sapiens
gagaacctcagtctgacgacattgaagctagccgaatgtgaggtttatacatggggcgacaatgatgagggacaactgggagacggaaccaccaatgcca

SEQ ID NO: 177783 - DNA, 82 bp, Homo sapiens
cgcgacgcgcaccaacggtggagaacccttaggagaaatcttgagagtggacagcaattgtgaagatcgccagagagttctg

SEQ ID NO: 177784 - DNA, 97 bp, Homo sapiens
ctggcctccgctgcagcgctcgcctggcccggaggcaatgtgaagcaaatcatggaggaggctgtcaccaggaagtttgtgcatgaagacagcagcc

SEQ ID NO: 177785 - DNA, 83 bp, Homo sapiens
aagggctacgccagcggcgtcgagaggaccatcctgggtgctggccctgtgctggaggtctcggcgcggaagatggccggcgg

SEQ ID NO: 177786 - DNA, 74 bp, Homo sapiens
tccttataggatctctgcccacagtcagcagcacaacagaggcggacttgtgcaccatggacaattttgctgag

SEQ ID NO: 177787 - DNA, 100 bp, Homo sapiens
gttcatgaaggccggcagcatcaatgtctggaacatctgtcccctgttcaaagagtggatcagcattgataaggatgaggcaggagcaaagagcaaagcc

SEQ ID NO: 177788 - DNA, 51 bp, Homo sapiens
ttcgcagtggtcgcttcttctccttgatttgcctgaagacctggataatct

SEQ ID NO: 177789 - DNA, 100 bp, Homo sapiens
agtgaagctgcagaccttcgcggccattatgctgctggattggacctcaatgacacctactctgggaagcgtgaaccattttctggggaccacagtgctg

SEQ ID NO: 177790 - DNA, 99 bp, Homo sapiens
cgcacgtctgctcggagatcatttgggagatccaagagattcagtatcactcgctcccttgatgatcttgagggcacggccgagcagatgaggactgtg

SEQ ID NO: 177791 - DNA, 74 bp, Homo sapiens
ttgaagcagttggtggcaaattaagagtgaagatgaagctggatgtagctcagttgatgaagaaagttacaaga

SEQ ID NO: 177792 - DNA, 50 bp, Homo sapiens
gagcggacaaggctccggcctgcgaggagatgagcagcaccagcagtaag

SEQ ID NO: 177793 - DNA, 80 bp, Homo sapiens
ggccataccgttgaccgctcctccaactaaccagttagcactctacgtatatgaatatctgctccatgtaggagctcaga

SEQ ID NO: 177794 - DNA, 100 bp, Homo sapiens
aatctcttttaggggattctgcaccaacactgcacttaaataagggcacacctagtcaggagtgtcatgggccggcagacatgcctggagtgcagcttcg

SEQ ID NO: 177795 - DNA, 101 bp, Homo sapiens
cgcgctttttggaattcagttatcaagctttagagcctggctactcacagttgaagcctgattgcagtaacagatcaactcctagcaatcatgatcggata

SEQ ID NO: 177796 - DNA, 100 bp, Homo sapiens
ctttcggggatgcagctggccaagctgatccgacagagaaaggaggagacatcacagctttcccagatcgggaggaaaaatatggaatgtgttttaccgc

SEQ ID NO: 177797 - DNA, 49 bp, Homo sapiens
ctgggaaccatcatgaatacgatcaaggagagaagtttgctgaggaatg

SEQ ID NO: 177798 - DNA, 138 bp, Homo sapiens
tcgttacctgcaggtattgggagatccacagctaagacgccaggacccactggaagcctagaaatgctctagaggacaaaatcccagtccttggcacaaactcaggaaatggaagccggagtctgttttttgtggggc

SEQ ID NO: 177799 - DNA, 82 bp, Homo sapiens
catcttcacccagctcgccaccatggccgccttcccaacatccagtcatggataaaaatgagctggttcagaaggccaaact

SEQ ID NO: 177800 - DNA, 82 bp, Homo sapiens
ggaagtccaagtcaaacgcagaaggactgcctcactgagcaaccaagagtgttggagcgggccggagagaagtagagtgggc

SEQ ID NO: 177801 - DNA, 75 bp, Homo sapiens
gcgcttccacctctccaccaccgaccgcgtcatcaaaggttgtctgcattcaaaagagcattctattaaagctac

SEQ ID NO: 177802 - DNA, 74 bp, Homo sapiens
gcctcgtgggcggcaaggacttcgagcagcctctcgccatttcccggcttcctgcctgacacagctcacttcaa

SEQ ID NO: 177803 - DNA, 82 bp, Homo sapiens
agaatgcatacttggaatgaatccttctagagacgtccacgattctacttcaaagaaatcctgccacccgatgattaaacag

SEQ ID NO: 177804 - DNA, 83 bp, Homo sapiens
cgtggtggtcggcgggggcggcgtgggcaagtcggcgctcaccatccagttcatccagatcaatgtccgagttaccaccatgg

SEQ ID NO: 177805 - DNA, 96 bp, Homo sapiens
tgcacatactgcacggccttggctggactctgcgggactatgtccgaggatacatccttcagaaatgcatcttctgcagacaccgggttaagaggg

SEQ ID NO: 177806 - DNA, 95 bp, Homo sapiens
ccatattccaatggctgagccgttttgccccaaaacgagagagtttgatgaaggccggaacaactttgaaggggaggtcaccaaggagaacctgc

SEQ ID NO: 177807 - DNA, 100 bp, Homo sapiens
gtgttcagggatttcctaccattaagatttttggatccaacaaaaacagaccagaagattaccaaggcataagggccatgtgttctgaaattattttgag

SEQ ID NO: 177808 - DNA, 83 bp, Homo sapiens
cgcagggcctgcagcgggagctggacggcgagcgcgagcggcgcgagaaacttcctcatcgtcctggtctgcctcatcttcag

SEQ ID NO: 177809 - DNA, 75 bp, Homo sapiens
cggagcgcggtccctgtattggtctcctgctcctagagtccacagacaaacgaatttaaaggagcaaccgaggag

SEQ ID NO: 177810 - DNA, 75 bp, Homo sapiens
acagggaagaaattggtaatcgggtcatgatcagagttcgactcttgcccaacactctgttgaactgactttacc

SEQ ID NO: 177811 - DNA, 101 bp, Homo sapiens
gcgccgcccggggcgaggcagggccagcagcaggcgggagggcaaatccagacagaacctttgacttggtgttgaaagtgaaatgtcatgcctctgaaaat

SEQ ID NO: 177812 - DNA, 74 bp, Homo sapiens
aggaaaaacctgtatgtggaaccacctgctgtagtacatgagcgagctagagaaatcaccaccgtttagaccaa

SEQ ID NO: 177813 - DNA, 96 bp, Homo sapiens
gcattttggaacacatccaggaaaagataactttcgacacacctgtagacgttcgccaggtaaagttttcaggtgggagatttggtactcatcatc

SEQ ID NO: 177814 - DNA, 75 bp, Homo sapiens
cccgccgacccgcgccctgctccctctcagcacctgggcggacgggggctgttgtggttccgactataaacagta

SEQ ID NO: 177815 - DNA, 100 bp, Homo sapiens
agataatcacagctggcttatcaatattgctgtttgatgcgatcctgaccagtgcaaccacgggatgttctcttcttcatgcaaggatggaaaaccagag

SEQ ID NO: 177816 - DNA, 83 bp, Homo sapiens
gccggagccgcagaggctcccgggctggactcaggcttctcaggcggcggcggcggcgcccgggagccggagccttcgcggcg

SEQ ID NO: 177817 - DNA, 95 bp, Homo sapiens
acttattcatctgtccagcatgactcatccccgggagtgttgagcagaatccagagaccacatttgaagtatatgttgaagtggcctatcccagg

SEQ ID NO: 177818 - DNA, 90 bp, Homo sapiens
gtcggcggcgcccggatgggcagctgagtttgtacaatgacgacagaaacctgcttcgaattagagagaaggaaagacgcaaccaggaag

SEQ ID NO: 177819 - DNA, 96 bp, Homo sapiens
aggcacctaccagcgcgccatcctgcaaaaccacaccgacttcaaggacaagagaatctgctagtcacatggaagcaagtggggctggaactgaag

SEQ ID NO: 177820 - DNA, 75 bp, Homo sapiens
tctacatattaccactggcagtcactgctacaatgtgggctgttcttgagggctacgtgaagcatgactgcgtcg

SEQ ID NO: 177821 - DNA, 83 bp, Homo sapiens
tcttagggaagctgagctaaggaaacagagggatctatcttgggatcccatggctttctttactgggctctggggccccttca

SEQ ID NO: 177822 - DNA, 98 bp, Homo sapiens
cgtgttggaccttccggagcttctcagaagacagagggttttcttttgagaaacagatgattatgctgagattatagatgaagaagatacttacacca

SEQ ID NO: 177823 - DNA, 74 bp, Homo sapiens
gaaaatggcggtgtctacagtgttctcgacttcgtcgctgagattccatcgtgcctggctcacataagcgcttc

SEQ ID NO: 177824 - DNA, 100 bp, Homo sapiens
gaagggaatcgcaaggctcttccctgaccattttctactgtccctgcgcgaggaatactcccccagttgcaagaggcgcaggaccgtggaagacttcaac

SEQ ID NO: 177825 - DNA, 100 bp, Homo sapiens
taaactggcgggctccgtggaagcgtggccggcagcgtcccggacgaggaggagtcccgacctctacatgttgtgctgggaaatgaagcctgtgatttgg

SEQ ID NO: 177826 - DNA, 100 bp, Homo sapiens
ggagatggcacagacggagaagacgagggggcgtctgaggaggaagacctggaagacagatctgggaacaggcacggtctcctggtacccaacaatacca

SEQ ID NO: 177827 - DNA, 98 bp, Homo sapiens
tcgtgtatggacctcaagcgttggaggtagcagacttttcagcagaagaggagaaggcagagcccccccaggctatgaatgccctgatgcggttgaac

SEQ ID NO: 177828 - DNA, 100 bp, Homo sapiens
ccaggacactggcctgagactgtctgcagttgcaccgcagatcctcctgcccggctggcccgacccaggtggaggtggtggaagaggacgggccttctga

SEQ ID NO: 177829 - DNA, 51 bp, Homo sapiens
gaccaacgaccaggatgagaagccaacagggttccccactgaaggacttgg

SEQ ID NO: 177830 - DNA, 111 bp, Homo sapiens
tggtcctcataatcttacttatcctctaggtcccaggaatgaaggaacaagcacatcatgattgacttggggactggcaacaacaacaagattaactgggccatggaggac

SEQ ID NO: 177831 - DNA, 50 bp, Homo sapiens
gggacctttgcggggaggcctcagtttcggagcaacatcccctgtcacct

SEQ ID NO: 177832 - DNA, 100 bp, Homo sapiens
tcctccgaagctatggcctgaagacgggattctttagggtaagagtaaagtctccaccagaagctggtacccagttaccaaagatcatcttcagcaggga

SEQ ID NO: 177833 - DNA, 99 bp, Homo sapiens
cagcagctgattacaagattttaggtggtgccatgtctcccagctactcgccaacgtcacctgcctacgagccccgctctcctgggggctacacacccc

SEQ ID NO: 177834 - DNA, 90 bp, Homo sapiens
ggaattgaacctaaagccatgtcccagattgggaatctatatatgtgacacaggaattacctctgaagcagttcatgtatgatgatgcat

SEQ ID NO: 177835 - DNA, 87 bp, Homo sapiens
aggataaagtcagccatgtgagcactgggggtggtgccagtttggagctcctggaaggcacgtggactccctttaatccagtgactg

SEQ ID NO: 177836 - DNA, 98 bp, Homo sapiens
caaggaggcttcaagacaaagggccccttacacaccagacagtgaagctgtggtctaccaatctagacaactcagtggcaagcattgaggcaaaggct

SEQ ID NO: 177837 - DNA, 100 bp, Homo sapiens
cagccttctcctggaacctgccttggggacttcatctgcagcatcctcaccattaaaaaaagaacagcccttatttactctacggcaggttgggatgatc

SEQ ID NO: 177838 - DNA, 99 bp, Homo sapiens
cctccacccgggggccgggacagccaagcacccgccgccggcagcttcgctggaagagcagataaaatccccccatctctgtactccacctactgccag

SEQ ID NO: 177839 - DNA, 48 bp, Homo sapiens
tggaactcagacatctgcaaatcatgagtttcgctctgctgcccaggc

SEQ ID NO: 177840 - DNA, 100 bp, Homo sapiens
gccgattatgtccattgttctcttggagcagctggtcatcatggttctggctggctgtccaagatcttaagaaacaacccctacaggatgtggccaagag

SEQ ID NO: 177841 - DNA, 74 bp, Homo sapiens
gccatcttgtgggagcaaaaccaacgcctggctcggagcagcagcctctgagtttttggctttcacccccaacc

SEQ ID NO: 177842 - DNA, 100 bp, Homo sapiens
gcagccaggagaaggagttcgtgcaggcgtacgaggatgtgctggagcggtacaaaggaatacatgcaccacctgctcgccctggagcatcgcgctgagg

SEQ ID NO: 177843 - DNA, 100 bp, Homo sapiens
tccgagtcccaggtcaagagcctctgcgagaaggtttctaagcatgaattgaggaacagaagaagcagagcagatgatcggagcagcatttgtttctccc

SEQ ID NO: 177844 - DNA, 49 bp, Homo sapiens
ccaggacccactggaagcctagaaatggaactgcaagcacatgttgacc

SEQ ID NO: 177845 - DNA, 100 bp, Homo sapiens
cctctgatgacagttgtgacagctttgcttctgataattttgcaaacacggttcatatccagctttcagagtggcaccgtgcaatttttcttccacaggc

SEQ ID NO: 177846 - DNA, 50 bp, Homo sapiens
tagcaatgctgtcaccagagggagaaaggacttcacagagaatgcagttg

SEQ ID NO: 177847 - DNA, 82 bp, Homo sapiens
tcacttgcatgtatttggaacaaaaaaaggagatgcctggcagccccgctctctgcaggggaagtccgtttgtcctcctacc

SEQ ID NO: 177848 - DNA, 100 bp, Homo sapiens
gttaaggttggaaagatggatgctacttcctattctaataaataggatttaccaatccttggatgaagtgcttgggaagtctttaagtgccataatcaac

SEQ ID NO: 177849 - DNA, 100 bp, Homo sapiens
actccagctttgcctgtgagaggaacaagcgtccctgatccagaaggtgaccagaagggaaagatttcagcattcatcgacttgtcctggggacacacac

SEQ ID NO: 177850 - DNA, 51 bp, Homo sapiens
cttggagtagggagaatattcagatcctgatgaatttgagcgaatatatga

SEQ ID NO: 177851 - DNA, 98 bp, Homo sapiens
gttcccactggctctgctgaccttgtgccttgccaacaacatctgcttctacggcgagtgttcctactactgctccacggagcacgccctgtgcggga

SEQ ID NO: 177852 - DNA, 100 bp, Homo sapiens
acagccatgttgctcacacaaagcctgtttggtggtctcttcccacggacgcgcgagacaatgaggagaactctaagaaggagctgatgtggaggagcag

SEQ ID NO: 177853 - DNA, 51 bp, Homo sapiens
tttctcctgcaaaccagggtatcagaggttctcctgaaaagaaagctgaac

SEQ ID NO: 177854 - DNA, 82 bp, Homo sapiens
ctggcctggaggctatccagcgtagattttcgttccgtcacccaggctggagtgcagtggtgtgaccttggcttgctgcaac

SEQ ID NO: 177855 - DNA, 82 bp, Homo sapiens
aattatcaactggcttgataagaatcagtgtactaatggtcacttgatgtgcgctggctgttttatccacctactagcagat

SEQ ID NO: 177856 - DNA, 74 bp, Homo sapiens
atattgaaggtggagtagcaaccgggcattatattatctcttggaaaagtatgcttttctcagcatccacagat

SEQ ID NO: 177857 - DNA, 100 bp, Homo sapiens
gatgcgttatgggatcgagatcctgccgttgcctgtcatgggagggcagatccggaagatgaagcttcctggccgggaaaacaagacggccgtggttgtg

SEQ ID NO: 177858 - DNA, 75 bp, Homo sapiens
cggagcaccgagctcgcggcacggtaggagattgagatggcacagaagctattgaactctgacctgggtgagctc

SEQ ID NO: 177859 - DNA, 99 bp, Homo sapiens
gtctgtacttcatctatgtggccccaggcatcgttgtcatggatgcactggtagaagatgatatctgtattctgaatcatgaaaaagcccataagagag

SEQ ID NO: 177860 - DNA, 50 bp, Homo sapiens
gttctggggatgctacagttcatcaggtgtagagaggagagagagtgaac

SEQ ID NO: 177861 - DNA, 100 bp, Homo sapiens
cgttgagagaacgaggaggaaggagagaaaatggcgtccacggattccagactccatcatttctcgtggtgttcaggtgctcccacgagacacagcctcc

SEQ ID NO: 177862 - DNA, 107 bp, Homo sapiens
cactttgggaggctgaggcgggcggatcacgagttgatgctgatgtaacagttataggttctggtcctggaggatatgttgctgctattaaagctgcccagttaggc

SEQ ID NO: 177863 - DNA, 75 bp, Homo sapiens
gtcccaaggacctattgctatgcaggtatatgaatgacctaaaggtacaaataaagacggagagagaacagtgcc

SEQ ID NO: 177864 - DNA, 75 bp, Homo sapiens
tagtgttttgagtctccaggaagaaattaatgagcagggacatgagggtcagatgtaccaacagtaccagcaaca

SEQ ID NO: 177865 - DNA, 99 bp, Homo sapiens
ggctcctgcttcatcttcctcgtgggaaccaagaaggaccttctggtgaatccagtctggaaaaagtgtttggaagaacaaggcttgaagtttgttggc

SEQ ID NO: 177866 - DNA, 83 bp, Homo sapiens
ccttaacacagtagcagctggaaccatgacaggcatgttgtataaatgtacaggaaacctcgacctgtctcccagttggttgc

SEQ ID NO: 177867 - DNA, 96 bp, Homo sapiens
tctgatgcaagaagatggtaggactcttccagatggcactcatgagctcatcgtgcataaggctactccagagcaaataagcatggacctcaagaa

SEQ ID NO: 177868 - DNA, 51 bp, Homo sapiens
agctgcagttttgatgcacagagtttctgatgttccgagggacctggaagt

SEQ ID NO: 177869 - DNA, 88 bp, Homo sapiens
cagattcgcagtggtcgcttcttctccttggacacctcctacctgttcatcactggccctgatgttgtgaagtctgtcaccaatgagg

SEQ ID NO: 177870 - DNA, 90 bp, Homo sapiens
ggcaccgccaactgcgagctcaagccccaagtcagttcaccgggacctggaggcccagattgcgatcgtgacggagaaccaggccctgca

SEQ ID NO: 177871 - DNA, 122 bp, Homo sapiens
gcaggcctcacgactaccagccgcttcctggcatgtcagagaacccctccgtctatgtgcctggacatttcatatatatggatttcacagctacactcgatccacgccccacaccacataca

SEQ ID NO: 177872 - DNA, 85 bp, Homo sapiens
cccgtgccgcgagcgcggcctgcaggagagtgaagacatttccacctggacacctgaccatgtgcctgccctgagcagcgaggcc

SEQ ID NO: 177873 - DNA, 98 bp, Homo sapiens
cgattcgtttctggagatagaactagctcatttggctaatatgacctacagtgactctgacgctaaatctgcaagttcttttaacaccacggaaataa

SEQ ID NO: 177874 - DNA, 100 bp, Homo sapiens
ggggacgagggcaaaggcaaggtggtggacctgctggccacggacgccgacatcatcagccgctgccagtcccgcagcgtggacaagcagcatgccgtca

SEQ ID NO: 177875 - DNA, 103 bp, Homo sapiens
ttcgcattcagaatttgaccatcttggtgagaaacattaagacctactaccaggttttaaaatcaaagatgggaaaatcggagaaaattgcccttccccatgg

SEQ ID NO: 177876 - DNA, 100 bp, Homo sapiens
agccgccgcgcagcctgcgttttctccggtacaggttgaggctactaagggcaagaatatcacggcatgggcatgagtagcttgaaactgctgaagtatg

SEQ ID NO: 177877 - DNA, 50 bp, Homo sapiens
ggagctgtcccggaaggagaagctgagatacgcaaacatgcagatctttg

SEQ ID NO: 177878 - DNA, 100 bp, Homo sapiens
ggatgcagcagagaggagcagctggaagccgtggctgcgctctcttccctctgctgggcgtcctgttcttccagggtccttttggaataaatcatgggat

SEQ ID NO: 177879 - DNA, 75 bp, Homo sapiens
tgatgctggaaaacttccagaacctggcctcactagatagtacacatcctaaatatgacttctgcaaagataatt

SEQ ID NO: 177880 - DNA, 100 bp, Homo sapiens
gtgatttctgcatttccatctgagagtgctgcagcagctcccagtccagtgctaggaaacattcccccaggagatggcatgccagtaggtcctgtaccac

SEQ ID NO: 177881 - DNA, 100 bp, Homo sapiens
acgactaccaccgcagcgacgagcaggtattagaaaactactcggatgctccaatgacaccaaaacagattctgcaggtcatagaggcagaaggactaaa

SEQ ID NO: 177882 - DNA, 83 bp, Homo sapiens
gcgggctccgcgcccggccggacccgggcccgagacaaatttacatgtattggagaccagaccagaagcccttctgaattaag

SEQ ID NO: 177883 - DNA, 50 bp, Homo sapiens
cgaaggtgctaccatcgtgagagtaagtattaattttaaagacccacagt

SEQ ID NO: 177884 - DNA, 100 bp, Homo sapiens
cccagtggctcatgacactaagaagtaaaattacgaactcactgagctggaagtcattcaacgggaattgaatagaagctgccagtaactcagattctag

SEQ ID NO: 177885 - DNA, 74 bp, Homo sapiens
aggacaaaaactctttgagtttcggagaggagtaaagagggcagctgcaatgactctccgcacggtattattgt

SEQ ID NO: 177886 - DNA, 100 bp, Homo sapiens
tgtatatagtgtattagatgatgttattccagaagaaattttaggcaaaatcactttagcagatctcccattaaccagtcataatgaagtaagaacaaga

SEQ ID NO: 177887 - DNA, 75 bp, Homo sapiens
agcttccatccgccagctgccatgagcgagcgcctccgtcccagaccaagatcactccatggatgaaatgacagc

SEQ ID NO: 177888 - DNA, 95 bp, Homo sapiens
cactcaagtgaagcaaaagccttccatgattacaatggagatttacagacagtcatctgggtggaggacacccttttgggatcagcactgaaagt

SEQ ID NO: 177889 - DNA, 50 bp, Homo sapiens
tttgcctgggcgtcggcctactcgagctagtgtcagcagtgggatacctg

SEQ ID NO: 177890 - DNA, 98 bp, Homo sapiens
tgctcaccggtttctcccacatcgacctggggcttgcttctgacatgtctgatgagcgcattcctgctgttgctcctggctattacaaggtgtcgctg

SEQ ID NO: 177891 - DNA, 75 bp, Homo sapiens
gccacaagcgacacaaatgaacacgccttctcagccccgccaggtgcggactcgagacatgggcggctacagcac

SEQ ID NO: 177892 - DNA, 112 bp, Homo sapiens
ggcctctcaatattgcctggacgattgcttagaggagtatttcctgaactgtgtgggtagctacagcaagctgggtagcaggcagatccaaaggatatcatgaagtttccag

SEQ ID NO: 177893 - DNA, 101 bp, Homo sapiens
accttcttcaagagaaatggagcccttctccaagataaaatctacgtggttgacttgagtaatgagcgagccatgtcactcaccatcgagccacggcccgt

SEQ ID NO: 177894 - DNA, 50 bp, Homo sapiens
gaaaaacacgatcagctcttagacagtcaaaccggcacgatgtccaggca

SEQ ID NO: 177895 - DNA, 125 bp, Homo sapiens
ctcgcccaccacgtccagcttcaccacgcggctgcacaactgcaggaacaccgtcacgctgctggaggagtgaagtacatgcgagaagccacgccctatgtgaagaaaggatccccagtatccga

SEQ ID NO: 177896 - DNA, 97 bp, Homo sapiens
ggcaaacctgtgaacccacccgagagcaacaaagcaggcgactacagccacgtgaaggacactcatgaggaccatgatacttccactgagaatacag

SEQ ID NO: 177897 - DNA, 107 bp, Homo sapiens
caaacagcccgcccgaccccgtcccgaccctggccgccccgagcggagcctggaggttatggaaacaaaggacatgctttacatcgtcactgaatttgctaaaaatg

SEQ ID NO: 177898 - DNA, 75 bp, Homo sapiens
gcagcctggggactctgcctcgtgccgctgagcctggcgcagatcggtggtgtcgggtttgacatcaactgtggt

SEQ ID NO: 177899 - DNA, 100 bp, Homo sapiens
aaaatccttgaattggaaggcatctctcctgaatattttcagtctgtacaaccatccactgtgggttatgcaagacaaatcattaagaaggaaggctggg

SEQ ID NO: 177900 - DNA, 100 bp, Homo sapiens
ggagaactacaggaacctgctttctctcgatgaggataacatccctccagaagatggatattcaaatagaagccttgctgatgagagcctgtgagcccat

SEQ ID NO: 177901 - DNA, 100 bp, Homo sapiens
gaaagcgaaaaactatgctgaccagactgtcaccactgactaaagaagagaaaactgcggcagagcaattcaaatttcacatgccagatttatgaagaaa

SEQ ID NO: 177902 - DNA, 85 bp, Homo sapiens
gcagctggctggcttcagtggaccactctgcagcgcttcagcgagggtgccctggagtacctagccaacctggaccgagccccag

SEQ ID NO: 177903 - DNA, 74 bp, Homo sapiens
caggatccggaggcgccagctcaacctactatactggcaattgctggagaagattttgcaattgttgcttctga

SEQ ID NO: 177904 - DNA, 50 bp, Homo sapiens
ccacagagctgcttgcggccaagtacaagattgagatagagagaagcctg

SEQ ID NO: 177905 - DNA, 74 bp, Homo sapiens
tggaacactacagacatttgagattcttcccgctaaatttattgtgaagaaatcagaagatgaagaagacgccg

SEQ ID NO: 177906 - DNA, 96 bp, Homo sapiens
gcgactcccatgcatcggctaatagcccggagacaagcctttatcttcaagccaggatgaagggagactgggcaagactcttacgccccacactgc

SEQ ID NO: 177907 - DNA, 126 bp, Homo sapiens
gaagagcgagccagcgcccggagcaagcggagctcccccaagagccggaaagttttgctacttgagaagatagaacatgatgacatctgcaataaaactttgaagattacagattttgggttggcg

SEQ ID NO: 177908 - DNA, 90 bp, Homo sapiens
aggaggtggtagagggcatggatatctctactcgctccaaagagctcccagctcctccagcagccgacaggaggcccgtcaagatgcagg

SEQ ID NO: 177909 - DNA, 100 bp, Homo sapiens
caggcccctgtcaagaaggtgccggtggtgcgagtcttcggagcgaccccggcagggagatgcacttatttacatggaaccagagaaacaagtgatgtcc

SEQ ID NO: 177910 - DNA, 100 bp, Homo sapiens
caagattcaatgccatgctggcagcactgaccccttcgagattagctgtggctttccaagctatgggtgccatgaaggtggggtggaagacaacccgtga

SEQ ID NO: 177911 - DNA, 109 bp, Homo sapiens
tgcatacttggaatgaatccttctagagacgtccacggccaaatttgagtccctctttaggacgtatgacaaggacatcacctttcagtattttaagagcttcaaacga

SEQ ID NO: 177912 - DNA, 75 bp, Homo sapiens
gcaggagggtcgtggtctggctgtggcggaggagcataagaaggaatgggtaccacagaccatgtcatcgtcctg

SEQ ID NO: 177913 - DNA, 82 bp, Homo sapiens
aggcgagccggagaccgagcccgaacagcagacctgcctagagctggaacgttacctccagagcgagccctgctatgtttca

SEQ ID NO: 177914 - DNA, 75 bp, Homo sapiens
ggaggaacagtgtgtccagcatgggagagtacatgagacgatgaagcaaaggctgatcagctgaccgaagaacag

SEQ ID NO: 177915 - DNA, 75 bp, Homo sapiens
ggatagtagaacttatctactggatttccgtagtattgatggtggaatggatccaacagcaagtggtaaaaaagc

SEQ ID NO: 177916 - DNA, 75 bp, Homo sapiens
agaaggctgaagtccctggaggaggagctggagaggaaggcgagctgaaacattaacaaacgtgctggatttcaa

SEQ ID NO: 177917 - DNA, 97 bp, Homo sapiens
cagccacaaagcagactagccagccggctacaattggagtcagagtcccaaagacatggatggactctgtgactacatgactaataaaatatggcag

SEQ ID NO: 177918 - DNA, 100 bp, Homo sapiens
ggacacagcaatatctctgggctttcacagtggcgagaggagcgcttccggcagaccagtgagagcaccaaccagcgggtgctgtggtggtccattctgc

SEQ ID NO: 177919 - DNA, 100 bp, Homo sapiens
ttcctgagggccgagcaacagtgtagtggcgtattccacatagcaaacaggctgtgccttcctcacctactgtgccagggattccgccatcaaagctcag

SEQ ID NO: 177920 - DNA, 100 bp, Homo sapiens
gaaaggatgacatatttttggacctgaaacagaaattctggaacacctatatggatttgggggttctttcatggcgccttccccatctccagtgactcca

SEQ ID NO: 177921 - DNA, 100 bp, Homo sapiens
ggagaatggctccgcttctgttgcagctggcggtgctcggcgcggcgctggcggccgcagccctcgtactggacatggtccggcgaggagagatcatcga

SEQ ID NO: 177922 - DNA, 75 bp, Homo sapiens
gcaagctcagcttggagggtgattggattgtattacacagagcatgaatatacttctttaggttacacgcatggg

SEQ ID NO: 177923 - DNA, 82 bp, Homo sapiens
agtggaagacggagctggtcggcccgaaggtgacttaagagattaaaattaatttggttgctgttggttctgaacaaataat

SEQ ID NO: 177924 - DNA, 75 bp, Homo sapiens
gctcaagatggcggcgcagccaccccgcgggatacgcctcagcgcggtcaaacatgtgttgacatcaaggacaac

SEQ ID NO: 177925 - DNA, 75 bp, Homo sapiens
atgcagaggatgctttgcagaaacttcataaatatatgcaggtattgaagcccctgggtgataatttgatggagg

SEQ ID NO: 177926 - DNA, 51 bp, Homo sapiens
gaacgatgtgattggctgctttgcggagaggtgaggtgtgtgaaaatattt

SEQ ID NO: 177927 - DNA, 83 bp, Homo sapiens
ataccagtccccagtgagggtgtacaaatacccctttgaattaattatggctccatcactggtgcaagctatatttaacggag

SEQ ID NO: 177928 - DNA, 100 bp, Homo sapiens
atccaagttccacaatatattgactactgccacaattccggttgctgcttttgctcagaggacatccatgaccctaatggtctttttgttcaagataaag

SEQ ID NO: 177929 - DNA, 83 bp, Homo sapiens
gtgtaagcgcagaaagcaggcgaacccgcggcgcaataacgggatcagtgtcgtttagggatgtgactgtgggcttcactcaa

SEQ ID NO: 177930 - DNA, 78 bp, Homo sapiens
aggggcagcgagcaagacagcaagcagaacaccttccaccatgaccacctcagcaagttcccacttaaataaaggcat

SEQ ID NO: 177931 - DNA, 90 bp, Homo sapiens
gccgcatttggagacagacatgatgcaaggaggcgtgtacggctcaggtggagaaaggattttttatcaagcagaaatgcatcgaacaac

SEQ ID NO: 177932 - DNA, 74 bp, Homo sapiens
tcggctgccgtggctgtgctgagggtggcggccggataggtctctttaatgtggggaacaagctgctggtaagc

SEQ ID NO: 177933 - DNA, 73 bp, Homo sapiens
cagaagaaactgcaccggaaatgtgcctaccaggcgctgagatgcgtctggagagccagagggcctgcctgaa

SEQ ID NO: 177934 - DNA, 95 bp, Homo sapiens
tgctgctagattcctctttaccactggatttcacaccaagaaaatagttcgtggtcctgccagtgactgggctacttctacaagtccgaacagcc

SEQ ID NO: 177935 - DNA, 100 bp, Homo sapiens
tgacctggggaacctgctcaaagccctgggtcgcttggaagaagccaaggaaggaaaatcacctcggcagtgtttgaaggaaggatactgcaactctttg

SEQ ID NO: 177936 - DNA, 75 bp, Homo sapiens
gcaagatgaatgaggagatctccagcgactctgagagcgagagggagccccagactctggtaaatgctctgcttc

SEQ ID NO: 177937 - DNA, 98 bp, Homo sapiens
cgggacacttctgcaaccccgcagagcgcatccatcaaagctttgcgcaacgccaacctcaggcgagatgaggctcctgccaagcctgaggaggcaga

SEQ ID NO: 177938 - DNA, 100 bp, Homo sapiens
attaactactatggaatgcaaagatttggaaccacagctgtccctacgtatcaggttggaagggagacgtacgaggaggaccgggagtacgagagccagg

SEQ ID NO: 177939 - DNA, 74 bp, Homo sapiens
cggccagctaggagcgctctgtggtgcctggggctgaacgcggctttctggtactctgtggatatccccttgga

SEQ ID NO: 177940 - DNA, 100 bp, Homo sapiens
ctttcagctgcgccggccgcgaggccacggagagctcgccttggagagcccaggagcaggggagacatggcacacggaatgcagtgctgaacacggaggc

SEQ ID NO: 177941 - DNA, 98 bp, Homo sapiens
gggggtcggcccggggctcggagaatgggcaggtgacagagctgaatgaacctctctccaatgaagatcgaaatctcctctctgtggcctacaagaat

SEQ ID NO: 177942 - DNA, 50 bp, Homo sapiens
tgctgaagcgagtccctgagctcccgggggtgaagccagccagttttgac

SEQ ID NO: 177943 - DNA, 98 bp, Homo sapiens
gcgagccggagcgcggagcccggctcccgcaccatggaggaggacgacagctacgggtggcattgtgtgtcccagagtgccggagcgagtcccagaag

SEQ ID NO: 177944 - DNA, 75 bp, Homo sapiens
gaaccagattcagacgtcctctcagaaataatgcattcttttgcaaagactccaaccgggaagactttgacccag

SEQ ID NO: 177945 - DNA, 100 bp, Homo sapiens
ccctgtatggcttcacccactgtggaggttgtactcgtaaaacaaggatcatcgatgttgtctacaatgcatctaataacgagctggttcgtaccaagac

SEQ ID NO: 177946 - DNA, 50 bp, Homo sapiens
tcctaggatgcacagctttacacagagggacccctgggcatactccttcc

SEQ ID NO: 177947 - DNA, 82 bp, Homo sapiens
gaaaatttcaaagtaaaggatattattagaattctgccatgcaagtttttagaacttcagccataaaaatgggcagaatttt

SEQ ID NO: 177948 - DNA, 51 bp, Homo sapiens
cgggcgcctatcagtacacaataaggccgtcatggaaatgatgagtcagaa

SEQ ID NO: 177949 - DNA, 100 bp, Homo sapiens
ttcggtggtttcttgtgaggacgcggcagcccgtggagtcggctgagggaaaagcgaggcaaggcaggcgggtcacatgcatcggacgttacggattact

SEQ ID NO: 177950 - DNA, 131 bp, Homo sapiens
gtgaaacgctgcaccggctgctgcaacacgagcagtgtcaagtgccagccctcccgcgtccaccaccgcagcgtcaagcttcactgctgtatctcccagtgtaaccctagcatccagaagtggcacaaaac

SEQ ID NO: 177951 - DNA, 100 bp, Homo sapiens
aaacacagtttctgcaggaaaagatctctctacttctcctaagggagcaatggaccacagaaattctgcattgaaaaagttgggaaagaaaattggctac

SEQ ID NO: 177952 - DNA, 80 bp, Homo sapiens
ggcgacgctaagttgctgatcgtggcggctgctctttggcgtaaattgcaatcgattagggatcgtttctcagaatcaag

SEQ ID NO: 177953 - DNA, 83 bp, Homo sapiens
cttcggaactgggaccaaggtcaccgtcctaggccgaactgatgagcagtctcattgagtactgcatcgaactgagccaggcg

SEQ ID NO: 177954 - DNA, 100 bp, Homo sapiens
atggggagcagagtttgatcctgtctacttcacaaacaacagcgcctgaagggaaacgatcctcaggcctgacagccgtttgggtcgctcgaaatcggtt

SEQ ID NO: 177955 - DNA, 75 bp, Homo sapiens
gtgaatccccctaaacaggagcacctgctggcgctaaaaggatggatgcaaccttgaaagaactgacaagcttag

SEQ ID NO: 177956 - DNA, 90 bp, Homo sapiens
ccctggtggacgagcagaagcaactgcgcaagcagaaggagccagatgaccaggatgccccagatgagcatgagccctctccatcagaag

SEQ ID NO: 177957 - DNA, 75 bp, Homo sapiens
gtccaccgagcccgcaaaaccatgtccaaaccaggaaatggacagctactgtgtgaagacattcacaggacacag

SEQ ID NO: 177958 - DNA, 50 bp, Homo sapiens
gtggaaggctcccccttgactaaagctgaacaaggagtgtcctacctgcc

SEQ ID NO: 177959 - DNA, 75 bp, Homo sapiens
cagccacacctgaactaccaaaagacttccattctttatcgactctgatgttttactgtgcctggctaactatag

SEQ ID NO: 177960 - DNA, 100 bp, Homo sapiens
tattgcggcaactactcacgctcctacgggacgaggagagggaggtgaatccgtggcagagggaatcggatctcttcctgctcgacagccgtaccctctg

SEQ ID NO: 177961 - DNA, 75 bp, Homo sapiens
cagattcgcagtggtcgcttcttctccttggcctggaggagaaacccaccattgcgtttgccacaatccccgcgg

SEQ ID NO: 177962 - DNA, 90 bp, Homo sapiens
ggagatcaatggacaggatctgaaaatggactgcaaggaggtgggcacaggcttcagttttactgatgatacccacggatatgcagtcaa

SEQ ID NO: 177963 - DNA, 100 bp, Homo sapiens
gcgatctatacaactgggaggtggccatcttcgggccccccaacacctactacgagggcggctacttcaagggggccgaaggccagagaccaggatttgg

SEQ ID NO: 177964 - DNA, 50 bp, Homo sapiens
ttcgatctccgccctggggtcattgtcagattacctgtggacgattcaac

SEQ ID NO: 177965 - DNA, 100 bp, Homo sapiens
ggcaagagtaacagcagcgccgtcccgtccgacagccaggcccgggagaagacccttgaacatctgtgaagaaatgactattctgcatggaggcttcttg

SEQ ID NO: 177966 - DNA, 82 bp, Homo sapiens
gagatctgaaagctggcaacgtgctgatgaccctcgagggagacatcaggctgggtcatggaagacgcccacttggatgcca

SEQ ID NO: 177967 - DNA, 90 bp, Homo sapiens
ggcagccattgagattatacggaaccagaagcagattgccaacattgaccgtattacaaaaacagctttgctgagccatcaaggtctaat

SEQ ID NO: 177968 - DNA, 101 bp, Homo sapiens
tagtctcaagatgctgcttactggtgggaaatcaagtcgtaaaaacaggtcaagtgacgaagttatacggaagcgtctcctcattgatggagatggtgctg

SEQ ID NO: 177969 - DNA, 98 bp, Homo sapiens
acagtatgcttgggagtcttctgctggaggttccttcactgtgcgtgctgaccatggtttttttaacatgtggggatttggaagagtcagcaaacaag

SEQ ID NO: 177970 - DNA, 75 bp, Homo sapiens
caacggagcgctgaggcgggcgttttcttggatgaattgcttgctttggagcatcaagaaatcgccaggaaaggt

SEQ ID NO: 177971 - DNA, 101 bp, Homo sapiens
aaattgaaaagtcaaataaggaaatgaattacctcccttgacggctctaattttacttgttcaaaccttgtactactcagctgatcacaagctgcttgatg

SEQ ID NO: 177972 - DNA, 99 bp, Homo sapiens
gttggcaacgcgacacagagccagtgcctccggaaaagaccaaagacaaagggaagaaaggcaagaaagacaaaggccccaaggtgcccaaggagtcct

SEQ ID NO: 177973 - DNA, 75 bp, Homo sapiens
tatcagccgaaccaagtactgggaggatcttcagcctgttaaacaagaaaacgaaaaaccccttccagaaaacat

SEQ ID NO: 177974 - DNA, 118 bp, Homo sapiens
tttgaagctgccgatgccagagccaggtgaactggaggagcgatttgccatcgtgctggcttgtaatgagccagtgctgcgccgtgttgctgtggacaagtgtgcaaggagagtgcgg

SEQ ID NO: 177975 - DNA, 90 bp, Homo sapiens
ctgcattgcaggcacagggcccgatgagccagagaagcttgcccgattactgaggctgcaagaaagttcacaaggggaacatcctccccc

SEQ ID NO: 177976 - DNA, 96 bp, Homo sapiens
tggctaagcaagctcagattccattagctgctgtcatcaagccctttgccaccattccttcaaatgaggttctcagctgctgcgggagttgaaaaa

SEQ ID NO: 177977 - DNA, 100 bp, Homo sapiens
cgcgcccttcctcggcgggccggactgtataaatcaaagccattctgtgaaaaactgctttcctgggtgaaaagcagtggctgtgccagagtcattgttc

SEQ ID NO: 177978 - DNA, 135 bp, Homo sapiens
ctgcgattcctactgcaaggcctccaaggggaagctgaagattaacatgaaaaagtactgcaagaaggactatgggatgatcatggtgattttactgctgcttgtggctatcgtggttgttgcagtctggccgac

SEQ ID NO: 177979 - DNA, 75 bp, Homo sapiens
tggggtggcactttccatagctgtaggactgctggagaatggatttctgcctgatcctccaagaatacgttacag

SEQ ID NO: 177980 - DNA, 143 bp, Homo sapiens
tcggacgcgtccggctgtggaagagagcggcggccgctcacaacatgcacagcctggcgacggctgcgccctggaacagctgctgacagagttggatgacttcctcaagattcttgaccaggagaacctgagcagcacagcac

SEQ ID NO: 177981 - DNA, 97 bp, Homo sapiens
atgcatctttatgtcagaaacacaaagcagcccaaccaaaggcatcctaatgtcctatgatcacgtggaactcacattcaatgacatgaagaacgtg

SEQ ID NO: 177982 - DNA, 75 bp, Homo sapiens
ccctttgcaggatgcagaagaagccaaaaacattctgggtaccttgtgggtcaacgactcgtgaactacgaacgg

SEQ ID NO: 177983 - DNA, 96 bp, Homo sapiens
cggttggaggcttcgcccggctttgcagcggggacttcggcggcggcgcctcaggcacctcggcccggtttctaataagtgaccgtgacccacagt

SEQ ID NO: 177984 - DNA, 89 bp, Homo sapiens
cgagaaactggacaaccaacggctcaagaatttcaagaacaaaggccgcgacttggagtaaatacaatcaagtggcatcttaaattttt

SEQ ID NO: 177985 - DNA, 51 bp, Homo sapiens
attgtcatgtgctcatcacagtctggtctctgctccccctttaacctggat

SEQ ID NO: 177986 - DNA, 98 bp, Homo sapiens
cgcactgaggaggcggcggccgacggtggcggcgggatgcagacttgtgcaccatggacaattttgctgagggagatttcactgtggcggattatgcc

SEQ ID NO: 177987 - DNA, 90 bp, Homo sapiens
gcaagaggcaaaacttcggacatagaggccaaccaacctttggagcaaatccagtttgctgatgacatgcaggagttcaccaaattcccc

SEQ ID NO: 177988 - DNA, 75 bp, Homo sapiens
ccagattggcagaaagttgatataggtggacttttttacagagagaagaagaaggaggttcctgctgtgccagaa

SEQ ID NO: 177989 - DNA, 90 bp, Homo sapiens
caaggtgcaagagtccacaaagggacctgatgaagcgaagatcaagcctcctgacaaggtgatccgggcgggccccgcaggaattttatc

SEQ ID NO: 177990 - DNA, 82 bp, Homo sapiens
gggagagaagaagcgcaggcacaggaagctggtgacggcgatgaacgggcgtgatggtgggcatgggtcagaaggattccta

SEQ ID NO: 177991 - DNA, 82 bp, Homo sapiens
ggatgcctatgtattccctggggatggcgcatcacacaccaaagaatgttcgcatcttaccacatacagttctttacatggc

SEQ ID NO: 177992 - DNA, 75 bp, Homo sapiens
ccttcgcgcgctggctgctctgtaacggcaggctgaacaactttttaaagcaacaatgagttacctccttggagg

SEQ ID NO: 177993 - DNA, 75 bp, Homo sapiens
gacaatggtctcaatttggcctttaccatcgcccatgagctgggccacaaatcaatgaactgagccatgttcaaa

SEQ ID NO: 177994 - DNA, 74 bp, Homo sapiens
ccacgtgcagacatctacaaccttcgatctcctgacgaaatgaactctggaagcccagccagggacaatgcacc

SEQ ID NO: 177995 - DNA, 50 bp, Homo sapiens
gaagctgctctctgagaaaaagctgaaactggcgatggaatatgagagga

SEQ ID NO: 177996 - DNA, 82 bp, Homo sapiens
aaccagtgctatactcagctaacatggcaacagaataatgttcagaggcagggcaagaatcctttcgttccatcacaaggtc

SEQ ID NO: 177997 - DNA, 100 bp, Homo sapiens
gatcgagagagaccggagaggtggagagtagctgcagctgaggacagccaccctttcttcgtctctgctgagcgaaggctacacggcccttcctccttgc

SEQ ID NO: 177998 - DNA, 83 bp, Homo sapiens
gggacaatggtcaccgtctcttcagttccaaagaactactggttcagattttagctcttcccaagttgtgaaaatagtgaagg

SEQ ID NO: 177999 - DNA, 80 bp, Homo sapiens
ctggaaatgtttgatcatgcttatggtaactatatggtgctaactgccaaagaaaggaaaactcaaattgatgatagaaa

SEQ ID NO: 178000 - DNA, 83 bp, Homo sapiens
caacaacaattccgatggcaaagccgttgccaagatggttggaatccattttcgtacccatacaaaaaactggattatggaaa

SEQ ID NO: 178001 - DNA, 100 bp, Homo sapiens
atactgaaggttttgtttccttcttggtcatcacaaaatgccttgatgttcctgacccttttgtgcctgaccctactggaagggacaatggagaacattg

SEQ ID NO: 178002 - DNA, 82 bp, Homo sapiens
aagaagctgaggatgaagaagatgaaagacgagaatccaggacttgaatcgtatcttcccactttctgaggactactctgga

SEQ ID NO: 178003 - DNA, 99 bp, Homo sapiens
ttagttctggggagcgcctcgtcgacatgagtgatgtggaggaaaacaacttcgagggcagagtgacatcagttgcaaggggatgaccgagcgcattca

SEQ ID NO: 178004 - DNA, 100 bp, Homo sapiens
ggacttcaagaaccacgtgatcaagtaccttgagacactcctttactcacagcagcagatcagtcgcatcgaatacattcattcaaagaacttcatccac

SEQ ID NO: 178005 - DNA, 115 bp, Homo sapiens
tcgtggacggggccttccagagacgcggcgcgcccgccctgcagctgcccaagcactacgagttccagggagctctgtcctggtgaccgtgcccgggttatgacgactaatccca

SEQ ID NO: 178006 - DNA, 100 bp, Homo sapiens
ggaaagcctggcccacacacgtggtctgtagcgacagcggcttggaagtgctctaccagagttgcgctcattcttggaatcccagaacaggccttaagtc

SEQ ID NO: 178007 - DNA, 74 bp, Homo sapiens
catgagcgacagcggcgagcagaactacggcgagcgggcaccaggatcatctacgaccgaaagttcctgctgga

SEQ ID NO: 178008 - DNA, 98 bp, Homo sapiens
tgatactcatctatttttcaatgacttagagataattgcctttgatgagttaaggacagattttaagagccccatagaccagtgcaatcctgttcatg

SEQ ID NO: 178009 - DNA, 102 bp, Homo sapiens
ctcccatccctgcagcatgaacaagagtcacctctactttcctgctaccgctgcctgtgagctgaaggggctgaaccatacactcctttttctacaaccagc

SEQ ID NO: 178010 - DNA, 110 bp, Homo sapiens
gaagagcccccaggagaaaagccagtattgcttgtgctcctaacaacctgtctcttgttacagaatgtctgaaggggacagtgtgggagaatccgtccatgggaaacctt

SEQ ID NO: 178011 - DNA, 103 bp, Homo sapiens
tggagcctcagttggaagcagccgatccagcctgcggagcctgtggggcagaaccccatgcatcccagctcaaggtggtcagagctagaccttcttattctgt

SEQ ID NO: 178012 - DNA, 97 bp, Homo sapiens
ttgaatttcatctgtctgtgggaattgtaagcaagacagggtcttactctgtcacccaggctggcgtgccatggtgcagtcatagctcactgcagcc

SEQ ID NO: 178013 - DNA, 99 bp, Homo sapiens
attcccagccgagatgcaaaagcatgtgggaactctggactctgtgcccatgccggtgtctctaattaacagaagatggcaaagcccagccacagcagc

SEQ ID NO: 178014 - DNA, 83 bp, Homo sapiens
ccgctctccagcccgcttgaacgactctcagcgttctcatctctcttccttcaccatgaagctgatggacaaattccactcac

SEQ ID NO: 178015 - DNA, 75 bp, Homo sapiens
aagaatgagtataaaggatgggttttaactacagacccagtctctgccaaagcttggggcttccttggtcgcacc

SEQ ID NO: 178016 - DNA, 100 bp, Homo sapiens
cctttaatgagcacacggatgaggaactgtggaatgccttacaagaggcacccagtcagtcagagtcagagccagagaaggctccattgtgcagtgtgcc

SEQ ID NO: 178017 - DNA, 100 bp, Homo sapiens
ctggatctttgctagaaagagagaaatcaacagcagtgatatgtcggcccacgtcaccagcccctctggccgtgtgactgaggcagagattgtgcccatg

SEQ ID NO: 178018 - DNA, 50 bp, Homo sapiens
cctcatgacacttcctattcagaaggagaccctgcagcgtcatggtgctg

SEQ ID NO: 178019 - DNA, 75 bp, Homo sapiens
gtccgggctcctggacttcgcctttcccgagccctggaggtggggagaaaaggagtgggctttgcaagctctggt

SEQ ID NO: 178020 - DNA, 122 bp, Homo sapiens
ctcagaggatagcctttcacttattcatctgtccagcatgactcatccccgggagtgttgaatttgttcagctggggcagagtcaacataaacaagacaagaatagccagcagccctgttct

SEQ ID NO: 178021 - DNA, 100 bp, Homo sapiens
gctgaagaatctccggagcgaggaacagaagaagaagaaccggaagaaactgtccgagaagcccaaagaaatggctagtgatgagctgaaagagatgcgg

SEQ ID NO: 178022 - DNA, 75 bp, Homo sapiens
cttgtacaaaggagagtttaaacagccaaaacagttcattcatattcagcacccttcgcaggtgttacagtcggg

SEQ ID NO: 178023 - DNA, 97 bp, Homo sapiens
agaggtttgtcctgaggcttaaatgaggcaacatggacacagcattttagcacaaggccagatgatgattcagatctgtactctcccagatactcat

SEQ ID NO: 178024 - DNA, 74 bp, Homo sapiens
caagattataatcaggaagtggatgcctccatttttaaggtaattaataaaatgtctccaacatctctaaagat

SEQ ID NO: 178025 - DNA, 50 bp, Homo sapiens
tggctccagtggtttgtcccaaacaggtgtcttatagaactcaacatact

SEQ ID NO: 178026 - DNA, 82 bp, Homo sapiens
ctgctgctgacgctgctgctgcccggcctcgggcaaacggggattcagcgtccgatcctttggaacagggactcacgtgaag

SEQ ID NO: 178027 - DNA, 87 bp, Homo sapiens
ttgttaaaccccatgctgtcagtgaaggccctcttcgctcgcttattacttcaagatccaggcaaccacttaattaacatgacttct

SEQ ID NO: 178028 - DNA, 74 bp, Homo sapiens
ttgaatcagaaattgagaagctggtgaaagaaaagatgttgtcccggttaagagtagtttccaccacttgtact

SEQ ID NO: 178029 - DNA, 74 bp, Homo sapiens
ccaagagggtgttcgactgctagagccgagcgaagcacaaatttacatgtattggagaccagaccagaagccct

SEQ ID NO: 178030 - DNA, 100 bp, Homo sapiens
ctcgaggacgctggagcccagcaaggttatgatgtgattgctcaagcccaatctgggactgggaaaacggccacatttgccatatcgattctgcagcaga

SEQ ID NO: 178031 - DNA, 90 bp, Homo sapiens
gagccacccgcacagacatctgccaaggagccctggatataattgaccctgcaatcctgcgcccgggccgcctggacaaaacactgtttg

SEQ ID NO: 178032 - DNA, 51 bp, Homo sapiens
gtggatgatgccaaagttttattaggagctaatttcgttactcgaaaaatt

SEQ ID NO: 178033 - DNA, 74 bp, Homo sapiens
aaccaagaaggagattttgaagatgcagatacccagggtgtccgcaatgttgccagtgtctgtctgcagattgg

SEQ ID NO: 178034 - DNA, 100 bp, Homo sapiens
tcaaggaggccttccagctgtttgaccgaacagaggtggtgcggagctcctgtttgacggtattaagaaacatcgagtcactttgcctggacaggaggaa

SEQ ID NO: 178035 - DNA, 50 bp, Homo sapiens
ctgccgctggcgagcgccaccgcatggaccggagagcaatggtgtgatct

SEQ ID NO: 178036 - DNA, 100 bp, Homo sapiens
cgcttgcattcagctcctctgtgtttgccgcctgggaggattccctgggagcacccaccagctgagatctgcacatcagccacaatcctctcaggacggc

SEQ ID NO: 178037 - DNA, 75 bp, Homo sapiens
gggctggctgctgctggccgaagcgaagggcgacgccaagccggaggagcccccctccatgcgcctgaaggcccg

SEQ ID NO: 178038 - DNA, 76 bp, Homo sapiens
gcaaaacagaaccttccaaatttccttttccaactaaggtaaactcgggggccaggactcttttgaaagcatagag

SEQ ID NO: 178039 - DNA, 100 bp, Homo sapiens
attttcacctcgcgtcgcgcccgggaggaaggaacgaggcaaggagctaaagcagcgtgcgttcagccctggggaatcggtgagtttcaaggatgtggct

SEQ ID NO: 178040 - DNA, 96 bp, Homo sapiens
ccgagccggacaaggcgccgcggcgactcaacaagcggcgcttcccggggctgcggctcttcgggcacagttttgggaggtcatcagtgatgagca

SEQ ID NO: 178041 - DNA, 58 bp, Homo sapiens
ggacagcctcatcacccggctgctggaggacatcctccgggaattcaacccttccctg

SEQ ID NO: 178042 - DNA, 90 bp, Homo sapiens
agcttcttactggatttcttcatggtgtccattttatttagcaaggaatgtttacccttgcggaagttgcatcacttaatgacattcagc

SEQ ID NO: 178043 - DNA, 137 bp, Homo sapiens
ggaggcgttggagcgcggaaatctggaaccgggatggcgacgtctacactgagtcggaggcgaaggtgctggagaatctggtaaaagcaccattgtgaagcagatgaggatcctgcatgttaatgggtttaatggag

SEQ ID NO: 178044 - DNA, 90 bp, Homo sapiens
gtaaacaaagacatgaatggattcccagtcaagaaatgctcagccttccaattttttaagaagcggaatttatagagcggcagcacgcaa

SEQ ID NO: 178045 - DNA, 76 bp, Homo sapiens
agaattacagcagccaacctatgttgccctgagttacataaatagttttgattacgaagatgcaggctaccagact

SEQ ID NO: 178046 - DNA, 100 bp, Homo sapiens
ccaaggttccgcgccgggcgtggacggtgtggggcggtcccggccccgcagcccgtggaccgggagcccgtggaccgggagccggtggtgtgccaccccg

SEQ ID NO: 178047 - DNA, 98 bp, Homo sapiens
aggaggtcctgccgtccatgcggaagatcgtcgccacctggatgctggagatctctgttgaggagctggcgcggaatctggtcatcaaggtcaacagg

SEQ ID NO: 178048 - DNA, 75 bp, Homo sapiens
tccagccatcagtggaaccaacccagccgaccccccagggacacgtcaaaggctacatatcgcatcagcatcaga

SEQ ID NO: 178049 - DNA, 101 bp, Homo sapiens
gagatggaactgacttggcaggagatcatgtccatcaccgagctgcaggttgcttcagagcctggagaggcaaagaagatggaagacaaggaaaaggataa

SEQ ID NO: 178050 - DNA, 100 bp, Homo sapiens
ctccagggttctttggggcccgaggtgcatgtgagggaaccctggcttgttcaacctgtcacctcatctttgaagatcacatatatgagaagttagatgc

SEQ ID NO: 178051 - DNA, 75 bp, Homo sapiens
gtgatgaaaacccagatgccacatatgatttcaagatgagtgaccgaggaggtggcgttcctttgaggaaaattg

SEQ ID NO: 178052 - DNA, 101 bp, Homo sapiens
agggcctggggagcggcggggagaagacggcggtcgtgatcgacctgggagaggcctttaccaagtgctggagaatctggtaaaagcaccattgtgaagca

SEQ ID NO: 178053 - DNA, 74 bp, Homo sapiens
ccaaatggaaccatccttatggagacacacaaaactgttggaacccaggaagtggtgaatatgattttcgatat

SEQ ID NO: 178054 - DNA, 100 bp, Homo sapiens
ccagctatgtgtatccatggagacaagagtcaaccagaaagagattgggtacttaatgcgggctacattgagagacctcagctgattcgagcaaaagtgc

SEQ ID NO: 178055 - DNA, 82 bp, Homo sapiens
gggaaccctggtcaccgtctcctcaggtagatttcgggcagacaacttgaacaagctgaagaacctatgcagcaagacaatc

SEQ ID NO: 178056 - DNA, 74 bp, Homo sapiens
ttgtgatggatctgtcagagtgtggcaaatttcagatcagtggtttgggaacctggtcactatggaatggtgga

SEQ ID NO: 178057 - DNA, 75 bp, Homo sapiens
ctgaataaagctgttttggaactgtcaggtacctcaaagcgaatcgggcgcctgattgctgagtgtcatctcaac

SEQ ID NO: 178058 - DNA, 100 bp, Homo sapiens
caatgttcagaatccacctgtataatgaatccagaagttgtagatgtaagtttcaatgaattaacttcctttcctacggaaggcctgaatgggctaaatc

SEQ ID NO: 178059 - DNA, 83 bp, Homo sapiens
tccttgtggagccggagctgggcgcggattcgccgaggcaccgaggcactcagaggagacatgcaagaaagcacttcagccaa

SEQ ID NO: 178060 - DNA, 83 bp, Homo sapiens
ggtgcatctatctatggcaaacagtttgaagatgaacttcatccagacttgaaattcacgggaacctcctggacaaagacatg

SEQ ID NO: 178061 - DNA, 100 bp, Homo sapiens
ggccccgtaaattggaaggatgcacaagttccaaggttacgtttcacctctgcctgtgagtttctggatattgtagagctgctgctccagtctggtgctg

SEQ ID NO: 178062 - DNA, 50 bp, Homo sapiens
acatccaaagagtggtactggaaccaggaagacccactaccttatctgag

SEQ ID NO: 178063 - DNA, 82 bp, Homo sapiens
ggaagccggtggggccttcggaaagagagagcaggctgaagaggaacgatatttccggatgctccagaccttgtatgattac

SEQ ID NO: 178064 - DNA, 75 bp, Homo sapiens
gaccgttttagtagtcgcagacctcgaaatgatagacggtactccgtggaaggcttcatcgacaagaacagagat

SEQ ID NO: 178065 - DNA, 101 bp, Homo sapiens
cgctgccgtggccgcccggctgccgggagccgacagcttcgcgccggagccagtcttggtgctctgtgttcacctggttcatctgaggagctgcatctacc

SEQ ID NO: 178066 - DNA, 100 bp, Homo sapiens
cgacaagtggaggcgccgctctagcggccgggactctgaactatggcgattttctggcatccttaaatcttgtgtcaaggattggttataatataaccag

SEQ ID NO: 178067 - DNA, 71 bp, Homo sapiens
actacaaaggctatgaaaagaagccctattgtaatgcggcagagcggcttgggtaaatccaccttaatcaa

SEQ ID NO: 178068 - DNA, 82 bp, Homo sapiens
aggaatcccgcaaccgaagcacaaaagttatcaaacccggtggaccatatgtagatttccagcacctatctagagagcaatt

SEQ ID NO: 178069 - DNA, 100 bp, Homo sapiens
aggtgcagcttcaagcttaggaccacccaccatgcctatccaggtgaagtcttcgtcttaaatgatggtggagaagttgatttagaccttggaaattatg

SEQ ID NO: 178070 - DNA, 100 bp, Homo sapiens
gggattgatgtgcaacaagtgtctttggttataaattatgatctacctaccaatcgtgaaaactatattcacagcacaagctccgggtggataaggcagc

SEQ ID NO: 178071 - DNA, 75 bp, Homo sapiens
ctttgaggacatggcctccgacgaggacatacaaatttacatgtattggagaccagaccagaagcccttctgaat

SEQ ID NO: 178072 - DNA, 51 bp, Homo sapiens
catcggtttcccttccagccattggaacagttcatggggagatttcctttt

SEQ ID NO: 178073 - DNA, 98 bp, Homo sapiens
ggagagctcattgtgtcaggggcctcccagtagcattggatgcaggaaaaaatacattgacggtgaaaaacaagccgaaccagttgtagttttagatc

SEQ ID NO: 178074 - DNA, 75 bp, Homo sapiens
tgttcatcttcaattcaccttttagagcacagtgttgaacttctgaaggaggctaatgcagagtcaagtaaaacc

SEQ ID NO: 178075 - DNA, 100 bp, Homo sapiens
ccctgacatgcagggaagccaccagctgctcgtcgtatcagaggagcagttcaagataccccagaatcttccatgctccgtcacactgcagccaggccca

SEQ ID NO: 178076 - DNA, 89 bp, Homo sapiens
tctgggacgcacagagaccgtgaagattccaagttcaggagaactcgaccgctcggcttattccaggggtgtgtttcgtcgagatgcac

SEQ ID NO: 178077 - DNA, 90 bp, Homo sapiens
gccgctgtgtggttgcaacggagataaattcccggaaccgcgattcggcgtgtcaggtatcagccagttccaaagaaccagccatgtcaa

SEQ ID NO: 178078 - DNA, 98 bp, Homo sapiens
aacaatcacaactttggtggaccacccgataattttgcagtggggccagtgaaccagtttgactatcagatgcaccagcaaggaatactgaagaccga

SEQ ID NO: 178079 - DNA, 90 bp, Homo sapiens
agaagagaggatagaagaacaacagcatagaaacagagaagagagtgacaggaagctgcagaaccttggcctgaaaatgctacattatat

SEQ ID NO: 178080 - DNA, 98 bp, Homo sapiens
agacggctgcgaggcgctgggcacagcatctgagattcaaatgatgacgcttcctccgggtcagtttgtgattacagacagtggtgtggcaactccag

SEQ ID NO: 178081 - DNA, 98 bp, Homo sapiens
aaagaacttttgcagagctgtgatgttttggggattccactctccagtgtaatgattattgacaacagtgtgtttcctgtaacaaatcgttcaagaaa

SEQ ID NO: 178082 - DNA, 79 bp, Homo sapiens
aaaaaagaggagcttgtagcagagcaagccatcaagcacttgaaggtgtttggagaagagggattgaccctgaatcttg

SEQ ID NO: 178083 - DNA, 100 bp, Homo sapiens
tgtgaaactgctttctaaaacaccagaactcaacctggccctggccaacgtcaacattgggagcctcatctgcaatgtaggggccggtggacctgctcca

SEQ ID NO: 178084 - DNA, 101 bp, Homo sapiens
tgctcagggctgcggccgcccgaagaggagagagcgcgggcctctaggaagtttaagctatgaagaaggacatccctcacactctgaaacagatctccttc

SEQ ID NO: 178085 - DNA, 89 bp, Homo sapiens
caaggcccccgagtgagcgcgggcgccgagtgaataccagggcctggtgaagcacacaggaggctgccactgtggagcagttcgttttg

SEQ ID NO: 178086 - DNA, 97 bp, Homo sapiens
aatctttaagccttggaaatggaggaaaaagaagaccagcgacaaatttagagaaacctcggcagaaaagcacttggttctgcttcgagatggaagg

SEQ ID NO: 178087 - DNA, 100 bp, Homo sapiens
cggggcatctttgagaccaagtttctctctcagatcgagagagacagggtctcattatgttgctcaggatggacttgaactcctggagtcaagcgattct

SEQ ID NO: 178088 - DNA, 83 bp, Homo sapiens
cgagggcatctatgtgcaggatgtcaagaccggaaaggtgaacttctagatccatgtggttatatcagtcctgaatctccagt

SEQ ID NO: 178089 - DNA, 75 bp, Homo sapiens
agaggacgccttcaacaccaccttcatctccaccatcgatatcagttttagagaatgtggcgtggagaaattctc

SEQ ID NO: 178090 - DNA, 100 bp, Homo sapiens
ctgcggccaagactccgtcctgcaaggcaacagctgaagctaataatcttgctgcagtagcaggagcaagagatacctattgtaaaagtatggaacaggt

SEQ ID NO: 178091 - DNA, 50 bp, Homo sapiens
gtgtgcaaacccgagagaactggtttctcctgaactgctcttggtctcca

SEQ ID NO: 178092 - DNA, 75 bp, Homo sapiens
gcgacgagctgaccctgggagacatcgacggcctccccatggccacccatggaccagtcggcattcacttcctcc

SEQ ID NO: 178093 - DNA, 75 bp, Homo sapiens
gtcctgcgcttggggatcctctgtacgcccgttcactgggaatttgaagtactgccttgtaattcttaatcagcc

SEQ ID NO: 178094 - DNA, 90 bp, Homo sapiens
ttggaagatctttaaatctgacagtgaagtggctggttacatccggcaagcgggtgacttccatcagcatctcagttataagaaatgcac

SEQ ID NO: 178095 - DNA, 90 bp, Homo sapiens
ctgaagaactattagaatttgcaacaaggtcattagatataaaggaacctgaagaattttcaaagaacatacatatgatagttgagaaag

SEQ ID NO: 178096 - DNA, 74 bp, Homo sapiens
ggccaccctggggttcaggatcgagggaatcaagatcaggatcctcatgaccagccaaagagaagaagaattag

SEQ ID NO: 178097 - DNA, 88 bp, Homo sapiens
ctacgagctgtttctcatctttatactcttccagaacagatctcggcccctttccaaacactcctgatgcctcatttgcctctcgcct

SEQ ID NO: 178098 - DNA, 100 bp, Homo sapiens
ctctaagcggagcctcagcaccaagtggtatctgatgctgcaggacagggtgtggccatcacagggaaccagaccttcaacaactggaactggcccaatg

SEQ ID NO: 178099 - DNA, 51 bp, Homo sapiens
tgagatccatctgcaccacggtgctgcctcacgaaagattttacttgtaga

SEQ ID NO: 178100 - DNA, 98 bp, Homo sapiens
gcggcttttccagcccagcagcagccgctccagggagtaccctgacttctaccggaagctctacggcctcttggacccctctgtctttcacgtcaagt

SEQ ID NO: 178101 - DNA, 96 bp, Homo sapiens
tcacctgtgcgggatggaacaaaaggtcagtgggaccatgtacaacactggaagacacgtatcccttcgcctggacaaggagcacttggtcaacat

SEQ ID NO: 178102 - DNA, 90 bp, Homo sapiens
gaaaatcgcttggttaaaacctgacacttttaacaggaccttcttaagactgtgaaactgtacctaggaatccaacttacaagggatgtg

SEQ ID NO: 178103 - DNA, 88 bp, Homo sapiens
ctggtagaaacaccaacaggatacattgaaagatttctcactatgtgcaatagacactttggcagtgttgtggcacaaaccattcgga

SEQ ID NO: 178104 - DNA, 97 bp, Homo sapiens
cgcgaggctcctcactgcagcgaaggactgggactcttcaattaatctgacatttcacaaatccaaaattgccgtggatgaactctttacttcactt

SEQ ID NO: 178105 - DNA, 98 bp, Homo sapiens
gggatattatcaaatctactactgttcatggcagcaggcattttggagatcaaagatgggtagaaaagatgctgctactataaaacttcctgttgatc

SEQ ID NO: 178106 - DNA, 75 bp, Homo sapiens
gaggatcgaatcttcactcccgctgtctcagcagtctacagcacgcctgatcctgcctgaagatggtgccactgg

SEQ ID NO: 178107 - DNA, 83 bp, Homo sapiens
gccacacagtgtgcctgcaacctgtccggggatcccagggagtgatgatgacagcctcttcatctatgactgcagtgctgcag

SEQ ID NO: 178108 - DNA, 97 bp, Homo sapiens
taaaatgcaaagaaaaatgtgaaggattcgaactgcacttctggagtccagaaaaggctttgaaagactcactacaaccctatgaggctgcttatct

SEQ ID NO: 178109 - DNA, 82 bp, Homo sapiens
caaaaactcctaagaaaaccaaaagttctccagctaaaaaagagtgcagggagactgaccctagacaaagctcttgacatga

SEQ ID NO: 178110 - DNA, 110 bp, Homo sapiens
tgggctacgctttgaggaagccccagattacatgtatctgaggcagctattccgcattcttttcaggaccctgtgattggcgcctgcgccggcggaccgtgaccgaggaa

SEQ ID NO: 178111 - DNA, 76 bp, Homo sapiens
tgcagaatgacccctgtcttttaccagaggattcttacagaagcagagattgatgctcaccttgttgctctagcag

SEQ ID NO: 178112 - DNA, 100 bp, Homo sapiens
agaagaagaaaacaaaggtagaacatggaggatcgtcaggctctaaacaaaattctggatcagttcttaagagcagccccggtaactggaggaatgggag

SEQ ID NO: 178113 - DNA, 82 bp, Homo sapiens
tttaagagagctctggacaagctggaatgcatccaagagaatccctcaacatgctggtgtggacactgccagcggctgcagc

SEQ ID NO: 178114 - DNA, 90 bp, Homo sapiens
ctacaacacagacaccaaataaaatagccatctcacctttgaaatcgccaaataagagttgatcaagaacttaatggaaaacaagatgaa

SEQ ID NO: 178115 - DNA, 100 bp, Homo sapiens
cggaagtgcagctgcctcagttcttagcgcaggtgtctgcagtgctgtgtgatgatgacatcatgctgaccattaagccaggggagcatgggtccacata

SEQ ID NO: 178116 - DNA, 75 bp, Homo sapiens
catttccagcaggctgcagatacgagtggacaaaataatcatgggccagactgggaagaaatctgagaagggacc

SEQ ID NO: 178117 - DNA, 83 bp, Homo sapiens
agctctcagcaagcaactttgagctgcacgttgcacaaggtgctggagaatctggtaaaagcaccattgtgaagcagatgagg

SEQ ID NO: 178118 - DNA, 51 bp, Homo sapiens
cggacatgcttctcggtcagagctgatcactcctctgccaaagatcccaac

SEQ ID NO: 178119 - DNA, 50 bp, Homo sapiens
ccagaacggagagctccctcctagaaaagcttttgtgtggtcctctgagc

SEQ ID NO: 178120 - DNA, 75 bp, Homo sapiens
gtggctacactctggaccccaatggcaaaacctgcagccgtgagacaggggaaaaggtggaaacagacatggaga

SEQ ID NO: 178121 - DNA, 96 bp, Homo sapiens
atagaagttgagcactcggtcccaaaaaggcaaagagcctggcagagagcaggtgtgtgatacacgtcgtcaggtgactgaccgaggaattcaggg

SEQ ID NO: 178122 - DNA, 100 bp, Homo sapiens
tccccaaaattgagaccactcatccaccgttgcctccagcccacccacctccagggaagcagagactttcaaggaacaaggaaatgcatactatgccaag

SEQ ID NO: 178123 - DNA, 101 bp, Homo sapiens
tgtacaaatacccctttgaattaattatggcttaatctatgccagcaattatgacaatgttagcagaccatgcagctcgtcagctgcttgatttcagccaa

SEQ ID NO: 178124 - DNA, 92 bp, Homo sapiens
ccgagggcaactttggaggccccctggaaggctttaggatccaggcgccatgtcagaaccggctggggatgtccgtcagaacccatgcggca

SEQ ID NO: 178125 - DNA, 73 bp, Homo sapiens
tgatatcagacaccgagcttcagcaagctctctccaacggccagctacagatgcatgcatattgtgaaaaccc

SEQ ID NO: 178126 - DNA, 99 bp, Homo sapiens
tcgaggagctcgaggtggactatgaggctatccgcagcgagatggagcagctcaaggagttttaacttctagtcatggcgaatgatcgcaggagagcac

SEQ ID NO: 178127 - DNA, 90 bp, Homo sapiens
tggacagccagggcaggaaggtggtggtgtgcgacaacggcaccggggggcatatgatattttcctgaatgcaaaagagcaaaacattgt

SEQ ID NO: 178128 - DNA, 90 bp, Homo sapiens
gggagttgggggcaaggagaagatcctggtgttgctctcttgccattcgtggatgagcgaaggctacgagctgccctagaagaggtatac

SEQ ID NO: 178129 - DNA, 100 bp, Homo sapiens
gtgaagagtagacacgactgatgacttcagggatgctacacctttctctcctgcctgggcaagcctcggtttttgtggaaactctggataagtgtttcga

SEQ ID NO: 178130 - DNA, 82 bp, Homo sapiens
acggtggcgccgcccggggcgaggcagggccagcagcaggcgggagatgctgcacttaaaaggatgcttgttttgatgtcct

SEQ ID NO: 178131 - DNA, 96 bp, Homo sapiens
cgtcggggagacgctgtggtgtgactggggcaggaccatcaggtctctgaaagaagatgaatttggctgagatttgtgataatgcaaagaaaggaa

SEQ ID NO: 178132 - DNA, 75 bp, Homo sapiens
cctggggaacctgctcaaagccctgggtcgcttggaagaagccaagccatgctgtgacctacaagcaaactaaat

SEQ ID NO: 178133 - DNA, 100 bp, Homo sapiens
ctcggagtaggaagctcgggcgctccggctgtaaggagccgcggcggggggaaaatggagcccttcaccaatggtgtcatggagaaactccagctgggcc

SEQ ID NO: 178134 - DNA, 140 bp, Homo sapiens
ttccatgagccggaggccattgagctgtgcacgaccacaccgctgatgaagacaaggactcacagtggctgcaagcttgttgcagatccttgtgccagcaacccttgtcaccatggcaactgcagcagcagcagcagcag

SEQ ID NO: 178135 - DNA, 95 bp, Homo sapiens
atgaaggaactgggcatatgggagccattggctgtgaagctgcagacttataagacagcagtggaggcattaagaagaaatgcactcaccatgag

SEQ ID NO: 178136 - DNA, 90 bp, Homo sapiens
cagattcgcagtggtcgcttcttctccttgcaccctggaggagaagaggttctgctggaacaagctggtgtagatgcaagtgaaagcttt

SEQ ID NO: 178137 - DNA, 82 bp, Homo sapiens
ttcaagaagaacaacctaactccagatatctacctaattgattggtgagcgagtgctgtgctttcatgggcctcttctttat

SEQ ID NO: 178138 - DNA, 94 bp, Homo sapiens
cgagcaccagagtcggcgtaactatcgcctgacaggacaatgcagatcttcgtgaagactctgactggtaagaccatcaccctcgaggttgagc

SEQ ID NO: 178139 - DNA, 94 bp, Homo sapiens
gcagcaccgcagccttgggcctcgcgccggctatggccgtgccctggggctgagccctcagtgtggacgaatgtggaacctcgctctgtggctg

SEQ ID NO: 178140 - DNA, 75 bp, Homo sapiens
gcttcaaattggacttaagtctgaatttcggcagaatttaggcaaagcctttggttgtgttggagggtacatcgc

SEQ ID NO: 178141 - DNA, 83 bp, Homo sapiens
ttctaatcaaaatatgcagtctcttttaccagcagactacaggaatatgtggaagctgtctcttttcaacacttcatcaaaac

SEQ ID NO: 178142 - DNA, 100 bp, Homo sapiens
gctctcgcagaggatgtgttagactcagactatatgttctcctttcagccaagacctttcaccagtgcaggggatagaagattcattccacaaacttata

SEQ ID NO: 178143 - DNA, 100 bp, Homo sapiens
gtggggagatgaacccaacctagtgggtgtaatacatcatgaactgcaggaagcttcactgtatgaagatagaataataacaagagagaaggacatgagg

SEQ ID NO: 178144 - DNA, 74 bp, Homo sapiens
ggagcagatcgctgcggagcaaaaggccaatccagatggcagaagattttcaagtcccggctggtggagttgtt

SEQ ID NO: 178145 - DNA, 100 bp, Homo sapiens
cgctcatccccctctcccagcaggagtgtacctcacagccttctaggatctccagagtggacaggaatctcacttggagggaccatggagcagtatacag

SEQ ID NO: 178146 - DNA, 73 bp, Homo sapiens
ttccaacaaggagattttccttcgggagttgatctctaatgcttctgatcatctacacgggcgacagcttcgt

SEQ ID NO: 178147 - DNA, 82 bp, Homo sapiens
tcctggctggccaagttactggagccgatttgagaagctgatgtctcctcgacttccaactggaaccttgaacccccacatt

SEQ ID NO: 178148 - DNA, 75 bp, Homo sapiens
atcgcgttttgccagcgataatacgcctcaggttatggaaacaaaggacatgctttacatcgtcactgaatttgc

SEQ ID NO: 178149 - DNA, 82 bp, Homo sapiens
cttccctgcactctcatcgctctcggcctcggcctcggcctccgacacggtgctgcggtgtgtcgcggggtgcccaggcctg

SEQ ID NO: 178150 - DNA, 100 bp, Homo sapiens
ctccagccttggtctgagtggactgtcctgcaggctgaggaaaaggcagatgctctgaataaggagctgctgatgaccaaacagaagttgattgatgcag

SEQ ID NO: 178151 - DNA, 100 bp, Homo sapiens
ggccccaggccgcggggcggcgcgggacggcgggcgccggcgccgcctccggcacccacaggccctgaggctccagtgcccacaggcagagagggcgact

SEQ ID NO: 178152 - DNA, 74 bp, Homo sapiens
ttcccggaaccgcgattcggcgtgtcagtaattcgccaaaatgacgaacacaaagggaaagaggagaggcaccc

SEQ ID NO: 178153 - DNA, 51 bp, Homo sapiens
attgtcagacccagaatcttcaatttgagagggaagatctgatctcctaga

SEQ ID NO: 178154 - DNA, 100 bp, Homo sapiens
aacaccaggaggaccagctggatcgacccccgggacagacaaagaaacagccttggtataatagcacgttagcatcaagacgaaaacgacttactgctca

SEQ ID NO: 178155 - DNA, 75 bp, Homo sapiens
ttagccaacccaaattaccttaattgtcagaacaaaatctgcttcatcccaggcatggtaggacctatattagag

SEQ ID NO: 178156 - DNA, 74 bp, Homo sapiens
acaagcgtcgcaatgaggactctctacaggacccgatatggcatccctacattgctgcctgaagtgggaaaccc

SEQ ID NO: 178157 - DNA, 96 bp, Homo sapiens
gtctcccttcttgcctgatctcaagcccaacctcaactccttgcactcatcgccctctggtgttataactaaggctatttataagtccagtgaaga

SEQ ID NO: 178158 - DNA, 50 bp, Homo sapiens
ttgggagttgttcctcttacagcattacgtagagaaatcgacactcttaa

SEQ ID NO: 178159 - DNA, 75 bp, Homo sapiens
ccatcttcgacttgagcgaagttttatgcaagatgacttcctgaagccacagatcatcacccagccagaaaccac

SEQ ID NO: 178160 - DNA, 72 bp, Homo sapiens
ctgatagaaatcatttccatcaataccgggagtcagtggatcggtggggaaaatgctgcttaccctgggccc

SEQ ID NO: 178161 - DNA, 85 bp, Homo sapiens
gaagcttatacacccaagttaactcagccatgtttcctgagagactgggagttgcaggtgcacttcaaaatccatggacaaggaa

SEQ ID NO: 178162 - DNA, 100 bp, Homo sapiens
ggaagatcctggaggtggatctgaagaacggaaaagtgggagatagatccatctgagttggcttttataaaggagattggaagcggtcagtttggagtgg

SEQ ID NO: 178163 - DNA, 85 bp, Homo sapiens
ctcctcggcctcggcgtgctgcgcctccgcggctgccctgcgccaggcaccagaatttcctgagtttgccactaaagtccaggaa

SEQ ID NO: 178164 - DNA, 82 bp, Homo sapiens
aaaaggaacaattaatatatatgctactggacattctagcaagttcagtgatgttgagatgggagaaattatcatgggaaac

SEQ ID NO: 178165 - DNA, 80 bp, Homo sapiens
acggccacctgcctggcctggtgccatgacaacaagtcccggctccggaagatgaagggcagctgtgcggagggtagtgg

SEQ ID NO: 178166 - DNA, 100 bp, Homo sapiens
cattggaccctcctcccaactgtaggaaacctcgacctgtctcccagttggttgcacagcaggttactcagcagtttgtgcctcctacacagtcaaagaa

SEQ ID NO: 178167 - DNA, 75 bp, Homo sapiens
catgaccagcttagcttctgtcctaaagttgcagatctgatctcttctgaacacctcatcgtgtctccatccctg

SEQ ID NO: 178168 - DNA, 90 bp, Homo sapiens
atctttaactttaattatgcccaagccaaagctgcaacaggcaataccagtgagggcgaagagaaactgctggagcgaacccgtgccagg

SEQ ID NO: 178169 - DNA, 100 bp, Homo sapiens
tcttccagcttctgctgtccttctttgtggagagcaagtaagactttgaccccgacgcaggcttcagtgattgccgcggatcagaagcctgagcactttg

SEQ ID NO: 178170 - DNA, 75 bp, Homo sapiens
gacagcacctcatcccctggatgggggaccacaagatcctcatcgacagtgtactaatggtcacttgatgtgcgc

SEQ ID NO: 178171 - DNA, 100 bp, Homo sapiens
ttgtgggaccttgtgatcatgttggtcaaagaaaaagtgatgtatgaaaaagaggcaaaacaacaagaagaaaagattgaaaaaatgagagctgaagacg

SEQ ID NO: 178172 - DNA, 100 bp, Homo sapiens
taaaatgttggcaaaagtgaagcaagttcacaaagaagtattaaactgtgaaatagagctgaggtcaaaggctggaaagtcatcaggagaaaaaattggt

SEQ ID NO: 178173 - DNA, 88 bp, Homo sapiens
gagttccatggctgagagtaggctccgggccccggacctaggttggaagaagtggcaatatcccagctggaacaacagttgatacaga

SEQ ID NO: 178174 - DNA, 100 bp, Homo sapiens
ttagaatctcaaacaagacaacttgagctgaaagcgaaaaactatgctgaccagagccggaaggtggtggtcgtacgctgtgaaggcatcaacatttctg

SEQ ID NO: 178175 - DNA, 88 bp, Homo sapiens
ccggcgccgcggcctcttcggctgcggaccctgccattccggaggagcagtagaagactcagaaagtggtgtttacatgcgattcatg

SEQ ID NO: 178176 - DNA, 100 bp, Homo sapiens
gaccccgcagggatctttgaattggtggaacttgttggaaatggaacatacgggcaagtttataaggcataatgattataaagtggtttctcctgctttg

SEQ ID NO: 178177 - DNA, 74 bp, Homo sapiens
attccgcagtccccccgttccctggaggtcctgtggaatgtgcccctctcagctgaggaggaaccgagagcggc

SEQ ID NO: 178178 - DNA, 111 bp, Homo sapiens
caggcgtgctggccggcgtggagagccgccagggctctatcaaggggctggtgtactccagcaacttccagcctagatattatcctactgaagatgtgcctcgaaagctgt

SEQ ID NO: 178179 - DNA, 120 bp, Homo sapiens
tcatctcggagactagaggctggataccaaatagcagtggaaaccgggaagcttctacatcacctctgagaactgcatgcagcacgcacacaagtggcaccgagacctgtgcctgttgct

SEQ ID NO: 178180 - DNA, 73 bp, Homo sapiens
aataagctatatactttggttacctatgtacctgttaccactttcaaaagtgctcatggaaacaacctcattg

SEQ ID NO: 178181 - DNA, 80 bp, Homo sapiens
gcctgtgacctttgtgaccaactccacctacgcagcagacaaggggttggtgtctcacctttaactctccttatgctggg

SEQ ID NO: 178182 - DNA, 100 bp, Homo sapiens
ttgtggaaattcccagaggactttggagaccagtttctatgcagattttggaccgctgaacttggcaatggtgtacagatattgctgcaaactaaacaag

SEQ ID NO: 178183 - DNA, 82 bp, Homo sapiens
ccgttcagctctccagtgggacagcgcatcggaccaagaatcgccttcagccctgtctggtgcatccttggcagaaagtgag

SEQ ID NO: 178184 - DNA, 101 bp, Homo sapiens
ctatggagaaaatcattcaagtggccaagacctctgctgcacaggaatgtcggattgcacaccctgttgtgaagtgcacctactgcaggactgagtaccag

SEQ ID NO: 178185 - DNA, 88 bp, Homo sapiens
cctggaccacggcgcagacgcgggcgagctgcggctcggacgccagcggacacgcgggcgagcactggcagcagcgacccctactgca

SEQ ID NO: 178186 - DNA, 75 bp, Homo sapiens
atgcgtgcagaaaagagatccagggcttcctcgattgtgccgcgagggctcaggcatccgtgtacaagatttgca

SEQ ID NO: 178187 - DNA, 100 bp, Homo sapiens
gaacactgatgggaaatcagccctggacctggcagatccttcagcaaaagctgtccttacaggaaactcaacagtgtaaatttgatggccaggagacaaa

SEQ ID NO: 178188 - DNA, 100 bp, Homo sapiens
ccagagcttgtgtagcgtcagatccttgagtgataaaggagtagagtctcttgcatggcaccaagaatgttaccaattcaagcagtttaagattgccaag

SEQ ID NO: 178189 - DNA, 76 bp, Homo sapiens
atcctgtccatcgtgtgcctgatgatcacgcagctggctggcttcagtggaccagaacaggagtacagctgtgtag

SEQ ID NO: 178190 - DNA, 75 bp, Homo sapiens
gcctgagcgacgtgccccaggcggagatctcggggggggccctcagcctcttggccttgaacgggctgttcatct

SEQ ID NO: 178191 - DNA, 97 bp, Homo sapiens
gaaatctacaggtcattcctggagatcctgcacacgtaccagggcgagctgaggatcagtgtcctgcctgcctacctgtcctatgatgccccatggc

SEQ ID NO: 178192 - DNA, 90 bp, Homo sapiens
agattacaaaacgacaggagcatcccaggaaggggttcccagaagtcagaatccaagatgacagcttatctcctgtgctgcacccttctg

SEQ ID NO: 178193 - DNA, 75 bp, Homo sapiens
ctagaccccacggcgacaccgccaagaagcccatcatcgggaaaaattgaggaagcagtgaatgcatttaaagaa

SEQ ID NO: 178194 - DNA, 75 bp, Homo sapiens
ctcatactacactttcttggtagagtctcccatcaaaggacgtgcacagccttatgatcccaatttttacgatga

SEQ ID NO: 178195 - DNA, 80 bp, Homo sapiens
ctgaggcggccgcggggcccgagcgcagtgtactaatggtcacttgatgtgcgctggctgttttatccacctactagcag

SEQ ID NO: 178196 - DNA, 83 bp, Homo sapiens
cagactgctgacaaattgtactttgtcctagactacattaatggtggagaggttgatgacaacaagaaactaggagaatgggt

SEQ ID NO: 178197 - DNA, 75 bp, Homo sapiens
gttttttcaagcccatatcttgccgaaatgtgtaccttgtggtctataatcctttagaacaagaccgaatctcgt

SEQ ID NO: 178198 - DNA, 75 bp, Homo sapiens
ccgccgattcctcctccttggtcgccgcgtccttggctggcgtgcacgtgtggttctcaaatataggcattctga

SEQ ID NO: 178199 - DNA, 75 bp, Homo sapiens
ggaaagatggagatgaacctctaacacagtggaaaggaaccgttctggatcagttatagctgaggtggtaccagt

SEQ ID NO: 178200 - DNA, 83 bp, Homo sapiens
gattcagccgtgaagcaagtgcagatagatggccttgagtcagaaataccatcagaggaggggtactgtgactttaatagtag

SEQ ID NO: 178201 - DNA, 83 bp, Homo sapiens
ccgagtgcagaagatctgggtgcccgtggaccacaggccctcgttgcccagatcttgtattggttggtgatggtggtactgga

SEQ ID NO: 178202 - DNA, 100 bp, Homo sapiens
agaaagaaggacagggatcacaaacactcagagtggaaaaagtaccatcatttgaaacagctgctctgttaaaagcgaaaatgaaacaattgcctgcggc

SEQ ID NO: 178203 - DNA, 90 bp, Homo sapiens
gacaatatcatgcaagtgtggcaaatgatattgaagatttgcccccaacagtccaagaaaaattatttgatgaggtgcttgatagagacg

SEQ ID NO: 178204 - DNA, 50 bp, Homo sapiens
cccgtgaaggagaagcacgcccggcatgtggcccggccagataagatttc

SEQ ID NO: 178205 - DNA, 97 bp, Homo sapiens
ggagcagctgcgcccgctgccagcacacgactacttcgagttcttcgccgccgacctgagacctaaagaattcattgagtgtgtctcccatatccga

SEQ ID NO: 178206 - DNA, 108 bp, Homo sapiens
gcggacgggccatacccaataaccaggtgcttggcaaaatcgagcgggccattggcccgcgatgctcccagcccggtgagacctgcctgaatggcgggaagtgtgaag

SEQ ID NO: 178207 - DNA, 101 bp, Homo sapiens
acactgtcagggaagaagcgcagaaaactcctccagcagatccggcttgcccagaaagagaagacagccatggaaggggagtttgaagaggaatcaaagca

SEQ ID NO: 178208 - DNA, 100 bp, Homo sapiens
agccagaagagaaaacctatgccctgttcattggtgacacagtgcttgtggatgaggatttgtataagtccttgaaaacactatctgcagaactggtacc

SEQ ID NO: 178209 - DNA, 96 bp, Homo sapiens
ggacactgaaattcagagaggggaagtgatttgcctcagcttgtactctcgttttgacaggagccattcaagtagcagacaaagtttcttcaggga

SEQ ID NO: 178210 - DNA, 90 bp, Homo sapiens
ctctgttggacagtgatgtgaagaggttcagctgtcctaatcctcactgccgaaagaggtgttatgaacataaacagtatagaaatggat

SEQ ID NO: 178211 - DNA, 95 bp, Homo sapiens
tgaagatttgcataaagccaacattcgcaccgtcatggtcacagattggttttcacagaattccatggactttaactgctgaaccaatgatgcac

SEQ ID NO: 178212 - DNA, 82 bp, Homo sapiens
gtagtgattcaatcagcagcagcagtagtaccagcagtgacaggtaacttgggtttttactcctgtaacaactgaaataaca

SEQ ID NO: 178213 - DNA, 75 bp, Homo sapiens
agttattggaaaaggttgtcttattcaagcaaggttacgttatatataggattcgtgttcgccgtggtggccgaa

SEQ ID NO: 178214 - DNA, 100 bp, Homo sapiens
catggggcaggacttaccgagaaggcaaattggccaggtaatttcatctgtgccaaagcctccagaggacaagccagaagatgtacatacaagtcatcca

SEQ ID NO: 178215 - DNA, 98 bp, Homo sapiens
cctgactaaagcttgaaatgctacatttccaagggtcgagctgtgcagttttagcgggtacaagatctaccccggacacgggaggcgctacgccagga

SEQ ID NO: 178216 - DNA, 139 bp, Homo sapiens
ggactcagaaccttggatagaagttaaaaaaagacatcagccagccccagtgaaattgaggtttgacatgcaaaggataactctggaagagttgaagcacattctctatcatgccttccgagaccacctaacgatgaag

SEQ ID NO: 178217 - DNA, 88 bp, Homo sapiens
atttcctgcaaggactccaaagtggtgagttctcctgtgcctcctgttggctctctttgcatctggcctcatccaccgagtctgtgtc

SEQ ID NO: 178218 - DNA, 75 bp, Homo sapiens
caaagtcatgggcacagctgaatggaaagccagtaggacacgaaggtgagttaaacatgaagtttctggagagac

SEQ ID NO: 178219 - DNA, 100 bp, Homo sapiens
tcctgtacagcctgcagaactcactgctcagcacgcaggcatgtgaggaagctgggcttaaaggagactccagcaaatggagagacagaccacagtcctg

SEQ ID NO: 178220 - DNA, 100 bp, Homo sapiens
tcgggctgtgctgaagtgggcagatggcaaaatgatcaagaatgaagtggacatgcaggtctataagaaggagaaagctcgagtcatcactgaggaagag

SEQ ID NO: 178221 - DNA, 88 bp, Homo sapiens
ttcaagaactgccgtcttctttgcctgcactaatgaaatgagccgtcagactgctacagcattacctaccggtacctcgaagtgtcca

SEQ ID NO: 178222 - DNA, 51 bp, Homo sapiens
cgaatacctcacgcctgaggagatggtgtccaggatgtggaggtgcacttg

SEQ ID NO: 178223 - DNA, 107 bp, Homo sapiens
ccgacacgccggggcgcccgcgcgcggggaccccacggggtttggtgcacctcgatttggaggaagtagggcagggcccttatctggaaagaagtttggaaaccctg

SEQ ID NO: 178224 - DNA, 50 bp, Homo sapiens
ctctttagagagttatctgagtgtgttgagatctgcatagccactcctgg

SEQ ID NO: 178225 - DNA, 97 bp, Homo sapiens
ttgctcaggtgtttgtccacggagaaagcctgcaggctgacttatccttgtataatgaattccgattgtggaaggatgagcccacaatggacaggac

SEQ ID NO: 178226 - DNA, 50 bp, Homo sapiens
ctttgcatccggagagtggacaagaaagttgtaaagaagaaagttctacc

SEQ ID NO: 178227 - DNA, 100 bp, Homo sapiens
tgctcgggagctggtccccaacgaggtgtggaaccccttcttgctggaactccacggagagactggtcctacttgaagtccatcatgtccttcggcagag

SEQ ID NO: 178228 - DNA, 100 bp, Homo sapiens
gttcaggctacggtgagccgaagagtacaggggctcaggtccaggtggcaggggatatgctacccaactcaactgagcgggccatcactattgctggcat

SEQ ID NO: 178229 - DNA, 100 bp, Homo sapiens
cgccactacagttcatcaacatcaactacgtccctctgaaggctgggccctgtctcaggcccccaggctttccccaaactggtgcggatcctcacggcct

SEQ ID NO: 178230 - DNA, 50 bp, Homo sapiens
accgcccccgcccgaccatggccgagggagaataaaggcagccccgttga

SEQ ID NO: 178231 - DNA, 100 bp, Homo sapiens
ctggggatcgctacggaccttaaaatacccgcaacagccccttcgtcccaagtaaggtactcaactgtgtggggtactacataaatcctgaaagactaca

SEQ ID NO: 178232 - DNA, 100 bp, Homo sapiens
gcagctgttgaaggagtcccagtccccagacaccaccatccagagaaccgtgcaacaaacactatgataccctggcaactggaataatttattttcatcg

SEQ ID NO: 178233 - DNA, 75 bp, Homo sapiens
agcggttccatcctacacttggtcctcccgagagctggatgacagcagcagtgagtccagtgacctccagctgga

SEQ ID NO: 178234 - DNA, 100 bp, Homo sapiens
cctgctctcagctctggtcgcggcggctatcgacggatgaaaactttcggaagagaaagttgcctgtggtaagttcagttgttaaagtaaaaaaattcaa

SEQ ID NO: 178235 - DNA, 50 bp, Homo sapiens
tggagactggcactgggctctgaggaattatatccagatcgagagacaga

SEQ ID NO: 178236 - DNA, 75 bp, Homo sapiens
cgcgtgagtcgtgagctggcaggacacacagcaaattatgcgcacagccatgaagtataacctgggattggacct

SEQ ID NO: 178237 - DNA, 75 bp, Homo sapiens
ggcagcaacggcgacatccagcaaggacagttctgcacagaggatgtggatgaatgcctgctgcagcccaatgcc

SEQ ID NO: 178238 - DNA, 110 bp, Homo sapiens
ctcagcttccacagcgtgtctgggaggaagagatagtcgctctggatcacccatggctagacgctgaaaacccacctggttccggaatcctgtcctcagcttcttaatat

SEQ ID NO: 178239 - DNA, 95 bp, Homo sapiens
ctctggagaaggatcagatgaacttacgcagggttacatatattttcacaaggtgtcacgtcttgaaattttaaatgtcctcagtgactctctac

SEQ ID NO: 178240 - DNA, 51 bp, Homo sapiens
tacatcattcagcaaggtggctggagtataccaagatgtctgataatttag

SEQ ID NO: 178241 - DNA, 82 bp, Homo sapiens
gcattcaagaaagccgacccccaaggcaagtgaaccggagcaaacgacttccgatccagtctgcgctgttgcggctcccgtt

SEQ ID NO: 178242 - DNA, 100 bp, Homo sapiens
aacttacatggacatatgcagcaaatgttggggaacatgatctgttaaagtggccctcagattctcagcttgattctaaggaactttcagctggttctca

SEQ ID NO: 178243 - DNA, 51 bp, Homo sapiens
aacgattgaacaccagattgcagttcagaaaaggtcacggatcgcctacag

SEQ ID NO: 178244 - DNA, 82 bp, Homo sapiens
gccgtctcggagaccccgcgccgacggctgctcaaacatcagggttcgtgctggccgtgggcagcgccgtctttgatgccat

SEQ ID NO: 178245 - DNA, 75 bp, Homo sapiens
gaaatagatctctcggctctgagggtgctgactgggttacttttttaaacactaggaatggtaatttctactctt

SEQ ID NO: 178246 - DNA, 100 bp, Homo sapiens
taactccggcagtgacaccaacatggtatgcaggttagcatggcctcattgaaagaactagatcaaagactctttgaaaattacatcgagttgaaagcag

SEQ ID NO: 178247 - DNA, 112 bp, Homo sapiens
tcagatcctagactcggtgctggtgggccctgtgccagcagggagacacatgtttgtctttcaggtaaatcgatttagtaaggtggaagacagagcaatttttgtcactgac

SEQ ID NO: 178248 - DNA, 83 bp, Homo sapiens
cagtcctcgtcagcactgactttcagctatggaatcggcttttgtggccacaggaaccaatctgtctctccagttttttccgg

SEQ ID NO: 178249 - DNA, 101 bp, Homo sapiens
aaagatagttatggagcttcaagtccttggtgtgactatcagctcaggcctaattttaccatagcaatggttgtggttgggggccgtcccgctcctaaggc

SEQ ID NO: 178250 - DNA, 80 bp, Homo sapiens
tacatgcaggacttggaggtggagcaggccctgactccagggtggcccggtggaaatcctgccctttctgtacctgggca

SEQ ID NO: 178251 - DNA, 100 bp, Homo sapiens
cagataccgacctactaagaactacctgagctacctgacagccccggattattctgcctttgaatgaaggctgggagcagaacggcctctatgagttctt

SEQ ID NO: 178252 - DNA, 100 bp, Homo sapiens
aagcccgactccagccgcctggacaacattaaggctataccaagtccatcgacatctggtctgtgggctgcattctggctgagatgctctctaaccggcc

SEQ ID NO: 178253 - DNA, 75 bp, Homo sapiens
gaactggtgaaggggccgaagaaggttgagaagctgactttggtgtgtctgccaagaatctgaagactctacaga

SEQ ID NO: 178254 - DNA, 98 bp, Homo sapiens
gtggagtgacggtgccaccgcggcgcatctttgatggaaaacagattccacagagaatggttgatggatggaatgctttcttctttgataaaacagaa

SEQ ID NO: 178255 - DNA, 100 bp, Homo sapiens
ctgcgcgtcgccaaagtgacaggcggtgcggcctccaagctctctaagatcggctatgtgactacgtttgtgacctcctcttagaagagtcaaatgttca

SEQ ID NO: 178256 - DNA, 75 bp, Homo sapiens
ggcaggctgagttcctcttgctcacagagctctgtaaagggatcgactacaagaccaccaccatcctgctggacg

SEQ ID NO: 178257 - DNA, 100 bp, Homo sapiens
ccgggcaatgcctcgcgggcgcaatgaatccgcggcaggtcactctgtgagactgctgggtcagaaaaaggataatggaaggcggcttgggggagcacga

SEQ ID NO: 178258 - DNA, 75 bp, Homo sapiens
agatctactgtgaccaagagtattgtggagaggcggccttagcaacatgctgttccagtgctccctacctgacac

SEQ ID NO: 178259 - DNA, 82 bp, Homo sapiens
tcgggacgctgcacctcccgcgccgcacggtggacgagctcttgggaccagaactgagtacaaggagttgacttcacaggag

SEQ ID NO: 178260 - DNA, 82 bp, Homo sapiens
aaaatagtgatagctttgataaggcaattgaaggaacagactaaaaatcgtgtcctggaaggaaactacaggtactaccagg

SEQ ID NO: 178261 - DNA, 75 bp, Homo sapiens
ctcaagttacaatcgttcctgacaaagatgatgttacatgggaattggtctttctgctcaaggtgtgaacatgaa

SEQ ID NO: 178262 - DNA, 98 bp, Homo sapiens
aggtcataaggccccagttcagatgggacttccccgcgtgacagcacagagataacggccagccctgggcgaaggactcagcccaaaaccatgtttgc

SEQ ID NO: 178263 - DNA, 100 bp, Homo sapiens
tcttaatactgcaaacaaatcatagtggaactaaggggaacttaatttactggatgtatttgagttccgttatgccaagatgccagatgaaccactagaa

SEQ ID NO: 178264 - DNA, 95 bp, Homo sapiens
cagagacagctcaacacggcacttccacagaatagcctaacatggcagaccagagacagcgctcactgtctacctctggggagtcattgtaccac

SEQ ID NO: 178265 - DNA, 100 bp, Homo sapiens
attggaagcagcaaatgagacgtatgtaatgctggaggatggaagaagcaaagggtttggcttcgtctgcttctcatctcctgaagaagcaaccaaagca

SEQ ID NO: 178266 - DNA, 100 bp, Homo sapiens
gaagtatgagcttgctcacccaccagaggagtggaatgccggtggtggtgtgcacattgagccccggtatagacagttcccccagctgaccagatcccag

SEQ ID NO: 178267 - DNA, 118 bp, Homo sapiens
atcgtcttatagttgagaatttatcctcaagagtcagctggcaggttcaatggataatacagttcgattatgggatgctatcaaagcctttgaagatttagagaccgatgactttact

SEQ ID NO: 178268 - DNA, 98 bp, Homo sapiens
ctccggaagaagaaaaaaaaacagaaaaacaagaaaagcagcacgggagaagcatcgtttcagtcattcagtcagtaccgctgtaagactgccaagaa

SEQ ID NO: 178269 - DNA, 75 bp, Homo sapiens
ggcggggctgaggcggccgcggggcccgagcgcagcaagtgcggaggcaagacacatcaaagcagagatgggaag

SEQ ID NO: 178270 - DNA, 85 bp, Homo sapiens
ggaaatggggagaactggagggggacacctatgaccggaaagggctattgcaagacacgaagtccgagaaattgagcagcgacat

SEQ ID NO: 178271 - DNA, 90 bp, Homo sapiens
tgcagctcttgggttttttgtggcttccttcgttattggagccaggcctacaccccagtatacctgaggtgcaccggaggtgaagtcggt

SEQ ID NO: 178272 - DNA, 83 bp, Homo sapiens
aatcaatgagtttctgagcagaatgacatgatgccttcttctgtagagtgggcgctttgcagaatacgtgttgaatgaaatca

SEQ ID NO: 178273 - DNA, 100 bp, Homo sapiens
gaagaaagagaggccctgaagaggcccatggggcccgtacattatgaagacattcgggaaaatggtggtgatgatgtccagcaactctgtgaagcaggag

SEQ ID NO: 178274 - DNA, 98 bp, Homo sapiens
cagaactctctttatctctcctacagatgctggctatgagtttgacatctgcttcacctcagtgcagaagagagcgatccggaccctctggacagtgc

SEQ ID NO: 178275 - DNA, 130 bp, Homo sapiens
aggctgcctataatcaagtaaaaacaatagctcaaggaaacctttccaacacagatgtccaagctgccaagctgaccggttccctgatgtgttacctgcttctgctactgatccaaactgcagaacttct

SEQ ID NO: 178276 - DNA, 100 bp, Homo sapiens
cctgcctctccctgggctctggctcagcagggagctgctggatgagaaagggcctgaagtcttgcaggactcactggatagatgttattcaactccttca

SEQ ID NO: 178277 - DNA, 75 bp, Homo sapiens
ctgagatccatctgcaccacggtgctgaggatgtccggcttccagatcaacctcaacccgctcaaggagccactc

SEQ ID NO: 178278 - DNA, 116 bp, Homo sapiens
gggagattctcgctctgctgctttagcttcggagtgtttggcgatggggcagcgcgagatgtggaggctcatgtcgagaaccatatttatttagagtcagaatggagcgatttgta

SEQ ID NO: 178279 - DNA, 101 bp, Homo sapiens
tgaagtatccagcgctcattgggaatttagttaagactcagatgccactgcatcatcagataacagcgagacggaggggacacccaagttgtctgacacac

SEQ ID NO: 178280 - DNA, 101 bp, Homo sapiens
gtttacacccggagccgcagtctcagcatgaacttgggaatgttttcttaaaattctccagaatgacagggtccagaaactggcgagccacgagggacatg

SEQ ID NO: 178281 - DNA, 89 bp, Homo sapiens
gtgagagtccgtaaggagcagcttccaggatcctgagatccggagcagccggggtcggagcgggttacaagcctgatgaagggaaacga

SEQ ID NO: 178282 - DNA, 104 bp, Homo sapiens
atggcttagggaacctcaccatcatcattgaaaccatgttgctctggctatatcaaataaaagtgtcaagagtgagcatccttgccttgtgctgaatcacaaag

SEQ ID NO: 178283 - DNA, 75 bp, Homo sapiens
ggaccatgtccggccaatgttcaaaatgctggactgcagccttatctggatcagatcaatgtcattgaagagcag

SEQ ID NO: 178284 - DNA, 51 bp, Homo sapiens
tcaagcacccacacctctttaaggacagtcattttgtttactcattcagcc

SEQ ID NO: 178285 - DNA, 80 bp, Homo sapiens
gcttaaaaagctgcacgcaagtgttaaacttctggtggaggctacggagccacaggacgtggtggtctatgaccagagca

SEQ ID NO: 178286 - DNA, 76 bp, Homo sapiens
tttcaccacaagaagggctgccaggtcttcaataaactcatcaggagatataagtatttggagaaggcatttgaag

SEQ ID NO: 178287 - DNA, 96 bp, Homo sapiens
ctgcctgcgctggtcctcagcaccagccctggcttgaaaaacagtccaattgatgaaagtgaggtgcaaacagcaactgatagtccctctgttaaa

SEQ ID NO: 178288 - DNA, 75 bp, Homo sapiens
gtttgagtccgcatcgccacagctgaaggctgcgagggactaagagcagaatggtcctggtgctgcccaggaacc

SEQ ID NO: 178289 - DNA, 75 bp, Homo sapiens
tggatgtgggatccggttccttggtgtcatccagccttagcaaaccagagggtgaagaacctgatgaagatgatg

SEQ ID NO: 178290 - DNA, 100 bp, Homo sapiens
taccaaatgttccagaaggttctgtgagtgagaaagatcagtctaaagaaaaggagaagaaagtgaaaaaaacaattccttcctgggctaccctttctgc

SEQ ID NO: 178291 - DNA, 74 bp, Homo sapiens
ggtggaactaacacagctgtagagctctctgttacttgaagctgtgccagtttgaagaagcaaagcaggactgt

SEQ ID NO: 178292 - DNA, 90 bp, Homo sapiens
agcgagcgatcgagcgagcgcgcgcgcgaaaactccgggcagggagaagtgagtcatctcattcccctccgtggatcagaggacttggac

SEQ ID NO: 178293 - DNA, 75 bp, Homo sapiens
gcgcagcggcggcagcggagagcgagagaggggagcagtccacaagaatcggaatgtcagttaatgctattcgca

SEQ ID NO: 178294 - DNA, 75 bp, Homo sapiens
tggaccaagagaacaatgggaaccagtctttcaaaatagccctggaaaccaacaggtataaccatatcacagcca

SEQ ID NO: 178295 - DNA, 100 bp, Homo sapiens
agggtgaccctggaggtgggcaaggtgatccagcaaggtcggcagagcaaggggcttacgcagaaggacctggccacgggtgttgaaagcagcaggggcc

SEQ ID NO: 178296 - DNA, 98 bp, Homo sapiens
cgggactaagagagccgaggtcgctccccatccactctcacaaggatactcatccagatcatcaggatattctgaaagcaatcgtagcattcaaaact

SEQ ID NO: 178297 - DNA, 74 bp, Homo sapiens
gacgcggcggcggcggcggaggatgagcctgcagagcgcgcagtacctccgggtgataaaagaaaatgtggctg

SEQ ID NO: 178298 - DNA, 99 bp, Homo sapiens
gttgctcgaagaactcgagcgacagagacaagctgagcttgccgcacaaaaagctagagaggaggatggcagactgtcagtatcatacataacagagga

SEQ ID NO: 178299 - DNA, 101 bp, Homo sapiens
agcagctctgatgacgatttggatgaatatacccttagaaaaaatgtggcagtgaaacttttgagaagaactttgaaagagaaacccataaaataagtgag

SEQ ID NO: 178300 - DNA, 100 bp, Homo sapiens
ccagagggctattaagcggcgaccaggaatcctcactatggatgggctcattgaggacattaagcatcggcggtattatgagaagccatgccgccggcga

SEQ ID NO: 178301 - DNA, 100 bp, Homo sapiens
gaaaatggcggtgtctacagtgttctcgacttcgtcgctggtctctggacactatgggcacacgactcctcccagctctgtttcttgtcctcctggtatt

SEQ ID NO: 178302 - DNA, 50 bp, Homo sapiens
cgcctccatctgggccatggatgggcagtagcagaatcccatggtagcca

SEQ ID NO: 178303 - DNA, 100 bp, Homo sapiens
acgtgagcaagcccaggcacagccgacgccgcgggcttcagcgcctgctcctggtcatcactaaccagatttacttggagtacatgtgaaagaaaacgtc

SEQ ID NO: 178304 - DNA, 82 bp, Homo sapiens
tctagtctggggtcaagaacactgaatgtgaaaacctttgcatcttctgatagtctagccaaggtccaagaagtagcaagct

SEQ ID NO: 178305 - DNA, 100 bp, Homo sapiens
tccagtaggaagaatgtgctggagatttggagcaagaggtggtggtggccttcccccgaagaaatttggtaatcctggggagcgtttgcgtaaaaaaaag

SEQ ID NO: 178306 - DNA, 96 bp, Homo sapiens
cagagccccagttgcagacgacttgtcctgccaccaccatgagttctgaaaccagcctggacaccaagtctgtgtcagaaggccacctcaagagga

SEQ ID NO: 178307 - DNA, 51 bp, Homo sapiens
tggttccaatgctgggattggctgcttttcaacactctgctccagccaagg

SEQ ID NO: 178308 - DNA, 75 bp, Homo sapiens
ctacccccagcaccacctccagcccctgcgcctcggagaacatttcaggataggaataggccaagtgctgagaag

SEQ ID NO: 178309 - DNA, 90 bp, Homo sapiens
ggcacaagctcttctttactagaggttatgaagacagtatggagtttccagaccatagtagacatttgctacagtgtctgagcgagcaga

SEQ ID NO: 178310 - DNA, 50 bp, Homo sapiens
ttgctttggatcttgtggaaagtcagattaaacgagaagattcatcaccg

SEQ ID NO: 178311 - DNA, 90 bp, Homo sapiens
tcttcggctaggtcgtcacaggctccggctcatggcatcaagtggcatccatcataagaggctcacaggacacctgcatgcccaaggcac

SEQ ID NO: 178312 - DNA, 100 bp, Homo sapiens
gttcctgtgggaccctgcaaagaggacatctgtgtttattcagggcaaggggacgcgagataaggtcctgatcagaatcatggtctcccgcagtgaagtg

SEQ ID NO: 178313 - DNA, 100 bp, Homo sapiens
cggctgctgctgctgctgacgctgctgctgcccggcctcgggggatggatgaatgagatttacaactatgatccagaaacctaccatgcgactttgacac

SEQ ID NO: 178314 - DNA, 90 bp, Homo sapiens
gctggttagtgtgctctgagggagggtccgagccagccgctgttttgccggaggagcccctcaggccgctacaagaattagttgatcgag

SEQ ID NO: 178315 - DNA, 100 bp, Homo sapiens
tggatctggcctcaagactggtgaagggcacagtgccagatgatgctgtagaagccttggctgatagcctggggaaaaaggaagcagatccagaagatgg

SEQ ID NO: 178316 - DNA, 96 bp, Homo sapiens
caacagctggacactagtggagcaccacccgcacctaggattagtgacactacctgagaagcctgttaaactagcttcacataccagagacaccac

SEQ ID NO: 178317 - DNA, 100 bp, Homo sapiens
ttctccctttacacccgctgtgaagttcagtgtttttctattcatgattggacatgtcctagacatcacttagagaagcctggctcctacagctgccgcc

SEQ ID NO: 178318 - DNA, 100 bp, Homo sapiens
tactgagatagaaggggaggggttacagactgtggtgcctacccccatcactgcttccctcagccataacaggtcagatgtaccaacagtaccagcaaca

SEQ ID NO: 178319 - DNA, 83 bp, Homo sapiens
accaggacctggcctgaagacatttcctctcctcccctctggatttctcagaggagttaacagagcagtttcataaagttgaa

SEQ ID NO: 178320 - DNA, 133 bp, Homo sapiens
tgccaccaaaaacgatgttgatgtccaaattgaccaggagtcctacctgcctgaagacatgcttctgggaacttggcagacgcagcttagagagactcaccagcgagcgtcattgttgtctttctgggaactc

SEQ ID NO: 178321 - DNA, 75 bp, Homo sapiens
aggagaattcggtttgtaggtcgtcagaaagaggtacatgtcccagagcaagcacacggaggcccgggagctcat

SEQ ID NO: 178322 - DNA, 75 bp, Homo sapiens
agctgggcgcggattcgccgaggcaccgaggcactcagaggagaacgaggtcactcggacactatggtgttcttt

SEQ ID NO: 178323 - DNA, 98 bp, Homo sapiens
gtgtcacgtcctgaacatgagcctcctcctctccttctacctgctggggttgcttgtcagtagcgggcaaggtttgttggcatccaaagctgttgggg

SEQ ID NO: 178324 - DNA, 82 bp, Homo sapiens
atggcgaccggagcgaacgccacgccgttggaccccccacccaacctgccttactttgtacgacgctctcggatgcacaaca

SEQ ID NO: 178325 - DNA, 83 bp, Homo sapiens
agcctacgggatccgctttgacgtgatggtgaacggcaagggactggtgattgcagctggaagtgcccatgaccgagctggcg

SEQ ID NO: 178326 - DNA, 103 bp, Homo sapiens
gaaggccataatgacctatgtgtccagcttctaccatgccttttcaggagcgcagaagatgttcgagcctgtgagctgcaccttcacgtacctgctgggtgac

SEQ ID NO: 178327 - DNA, 75 bp, Homo sapiens
ggaagagctgcacaaccaagaggtgcaaaaacgaaagcaactggagctcaggcagtgatggagaacatgcggcgg

SEQ ID NO: 178328 - DNA, 51 bp, Homo sapiens
cagaaactccctctggtgatgatttcagggcatttgacactcttgcaaaag

SEQ ID NO: 178329 - DNA, 74 bp, Homo sapiens
ggatgatgtgagaaacaggcagcaggatgtgcgggttcaaaatggaaagtatttattgaccaaattaacaggtc

SEQ ID NO: 178330 - DNA, 90 bp, Homo sapiens
cccaaaccccgccaccatcatagttccacttacttacatgatcatttcgagagatgtaatgttgattgctgctgttttttatgtcagata

SEQ ID NO: 178331 - DNA, 100 bp, Homo sapiens
aggaccctgtggagctggccatgtttggcctgcggcacatggagcctgaccttagtgccagggtcaccatctaccagagacagggtctcgctatgttgcc

SEQ ID NO: 178332 - DNA, 83 bp, Homo sapiens
ggcgtcggacctgcacgagctgtctggcccgcgatgctcccagcccggtgagacctgcctgaatggcgggaagtgtgaagcgg

SEQ ID NO: 178333 - DNA, 100 bp, Homo sapiens
gaagtttgagagaagtttaagagaagaaatggacatgattgcctaaatcagccaaacacagggtaagaagagttcctgggtcaagtggtcaccttcataa

SEQ ID NO: 178334 - DNA, 76 bp, Homo sapiens
ggaaatttggcttgcaattcatcactttgaaaagagaacggagaccaacctgggctgaagaaagaagattaaatgc

SEQ ID NO: 178335 - DNA, 82 bp, Homo sapiens
gcaatgtttgaacaaactcgaagaacagctgtggaaagaagttgcaaaacactggtcttggaggaggaactttttttggtct

SEQ ID NO: 178336 - DNA, 75 bp, Homo sapiens
gcactcgcgggacgtggtataccgcgacatcaaggagcttctggaagaggtgaagaaggaattgcagaaagtgaa

SEQ ID NO: 178337 - DNA, 113 bp, Homo sapiens
ccggtgccggcctagcgtcctggaattacttcaatcaagtactccaaagattcaggtttactcacgtcatccagcagagaatggaaagtcaaatttcctgaattgctatgtgt

SEQ ID NO: 178338 - DNA, 98 bp, Homo sapiens
attctgcaagacaaagggaagaaataaaattttcccatactgaactgcagctgaatatgtaaaatctcgactcccagaggcccttaaacagcatcttc

SEQ ID NO: 178339 - DNA, 99 bp, Homo sapiens
tgagtgcttctttcttggagctgaccatggtgagcccattggcaggggtaccaaagtgatcctccatcttaaagaagatcagacagagtacctagaaga

SEQ ID NO: 178340 - DNA, 75 bp, Homo sapiens
ctgccatgctcctggcgtggacacacaagcaccccaataacctcaagacctgcctagagctggaacgttacctcc

SEQ ID NO: 178341 - DNA, 101 bp, Homo sapiens
accccaagctgtacttgtcacctcgaattgagcaaaattccgggtagatatgcctggctcaggcagtgcattcatccccaccatcaacgccatcacgacca

SEQ ID NO: 178342 - DNA, 98 bp, Homo sapiens
gcggcccggaatcggggcgcttcgccccgggccccccagcatgaagaccccggcggacacagatgaaggtcaccgtgtccaaagggggcgaccgggac

SEQ ID NO: 178343 - DNA, 100 bp, Homo sapiens
acccgctgatcttccagctcccctcacccaacgtcgtgaagacaccatggaggagtctgggtggaagttggtgcacggcgacgtcttcaggcccccccag

SEQ ID NO: 178344 - DNA, 100 bp, Homo sapiens
agcccgtggagtcggctgagggaaaagcgaggcaaggcaggcggttaatgaaggagttcccccttctgagtatgttcaatatccatgaaaaccttttaga

SEQ ID NO: 178345 - DNA, 98 bp, Homo sapiens
cgattatgtccattgttctcttggagcagctggtcatcatgtgccggtggtggtgtgcacattgagccccggtatagacagttcccccagctgaccag

SEQ ID NO: 178346 - DNA, 100 bp, Homo sapiens
tgagtggttgtgtggtcgcgtctcggaaaccggtagcgcttgcagcatggaatttttgagagatatcttcaatctcctgtttttgttgccaagtctaaag

SEQ ID NO: 178347 - DNA, 100 bp, Homo sapiens
gacctcacccactctggtctgtggcgggtgtgctgcatcgaaggtcacaaggcacttaaagcattgttgaggtcattggtaggtcttcaggaagagttgc

SEQ ID NO: 178348 - DNA, 75 bp, Homo sapiens
cattaaccagctggaagccctgttgctggggctttgaccacgacctttgaagagcttcattttgagatcaagccc

SEQ ID NO: 178349 - DNA, 101 bp, Homo sapiens
caactgctacatctgttggaggagccaactagcatggaagtgcagagtgaattactggaactgaaacggcagcagcaagagcaagaaagagccaaaatcca

SEQ ID NO: 178350 - DNA, 75 bp, Homo sapiens
caacgcctggctcggagcagcagcctctgagtccacagacaaacgaatttaaaggagcaaccgaggaggcacctg

SEQ ID NO: 178351 - DNA, 100 bp, Homo sapiens
aagatccctggaatatgaagggacacagtacggtagtcaaacccccaggtggataatattaatgcagctgtgatggatttgaaaaaaaagaagatccgca

SEQ ID NO: 178352 - DNA, 83 bp, Homo sapiens
ctgtgccatcatcgtggtagttattgtaaagggagacgctgttgcggcagctggagacgaaccagctggacatggacgccacg

SEQ ID NO: 178353 - DNA, 100 bp, Homo sapiens
ggccgacggcgacgactcgctgtaccccatcgcggtgctcatagacgaactccgcaatgaggacgttcaggtgaatgaaaactttgccattgatttgata

SEQ ID NO: 178354 - DNA, 100 bp, Homo sapiens
ctaaatggctccctgattcatggatgcacattcacaaggtgaggtggtatcatgcttggagaaaggcctggtgaaagaagcagaagaaagagaacccaag

SEQ ID NO: 178355 - DNA, 100 bp, Homo sapiens
tatgaattctgcatttcaactctagaggaaaaaattgaaagagaaaaggaattagcagaagacattatgtcagagcacagcaatggaggaaacagctata

SEQ ID NO: 178356 - DNA, 50 bp, Homo sapiens
cccgagtcggtcagcgccggaggctatttactgaggacccactggatgtc

SEQ ID NO: 178357 - DNA, 96 bp, Homo sapiens
ctcgagttggaagaggcgagtccggtctcaaaatggaggtcaaaatgcagatcttcgtgaaaacccttaccggcaagaccatcacccttgaggtgg

SEQ ID NO: 178358 - DNA, 116 bp, Homo sapiens
aggctgggcacgaggaccatgctgggccggagcctccgagaagagcggcctattgccaattcatggacatgctcttccctggctgcattagtttgaagaaagtaaaatttcaagca

SEQ ID NO: 178359 - DNA, 83 bp, Homo sapiens
cttatgttttggagtcacacaagctaaagacgggccattttccagacctcatccaggacgactgggtttggattcagaagagg

SEQ ID NO: 178360 - DNA, 83 bp, Homo sapiens
accacttttggaccaaaggcctgtgtgctgcagaacccccagaccatcatgtgaaagaaaatggcccgaaccaagcagactgc

SEQ ID NO: 178361 - DNA, 96 bp, Homo sapiens
tgagaagaagcggaaaaaagaaaactctagaagtctggatgtcggtgggcctctgagatatgccgtttacggttggcccagtcccgcggtgaaagg

SEQ ID NO: 178362 - DNA, 73 bp, Homo sapiens
caaaagttctgaatggcatccgtcctaccggaaacctaggaaaaggtggcaggttttaagaagcaaatggcag

SEQ ID NO: 178363 - DNA, 89 bp, Homo sapiens
tccagccaacagcagaagagaaagccagttatccacggactggaagatcaaaagagggaaatgggtcctgatgaatatgaagagatgga

SEQ ID NO: 178364 - DNA, 94 bp, Homo sapiens
ggccagcaggggcagatggcaagtggagacagcaatctcaacttcagccatgaagatggacctacagctaaaaaattaaagactgagcaagggg

SEQ ID NO: 178365 - DNA, 100 bp, Homo sapiens
cccagtgtctgctctgcggggaggtgctgggcttcctgggcagctcgtcggtgttctgcaaagactgcaggaagaaccccatgcatcccagctcaaggtg

SEQ ID NO: 178366 - DNA, 50 bp, Homo sapiens
cttcaccagctcttcagatcaatatggtcatgctaaatgtgtagaagttg

SEQ ID NO: 178367 - DNA, 83 bp, Homo sapiens
cggtcaccaagtacaccagctcgaaaaagtactgaaatcccaccttatgtgatgaagtgtccgagcaatggtttgtgtagcag

SEQ ID NO: 178368 - DNA, 90 bp, Homo sapiens
aagtgtctttggttataaattatgatctacctaccaatcgtgaaaactatattcacaggctttttgaaatgggtttcgcagagcagctgc

SEQ ID NO: 178369 - DNA, 82 bp, Homo sapiens
ctgggttctattttccctcctcaaactgactttgcagccacggagaggagagcgacttgcagttgtggaggtacagtgtgaa

SEQ ID NO: 178370 - DNA, 90 bp, Homo sapiens
attcatgacacctttgactcttctactgtctcagaccttaggtttattttcttgaaaaggctccaggcttcggcttggaaaatcccaccg

SEQ ID NO: 178371 - DNA, 100 bp, Homo sapiens
gggcgtggcggccgggatgacccacagctggttcccgagcctcatacagcagccagcatgggcacctgggcccagagttgcgggccctgcagtccccaga

SEQ ID NO: 178372 - DNA, 122 bp, Homo sapiens
ctcgtttctacactggagaactcgtcaaagccatagttgttagaacagattgcgcagtctctttgtggagaggacttgatcattaaaggaatcagcgttcatatatccaatgccgaacctaa

SEQ ID NO: 178373 - DNA, 100 bp, Homo sapiens
caaagctgggagagactggaccagaccatgggcctgagcatcaggccgttaattaaggaaaagttgagccagggcgtgaccctcgtcgtggacagatacg

SEQ ID NO: 178374 - DNA, 100 bp, Homo sapiens
ccgcggctgcgcttccgacggggcggccgggggctcagagatccaagtgcgcgccctggcgggtccggaccaaggttacaagcctgatgaagggaaacga

SEQ ID NO: 178375 - DNA, 82 bp, Homo sapiens
caaggtcggcagagcaaggggcttacgcagaaggacctggccacggtgaaaggtgtagcagtcactcggcctacacccacag

SEQ ID NO: 178376 - DNA, 99 bp, Homo sapiens
gacaaaagaagagttaaatgccctcaagtcgacaggggatgggaccctagtgccctgcaggagtcattaaatcaaaacttcatgctgatcatcacccac

SEQ ID NO: 178377 - DNA, 98 bp, Homo sapiens
agctcagacctggggcccctacctccctacagacagagccacaagcggaaggagagttttacatggaagtggcttacagaaacttggcgctgaggtgc

SEQ ID NO: 178378 - DNA, 88 bp, Homo sapiens
ctggccagcgagagccagggctccaaagaactcggcatgtcgggccccaggcctgtggtgctgagcgggccttcgggagctgggaaga

SEQ ID NO: 178379 - DNA, 100 bp, Homo sapiens
agttttgaaaacatcagcaaatggcttagaaacatagatgagacctcgaagtagggggaaaactgcagtggaagatgaggacagcatggatgggctggag

SEQ ID NO: 178380 - DNA, 100 bp, Homo sapiens
agggatacccttccatttcaaagaacagaatgctaaggaagctgtggcaaactctttttgatcagaacaatgctgcaaaaaaagaagagtcagaaactgc

SEQ ID NO: 178381 - DNA, 100 bp, Homo sapiens
ggggaccagagatggacggtcactcagcctatggagggtgcaaatagctatgggcaacttggcctcggccataaggaagatgtgctgttgccccagcaac

SEQ ID NO: 178382 - DNA, 75 bp, Homo sapiens
cattgatgccacaaccataatagaatgtctacattcctaaactaatctggattcactccctctggttgataccca

SEQ ID NO: 178383 - DNA, 75 bp, Homo sapiens
cgatactgagcttcttcctatttgccatgggtactgagtttgagggtgcagtcatagctctgttccatttgttgg

SEQ ID NO: 178384 - DNA, 99 bp, Homo sapiens
ctgatgctctctctccagtccttgctgaagagactttccgttacatgaataaagtgaaatctttccgtgcagctctacaagaggaggaacaagccagca

SEQ ID NO: 178385 - DNA, 98 bp, Homo sapiens
tcctgggccgcgacctggttctcccggagtctacagaggccccgtgtgggccgcggcccggccctcaccatggagtccatgttcgaggacgacatcag

SEQ ID NO: 178386 - DNA, 100 bp, Homo sapiens
agaaaaacatttgggaggtgtctagcccagtggaccttctgaagctctagaggacaaaatcccagtccttggcacaaactcaggaaatggaagccggagt

SEQ ID NO: 178387 - DNA, 99 bp, Homo sapiens
cctttccaagccaatgcccaagacattataaacctagatgctggtgtgccagaaaaaataagcctgatttccagagatgagaagagtgtacttgtggtg

SEQ ID NO: 178388 - DNA, 80 bp, Homo sapiens
gttttcaggccacaaatgctttcacagatgttggatgacaataaccatcttattcagtgtataatggactctcagaataa

SEQ ID NO: 178389 - DNA, 100 bp, Homo sapiens
ctcagctggtggtgattgcacacgacgtggatcccatcgaggagtctcaggagcaggggctgcggcagaggctgctggacgagcagttcgcagtgttgcg

SEQ ID NO: 178390 - DNA, 72 bp, Homo sapiens
aaaagtctgctactactacgacgcggatactctgttttcaaggaagctgaatgggaaatacagacttgagcg

SEQ ID NO: 178391 - DNA, 74 bp, Homo sapiens
cgaagggtccccgggacccgcctgctgagtggacccgggtgcatccaggctggagaagcagaacagcacacctg

SEQ ID NO: 178392 - DNA, 98 bp, Homo sapiens
gccacctacagaaacaaaatgtcaacaaattgatggggccggcagacattccaccgctttgacaagttcaactccaaatacaaccctgtgggggccag

SEQ ID NO: 178393 - DNA, 100 bp, Homo sapiens
tgcaccaatcagcatgctgtgtctagctcaagcattagtgccagcagtagttcccaagggctgtctcagccatccacccagacgactcagtatctgagag

SEQ ID NO: 178394 - DNA, 90 bp, Homo sapiens
gcgcgcctcgcctcacagcgaaacgccgcgcactcggagccggcacggctcggcgataccggggagaccacgacgctgcctcctgggcgc

SEQ ID NO: 178395 - DNA, 50 bp, Homo sapiens
gaatatcctttgaagaattctgtgctccggtctgtgtgatattagtgaag

SEQ ID NO: 178396 - DNA, 100 bp, Homo sapiens
acaaaattctgaactcaggacttggcaagtgctggagaatctggtaaaagcaccattgtgaagcagatgaggatcctgcatgttaatgggtttaatggag

SEQ ID NO: 178397 - DNA, 74 bp, Homo sapiens
agaccgtttgtgtgcaatgccccgggctgtggacagatgtggaaactaaagcccagagagaaagtctgacttgc

SEQ ID NO: 178398 - DNA, 78 bp, Homo sapiens
acaaactggccaagaagggccttactccttcacagatcgtccttaatggatcagtactttgcccgaatgtgctccttg

SEQ ID NO: 178399 - DNA, 50 bp, Homo sapiens
caaatactgcatatcagaaacaacagatccctgggtatcagtatgtgtca

SEQ ID NO: 178400 - DNA, 99 bp, Homo sapiens
cccggttccccggcccacagtgggggtgtgcaaacccgagagaactggggtggctttgtccactatggtgaagtgaccaatgactttgtcatgctgaaa

SEQ ID NO: 178401 - DNA, 100 bp, Homo sapiens
gatatcgaaggtaccacaaccccgattgctttcgtgaagaccagcatctcagacatgtcgaaaaagatgttttgatccctaaaataatgagagaaaaggc

SEQ ID NO: 178402 - DNA, 90 bp, Homo sapiens
caggtgttcaagtgcagggagttcccgttacaatcactagtgttgcagatgctgcacaacaaacatgtcatggtccgtgtgggaggaggc

SEQ ID NO: 178403 - DNA, 97 bp, Homo sapiens
gccgccgcccccgggctcgcggcctgcagaataccctctaccatctgctttggtcagggtgccgctcgaggatttaaaagcaacaagaagaaaacca

SEQ ID NO: 178404 - DNA, 75 bp, Homo sapiens
aggagattgacagtcacaattttgtaataaggtttggaattcacccagttgcaggccgaatgcctggtcagctta

SEQ ID NO: 178405 - DNA, 73 bp, Homo sapiens
gtggacggaccccgggagcccagacgacacaactcagatgggaagttcatcgcccgggcacagcggatagagt

SEQ ID NO: 178406 - DNA, 100 bp, Homo sapiens
tacacagacgagcatggggaaggcagctgagtatgtcccagagaaggtgaagaaagcggaaaagaaattagaagagaatccatatgaccttgatgcttgg

SEQ ID NO: 178407 - DNA, 75 bp, Homo sapiens
ctaaagcagcgtgcgttcagccctggggttgagaacttgttgcttagtaaccaagggaccattaagctgtgtgac

SEQ ID NO: 178408 - DNA, 96 bp, Homo sapiens
cgccctccccgtcgttttccgtgagagacgtagagctgagcgacccagcccgcgagcgagccaggcccagacatgtccgtccttgtaagttaaaag

SEQ ID NO: 178409 - DNA, 98 bp, Homo sapiens
ccgccgctcgcatgagcacctcatacggctgcttctggagaagtgaatttaggaggacttttactccaagcactcctggaatattggcctagaacaca

SEQ ID NO: 178410 - DNA, 76 bp, Homo sapiens
gttgccatctccttgcccaagggtgtggtggaggtgacccatgacctgcagagacggggtttcaccacgttggcca

SEQ ID NO: 178411 - DNA, 78 bp, Homo sapiens
agaagccggcgtcgtcggatgttgtgttgcccgccaccatgagctacacaggttgaagcactggacaatgccacatac

SEQ ID NO: 178412 - DNA, 100 bp, Homo sapiens
cggcggcggtaggaagccggagacagcagggtgacagcccttcccagcctggatcagaagaagcgtggtggccacaaagcatgctgcctgctgacgcctc

SEQ ID NO: 178413 - DNA, 98 bp, Homo sapiens
cagaatcaacccagaacggatagctccctcctggaaaaggaagacaactgttagttttgtggcttactgctgctccacccagtgtctgcagacttttg

SEQ ID NO: 178414 - DNA, 75 bp, Homo sapiens
cttaccttaaaccttttaagcaaggaaattgaactaagaaatggagagtgtctctggagaatggttcgactgttg

SEQ ID NO: 178415 - DNA, 98 bp, Homo sapiens
tcaacttcctactgcaagcttagttcagttagattagagaggacagcaaagacgcggctgattataatttatggatgaggtttatataactttccaag

SEQ ID NO: 178416 - DNA, 100 bp, Homo sapiens
cgcaaagcggggacccagaccctggagcctcagttggaagcagccgatccagcctgcggagcctgtggggcaggagacgttgacatttagggatgtggcc

SEQ ID NO: 178417 - DNA, 82 bp, Homo sapiens
gacaagtcggcgccccagagcggacgagacaatgcagatcttcgtgaagactctgactggtaagaccatcaccctcgaggtt

SEQ ID NO: 178418 - DNA, 83 bp, Homo sapiens
agatcgcgagcggctgcggaccatttataaccgcgacttcaagatcagaataccctctaccatctgctttggtcagggtgccg

SEQ ID NO: 178419 - DNA, 75 bp, Homo sapiens
ggcaagtattgctgtgggtgctgggacttcccgtccgcggcgtggagggtgtggatgtggaagcagccaagcggg

SEQ ID NO: 178420 - DNA, 100 bp, Homo sapiens
agcaagttcatggtcacggagaaggcagcctacatagttccagggtctccctccactgctgtagtaacccgggtccggggcctcggtggtgctcctgatg

SEQ ID NO: 178421 - DNA, 100 bp, Homo sapiens
ggtacaatagaattaaagcgcttccttctgggattggagctcaccattgctctaggtcgtaaccagcctttgaaaaaggagaaaccaaaatggaaaagcg

SEQ ID NO: 178422 - DNA, 80 bp, Homo sapiens
agtacgcggctgtgtgcgtgcgctgccctggctacggcaccaggctcagtgtatgcttaatcaggcatggtgcatcagag

SEQ ID NO: 178423 - DNA, 53 bp, Homo sapiens
ccagaagctacatgacccctaaacgcaagatctctgtaccttcttgatatcga

SEQ ID NO: 178424 - DNA, 100 bp, Homo sapiens
gctggaaaaggggtgattgttgcaaagagcaaagaagaggcctgcaaagctgtacaagagatcatgcaggcgcagttgtgtagcagttgagtaatgctgg

SEQ ID NO: 178425 - DNA, 99 bp, Homo sapiens
cctggagcctcagttggaagcagccgatccagcctgcggagcctgtggggcaggcaaggatatcctgaaggatactatagttccaaaagtggatggagc

SEQ ID NO: 178426 - DNA, 100 bp, Homo sapiens
gtgcaggagagtttcagggacaattactggggacaattgcatttatggcacctgaggtggactggcagaggaagtggacgacaaagttcttcatgctgcg

SEQ ID NO: 178427 - DNA, 74 bp, Homo sapiens
caggaaaagactcaggacggacaagcacagtcttcggaagacaagttggatggcttgaggactggtactaaaag

SEQ ID NO: 178428 - DNA, 82 bp, Homo sapiens
ttggaagtgtctcttagcagcgcgcggagaagaacggggagccagtttttcagaagaagtgaagtcaagatgaagaaccatt

SEQ ID NO: 178429 - DNA, 82 bp, Homo sapiens
ggagagagcaagcagggaaagagagcgccaggtgcttagcaggcagccgggattgcttaccacctgcagcgtgctttcggag

SEQ ID NO: 178430 - DNA, 90 bp, Homo sapiens
ccgggatcgtgaccgagaccgtgaccgagagcgtgaccgagagcgcgaatatcgtcatcgttagaagcggcagaagttacgtgaaatcat

SEQ ID NO: 178431 - DNA, 83 bp, Homo sapiens
tggaattctaatttgaaccatgtttggattgaagccgcctctgtattacttaccaggttttggctacgggcctccacctccac

SEQ ID NO: 178432 - DNA, 75 bp, Homo sapiens
acatgatgcaatcttcaggaaagtaagagggtgcaaacagctgcacagcaagtggcagaggataaatttgttttt

SEQ ID NO: 178433 - DNA, 100 bp, Homo sapiens
gacaagcacacaccagagaccagaatgaaagtcggggaagtccttatgcgaatcgtcagggcattaggcagcctgcttctgcaaagtggtacgatcgaag

SEQ ID NO: 178434 - DNA, 100 bp, Homo sapiens
cagggtccagcccgaggcccaagccaaggtgaccaagaatatggcccaggtgaccaaagccctggacaaggccctgagcaccatggacctgcagaaggtc

SEQ ID NO: 178435 - DNA, 124 bp, Homo sapiens
gtcaggggccttgtgtcctaccatggtatttgctaacgtttagagagtgcttccccttgccgagcactggaagctccaccatgaggcgaggtggatggaggaagcgagctgaaaatgatggctg

SEQ ID NO: 178436 - DNA, 100 bp, Homo sapiens
ccaaagtacaattaccatttggactccagtggtagctatgttgcaagaatgtagtaactctgatcagctacaaggaaaggaggaaagagtaaatgaagaa

SEQ ID NO: 178437 - DNA, 83 bp, Homo sapiens
cggcgctgccgtctctggaggagtactggcaacaggtgacttaagagattaaaattaatttggttgctgttggttctgaacaa

SEQ ID NO: 178438 - DNA, 71 bp, Homo sapiens
agtgcttcgtggtgactgaaaaagcctcgatgacttacgagccctcaaggggaagcattttctcctggacc

SEQ ID NO: 178439 - DNA, 82 bp, Homo sapiens
ccgcagcttccggccaagttggactgcagctcgcggtttcctggcttctaggcccctggccccaacatggcccgtcgctctc

SEQ ID NO: 178440 - DNA, 100 bp, Homo sapiens
cggaagaccgccgggaggaccgacgtgcagctggagcagttcaagaaggacaacgaggaaacaggcttcggctcaggcacccgggccctggagcaagccc

SEQ ID NO: 178441 - DNA, 90 bp, Homo sapiens
gcggccgccgctgcaccttcaccgcgtacccgggacccgcccgcccgcgggaggtgtatactcttgatgtaccagatgcattctattact

SEQ ID NO: 178442 - DNA, 100 bp, Homo sapiens
cgagtccacgggcctgaagaaggtaatgaaagcatgggatgctcatgtgacagcagtttgctcccaagatgccagtgaacttgtaaggaagcttggtgca

SEQ ID NO: 178443 - DNA, 90 bp, Homo sapiens
ggtactccaggtccgacccgcgaacccctctgggatccccgccgctctgtctacaacccgaggctcgcttctcatatgtgcggatgaaat

SEQ ID NO: 178444 - DNA, 100 bp, Homo sapiens
ggcgctgccgctcccgggcggccgcgggcgggcacttccgttccggcgcccctccggtcatcaacccgctgggcaccagcttcccggacgacaccgcggt

SEQ ID NO: 178445 - DNA, 76 bp, Homo sapiens
gtccatatgtaaccaaatattatggatcctatctgaaggtgaccttggagaaggtgctgggaattacagtgtctgg

SEQ ID NO: 178446 - DNA, 98 bp, Homo sapiens
gaaatcatgtcaagcgaagccttgaaaaagctgccctgagacggtgtcccgccgaaaggctctgacgcccgctctgcggcttcggtgtttgaacaggc

SEQ ID NO: 178447 - DNA, 51 bp, Homo sapiens
aggatgtctacaaaattggtgaggttggagcaatcactgaagaaactgaag

SEQ ID NO: 178448 - DNA, 80 bp, Homo sapiens
ctgtgttttaaacagaatttcgtgaacagccttttatctccaagcggaaagaaaggtctgcgaggaacagaagtgcgagg

SEQ ID NO: 178449 - DNA, 78 bp, Homo sapiens
gatgattggtagctaagactcccgaatacttcagaagtggggaaatgcccgtggaccgggagcccgtggaccgggagc

SEQ ID NO: 178450 - DNA, 85 bp, Homo sapiens
ggcttgaacttcgtgagtttcgctctaaactgcccttgaaatgaagctggacttggaggtcaaaatgcagatcttcgtgaaaacc

SEQ ID NO: 178451 - DNA, 75 bp, Homo sapiens
atctgtgagaagccacaggaagtctgtgtggctgtatgtttagatgcaaaatccacaagtattcaagtgattgtt

SEQ ID NO: 178452 - DNA, 87 bp, Homo sapiens
aagaacaaaggaaggggagcccgggacccccgggggcgcagcctacaacacagcagtcccctcaggatgagcaggaaaagctcttgg

SEQ ID NO: 178453 - DNA, 90 bp, Homo sapiens
gacgacgggcgcccccgagccgccgccgctgtccggagccccacaggcaatggacctcatcatgaccgttgctgtacttacaatgaaaac

SEQ ID NO: 178454 - DNA, 75 bp, Homo sapiens
tctgcggtcatacaaccaggaggcgtccgagctgggccacagcctgaacgagaacgtcctcaagcctgcgcagga

SEQ ID NO: 178455 - DNA, 107 bp, Homo sapiens
agtattcgtgttcccagggaaaagatggtttatatgactgtcaatgactctcagccagaagatgaagatttaagattccagtggaatgacactggtgatgcttgccg

SEQ ID NO: 178456 - DNA, 100 bp, Homo sapiens
ctgtcccatcgcaaacccaaagatccccgttcctggagattctgattgaggactgcctccgggcctgccaggagcagatcgaagccctgctggagtcaag

SEQ ID NO: 178457 - DNA, 75 bp, Homo sapiens
gggaacccaggcctccggggacaaggacattcctgcaattaaccaaggtggcagaactggtgaagccattgtaga

SEQ ID NO: 178458 - DNA, 51 bp, Homo sapiens
tgaccaccaatcagatccgtaagaacgacaaatcctccacccctgggctca

SEQ ID NO: 178459 - DNA, 90 bp, Homo sapiens
attcaggactactttaatccagctactctacctctaacacagtacctgttaacaacatgaaaggttgtatcaaagttcttaaggaccaac

SEQ ID NO: 178460 - DNA, 99 bp, Homo sapiens
cagagcctcgcctttgccgatccgccgcccgtccacacccgccgccagggtgaggtggctttgaccccgggttgcccggccagcacgaccgaggaggtg

SEQ ID NO: 178461 - DNA, 89 bp, Homo sapiens
ctggctgctggagcttgtcaccaccagtgcaccgtccaggtgaggttagagctggggcatcgcgcccaactgcgcaagaagcccaccac

SEQ ID NO: 178462 - DNA, 50 bp, Homo sapiens
ggagaagccgcccaaagaactgcagcagccgctcttctaaaacattcaaa

SEQ ID NO: 178463 - DNA, 75 bp, Homo sapiens
gccggagaccgtggggcccccggttgccgccccctcggcccacagaattcttccagtccctgggtggggacggag

SEQ ID NO: 178464 - DNA, 82 bp, Homo sapiens
ctggccgccggttgcaagcagatactggtgcctgtggaggtggaggaagcgtccctgggatcgagaggatgggtcctggcat

SEQ ID NO: 178465 - DNA, 100 bp, Homo sapiens
tccttccttaacggtcaatacaactgaatatgagggttatgtggtccgaatcagtggtgggaacgacaaacaaggtttccccatgaagcagggtgtcttg

SEQ ID NO: 178466 - DNA, 78 bp, Homo sapiens
gggacacgcctagcgcgggctccagggtcacggagactcaccagttggcagaattaaatgagaagaagaatgaaagac

SEQ ID NO: 178467 - DNA, 75 bp, Homo sapiens
ctcgaagtagacctcaaaaatggattttctccaaaggaacatccggtgcttgccctgccaggagccccagcccag

SEQ ID NO: 178468 - DNA, 82 bp, Homo sapiens
cccgcgccgcctccccgcgccgctcgcgcagccatgtccgaggagaagcccaaggtgcatctgcagacgcagcaggaggtga

SEQ ID NO: 178469 - DNA, 75 bp, Homo sapiens
tgctcccatcattgatgtggtgcgatcggttggtttgacttccacaaatgcagaagtaagaggatttatagatca

SEQ ID NO: 178470 - DNA, 100 bp, Homo sapiens
actgtaagggtgtcaggatctgaagagctatggtgaaacaccactgaagcattgccaagatatggaatatatgaacgctgtcgagaattggtggaagcag

SEQ ID NO: 178471 - DNA, 80 bp, Homo sapiens
ccgggaggagaaggaaggcatggaaagttccagccggttcgagagctagtgtactaatggtcacttgatgtgcgctggct

SEQ ID NO: 178472 - DNA, 74 bp, Homo sapiens
aagcaattctggaagcgcagcaacagcaagctcccgggcaggctatgtccaaactgggtcttcggcaggttaca

SEQ ID NO: 178473 - DNA, 82 bp, Homo sapiens
cagtggaggccgacttcttgtatgcatactccacagcacctgttttctggatatgccgcagaaggatccgtgccagaagcaa

SEQ ID NO: 178474 - DNA, 75 bp, Homo sapiens
ctttaaatccggagggggaaaaaatcccaaggtctgcaaaggtcacccgtgtgaacagaaagtgagaggttgtag

SEQ ID NO: 178475 - DNA, 90 bp, Homo sapiens
agagctcccgggtcgtctttcgtgtggccgcgaggcaccaccaggaccagctgatcattccagcccacagcaatggagccacatgactcc

SEQ ID NO: 178476 - DNA, 50 bp, Homo sapiens
cctgaaggaattctcagtcaaagagagctggaatacggctggcatcggag

SEQ ID NO: 178477 - DNA, 100 bp, Homo sapiens
atggattccaaagagcgtttggatcaggacggacgcttggtaattattcgaggtggaggacatattttaccctatgaccagcctctgagagcttttgaca

SEQ ID NO: 178478 - DNA, 100 bp, Homo sapiens
gagaagcatgggaaggaggccgagccgggatctcaggtcctcgggggcggcggccacgccaaggacgggttttgacctgtagcagagaaccaattctgga

SEQ ID NO: 178479 - DNA, 100 bp, Homo sapiens
cctccccagccatgcagaactgcaccatgactcctgtgaggatgcagcactccctggcaggtcagacctatgccgtgcccctcatccagccagacctgcg

SEQ ID NO: 178480 - DNA, 98 bp, Homo sapiens
gctcgggtcgttgtggtgcgctgtcttcccgcttgcgtcagggacctgcccgactcagtgagtgcaaggggtgtgattgagtgtttgaagattgtcac

SEQ ID NO: 178481 - DNA, 100 bp, Homo sapiens
ccgggcaccaggagcatatcaagctgctctttggcgtaaattgcaatcgattagggatcgtttctcagaatcaagttagaagtgagagttcagataagtg

SEQ ID NO: 178482 - DNA, 80 bp, Homo sapiens
gcggcaggagagtccggccgcgacaggacgccccatggctgggggttatggagtgatgggtgacgatggttctattgatt

SEQ ID NO: 178483 - DNA, 98 bp, Homo sapiens
gacaaaggctttgccgcagttcatcttcctccctgtgtactttccatttgccttcctgggtttttgaagaaccctccatcagcctttttgctctggag

SEQ ID NO: 178484 - DNA, 73 bp, Homo sapiens
ttcaccatcctggccccggaagttcctgtgccttaagaacattagaaccttcctgtccacctgctgtgagaag

SEQ ID NO: 178485 - DNA, 98 bp, Homo sapiens
aaatgtttgaagcaacaagattgcttgcaacaattgttatgctttgatcctgccatgaagcagtttctgctgtacttggatgagtccaatgccctggg

SEQ ID NO: 178486 - DNA, 74 bp, Homo sapiens
gccgccgacagtgacgatggcgcagtttcagctcccgcagcttccgacggcctggagctgctgaagactgctat

SEQ ID NO: 178487 - DNA, 75 bp, Homo sapiens
atctaaggatgaccctggaaaggaaggaaaatcacctcggcagtgtttgaaggaaggatactgcaactctttgaa

SEQ ID NO: 178488 - DNA, 101 bp, Homo sapiens
cccgggggcgcagggaaggagggcgtccgagtcaacaaccgcttcgagctggttcgtgctggccgtgggcagcgccgtctttgatgccatgttcaacgggg

SEQ ID NO: 178489 - DNA, 75 bp, Homo sapiens
ggccacgccattaaagcgcttcagtcaaaccctgcaggtggcaattttggaggtagccccggttatggaggagga

SEQ ID NO: 178490 - DNA, 75 bp, Homo sapiens
tggctgtggtcaaacccacccggcccaactcactcctctgcctgtgagtttctggatattgtagagctgctgctc

SEQ ID NO: 178491 - DNA, 48 bp, Homo sapiens
ggatggcctgactcatcccagagttggaagctgtgtactgtgggtgtt

SEQ ID NO: 178492 - DNA, 85 bp, Homo sapiens
aatccaaatgcatcattcagatgcaaggcaactcgaccagcacagatagatcattatctaggacttgcaaataagaatgttaaag

SEQ ID NO: 178493 - DNA, 100 bp, Homo sapiens
acttcaaggataagggtgacagcaacagctcggcgggctggaaggaggaactctctggaatgaaaaataaaatacaagtagttgtgcttgaaaacgaagg

SEQ ID NO: 178494 - DNA, 100 bp, Homo sapiens
atttgctccaaaccgccttaagatttggtggcaatctgaaaatgtgactactgtgaagactggccagaggcacagaggatctcagcctcgctcctggaca

SEQ ID NO: 178495 - DNA, 75 bp, Homo sapiens
ggacggggacagcgacgacgcggaggcagagaagggaacgcccggcccagccccctccagtccccaaaaggcaaa

SEQ ID NO: 178496 - DNA, 100 bp, Homo sapiens
caaagagctgggcccctacaccctggacaggaacagtctctatgtcaatggccagatcctgtctgccactcaggagcagattgcagaatcttattacccc

SEQ ID NO: 178497 - DNA, 75 bp, Homo sapiens
atctgccaactaatagtaatggcccggaaccgtgaagactgtgatcaaccactctatgattgtcctatgtgtggg

SEQ ID NO: 178498 - DNA, 75 bp, Homo sapiens
cgcggatgtcggcgaagagttcaaccagattattttcgaaataccagtatttcgactccagggggatgttcattt

SEQ ID NO: 178499 - DNA, 100 bp, Homo sapiens
gcaagaccaaggcctggaccgagttccacaagaaggactgcggggacctggtggccatcggtgcttcagcgaagagtcctgcgtctccatccctgaagtg

SEQ ID NO: 178500 - DNA, 100 bp, Homo sapiens
cccagcgccccggtttgcaaagcagtgaaattaaatggtggcagacatgtccaaggaatattgcggggatttgatccctttatgaaccttgtgatagatg

SEQ ID NO: 178501 - DNA, 100 bp, Homo sapiens
tttaccatgcagctactggatcactgccatttagaccctttgaagggcctcgtaggaataaagaagtgatcttcatcactggtccagctgtaataccagg

SEQ ID NO: 178502 - DNA, 82 bp, Homo sapiens
ggcagaggaagctcaccccgaggaagtctctcgccacggttcttatagaaaattggaacgatatggggaatttctaaagaag

SEQ ID NO: 178503 - DNA, 100 bp, Homo sapiens
cgcttccggcccctgcacgtccgcaaccttctcagcgcctatggcgaggtcggacgcgtcttctttcaggctgagggttggattatctcaagatgcccag

SEQ ID NO: 178504 - DNA, 95 bp, Homo sapiens
ccagcgctaccggctggaagccctcaagaaagtggatctcttcagcctgggaattatcttctttgagatgtcctatcaccccatggtcacggctt

SEQ ID NO: 178505 - DNA, 100 bp, Homo sapiens
atcaatgtgtctatgctgcacacaactctgtcatagtagatgaatgcaaggtgaccaagaatatggcccaggtgaccaaagccctggacaaggccctgag

SEQ ID NO: 178506 - DNA, 74 bp, Homo sapiens
gttctgaagcccgagaggagccacaatggagacgccgccgctgcctcccgcttgactatattgtggagtatgac

SEQ ID NO: 178507 - DNA, 100 bp, Homo sapiens
gctggcagcagcatctcagcccaagagaaggctgctggaaagtacagacaacaaggcagaaattatattgttgaagatggagatattatcttcttcaaat

SEQ ID NO: 178508 - DNA, 78 bp, Homo sapiens
gaccagaaatattggttcagcccctgaaagtttccaacaggaaatcatgtttcatatacactggagaagtcgtacatc

SEQ ID NO: 178509 - DNA, 75 bp, Homo sapiens
gattgctcaagacttctttgtggctttgctaaaggacagaacactcgtgaaactgctcaggccatcaagggtatg

SEQ ID NO: 178510 - DNA, 50 bp, Homo sapiens
accgggacacccagaagccgggaaatggtccagatcaaggaagagacccg

SEQ ID NO: 178511 - DNA, 100 bp, Homo sapiens
cctttaccaaccagactggcggttcatggagagcaaggagaaggatcgccaggtgctggaggacttcccaacgattttacaatcaggcgttgaatgtagg

SEQ ID NO: 178512 - DNA, 74 bp, Homo sapiens
agcaattgaaagttattaccagaggaattggcagcaatgaaacagattctcgttaagatgcatagtaaacattc

SEQ ID NO: 178513 - DNA, 100 bp, Homo sapiens
cacgcacgtggcccccagcacgtccaccaacctgaccatgacctttaacaaccagctgaccactgtccacaaccaggcacggagtgtgaatgtgaagaca

SEQ ID NO: 178514 - DNA, 100 bp, Homo sapiens
atcacatctgtgggagacgaagaaggcagaaggagccacgtttattttcttgaaaaggctccaggcttcggcttggaaaatcccaccgccaaaattgagc

SEQ ID NO: 178515 - DNA, 48 bp, Homo sapiens
cccactcgtctcagtgtctacaaccatgatggatgtaacagatataat

SEQ ID NO: 178516 - DNA, 110 bp, Homo sapiens
tgtgcggggtgcgccggcagaggatccagtgttcaccatcctggccccggaagccgcggcgagtcctttgcacatgttggcaacacacgcatccgcatcggcctccctgc

SEQ ID NO: 178517 - DNA, 87 bp, Homo sapiens
tccccacgcaaccccagatccatttacactttacagacatgtctcaggaaggctatggaactagatctcaacctcctctggcccccg

SEQ ID NO: 178518 - DNA, 82 bp, Homo sapiens
ttccatccttgactgttactacagaaaaagcatttcttttgaagaagctcctgttttcttcggagaagtcttcttggcggga

SEQ ID NO: 178519 - DNA, 82 bp, Homo sapiens
ctcggatcgaatccctcacgcgggcgcggatcgaccggagcagagagctggcgagcaagttgatattcactgatggactcca

SEQ ID NO: 178520 - DNA, 135 bp, Homo sapiens
ggagctcagagtgacccaaattctcaaagaaaagtttccacgagctacagctataaaagtcactgacatttcagaaatgaagctgttgtcatttctggaaggaaactggcccagcagatcaagcaggaagtgcgg

SEQ ID NO: 178521 - DNA, 98 bp, Homo sapiens
cgggcggccccctgcagcctcctgcccaggctccgatgccgctcctacgaggactgctgtggctccaggtgctgtgtgcgggccctctccatacagag

SEQ ID NO: 178522 - DNA, 95 bp, Homo sapiens
ccgccgcagcaccatggcgaccaccgtcagcactcagcgcgggccgggcaacaggtttgtctatgctggctctaactcgggcgtggtccaggccc

SEQ ID NO: 178523 - DNA, 100 bp, Homo sapiens
gagcgagctgagtggttgtgtggtcgcgtctcggaaaccggtagcgcttgcagcatggcacacggcacagcaggagaccaacaagaccattgcagccagc

SEQ ID NO: 178524 - DNA, 51 bp, Homo sapiens
aaactctttgggaaagccactcgaaaaggcgttcccacagctgtgcagaac

SEQ ID NO: 178525 - DNA, 100 bp, Homo sapiens
ctatatactttggttacctatgtacctgttaccactttcaaaagctttcccaacgagcctgctgcagtcattgccctcaacaccattaaggaatggcttg

SEQ ID NO: 178526 - DNA, 74 bp, Homo sapiens
attactactttattcaagatgacggaagcagatttaagtcaaacatcatcgcctggctgcggaaagcgctggag

SEQ ID NO: 178527 - DNA, 95 bp, Homo sapiens
agagaagactgatagagacttcgttaagggttatgtggtccgaatcagtggtgggaacgacaaacaaggtttccccatgaagcagggtgtcttga

SEQ ID NO: 178528 - DNA, 96 bp, Homo sapiens
gttgggtgtaggaaccatggttggtgcagacatactagcagggagggaagacaattcagatggtcagcaagaggatgaagccagtaaaattgaagc

SEQ ID NO: 178529 - DNA, 105 bp, Homo sapiens
aaatatccaagacccagctcaagcagaggcctacacgatttactggtggtctttgggaagaagcttcctgcctttgccaccatccccatccaccagctgcagcat

SEQ ID NO: 178530 - DNA, 100 bp, Homo sapiens
gaagcaaaaaaggctaagcaagcatctaaaaagactgcaatggctgctgctaagaccaccaaatcccattgaatttctagcatcttatcttttaaaaaac

SEQ ID NO: 178531 - DNA, 80 bp, Homo sapiens
gtcagacgcagccgtagacaccagctccgaaatcaccaccaagatgctgtgggccctgagggaaaggatcacagaggcgc

SEQ ID NO: 178532 - DNA, 74 bp, Homo sapiens
aggaatgacagcatctatgaggaggattactacagcatcccatttcccacacccactactccgctgactgggag

SEQ ID NO: 178533 - DNA, 85 bp, Homo sapiens
tcaccttgctgctcagacgctccgagaagcttcaggcagcataacacttacaggtgctgtaacacctgtgaagatgtgcgggagg

SEQ ID NO: 178534 - DNA, 98 bp, Homo sapiens
aaccttgttcaccaggcttatgaagtcactcagcctctgaagaagcttcgggttcagactcaggcagtcagtcggaaagtgagcagggaagtgatcca

SEQ ID NO: 178535 - DNA, 82 bp, Homo sapiens
gaatggagtcgccttctgcctggtcgggatcccgccccgcccggagccccggcccccacagattcttcgctgctgctgcctt

SEQ ID NO: 178536 - DNA, 100 bp, Homo sapiens
tgaaaagcaggttgaagtcaaagaagggcttgttccggtttcagaggatcctgtagccataaagattgcaggttcttgggtgtctctggggagtccctgg

SEQ ID NO: 178537 - DNA, 83 bp, Homo sapiens
ctctgctcttcctcccttcgctcgcaccatgccctgggcgctgcctatggcacagccaagagcggtaccggcattgcggccat

SEQ ID NO: 178538 - DNA, 83 bp, Homo sapiens
agcgcgagcggcgcgagaaaagcccgcagcttcatctcccagctcaaacaacacagcggccacaacagcagctattgtcccgg

SEQ ID NO: 178539 - DNA, 100 bp, Homo sapiens
ggaagactgccacacctagactgatgcttattagtcatcaccgttattcctactaacgtcctgtgtcactgagagatcccagaagacccacttgtggctg

SEQ ID NO: 178540 - DNA, 75 bp, Homo sapiens
ggtcataccggatgtctatggtacagacagagatttaggaccaataagtcttaattggtttgaagaactttcttc

SEQ ID NO: 178541 - DNA, 100 bp, Homo sapiens
gaagccgcatcgggcatctggccgacgccctcgttcctgtggctgacgtggaggagaaccgccagtaccgcatgcacagcctgcagcacaaggccgccag

SEQ ID NO: 178542 - DNA, 75 bp, Homo sapiens
cgcatcgcaaccaccgccctggccatctaccatgtggtgatgtgtccaatctagatcccaacttctcatttgaag

SEQ ID NO: 178543 - DNA, 98 bp, Homo sapiens
gaaggcgaggagacggagttctacgtgtcccccgaggatctggaggcacagctgcagtctgacgagaggggtgctggggagtcagggaagagcaccat

SEQ ID NO: 178544 - DNA, 96 bp, Homo sapiens
agagcgagctgagtggttgtgtggtcgcgtctcggaaaccggtagcgcttgcagcatggttccgatgtgattcagaagggcagttccctggggact

SEQ ID NO: 178545 - DNA, 97 bp, Homo sapiens
tcgggccggggtgcgcaagggggaccgcatcctggaggtgctggctacagcaaacatcattcaagatgtccagcaaagggagcagcacagatggcag

SEQ ID NO: 178546 - DNA, 74 bp, Homo sapiens
cgacaactcactttacttgaatcagatctataccggtcaaggtcagcatctcctcgacgatcaagatctatctc

SEQ ID NO: 178547 - DNA, 83 bp, Homo sapiens
gtggagatagattattttgggctacgttactgtgacagaagccatcagacggtgtttgtagccaatcctaacaagacgcagcc

SEQ ID NO: 178548 - DNA, 75 bp, Homo sapiens
gatgccctgcagtacctgcagaaggtctctggagacatcttcagcaggttggctggatatttacagacctcgtct

SEQ ID NO: 178549 - DNA, 75 bp, Homo sapiens
ctaagacgctgtttcagagcgtttgggtcctctgaggccccttgaccagcaacaggaacaagatcctaccaacct

SEQ ID NO: 178550 - DNA, 136 bp, Homo sapiens
gacctgcatgtactgggggattcgcagggaggatgtcgggacaccccggaagctgggaaatgtggaagtatgcgagacttaagagctcaagtgactagtggtctcctgccatttccagaagtgactcttcaagccc

SEQ ID NO: 178551 - DNA, 74 bp, Homo sapiens
ttctctgttctccctccttcatgagcagaagaggggctatcaacagcaggacgcccatgaattcatgcgctacc

SEQ ID NO: 178552 - DNA, 101 bp, Homo sapiens
tgaatgcacaagtgcagttagtgtcgacgtggaaggctacatttatagtcattgtcgaaagtataccaaatactacattcaccgaattccaagaagccggg

SEQ ID NO: 178553 - DNA, 75 bp, Homo sapiens
caacactgttattgtaaacaaaggatcgaatcatcaatttagttgttggcagcttaacatccttattgattctag

SEQ ID NO: 178554 - DNA, 100 bp, Homo sapiens
agggaaaatgccaagtggaataaaaaccaacatcaagtcggcttccatgcatccctaccagcgtactatactggcaattgctggagaagattttgcaatt

SEQ ID NO: 178555 - DNA, 96 bp, Homo sapiens
ctcgcgctactctctctttctggcctggaggctatccagcacatccacgacagcgatggcagttccagcagcagccaccagagcctcaagagcaca

SEQ ID NO: 178556 - DNA, 100 bp, Homo sapiens
cgcgccttcggaagcccgttcggcctggaggagccgcagtgggtcccggacaaggagaaatggtggagtcaatgaagaaagtagcagggatggatgtgga

SEQ ID NO: 178557 - DNA, 100 bp, Homo sapiens
ccggcgccggcaaggggacccagtgcgcccgcatcgtcgaggtgtgcaactgaggaacatggctcaagaaactaatcacagccaagtgcctatgctttgt

SEQ ID NO: 178558 - DNA, 100 bp, Homo sapiens
atcagtttcacagctggccacagactttattcagagccttttagtaaaaaatccagaccttcacagttgttgatcacatagcatggtcatccactcacag

SEQ ID NO: 178559 - DNA, 75 bp, Homo sapiens
gatcgattttaccttggataccctgctttgggaattcaccgtcccccagctccgtggccagcagcgactcaggaa

SEQ ID NO: 178560 - DNA, 98 bp, Homo sapiens
taccagaggtggaagtccaagtcaaacgcagaaggactgcctcactgagcaaccaagacttttgtctggtcctctgagccccagtgagagtttcctga

SEQ ID NO: 178561 - DNA, 80 bp, Homo sapiens
gacaagcttttgtccccaaaccagagctttgcccgaagtttttacatacaaattctactagtcacacctggccattcagt

SEQ ID NO: 178562 - DNA, 90 bp, Homo sapiens
cgcacctcggggacattattgcgcgtggaacggctgcttttggaagcatcctgaggttagcattacacttctcccagtggagcccatgac

SEQ ID NO: 178563 - DNA, 101 bp, Homo sapiens
tccttggcctgcatcgtcaactaccacatggaccgcttcaaggaaagcctcactctcaacgtgcagtacaacagcccagacccttggacctgaggaatccc

SEQ ID NO: 178564 - DNA, 75 bp, Homo sapiens
cttagctgtgctcgcgctactctctctttctggcctggaggctatccagcatgccgtagggccaggtgagctgct

SEQ ID NO: 178565 - DNA, 48 bp, Homo sapiens
tcggcagggcggggcggaacgagtatctgactgtcttctctcagatga

SEQ ID NO: 178566 - DNA, 75 bp, Homo sapiens
cagccttggtctgagtggactgtcctgcagtattctaccttgtaaatactgttatttgtatatactgtaaatgat

SEQ ID NO: 178567 - DNA, 75 bp, Homo sapiens
gagccgggagttcaagaagaacactccagaggtaatgctatgggctatgtacgaatgataagatctggtggtctt

SEQ ID NO: 178568 - DNA, 123 bp, Homo sapiens
tccagcagatggcggatgccctgcagtacctgcagaaggtctctggagacatcttcagcagcaccatatgaaggcggagtatggaaagttagagtggacctacctgataaataccctttcaaa

SEQ ID NO: 178569 - DNA, 100 bp, Homo sapiens
tgacagcacaggtcacagtaaggccaaaaatgtgcatactcacagagttagagagagggatggtgacactgtgcatcttagccaacatagcggatgggac

SEQ ID NO: 178570 - DNA, 90 bp, Homo sapiens
tgaagatgggaccctcacctgcagtgatcctggcatctacctcagtttaaaaatcctccgagaagataaaaaatgtcccgggtcactgca

SEQ ID NO: 178571 - DNA, 51 bp, Homo sapiens
agtgcccatgaaggtcagactgagcatgcagcagaactgattaaaacagtg

SEQ ID NO: 178572 - DNA, 82 bp, Homo sapiens
tgcagctggagctgagcaaagtgcgtgaggagtttaaggagctgaaagcgcgatgcctgaggaagtgcaccatggagaggag

SEQ ID NO: 178573 - DNA, 100 bp, Homo sapiens
acgagagggagagcaagaccatcatgctgcgcggccttcccatcaccatcacagagagcgatcatgaatacaactttgtctgagagccccttcaagtgtg

SEQ ID NO: 178574 - DNA, 71 bp, Homo sapiens
agcagatcctggtcctcgatccgcccacagacctcaaattcaaagaatatgcttttaaggctattaaccag

SEQ ID NO: 178575 - DNA, 76 bp, Homo sapiens
cttccttgaattctttgcgtggggccttttgacaactccaatgttgacttttgaacaaaaaagtggtgcagttttt

SEQ ID NO: 178576 - DNA, 100 bp, Homo sapiens
ggtaatcctgggagcaccagcgctgccacttgtacccgcagacattatgaaaggtgtggtggacacaggcctattcatcaacatggctgagagagtctac

SEQ ID NO: 178577 - DNA, 90 bp, Homo sapiens
gcagagcggagggctgctggtggtcagcaaaggctcaactggagaagctacaggcagagatttcacaagcagctcgaaaaacaggcatcc

SEQ ID NO: 178578 - DNA, 100 bp, Homo sapiens
ccgcggaaaccgatctgcccgttgtgtttgtgaaacagagaaagataggcggccatggtccaaccttgaagtttcagagtcaagtggtgagatcaaagac

SEQ ID NO: 178579 - DNA, 90 bp, Homo sapiens
ccaatgggtggaatgatgccacctggaccaggaataccacctctgatgcctggaatgccaccaggtgctggagaatctggtaaaagcacc

SEQ ID NO: 178580 - DNA, 50 bp, Homo sapiens
cgggaggtcaacgaggtcatccaggaatgtatcctgtcaggtataatgtc

SEQ ID NO: 178581 - DNA, 82 bp, Homo sapiens
ctcacctcgctactcgcttgcctacccgccggcccgcgggtctacttcctcaaagatgccactgccgccaggagccctgtaa

SEQ ID NO: 178582 - DNA, 100 bp, Homo sapiens
gaatggggatatctgtggccactatccccggcacatcgtgttcctggagtatgagagttctgagaaggagaaagacacgccttagcagtaggaggactag

SEQ ID NO: 178583 - DNA, 96 bp, Homo sapiens
aaagaaactacagtcatcacaatggtctggatgagctgaagaagcaggtggagagtgccgagctgaagaaccagcggctcaaggaggttttccaga

SEQ ID NO: 178584 - DNA, 83 bp, Homo sapiens
cacaagagcgagtggaagaagtccttagtggcaagccatcactggtgcaagctatatttaacggagatcctgatgaagttcga

SEQ ID NO: 178585 - DNA, 95 bp, Homo sapiens
ctcgggagctggctgaagatggctactctggagttgaggtatcatctttatcagaaagtgaggagtcccaggactcatccgacagcataggctcc

SEQ ID NO: 178586 - DNA, 83 bp, Homo sapiens
ccaggcccacggaggaagagccgggcagtccctggagcgggccagccacacccactcgcccgggtctatggccacggtcggag

SEQ ID NO: 178587 - DNA, 78 bp, Homo sapiens
ggtgccgtggcatgtcgatttgtccttcactacaggtcagaaagcaacattgaatgcagaagaaatggcggacttcta

SEQ ID NO: 178588 - DNA, 74 bp, Homo sapiens
gggaatggggtcaaaatgagcaggtgttttcacagtcctgtgtttggtatggagagtgtggaattgcatatggg

SEQ ID NO: 178589 - DNA, 151 bp, Homo sapiens
gagaaggaaagcaccatgacgtccatccatttcgtggttcacccgctgccgggcaccgaggaccagctcaatgacaggtggtattaaagataatcaaacattatcaagaagaaggacaaggaactgaagttgttcaaggagtgcttttggg

SEQ ID NO: 178590 - DNA, 108 bp, Homo sapiens
cccagagtgcagagccgcctttccagcatgcaggggctgctcagacaagttggatggcttgaggactggtactaaaaggaaacgtgactgggaggccattgccagcag

SEQ ID NO: 178591 - DNA, 73 bp, Homo sapiens
agagggatccttcacccgtgtctgattagaaatgatatttgccaaatttgatgaagtgcaaagttcaggcggt

SEQ ID NO: 178592 - DNA, 83 bp, Homo sapiens
agtggtcctacctggggatattatcaaatctactactgttcatggcagttgttgacctcctgtactggagagacattaagaag

SEQ ID NO: 178593 - DNA, 134 bp, Homo sapiens
ggcggggaccggcggcgctggaggagcgaggcagctgtactaggactgggaacggaatgtgaaaacctttgcatcttctgatagtctagccaaggtccaagaagtagcaagctggcttttggaaatgaatcagg

SEQ ID NO: 178594 - DNA, 100 bp, Homo sapiens
atgtagtgactcgctactacagagcacccgaggtcatccttggcatgggctacaaggaaaacgtgaattttgaagattgcaccggtcgacaaaggacagc

SEQ ID NO: 178595 - DNA, 100 bp, Homo sapiens
aggtgaaactgggcaagaggccccagcccgtgaaaagtgagttgccaccttccagagaagaggtacgagatgacaagacaaccataaagtgtgaaacctc

SEQ ID NO: 178596 - DNA, 100 bp, Homo sapiens
ctctatggtgttgtgagccatcaggactccatcactcgtcttatggaggtgtctgtaactgagtttggagggaagctggttacttttggcctccccagca

SEQ ID NO: 178597 - DNA, 100 bp, Homo sapiens
tcagatatcctggattgatgacacatcagcatttgtttcccttagccagcccgagcaagtaaagattgcacctgtggaatcctctcaagaggaacagtca

SEQ ID NO: 178598 - DNA, 89 bp, Homo sapiens
gactggtgggaactgggaacactggagacctgatttctaactgacgctaccgtcgcggccgccgaagttccacctggtgccaagcatca

SEQ ID NO: 178599 - DNA, 96 bp, Homo sapiens
gaaaacgagcccctatcctaggattacctgaaggtgaaacagattgagccagaaggaagacaatgctggtgctcctgacctctgataaagctgcag

SEQ ID NO: 178600 - DNA, 100 bp, Homo sapiens
ggcctcctctgctgcagacatctgagtgttgcggagataggaacatgggagagaaacaatctgggtaacatgaaagtgatgctggttgctaagggaaggc

SEQ ID NO: 178601 - DNA, 98 bp, Homo sapiens
ctgcaacaggcaataccagtgagggcgaagagagacgagttgtactgctgtcacaggaaatggacgctggattacaagcatggcagctcaggcagcag

SEQ ID NO: 178602 - DNA, 100 bp, Homo sapiens
ggacgcaaagctgtcatcgtgaaggaccgtgtttcttcgcctcgcctccctggtggtcctgctcttctctctctggaatcagatcacttgtgggggcgac

SEQ ID NO: 178603 - DNA, 100 bp, Homo sapiens
acacccgtgcccaggagcttgacgccttagataacagccatcctattgaattaattggccttggtcctcacagctccaaaaagaaacaggatctcgataa

SEQ ID NO: 178604 - DNA, 82 bp, Homo sapiens
ccgccaagatgccggcctattttcagaggccggaaaatgccctcaaacgcgccaacggtgacagagttagtccttgataatt

SEQ ID NO: 178605 - DNA, 106 bp, Homo sapiens
ctcaaagggtcccggacggcagccacagcgtccgactcgactcggagggtttctgtgagagacaaattgcttgttaaagttgtccagtggagccccaaaatagaag

SEQ ID NO: 178606 - DNA, 101 bp, Homo sapiens
gctgtacgacagcggcgcgggcggcggcacggccatcgccggctcggtggaggcggtggccaggatccctgctgccttggtgatcccgggctgacagccag

SEQ ID NO: 178607 - DNA, 100 bp, Homo sapiens
aggatttatacagagatgtcatgttggagaactacaggaacttggtatggcttggcccggaggctgtttgatgtcctgcacgagcccttcttgaaagtac

SEQ ID NO: 178608 - DNA, 98 bp, Homo sapiens
ctttagaatctcaaacaagacaacttgagctgaaagcgaaaaactatgctgaccagagtctctaattaacagaagatggcaaagcccagccacagcag

SEQ ID NO: 178609 - DNA, 75 bp, Homo sapiens
cacgagcagatcctggtcctcgatccgcccacagacctcaaattcaaagagcacaaagttatcattgttgggctg

SEQ ID NO: 178610 - DNA, 83 bp, Homo sapiens
tgatgttcgtccgcaacgattgcaagggtcaactgtatttgttggtaacggaccaggggtttcttactgaagagaaagttgtt

SEQ ID NO: 178611 - DNA, 75 bp, Homo sapiens
gaaagagtggatttcagcctgcacggatggtcttgaaacacaaatggtttttgtctctaacgaagtgccggagca

SEQ ID NO: 178612 - DNA, 73 bp, Homo sapiens
atgagaccatagccaaacccccagaacgagcctctgactccaggttatcatggattcccagcgcgggacagcc

SEQ ID NO: 178613 - DNA, 96 bp, Homo sapiens
gtacagaacatgatcaagggtgttacactgtaatccttcccctctaccaccggatatggctcctgggcagagttatcaaccccaatcagaatctgc

SEQ ID NO: 178614 - DNA, 75 bp, Homo sapiens
ttctgcaaatgcgacaagcctcccagagtaaagacaagattgcatcctacagcaaaactccaaaaattgaacgaa

SEQ ID NO: 178615 - DNA, 74 bp, Homo sapiens
ggaacgggagccaacatggcagcggggttcgggcgatgctgcaggacaaatttacatgtattggagaccagacc

SEQ ID NO: 178616 - DNA, 95 bp, Homo sapiens
agatctgcctgaaggacctggaggaggaccacgcctgcatccccatcaaggattacggggcgctgaaagacatcgtgatcaacgcaaacccggcc

SEQ ID NO: 178617 - DNA, 96 bp, Homo sapiens
cacaatgcacacttcatatcgctcggtacatgcgtctgacagatgttgttcaacagcttgtttcctatcctgggagcaggagagtgtgcctatttg

SEQ ID NO: 178618 - DNA, 82 bp, Homo sapiens
caagaatctgcaggacttggtccgcggcatccgtaaccacaaggaggacgagaagcagcagtccgcggcgtgcggcaggccc

SEQ ID NO: 178619 - DNA, 75 bp, Homo sapiens
gctgcgctaccggaatgtcatccagcgagtgattaggcagctgcattcagcctcagcggaggacacgcctgtggt

SEQ ID NO: 178620 - DNA, 100 bp, Homo sapiens
ccggtgcgcagacagagctattccagcaccagcagagaatctggccaacctatttgtggaaatggaatggtagaacaaggtgaagaatgtgattgtggct

SEQ ID NO: 178621 - DNA, 95 bp, Homo sapiens
tcgagagatgaggacactgaaattcagagaggggaagtgatttgcctcagcttgtactaggagctctacggtgactttgaagacttggaaacagg

SEQ ID NO: 178622 - DNA, 82 bp, Homo sapiens
attccgaaactgtcaagattggcaagaacaccaatcagggtcttcaggcctggaagattgaagacattccagccaacaaaat

SEQ ID NO: 178623 - DNA, 54 bp, Homo sapiens
tagcaaaagttgatgatcttccccctggcctgtctccactaactctggacccta

SEQ ID NO: 178624 - DNA, 118 bp, Homo sapiens
tttgactactggggccagggaaccctggtcaccgtctcctcagcttccccgggcgctgcctggacaggcctgcctgcgtgctgggacatgtctggcctccaaggaccgtcggtgggcg

SEQ ID NO: 178625 - DNA, 76 bp, Homo sapiens
actactcatgtcagctgttctgcaggatcccatgagaagacggagtcttgctctgtcgcccaggctggagtgcagt

SEQ ID NO: 178626 - DNA, 98 bp, Homo sapiens
agaatcactgatgatggaattcaggcccagtcccaaggcgcaaggccacttgtgccagcagtgtgagtcagcaagatagcagaagcaggaagagagcc

SEQ ID NO: 178627 - DNA, 100 bp, Homo sapiens
gaagattcttgacgttggctgtggtggtgggctgttaactgaaacaaatcttcctattttcaagctgaaagaatctactgttagaagaagatacagtgac

SEQ ID NO: 178628 - DNA, 100 bp, Homo sapiens
gcgcgcccaggacatcggcatctggttccacatcctggcgggcctcacgcacctggcggtcatcagcaacgtggtggtgaagtttattaagaaggagaag

SEQ ID NO: 178629 - DNA, 75 bp, Homo sapiens
agaaaaattaccgagccagccagcaggaaatacagcatgcttgcagtaaggttgggctgctggcacgacccttac

SEQ ID NO: 178630 - DNA, 74 bp, Homo sapiens
tgggccgggatcacattctgattgtccttgaatgggcaagagggcacatgaagtacggcgtcctccacattcac

SEQ ID NO: 178631 - DNA, 83 bp, Homo sapiens
cggcgtgttcatgcccccggggctatgactttgcagccgtcctggagtggttcgcggagcgtgtggaccgcatcatcctgctc

SEQ ID NO: 178632 - DNA, 75 bp, Homo sapiens
tactatccatttcaactacagatactttgaagtagaagaagctgatggaagcgtcagcccccgtagcacctctgt

SEQ ID NO: 178633 - DNA, 74 bp, Homo sapiens
agaactgccccatcgatgtgcggcgcccgctgtataagggcgtctctggccgagcctctttttgtggaaaacga

SEQ ID NO: 178634 - DNA, 75 bp, Homo sapiens
gactttgaccctccagaagtggcatgcactaagatcgagatggtgatcatggagcgtagcaagctctcagagctg

SEQ ID NO: 178635 - DNA, 75 bp, Homo sapiens
ccaagatgtagctaatgaccgtggttcccactgaggaactgcaagcacatgttgaccagataactgaaatggcag

SEQ ID NO: 178636 - DNA, 74 bp, Homo sapiens
cgcagtggtcgcttcttctccttggtccaagcagctcagtctgaggctaaggttgtatctcagtatcatgagct

SEQ ID NO: 178637 - DNA, 100 bp, Homo sapiens
gttgcagcagcagcagcagcaacaacagctggcgcagatgaaggaggcaggtggaagtcatcataaagtttctgtttcacccgtcgtccatgttcgagga

SEQ ID NO: 178638 - DNA, 95 bp, Homo sapiens
cccaggcagaccttgcagtcaaatgtgaagcctcagtttaggtcatctggtggttcagaacactcaacagagggctctgtatccttgggggatgg

SEQ ID NO: 178639 - DNA, 96 bp, Homo sapiens
cgcgcggagcgccccttcgcgtcccctgcaccatgagctggggcaccgagctctgggagttgaaattgtcctacaggagccctggagaaattcagc

SEQ ID NO: 178640 - DNA, 100 bp, Homo sapiens
atctaatttcattgctcggcagcttctcacctggggcgggtgggttctgcaccaccctcccaccctccttcctccgtgtggacgatagagccacatccag

SEQ ID NO: 178641 - DNA, 100 bp, Homo sapiens
ggtggctgccatgatgatttccattgtggggtatggcagattttcgaaagttttttgcaaaagcaaagcacatagtcatcatctcaggagctggtgttag

SEQ ID NO: 178642 - DNA, 100 bp, Homo sapiens
ggcagatcgagcagctgcgtcgctgcgagctcatcaaggagagcgaagtcaaggccctgtgcgctaaggccaggcagcagctaccaagaaaccagcccct

SEQ ID NO: 178643 - DNA, 89 bp, Homo sapiens
gatggaagtcttggctttgctgcagggtcttcaggcagtgacagtggtgggagcagcagcagcagcagcagcagcatcaatagcccgga

SEQ ID NO: 178644 - DNA, 50 bp, Homo sapiens
tctgctcacgcgtgttcttctgagccagcccctgggcaacaaagtggaaa

SEQ ID NO: 178645 - DNA, 75 bp, Homo sapiens
tttaacgtcacagtttttgaagaccaagattactgattttgggcactccaagattttgggagagacctctctcat

SEQ ID NO: 178646 - DNA, 83 bp, Homo sapiens
cccgctacgagctggctttaatcctgaaagccatgcagcggcctgtggacatctctacagcaatgagtgaacgggcacttgct

SEQ ID NO: 178647 - DNA, 98 bp, Homo sapiens
ggggcggtaaaaggccggcagaagggaggcacttgaggtattgttgcagcatctggcagtgagactgaggatgaggacagcatggacattcccttgga

SEQ ID NO: 178648 - DNA, 100 bp, Homo sapiens
agtgatggaccgtgctagtgacctgactgatgccttcgtggagataaagagaggcctgtccagtctttgaaaacatcaagagatacttcaccctcaagtg

SEQ ID NO: 178649 - DNA, 100 bp, Homo sapiens
actccagcagccaagatggtgaagcagatcgagagcaaggtacgctacgggccatgacatcacagagcactctgtgctgatccacgagtactacagccga

SEQ ID NO: 178650 - DNA, 90 bp, Homo sapiens
gttaatgagtaccgccattggattaaagagttctcagcacagatattctacacctcacgccttcacctttaacacctccagtccctcatc

SEQ ID NO: 178651 - DNA, 100 bp, Homo sapiens
aacatgatcaagtccttctatactgcaagtcttttgatagatgtcataacagtatttggagaactcactgatgaagtctctaattaacagaagatggcaa

SEQ ID NO: 178652 - DNA, 74 bp, Homo sapiens
gccagctccacgctaaggagggtgctggagtgagtcccccacttatcactcagattgtctacaacctgttgtct

SEQ ID NO: 178653 - DNA, 100 bp, Homo sapiens
tgagtcttctggcaaacagtgtttgcctctggttcagctcatacaacagcttcttagtgtgttaacagggcacaaccattatgtgatgtgtgctcagttc

SEQ ID NO: 178654 - DNA, 82 bp, Homo sapiens
ggtcaccattgacgatgtccaggttgcaagttccaagaccaaagattaaattaagagaaggtaaagctggacaaaatctgct

SEQ ID NO: 178655 - DNA, 100 bp, Homo sapiens
gcgagtacaacaaagccagcaacgacatgtaccacagccgcgcgctgcaggtggtgcgcgcccgcaagcagatttcgatggggtcctctatcatatttca

SEQ ID NO: 178656 - DNA, 75 bp, Homo sapiens
agaccgcggtcctgcaggggcgcttgctgcctgctggagccagttctgcttctcggcaaggagcgatttgctggt

SEQ ID NO: 178657 - DNA, 100 bp, Homo sapiens
gggagacgctgggcctcattggctttgatcgccacatcacagaatcgtatctatctcacagctgacaaccttgtgctgaacctacaggatgaaagtttca

SEQ ID NO: 178658 - DNA, 100 bp, Homo sapiens
ggagacgcacgcagctgactttgtcttctccgcacgactgttacagaggtctccagagccttctctctcctggttcaaaccttgtactactcagctgatc

SEQ ID NO: 178659 - DNA, 138 bp, Homo sapiens
caaatgttgtctatacatatactggaaagagaattgcattatatattggaaatctaacatgggtccagtgggcttgttgctccagacctcatgccttctggacccagacatctctgcaatctcggaactggaatacac

SEQ ID NO: 178660 - DNA, 75 bp, Homo sapiens
cctgatgatgagaagttccatgggggctgggccctcattgactgtgaccctagattactacaatgcagctagaac

SEQ ID NO: 178661 - DNA, 105 bp, Homo sapiens
gagactgggcggccggccgacccttcctgtcgctgacggcgactgcgggaggccaggtctcctctgagcctccggcctccataagacccaaaacagatgacacct

SEQ ID NO: 178662 - DNA, 100 bp, Homo sapiens
aaggtggaccccgagctggtggtgaccgtgctgggagacctggagcagctgctcttcagccagatgctgggaaagcaagcaagtggagaccaagacagat

SEQ ID NO: 178663 - DNA, 50 bp, Homo sapiens
gctccgcctcctccgccgcgcagctgaaccttagccggccgatcgaggag

SEQ ID NO: 178664 - DNA, 82 bp, Homo sapiens
ggagaacgtcccgctggatctgacccgagcatcgagagtaaacatgaggttacgatcctgggaggacttaatgaatttgtag

SEQ ID NO: 178665 - DNA, 83 bp, Homo sapiens
caaaggggaggttacgcagcaaaccatccagaagggcgaactttctgaccaagtatacaactacccagagggcctaggagaag

SEQ ID NO: 178666 - DNA, 75 bp, Homo sapiens
gcctggacaaaatgtttacttgtctgagtatgttggataaaggacattgttgtggcagtaactggagagaacatg

SEQ ID NO: 178667 - DNA, 89 bp, Homo sapiens
gagttctctatttagctgcttataactgtactcttcgcccaggtggtattcacagccaacgactccggcccccgccgctacaccattgc

SEQ ID NO: 178668 - DNA, 75 bp, Homo sapiens
gagctgagtccattcacactggtttggaagttgcaatcaaaatggccaatggaagcactgttgtgaagaacttat

SEQ ID NO: 178669 - DNA, 71 bp, Homo sapiens
gctttaaagcgcataagaatgtcctggcagcattcagccagtattttagtttaatggatcgagaagtggcg

SEQ ID NO: 178670 - DNA, 75 bp, Homo sapiens
ccgatccagcctgcggagcctgtggggcagagcctcattttacagatgaggaaactgaggctggctgcgtgctca

SEQ ID NO: 178671 - DNA, 75 bp, Homo sapiens
aagaccaatttttacgtctagatttccatgcccatggaagtggtgaaagtggtgctggaaaaacagtggctgcca

SEQ ID NO: 178672 - DNA, 100 bp, Homo sapiens
atggctagcaggaatgcttactgttgcgtggttcgttattaacaggagccaacttctggccttgggatcattctggacagtgtgtgtggaatgtttcccc

SEQ ID NO: 178673 - DNA, 100 bp, Homo sapiens
cttcaccgagctcattaaaggattcggatgtgtactctggcacacccaccaaggtgagacacatggacagtcaagtggaggatgagtttgatttggaagc

SEQ ID NO: 178674 - DNA, 73 bp, Homo sapiens
aatactttcaagtcatcccaaatatggttccatccctaaacttatacatgaaaaagagaggtttgaccctact

SEQ ID NO: 178675 - DNA, 87 bp, Homo sapiens
ccccccaaagtgctgaaattacagcacaaccagtgtctctgaagaagatgtctcaagtagatattctcgaacagatagaagtgggtt

SEQ ID NO: 178676 - DNA, 90 bp, Homo sapiens
gagagactccttgggggtcgagcacataacggggttcgggtgtctcgtgtgtgaacatcacaggatgctcgtcagaagttccgctctgtt

SEQ ID NO: 178677 - DNA, 83 bp, Homo sapiens
ggcgcctaccccaaactcatggaaattgatcaggtcaatgtgacggtggactacattagaccagccagcccagccacagagac

SEQ ID NO: 178678 - DNA, 96 bp, Homo sapiens
ctcggcgcctgcgtgacctccccgccggcgggatgtggcgactacgtcgggccgctgtggcctgactcgcagggcaatgacattaaagtcactgct

SEQ ID NO: 178679 - DNA, 75 bp, Homo sapiens
ctacagtatgcacttaatgtccctctggagaatgctggaggagaccttaaggatggccaccaccactatgaagga

SEQ ID NO: 178680 - DNA, 100 bp, Homo sapiens
tctgcgagaaatcaaactttgggcacaagtcatgaagccgacaagcccgggagacacagtgtcagaattacaagatcctgataacttaagtgactctctc

SEQ ID NO: 178681 - DNA, 75 bp, Homo sapiens
cgcagcgccggcgcccgggagacccaggaggagcccgcaggtgtgcaactgaggaacatggctcaagaaactaat

SEQ ID NO: 178682 - DNA, 100 bp, Homo sapiens
aatttgcatcaacaagtccaagataggaatgaagtaattgaagctgcaaatgaagcattacttactaaagaaatggtgttcacactggccctgaatcaag

SEQ ID NO: 178683 - DNA, 134 bp, Homo sapiens
ggaaccgtgtgagaatccctaaggcggggaaccgcagcgcagtgacagtgcagaaccccggcgcggcccttgcttcaagcagtttatgtatggatgaaaaacagattacacagaactactcgaaagtactcgca

SEQ ID NO: 178684 - DNA, 80 bp, Homo sapiens
aaacatagagaggaactggagcaattgaagctgactactaaggagaataagcctttccgctgtgcccattgccattactc

SEQ ID NO: 178685 - DNA, 100 bp, Homo sapiens
gaggaagccttgaggacctactcacagataggaattgaagtgcctacaccaactaatgttacaattgaatcctataacatgaaccctatcgtatattggg

SEQ ID NO: 178686 - DNA, 96 bp, Homo sapiens
cctaatccaccaaggatagccaatcggaccaaaaattcactcactttgcaatggaagccttcatatgctgagtttgatattagtggaaatgtgctg

SEQ ID NO: 178687 - DNA, 100 bp, Homo sapiens
gtggaaataattaatgaccgaacagaaacccctcctcccctagcttcactcaatgttagtaaggttaatggcacagatgcagattatgaatatgaagaaa

SEQ ID NO: 178688 - DNA, 100 bp, Homo sapiens
ttgcatgactgcaatggagatgtcaacagagctatcaatgttcttctggaaggaaacccagacacggtgtggcagctctcagaaaagaagcaaataaacg

SEQ ID NO: 178689 - DNA, 100 bp, Homo sapiens
gcggggcttccctgcggctggaggtctgacagcagccgctgcagcagctgctgctgctaccaatgcagctattgctgaagcaatgaaggtgaaaaaaatc

SEQ ID NO: 178690 - DNA, 98 bp, Homo sapiens
ctagcatgaccgacgcgctgttgcccgcggccccccagccgctggagaaggagaacgacggctactttcggaaggtattcctggagtggagagccact

SEQ ID NO: 178691 - DNA, 50 bp, Homo sapiens
cccaccccattaccctccacatgggactttgaacatgtcggggatcgccc

SEQ ID NO: 178692 - DNA, 76 bp, Homo sapiens
gccggatggaaatcctaatgacagtctccaaattcgcctccatctgtaccatggacctgaaggagaagaaggagaa

SEQ ID NO: 178693 - DNA, 100 bp, Homo sapiens
caccaaaatacaaatggggatctgtgactcatcagagtgtgggggttgtgaaaggttcgttccaccagtcataaaccagatgaaatctatggcatgattg

SEQ ID NO: 178694 - DNA, 100 bp, Homo sapiens
cagcacctcaacaacatttttttttggcttaacaaaacatcaaacggcatacaaatggttagcactctacgtatatgaatatctgctccatgtaggagct

SEQ ID NO: 178695 - DNA, 100 bp, Homo sapiens
tcgagactcatgactcccagagaggatggcatctagaagaacccttaggagaaatcttgagagtggacagcaattgtgaagatcgccagagagttctgtg

SEQ ID NO: 178696 - DNA, 102 bp, Homo sapiens
cccatcctgccgtccttctccactttcgccagcccgtgccgcgagcgcggcctgcaggaggttagctttatacgtctacgaatatttactgcacgtaggagc

SEQ ID NO: 178697 - DNA, 95 bp, Homo sapiens
gctgggagagaggtacctctccttttccctctccctttccctaagatttgtcttcagcgaagcggaagtttgcagattccttaaatgaatttaaa

SEQ ID NO: 178698 - DNA, 74 bp, Homo sapiens
ccatgttatggacacggtctttcttattcaggtctgcagactcgtgaatgacgtctaccgcgtgtataatcgac

SEQ ID NO: 178699 - DNA, 100 bp, Homo sapiens
tttgccaggtggggacttaaaggttgtaaggatgcgaggcagcgggaggcagtgctggatgacggagacgccaaacggtgatgatttgagctgagccctt

SEQ ID NO: 178700 - DNA, 100 bp, Homo sapiens
tggagcgcgccggctccctatctgggaaacaaaatctggagaatcgaaggttccaacaaggtgcccgtggaccctgccacatatggacagttctatggag

SEQ ID NO: 178701 - DNA, 83 bp, Homo sapiens
actggaaccgcttccgagacgattttttatcaagcagaaatgcatcgaacaacgagaatcaagatcactgagctaaatcccca

SEQ ID NO: 178702 - DNA, 75 bp, Homo sapiens
tcgcagtcttcgctgctaacgatattagttgccgctttgacattctttcttgggaaagatgaagatgaaaaacag

SEQ ID NO: 178703 - DNA, 75 bp, Homo sapiens
gaagtgatgagtgcctccaagttcaccttcaagctacgagttccagggagctctgtcctggtgaccgtgcccggg

SEQ ID NO: 178704 - DNA, 99 bp, Homo sapiens
gggccctatgatgaggtggtcctcccaccacagagccaggtgaccaagaatatggcccaggtgaccaaagccctggacaaggccctgagcaccatggac

SEQ ID NO: 178705 - DNA, 100 bp, Homo sapiens
ccatgaaccccaactgcgcccggtgcggcaagatcgtgtatcccacggagaaggtgaactgtctggataagatgaccattctagggtgattctgagccaa

SEQ ID NO: 178706 - DNA, 124 bp, Homo sapiens
ggctcatcgtgatcccggcgacatactacctctggccccgagatcagaatgccgacaatgcagatcttcgtgaagactctgactggtaagaccatcaccctcgaggttgagcccagtgacacca

SEQ ID NO: 178707 - DNA, 71 bp, Homo sapiens
ccaagatccaggataaggaaggcattccccccgaccagcagaggccaacctgagtgagcagcagatagtat

SEQ ID NO: 178708 - DNA, 96 bp, Homo sapiens
aagcagttctacaaggcgagccaggcattacgagattggacgaccaaatatttctgaacaggaaccccggcgtcccctctgtggtgaaattccacc

SEQ ID NO: 178709 - DNA, 82 bp, Homo sapiens
ggagctcggtggtgccaagacccacaccaccatgtcagttgctctatatgcaatcagtgctgtctactttgctggagtgatg

SEQ ID NO: 178710 - DNA, 135 bp, Homo sapiens
tcacttcttcagaaagcctccggaatctaaaaagccctcagtaccagagacagaagcagatggattcgtccttttagaaatacactttcgggaaatggcctctaaatcctggctgaattttttaaccttcctctg

SEQ ID NO: 178711 - DNA, 97 bp, Homo sapiens
ttatgatgaatgcaataattctccattgagaagagagaagaacattctcgaatacctagaatgggctaaaagatggcggcaaggcagcccaggcaaa

SEQ ID NO: 178712 - DNA, 100 bp, Homo sapiens
ccagggcggggatcctgcgctgccagccgtgtgctcatgggcagatttattgggccaaagatatcgtcttcctggtaacagaacatgaccttctgggcac

SEQ ID NO: 178713 - DNA, 89 bp, Homo sapiens
gggacgcgggcgccaggaccggccgaacgcagagatggagaaggatgaaactgtgagtgactgctccccacacatagccaacatcgggc

SEQ ID NO: 178714 - DNA, 98 bp, Homo sapiens
acaaaaacccccatcctgggaaaaatggggaagctggttaagacatcagaattttatagatactcccgacagctccgttacgaagttgaccaagcatt

SEQ ID NO: 178715 - DNA, 100 bp, Homo sapiens
tgcgttttcctcgcagtgctccgcttgtggggagactgtcatgcctgatgtgtatatctcatgattgatatggagaaactagtcatgggccaaaggtcaa

SEQ ID NO: 178716 - DNA, 100 bp, Homo sapiens
tggacattcgccacttcttctctggattgaccattcctgatgggggcgtgcatattgtagggggtgaactgggaaactcccagtacagccagcagcaggc

SEQ ID NO: 178717 - DNA, 100 bp, Homo sapiens
cccacagtgggggtgtgcaaacccgagagaactggatagctgatcagcttccttgggttttgctgatgacacaagagagctttgcctgaagatggaaaca

SEQ ID NO: 178718 - DNA, 100 bp, Homo sapiens
ccggacttcacctgagctacctcaggttgcctgtggctggagaaaggaatgtgctcatcaccagtgccctcccttacgtcaacaatgtcccccaccttgg

SEQ ID NO: 178719 - DNA, 75 bp, Homo sapiens
tgttctgctttcatggagttcacagaagagtcgaggagcagcttcatggagtttggccacaagatgttgttgacg

SEQ ID NO: 178720 - DNA, 123 bp, Homo sapiens
gaggagaccctctactacgtgaaggtgtacctggtgctcggtgacatcatcttctacgacctgaaggtaccgatatggccaattaattgaaataaacagccacagcctcttttctaagtggtt

SEQ ID NO: 178721 - DNA, 50 bp, Homo sapiens
cttggaaaacggagagactggggagaagttacctgtcctgctgccgattc

SEQ ID NO: 178722 - DNA, 50 bp, Homo sapiens
ctctgcctcggggacgaaagcagacaggtgatttggcttctgcacagtta

SEQ ID NO: 178723 - DNA, 74 bp, Homo sapiens
ttgccctgtctcctcgcagatgagctttcggaaaatgtgattgatcgaatgaaggaatcctctccatctggttc

SEQ ID NO: 178724 - DNA, 75 bp, Homo sapiens
ggcggtcacctggcacaccagcgcccgcaggatgcccaggtgcaatggatgagcttcatagtctggatccaagaa

SEQ ID NO: 178725 - DNA, 75 bp, Homo sapiens
ctttcctaagcttaattggagtgccccaagggtatggcccatctcctgtacgcttggagcgacctttggctacgt

SEQ ID NO: 178726 - DNA, 90 bp, Homo sapiens
agctttacaggagcgacttgacaatgtccctcacaccccttccagctacatcgaaacattggagctggagtgagccttccaggaattttg

SEQ ID NO: 178727 - DNA, 100 bp, Homo sapiens
aggtggagggcgtgttgtcgcaggtggacttcttgcaacaggttaacgtgtatggcgtgtgcgtgccaggttagaaccatcagagagccttgaggaaaac

SEQ ID NO: 178728 - DNA, 75 bp, Homo sapiens
acatttcttttgtgcaagatgagcctcaagtgcttctgcattacaacagttaaatctcacacagaaacagatgag

SEQ ID NO: 178729 - DNA, 75 bp, Homo sapiens
tattcgagtgaccgagaccgcggccgggaccgagggaactctgcgaccttcaagtcgtttgaggaccgagttggg

SEQ ID NO: 178730 - DNA, 88 bp, Homo sapiens
tcaaggaggccttccagctgtttgaccgaacaggtacggttcctggagcagcagaacaagatgctggagaccaagtggagcctcctgc

SEQ ID NO: 178731 - DNA, 101 bp, Homo sapiens
taacacaccggagacttttggggggaaactaggtcgatggtcggcggcgcccggatgggcagctgaggaaacttggatttaactggccagaagcaggtatt

SEQ ID NO: 178732 - DNA, 80 bp, Homo sapiens
gttcggcaccttatttctctgctgagtgtccagatcctccaaagacagatctggagagcctgacaaggagctgaatccta

SEQ ID NO: 178733 - DNA, 100 bp, Homo sapiens
tggcgaccggcaactactttggattcacccacagcggggcggcggcggcggcggctgcggcccaatatagtgccaacaatatgcccaagcaggtggaagt

SEQ ID NO: 178734 - DNA, 90 bp, Homo sapiens
gaaaagcactagcaacttcaaagccgacggcctgtccggcactgctgaagcatttaaatcaaacggtattgagatggattgggttatgaa

SEQ ID NO: 178735 - DNA, 100 bp, Homo sapiens
gtcggtggcggggctgaagaagcagttctacaaggcgagccaggtatgagtcgtcatccgaggactccagcacagcagagaacatctcagacaacgacag

SEQ ID NO: 178736 - DNA, 82 bp, Homo sapiens
caccgcggatccctcccgcttgtcaggaggcggccagcgggtgtcaagctagggatgcggtccattcccattgccactgctt

SEQ ID NO: 178737 - DNA, 82 bp, Homo sapiens
gctaaggacttcatgcccgccagcaaagcattttgaaagcgaagcagaagccgtagaatcagcggcgagcctgttgaaagaa

SEQ ID NO: 178738 - DNA, 74 bp, Homo sapiens
cagagaaagtcctcgctcgtcaccagcaagcttgcgggccatccagtccaatggatcagatgggcaagatgaga

SEQ ID NO: 178739 - DNA, 90 bp, Homo sapiens
tctcgaatcctctcctggtttagggaggggaaggagatgttgcagtaaagatcctaaaggttgtcgacccaaccccagagcaattccagg

SEQ ID NO: 178740 - DNA, 100 bp, Homo sapiens
tgcacgttcgggggtcattgttcttccctgcgataagccattatccaacatgaagatcctgactctcgggaagctgtcccggaacaaggatgaagtgaag

SEQ ID NO: 178741 - DNA, 50 bp, Homo sapiens
ctgttacttaaaggaacctaagagttactgtgacaacaacatactttggc

SEQ ID NO: 178742 - DNA, 75 bp, Homo sapiens
tggcccagcccgaactgactcagtcatcattgcagttctgaaagtgtgaagcaaaggaatgatgtgttttacctt

SEQ ID NO: 178743 - DNA, 99 bp, Homo sapiens
ggagctaagagatatctgcaatgatgtactgagtaatcaagtcagaggattatatgacttttatctgcctagagaagaactatggatctacaacatgga

SEQ ID NO: 178744 - DNA, 82 bp, Homo sapiens
gaggtgaagcctttggtggagaaaggggagattgttaaaggaaatgggctggcaggaagacagtgaaaatgatgaaacatgt

SEQ ID NO: 178745 - DNA, 83 bp, Homo sapiens
cctggcagggcagccagctggccaggggggcccgtctgggccagccacctggtgtccgttccagtgtctcgccccatcctcac

SEQ ID NO: 178746 - DNA, 82 bp, Homo sapiens
tatttctgatggagtgaaggatgaattctgtaggtggtgcatccaaaacagtctattgaagacaatgaagtatatttgccta

SEQ ID NO: 178747 - DNA, 98 bp, Homo sapiens
gcatgatcttggttcactgaaacctctgcctttctggttcaagcaattctcatgtttcagcctcccagcaaagaacagtctgaacttgatcaagattt

SEQ ID NO: 178748 - DNA, 100 bp, Homo sapiens
ttctgtatagccccacagcagtcttccccagcaccccaccagagctgtctgacagcaaagatgcttttaagaagacgtggaaccccaagttcaccctgcg

SEQ ID NO: 178749 - DNA, 82 bp, Homo sapiens
atatggcagatgtatgggtgaagatccaagatgttctacaggttcagccaggcccaccaccatgtccggtattctacccaga

SEQ ID NO: 178750 - DNA, 51 bp, Homo sapiens
gaagggccttactccttcacagatcgagggtctcgctgttggagttggatt

SEQ ID NO: 178751 - DNA, 75 bp, Homo sapiens
tcctgcaggctatggaacacactgaagttcttcagcttctcagccccccagaatgtgacagtgatgataacatgg

SEQ ID NO: 178752 - DNA, 101 bp, Homo sapiens
tgggcatgtaaggtgcgcggagggactgcaccttctccatcaggtgcagaaggaagaagagtgacaggaccaccctagattcacaggaaggggactacaca

SEQ ID NO: 178753 - DNA, 82 bp, Homo sapiens
ctctcgcctcgggtctcgggggccgctctgggatcccggccaccagcaattgtccgcttaaagcttttcaagccaggccaag

SEQ ID NO: 178754 - DNA, 96 bp, Homo sapiens
gtggcatagtacgctcgtggctcagtacaactcccacctcagtctcccgagtagcttggactacaggctggagcattggatttgctaaaggagctt

SEQ ID NO: 178755 - DNA, 80 bp, Homo sapiens
cggggttcagcgctcgggtgaggagctggtggcgtcggcaggttcgaggcgattcgaggcccatcttgacgattccaaga

SEQ ID NO: 178756 - DNA, 100 bp, Homo sapiens
gtccttccagtgtcctccccagcctcctgagactccgggctgaccttgctggcctcagccagtcgggaccggctgatccatgtgctgaacgtggagaaga

SEQ ID NO: 178757 - DNA, 51 bp, Homo sapiens
cgggtttgccgccagaacacaggctttgatgcggcctggaagaattgatag

SEQ ID NO: 178758 - DNA, 75 bp, Homo sapiens
cgacttcttactgtccagcatcctttagaagaatccaggtggacccccaaaagtacaagggcatatttaacggat

SEQ ID NO: 178759 - DNA, 83 bp, Homo sapiens
tgcactgctgcagtccaggctgaagacagagggctctgatctgtgcgacagactgctgatgcaaggaatcccctgggctcccg

SEQ ID NO: 178760 - DNA, 83 bp, Homo sapiens
aagcctgcacagccgcggcggcagcagcagtgagaggtatcagaagcatgtgcacacgtatcgcattctgcctgatggagaag

SEQ ID NO: 178761 - DNA, 109 bp, Homo sapiens
cgagaaagtcctctcgggagaagcagcgcctgttcccggggcagatccaggttcagttcgatcctttggtacagaagacagaccgacagatcgtccaataccacctcga

SEQ ID NO: 178762 - DNA, 100 bp, Homo sapiens
ccggggagccgttcttggtttcaggcccgcactcgacagccaccgccgcccccaacgtccatgcctgagccagctgcgggccgtccagcggctgtgccac

SEQ ID NO: 178763 - DNA, 98 bp, Homo sapiens
ttgcaaagagttatggatattctggtggggagatgaacccaacctagtgggtgtaatacatcatgaactgcaggcacgccaaccatactaacaggtgg

SEQ ID NO: 178764 - DNA, 90 bp, Homo sapiens
ccggcccgagatgaatcctgcggcagaagccgagttcaacatcctcctggccaccgactcctacaagtactatactggcaattgctggag

SEQ ID NO: 178765 - DNA, 74 bp, Homo sapiens
tctagccagccagctgaaacggactccatgcaccatatgaaggcggagtatggaaagttagagtggacctacct

SEQ ID NO: 178766 - DNA, 51 bp, Homo sapiens
gtggagatcaagcgcagcgatggtgctatacttggtagatcagaaactcag

SEQ ID NO: 178767 - DNA, 96 bp, Homo sapiens
agagaccccgcggctgggcgttcatctaccacgctttcgtctggtgctcaagaccgaatcggctgggcttttggcctaggattagaaaggctagcc

SEQ ID NO: 178768 - DNA, 100 bp, Homo sapiens
ggaaaacctttcaatgaactgtgggattatgaagtgccccgactcggcttgcaagcaggacctgctggcctacctgcaacgcatcgccctctactgccac

SEQ ID NO: 178769 - DNA, 82 bp, Homo sapiens
ggaactgcgcagcctcttcgagcgccgcggacgcgtcatcgagtgtgacgtggtgaaagttcaaatctgaacatcaatgatg

SEQ ID NO: 178770 - DNA, 82 bp, Homo sapiens
tgcgccgcaacgccgagcgcaccgacatctgcctgctcaaagaagcccttgttggatttttggactttctgaactggtcctg

SEQ ID NO: 178771 - DNA, 74 bp, Homo sapiens
caaggagctaaagcagcgtgcgttcagccctgggcatgtagagcgcatgaagtacaggacaataaagcttccta

SEQ ID NO: 178772 - DNA, 75 bp, Homo sapiens
ttttgctgtctcctcctaatacgttttccaagagataacttcaccaagatgtccagtgataggcaaaggtccgat

SEQ ID NO: 178773 - DNA, 100 bp, Homo sapiens
cagattcagagacattgccagtcagtcagagatccagctatcaaaggcaaatggcaacaggctgacaaaccaagaggatttgccagaggtcttgatcctg

SEQ ID NO: 178774 - DNA, 100 bp, Homo sapiens
tgctgagctccctactggctgagggcagagactctcccgcaattctgtggtgttcttggtcacacatttatggagtttctgaagggcagtggagattact

SEQ ID NO: 178775 - DNA, 98 bp, Homo sapiens
atggggatctggtggtcgtgaaactgcttcccgaggagcattggaaggtagtaacactctggtacagatctccagaagtattgctggggtcagctcgt

SEQ ID NO: 178776 - DNA, 102 bp, Homo sapiens
gagaagggagactacaaggacagcagcgactttggggcccgtcaccctcagatttgcttgtaaatgcatcacgaagaggcagcccagaatgaagaaagcaag

SEQ ID NO: 178777 - DNA, 74 bp, Homo sapiens
gcccggcgcttcggcccgggccgctcaggtgcaggatagagggaggaatcagcagcttggaaattcaagcacgt

SEQ ID NO: 178778 - DNA, 100 bp, Homo sapiens
cctggaatatgaagcaacatgagatggtggatgaacccacagatgctcccataatactctcagatagtgaagaagaagaaatgatcattttggaaccaga

SEQ ID NO: 178779 - DNA, 75 bp, Homo sapiens
ggaattccggtcagggtcaagtcgtgttctgatcactactgacttgttgagtctgtagaagaggcgacaccaggg

SEQ ID NO: 178780 - DNA, 101 bp, Homo sapiens
tagaggtgtacgagaagccggtacaggtgccctgcggacacgtattatcctcttgacttgaaccacagtgaaaccttcctgcaaactacaacatttcttcc

SEQ ID NO: 178781 - DNA, 75 bp, Homo sapiens
tgttgggcggccacagagagattggtgtttttgtgaggcagtgagacctaagaggagaaggcagagcccccccag

SEQ ID NO: 178782 - DNA, 89 bp, Homo sapiens
tttggctctgcgtgagtgtggtctacgagctgtttctcatctttatactcttccaggttttgtagtgcatccctgagcatgagcacaga

SEQ ID NO: 178783 - DNA, 82 bp, Homo sapiens
tctctgctcctctagaagatttcacagcaatgctggactgcagtgactatgttctagtttggtgccctggttgtcagatgtt

SEQ ID NO: 178784 - DNA, 73 bp, Homo sapiens
tggtcaaaagcatgtggtcacattacttcaggtaccgaaagcacagtaatcactggtgtcgatattgtcatga

SEQ ID NO: 178785 - DNA, 75 bp, Homo sapiens
gagcgcttccgcaccatcacctccacgtgctacctttttacccacacttaagtgacgcaaaatgcccttcaatgg

SEQ ID NO: 178786 - DNA, 101 bp, Homo sapiens
gatcacttcaagatatttaccatgcccagttcggggcacagtagtcaccaatgatcgttggggagctggtagcatctgtaagcatggtggcttctatacct

SEQ ID NO: 178787 - DNA, 83 bp, Homo sapiens
ctggagcttgacgcgctggagcttgagagaattttccagttcatatgaagaggtgatctctcaaataaatacgtcattacctg

SEQ ID NO: 178788 - DNA, 100 bp, Homo sapiens
tgcctgaccaccatggacaccaacgggaagcccctctacatcctcacttacgggggccgaaggccagagaccaggatttggctacggaggcagagcgtcc

SEQ ID NO: 178789 - DNA, 100 bp, Homo sapiens
actactatccattacgtggtgcagagtcaagtccagtgtaactgtgggtttgttggaatcaggatatagtggatctaggatccggcttccaacatgtggc

SEQ ID NO: 178790 - DNA, 100 bp, Homo sapiens
agtggtccgctttgccaagaagatggacaagatggtgcagaagaagaacgcgggacagagcagaatgggctgatatagatccggtgccgcagaatgatgg

SEQ ID NO: 178791 - DNA, 75 bp, Homo sapiens
agttcagttgagaaacaagggctcaatatggaggattacattggtgctggtgaagagaagcaaaaggaaggaggc

SEQ ID NO: 178792 - DNA, 100 bp, Homo sapiens
cttgacaaaatccagtccagccacaacttccagctggagagcgtcaacaagctgtaccaggacgaaaagagtttatgtggccgaggcagacaagtggaat

SEQ ID NO: 178793 - DNA, 100 bp, Homo sapiens
ttggagagaggagaacgaacatcttctggacctttgtccagaaatgggcaagttcatgaaacctgggaaggtggtgcttgtcctggctggacgctactcc

SEQ ID NO: 178794 - DNA, 82 bp, Homo sapiens
accagaaaccaacaggcagcacaggagttacagaatgtctgaaggggacagtgtgggagaatccgtccatgggaaaccttcg

SEQ ID NO: 178795 - DNA, 100 bp, Homo sapiens
gctggtggactggctgctggctcagagagacaagagagacacctccaacttcgacaaagagttcaccagacagcctgtggaactgacccccactgataaa

SEQ ID NO: 178796 - DNA, 100 bp, Homo sapiens
gaaggctttattggcagaaggtgtcattttaagacgagtaggcgaagcaaggactcatgccaatgaagatgtggaaagaatgttactaggaaacaagtgt

SEQ ID NO: 178797 - DNA, 98 bp, Homo sapiens
tgctggagatggtggagtccgtcaatctcacgccacctgggcaagatgtatagtgagatgatcttcgtcaatggcttcgtgcactgcgatccccaccc

SEQ ID NO: 178798 - DNA, 75 bp, Homo sapiens
ttgatcccctgacctgcattaccttgagtctcactctgttgtcacccaggctggagtccagtggcaggatctcaa

SEQ ID NO: 178799 - DNA, 98 bp, Homo sapiens
cggggcacgatgttgaacatgtggaaggtgcgcgagctggtggacaaagcaggtcctgctgtactagccaccaaagcagctgctggtactaagaaata

SEQ ID NO: 178800 - DNA, 50 bp, Homo sapiens
cggcggccgggccctcgagacggggacgttttctttttaaaagcggaagg

SEQ ID NO: 178801 - DNA, 82 bp, Homo sapiens
ctttcagcacctgatggcctatcaccagacaatgcagatcttcgtgaagactctgactggtaagaccatcaccctcgaggtt

SEQ ID NO: 178802 - DNA, 100 bp, Homo sapiens
ctcgcccccacctgtggactctgaccgcaaacaaggagagcctactgagcagcctgagtggaccaaagagaaccctgtacagtaagaaatatggtgtgga

SEQ ID NO: 178803 - DNA, 83 bp, Homo sapiens
tgctgctgaagtaatgcaatggtctcaatctctggaaaaacttcttgccaaccaaagatggcaccaagcattatgaaaagcct

SEQ ID NO: 178804 - DNA, 82 bp, Homo sapiens
agtcatcacctcctgggatcagatgtgcattgaggcagaagtcaattcatctggaaagactatctctgagtcagacttaaac

SEQ ID NO: 178805 - DNA, 90 bp, Homo sapiens
ctgcacgacacatggaaattggactaaattaccagaatgcaggggccacggacacagtcattccctctttaatggtgctctagatcaggc

SEQ ID NO: 178806 - DNA, 100 bp, Homo sapiens
attcgtctgattgatgcattcaaaggagtggtgatgcacacatttgggggttaccttacagaaagtggttatgtcaatctgcaaagagtacagatgatca

SEQ ID NO: 178807 - DNA, 75 bp, Homo sapiens
tcacacgacgtgcgctatgggtcagcctatcagcttatcactgtggtgatcgcagccgcgggaggtgggctcctg

SEQ ID NO: 178808 - DNA, 100 bp, Homo sapiens
agaagagaatgacctagcaaaagttgatgatcttccccctgatacagtttatgtaacttgatggaagaaaatggaattactccaaaaagacaagtgctca

SEQ ID NO: 178809 - DNA, 83 bp, Homo sapiens
gccgcgccgcacgagcaccagcctagagccaggtggccaagactaagcagcagattgaggagcagcgggtgcaggtgcaggtg

SEQ ID NO: 178810 - DNA, 90 bp, Homo sapiens
ggagcgaggctatcacaagctgcaccagcttctaaccgagcctccccatggccacccatggaccagtcggcattcacttcctcccttctg

SEQ ID NO: 178811 - DNA, 74 bp, Homo sapiens
ttagaccagacaactttgtatttgctgcagtctagtcatcagataaacatcagacaaatcccaatgaagaaaat

SEQ ID NO: 178812 - DNA, 101 bp, Homo sapiens
aggggcgcgcgcctgcccagctttgcagcccccgaacgcggcctcgcacaggaactttatattgctgttggaatatctggagccatccaacatttagctgg

SEQ ID NO: 178813 - DNA, 75 bp, Homo sapiens
gtgggtttcccaagcaaggttccttggaagaagatgtctgcagagtgatcagggccaaagcggtcagtgagaagg

SEQ ID NO: 178814 - DNA, 100 bp, Homo sapiens
ctcagaaccattagacacatcagtggagtccatgctacctgattgcccccgggtctcagcagacgcctgtggcctgtcggatgcggcccacatcgagagc

SEQ ID NO: 178815 - DNA, 50 bp, Homo sapiens
gcaccttgccagcaagatccgagtatgctattgcggcagcacctcccgag

SEQ ID NO: 178816 - DNA, 82 bp, Homo sapiens
atctggggcagatgatcgtcaagtgaagatctggcgcatgaatggccgagacgcatccagagctttcgtgaccggggactgt

SEQ ID NO: 178817 - DNA, 75 bp, Homo sapiens
ttttgaagagagatatgccaccagcatttattaagggcaattccaaaagtcttcagatttccaaaaggaaggact

SEQ ID NO: 178818 - DNA, 82 bp, Homo sapiens
ctgaagatctggaagacgcgctcctgcgccggagccttcacgtaaatgggtccagtcatgcctcccagtaagaagccagaaa

SEQ ID NO: 178819 - DNA, 143 bp, Homo sapiens
aagaaggtgcccactggggagtgagacagggatttctggaaggttctttgtctctgactgtgtgagcagcctcccgcgacgatgcccctcaacgttagcttcaccaacaggaactatgacctcgactacgactcggtgcagcc

SEQ ID NO: 178820 - DNA, 98 bp, Homo sapiens
ccgggagttacaccgccaccgccagatgaggagcgggaaggcctcctgcaccctggagaccgtgtgggaagacaagcacaagtatgaggaggccgagc

SEQ ID NO: 178821 - DNA, 75 bp, Homo sapiens
gttccatcatggcgtcaatgcaggaagcaaaatgtggattcagcaaacaaattctggaaatactaaatagtactg

SEQ ID NO: 178822 - DNA, 134 bp, Homo sapiens
aagcgtgccgggaagcgcttcgaaatcgcctgctacaaaaacaaggtcgtcggctggcggagcggcgtgattggaatacttttctgctacggttcaatgatttggacttgtgtgtatcagagaatgaaaccctc

SEQ ID NO: 178823 - DNA, 101 bp, Homo sapiens
atcataaaagcttcagctttggcatgtttaaaagttcccgaagcaaattcttcttggatggacacagttataagacagtgtgtgcagtggcctcagggatc

SEQ ID NO: 178824 - DNA, 100 bp, Homo sapiens
agacaccaggacagaaaagacagtgttctgctttcatggagttcacagaagagtcgaggagtcacatcgatcagacaacaacatggcaggaccccaggaa

SEQ ID NO: 178825 - DNA, 82 bp, Homo sapiens
tacgtgggagagctccgcggggagcagcaggaggcggtcgtgggaaagaaggtggaagagcgagctttttggaactgtgcac

SEQ ID NO: 178826 - DNA, 100 bp, Homo sapiens
ctggctctatttacaggaccagaacaaggacccagatgatgtggtaccagttggccaaagaagagcctggtgttggtgcatgtgctttggactagcattt

SEQ ID NO: 178827 - DNA, 125 bp, Homo sapiens
cacggccagagccctggatgtcatttggaaaaacactagagacagacggctggcagataatggattcatacccgattcacttctggaagatgtgatgaaagcattggaccttgtttcagatcctg

SEQ ID NO: 178828 - DNA, 100 bp, Homo sapiens
aagaaacgggccgcgaaccgcagtatcatgctggccaagaagatcatcattaaggacggaggcacgctgtatgcaggagctattcttgaagtttgtggat

SEQ ID NO: 178829 - DNA, 101 bp, Homo sapiens
tatcatgcttccagtctactgtaaagtccatggcagaagtccttgctaaaaaagaagagctagcagatcgtctagaaaaggccaatgaagaagccattgct

SEQ ID NO: 178830 - DNA, 88 bp, Homo sapiens
gaagatatgatacccacagtgggcttcaacatgaggaaggttgggggccgtcccgctcctaaggcaggaagatggtggccgcaaagaa

SEQ ID NO: 178831 - DNA, 100 bp, Homo sapiens
ttcctgataacgaggctgtggagcagcacagatctacagagttggattccaactggtcatggtttcagttgcgatgcatgcaagtcggaggaaacgctag

SEQ ID NO: 178832 - DNA, 90 bp, Homo sapiens
gaacaaggccaacacctatgcagatcaggatcctcatgaccagccaaagagaagaagaattaggaagcataaatcaaagaaaaaatttaa

SEQ ID NO: 178833 - DNA, 87 bp, Homo sapiens
ccgcaaacaaggagagcctactgagcagcctgagtgggaggaggcccagcctcgtgatgaggaatagcaaggagagaattcagctcc

SEQ ID NO: 178834 - DNA, 82 bp, Homo sapiens
gcagaacgtgagggtgtaacttacaaaaagctgataggaagatgtcttcaggaaatgctaaaattgggcaccctgcccccaa

SEQ ID NO: 178835 - DNA, 80 bp, Homo sapiens
ctcggattgaagatgaatatagaacccatcacacagtacaactagctttatcctgtggataaacgcagagtgaacgagtt

SEQ ID NO: 178836 - DNA, 82 bp, Homo sapiens
cgctcggtcctccacctgtccgctacgctcgccggggctgcggccgcccgaggaatgggcaaagaagtggggaatctgctac

SEQ ID NO: 178837 - DNA, 74 bp, Homo sapiens
gagatgttacccagtatcttggtgttgctgaagaggtggcaattttggaggtagccccggttatggaggaggaa

SEQ ID NO: 178838 - DNA, 100 bp, Homo sapiens
cgaggatctggctggacttccagagtacctgagcaagaccagcaagtacctcaccgactcggaatacacaggtcgatttggtcagacaacgccaccactt

SEQ ID NO: 178839 - DNA, 99 bp, Homo sapiens
cttcctccaagtgataatccagattttgatccagaagaggatgaacccacgcttgaggcctcttggcctcacatacagcccctcatatggaaaatttga

SEQ ID NO: 178840 - DNA, 98 bp, Homo sapiens
agcagcacccgagcaaaccccagcaagatgcggaggctgcctcggcggagcagaggaaccacacgctgatcatgtcactgtgtgcccagtattctgca

SEQ ID NO: 178841 - DNA, 100 bp, Homo sapiens
gatccagcaaggtcggcagagcaaggggcttacgcagaaggacctggccacggttgacttccccagaaatctggccaagtctgtaactgtggaatgaggc

SEQ ID NO: 178842 - DNA, 82 bp, Homo sapiens
tccggctcctcagagagcctcggctagtgcaatcgtgtacctgatgagaggaggtactccctgcccttaaagagcatctaca

SEQ ID NO: 178843 - DNA, 88 bp, Homo sapiens
tcacctacctttcgagactcagaaaccagagtgtgtttaacttctgtgctattccacagataaagagttctatctgtcttctacgcgg

SEQ ID NO: 178844 - DNA, 97 bp, Homo sapiens
ctccgagccccttcctgagaagatcccagctcgcaacgccctggtggtctccttcgcagccctggttgcgtactccttcgaggtgactggataccag

SEQ ID NO: 178845 - DNA, 100 bp, Homo sapiens
ccattgtgatcccaccttctgggcaaagaatgtagtcaatttagttccagtctcatcagattttccatgtcctggtggtggcagcagcctttgtccactt

SEQ ID NO: 178846 - DNA, 98 bp, Homo sapiens
aatcttacagctaacatgttgtacctggaaaacaatgcccagactcaatttagtgaggaagccagttgagggaagttctccatgaatgtacgtcacaa

SEQ ID NO: 178847 - DNA, 73 bp, Homo sapiens
ttgatgagctcaaggctggcaaaatcccaaaaccagggccaagatttacattggtgcagaagcatacagtgga

SEQ ID NO: 178848 - DNA, 100 bp, Homo sapiens
cttcgtctatttcatcacaaaactgtcccgggtgggaagaggaacagcctatgtgggcttccacggagatacatcagcccacagcaaggcgggctccagc

SEQ ID NO: 178849 - DNA, 88 bp, Homo sapiens
agaaccgcggggacagcagccggccagccggggggcactgcccgcccgggctctgagatctggttggagttggagggtgagagaaaat

SEQ ID NO: 178850 - DNA, 75 bp, Homo sapiens
ctgcatccggaactcctctaccaagtcggggaaggaaattgagaggctgactgagcgactagaagaaaaagagag

SEQ ID NO: 178851 - DNA, 133 bp, Homo sapiens
gggactggggcgccgaggcgtgcacatgctcgcccagccacccccaggacgccttctgcaactccgacatcgtaccaaaccctgctgcagctgcaattcctcgaacgcccctgagcccaagtcctatgaaaac

SEQ ID NO: 178852 - DNA, 87 bp, Homo sapiens
acgtggactacagtgacgccctcacggagaagcagtggctaagggagttgttcctttggccacatatatgcgaatctataagaaagg

SEQ ID NO: 178853 - DNA, 100 bp, Homo sapiens
tcagtctgtgcggcccgctgttgtctgcccgcacccgggcccgcaggccaggttttctgtctcaactggtctctgacaagcctctgactgaatgtatccg

SEQ ID NO: 178854 - DNA, 74 bp, Homo sapiens
ggagaagtgtccggggtagccccgttacaggcatttgcaagtaaaatcactggcatgttgttggaattatcccc

SEQ ID NO: 178855 - DNA, 100 bp, Homo sapiens
atcagatattacaaggactcgcatttattcacaaacacggaatgtttacccttgcggaagttgcatcacttaatgacattcagccaacttaccgaatcct

SEQ ID NO: 178856 - DNA, 80 bp, Homo sapiens
caaatctggcctgggggcccgagaagcttcctctcagaatgattacggacctgaagccaaagaacaagatgcgctagtgg

SEQ ID NO: 178857 - DNA, 78 bp, Homo sapiens
caccaccaacattcttggcattacgcaggccagcaactcccagctcaatgcaatggatcttgacattggtgccaagaa

SEQ ID NO: 178858 - DNA, 83 bp, Homo sapiens
gcgagcctggaggattgtcactccaacctcttttcgctgggagtggggaaggccagggccagattctgcagcgcttcccagag

SEQ ID NO: 178859 - DNA, 120 bp, Homo sapiens
tgcagcgggagctggacggcgagcgcgagcggcgcgagaaaatgtgaagttcatttccaatccgccctccatggtggcagcggggagcgtggtggccgcagtgcaaggcctgaacctgag

SEQ ID NO: 178860 - DNA, 123 bp, Homo sapiens
ataaagtcagccatgtgagcactgggggtggtgccagtttggagctcctggaaggataccatacttgcagagctccttcagatacataaagaacacattgtaggataccatgaacatgattct

SEQ ID NO: 178861 - DNA, 50 bp, Homo sapiens
ccgagaatcaaggcgttgagcctcaaggggtgaagctaagtagtcttctt

SEQ ID NO: 178862 - DNA, 76 bp, Homo sapiens
atcctgagaccaattccgacgtgtcaggggaagctgatggagaatcgagctctggatccagggactcgggactcct

SEQ ID NO: 178863 - DNA, 100 bp, Homo sapiens
taaccacttgaccttcattccagaagaaatccagtatctgagtaatttgcagtactttgctgtgaccaacaacaatgctcctaacagtattggctttgga

SEQ ID NO: 178864 - DNA, 87 bp, Homo sapiens
actggcccccttgagcctgtcccaagccctggtgccaggtgtccatccccgtgctgagtattctaccttgtaaatactgttatttgt

SEQ ID NO: 178865 - DNA, 144 bp, Homo sapiens
ctcatgtcttttcagacattcctgggataaacagtgtgaccgatgtcatatgctaggccactatacagatgtttacccagggttgatgataaccgctggccttattcattggattttaaatacattgaacataactgttcacat

SEQ ID NO: 178866 - DNA, 98 bp, Homo sapiens
cgggatcgtgaccgagaccgtgaccgagagcgtgaccgagagcgcgaatatcgtcatcgttagaagatacctcttctggctcagaagatgaaggctca

SEQ ID NO: 178867 - DNA, 96 bp, Homo sapiens
gaccttttttcatttccatttctaccttgtatgcctcaatttgctggatttaagcactgctgcactttatgagatctcacattcttgaaggtggca

SEQ ID NO: 178868 - DNA, 96 bp, Homo sapiens
cccggttccccggcccacagtgggggtgtgcaaacccgagagaactggggcaccagcggctgtcggtgacgagcctgctcgtctgccacggattgc

SEQ ID NO: 178869 - DNA, 100 bp, Homo sapiens
gcaccgattacatccctcgctcatccaatgattatacctcacaaatgtattctgcaaagtacctggactatgccagagtccccaatagcaatccccctga

SEQ ID NO: 178870 - DNA, 98 bp, Homo sapiens
aatagattgcctacccccattgcaggactggatttgcctcaaagggcactgcaaaaattgaacagaggaatcccaaggaagctgcctgaatttgcctg

SEQ ID NO: 178871 - DNA, 75 bp, Homo sapiens
gccgcacttacctatgaggccagcaagcggaggtgctgggagcgagttggctgcggaagaccctgaagaccctgc

SEQ ID NO: 178872 - DNA, 96 bp, Homo sapiens
ctggagtgaaactgcttgtgttcgatttctgataccattcataactggctgtgtgatctcaagcactggtgaggtggattgatgatgaatcttctg

SEQ ID NO: 178873 - DNA, 101 bp, Homo sapiens
tgtgagggaaagaaaacaatttctcctgctctgcagcttctgttcagatgatatcatcaagttgaatcgaaaggaagggaagaagcagaattttccaagac

SEQ ID NO: 178874 - DNA, 100 bp, Homo sapiens
gccaatcccaggaggaaaaacggcttgcttccggcgtcatggctcaaagggccttcccgaatccttatgctgattataacaaatccctggccgaaggcta

SEQ ID NO: 178875 - DNA, 74 bp, Homo sapiens
acgaagacagtccctggatcaccgacagcacagacagaatccctgctaccactcttcacctgaaagactatgaa

SEQ ID NO: 178876 - DNA, 100 bp, Homo sapiens
ccagcagatgcaggaaaatttcgatattgaagtgtcaaaatccatagatggaaaagatggttcaaaccttgtactactcagctgatcacaagctgcttga

SEQ ID NO: 178877 - DNA, 50 bp, Homo sapiens
gccgctgccaccggcgcgcccgagtttttcttcccccagtccctcagctg

SEQ ID NO: 178878 - DNA, 100 bp, Homo sapiens
ctttcgcttttttacctgccaatcaaactgctacaagacaacaccctgatctggcatggacatatctctcgtggaagaggaagaccaacacatgaaattg

SEQ ID NO: 178879 - DNA, 100 bp, Homo sapiens
ccttggtcccagagtcatcatgaaggccatggttgcttgttatccgggcaatggaacgggttatgtacgtcatgttgataatccaaatggagatggaaga

SEQ ID NO: 178880 - DNA, 133 bp, Homo sapiens
tggagctggtgtggggcaccaagagcagccccggtctctcggacaccattttctgccgctggacgcaagcatgaacaggctgaacactttgccacgaggcttcggctccctgccagctcttgaggttctggac

SEQ ID NO: 178881 - DNA, 82 bp, Homo sapiens
cgggcctgcaccatgagcgtcccggccttcatcgacatcagtgaagaagatcaggttgtgaccgagattcccgacgagagag

SEQ ID NO: 178882 - DNA, 100 bp, Homo sapiens
caatgggcctttccagcccgtggtccttctccatattcgagccggttgttatgacaatggaaaacactatcagataaatcaacagtgggagcggacctac

SEQ ID NO: 178883 - DNA, 100 bp, Homo sapiens
cctgggcggatgtcagaccagagaagagcacagaatgtaccagagagggaagaaggagaaagggccaacccctgaagaagcaatacagaaactgaaggag

SEQ ID NO: 178884 - DNA, 88 bp, Homo sapiens
gttgtccacccaagatggagttcctcctggggaacccgttcagcacaccagtggggcagtgcctcgacggttgatgatgaagcgccgg

SEQ ID NO: 178885 - DNA, 75 bp, Homo sapiens
tacaattgagtacgtgatacagcttaagagttggacagtggaggaccttcagaagaggctcttggccctggaccc

SEQ ID NO: 178886 - DNA, 82 bp, Homo sapiens
ctcaatatctgtcttcggtggactccttcggcagtccacccaccgccgccgcctcccagaaccagacgtcctgggtcctctc

SEQ ID NO: 178887 - DNA, 75 bp, Homo sapiens
aaaatgaatgccaaatgggacacgacttaattcagtgcacaaatgagatgaatgtgaacatcccacagttggcag

SEQ ID NO: 178888 - DNA, 78 bp, Homo sapiens
ccctaacagcaggaaggttgtaaacctctgtagaggagcaggatgcaaccgacaggctgtggccggacagctgctgcc

SEQ ID NO: 178889 - DNA, 80 bp, Homo sapiens
cgcgaagctggccaaagcctgcccagacggctcacctgtgcgggatggaacaaaaggaaagtggagaatgaggacatgaa

SEQ ID NO: 178890 - DNA, 90 bp, Homo sapiens
ccgcgagccgggccctccgcgcggtccatcgcccactggacgccgcccgcggccggaccgttttagttactatccagcagaaaacttgat

SEQ ID NO: 178891 - DNA, 83 bp, Homo sapiens
ggaagggatgtcgtctcagcagtgctcgggcgcagggagtgcatccgccccaacccttttccccctcgtctcctgtgagaatt

SEQ ID NO: 178892 - DNA, 76 bp, Homo sapiens
tctagaaatccaggcaggcatctatcttgaaggtcgtttatacgcaatgcagactggaatgaagatcgatagtaaa

SEQ ID NO: 178893 - DNA, 83 bp, Homo sapiens
taattcaaggtcacacaatgtcggggatggacctccagatttccttactggtggacccccaaaagtacaagggcatatttaac

SEQ ID NO: 178894 - DNA, 83 bp, Homo sapiens
cgccagcgtcgggtgggctttcgcccgcggctcctgagggatcggtctcagccgcgcgggcactgaacttcccagccctgccg

SEQ ID NO: 178895 - DNA, 89 bp, Homo sapiens
gtgagcctcagcagctccagccagcggacccgacggctgagagggggggccctcagcctcttggccttgaacgggctgttcatcttgat

SEQ ID NO: 178896 - DNA, 74 bp, Homo sapiens
gtccagagctgaggactgcctgtttgcagccagagcagctgagttccagataaaaactgtcagacccggcctgt

SEQ ID NO: 178897 - DNA, 50 bp, Homo sapiens
aaaaatcaccagttactttaatgaaaaagtgggagatagatccatctgag

SEQ ID NO: 178898 - DNA, 49 bp, Homo sapiens
gagttaaaactgtgaaatactttaaagtatggtggtgatattacccgaa

SEQ ID NO: 178899 - DNA, 80 bp, Homo sapiens
ccgacgcgctcatctgctggagcccgctgtccctttccccccaacacatcgcttgacatctgaagaagtatttgatttgg

SEQ ID NO: 178900 - DNA, 100 bp, Homo sapiens
cctactgggtcgtcttctcggcgacaactgccctgctcttcatcccagtacgaggatgtcgtccaggaaagattgtgcagatgactgaagcagaagttcg

SEQ ID NO: 178901 - DNA, 112 bp, Homo sapiens
tggagagccagaaaaggatccagaactggagtggaaggtttgggatgaaaatcttgcaaaatcggcagaggcttgggcggctacttgcatttgggaccatggaccttcttac

SEQ ID NO: 178902 - DNA, 100 bp, Homo sapiens
gtgcggcctcaccatacaggaacagggcagacgttagcgtgagtgatcactctcaatcccggtgatgtcttggcattgcccattttcaagcaggaagatt

SEQ ID NO: 178903 - DNA, 75 bp, Homo sapiens
gtcacatgagccagtacccgatacctctgtggagaaaggtacaggtttgcagattccgccagcagcacagcaagc

SEQ ID NO: 178904 - DNA, 100 bp, Homo sapiens
tgtaagcacagtcttcacagtattgcaggaagttggtgaaccatctaaagaagagaaggctgtggccaagtatcttcgattcaactgtccaacaaagtcc

SEQ ID NO: 178905 - DNA, 75 bp, Homo sapiens
ctgcggacgaggccgggacttggccgagcggatcctaataaggggaaaatgaacccagacctggactcagaggcg

SEQ ID NO: 178906 - DNA, 82 bp, Homo sapiens
gcgagcctccttcgccgcgccccacttgctcgtgcactttacacacatgagtacgagctcaactggaggcagtcctgtgcgg

SEQ ID NO: 178907 - DNA, 82 bp, Homo sapiens
gcaagcagtttgtgaccggagggaagaagatccgtgattctaactgcaactatgaggcctttatgaacattattaaattgag

SEQ ID NO: 178908 - DNA, 75 bp, Homo sapiens
tgtaagcgcagaaagcaggcgaacccgcggcgcaataacggtacagcaggtacagactgtgcagcaggtacaaca

SEQ ID NO: 178909 - DNA, 75 bp, Homo sapiens
cggatgagtacgataccgaagcgggctgtgtgccccttctccacccagagcataagcagtactataatggatgta

SEQ ID NO: 178910 - DNA, 100 bp, Homo sapiens
gagcagagccctgcgatactattatgacaaggaattctcacactcaagaaagcaaatgaacttcttctgagcacaggcatgcccggcagttttctcatcc

SEQ ID NO: 178911 - DNA, 90 bp, Homo sapiens
gcgccacatgttcgtctggggcggctacaagatcaccctgagactataatggaagaagtgaaaataaagccacctaaacagcaacagacg

SEQ ID NO: 178912 - DNA, 74 bp, Homo sapiens
ggcaacgtgtaatcagaaggcacagattagaggaaggaagaggcactgtacaaaacgagttaaacagacatggc

SEQ ID NO: 178913 - DNA, 75 bp, Homo sapiens
gaagatatttcctggcctctctccagtgctgcatttgatgccagaaggcaaacacaacctgcatttgcgttttgc

SEQ ID NO: 178914 - DNA, 50 bp, Homo sapiens
caatgtcaagagtctgctgaagcaggaatgatgagaagacagcagctgat

SEQ ID NO: 178915 - DNA, 75 bp, Homo sapiens
aaagaagatgcctcgaactaaacaaattcatcccagaaatctaagagattacatgaagcagatgacatttgaagc

SEQ ID NO: 178916 - DNA, 100 bp, Homo sapiens
cagctgcagaagtgaaccggcaaatgctgcaggaactggtgaacgcaggatgcgaccaggttgcagtccatgagctgggaaaggaggcagtgctcttggg

SEQ ID NO: 178917 - DNA, 83 bp, Homo sapiens
gatgccaatgccgctggtgcttattatcaggtgatacatgcctgaggaacccactccacaaacagcaatcactccctctccgg

SEQ ID NO: 178918 - DNA, 100 bp, Homo sapiens
atgccgctcctaagcctgcacagccgcggcggcagcagcagtgagagaaaatgaaactgaagccgtggtcacgtgacaggacatgtagtatatagcaggc

SEQ ID NO: 178919 - DNA, 83 bp, Homo sapiens
ggcatttccgagagaagctgcaggctgccaatgcggaggacatcaaggaccctcgagatgcccctcctccaactcgtgctgaa

SEQ ID NO: 178920 - DNA, 74 bp, Homo sapiens
gggacgaactgcatctgccgcgtgcccaaaagcaagctggaagtggtactccaaagattcaggtttactcacgt

SEQ ID NO: 178921 - DNA, 90 bp, Homo sapiens
gactgtgacaacgaccacgtctccaaaatgagtcgcatcttcaacccccatctgggcggcgaagaggacccgcaggctgcaaggagcaac

SEQ ID NO: 178922 - DNA, 99 bp, Homo sapiens
cacgttggagggcttcgcgtctgcttcggagaccgtaagggaccgcctctttttcgtcatggaatatgtaaatggtggagacctcatgtttcagattca

SEQ ID NO: 178923 - DNA, 100 bp, Homo sapiens
gagctgtgcagccgcgaggaggcgcgggaggtgttcgagaacgaccccgagacgatgaggacggggacttggttgccttttccagtgacgaggaattgac

SEQ ID NO: 178924 - DNA, 76 bp, Homo sapiens
tggcacaagactcagtgctgggcctggcatgcaacaggtccttggagctgcagaggctggagacagagttgggcca

SEQ ID NO: 178925 - DNA, 100 bp, Homo sapiens
gacgaccaggagaagctgcccttcaccgttgtgcatgaaagagagattcctctgaaataacccggcagtgggcaggtgtttgtgacttcagagaaccaac

SEQ ID NO: 178926 - DNA, 100 bp, Homo sapiens
tgagggtccggcccatgaatcgcagtactatactggcaattgctggagaagattttgcaattgttgcttctgatactcgattgagtgaagggttttcaat

SEQ ID NO: 178927 - DNA, 75 bp, Homo sapiens
gaaccagcagcgtgggaggcgttttaggtgccctttaaggaggcagaattacgattatgcagtgtatctactaac

SEQ ID NO: 178928 - DNA, 98 bp, Homo sapiens
atgaagagggaggcctgagaggctgctgttctaactcgctcccaggtgccagaaccctgtggagcatcatgaactgggaagagtagctgagccccaga

SEQ ID NO: 178929 - DNA, 98 bp, Homo sapiens
attgcagggagtatcaaatatgagaaagctaggccatctgaataactttactaaggcaatgaatcgctccctggctaatgtgattcttggaggctatg

SEQ ID NO: 178930 - DNA, 83 bp, Homo sapiens
gcctcttgacgtgggtcttaaacacctacacaagacaatgcagatcttcgtgaagactctgactggtaagaccatcaccctcg

SEQ ID NO: 178931 - DNA, 90 bp, Homo sapiens
gcgtgaggagtgtgagctcatgctacagtccaaaccaggttgcagagaaggtggcctccagaatcgccgagggcttcagcgacactgcgc

SEQ ID NO: 178932 - DNA, 74 bp, Homo sapiens
tccttccctcctgccccgtccatggctgtgggccctggccaacgtcaacattgggagcctcatctgcaatgtag

SEQ ID NO: 178933 - DNA, 51 bp, Homo sapiens
cttgcacttcggtatgcagggaggcagatgaagacttccggggcaggcgtc

SEQ ID NO: 178934 - DNA, 101 bp, Homo sapiens
cagcaggcagatgatgcagaggagcgagctgagcgcctccagcgagaagttgagggagaaaggcgggcccgggaacagtagagacagagtttcaccatgtt

SEQ ID NO: 178935 - DNA, 82 bp, Homo sapiens
gaagatcatcattaaggacggaggcacgcaaaatgatgcttcaacacccaggccaggtctctgcctcggaagtgagtgcttc

SEQ ID NO: 178936 - DNA, 50 bp, Homo sapiens
gcagaggcggcggctggaggaggaacggaaaacagttcttccttcaaagc

SEQ ID NO: 178937 - DNA, 75 bp, Homo sapiens
cgtgacctgccctggcgtccggctgaggacggccatagtcatgcctgtaggagagctcactcctctacttgaaaa

SEQ ID NO: 178938 - DNA, 96 bp, Homo sapiens
atgacatctacctccatcaggaccccagatgtctgacagccctgtgtgacaccaagataagtaacatcgttctgaagtctccagcctgagttcaga

SEQ ID NO: 178939 - DNA, 85 bp, Homo sapiens
acgccagccatcaccctcgagagcccggacatcaagtacccgctgcggctcatcgaccgggagggccatgtgtccttcaagccca

SEQ ID NO: 178940 - DNA, 74 bp, Homo sapiens
atacagtggagctacaacttctgaagggtaatggagtcggttagacaactacaaatggagagagataaatatgc

SEQ ID NO: 178941 - DNA, 75 bp, Homo sapiens
tagaccggtttttagtccattgactatgcagcctaatgaattgttaagactcgaatcagaaatggagttcattgt

SEQ ID NO: 178942 - DNA, 101 bp, Homo sapiens
gatagaatgaagaccacaataaaagagacctctacttagctcagcaattcttaccttacctctgtgagtgaaagccttcagagggaagctgctaagaagca

SEQ ID NO: 178943 - DNA, 83 bp, Homo sapiens
cggcttcctggcctgggcgctccggtggcggcggagagctggaagtcgagtgtgctactcaactcaggagatttggagacaaa

SEQ ID NO: 178944 - DNA, 75 bp, Homo sapiens
tcagtggtgttaaggattccaacaacaattccgatggcaaagccgttgccaagggttacgactcactgattaaaa

SEQ ID NO: 178945 - DNA, 96 bp, Homo sapiens
atcctcactctgagtacggtctcacagacaacgttgagctgcaaatcagaaggagcccatgaatcttaattttaaagtgaaagaggagcctaagga

SEQ ID NO: 178946 - DNA, 90 bp, Homo sapiens
caaaatcccaggcaagaccagaaggggggctttcgcagctccttccgcaagctctttaaaaagaagcagccttaagtgccttgaaacaat

SEQ ID NO: 178947 - DNA, 100 bp, Homo sapiens
gacatggatattaatcggcttagggcagttgttttcagagacataacctgcacatcatctggcactggataatcacagaggagcatcccatcagaatgat

SEQ ID NO: 178948 - DNA, 90 bp, Homo sapiens
gtttatcctataagacttcatccactgcataaaagagaggccaaagagccagagcaacagggcctgccttaagtgtgaaagtaatgactg

SEQ ID NO: 178949 - DNA, 90 bp, Homo sapiens
tctctacggccagtctgtagaggatgattattgtatttcgccgtcaacaggatgtgatcttcgtggtggaaagctaaattttaaaaccac

SEQ ID NO: 178950 - DNA, 110 bp, Homo sapiens
ctagaaacactctctattcgaactctcatgaggttatgagaagacagatgatgtttcagagaagacctcactggctgaccaggaggaagtaaggactattttcatcaacc

SEQ ID NO: 178951 - DNA, 100 bp, Homo sapiens
catggacaagagctattgatagaaggcaacgtgttggaccttccggagcttctcagaagacagagggttttcttttgaggtaaatttgatagtacatttt

SEQ ID NO: 178952 - DNA, 80 bp, Homo sapiens
atcctttatcctggtcatcttctatttccaaagattctttctactaatccagatacttgttgaagtgctgactagtttct

SEQ ID NO: 178953 - DNA, 82 bp, Homo sapiens
gtcagtccgccgctcaccccgcggccgcaccttcccgccttctcagcgccgtgccgtccctgcagtgacaccgaggtgctcc

SEQ ID NO: 178954 - DNA, 73 bp, Homo sapiens
cccggagaagcaggagccctactcggcagatgaaggatttgggggcagagcacttggcaggtcatgaaggggt

SEQ ID NO: 178955 - DNA, 74 bp, Homo sapiens
acggagccagggctgtagcagagaggctagtccatctaggctttcagtggagcagcccgacggccatggaggct

SEQ ID NO: 178956 - DNA, 75 bp, Homo sapiens
ccagcacgtcatctcccgttctccagactttgccagagttcaagctgaagaagatgtggaaaagtcccaatggaa

SEQ ID NO: 178957 - DNA, 51 bp, Homo sapiens
acgggcttcatgctccagttctacagctcctgaaatacccactattgatca

SEQ ID NO: 178958 - DNA, 50 bp, Homo sapiens
cgagggcagcggaggggcgacaaatttaattggttggggtcagataagaa

SEQ ID NO: 178959 - DNA, 100 bp, Homo sapiens
tttcccagtcacgtgcttccggaacccgggttcccagacacagacccctctcaggtccagggtggcgcgtggctgctgagcccccgcctgtgcgacgccc

SEQ ID NO: 178960 - DNA, 123 bp, Homo sapiens
aaaaaacagcagatggctcgagaatacagagagaaaattgagacggagctaagagatatctgcaatgatgtactggagtctccccaggacagtgctatcacccgggatattaaccgaacattc

SEQ ID NO: 178961 - DNA, 82 bp, Homo sapiens
gggaaccctggtcaccgtctcctcagtcgtccctcatggaccttgctgacgtcttcacggccccagctcctgccccgaccac

SEQ ID NO: 178962 - DNA, 76 bp, Homo sapiens
gcaagatgcattattattagaaagatggatcttggagccagttcctcgacagtcatgtaatgtttgcagaaataaa

SEQ ID NO: 178963 - DNA, 83 bp, Homo sapiens
cgccccctccggcgtgttcatgcccccgggggggggctgtcggggggctgttaggtgcctggatgacaagtggacagtttaag

SEQ ID NO: 178964 - DNA, 100 bp, Homo sapiens
gatgaaacctgctgacagtgagaagaacaatggaagttcatcagcagaggaaatggtcactctcttggttcaggcgggcctctttgacactgccatatca

SEQ ID NO: 178965 - DNA, 75 bp, Homo sapiens
agcaaatcgagaaaaacctcagcgacctgatcgacctggcatctccttggaaacaatgccatctttgaatgtgag

SEQ ID NO: 178966 - DNA, 47 bp, Homo sapiens
atgctttaatacagaaccagcatattaaatctcttgatgaacagtgt

SEQ ID NO: 178967 - DNA, 100 bp, Homo sapiens
aagttttgtgcagattgccagtctaaagattgatatcagtaaatgccattatttagtggatttggacaccatgagagaaacaccccgggagccaaaatat

SEQ ID NO: 178968 - DNA, 97 bp, Homo sapiens
agtcttcccgcgtccgccgattcctcctccttggtcgccgcgtccttggctggcgtgagaactacgatgacccgcacaaaacccctgcctccccagt

SEQ ID NO: 178969 - DNA, 100 bp, Homo sapiens
aggtcgtggaggtggccgtggaggcagaggtggcatggggcttcacaggctgctcaagaagccgagatcaatgccagaaaagccaaaaactctgttacta

SEQ ID NO: 178970 - DNA, 75 bp, Homo sapiens
ggccgccccgttccccgagctgtgcagagtcgacttcaatgttcctatgaagaacaaccagataacaaacaacca

SEQ ID NO: 178971 - DNA, 75 bp, Homo sapiens
tgctgtctctgtatatgttctgtgaggaagctgcagtaaaggaagatgaagaagaagtttcagataagggcagtg

SEQ ID NO: 178972 - DNA, 101 bp, Homo sapiens
agcattacacgatgcacttaatgaccctaaaaatggcgattctgcaaccaagcacctgaaacagcagacgccacaggtcatcatctggatcatcccattct

SEQ ID NO: 178973 - DNA, 75 bp, Homo sapiens
cccgcacggaccctctacttcaatttagtacctcaagacaaactcttatgtggattccagattcttttttttcca

SEQ ID NO: 178974 - DNA, 75 bp, Homo sapiens
ggtggaggactacctggcaagtggttatcaggtttcaggctgtaaggaagaagtttgtgacagaattaaaagaac

SEQ ID NO: 178975 - DNA, 90 bp, Homo sapiens
tcagatctggagcatcggctgcaggggtcagtgatggagctgcttcaggtcctgggaactccaacaagggagcaaatcagagaaatgaac

SEQ ID NO: 178976 - DNA, 100 bp, Homo sapiens
acttgggcttcgcagtcctctcacctccataccccggatttggagaacatggctctctatgctgacgtcggtggaaaacaattccctgtcactcgaggcc

SEQ ID NO: 178977 - DNA, 82 bp, Homo sapiens
ggagagggggcgctgagctgttgggcttcctgcctgacacagctcacttcaagaagtgcacaatgtcagaacgtggaattaa

SEQ ID NO: 178978 - DNA, 98 bp, Homo sapiens
ggcgctggccgagagccgcggctccgtgtttctggaaagtgacagcaggccttttccctcagaggagaccacagagaatgacgatgacgtctaccgca

SEQ ID NO: 178979 - DNA, 98 bp, Homo sapiens
tgtgaactaaggccccctgcccccttttcctggtgcatgtgaagttatcaaaaacagatgagaagcccaaggtcaaccccaaactctacatgtgtgtg

SEQ ID NO: 178980 - DNA, 82 bp, Homo sapiens
cggagactgggcggccggccgacccttcctgtcgctgacggcgactgcgggaggccagctgtttgcagacaaggtcccaaag

SEQ ID NO: 178981 - DNA, 74 bp, Homo sapiens
ctctcccaggggctgtctctacctcaaagactggcacttgtgcagtacatccagcagtggtcattcgacaacga

SEQ ID NO: 178982 - DNA, 82 bp, Homo sapiens
tctgagggagggtccgagccagccgctgttttgccggaggagcccctcaggccgtgactctcctattccatctgtttcttcg

SEQ ID NO: 178983 - DNA, 83 bp, Homo sapiens
ctctccacgacctcggtcgagcatgttcaccagggcccaggtgtgatgaatgcagactctgctaccattttggctgtttggat

SEQ ID NO: 178984 - DNA, 98 bp, Homo sapiens
ccccccttgctcgggatggtgccacaggaggctgtgcgggccccgctccgcttcgaatgggaagctgcacagtgggatgaagacgtacgggtgcgagc

SEQ ID NO: 178985 - DNA, 98 bp, Homo sapiens
gaggagttccgcccctttctggcaaagatgagggggattcttaagaattaaacaaccaccatgtcgagcaaaaaggcaaagaccaagaccaccaagaa

SEQ ID NO: 178986 - DNA, 100 bp, Homo sapiens
gctctcttaagactcctggtattaccaacataaagaggggcatacaaacttgcctgattccagggatgtatggataggggatgagcgaggaggccattct

SEQ ID NO: 178987 - DNA, 75 bp, Homo sapiens
aacgaacagcctgaaaaatccccctccgtgctaactgttccaggtgatgatgaacagtctacacagatggctgca

SEQ ID NO: 178988 - DNA, 98 bp, Homo sapiens
agctgtggaaaccgaaatgagactccatcggacccagtcataattgacagattttaccagattcggaagcattccaagatgtgcaaggaaagagacat

SEQ ID NO: 178989 - DNA, 74 bp, Homo sapiens
gaaactgtacattgaagcagaggttaatttggagtggcccctggagtcagtttcctacaccatccgaggcccca

SEQ ID NO: 178990 - DNA, 100 bp, Homo sapiens
ctcgcacttctgcgcccattggagcttcggagatccctgcggtcccgcgggacggcgcggcagcagctgacctcgcagagcatgaataatctttcattta

SEQ ID NO: 178991 - DNA, 75 bp, Homo sapiens
cctggccggggcgcagttcggaggttcagatgtgccggtgacttcagcgccagtcaccgcgttctaccgcggctg

SEQ ID NO: 178992 - DNA, 75 bp, Homo sapiens
cagggtgtgatgccgtgggagccacctgatatctaagagacctcggtccacagaactcgaccctggaagagagag

SEQ ID NO: 178993 - DNA, 75 bp, Homo sapiens
aacagttaatcctcaatttaagcctgatctaacccctagaaacagttccacttacttacatgatcatttcgagag

SEQ ID NO: 178994 - DNA, 96 bp, Homo sapiens
ccccgcagggcgatggacggccgaaccccgcgcccgcaggacgccccagccaggatgttcacggaagaccagggtgtagatgacaggctgctctat

SEQ ID NO: 178995 - DNA, 78 bp, Homo sapiens
ggaggcagggggacgacaaggagggcatgatcaacctcgtcatgtcctacgcgcacacaccagggcgcctcgggtctt

SEQ ID NO: 178996 - DNA, 75 bp, Homo sapiens
attttttgagtgtaaaagatcagtggtggtgttcccactgatgaagagcaggcgactgggttggagagggagatc

SEQ ID NO: 178997 - DNA, 100 bp, Homo sapiens
ctgttcgcagctgcggcagtgaacgaaatctcacaaaactgtcccttatcttcagtcacatgctggcagaaatcaaagcaatctttcccaatggtcaatt

SEQ ID NO: 178998 - DNA, 98 bp, Homo sapiens
ggcactcgttgctcaggatcatgcagagttcagctatgttctcaatgggatactcaacttgattccatcaaccagagccctatgagtttgtctctctg

SEQ ID NO: 178999 - DNA, 51 bp, Homo sapiens
gcagtgcggcgggttacggcctggtcagctctggattaatcgaattacagc

SEQ ID NO: 179000 - DNA, 75 bp, Homo sapiens
ctttgggcgtcccattgccatgcacaagctccgggtggataaggcagctgctgcagcagcggcactacaagccaa

SEQ ID NO: 179001 - DNA, 50 bp, Homo sapiens
gaggaaaacaacttcgagggcagatctcaggcatgctggaacatgaaacg

SEQ ID NO: 179002 - DNA, 100 bp, Homo sapiens
cggcacccatggttgcgttcggtcggccttggccggctggctcctgcttggaaacttgctgggtggtgtctgcgtgtggtttcttcaagagaaataagaa

SEQ ID NO: 179003 - DNA, 75 bp, Homo sapiens
caagtgttggcggatggaagggaggagactcctgaccctcagaatgatcattgcttttgtcctggaaggaaaaag

SEQ ID NO: 179004 - DNA, 100 bp, Homo sapiens
tctgttctgcgtggctgtcgggcggcgtttggtcccgggagcctcgccggcttacaaaacactacacagcaaaataatgatctgctagactgctaacccg

SEQ ID NO: 179005 - DNA, 75 bp, Homo sapiens
aaataagagctgggcaaagcattctgtgaattggctgactccacttctatggaccacatggtgacaatgcatgat

SEQ ID NO: 179006 - DNA, 83 bp, Homo sapiens
gaggatgagctggaggaggggacaatgcagatcttcgtgaagactctgactggtaagaccatcaccctcgaggttgagcccag

SEQ ID NO: 179007 - DNA, 75 bp, Homo sapiens
agtgcccgctttgttcagctgcagcatggagagatagataaacgggcttatgcatctggatgtgacattgtaata

SEQ ID NO: 179008 - DNA, 74 bp, Homo sapiens
ccagacaccggagactgggaaatgagggaagtggaatcccgattgcttgatgattgatggactggtttctcagt

SEQ ID NO: 179009 - DNA, 100 bp, Homo sapiens
agacagagcgtgactatgtgcgggaccttggctatgtggttgaggtattctctactgccgctgatggtcaaacgcaagtggaaattaaagtgtgtcaggg

SEQ ID NO: 179010 - DNA, 147 bp, Homo sapiens
ggccggaccgaggccgcaagcagcgccgcggggtgtggggcggacccaggagatgaaatgacaacgtcaaccctccagggatcccaacggcttcaatgactggaccttctccactgtgcgatgctggggggagagagcccgagggac

SEQ ID NO: 179011 - DNA, 137 bp, Homo sapiens
agataaagcctaaatgtagcatatatcctaaaggagatggaagtgatgtaccatcatgggtagcctttgataaacaggaatgaatctgaagtctgctgcagtaaaacacagaaggctttaaaatgttttcttgcata

SEQ ID NO: 179012 - DNA, 100 bp, Homo sapiens
tcttttgccaagaatctggttatgatacaatcttgcgtgtcctgggctctaatgtcagagaatttctacaggatgttttagaagaatgtatgtctcttcc

SEQ ID NO: 179013 - DNA, 83 bp, Homo sapiens
cgtcatgttcttcgcgccctggcatcagtgtttttctgaccgaagttctcatttcctgacaatggaaatggaacaagaaaaaa

SEQ ID NO: 179014 - DNA, 96 bp, Homo sapiens
tcttgtcctggcattgcatccacaggaggggcaggaaattctttgaaggctggacaccgccccccaaatcctgccttctggtgggtcaatggcaca

SEQ ID NO: 179015 - DNA, 75 bp, Homo sapiens
aagcagaagccctggcatctaatgccacagtggagctatccttggacagcacacaaaataatcagaagaaggtgc

SEQ ID NO: 179016 - DNA, 100 bp, Homo sapiens
gagagggagccgcagctgatgtcaggtgtcagcagttgagtctttggagggccccctgctccaggtggaaggactgagtgaccttcgactagagcttcac

SEQ ID NO: 179017 - DNA, 75 bp, Homo sapiens
aggagaacgtcccgctggatctgacccgaggagcaggacatcgagactttacatggctctgttcacgtcacgctg

SEQ ID NO: 179018 - DNA, 82 bp, Homo sapiens
cctccgggcctggcagtcatgaaggccctctggtcctggaggcaggatcatgtggtggattcttggcagtcagcagtctgtg

SEQ ID NO: 179019 - DNA, 128 bp, Homo sapiens
aggaaccagaacccaggcccacggaggaagagccgggcagtccctggagcgggccaggtgctggagaatctggtaaaagcaccattgtgaagcagatgaggatcctgcatgttaatgggtttaatgga

SEQ ID NO: 179020 - DNA, 100 bp, Homo sapiens
acgtgttccagcacaccacgcacagcgtcctggacagcttcctccagggctacaactgctcagcggttgtcaccaccaccacatccaccactgtggtgca

SEQ ID NO: 179021 - DNA, 100 bp, Homo sapiens
tcatgggggagtgctgatcaactaaaagagcatgttggcagataaattgaacatgactccagaagaagctgaaaggtggattgtaaatttgattagaaat

SEQ ID NO: 179022 - DNA, 98 bp, Homo sapiens
ccggtgtctgctcctgtcgccttcgcctcctaatccctagccactatggtgagaagccctaccactgcaactgggacggctgcggctggaagtttgcg

SEQ ID NO: 179023 - DNA, 97 bp, Homo sapiens
ctatccgtttgttcaggaaccaccagtgacagagttgtcaatagggtgactggaaatttcaagcatgcatctcctattctgccaatcactgaattct

SEQ ID NO: 179024 - DNA, 96 bp, Homo sapiens
gtccggtggttgctgttgcttggcctggtgggcccagtcctcggtgcggcgcggccagttgtcacaggtagtactgatggaattggaaaatcatat

SEQ ID NO: 179025 - DNA, 136 bp, Homo sapiens
ccaactacgtggagcggaagaacagcctgaagaagggctccctcgtgaagaacctgaaggacacactaggtactccaaagattcaggtttactcacgtcatccagcagagaatggaaagtcaaatttcctgaattg

SEQ ID NO: 179026 - DNA, 87 bp, Homo sapiens
acctttcgcttcaccttcacagcagccctgcgagtgtaaacaggaacatcgataagtagtgtaaaaacttgcacaatgaaatccgaa

SEQ ID NO: 179027 - DNA, 90 bp, Homo sapiens
cgctgaggggctgggagccgcgcacaccaccatcacatacggctacgtcaccaactccaaggtgaagtttgtcatggtggtagattcctc

SEQ ID NO: 179028 - DNA, 74 bp, Homo sapiens
ctgattgaggactgccagctggcgctgcagggagggacattgcttgggcctccagactctgtggttgatgtggg

SEQ ID NO: 179029 - DNA, 87 bp, Homo sapiens
aggctgggcaggtgattccgtgaaggcttcgaagtcattgagactgcctcttctcaaagggacactgtcctcagcactttatacagc

SEQ ID NO: 179030 - DNA, 100 bp, Homo sapiens
gttgctgcgagtgggacgcgcactggtcggtgccggctcaggagccgggctttgcccgaagtttttacatacaaattctactagtcacacctggccattc

SEQ ID NO: 179031 - DNA, 98 bp, Homo sapiens
tcaggtgcgcccgccaggtgagcgcgctccctggcaccgttggcccccggagggtcgggcccagttgcggcgagcggagctgccatcagtcatgctct

SEQ ID NO: 179032 - DNA, 100 bp, Homo sapiens
cagcgctcgttttgtgcagcttcagcacaatgacattgacaaacggagttttatggacgaggagccccctacaatgccttgacggggaaggactccacta

SEQ ID NO: 179033 - DNA, 96 bp, Homo sapiens
acagtaactctctccaccaaacaagcttgataatggaactatacagcgaagagacaatctctggcaagtttttgtagaaaaaatgtttcagtgcct

SEQ ID NO: 179034 - DNA, 100 bp, Homo sapiens
gcctacaggatggcttggccttgcacataaggagcagaagttctgccagcgctatgaccagctcatggaggcctgggagaagaaggtggagcgcatcgag

SEQ ID NO: 179035 - DNA, 82 bp, Homo sapiens
gtctttccgtcctctgaggcgacggccgcggctgcacagattgacgagatgcctgaggctgccgtgaaatcaacagccaaca

SEQ ID NO: 179036 - DNA, 97 bp, Homo sapiens
agaagtcatgacaggcgaggtgggttctgaggaaagtacacaggaagatgctatgaaatttccatcttcccaatcttcccagccttccaggctttta

SEQ ID NO: 179037 - DNA, 51 bp, Homo sapiens
ccaaaatcacagctttgagtgagaaacagggtcgccccattatactgtgct

SEQ ID NO: 179038 - DNA, 100 bp, Homo sapiens
tggatgctgagctgacaggcgtggtttattcttcagtccaaggaagcaattcacagtcagctgttagagaagcagaaaatagcagaagaaaaaattaaag

SEQ ID NO: 179039 - DNA, 97 bp, Homo sapiens
agtcgcctggtgtgaactgcaggacagtctccgtaagaaggatgacaggattgaagagctggaagaagcactaagagaaagtgtacagataactgca

SEQ ID NO: 179040 - DNA, 136 bp, Homo sapiens
ggcagtctcggctcaacgagaagatcctggaagaaccgcaccctctgatgttccagaaactccaggaccaggaacatttacagttcagttttatgatggagtaattcgttgtttaaaaagaatgcacattaaagcc

SEQ ID NO: 179041 - DNA, 100 bp, Homo sapiens
tggccacggccctgcagaagctggaggaggcagaaaaagctgcagatgagagtgagaggttccaatgattcttgttggtaataagtgtgacttggaagat

SEQ ID NO: 179042 - DNA, 75 bp, Homo sapiens
cagaccaggatggagataaaggaactcaaagaatttggtggcagaaatctgaagctatcatggaacaattgaagt

SEQ ID NO: 179043 - DNA, 101 bp, Homo sapiens
ctttaaagaatacacttcaatggacgtgactctggacccagacacggcctaccccagcctgatcctctctgataatctgcggcaagtgcggtacagttacc

SEQ ID NO: 179044 - DNA, 82 bp, Homo sapiens
ccccagcaaacctccgggcccccaggcatggctagctcgcaaattgtggctactaatttgccccctgaagatcaagatggct

SEQ ID NO: 179045 - DNA, 98 bp, Homo sapiens
attactatgccacgcgctctgcagcccagagtgtcaaacagctggtagcctttccagtaaatatatgactcagggaaaagcctcagcgaagaggaccc

SEQ ID NO: 179046 - DNA, 124 bp, Homo sapiens
cttcagaactactagcagataatttggggggacttcatattcagaagtctatataaagactctgaacaggaagtgcctcctggaaccacagagtcggttcagtctgtggattactactgtgata

SEQ ID NO: 179047 - DNA, 98 bp, Homo sapiens
tctaattcaacaaatcataacttgacaaggcgcctctgtcgaagagccttctgctggtccccagtgccctctccctcctgctcgccctcctcctgcct

SEQ ID NO: 179048 - DNA, 82 bp, Homo sapiens
cagaccctggagcctcagttggaagcagccgatccagcctgcggagcctgtggggcagggcgccctgcgtccggcagaggag

SEQ ID NO: 179049 - DNA, 90 bp, Homo sapiens
tgctgctgttcatcgccgtcctcaagcagttcggcatcctggagcccatatccatggaagggtccccagccccaccccagccccaaagga

SEQ ID NO: 179050 - DNA, 99 bp, Homo sapiens
cctggtctccggggccgctggattctgaggaccagcagatggccagtcacgagaacccagggcgccatgttttggaagtttgacctgcacacaagctcg

SEQ ID NO: 179051 - DNA, 100 bp, Homo sapiens
gtcaaaatggaagtgaatccccctaaacaggagcacctgctggcgctaaaaggtatgtaactgctctgcgcctgacacgggcaacatggagctgctggtg

SEQ ID NO: 179052 - DNA, 100 bp, Homo sapiens
gccccatcaaggaagaaaaaggaagccccttaaatgccgcaccctacggcatcgaaaggtgctccatctcgaaaagcgagaaaggcctccagaccaccaa

SEQ ID NO: 179053 - DNA, 97 bp, Homo sapiens
cacactaggcaaagaacttgcgtcaaaatcaggactgaaatacattaatgtgggtgatttagctcgagaagtttcaccagtgatcattaaagaatgg

SEQ ID NO: 179054 - DNA, 80 bp, Homo sapiens
atcacgccgaggcccattttccagacgaccacgacgaggccggggtcaccaaagtggaagatgctttctacaaaggtgaa

SEQ ID NO: 179055 - DNA, 145 bp, Homo sapiens
gggcccgggtgcgccgcggcgctgggggcggcaggttgcggcggcgccggagcgggtctccaggctggcgagcgcccagagggcctgagctgcatgaataaggatcacggctgtagtcacatctgcaaggaggccccaaggggca

SEQ ID NO: 179056 - DNA, 100 bp, Homo sapiens
gtctcggccacctcaaggataatcactaaattctgccgaaaggactgaggaacggtgcctggaaaaggctgcacatggtccgtctaatgctgttggagag

SEQ ID NO: 179057 - DNA, 100 bp, Homo sapiens
aggtagatcatgaaagagatcctggacctatgaatatccagtttgagccatcggatctaagatccaaaagctattgacctgaaaagtggttctggaaaag

SEQ ID NO: 179058 - DNA, 75 bp, Homo sapiens
gcattgggaggccgaagggtccccgggacccgcctgctgagtggacccgggtgcaggagggagccaaagtttctc

SEQ ID NO: 179059 - DNA, 100 bp, Homo sapiens
agctcgcacatttgacttggaagcaatgtttgaacaaactcgaagaacagctgtggaaagaagttgcaaaacactgggtgtggcagctctcagaaaagaa

SEQ ID NO: 179060 - DNA, 90 bp, Homo sapiens
cggcagctgataccagagtcttgctccggccgcggccagcggagccctgggctggggcaggagccggtgcgtatagcagcaaaattcatc

SEQ ID NO: 179061 - DNA, 75 bp, Homo sapiens
gaggaaagcaggaggaggtggcggcggcgggaagatgttttaaaatcaaagatgggaaaatcggagaaaattgcc

SEQ ID NO: 179062 - DNA, 82 bp, Homo sapiens
acggcttgaggctccagtcaaaaaccattaagatcatccccccgaaggagtggaagccgcggcagacgtatgatgacatcga

SEQ ID NO: 179063 - DNA, 75 bp, Homo sapiens
ccgcgcccgcaggacgccccagccaggagctgcaattggaacatgcaagacaagcctttgcactcaaagacaaaa

SEQ ID NO: 179064 - DNA, 101 bp, Homo sapiens
atatcgcgtcatgattaaggaagaagtggatagttccgtgaagaagatcaaagctgcctttgctgaattacacaactggttgacctgacagttcaagaaaa

SEQ ID NO: 179065 - DNA, 78 bp, Homo sapiens
ggatgtagatttaccagaagtagatggagcagatgatagtacaggggctcaggtccaggtggcaggggatatgctacc

SEQ ID NO: 179066 - DNA, 98 bp, Homo sapiens
atttctgcacccaaaccaggacctctaaaaaaggcacctgctgctaagatcaaattttctccggtggctaaaaagttgtttgtggtaactgcagtgag

SEQ ID NO: 179067 - DNA, 75 bp, Homo sapiens
aaagattttgcagaacagagatgacatgccagcccagactttcatctatcatggtgaacttacttcagattgtgc

SEQ ID NO: 179068 - DNA, 100 bp, Homo sapiens
cacatcaccagtttaaagaatctgattggacctatatccagactttgcctgacactgcagggtccaagagaattaaagaaatatggaatgacatgaagaa

SEQ ID NO: 179069 - DNA, 98 bp, Homo sapiens
tctattttccctcctcaaactgactttgcagccacggagagggcagcttgtgcagctggaagagaaagggcagggttcagtgccctggtcagtatatg

SEQ ID NO: 179070 - DNA, 75 bp, Homo sapiens
gggcggggccgcgggacgccaggaggcggaggcggagtggagttagaagtaaaagattatgagcctccatttggt

SEQ ID NO: 179071 - DNA, 83 bp, Homo sapiens
tggtctctgcacctcctttctgtcacgagacatgtgtagaactgcttttagaacaggaagttttccagaaaacggaaggaaat

SEQ ID NO: 179072 - DNA, 98 bp, Homo sapiens
gggtgcagaagctcgtgttgacttctcgctccgggatccggacagagctagccaacatggaagaagatgccagatcagctggagtcgctacctttgtt

SEQ ID NO: 179073 - DNA, 80 bp, Homo sapiens
acctctgtccgaaagtgatgctacccgtggtgagaagccctaccactgcaactgggacggctgcggctggaagtttgcgc

SEQ ID NO: 179074 - DNA, 82 bp, Homo sapiens
cctccgcccagcagcagtatggcttccagtacccccttgccatggcagcaaaggctggaccccaatggagaacaggtggtgt

SEQ ID NO: 179075 - DNA, 100 bp, Homo sapiens
gagaccgggctggccatgatctatgcatatagcactttctacattgtgggtttaatattatcaatgcagataccttttgtgggattccagccaatcagaa

SEQ ID NO: 179076 - DNA, 75 bp, Homo sapiens
gtgaaaagaatgggggtatgctacagccacctcttgactggcatagtgagtatggtatacacacaatcggagatt

SEQ ID NO: 179077 - DNA, 100 bp, Homo sapiens
agaggtgaatgtaattcctccacacactccagttagttttactgctcggattacagaattaatgcaagtactgaaggatttaaatcatggcaaatatgag

SEQ ID NO: 179078 - DNA, 75 bp, Homo sapiens
aagcatgccctgaaaaagtatcgtcgagaagcctatcatcgaaaagggagatttcattgccctggatcttggtgg

SEQ ID NO: 179079 - DNA, 128 bp, Homo sapiens
ggtctacatcctgcgggtgcctttgaaaatcaacgacaacttgagcacaggagcagatgtctcaagtattagatgccatgtttgaaaaattggtcaaagatggggagcatgtaattgatcaaggtgac

SEQ ID NO: 179080 - DNA, 74 bp, Homo sapiens
gaagctttactggtgttccagccctaagcctccagggtcgtatagacctccccctcctatgggcaaaccaccag

SEQ ID NO: 179081 - DNA, 127 bp, Homo sapiens
gcgtgcacatgctcgcccagccacccccaggacgccttctgcaactccgacatcggcaagaggaggagcgaggccgggtatacaattacatgaatgccgttgagagagatttggcagccttaaggca

SEQ ID NO: 179082 - DNA, 100 bp, Homo sapiens
gttccctggcctgcagggaggtccccacaaccacgccattgctggccaaggcagaggcttcctcaggagaccatcccactgacacagagatgaaggagga

SEQ ID NO: 179083 - DNA, 75 bp, Homo sapiens
ccgcgaccatgggcgggaagaacaagcagcgaactaaagggaacctgagggttataatcaccaacagatgagtga

SEQ ID NO: 179084 - DNA, 73 bp, Homo sapiens
ggccacccgcttccatgcggttcgggtccaagatgatgccgggaggaaataatgctggccatacagttgttgt

SEQ ID NO: 179085 - DNA, 75 bp, Homo sapiens
ctcgggatgcagccgccggtgcccgggcccctgggcctgctggaccccgcagattacctaaaacctcgggcagaa

SEQ ID NO: 179086 - DNA, 90 bp, Homo sapiens
gacgaagagcccgggcggcgctcgtacttctggccactgggcgagcgtctggcagccagagactgctgctactttgaaacgtacgataga

SEQ ID NO: 179087 - DNA, 100 bp, Homo sapiens
gaactacctgtacaacgtgctggagagaccccgcggctgggcgttcatctaccacgctttcgtaagatggctgtgccacccacgtatgccgatcttggca

SEQ ID NO: 179088 - DNA, 74 bp, Homo sapiens
gatgatttagttgattctctgaagaagtcacctgcaccggtgcccgtgacgtacgagctgcccacactgtatag

SEQ ID NO: 179089 - DNA, 74 bp, Homo sapiens
atcatgatcgtcaggagggccatcaagataattcatcaccttcgactgagcattcacaaggccttgagaagcaa

SEQ ID NO: 179090 - DNA, 100 bp, Homo sapiens
ccatccaagagatccaaatcttctcctgtcagtaagtaaagggtacctgctcttccgagacttctgcctgaaccacctggaggaggccaggcccttggtg

SEQ ID NO: 179091 - DNA, 96 bp, Homo sapiens
cggctgctggatggaggggattttgtcagcttgtcgtcaagattctgatacagagcgtctgtgagacgatggtgccaaagctggtggcagaggaca

SEQ ID NO: 179092 - DNA, 74 bp, Homo sapiens
aacgaacatcttctggacctttgtccagtggagacctttggcgacttggcctttggcgacatcttcctccacct

SEQ ID NO: 179093 - DNA, 75 bp, Homo sapiens
atatttagaggagaagaaggacttgattatggtggcctagcgagcccgtgatgctgatgagcgagagaagtggat

SEQ ID NO: 179094 - DNA, 83 bp, Homo sapiens
cttcagccgcagtcgccactggctgcctgagcaaattgtggctactaatttgccccctgaagatcaagatggctctggggatg

SEQ ID NO: 179095 - DNA, 87 bp, Homo sapiens
gaaagaaaactacaaaaagcagtggagagctttacctggaatattaccatcttaaagtctactgcaaatcctgaaactccaaactca

SEQ ID NO: 179096 - DNA, 78 bp, Homo sapiens
agcatttgaacacagggctgtcaagggagaggtccaacgagcgctcctccaagcggagccttggagggcacggccggc

SEQ ID NO: 179097 - DNA, 90 bp, Homo sapiens
cacctccacatcgccttttgccacctttccctttatttccggaggtttgtggagaaaaacagcgctttgagaagttgatggaacatttca

SEQ ID NO: 179098 - DNA, 75 bp, Homo sapiens
cgtcacaggctccggctcatggcatcaagtggcatccatcataaggtatattactcgaggggtttttaaatattg

SEQ ID NO: 179099 - DNA, 100 bp, Homo sapiens
caagactttgacatgtgtgaaaacatgaaatggaagaaatgttggctatttggcgatgagaggtggtgaacagtgaccatactggtatacaacactatgg

SEQ ID NO: 179100 - DNA, 100 bp, Homo sapiens
gcggtttcttttggctcacaattatcctagagtgaggactttttccaaggcaggaaaggtaaagagacaaagaaagtgccttgtacagatgcaaacggag

SEQ ID NO: 179101 - DNA, 90 bp, Homo sapiens
atggattggagtgaaccggagaccccgaaaacggaagcgcagggagaaggaagaggtgtttgaaaaggcagagaagaggcgatggcggcg

SEQ ID NO: 179102 - DNA, 82 bp, Homo sapiens
ataccagtccccagtgagggtgtacaaatacccctttgaattaattatggctaacccttaggagaaatcttgagagtggaca

SEQ ID NO: 179103 - DNA, 82 bp, Homo sapiens
agggctacccgctctttgccgtgacaacaccgttcccccagccgggctggtgtcatggctgggtgaagagcctgtggctggg

SEQ ID NO: 179104 - DNA, 100 bp, Homo sapiens
agtcatgaagatcttgaaaatttgacaacttacggttttcgtggagaagccttggggtcaatttgttgtatagctgaggatgcctcaccaagagtcccag

SEQ ID NO: 179105 - DNA, 51 bp, Homo sapiens
atatatctcatcttcaaggacaagaagctgagtatctatggtgacttggag

SEQ ID NO: 179106 - DNA, 88 bp, Homo sapiens
cgaatcatggaatcccttgcatggctctcacctggcacctgtgtttgctctgtttgtaccattttactgctccataccaagagtccaa

SEQ ID NO: 179107 - DNA, 60 bp, Homo sapiens
gagaccagatcaaaggaccggacaaagaggaggtcctccaaatgcagtgaggttaggaag

SEQ ID NO: 179108 - DNA, 100 bp, Homo sapiens
gaaaatatttgtaggcgggttatctgcgaacacagtagtggaagatgtaaagcaatatttcgagcagtttggcaagaacgacaccgtaactatccgcact

SEQ ID NO: 179109 - DNA, 83 bp, Homo sapiens
gacttcagctgccctgtccacagtgggctctgccatcagcaggaagcttggagacatgaggctgaccccgcactacatctacc

SEQ ID NO: 179110 - DNA, 100 bp, Homo sapiens
ccgcacatattgctgaaaggcatggtcacaaagaactcaagaaaatcttcgaagacttttcaccacagatgaagatatccttgctaaaggaaaacagtcc

SEQ ID NO: 179111 - DNA, 113 bp, Homo sapiens
gaagatttacacagatggaaccagaaaagatacgaggctctaggagaggtgggaaatgaagaaggatgaaacactagaagaggaagaaaaagcaatactggagcacttaaaac

SEQ ID NO: 179112 - DNA, 100 bp, Homo sapiens
aatcattctttgtacagaaattgaaaggcttcaaagctagcaggctcccagccaacctctgataaaccctcccagcggccatcagagagcacaaattgta

SEQ ID NO: 179113 - DNA, 78 bp, Homo sapiens
tggcaacctggaccccaaaattaccgagaacacatgattctgtgcagatttgcagaccagacagctgtccagctccca

SEQ ID NO: 179114 - DNA, 75 bp, Homo sapiens
gaggactcggcccggctcgtggagcccttcgcccgcggcgtggagccgccaccaaaatgcagattttcgtgaaaa

SEQ ID NO: 179115 - DNA, 89 bp, Homo sapiens
cgctgacgccgcggacctccctgcgaccgtcgcggaccatgggcgacaaagggacccgaacacagaatgttcttggtgagaagggccgg

SEQ ID NO: 179116 - DNA, 100 bp, Homo sapiens
aaattatttatccaacagctcctcccaggttgtttacattcagagctctatcaataagaggaatacatattacagtgaattcgacaaccgcacaagttgg

SEQ ID NO: 179117 - DNA, 75 bp, Homo sapiens
tcctgccgtctgctcttctgcctcttgatctccgccaccgtcttcaggccagacggctcctctaaccatgtttac

SEQ ID NO: 179118 - DNA, 98 bp, Homo sapiens
gttccgcatgatcgttataataaggatgttggttcctgcaaacaagaactgaccctatcacctctgcctcacagtgggtaaatatatcatacatctct

SEQ ID NO: 179119 - DNA, 100 bp, Homo sapiens
gtggtcagaggcctgtgcggctgcaggtagagtgtcttaggtgcttaatgatcaatagttggtgcactgcctatcctcatcccccccatgagccttggtt

SEQ ID NO: 179120 - DNA, 90 bp, Homo sapiens
ctcttgataaaaagagatgtggggggattctcgacctgctaacagaactggaccttttcggtgtggcggctgatgctgagtctagggcta

SEQ ID NO: 179121 - DNA, 100 bp, Homo sapiens
gaagaccccggagcccctttagccatgtggatacctacggagcacgagaaatacggcgtggactatgtcttcagcagtggtgcagttatatgcagcagat

SEQ ID NO: 179122 - DNA, 99 bp, Homo sapiens
gagaccgtcctggcgcgatgcgtcaagtacactgaaattcatcctgagatgagacccaacatgagtgaagtttcctgcaagaaacgggacgactatttg

SEQ ID NO: 179123 - DNA, 50 bp, Homo sapiens
cgccgacaagatcgagggggccatggccataaaatgcagtaaaaacaaat

SEQ ID NO: 179124 - DNA, 50 bp, Homo sapiens
cgcctcaccgttctgcccccagaactagagatgggttgtcactgtgttgc

SEQ ID NO: 179125 - DNA, 100 bp, Homo sapiens
cagcaagggtgcatccagctatatgtcagaatggttttcaagctggacgagggccgttgctccagggagaactgcaaatatcttcatccacccccacatt

SEQ ID NO: 179126 - DNA, 100 bp, Homo sapiens
gccaacagcaccatcattgcatttacctcggatcatggctgagggtaaaaagctgggattggtaggctgggtccagaacactgaccggggcacagtgcaa

SEQ ID NO: 179127 - DNA, 100 bp, Homo sapiens
aggcggaggaggcgatggctactatccctcgggaggcgcctggccagagcctggtcgagccggaggaagccaccagaatgactgaccctgttccttgagg

SEQ ID NO: 179128 - DNA, 87 bp, Homo sapiens
ttggcagatggagaacctgatcgaacttcgggacatgagagatggctttagaagaaaaagtttctactcttcccattatgcgagaga

SEQ ID NO: 179129 - DNA, 75 bp, Homo sapiens
ctcagtttgatgcgtcacactacgacagtgagaaaggagctaagtttggtgcgaacgccattctgggggtgtccc

SEQ ID NO: 179130 - DNA, 75 bp, Homo sapiens
ccgcgcagcccagcgcagccataattaaatgtgagggagtctgacgtaagagtttgtgatgagtcatcatgtaaa

SEQ ID NO: 179131 - DNA, 98 bp, Homo sapiens
ttcaggacccttcctttctccatgaagctctgaaggctattcagcttgaccctgaagaaactcgtcatgctaaaagaaatggacaaagatcttaactc

SEQ ID NO: 179132 - DNA, 101 bp, Homo sapiens
ggcgaagatggcaaggatggatcacctggagaacctggtgcaaatgggcttccaggagctgcaggagaaaggggtctccatggtgagtttggtctccctgg

SEQ ID NO: 179133 - DNA, 100 bp, Homo sapiens
atcaccgccttcctgggccacaacggggccggcaagaccaccaccctgagcatgcaagttgtccccttggacaaacagatcacaatcatagatagtccga

SEQ ID NO: 179134 - DNA, 78 bp, Homo sapiens
agggaggggaaacacaaagccggctacgcgctgcgagtggcccaccctcaggaccctcaccacccatcagagaagcct

SEQ ID NO: 179135 - DNA, 100 bp, Homo sapiens
gaaccactggaaagtgaggaattttgaagtacaccgtggtgacattgtatcattggtacgaaatctcacaaaactgtcccttatcttcagtcacatgctg

SEQ ID NO: 179136 - DNA, 118 bp, Homo sapiens
cccggacatgagcaagcccccgacagctcagccagacttcccctatggtcagtatggtgagaagccctaccactgcaactgggacggctgcggctggaagtttgcgcgctcagacgag

SEQ ID NO: 179137 - DNA, 96 bp, Homo sapiens
ttgacttgacagcagtggacgtcccaactcggcaaaaccgttttgaggagctctgtctaaacatcattccaacctttgcaaatcttatagactacc

SEQ ID NO: 179138 - DNA, 74 bp, Homo sapiens
tttactattagcccatcaagaaatgaagaacgagattcagacacaggggatgccaacagacagatcagcgacct

SEQ ID NO: 179139 - DNA, 75 bp, Homo sapiens
gccaaatccggaagaagatgatggaaatcatgacccgagaggtgcagaccccgcagtcgatgccccctccccccc

SEQ ID NO: 179140 - DNA, 75 bp, Homo sapiens
cgcagatgccgacgaaatcctccaggaggagatcaaggagtacaagactcgcagggcaatgacattaaagtcact

SEQ ID NO: 179141 - DNA, 76 bp, Homo sapiens
aagtgtgtccccgagggcatcgaggacccccaggcactcctggagggtgtgaagagtgaagatgaagctggatgta

SEQ ID NO: 179142 - DNA, 80 bp, Homo sapiens
caagggcggtgttgtgggcatcaaggtgttggggatgtcctttgcactgaccctgaactgccagattgacaaaaccagcc

SEQ ID NO: 179143 - DNA, 90 bp, Homo sapiens
gagatgtgatgttggagaactacagaaacctggtctccctaggggccaactcaccctatgcagcacagcccaccagctacgactatgatg

SEQ ID NO: 179144 - DNA, 82 bp, Homo sapiens
cggagccgagagccacactttcaagtaaaccagccaacatgcccatcactcggatgcgcatgagaccctggctagagatgca

SEQ ID NO: 179145 - DNA, 83 bp, Homo sapiens
cgaaaactccaccgtagcccttgccaaagaaaaagcttgagtctccacccccatctaccaatcccttcctggaagatgagcca

SEQ ID NO: 179146 - DNA, 88 bp, Homo sapiens
ctgccggacgacgtgcgtgacttcatcgacaacctggacagccaggtttgcctgttcctgaagcggggcgcggaccagcacgccctgg

SEQ ID NO: 179147 - DNA, 96 bp, Homo sapiens
caacgacttggacatctgagctgtcactgccgaaaacaggccgcaagagaggaattgaatgatctggcacgggaccctccagcacagtgttcagca

SEQ ID NO: 179148 - DNA, 75 bp, Homo sapiens
ggacgggggcgagagtgaacgattcaacccgggggagctcagcgtttgtcaccctccgtctcccatagcatttgt

SEQ ID NO: 179149 - DNA, 74 bp, Homo sapiens
tcgcgggagccacgcagaggacgccggaacaccctggaagccgagaaatgggcagcaaggagcgcttccactgg

SEQ ID NO: 179150 - DNA, 99 bp, Homo sapiens
aacctggatcttcgaacttttgacacggctttggaaacgacgtcatgtgttaggagattacctggggcaattgatgttatcggtcagactataactatc

SEQ ID NO: 179151 - DNA, 59 bp, Homo sapiens
tccttctcccggcgcctcaagcggaaggttcgaaccagtgtcctaccagaacataagga

SEQ ID NO: 179152 - DNA, 90 bp, Homo sapiens
gaaggaagttccctcctttttgcaagaaggagcagtttttgacagatacgaggagggggaaggttcctcctcattcttgtcggaaacttg

SEQ ID NO: 179153 - DNA, 100 bp, Homo sapiens
gcaaaggtgtcgtggtggtcattaagcggagatccggtcccactctatgaccagtgggaggatgtgatgaaagggatgaaggtggaggtgctcaacagtg

SEQ ID NO: 179154 - DNA, 100 bp, Homo sapiens
gaggcgcccggtgatgctgctgtgcctgtacacaagaccagcttccgatgtcaacatgttaggggaaatgatgtttggctcagttgccatgagttacaaa

SEQ ID NO: 179155 - DNA, 100 bp, Homo sapiens
cttggcctctcctgggatcggcccaaggccagttctccgcagatgttgctatgaggacagattcatcaaaaatgactgacgtggagtctggggtcgccaa

SEQ ID NO: 179156 - DNA, 87 bp, Homo sapiens
cagcctgatcctggaagagactcggggccccccagcctccgccaacccagatttttgcacgataagaatagcagggaattcctctac

SEQ ID NO: 179157 - DNA, 100 bp, Homo sapiens
ctaaattgcttgagttgttcgaagatgtggcacacaactgggcaggctccatctcgtctgctgctggaacccactagaaaccaaatgagccctccagcag

SEQ ID NO: 179158 - DNA, 83 bp, Homo sapiens
ggcgctctggctgtgctgcgcgacccccgcgcatgagtgcctggtgaagaatgtgatgggatcactagcatgtctgcggagag

SEQ ID NO: 179159 - DNA, 82 bp, Homo sapiens
tcagagccgccatcttgtgggagcaaaaccaacgcctggctcggagcagcagcctctgagtgcctccggagccagcgtggtg

SEQ ID NO: 179160 - DNA, 74 bp, Homo sapiens
tggaagacttgacccagacccttcaggacagtgcatgcagccagtaaagatcccagagaagttcgagaagctag

SEQ ID NO: 179161 - DNA, 91 bp, Homo sapiens
caaacagcccgcccgaccccgtcccgaccctggccgccccgagcggagcctggagcgccgtgccgtccctgcagtgacaccgaggtgctcc

SEQ ID NO: 179162 - DNA, 98 bp, Homo sapiens
aagaaggaggttgctacactaaaacagagttagcagagtgctgctggttccttcgatgtaggtgcaaaaaactacagacatctctgtgctgtttatta

SEQ ID NO: 179163 - DNA, 100 bp, Homo sapiens
caagaatcagcaggatgacgggtattagcctcactcatcattcgcctggccctggctgaaacgttctgcctcaactgtggcatcattgccttggatgagc

SEQ ID NO: 179164 - DNA, 83 bp, Homo sapiens
ctcgctctgcccaggacgcacagatgagagcgctccgaagactgcctggtccgacccccagtggcactaacgtgggatcctca

SEQ ID NO: 179165 - DNA, 82 bp, Homo sapiens
cgacggccccacctccggccactgggacggcggcgcggagaaggcagggtcctgccctccggaggagcagcctcgaggctgg

SEQ ID NO: 179166 - DNA, 82 bp, Homo sapiens
ttacagcaataatcgcttccttcaggtgaaatgacaatggatgctctgttggctcgattgaaacttctgaatccagatgacc

SEQ ID NO: 179167 - DNA, 87 bp, Homo sapiens
ggaaggagactggatgatagaattcccgtgctttgaagaagaggagcacttcaaggtgctggtgaagatgaccgcccaggagctcgc

SEQ ID NO: 179168 - DNA, 82 bp, Homo sapiens
ctgcgcctccggggccggccctgcagagtttattaaccacttaacctctcagaactgaacaaagacaacattgttcctggaa

SEQ ID NO: 179169 - DNA, 103 bp, Homo sapiens
ctggagcctcagttggaagcagccgatccagcctgcggagcctgtggggcaggcacctacattggatgcttcagtgacgatggccacgagaggactctgaaag

SEQ ID NO: 179170 - DNA, 75 bp, Homo sapiens
attgaagatcagtacaaaaattcttcaagaaatctaagagaatgcaactggatatcatcctgacaagtttgcaag

SEQ ID NO: 179171 - DNA, 100 bp, Homo sapiens
acacactgggtctccaggcagcggccgtcgccgcatccccggcagcagctccaggcaaagtgacagtggtagtcgctcttctaaaacttttaaaccaaag

SEQ ID NO: 179172 - DNA, 80 bp, Homo sapiens
gagaatgctcttcaggatagtatcttggccagggaactcaaacagcagatgcagacgaggacctattaaacttggaatgg

SEQ ID NO: 179173 - DNA, 100 bp, Homo sapiens
ctacaactgctggcagcgccggctgcccaagctcaagcacgtgggtgaagttgaacaaattgctatgatgaaaccaaaaggccagactgaacacgatgag

SEQ ID NO: 179174 - DNA, 90 bp, Homo sapiens
cgccggcctgggcggggggcgcgcggccgggccccggtgtctgggaccccaactgggacaggaaagaccacagcaagattctttcattcg

SEQ ID NO: 179175 - DNA, 101 bp, Homo sapiens
taaagacgatgaagccccctctgatggaagatgagaatgtgcctactgctcctgatcctccaagtcaacatttacgtgggcatgggacaggcttttgcttt

SEQ ID NO: 179176 - DNA, 50 bp, Homo sapiens
cttccgagtagctgggactacagcttgaggtcctacctggtgtcctccat

SEQ ID NO: 179177 - DNA, 100 bp, Homo sapiens
ggcagtcacagagtcaagcgattaacaggcatgagatttgaagccatggaaagactccatgcacatagaagatgttgaagccgttcagaagcttcaggat

SEQ ID NO: 179178 - DNA, 75 bp, Homo sapiens
agcccttcttacagagttggaaaaccgaaagcagagacagcagtggtggattttcggaaaagacatatgaatgga

SEQ ID NO: 179179 - DNA, 95 bp, Homo sapiens
ctatctggagacagctgactactccatccgagaagagattagctgagctcaatgtgcagcaatggatgacgacagcctggatgagcttgtggccc

SEQ ID NO: 179180 - DNA, 90 bp, Homo sapiens
gaagaactcgtcatgctctttgtagcgtggtgcttctgttgctcacagatctcatcctggccttgggtgtcctggcccaaagccggccgg

SEQ ID NO: 179181 - DNA, 100 bp, Homo sapiens
tctacctggatgcattttaactaatcctgaggacttcatccggtcaccatctacctattcttcaaatgcatcagaagagctaacaattgctggaatgacc

SEQ ID NO: 179182 - DNA, 96 bp, Homo sapiens
ggaactactgtacaaaaatttaaagaaatggtctatagtctctttaagaacacacatgcaggacttgaaagatgttactaataatgtccactatga

SEQ ID NO: 179183 - DNA, 50 bp, Homo sapiens
gcggaagcccaggaaacacaggcagcggatggagtgtcgctctgtcgccc

SEQ ID NO: 179184 - DNA, 82 bp, Homo sapiens
ttcggccaccggaggagcgggagccaagcaggttttgggatttgagattgacgcggtgaactctgtccagttttcaaaccac

SEQ ID NO: 179185 - DNA, 111 bp, Homo sapiens
gcggtggaggacgaggggctccgggtcttccagagcgtgaagatcaagatcggctgaccccgcactacatctacccaccagccatcgtgcagcccagcgtggtgatcccag

SEQ ID NO: 179186 - DNA, 86 bp, Homo sapiens
gccgtccttctccactttcgccagcccgtgccgcgagcgcggcctgcaggagtgtggacgaatgtggaacctcgctctgtggctgt

SEQ ID NO: 179187 - DNA, 100 bp, Homo sapiens
ggaaagacgggccagtggtcactgctctaaaaaagcgtccgttggatgtcacagacgcaggaggagggagacgcactgatgacatcgggccgctcctgca

SEQ ID NO: 179188 - DNA, 82 bp, Homo sapiens
caggacttcccgtcacaatttcatttgttgatcccggcaccgccaggttcaagcactgtcttcctgttggccctgacaatca

SEQ ID NO: 179189 - DNA, 82 bp, Homo sapiens
cagagctgaggactgcctgtttgcagttcccagtgacctgacagcagaggagcgtcaagaactggagaacatccgacggaga

SEQ ID NO: 179190 - DNA, 75 bp, Homo sapiens
tctcctctcaagaaatctcaagatattaaagttactgctgttaaaaagtgcctccggagccagcgtggtggccat

SEQ ID NO: 179191 - DNA, 96 bp, Homo sapiens
gtgacagccctgccccccaaggaagcgtgcaaatgccagaaagaggatttggccagagcgttttgtgagtatctaactatcaagttgaagaagata

SEQ ID NO: 179192 - DNA, 98 bp, Homo sapiens
gtttgaaatccttagtgttgaggacatgccctactaccggtcccagtttaagaagtgtgctgtagtgggcaacggaggcatcttgaagaacagccgct

SEQ ID NO: 179193 - DNA, 100 bp, Homo sapiens
ttgaagaaggcattccccacccgccaaatggcgtccatgcccccgacgcccgaggcccagaaaactgtcgctgaaaagcaggagaagagaaatcaggatc

SEQ ID NO: 179194 - DNA, 100 bp, Homo sapiens
ttctttatccggggccaccccgtgaccatgcgcaccatcacctatagcatcaacttcttctccaaggtggaagttaaacgagctgagcctcgggacagca

SEQ ID NO: 179195 - DNA, 78 bp, Homo sapiens
atgagggaaatcgtgcacatccaggctggtcagtgtggcaaccagatcggtgccaagctaccacagcccctaaacccg

SEQ ID NO: 179196 - DNA, 99 bp, Homo sapiens
cagcagttactcgcacaaccccagttaagctgcgctccgggagacctagaggatcaagacataatgggagcatttttagacaagccaaagatggaaaag

SEQ ID NO: 179197 - DNA, 51 bp, Homo sapiens
ggatactgaaactgacattatttgaaattctccagaatttcagaaacttct

SEQ ID NO: 179198 - DNA, 75 bp, Homo sapiens
agttccagcagggcaagcttcttggtgaccctcttcgagagctgggcagtgagtgcgggattgagtttgacgagg

SEQ ID NO: 179199 - DNA, 101 bp, Homo sapiens
cccagcagagctacctatctatggagaaaatcattcaagtggccaagacctctgctgcacaggcgcagacggggaagcggagccaacatgccagtggcccg

SEQ ID NO: 179200 - DNA, 82 bp, Homo sapiens
ttggatactcagcgtcgctggcagccgctgtacttgttgatcatggccttgccaggttggtgacagtatattgtgagcatgg

SEQ ID NO: 179201 - DNA, 51 bp, Homo sapiens
ccagggagggagtccgcagcctgaggactaatggctgaaggataaatcaac

SEQ ID NO: 179202 - DNA, 90 bp, Homo sapiens
ctggactctagggaccctgctgaatagctggggctacaggcgtgtgtcactgcgcccagtggtgaactatgacaatgtagtggacacagg

SEQ ID NO: 179203 - DNA, 75 bp, Homo sapiens
ccacagcggcctcggcctccccttggattcagacgccgattcgcccagttattgccttgtctgtcaagatccgca

SEQ ID NO: 179204 - DNA, 100 bp, Homo sapiens
agggggcgcccgcgcctttgcccccgtgcgcacccccgccccgctcaccttagccccgcgcccgagagctgctaagaaggacaaataagatagcagagtg

SEQ ID NO: 179205 - DNA, 100 bp, Homo sapiens
atgaccacctccagagctaatcaggagtctcaggagcaggggctgcggcagaggctgctggacgagcagttcgcagtgttgcggggcgctgctgccgagg

SEQ ID NO: 179206 - DNA, 100 bp, Homo sapiens
ggcatgtcatctttgccaggactgatgcagatgcccctcctccaccagaggactgggaggagcatgtcaacaggtcctctcagggtgcgccatcattgtc

SEQ ID NO: 179207 - DNA, 100 bp, Homo sapiens
ggccggcctggtcattggcaagggcggggagaccattaagcagctgcagggccagaagttcaggctgccccgcctccactgggggatcgcacctgtgaat

SEQ ID NO: 179208 - DNA, 74 bp, Homo sapiens
tgatgttttgccaggaaaagaaagcttaggatattttgttggtgtggacatgatgagctttgatccaaaccttc

SEQ ID NO: 179209 - DNA, 98 bp, Homo sapiens
gcactggagctggtggtgcaggaggtctccagcgtgctcaggtcggcggaggagaaggtctgtttctgtcgactgtggaccacttatgtgcgatccgt

SEQ ID NO: 179210 - DNA, 73 bp, Homo sapiens
ggaggacactggaagatgggaagaaagaagcagctgccagctttcttggactccgtactgttggtgtaaccaa

SEQ ID NO: 179211 - DNA, 50 bp, Homo sapiens
tgtccctgctggaggagcgcttccggattggaaccaaccagatggctgtg

SEQ ID NO: 179212 - DNA, 100 bp, Homo sapiens
gaaccatcttcctgcacacagccacgatttgcaaaggtcctttgtcatccagcaaatcccaagcagcaacctgttcatggtggtggtggacagcagctgc

SEQ ID NO: 179213 - DNA, 100 bp, Homo sapiens
tccagtgggcagggtcagcaggcccaaacccccacaggtcctcttcctgatggatgggaacaagccatgactcaggatggagaaatttactatataaacc

SEQ ID NO: 179214 - DNA, 100 bp, Homo sapiens
gggctgctcttcctgaggttttcctaagccatcccctggcggaaccgcccccagattgggagtatgtatttaaaaacagtgaattttcatcaaagcaaga

SEQ ID NO: 179215 - DNA, 100 bp, Homo sapiens
ctccgggagccgtccgtgtcaccgccggaacctggcgcagttgatattcactgatggactccaaagaatcattaactcctggtagagaagaaaaccccag

SEQ ID NO: 179216 - DNA, 82 bp, Homo sapiens
gtggaaagaccgctttccatggagagtaaaggccggctggaaagtccccaagcgcttttgaagagggagaacagcagattgc

SEQ ID NO: 179217 - DNA, 74 bp, Homo sapiens
actacgctgtgcacgagggtctcggcctcgcggtgcagggttattggggctgtgccatcggcaaagccaggcaa

SEQ ID NO: 179218 - DNA, 88 bp, Homo sapiens
gcagatgtatgggtgaagatccaagatgttctacaggaagatattcctcgtcagcttgtctacattggtctttacctcttccacattg

SEQ ID NO: 179219 - DNA, 100 bp, Homo sapiens
cattcatggatgtgttagatgatgaaagtgagagcgttccaggctgaaaatatttacaatgatgaagagtcagatgtcacgacatccgaactggagggac

SEQ ID NO: 179220 - DNA, 96 bp, Homo sapiens
tactgaacttcatgcttgacaatctcgcagaatttcttgaggttggcaaaaagcagcctgctctggatgttctttatgatgttatgaaaagtaaaa

SEQ ID NO: 179221 - DNA, 50 bp, Homo sapiens
agatcatcgagcatttcaaacgaatctatctaccgccggggagccagaag

SEQ ID NO: 179222 - DNA, 132 bp, Homo sapiens
ttcctaagagataccgctcagaagaaaatgcaaaaaaactaatggaattagcctgcaacatgaaggaggcaagtgaggcctatctggttggcctttttgaagacaccaacctgtgtgctatccatgccaaac

SEQ ID NO: 179223 - DNA, 75 bp, Homo sapiens
gcccccagaaccaggcccccaactcagccatctgcggaggtcaagatggctgtatgggcgaaaaagatgaccgaa

SEQ ID NO: 179224 - DNA, 50 bp, Homo sapiens
ggaacttggtagtagtcaatcagcagggaactgtggctgcaccatctgtc

SEQ ID NO: 179225 - DNA, 100 bp, Homo sapiens
aaaaggagaaggaaaacttgagttacgatttggttccattgaaaaatggtggagttggaataaagattcttattgccaagtcccctctggctcccttcac

SEQ ID NO: 179226 - DNA, 74 bp, Homo sapiens
ccgaggactccagcacaccgaggcccgtggaccgggagcccgtggaccgggagccggtggtgtgccaccccgac

SEQ ID NO: 179227 - DNA, 94 bp, Homo sapiens
tgagtctactctgtcgctcttgtgccctagcaccccgagaaccgtcagtttgagccagatggccaggaatagttgctgaacaccccaggcctgc

SEQ ID NO: 179228 - DNA, 83 bp, Homo sapiens
cgccgaagcactcgttccgggggtgaagcctcctgcgccggccttgcctcggccacaatggtgcgcatgaatgtcctggcaga

SEQ ID NO: 179229 - DNA, 96 bp, Homo sapiens
ttgtttctctccctctgcccccccttccccacgcaaccccagatccatttacactttacaggattcccctgaaaccaatgttggcccatcccaccc

SEQ ID NO: 179230 - DNA, 100 bp, Homo sapiens
aaccatagaaagatttatggattgtcggattgggagaaaaggagttcgatatctcaatgcctatactggaatagtgctacttcgatgcagaaaagaattc

SEQ ID NO: 179231 - DNA, 97 bp, Homo sapiens
gcggtgatggagacacccgtgggtgatgcagacgcaagcgccgccatggcatcagatgaaggcaaactttttgttggagggctgagttttgacacca

SEQ ID NO: 179232 - DNA, 100 bp, Homo sapiens
taccagtgccttgatcttggacttcctagcctccagaaccgtgagaagtaaatttctgtttatgatatcatcaagttgaatcgaaaggaagggaagaagc

SEQ ID NO: 179233 - DNA, 82 bp, Homo sapiens
ctgtgaacgtggctttcctcggggaccagattgtgggtgccaccatctactttgacaacctgcagtcgggtgaggtgaccca

SEQ ID NO: 179234 - DNA, 100 bp, Homo sapiens
tcctctccgctccgcatggcggcagcggcctgcacaccaagggcgcccttcccctggatacggtcactttctacaagttcaacctggtgtgtgctgactc

SEQ ID NO: 179235 - DNA, 75 bp, Homo sapiens
tctttctggcctggaggctatccagccacacttccaccctgggcagcgtgtttggggacgcgtactatgagcagc

SEQ ID NO: 179236 - DNA, 90 bp, Homo sapiens
cgggatggtgccacaggaggctgtgcgggccccgctccgcttcgaatgggaatgcttctagtcacaacagacacccttggccatgacttt

SEQ ID NO: 179237 - DNA, 50 bp, Homo sapiens
gcgcctttgtgcgcgcgccgagattgaaaaggaagatcaggccaacccca

SEQ ID NO: 179238 - DNA, 90 bp, Homo sapiens
gcgacggcctgacgtcggcggagggaagccggcccaggctcggtgaggaggcaaggattcaggtgaggggcctggccgccgtagggccga

SEQ ID NO: 179239 - DNA, 75 bp, Homo sapiens
caaattgaagagagcagttgaagaagtgaagaaattattggtacctgcagaatactcccccagttgcaagaggcg

SEQ ID NO: 179240 - DNA, 83 bp, Homo sapiens
gaagaccgcgcgcagggcctgcagcgggagctggacggcgagcgcgagcggcgcgagaaacctgggctggaagctcttctacg

SEQ ID NO: 179241 - DNA, 100 bp, Homo sapiens
gagagtggagagcaggtagcctaccggacctacagttcaccatttcagccctgtaattgaccagctgtgggacctcagattagtcagaagaagttgaaaa

SEQ ID NO: 179242 - DNA, 100 bp, Homo sapiens
tccggataaaggagctgggaggtcctgattatggagagcatggggaagtgattgactgtgtgcaggagctgagccactccgtgaacaagctgtttggtct

SEQ ID NO: 179243 - DNA, 118 bp, Homo sapiens
gaaaatgggagcagttttcatggatgcccctgtttctggtggtgtcatggagaaactccagctgggcccagagattctgcagcgggaaaatccaaggcttatttatgccaggctgagt

SEQ ID NO: 179244 - DNA, 75 bp, Homo sapiens
gacaaaatggcgaagatcgccaagactcacgaaggtggaagttaaacgagctgagcctcgggacagcaagagcca

SEQ ID NO: 179245 - DNA, 100 bp, Homo sapiens
tttggatcatacagcagatgtccagctcgaaaggacacagaagcgggagaaacgttttcatctgtccaagccaatttaagtaaagcagaaaaacataaat

SEQ ID NO: 179246 - DNA, 101 bp, Homo sapiens
gattccaagtaactcttatttgagctattctcaagctggaataactgagactgaatggacaagtggatcttcaaaaggcggacctctgcaggcattaacta

SEQ ID NO: 179247 - DNA, 110 bp, Homo sapiens
ccatcctgccgtccttctccactttcgccagcccgtgccgcgagcgcggcctgcaggaggatcatccagcagctcgtcaacggcatcatcacgcccgccaccatccccag

SEQ ID NO: 179248 - DNA, 75 bp, Homo sapiens
catgtcgggttattcgagtgaccgagaccgcggccgggaccgagggagaagatggggagccccgaggatgacctg

SEQ ID NO: 179249 - DNA, 75 bp, Homo sapiens
ggtgtacctgccgcgacaccgagtatcgtcgtcctccccgcagtcaggctgcccatcacccaccattccagcagg

SEQ ID NO: 179250 - DNA, 50 bp, Homo sapiens
cacaagattgaccacattgatcacaagaagatggcgaattagaagatggt

SEQ ID NO: 179251 - DNA, 100 bp, Homo sapiens
ttgtactgtgttcgcagtgacctggggaacctgctcaaagccctgggtcgcttggaagaagccaagtgtggcaaaggagcagagaactttgacaagttct

SEQ ID NO: 179252 - DNA, 100 bp, Homo sapiens
atcacgtgccacatttgcttggggaagctgtgatgcagatccatccgccctagcaaaatatgttctggctttggtaaagaaagacaaaagtgaaaaagag

SEQ ID NO: 179253 - DNA, 98 bp, Homo sapiens
cgacttcgatgatcgtgtgtcggatgaggagaagatattcaagattaaagcagtgcaattggctgagaaactccttcctgcctttaacacacctactg

SEQ ID NO: 179254 - DNA, 130 bp, Homo sapiens
ctttttcgacgcctccgccgccgcctgaggaggcgagctagccgggagttacaccgccaccgccaggtctgagaaagaaccccagtttaagtttatctacttcaaccacatgaatctcgccgagaagagc

SEQ ID NO: 179255 - DNA, 83 bp, Homo sapiens
gtacaactaccgctgctggaccacaaaccgctgccagaaaaatccatctgtgtgtgctgtggaattcaggatacttgggcatt

SEQ ID NO: 179256 - DNA, 100 bp, Homo sapiens
gggagatttccagccttccaagctctactgtgacttcagagacactgccaagcagccttagccctagtgtagaggctgaagcagctgagcgtcgagccct

SEQ ID NO: 179257 - DNA, 82 bp, Homo sapiens
ggtcagtccgccgctcaccccgcggccgcaccttcccgccttctcaggcttacaagagtgcgtgcgacatggccgaggcacg

SEQ ID NO: 179258 - DNA, 90 bp, Homo sapiens
gcaaaggctgctctgaagcgcacgacctccgactactttctccttcaagggatttcttcagtgccaaccccttcaccccttggacctctg

SEQ ID NO: 179259 - DNA, 51 bp, Homo sapiens
ggacccgagtgcactgcactggttaagatcaatctacaaggagatatagta

SEQ ID NO: 179260 - DNA, 75 bp, Homo sapiens
gcgtttggcaacagcgagggcaaagagctggtggcctcaggtgaaaagaatctaaggccgctgctccagctcctg

SEQ ID NO: 179261 - DNA, 85 bp, Homo sapiens
cagaagtgccgaaagagcactggactccggaaggtggtggaggtggatacagcagtcggagaacatctggcagagacaaatacgg

SEQ ID NO: 179262 - DNA, 100 bp, Homo sapiens
ataaagacaagctttccatcattggtgaggtgctatctcggagacacatgaaggtggcattttttggcaggatttgacgggatctgaactatacacccag

SEQ ID NO: 179263 - DNA, 100 bp, Homo sapiens
tctccagagcttttggatggtgtgtggccctgccaacctttacattttggacttccagcctccgaaatgcgagtccctgtggcccatcgaggccagaaac

SEQ ID NO: 179264 - DNA, 100 bp, Homo sapiens
ccagccgagacggagccggacccgccgcctcccggtgctcctgcgggaagaagtgtcgcggctccaggaggaagttcaccttctccggcagatgaaggag

SEQ ID NO: 179265 - DNA, 88 bp, Homo sapiens
ggggaataaacgcctgaaagaagctacctgcaagctctatttttaccagatgctcttggctgtgcagaggcatgccaggtggaagtga

SEQ ID NO: 179266 - DNA, 80 bp, Homo sapiens
agatggcagtgtgtgcaaaaaagcgccccccaggagtgcgccggtctcggggaaatgcccggttccttcgtgcccacggt

SEQ ID NO: 179267 - DNA, 76 bp, Homo sapiens
cgacactaccagctatccttaatactttgttgacactgcaagagaaaggtgttacagaagatggctggaactgcat

SEQ ID NO: 179268 - DNA, 75 bp, Homo sapiens
tccaggttgatgaagctaatttattgacttggcaagggcttattgttcctgtttttcgttggaatatacgttgca

SEQ ID NO: 179269 - DNA, 100 bp, Homo sapiens
cgcacagccaggacatcctggaacctgggaaaggggcgccctgcgtccggcagaggaggcgagcatcccgctcaggtgatgaggaacccctcgcgcaccc

SEQ ID NO: 179270 - DNA, 100 bp, Homo sapiens
aacagtctatggtgtgacatcaccttattcacagacaactccaccaattgtacagtcttcccaagggattgttgaagaaacttctgaagagggaaactct

SEQ ID NO: 179271 - DNA, 82 bp, Homo sapiens
ggaacatcattacaagacagacagtctccagggaggacggctttatcctgtggataaacgcagagtgaacgagtttggggag

SEQ ID NO: 179272 - DNA, 75 bp, Homo sapiens
aggaatgaaggcaacatctttcctaaccctgaagcgacttttgtcaaggaaatgagcatgcaagttgtccccttg

SEQ ID NO: 179273 - DNA, 96 bp, Homo sapiens
aagatagatgtgtcctatgaataccgcttcctggagttcacgactctgagtgctgcagccaagagtttactcaacaagaaagcagatggagtcaag

SEQ ID NO: 179274 - DNA, 137 bp, Homo sapiens
gaagagcagaagaaacagttagcgcaagacacaggacttacaattctccaagtaaacaactgatttgggccaggcttagtcatctattggtatggatttatccaggagctggactgcaaccgggaaaggggcatcct

SEQ ID NO: 179275 - DNA, 82 bp, Homo sapiens
ctccgggacaacatgctgcggggcacaggctcaggctgcacgaagaaaaggttattaaagatagacgtcatcatctcaagac

SEQ ID NO: 179276 - DNA, 100 bp, Homo sapiens
agcttttggagagtatgtggctgaaatcttgcccaagtatgtccaacaagttcagggtgtccgcaatgttgccagtgtctgtctgcagattggctaccca

SEQ ID NO: 179277 - DNA, 74 bp, Homo sapiens
ttttttgtgggcttatgctgcacaattggcagagttcacatgagactctgaatatagtggaggagaagaagcgg

SEQ ID NO: 179278 - DNA, 100 bp, Homo sapiens
ctatatttaacggagatcctgatgaagttcgagcactaatatttaagaaagaagatgttaactttcaggtggtgaagcagtattttccaatttgaagatt

SEQ ID NO: 179279 - DNA, 100 bp, Homo sapiens
cgagcctgggaggccggccggtgccagcacctttcggcttctgagacggcggcagcagcggcattcagacggagtctcagtggcgtgatcctggttcact

SEQ ID NO: 179280 - DNA, 100 bp, Homo sapiens
tatcaccctttgatcctagcagattgtttggctggcagtctgctaacacactagctataggaggaccctgctatagccatccccaaggggaccctcatgg

SEQ ID NO: 179281 - DNA, 74 bp, Homo sapiens
tcaggacgctgatggaggaggaccctgaaaaatacgaggaacttcttcaggcgaggaaacgagacctctttcgt

SEQ ID NO: 179282 - DNA, 82 bp, Homo sapiens
ggaaaagcagctccgtccacaacgccgcttcggggctcctaggccccttcacagatgtagtcactacaaatcttaaattgcg

SEQ ID NO: 179283 - DNA, 100 bp, Homo sapiens
tcgccgccaccgcggaaaacgtcttgcacgtgcgaggggcatttcaggagtttcctgtctgtcaggtaaaataccatgaagattttgaaaaaacaaaggg

SEQ ID NO: 179284 - DNA, 77 bp, Homo sapiens
cggcgacagtggcggcggcgccatggcagggcttgcagcaattctgtggtgttcttggtcacacatttatggagttt

SEQ ID NO: 179285 - DNA, 155 bp, Homo sapiens
tgaaataacaggaaacacatgaaaaatgccacgattgtaatgtctgtgaggagagagcaaggcagttcttcaggggagtccacaggtcctggctaccctgggaagagacaagaagtaaatgaagaaagaggaagattccaggacctagatatgat

SEQ ID NO: 179286 - DNA, 50 bp, Homo sapiens
cgggccggcccgaccccaccggccatacgcgttacatccttactattcaa

SEQ ID NO: 179287 - DNA, 100 bp, Homo sapiens
actctgaggagtccactgcagcaggacttaaccaccaccatgtcgagcaaaagaacaaagaccaagaccaagaagcgccctcagcgtgcaacatccaatg

SEQ ID NO: 179288 - DNA, 100 bp, Homo sapiens
aagatcgctcgggaattcttactctcgataaagtcaccaggagactaaagtccatcaaaaacatccagaaaattaccaagtctatgaaaatggtagcggc

SEQ ID NO: 179289 - DNA, 83 bp, Homo sapiens
cagccgcgaggaggcgcgggaggtgttcgagaacgaccccgagacggaaacatttactagggacaacttttgagtgtcagacc

SEQ ID NO: 179290 - DNA, 75 bp, Homo sapiens
cgaaggggcttcttccagagccaaggaggaagggttgtccgggagttggatcagtcacttggtaccctctagcct

SEQ ID NO: 179291 - DNA, 96 bp, Homo sapiens
cggaaatgaggaggagatggtggaggaggctgaaggtgctggagaatctggtaaaagcaccattgtgaagcagatgaggatcctgcatgttaatgg

SEQ ID NO: 179292 - DNA, 101 bp, Homo sapiens
tttcatcctcaagggctccatgcgaccgctgcacatccaggactttccttatcccagttgattgtgcagaatacactgcctgtcgcttgtcttctattcac

SEQ ID NO: 179293 - DNA, 90 bp, Homo sapiens
ttgcaacactaaacgagaaattgacagcccttgaacggagaatagagtacattgaagctcgggacagtcattttgtttactcattcagcc

SEQ ID NO: 179294 - DNA, 83 bp, Homo sapiens
gagcagctcacctgagagacggagccccggctcgcccgtgtgcagagacaatgcagatcttcgtgaagactctgactggtaag

SEQ ID NO: 179295 - DNA, 75 bp, Homo sapiens
caaaccccgaggcggatcgcgtggagtgaaggtcgtaccgcggcgcattggtgctgaagacatggacggcttcca

SEQ ID NO: 179296 - DNA, 85 bp, Homo sapiens
aggctggagtgggcgcggaggcgaccgccatggcgttcctcaaactccgtgaccagagtaaacatcagtctccaaagataactac

SEQ ID NO: 179297 - DNA, 75 bp, Homo sapiens
ggccgccgaacctgcctggctagccggcgacttgagtgacgactgcatcttcctcccgtgaggctggccgagctc

SEQ ID NO: 179298 - DNA, 98 bp, Homo sapiens
gcaccttggagaaaaattttaacgtttgaggtactgcaccaactaaagagacttggaattgtgtggcaggatgtcctgccagtgaatatatattgcaa

SEQ ID NO: 179299 - DNA, 75 bp, Homo sapiens
caaatttcctgcacttcacctggcatgcgaagtccaagggaatgacagaggaagaggaagacaaacttctggcac

SEQ ID NO: 179300 - DNA, 75 bp, Homo sapiens
cggggatgtacactcactgattcttaaggctctgttccttagagatccaaagccccttctcaaagtcagcatgtc

SEQ ID NO: 179301 - DNA, 100 bp, Homo sapiens
caccacggccactccccttcagtgacccaaagaactatgtggtggtaatgcctaaaaagagacaagcactggtggagtttgaagatgtgttgggggcttg

SEQ ID NO: 179302 - DNA, 82 bp, Homo sapiens
gtcaccaacgggaagggccggcccgcctccctggccggggcgcagttcggaggttcaggctatgcccactggaagggccaag

SEQ ID NO: 179303 - DNA, 75 bp, Homo sapiens
ggtgggggacctgccggcacgcgactccccccgggcccaaaggtggtgaaggaggagatctttgatgacaatgcc

SEQ ID NO: 179304 - DNA, 100 bp, Homo sapiens
caacctgccgaattgatgccccagttttctacaattgagtacgtgatacagtgctgccaactgtccctattcagaaatcaatttgaataaagaccgtatt

SEQ ID NO: 179305 - DNA, 82 bp, Homo sapiens
aaaccccagcaagatgcggaggctgcctcggcggagcagaggaaccacacgctgatcatggggacggcaaaacagaacagaa

SEQ ID NO: 179306 - DNA, 101 bp, Homo sapiens
ggaatcagaagatgaccctgtcataaagaaaattgcccttcgggaaatccgaatgctcaagaaaagaggcacagttagatgaagaaggacagtttcttgtc

SEQ ID NO: 179307 - DNA, 51 bp, Homo sapiens
cccagatcgaattccgtgatatgatcaacaacccctccccgtcgtaaacgc

SEQ ID NO: 179308 - DNA, 97 bp, Homo sapiens
gcggccccgccgagagccggaggcaatggatgaacagagcgtggaggaagaattttaaatcgtttctccaaagacattggacacttggatgatttgc

SEQ ID NO: 179309 - DNA, 76 bp, Homo sapiens
cctcgccatgtcctgctgcccgtatggtgactacgaccccagtgttcacaagcggggatttttggcccaagaggaa

SEQ ID NO: 179310 - DNA, 100 bp, Homo sapiens
tagaccaaagccattgcttttgaagttattaaagtctgttggtgcacaaaaagacacttatactatgaaagagatcccatactccaacatcatcaggaag

SEQ ID NO: 179311 - DNA, 100 bp, Homo sapiens
cgagaatttcttaagtttttgccagagtcagaagagcatttgacattgtgcagcaaagaaatggttatggagaagcccagtccgctgcttgtagggcggg

SEQ ID NO: 179312 - DNA, 101 bp, Homo sapiens
ccactgccctttccccgcctggtctgagtgacattgagcgcaccatccttctactaaaggaggtgccgtgagcgatgtggagatgcaggaacactatgatg

SEQ ID NO: 179313 - DNA, 82 bp, Homo sapiens
gcaaggctcttccctgaccattttctactgtccctgcgcgaggaagctcttcgtgggcggtcttgactggagcacgacccaa

SEQ ID NO: 179314 - DNA, 75 bp, Homo sapiens
gcactctagatgccctcaactatgctctccgctgtgtccacagcgttcaaggcgactgaaccgaaaccagctgca

SEQ ID NO: 179315 - DNA, 75 bp, Homo sapiens
attgtgtatgtagaagaccagaagtggatggagaagttgaaactgtgggacagccagacagaagagatagcatag

SEQ ID NO: 179316 - DNA, 129 bp, Homo sapiens
tggtgtgcggaggggacggttctggttgcagcaagcagtcaggctccttcaggaaattcaggcctgcgggatacaacgggaatacaaaaatgcgctagagcggtccgcaacgctgtagcctgcgtaagg

SEQ ID NO: 179317 - DNA, 100 bp, Homo sapiens
cgacattgaagctagccgaatgcgagtgttgtgtataaaggaagttgaaatcctgggccttatgtgtgtagactggcaatgtccatttgaagattttgta

SEQ ID NO: 179318 - DNA, 76 bp, Homo sapiens
gacggccagaaagttccgccatgagctggggcacggagctgtggcaaccccaaggtccaggtggaggccatcgaag

SEQ ID NO: 179319 - DNA, 83 bp, Homo sapiens
tgtgcgttcgacgacgcggcaccggcttcgacgccctctgcccgctccagaagcagccatcactggtgcaagctatatttaac

SEQ ID NO: 179320 - DNA, 130 bp, Homo sapiens
acctccaaattctttggtttctttttttgatgcatctctacctggaactttgccgatgccttcaattaagttgcagagttctgatggagagatatttgaagttgatgtggaaattgccaaacaatctgtg

SEQ ID NO: 179321 - DNA, 100 bp, Homo sapiens
ggtggccgccctgttccccgcgctgcggcctggcggcttccaggcgcactaccgcgtgtactaatggtcacttgatgtgcgctggctgttttatccacct

SEQ ID NO: 179322 - DNA, 93 bp, Homo sapiens
aagcatttcaacgtgcgtgtcacccacgcagacatcttcagccgctgccaggattttttatcaagcagaaatgcatcgaacaacgagaatcaa

SEQ ID NO: 179323 - DNA, 100 bp, Homo sapiens
atgtgaagtttcctataaggttagaaggccttgtgctcacccaccaacaatttagtaggactggacctcactgtgggaacaacaagatcaacaagaggag

SEQ ID NO: 179324 - DNA, 76 bp, Homo sapiens
tgatcccccagcttcagcagcttggagtccagttcaggctggtactgaacgacacctgggtctccttcccttcctg

SEQ ID NO: 179325 - DNA, 74 bp, Homo sapiens
gatgggagaccaccgggatgggcaggttgggcccgaaggcatcctgcagaacggggctgtggacgacagtgtag

SEQ ID NO: 179326 - DNA, 88 bp, Homo sapiens
tcgctgctgctgctgctcggagtcttcgccgccgccgccgcggccccgccaggactgtttgcaacctctaagcatgcaggctctccca

SEQ ID NO: 179327 - DNA, 75 bp, Homo sapiens
ggccgaggtagaggcagtggcgcttgagttggtcgggggcagcggcaggtaagaatgattgatgttggctgatat

SEQ ID NO: 179328 - DNA, 90 bp, Homo sapiens
agttgctttgaatatggcaagagggttaaagataactggagtgccaaggctaaaagacgaaataccaccggaactggtcgaatgaggcac

SEQ ID NO: 179329 - DNA, 120 bp, Homo sapiens
cggagccatggaggacgaagtggtccgctttgccaagaagatggacaagatggtgcagaagaagaacgcggttactataacaacagtaccaaggtggctgtgaaaaccctgaagccagga

SEQ ID NO: 179330 - DNA, 75 bp, Homo sapiens
atccattttccagaaaccataattctgacggatatgaaaaagtggggctgatccaacaattgaaactgactctgg

SEQ ID NO: 179331 - DNA, 88 bp, Homo sapiens
cctacagaatgaaagtttaagttccacacatcatacagtttgcagaatttgatcagatcatgaagtctgaccctgaccacttagcaga

SEQ ID NO: 179332 - DNA, 74 bp, Homo sapiens
cagttcccctcaggtcttagcggactggccccaaaagctgcggtaaatgactcgtgctaccagaatgatgattc

SEQ ID NO: 179333 - DNA, 75 bp, Homo sapiens
gcctgagttggcattcgtataaatgacctggtggctgaatccacagaggagcctgctggttctaatcggggacag

SEQ ID NO: 179334 - DNA, 87 bp, Homo sapiens
cttttccgttgccggtgccggcctagcgtcctggaattacttcaatcaagagagattaaacagattctagaaaatgaacttcagata

SEQ ID NO: 179335 - DNA, 82 bp, Homo sapiens
aaagttctctcgatcagggcatacatctttcttcgacaaaggcactgtgacttctgccgtgttcaccgtgggagacaacgtg

SEQ ID NO: 179336 - DNA, 50 bp, Homo sapiens
aaaaggggacacggcggtgcttaggtaacttgcccaggagtcgtgcttaa

SEQ ID NO: 179337 - DNA, 100 bp, Homo sapiens
ttcttcgagtatttgtagaagggattgacttctaaggactcttggtacatgaggaagaaacccggaaggggaagaggaaagcaaaggcgtcaggaatggt

SEQ ID NO: 179338 - DNA, 100 bp, Homo sapiens
tcactgcagtagaattccttgtagataagcaactggattttttaactgaagatagtgcctttcagccctaccaggaatgtatcctgtcaggtataatgtc

SEQ ID NO: 179339 - DNA, 83 bp, Homo sapiens
agggactcttgcaccccgactgcaagcttcaggtgttggaacacaacatttgcctgcaacaaggacagcggccagtggcacta

SEQ ID NO: 179340 - DNA, 100 bp, Homo sapiens
gtttcgactacgtgaaggccctgcggcagcgcatcgcggagaccaggtgctggagaatctggtaaaagcaccattgtgaagcagatgaggatcctgcatg

SEQ ID NO: 179341 - DNA, 80 bp, Homo sapiens
tattcagcatagctattcctgttgatggtgatgaagacagattgacgtgagtgaattcagatataactcaagcttgttag

SEQ ID NO: 179342 - DNA, 82 bp, Homo sapiens
ttagctacccacgatgtttcagacagtccccgacacgtcgtcttacatcaaggctctgggcgtggggaggctgagacacggg

SEQ ID NO: 179343 - DNA, 100 bp, Homo sapiens
accaagtacctgcagatcctgacctctctgatgagatggatcgcaaattgtggctactaatttgccccctgaagatcaagatggctctggggatgactct

SEQ ID NO: 179344 - DNA, 100 bp, Homo sapiens
ctgcagagcgcgcagtacctccggtttgtctacagattttgagcgttcgaagttgacccctgactaagtatactttgctgctccctcagcctttgaaaaa

SEQ ID NO: 179345 - DNA, 100 bp, Homo sapiens
gagcactgggggtggtgccagtttggagctcctggaaggtctgctggagtttgttggagttccactccagaccctgtttgcctgggtatcaccagcagag

SEQ ID NO: 179346 - DNA, 96 bp, Homo sapiens
ccgggccaggagctgaccgatgttaatggggtccggattgcagcacctgctgtctgcgagcctggctgtggtgcacatggaacctgccatgaaccc

SEQ ID NO: 179347 - DNA, 74 bp, Homo sapiens
tttttgatgatgaccttgaagatgatgcccttgatgctgatgagaaagtttggatttaggtggcgagtagaaaa

SEQ ID NO: 179348 - DNA, 75 bp, Homo sapiens
ctggaaatacagaaccacagtttatcatcccttcctggcttcgtgggacacatatgcaacatgcctatgattttt

SEQ ID NO: 179349 - DNA, 73 bp, Homo sapiens
acctcactcccaactctcctgcagaaatgtgaaggagaacgacctgctcagaatgagaagaggaaggagaaaa

SEQ ID NO: 179350 - DNA, 90 bp, Homo sapiens
gccgagatgccgggggagcggggccttccacaccccctccgtgggtgtgtgatatgaggccccaggattcctggcgaggtcctcctcccc

SEQ ID NO: 179351 - DNA, 75 bp, Homo sapiens
tctgggctcgcggcgtctccggggaaagccgtggccccgagggcggatccgagcagcagcccgtggagtctgaag

SEQ ID NO: 179352 - DNA, 75 bp, Homo sapiens
aacctggaggaggaggccatcatcatgaaggacgtgcccgactggaaggtgctggagaatctggtaaaagcacca

SEQ ID NO: 179353 - DNA, 100 bp, Homo sapiens
agcgccgcggttaaccacgtctcgtccacgacctccctagatgcctgtgaggagccaccaacatttgaagctatggagctcattggtaaaccaaaaccct

SEQ ID NO: 179354 - DNA, 100 bp, Homo sapiens
aagatcctggtgtcgccatgggccgccgccccgcccgttgattcctggtcgggtggcttccagtggtcttcagtctgtcgtgcaccgatgagaactctcc

SEQ ID NO: 179355 - DNA, 83 bp, Homo sapiens
cgggtcctccctgcctgccgatgtgcatcggtacatgaagattgcagagcagagcgggcggaggaccccgggcgcgggcgcgg

SEQ ID NO: 179356 - DNA, 75 bp, Homo sapiens
cgacaacagagtgggaactttctgtcttgtgatccattgcctgtcccccagtcaaccagagaggagaaaagagaa

SEQ ID NO: 179357 - DNA, 50 bp, Homo sapiens
ctcatccactgctcgctgcctctccaggccagagacgatgattcagggaa

SEQ ID NO: 179358 - DNA, 95 bp, Homo sapiens
ttattttttctcatggatgttcttcttcgagtatttgtagaaggcctggtggagttgacagaagagatcctgaagctgctgatggaactggtctt

SEQ ID NO: 179359 - DNA, 75 bp, Homo sapiens
cagctgccgaacgacgtggtcctacagatctgagtgggacatacttttgaaggatgtgcaatgttcaatcataag

SEQ ID NO: 179360 - DNA, 74 bp, Homo sapiens
ccagaggcagaaaacggacggaagaaaaggtctggccggtttcaggtgttgaccaggggcaagaactgctctgt

SEQ ID NO: 179361 - DNA, 99 bp, Homo sapiens
atgagctggaggacatgaagatgaagatctctgccctcaagagtgaaatccagaaggaggccactcgctctggtgggaccctcgtgcttgtggggctgg

SEQ ID NO: 179362 - DNA, 100 bp, Homo sapiens
cgtgcgacccaagcccctgcattcctgtacggagacacctatggctgccgatgaaggctcagcagagaaacaggcaggagaggcccacatggctgcggac

SEQ ID NO: 179363 - DNA, 99 bp, Homo sapiens
gtcagtttctcaaaaccagcatcgagatgtagttcctgagcatgaggctcccagcagtgaggccttcatggtgaaacacctcttggagtatacccaggc

SEQ ID NO: 179364 - DNA, 95 bp, Homo sapiens
ttccagtcatgaggctgtggtggatctttctgatgaggagctctatgctggtgtgtacatcgattttatgggcactgatgcagccatcttccgca

SEQ ID NO: 179365 - DNA, 75 bp, Homo sapiens
tccaacatcctggatgtcctgggtgccagtcagagagcaaggctgaagaggacgtggagtctggggaggatgccg

SEQ ID NO: 179366 - DNA, 76 bp, Homo sapiens
cccatcatcgccagctgcacactcttggggctctacctctttttcaaaatggcccactgcgtgaccttggttcagc

SEQ ID NO: 179367 - DNA, 113 bp, Homo sapiens
cgggtattggatgattggtagctaagactcccgaatacttcagaagtggggaaatggtctcggacagcccgggagacgagccctcggagtccccatacgaaagtgcagacgaa

SEQ ID NO: 179368 - DNA, 51 bp, Homo sapiens
tatcaacaagccacgagtaaatgagtgtttggaaacatctgagcctctttg

SEQ ID NO: 179369 - DNA, 50 bp, Homo sapiens
ggcttcccaacattcttgtctgtgatggatggagctcttagaagaggccg

SEQ ID NO: 179370 - DNA, 87 bp, Homo sapiens
ccccattcaagttcaagttcacaattggcggactttgaacatgtcggggatcgccctcagcagactcgcccaggagaggaaagcatg

SEQ ID NO: 179371 - DNA, 50 bp, Homo sapiens
ctctatccaacctattatatggcttaaagaagacatgtgtgaccatggac

SEQ ID NO: 179372 - DNA, 74 bp, Homo sapiens
ctgtgctcgcgctactctctctttctggcctggaggctatccagcggcggctacttccctgagaatgtcaaggc

SEQ ID NO: 179373 - DNA, 100 bp, Homo sapiens
atttcttttgtgcaagatgagcctcaagtgcttctgcattacagaaatgcttccagactgcacacttttacttagaggacagtacatcccctagagttat

SEQ ID NO: 179374 - DNA, 90 bp, Homo sapiens
tgagtgaccatgcagcaaaagaaggagggtcctctcagtgattaaggctttggccaaagagttgcaaaatgatgtccatgtggtaaggcg

SEQ ID NO: 179375 - DNA, 100 bp, Homo sapiens
aaggagtcacggatcggattcctcagctacgaggaggcgctgaggagagtgtaaacaggaacatcgataagtagtgtaaaaacttgcacaatgaaatccg

SEQ ID NO: 179376 - DNA, 82 bp, Homo sapiens
gctgtgctcgctggcaccccgaacgggttgcttcccccgctgcgaggtttgcctgcaatgagatttcattctctacatttaa

SEQ ID NO: 179377 - DNA, 88 bp, Homo sapiens
aaatacccctttgaattaattatggctaaatggtggagtcaatgaagaaagtagcagggatggatgtggagctgacagttgaagaaag

SEQ ID NO: 179378 - DNA, 98 bp, Homo sapiens
cctgaatgtgagaatcctgaaacagatttggagtccttcaataatgttaaacagtggctgcaggaaatagatcgttatgccagtgaaaatgtcaacaa

SEQ ID NO: 179379 - DNA, 98 bp, Homo sapiens
ggctgcaacctgcagcacatcagcgaccgggagaacatagacgattgccttgggtccccagtgtttactcccatcaaggcagacataagcggcaacat

SEQ ID NO: 179380 - DNA, 96 bp, Homo sapiens
gtttcacactccaccaagcatcccattacagatagaagagggtctcctatggacagaagtgcgggcaaggagctttgttcctccccgatgtcaccc

SEQ ID NO: 179381 - DNA, 75 bp, Homo sapiens
gccagcgccgcgcccggggccgtgcgctctcgggccactcggccgcagtttaactcggctgctaagcagctgata

SEQ ID NO: 179382 - DNA, 100 bp, Homo sapiens
tggcatttcagtcactggtttgcagagtccagctgatacagaaggcaataataaaacagtgctaaaatataaatgccatacaatgaagaagctcagcatg

SEQ ID NO: 179383 - DNA, 89 bp, Homo sapiens
cagcagcagcagtagtaccagcagtgacaggttgattcttcaccacactgaaaccattaggaaaaatccttgtggttaacagcagaggc

SEQ ID NO: 179384 - DNA, 100 bp, Homo sapiens
gagttagcgtcctcaatgtggacgccctgagctcccattaggagccgctggctgcggcagcaggggactagcgtgagagtgatgcagccaacacgaacgg

SEQ ID NO: 179385 - DNA, 100 bp, Homo sapiens
aaaggaaagaaacgaaggagagatccaggagtggcagaagctcaactatgatatccataccctgcggcaggttcgaagggaagtaagaaacagatggaag

SEQ ID NO: 179386 - DNA, 100 bp, Homo sapiens
ctgcaaggaccccctccggctcaagtgtgtcaagcaaggggctgggcctgtatgctgctcgagacattgagaaacacaccatggtcattgagtacatcgg

SEQ ID NO: 179387 - DNA, 101 bp, Homo sapiens
agtcggcggagcttcgccaaggctggcgcagtcgttgatattcactgatggactccaaagaatcattaactcctggtagagaagaaaaccccagcagtgtg

SEQ ID NO: 179388 - DNA, 98 bp, Homo sapiens
ggctgaagaaatccatgactccaacccagaaccgggagaaatggatctactactgcaatggccatgactcgctctttactgagcgtgtttgaagaaga

SEQ ID NO: 179389 - DNA, 75 bp, Homo sapiens
attttcttcaatcacatctgaataaatcacttgaaggtatttgttactgaaaacacaccagctgtctctggatgc

SEQ ID NO: 179390 - DNA, 75 bp, Homo sapiens
aaattcaggagttcaagaaacgagatgcacaggtacctttgacaggagcgtgaccctgctggaggtgtgcgggag

SEQ ID NO: 179391 - DNA, 75 bp, Homo sapiens
ctccttcggcagtccacccaccgccgccgcctcccagatttgggcaaagagaaagcaaagcagctgcgctcagac

SEQ ID NO: 179392 - DNA, 76 bp, Homo sapiens
cccacggaggaagagccgggcagtccctggagcgggccaggatgaaacaggcgcctatttaatcgacagagacccc

SEQ ID NO: 179393 - DNA, 95 bp, Homo sapiens
caagccttctggtgcctggtacagatctgtgagaagtacctgcccggctactacagcgagaaactggtgttctgggaagatggcatcatgtctgg

SEQ ID NO: 179394 - DNA, 100 bp, Homo sapiens
gcgatgtccggggccggcctagccgcggtggtgagctgcctgcgcccgcagcccggcgaggagccgcagacccatgagcaacagctgcgaatgcggatca

SEQ ID NO: 179395 - DNA, 100 bp, Homo sapiens
gagatggcgactagtggacaacagaacaatattggaatggtggttttgatgatgatggttcagaatttcatgaacatatatttctggagaaacacctgga

SEQ ID NO: 179396 - DNA, 74 bp, Homo sapiens
cagagatgtgatgctggagaactacatgaacctggcctctgtgggttcaaaatcaaaggaagcccagaagggag

SEQ ID NO: 179397 - DNA, 98 bp, Homo sapiens
ttggctgctgcaggagccattttagtgaacacctacctcttcatgatgcaagcccaaggcattctgatccgggacaacgtgagaacaatcggtgctca

SEQ ID NO: 179398 - DNA, 83 bp, Homo sapiens
cgggaggtcaacgaggtcatccaggttatggaaacaaaggacatgctttacatcgtcactgaatttgctaaaaatggagaaat

SEQ ID NO: 179399 - DNA, 100 bp, Homo sapiens
cttccagcttctgctgtccttctttgtggagagcaaggttatgaagacagtatggagtttccagaccatagtagacatttgctacagtgtctgagcgagc

SEQ ID NO: 179400 - DNA, 101 bp, Homo sapiens
gaataaagcgttggcttctgattttcctcacatttctgcttgtgcacatgagactacgtctactttgagaactcctccagcaacccatacctgatccggag

SEQ ID NO: 179401 - DNA, 73 bp, Homo sapiens
gtagagtctaaactcatccttaaaggggtcatactgctggtgtctgctttttcaacgtgggagaaggagttgc

SEQ ID NO: 179402 - DNA, 100 bp, Homo sapiens
ttgaacaaacagattgcgcaaaagaccaaacatcttgaagaggtatgaaataatgtactcttgctggagaaccgatcccttagaccgccccaccttttca

SEQ ID NO: 179403 - DNA, 100 bp, Homo sapiens
gtttttaaccctagaactgtagcatcacaacctatcagtacacagactctgaattatatccagatcgagagacagaagattctgaaagggttcaatgaaa

SEQ ID NO: 179404 - DNA, 98 bp, Homo sapiens
gcttcagccagcaaagcagcagaattctttgatgtggccacagatgtctttaattccaaaaacctggccgttcaggcacaaaagaagatcttgggtaa

SEQ ID NO: 179405 - DNA, 74 bp, Homo sapiens
ccatttgccagtgatggaccgtgctagtgacctgactgatgccttcgtggagtctttaacacctctgtgtgaag

SEQ ID NO: 179406 - DNA, 101 bp, Homo sapiens
ggcctcatcagcccggcctacctcttcctctggcccgaagccttcctttatcgctttcaggtgccaggggagagcaagaaacagtggaaaccagccctggt

SEQ ID NO: 179407 - DNA, 98 bp, Homo sapiens
cctcccgagtaactgggactacaggctgcatgttaaatggccaagaggtgaggcttactattcactatgaaaatgggttcaccatctcaagggaaaat

SEQ ID NO: 179408 - DNA, 51 bp, Homo sapiens
gagcgtggttgctgaccagttgaaagagatccgtgctcagctcacagagca

SEQ ID NO: 179409 - DNA, 75 bp, Homo sapiens
aagacgcacggtgccaggaccaagtatctgggtctgactgcgtaccatgatatctccctggacaagtgctatgtc

SEQ ID NO: 179410 - DNA, 75 bp, Homo sapiens
cctgggccaggtattgctccggagggtgttactcgttagcgtcagtttttcatcaacaacagcaacttgtgattg

SEQ ID NO: 179411 - DNA, 80 bp, Homo sapiens
ctgaagggcaaggaaagcagcatagagaatgagatagccgtcctgagaaagcgccatgtcagaaccggctggggatgtcc

SEQ ID NO: 179412 - DNA, 92 bp, Homo sapiens
actggggccagggaaccctggtcaccgtctcctcagatattgatgatgttaagaagttcaaaccgggttacctggaagctactcttaattgg

SEQ ID NO: 179413 - DNA, 82 bp, Homo sapiens
ccgagggcaccaaggcggtcaccaagtacaccagctcgaaattcccaacttcttctggagcctggggatcggtcacactggt

SEQ ID NO: 179414 - DNA, 83 bp, Homo sapiens
ttcccaatgacatgcaagttggacagacgggaaaaatagtagcaccactacgtggtgaacatgggtctgattgacaaactgtg

SEQ ID NO: 179415 - DNA, 147 bp, Homo sapiens
cctcctcctcctccccaccaccaccatctccatcacccaccaacaacaccacaataatccacagccaaggacacattcagctaacgtattttagcaggtggagtgaggttgaagattcctgtgacagcgatgccatagagagaatgt

SEQ ID NO: 179416 - DNA, 100 bp, Homo sapiens
cagaatttgatgctgtggttggatatttagaggacattatcatggaataaacagccattggactcttcaaacaaaaacgctgtctccatcaagtactgct

SEQ ID NO: 179417 - DNA, 89 bp, Homo sapiens
ccgggatcgtgaccgagaccgtgaccgagagcgtgaccgagagcgcgaatatcgtcatcgttagaaggataccaagggttcgagttttg

SEQ ID NO: 179418 - DNA, 99 bp, Homo sapiens
tcatgattatgaaaatgatttctgccacagaaggtcccgtgaaggccagagaagtccaaaagaatgattacggacctgaagccaaagaacaagatgcgc

SEQ ID NO: 179419 - DNA, 90 bp, Homo sapiens
gtttgattttggtctccgcgtcacgggataagactcttcgcatctgggacctgaataaacacgatatgtcttgtcgttcaagacttgcaa

SEQ ID NO: 179420 - DNA, 75 bp, Homo sapiens
ctgtgaagaagctgtatgacattgatgtggccaaggtcaacaccctgattcgtggatgcccgtcaccaagttggg

SEQ ID NO: 179421 - DNA, 81 bp, Homo sapiens
gccgtctcttcgagttcttcgtgctgctcaaggataaagataaagtttctctaaccaagaccccaaaactggagcgtggcg

SEQ ID NO: 179422 - DNA, 100 bp, Homo sapiens
tggcagcgcgacctggccagctgccgcgactgggaggagcgccggaacgccgaggcccaggtatttcagtgtctgtagacaagatggaatcatctccatt

SEQ ID NO: 179423 - DNA, 90 bp, Homo sapiens
agagccgcctgccatgccccagccagtccccacagcataacagggtcacgcccagaaccccctgcaggtcggggctgagctccagtcccg

SEQ ID NO: 179424 - DNA, 100 bp, Homo sapiens
ttttactactgtgacaacattaacgactctcttgagcctgagggatccattacagtttcaatgggtattgacttttgtgattctactcagactgccagtt

SEQ ID NO: 179425 - DNA, 90 bp, Homo sapiens
acctgtctgagactatttaccaggaaccattttgcagtaatccttctgatgtaccagaaaagcccaggtgaaaagagatttgaatgcccg

SEQ ID NO: 179426 - DNA, 98 bp, Homo sapiens
gcttcatcgagctgcctttacaggacgaaaggtaaaacatggctaaaagcttacggagtaagtggaaaagaaagatgcgtgctgaaaagagaaaaaag

SEQ ID NO: 179427 - DNA, 80 bp, Homo sapiens
ttaaggtcttcagcggggcgctccaggaggcactcacaggtaactaggatttctacctcaaccgcgagacctatgcaagg

SEQ ID NO: 179428 - DNA, 90 bp, Homo sapiens
catgaagctgaggaggggagtaaattgaaaatattggggccatttagtaacttctttgcaaggcatgaagctttgctgtattatgtttta

SEQ ID NO: 179429 - DNA, 127 bp, Homo sapiens
cggcttggcgatggagtttccggacctcggcgctcactgttcggagccgagctgtcagcgcttggggcggcgactggcggcgcgatggacctgaccgggctcctgctggacgaagaaggcaccttct

SEQ ID NO: 179430 - DNA, 50 bp, Homo sapiens
agacgatgaagccccctctgatggaagctactctttgtccgtgcgagact

SEQ ID NO: 179431 - DNA, 97 bp, Homo sapiens
gctggccatccgtgaatccatcgagagtgagattaggcgagaacgagagaggcagacaaacccatcagccatggaagaagaacgattatccattcaa

SEQ ID NO: 179432 - DNA, 100 bp, Homo sapiens
aggagcagctgcgcccgctgccagcacacgactacttcgagttcttcgccgccgacctgagctggaacagctttgggtcttggggttgtgaacatcctcc

SEQ ID NO: 179433 - DNA, 75 bp, Homo sapiens
gatggttttgcactatttacaaagctgagggtaaaaagctgggattggtaggctgggtccagaacactgaccggg

SEQ ID NO: 179434 - DNA, 98 bp, Homo sapiens
ggagcagcctgggcgggtcgcagggtctccgcgggcgcaggaaggcgagcagagaatggcttcctttgggtggaagaggaaaattggtgagaaggtct

SEQ ID NO: 179435 - DNA, 51 bp, Homo sapiens
ctgcggccgcccggctcttgggaaccaaggaaaaaggtcactggtcagaac

SEQ ID NO: 179436 - DNA, 100 bp, Homo sapiens
cttacctctttgatctcgacaataagctgcctgtggaggaaccgattgtgtccacagatgaggtcatcttcccactcaccgtttcactggatagactgcc

SEQ ID NO: 179437 - DNA, 97 bp, Homo sapiens
aagaaagtgacctctgagaaagtgagccagaaacatgctgagcctttgacaggaaagtatttcaagcctaaacctttgggtgaaaagaactcttgaa

SEQ ID NO: 179438 - DNA, 88 bp, Homo sapiens
ttaatggtgccaatgatgttggaggatacctgtggatgacccctccggcgaaggtgtcctgccctcggcccgcggcccagccaccttc

SEQ ID NO: 179439 - DNA, 90 bp, Homo sapiens
caacatcaactacgtccctctgaagagtaagaaggcagtgctttccatcaccactggtggcagtggctccatgtactctctgcaagggat

SEQ ID NO: 179440 - DNA, 102 bp, Homo sapiens
ccaagatgatgctactatcgttagactagcctatgctgcttcctaggtgacagacaggtacactgtatgctagccctgtatctgtctgagcagtggaatgtg

SEQ ID NO: 179441 - DNA, 100 bp, Homo sapiens
caaggctctccgtgatgctgtggccaaagctgtcctcgagtgcaagccactgggcattaagactgctctgaagccactaacaccttcaaagccaccagta

SEQ ID NO: 179442 - DNA, 98 bp, Homo sapiens
tcagctcatagccgttgacaaccaacttctgcatgtgaaggtggttctacccaggcaataacccctacactgggacccccgactggttgtatgcaggg

SEQ ID NO: 179443 - DNA, 83 bp, Homo sapiens
tgagcctttttggcctggcttgtttgcaaaggcctccccaaagccagtcctgtgtcaccaatcaaaggaaaggaagccgtcag

SEQ ID NO: 179444 - DNA, 82 bp, Homo sapiens
cgctttacgcttcttcaaaccctgagtatctcagtgccagtgatgacaatgcagatcttcgtgaagactctgactggtaaga

SEQ ID NO: 179445 - DNA, 100 bp, Homo sapiens
gcttcgttatttcgggcactccacagattctgttgcgaaggcagccatctttagttcgtctttcctagagagttatttgagacagagtctcgctctgtca

SEQ ID NO: 179446 - DNA, 83 bp, Homo sapiens
cggtactcttcagggatgagtcatgtggcagtggaaaatgcgctcgggctggaccagcagcaggagcattggtttgaaaaggc

SEQ ID NO: 179447 - DNA, 50 bp, Homo sapiens
cagagcagggcggcggcgactcgctggagtcacatcagaagccgcgcaga

SEQ ID NO: 179448 - DNA, 74 bp, Homo sapiens
ctcagacaagactggtacacttacaacaaaccagatgtcagtctgcaggtctatccagaagttaaaggagagat

SEQ ID NO: 179449 - DNA, 73 bp, Homo sapiens
tgtggttcctgcatgaagacagtggctggcggtgcctggacgtacaaacgggctcatcttcgcttgtgcctgg

SEQ ID NO: 179450 - DNA, 148 bp, Homo sapiens
catgggggagggctggggtcagcaattcaagactgtcttttctatcctcttcactgcctctttcagcaatatgaagccgccatgtactcggagatccagagggagcgggcagacattgggggcctgatggcccggccagaatacagag

SEQ ID NO: 179451 - DNA, 101 bp, Homo sapiens
tcaagcgaagccttgaaaaagctgccctgagacggtgtcccgccgaaagatacacacaaatccatgtttttaccagtcttcagagaagagtcagctcttac

SEQ ID NO: 179452 - DNA, 100 bp, Homo sapiens
ccaacgtgggctcgctcttcgacgacgtacccactgatggtaatgctggcctgctggctgaaccccagattgccatgttctgtggcagactgaacatgca

SEQ ID NO: 179453 - DNA, 101 bp, Homo sapiens
attccactggattgggaaagaccatggcagaaaccgaaacttcattgccccttcaatgtgggaatccagccagaccctattcttggacagcatcagtgaaa

SEQ ID NO: 179454 - DNA, 136 bp, Homo sapiens
agctactggatctcagccttgtcaaagatgccagatgtgggagacacgccaaagctcccaagccctgcatgaattccccaatgacatcttcacaaacgaggatagaagacaaggtgcggtggtcctccatgtgctc

SEQ ID NO: 179455 - DNA, 97 bp, Homo sapiens
gtatgtcatgacggggatgtatggggaccctgcagaaatgggtgccggaatctgtctcctgatcatcattcagctcctctggtgcaagtgtggtagc

SEQ ID NO: 179456 - DNA, 97 bp, Homo sapiens
gaagatgagctccaagatggtcataagtgaaccaggactgaattggttatcttgtagcatagcaacttcggatttcactctacccggagagtttccc

SEQ ID NO: 179457 - DNA, 100 bp, Homo sapiens
tccacccagtggagctgttccagttactgggataccacctcatgttgttaaagtaccagcttcacagcaacgcacctcttgctttttcctccaaagtatg

SEQ ID NO: 179458 - DNA, 88 bp, Homo sapiens
agccggaacctatgctgtgtagatgaagtagattcagggagcctactacacacagccggtgtatgctgcccagcctcatgtcatccac

SEQ ID NO: 179459 - DNA, 98 bp, Homo sapiens
ccaccatggacctggagcagcagcggcagcttgtgagcaccctggagaagaagcagcgcaagtttgaccagggagctgagcacataacgacttacacg

SEQ ID NO: 179460 - DNA, 83 bp, Homo sapiens
tgagaggacaagcccagattccaaaacttatgtcaagatgtggagagcatcttgtgcgcaccatactggctagagaatgttca

SEQ ID NO: 179461 - DNA, 82 bp, Homo sapiens
gcgggggcggcgtgggcaagtcggcgctcaccatccagttcatccagccaccaaagtccttggcactgtcaaatggttcaac

SEQ ID NO: 179462 - DNA, 101 bp, Homo sapiens
caatgggctgctggtggggctggctgaggaggaaatgcgagcttcgctcaagaccctgcaccggatggcagagaattcccaaagagaatattacgtctgat

SEQ ID NO: 179463 - DNA, 83 bp, Homo sapiens
ggccgctctgggatcccggccaccagcaattgtccggaacaagatcactcaaggtgaaggataatctactaataccagcactt

SEQ ID NO: 179464 - DNA, 75 bp, Homo sapiens
aaaaccgatggaggctgccagtgccatcctttcccaggctgatgctcgacagacttcctcatcccacaaagccac

SEQ ID NO: 179465 - DNA, 99 bp, Homo sapiens
cctcacgctagccgatgccctggaaaagtgcctcaagaaaggaaaggagaaagtcagtccgggtagaacttcagaccctaatcctgcagcccccgacag

SEQ ID NO: 179466 - DNA, 75 bp, Homo sapiens
cgccgccgccggagctctgcagcacgctagaacaacagaggcagcagttgcttactgaacgccaaaacttccaca

SEQ ID NO: 179467 - DNA, 100 bp, Homo sapiens
caagaggcaaaaagtatgctttagaaaaagtgccaaaagtgggtagaaagtttcataggataggactccctcctaaggggccttggacaagttgttactg

SEQ ID NO: 179468 - DNA, 75 bp, Homo sapiens
ggagtataaaaatgccacctacggctacgttttagagatccgtgctcagctcacagagcagatgaaatgcctgga

SEQ ID NO: 179469 - DNA, 50 bp, Homo sapiens
aagacctctttggacccgaaattgtaaggcatcagaacacaccatgatgg

SEQ ID NO: 179470 - DNA, 51 bp, Homo sapiens
gagaacctggcacttatgtcctccctgggtgctggagaatctggtaaaagc

SEQ ID NO: 179471 - DNA, 89 bp, Homo sapiens
gatggcattattgatgacagtcttcatttagaacttgaaaagcagtttgcaggcctttcagatatatccatctcacaagacatccccgt

SEQ ID NO: 179472 - DNA, 83 bp, Homo sapiens
cagccgcctgcgcctgcgggagccggccgagaactactggtggcgtggccagaacacacggacgctgtgtgtggggcccttcc

SEQ ID NO: 179473 - DNA, 100 bp, Homo sapiens
cagaaggtggaggatgtggtgctgcccgagaaggtggacgtgctggtgtctgagtggatggggacctgcctgctggaagcagtcaattatagatttcttc

SEQ ID NO: 179474 - DNA, 100 bp, Homo sapiens
taacttggacacatgtggttccatcagtcaggtcattgagcagttacctcagccaaacaggacaagcaggtgtggacactgcaagagacttgcacctgag

SEQ ID NO: 179475 - DNA, 75 bp, Homo sapiens
atcctgctcctgggtgccgtggcatgtcgatttgtccttcactacaggcaaagtgtttcatggatttcaaagctg

SEQ ID NO: 179476 - DNA, 82 bp, Homo sapiens
cgggacacctggaagccgagaaatgattggtttatcttggaagctaaagggcattgctcatcctgaagatcagctgaccatt

SEQ ID NO: 179477 - DNA, 100 bp, Homo sapiens
tcgtactggagcgaagagcggcctcctgaaggaggggaagggacgtgggggcggccacggcagggtctccgtctctccaccgggggcttcatccttccag

SEQ ID NO: 179478 - DNA, 113 bp, Homo sapiens
cgcccgggaggaaggaacgaggcaaggagctaaagcagcgtgcgttcagccctgggatgtgaagttcatttccaatccgccctccatggtggcagcggggagcgtggtggccg

SEQ ID NO: 179479 - DNA, 143 bp, Homo sapiens
ggagcttggtgtccggcgtcccgggggcgcagggaaggagggcgtccgagtcaacaaccgcttcgagctgacaatgcagatcttcgtgaagactctgactggtaagaccatcaccctcgaggttgagcccagtgacaccatcg

SEQ ID NO: 179480 - DNA, 75 bp, Homo sapiens
cactcttccagagcaagctaaactgctagttcgttccaccagtcataaaccagatgaaatctatggcatgattga

SEQ ID NO: 179481 - DNA, 100 bp, Homo sapiens
aaattatgcgtgcacttaaagctgccagcaaggatgactcaatcatcactgttttaacaggtggaaaaaagtctcacttttgagaaactcacagcctgga

SEQ ID NO: 179482 - DNA, 101 bp, Homo sapiens
cgcagctccacgcagcaagacccgcgccgccgggacccccaggacgacgtgtacctggacatcaccgaatttcgctaaggagtttgtgatcagtgatcgga

SEQ ID NO: 179483 - DNA, 100 bp, Homo sapiens
caccaacgagatcttccgccactacgagttgtaaataagacagacttgaaggtggattgtttatccagtgagagaatgagtttgcctcttcttgctggtg

SEQ ID NO: 179484 - DNA, 101 bp, Homo sapiens
tttgctacaaatggaggaggaggaggacgacgacgatggggatatcggaaactgttaaggcagcaataatagaagagcagaaacgaagtgaaaaggctgtg

SEQ ID NO: 179485 - DNA, 75 bp, Homo sapiens
acggggagccccagagcacttctgcttccagaacctcggaggcggggtcgacactacccctaaagcaagaagaat

SEQ ID NO: 179486 - DNA, 75 bp, Homo sapiens
ccgatttcatgactaaccagtatccctttgttgatctagcaagtggccaagttcctttgcctcctgctagaaggt

SEQ ID NO: 179487 - DNA, 95 bp, Homo sapiens
gaggagctggcggagagcggcctgcgggcgatcgggccgagggaatccctggagatagagaaagtcaggctgtggttgacccccctcaagcagct

SEQ ID NO: 179488 - DNA, 97 bp, Homo sapiens
aggaggggcggcccggtccgggttgcgcctcctggagccgcccccgggacgtcagtcctggaggaggcgaggggagaagccggagacccagggcccc

SEQ ID NO: 179489 - DNA, 75 bp, Homo sapiens
agattctctgccacaaaaaaatataataaggctgagtgcggagccaaggttgcttctagaactgctggagttact

SEQ ID NO: 179490 - DNA, 88 bp, Homo sapiens
aatatttaatggaaaatcgcttggttaaaacctgacacttttaacaggtcctgggaactccaacaagggagcaaatcagagaaatgaa

SEQ ID NO: 179491 - DNA, 100 bp, Homo sapiens
ggctcagaggggagtcatcatgagcgatgttaccattgtgaaagaaggttgggttcagaagagggggtctccaactgaattccttgaagagaaaatggcc

SEQ ID NO: 179492 - DNA, 97 bp, Homo sapiens
ccagatcaacgccagcaagaacgaggaggacgcgggggcggcaccttcctacttctgcccagccacagccctcccctcacagttgagcacctgtttg

SEQ ID NO: 179493 - DNA, 75 bp, Homo sapiens
acaacaagaactttgataaagtgacagaacccagtgacttgattgtaaaaatttacagagcggaatcatatgctg

SEQ ID NO: 179494 - DNA, 100 bp, Homo sapiens
agatgtggtggaatatgccaaggaaaaactggagagcttcatcaaaaatagtgatagctttgataaggtggaattgcgtttgttgccataaaaggagcat

SEQ ID NO: 179495 - DNA, 75 bp, Homo sapiens
cgaagtgaagggaaggccatatatgcaggcctgctggatgtgtatggatttgaatcatttcctgacaacagtctg

SEQ ID NO: 179496 - DNA, 123 bp, Homo sapiens
caacaagtgtctttggttataaattatgatctacctaccaatcgtgaaaactatattcacagggacttctggagccccgtcctggacaggagacagaggaagaaccctggagtcggaagccag

SEQ ID NO: 179497 - DNA, 75 bp, Homo sapiens
gtcagactctcccgcgcctcctggcccgcaggccggacccccttctaggaacctcaagaaggcatgaagccagcc

SEQ ID NO: 179498 - DNA, 101 bp, Homo sapiens
tacagccaggacctgcccccaggagcctctcaggggatttctctctgatcaaacggacagttcaggactcagaatctaaggatgaatgttcaccgtggcag

SEQ ID NO: 179499 - DNA, 100 bp, Homo sapiens
tgttactcaacaacaatatagagatcacctttttgataaggttaatttggagtggcccctggagtcagtttcctacaccatccgaggccccacccagcac

SEQ ID NO: 179500 - DNA, 95 bp, Homo sapiens
atcccagatttgttgccataatcatagaggcaagtgggggaggagcgttccttgtcctccctctgcacaagatctcattcgtcggttcggatcca

SEQ ID NO: 179501 - DNA, 100 bp, Homo sapiens
ctgcggccggggctggtcgtggtgcatgcagaggacggcaccacctccaaatactttgaggagcccaaggtgggcatcaagaccatcaaggtgtactgcc

SEQ ID NO: 179502 - DNA, 83 bp, Homo sapiens
ctttttcagaaatgcgcagagcaaacatctttcaaaggcttcaacggaccacaccaaaatgccatctcaaatggaacacgcca

SEQ ID NO: 179503 - DNA, 78 bp, Homo sapiens
attgatcaccataagaaggaacatttgtgaaggtactccagtgccagaaagagagctaaagttgcagacaagatccag

SEQ ID NO: 179504 - DNA, 76 bp, Homo sapiens
agaagatcctggtcccctgctttaaccatcgaaaatgagattgctcgagactttaatcccaactggatgagtgctg

SEQ ID NO: 179505 - DNA, 88 bp, Homo sapiens
ctgcggctgtatggagcgattttgcagatgagctcttcagtatccccatcagccagtttccgaggtgctgagaagcacagaaactccg

SEQ ID NO: 179506 - DNA, 82 bp, Homo sapiens
gtcagtatttgaggagaaagcatttgttgaacaggtagttaagcccccccaaaacaagacggaaagtgaaaatacttcagat

SEQ ID NO: 179507 - DNA, 100 bp, Homo sapiens
ggaaatttcaggaattaagtcaaccacgttctcataccagcctgaagcttgccagcaaagcacggacagagaaggaggagaagctgagccaggcctatgc

SEQ ID NO: 179508 - DNA, 75 bp, Homo sapiens
ggcagacatacatcatttaaagggattccccgttactactggtgatggagatgtatgaactgtgtatgttcttca

SEQ ID NO: 179509 - DNA, 98 bp, Homo sapiens
ttaggaccacccaccatgcctatccaggtcacagtaatgaaaggcagtaatagaaataaggatcattcagcagaaggagaaggggttggaaaacgacc

SEQ ID NO: 179510 - DNA, 100 bp, Homo sapiens
tatccagctttgcttggacctgaccactacagtccagaagggcaccattcccaaactcacagctaaatccaactgccgctatgaaattgagtggattact

SEQ ID NO: 179511 - DNA, 100 bp, Homo sapiens
cttcgcagtctggaaagctttaggagttcacagtatagaagaagtcagagatgccatggaaaatgaaatgagaacccagcttcgccgacaggcagctgcc

SEQ ID NO: 179512 - DNA, 99 bp, Homo sapiens
aaacttcactgtattcgacaggcttttcaggtcaaaatgcagatcttcgtgaaaacccttaccggcaagaccatcacccttgaggtggagcccagtgac

SEQ ID NO: 179513 - DNA, 83 bp, Homo sapiens
caagcctctcttctttgccgacaaactttacaaatccatgaagaccgacaaggagcagctgacagcagaggccaaggagctgc

SEQ ID NO: 179514 - DNA, 82 bp, Homo sapiens
gtctccaggcccgcgaccgtccgccagtcgtcccgaggagcgcagctcagctgggctggaactgccctcctggaactccccc

SEQ ID NO: 179515 - DNA, 83 bp, Homo sapiens
ctaatctaccggcaggaaccaattccagacacattattaaggttttcctttggaatatggataaatacaccatgatacggaaa

SEQ ID NO: 179516 - DNA, 75 bp, Homo sapiens
tgatgggcagatgctagtctcaggttcatttcagacgaatcagtttactggaatggtatatcagacagtactgct

SEQ ID NO: 179517 - DNA, 100 bp, Homo sapiens
gggatcgagatcctgccgttgcctgtcatgggagggcaggtaatgagagatccaaacaccaagcgctccaggggctttgggtttgtcacatatgccactg

SEQ ID NO: 179518 - DNA, 100 bp, Homo sapiens
acctggagagggagtgcgtggaggagctgtgcagccgcgaggaggcgcgggaggtgttcgagaacgaccccgagacgggtttggacagaggagccaaagg

SEQ ID NO: 179519 - DNA, 98 bp, Homo sapiens
caaagagaccatggcagcctgcagctaggactttaatatatgattctataacagactcttccagaaatgatatgaagaggaaatttgccctgacaatg

SEQ ID NO: 179520 - DNA, 101 bp, Homo sapiens
ccgagtggatgaacatgtgcttggtgtcgtttttccttgagctgaacgtcttgcaacagtggccgcacgcatagccagagactgctgctactttgaaacgt

SEQ ID NO: 179521 - DNA, 75 bp, Homo sapiens
gcggcgcggtcggtcggcgcctgttctcgggctgtttggcgggcagaggcagaggtgaatgtggtttctaccaaa

SEQ ID NO: 179522 - DNA, 76 bp, Homo sapiens
cagcagaaactccagctcacgacaggctcgctccctcagatatcaacacttctgtttgcaacactgtacatcctct

SEQ ID NO: 179523 - DNA, 98 bp, Homo sapiens
ggttgtacagatttgcataaagtggctcacaattatactatggtaaaaatgcatttgcaaagggagaaaatgaaggccaaacagaagcaggctccagc

SEQ ID NO: 179524 - DNA, 75 bp, Homo sapiens
ggaagatgaagaacctccacgaaggtcagcattccaggttcgatacaagaggctgttttcctagcgtggcttgct

SEQ ID NO: 179525 - DNA, 50 bp, Homo sapiens
cttgatgataaaccagtaaatgtggtccattatggctgacatgcaaaatc

SEQ ID NO: 179526 - DNA, 83 bp, Homo sapiens
ctgggatcccggccaccagcaattgtccggaacttggcattagaattcctcgaccactaggacagggaccaagcagattcatc

SEQ ID NO: 179527 - DNA, 101 bp, Homo sapiens
cctccctcttctcccgactatttggcaagaagcagatgcgcattttgatggattcttctgcacagtcagtatcctcgggagttcgtgcaccatctcctgcc

SEQ ID NO: 179528 - DNA, 83 bp, Homo sapiens
caagcaggcagcgggctttgccagcaaaaccgaaacaggtctacatccggataaaagacgatgaatggaatatttatcgccgg

SEQ ID NO: 179529 - DNA, 75 bp, Homo sapiens
ttgtgcgccgggtggagattctcagtgaaggaaatgaagtccgttcaagttctttcttcaaagagtcatcagaat

SEQ ID NO: 179530 - DNA, 50 bp, Homo sapiens
tctgggaccttaacagggagccatgatccaatggatttgaacagaagcgc

SEQ ID NO: 179531 - DNA, 100 bp, Homo sapiens
agcggcgctgcctgtggagatccgcggaggccgacaggattcgttggctgccgtccccgctgctgtgcattggtgtatgctgatggtagcatatgtttag

SEQ ID NO: 179532 - DNA, 106 bp, Homo sapiens
gagttgtcatgatgaggaagatgacgatggtgaagaggaagtgaagagttttgaaggcggcgactggcggcgcgatggacctgaccgggctcctgctggacgaaga

SEQ ID NO: 179533 - DNA, 96 bp, Homo sapiens
ttgaaaagacctaccggaatgatcctcttcaagatctcttgttcttccccagtgatgacttttcatcctgacacagctctccctgaggagcagcca

SEQ ID NO: 179534 - DNA, 75 bp, Homo sapiens
tctatgactccaggtcttcagcacccacccaccgtggtacaggtactccaaagattcaggtttactcacgtcatc

SEQ ID NO: 179535 - DNA, 97 bp, Homo sapiens
accctctggaagcctagaaatgatgccttcaattaagttgcagagttctgatggagagatatttgaagttgatgtggaaattgccaaacaatctgtg

SEQ ID NO: 179536 - DNA, 100 bp, Homo sapiens
gagaccctgcctgcctgaggaggcctcggttggatgcgaaggagctgcagcatccaggctgcaaggtgtgactgttgtaaatctcaaggaactcttaaag

SEQ ID NO: 179537 - DNA, 51 bp, Homo sapiens
tgacgccttagcttggagccccgttatgagcgggtattcccctacatctca

SEQ ID NO: 179538 - DNA, 83 bp, Homo sapiens
cactgtattctttacctgcttcccaatcccactgatgaggatcagcccatggatcttaaatgtatttcggcattgggttgaac

SEQ ID NO: 179539 - DNA, 100 bp, Homo sapiens
gcatagaaggaaaggattacatagcttcattaccatttcaggatttccagatgtgacttgcactcagaagatcagtggtcaacttcagaagctcttccac

SEQ ID NO: 179540 - DNA, 100 bp, Homo sapiens
cagagacgccgtccccgccttcattgagcccaacgtgcgcttctggatcaccgagcgccaatcctccaggggctgatcgaggtgaggtccccccacctgg

SEQ ID NO: 179541 - DNA, 90 bp, Homo sapiens
ggccggatggaaatcctaatgacagtctccaaattcgcctccatctgtaccatgacaaatttacatgtattggagaccagaccagaagcc

SEQ ID NO: 179542 - DNA, 76 bp, Homo sapiens
gcaggaagaaaacgagccagtgatttacaatagagcaaggcagctgctcccaaccccagaacctttgctgtcttgg

SEQ ID NO: 179543 - DNA, 100 bp, Homo sapiens
ttgacttctgttcctataacacccagggtggtttgctttctctgtgccagtagtgggcatgtagaggacttcctcgttctgcccatcttcctaacaaggc

SEQ ID NO: 179544 - DNA, 75 bp, Homo sapiens
gtccttcaggattactacgcgggaggctggcatcatcacgacaaaggtagttaacctgcagtacagtgaagttca

SEQ ID NO: 179545 - DNA, 100 bp, Homo sapiens
cagggaggagaccggcacccagacaggtggcgacggcagaggagtttatgctaaaactatcgatgggcaacagactattattgcatgtattgaaagccac

SEQ ID NO: 179546 - DNA, 100 bp, Homo sapiens
gagctgagtggttgtgtggtcgcgtctcggaaaccggtagcgcttgcagcatggtcatgatgatgggcagcgcccgagtggcggagctgctgctgctcca

SEQ ID NO: 179547 - DNA, 98 bp, Homo sapiens
gcagttcagaattcttctctacatgatattcaacatgcccctaagctctcagctttgaaacaaggaggacatgtatgcccaggactctatagagctac

SEQ ID NO: 179548 - DNA, 100 bp, Homo sapiens
catacagttacttagaagaaagaaaaccttacagcagcaggctagaaaaggatgactcaactgactttaaaaagttgagaaaccaaggcagtatcatgag

SEQ ID NO: 179549 - DNA, 100 bp, Homo sapiens
agaaagagaatattgttcagttgattatgccagccagatgcagggacaaaagtggctctcaatccagcacatgcacattgaagcaagttaaaggatttaa

SEQ ID NO: 179550 - DNA, 98 bp, Homo sapiens
cttgctcaaaatatgcaagaagcatcgactcagctggaagactctctcctggggttatctgtgctacaattgcatttggaatggggattgacaaaccg

SEQ ID NO: 179551 - DNA, 51 bp, Homo sapiens
gatggatatgtgatttctcagaaggaaagtgggaaagaagcctaaggaata

SEQ ID NO: 179552 - DNA, 75 bp, Homo sapiens
cacgctagacctgcccaagcgaactgaggccgccaaagccctgaccctctattctgcaccctgtgagccaccgag

SEQ ID NO: 179553 - DNA, 100 bp, Homo sapiens
gttcagcgtcctcacagaactcctgaagaagctctgtagtggccccgaaggaggactgaggaagagttcactgacttgaagtatactcagttaaaatcgg

SEQ ID NO: 179554 - DNA, 96 bp, Homo sapiens
cttctttcttcagccgaggccgccgccgcctctccttgctgcagccatggaggtaaagcatcaagtcgaatatttgggtctgaaagagaacattcg

SEQ ID NO: 179555 - DNA, 75 bp, Homo sapiens
ggcggtgtcccacctgccgcccttcttcggacctctggtcctcaatcgagttcctctacgaagaacacaccagaa

SEQ ID NO: 179556 - DNA, 90 bp, Homo sapiens
tgttgatgctggctttgttcccaatgacatgcaagttggacagacgggaaaaatagtagcaccagattttgcctaccattttacagtatt

SEQ ID NO: 179557 - DNA, 83 bp, Homo sapiens
caggaccctaacgacaggcgcctccggcccatttacggtaatgcatgtccatggtacacaaattcacaaggtttgtaaatgag

SEQ ID NO: 179558 - DNA, 90 bp, Homo sapiens
ggaaaggaggtgacgtgtctggcatggagaccagatggcaaacgtaaattcaactggaagggaactattaaagcaattctgaaacaggcc

SEQ ID NO: 179559 - DNA, 74 bp, Homo sapiens
aacctggccctgaagaactacagtgtggtcagaagagatcaattctacagaaatttccagtggttctgttgagg

SEQ ID NO: 179560 - DNA, 76 bp, Homo sapiens
ccatgaaggctcatggtgtggacaaggtcgtggcctgcacctcggatgccatggacaatattaccaggcagaacca

SEQ ID NO: 179561 - DNA, 83 bp, Homo sapiens
ttcgccgaggcaccgaggcactcagaggagcgagcagctgatgcagctgtacagtgcgcgccagcggcggcggctgaaccggg

SEQ ID NO: 179562 - DNA, 82 bp, Homo sapiens
ctgcgagccgggaagacgcggggaagaggaggcggaaaaggacgcaaagttctccggcgagaagccccatgtgccactcccc

SEQ ID NO: 179563 - DNA, 76 bp, Homo sapiens
cttgaacttaatacagcaagaaagaccatcaagtttaccactgcctactgaatcactcttctatcgtgctgttctt

SEQ ID NO: 179564 - DNA, 100 bp, Homo sapiens
gtgtgaagaagagaaaacgaggacccaagaagcagaaggagaacaagccaggaaaaccccgaaaacgcaagaagcgtgctcctcctgctggaccctccag

SEQ ID NO: 179565 - DNA, 75 bp, Homo sapiens
ctgtggaaatcagaagagagaatatagtaaaaatacgcagtacagtcccagatgcctttgagtaatggacagatg

SEQ ID NO: 179566 - DNA, 46 bp, Homo sapiens
tcactgtgcgtgctgaccatgactgattcttccagaccagagtttg

SEQ ID NO: 179567 - DNA, 100 bp, Homo sapiens
tggctgctcgataaatcagacagaacagttaatcctcaatttaagcctgatctaacccctagaaacaggttatcaatactctggctgaccatcatcatcg

SEQ ID NO: 179568 - DNA, 100 bp, Homo sapiens
aggaagctgggctcctatgagcacaggatctatctgcaacctggacggctggccaaacacttagagcccgtggaacacagagcattcctaatgacagtcc

SEQ ID NO: 179569 - DNA, 76 bp, Homo sapiens
ttctccaaagatctccctggcccccacagatggtgctggagaatctggtaaaagcaccattgtgaagcagatgagg

SEQ ID NO: 179570 - DNA, 50 bp, Homo sapiens
cagattcagaggatgacagttgcaagtgatctgaaagtagagatgatggc

SEQ ID NO: 179571 - DNA, 83 bp, Homo sapiens
ccggaatcggggcgcttcgccccgggccccccagcatgaagaccccggcggacacagggagtaccctgacttctaccggaagc

SEQ ID NO: 179572 - DNA, 82 bp, Homo sapiens
ggtgctgtggtgcagagctagttcctctccagctcagccgcgtagtattgactcggagacaaaaagaggccaagaccaagag

SEQ ID NO: 179573 - DNA, 88 bp, Homo sapiens
gggccagtattatcaggcatggagatgctactgatgtcagggtcctcagaatggttggaatgaccctccagctttgaacagagtaccc

SEQ ID NO: 179574 - DNA, 83 bp, Homo sapiens
gtgatggccagagagatgacgatcttagtttatgttccatctgagaagatctccatttcttcaagtgtttaacaacagtcctg

SEQ ID NO: 179575 - DNA, 100 bp, Homo sapiens
cgagcggggacttcactgctctgctgtctcctgcaagaactggctcaagaaatttgcctcgaaaaccaaggaacagtgttgataaagactgctgaagaat

SEQ ID NO: 179576 - DNA, 98 bp, Homo sapiens
gctatcccaccatcaagttcttcaggaatggagacacggcttcccccaaggaatatacaggagatgttgcagtaaagatcctaaaggttgtcgaccca

SEQ ID NO: 179577 - DNA, 50 bp, Homo sapiens
tcagctagtgacgtatggatgtttgcagccagagccgaagtgtgcagcgg

SEQ ID NO: 179578 - DNA, 75 bp, Homo sapiens
atctttggcttgcagccaacaatggggtcaaagagttagtggaagcagagttatttgcccgttatgaccgccttc

SEQ ID NO: 179579 - DNA, 100 bp, Homo sapiens
ttggacttacgacccaaatgaacctcgatactgcatttgtaatcaggcgcagttgtgtagcagttgagtaatgctggttagctgttaaggtggcgtgttg

SEQ ID NO: 179580 - DNA, 82 bp, Homo sapiens
acatgaccaagatgcccgagtgctacttctactccaagttcggtcgttccaggggtagaggaggcatgaaggatgaccgtcg

SEQ ID NO: 179581 - DNA, 100 bp, Homo sapiens
ttgctacaacggcatgtgccagtattatgatgctcaatgtcaagtcatctttggctcaagactattggaaatgcacttcatgcaatgaaatgaatccccc

SEQ ID NO: 179582 - DNA, 83 bp, Homo sapiens
acccctggaagcctagaaatggtggatcatccatgccatggagtatgaacttcagatccgtggcggagacaagccagccttgg

SEQ ID NO: 179583 - DNA, 75 bp, Homo sapiens
ccgggtctataatgggcggctcaaggtgcagcgcctctgctcagttaaaagatggtgctcgctctgttacccgaa

SEQ ID NO: 179584 - DNA, 83 bp, Homo sapiens
ggtcgcttccccgcagcatggaggacgatgcaccagtgatctacgggctggagttccaggaagccagttgagggaagttctcc

SEQ ID NO: 179585 - DNA, 100 bp, Homo sapiens
caggattacaaggaaaagcaccaggcaaaccaccatcacatctcattttgcaaagggagcctgtggggcccggatagtcagccgaccagaggaactgaga

SEQ ID NO: 179586 - DNA, 100 bp, Homo sapiens
gatcatggcggatggcccccggtgcaagaggcgcaaacaagccaatcccaggaggaaaaacggtaaacactacacgtgaagagtggtgaaagggaacatt

SEQ ID NO: 179587 - DNA, 75 bp, Homo sapiens
cagggaagtgatgcaggaaaccttgaggaacctgacctccatagaaagaaatgaccgcccggatgtgccactgag

SEQ ID NO: 179588 - DNA, 95 bp, Homo sapiens
ttcagaatggggatgaaaagcatgagcacaggtggaagtttagctgatgctataagtgaaaactacagaatcatgagttactttaaagaagcaga

SEQ ID NO: 179589 - DNA, 100 bp, Homo sapiens
tgaatctagactgggctgttctctgtgttaaaccaatcagttgcgaccttctcttaacagcttctttcatcggaagaaaactactacagcacttcttaca

SEQ ID NO: 179590 - DNA, 78 bp, Homo sapiens
acgctcatcagagggaagatctttttcctcaattgtgtttcctgaggttataggcgggtgtttgaggagtacatgcgg

SEQ ID NO: 179591 - DNA, 75 bp, Homo sapiens
cctcccgcgcgtgctgcgggtctgctcgggggtctacttcgagggtcaaaggccctttcagaagcaactccattt

SEQ ID NO: 179592 - DNA, 98 bp, Homo sapiens
cggccactgggacggcggcgcggagaaggcagaatggatgatgaacttgttgttggacatagtgcaagatcagacatctccagcttcccttgtacatc

SEQ ID NO: 179593 - DNA, 82 bp, Homo sapiens
tagcgaaggccgccgaacctgcctggctagccggcgacttgagtgacgagtcatcgtgatgtcaggtcatgagaccatccga

SEQ ID NO: 179594 - DNA, 97 bp, Homo sapiens
ttcgcgggaagacgcggcggcggcggcggaggatgagcctgcagagcgcgcagtacctccgatttgtcccatcagatgaaaagaagaaacaaggttg

SEQ ID NO: 179595 - DNA, 82 bp, Homo sapiens
ccaccttgtggccctgggctttaccatctttgtggctgtgcttgccaggcctggctccacaatggctgccatccggaagaaa

SEQ ID NO: 179596 - DNA, 96 bp, Homo sapiens
gagaatttatcctcaagagtcagctggcagagccacctgagctgaagattcccttgagaacaagtactgtcctgtggtttcatggcctttcttcca

SEQ ID NO: 179597 - DNA, 51 bp, Homo sapiens
cggagactgagtacttcgctgctctgctgagatctgtatctgtggacctga

SEQ ID NO: 179598 - DNA, 100 bp, Homo sapiens
tctgccgtgccacctgctgcacccacgaatctgcccacccctcctgtaacccagcctgtttcacttcttggtatctctgatgaatatataacacctatgt

SEQ ID NO: 179599 - DNA, 100 bp, Homo sapiens
gaggatagcagcagaagagaagaagaagcaggatgaactgaaacggattgccagagaattggcagaagggactgctgagatgtcctctattcttgaagag

SEQ ID NO: 179600 - DNA, 98 bp, Homo sapiens
atattccgaggacctgaaggacgcgcaggagaagctggagctcacggagaagaaggcctccgacgaactttatattgctgttggaatatctggagcca

SEQ ID NO: 179601 - DNA, 51 bp, Homo sapiens
gaaaaacaagctgaagaaatggcatcagagtgtcctgccatacttcgtagc

SEQ ID NO: 179602 - DNA, 90 bp, Homo sapiens
gggcggccggtcgggcggggcggcggcgctgacaggtgctggagaatctggtaaaagcaccattgtgaagcagatgaggatcctgcatgt

SEQ ID NO: 179603 - DNA, 100 bp, Homo sapiens
gaaaattctgaagattccagtcctgaatattcctcggacaagaaggaaaagaaatcttttagccttgaggaaaagtccaaaatctccaaaaaccgtgttc

SEQ ID NO: 179604 - DNA, 83 bp, Homo sapiens
gttcgcgtctctctgctgcggcgcggggaccgctgtgctctcgggcgtgatggtgggcatgggtcagaaggattcctatgtgg

SEQ ID NO: 179605 - DNA, 75 bp, Homo sapiens
ttacaagactacggagcataggaggaaaattcatcatctggagaagtacagcatcggggagcccacagtgccatc

SEQ ID NO: 179606 - DNA, 75 bp, Homo sapiens
gacgtatggcaactttgacagccaggatgagattcatcttctccacgatgacagaggtcctgtcttagaagcttt

SEQ ID NO: 179607 - DNA, 100 bp, Homo sapiens
tcatgagcgacagcggcgagcagaactacggcgagcggaaactatccaactctggccaatattgaaaggaagaagaagttaaaacttgaaaaggagaaga

SEQ ID NO: 179608 - DNA, 116 bp, Homo sapiens
cttcggagcccctccacaagttccatctaggcctacgagggccccgcccagtgtcccaagatgcagatgttggacaaatttcccatggaaggaggacagaaggaccccaagcagcg

SEQ ID NO: 179609 - DNA, 97 bp, Homo sapiens
atgccacagttcctgatggagaatgctgtcctcgctgttggcgtgatttgaagatattaaagctagaaattggaactagaaaatcaaaagaattcaa

SEQ ID NO: 179610 - DNA, 100 bp, Homo sapiens
aagaaggttgggttcagaagagggttttaacttctagtcatggcgaatgatcgcaggagagcacagactggaccctgctacgatctctcttggagtggat

SEQ ID NO: 179611 - DNA, 100 bp, Homo sapiens
cagtgcgtcaatcagagcgtcctgtgcgggggctgttgtggttccgactataaacagtacgtgtttggcggctgggcctgggcctggtggtgtatctccg

SEQ ID NO: 179612 - DNA, 100 bp, Homo sapiens
cggcacctacggtcacgtctacaaggcgaggcggaaagatggattgccatcacgaaagccaaagtggatttctccagtgtggtgtgcctgcccccttccg

SEQ ID NO: 179613 - DNA, 98 bp, Homo sapiens
caggactttgatgctagcctgtccgggatcggccaggaactgggtgctggtgcctatagcatgagaacaccttccaccatgaccacctcagcaagttc

SEQ ID NO: 179614 - DNA, 82 bp, Homo sapiens
ctgcagtacgtgcctcatgatcgcttcaacaaggcctgtttccttggctttgaagttgccatgaagttccttaattgggcca

SEQ ID NO: 179615 - DNA, 82 bp, Homo sapiens
gacgggaaggcgggagacgagaagcctgaaaagtcgcagcgagctggagccgccggagaatcctcactatggatgggctcat

SEQ ID NO: 179616 - DNA, 83 bp, Homo sapiens
tttccatctcttcagagatgaaccagttgcagatctgatctcttctgaacacctcatcgtgtctccatccctgggaatctgac

SEQ ID NO: 179617 - DNA, 75 bp, Homo sapiens
cgatggcctagcacgtggaattcgcgaagctgccaaagccttagacaatgaccgaagctggctttggtgctgaca

SEQ ID NO: 179618 - DNA, 50 bp, Homo sapiens
gtggctgcacaggagtcttgctgatggatctgagtgatgagacgtgtccc

SEQ ID NO: 179619 - DNA, 100 bp, Homo sapiens
tcctgtctgagaggcaggacatgatcacacgccgctatgcagagttctcctccgctcttgtcagtatcaaccagacaattcctaatgaacggaccatgca

SEQ ID NO: 179620 - DNA, 98 bp, Homo sapiens
ctgtccaccgtggccgcggtggtgctagaatatgtggatcgagagaaccatatatacaactgcatataaattacctggaattttaaggtggtttgagg

SEQ ID NO: 179621 - DNA, 75 bp, Homo sapiens
agatccgctgatctagtgcttctcgaaaaaaaccttcaggcggcccatgggccaaagatgaagaggaagcctttc

SEQ ID NO: 179622 - DNA, 97 bp, Homo sapiens
gtcgagtcacataatagcattacggtctctgtatgtgggagaaaaggccgttaattaaggaaaagttgagccagggcgtgaccctcgtcgtggacag

SEQ ID NO: 179623 - DNA, 74 bp, Homo sapiens
gaagcagccgatccagcctgcggagcctgtggggcaggaaagatttgaagcactcttcaccatctatgatgacc

SEQ ID NO: 179624 - DNA, 100 bp, Homo sapiens
ggtgcaactgcacaacaacgaggcgggcaggctggccaaacgtaccaagaaagtcgggatcgtcggtaaatacgggacccgctatggggcctccctccgg

SEQ ID NO: 179625 - DNA, 74 bp, Homo sapiens
ttcgcgtctctctgctgcggcgcggggaccgctgtgctctcgatattaacctggctgcagagccaaaagtgaac

SEQ ID NO: 179626 - DNA, 80 bp, Homo sapiens
gttggaaagcactatggtgtgagtacaggggctcaggtccaggtggcaggggatatgctacccaactcaactgagcgggc

SEQ ID NO: 179627 - DNA, 83 bp, Homo sapiens
gttggacgctgccagtttgcacagcagcaggttaattatagaaaatgccaagtaggaaatttgccgatggtgaagtggtaaga

SEQ ID NO: 179628 - DNA, 90 bp, Homo sapiens
ggaatgcattttgaaacttaaggatgggatacagagatagactactgtgcctcatctaatcacggatgtcagcacgagtgtgttaacaca

SEQ ID NO: 179629 - DNA, 100 bp, Homo sapiens
gtgtggccttctcctctgacaaccggcttttaaggataccggaaaaacacccgtggagccggaggtggcaattcaccgaattcgaatcaccctaacaagc

SEQ ID NO: 179630 - DNA, 90 bp, Homo sapiens
cgccaagctcctggccctggccctgatcatcctgctgggcttcgtccagatcgggaagggcttgggcactgtttaaaggaaagttccgag

SEQ ID NO: 179631 - DNA, 98 bp, Homo sapiens
aagcattttgcaacgcagttcggagttattatgagaatggtcctagtgccagatcgtgtcataaaatgtgcattgatattcaacggaggcaaatctac

SEQ ID NO: 179632 - DNA, 82 bp, Homo sapiens
ccagtctctaacgttttagaaaatcataacaagcggttctctaccctgtaaaggattcaagatgaccaacgaagaacctctt

SEQ ID NO: 179633 - DNA, 138 bp, Homo sapiens
atgatcggatccatggagccttgttgatccttaacgagctggtccgaatcagcagcatggagggagagagaccgtccaggctggacttgaactccttcctcggctgaagtgatcctcctgcctcagcgtcctgaatag

SEQ ID NO: 179634 - DNA, 100 bp, Homo sapiens
cggactttgccagcagactacggtgattctctggcaaagcgaggcagtttgtgaaaaacttcaggacaaaaatgtttcatttaaggacttgtgctgctaa

SEQ ID NO: 179635 - DNA, 97 bp, Homo sapiens
attggagagaaatgttctaaatgtgcacccaatacctggggccacagcattaccactggttgtaagagtcaactaattcatgaccgaaaatgtatta

SEQ ID NO: 179636 - DNA, 83 bp, Homo sapiens
taagcttgggaggtaggagttggcgagtagtagcgaggagacgaaggcactataagaccgacttcgacaagaataagatctgg

SEQ ID NO: 179637 - DNA, 59 bp, Homo sapiens
agacagcagtgacctgcaccaagcagaagaaggtcccaaaggcaagcagttagaaggaa

SEQ ID NO: 179638 - DNA, 75 bp, Homo sapiens
ggactacgtggcggcgctggaagggatgtcgtctcagcagtgctcgggcgcaggagctgtggatgaggagggacg

SEQ ID NO: 179639 - DNA, 80 bp, Homo sapiens
ttgaagtctgtgtcaaacatccatatcataagtggaattttggagatattcaaagtttttcagaagaagtgaagtcaaga

SEQ ID NO: 179640 - DNA, 82 bp, Homo sapiens
agaaaaggcaacatcctgtcacaggccatgctctggcaaaaacgctgccctgaggatctgtgtttggtgaaaaggagccaaa

SEQ ID NO: 179641 - DNA, 76 bp, Homo sapiens
gtgcccgaggcccaggacagccaggtcaccagcaccaagaggtatttgtggtgcagcagattcccaacagtaacct

SEQ ID NO: 179642 - DNA, 107 bp, Homo sapiens
cacctttctgggactgcagcaccagggtggctacgcctcccggctggtattgactttgccactcgtaaaatagccaagttgctgaagccacagaaagtgattgagca

SEQ ID NO: 179643 - DNA, 83 bp, Homo sapiens
attaaagaaggaatttacagtctttgagcatatagatatcaacactccttcattactgggtgtctgatgccatcaagtgttgc

SEQ ID NO: 179644 - DNA, 90 bp, Homo sapiens
ctgctggggaaggcgattggcatcgatctctccatcccttccgaggcccgacttcgggaaatcctcattgacgattcaatttgttgaagg

SEQ ID NO: 179645 - DNA, 83 bp, Homo sapiens
gtcggtctggactgatgaaaatccatatgatctgaagaagacacttgaatcatgggtgacgttaaaaattttctgtatgcctg

SEQ ID NO: 179646 - DNA, 100 bp, Homo sapiens
ccctgctagtcagggacactccattttgggctgggatcattgtgttttataactgtagctgtgtggaagtaattggtctccagaacaaaaattactcagc

SEQ ID NO: 179647 - DNA, 50 bp, Homo sapiens
gattcgcagtggtcgcttcttctccttgcctggagatgcccaaagatgag

SEQ ID NO: 179648 - DNA, 75 bp, Homo sapiens
tagaaaactggtcaaggaagctgtaacaattctgtttgcggacctccacgcatacctggataacatgaaagcccc

SEQ ID NO: 179649 - DNA, 73 bp, Homo sapiens
cggggatgcgggaccggctgccagacctgacggcgtactacgacatttctgccaaaagtaactacaactttga

SEQ ID NO: 179650 - DNA, 50 bp, Homo sapiens
cgcaaattcactccccagtacaaagtactactataattccttgacccagc

SEQ ID NO: 179651 - DNA, 100 bp, Homo sapiens
tcttttcgatccgggacggccggtcaggctcgccgccgagctgatcgcccaggaccacaccgcagcgtaactgcaggcctctcagcgaaaaagggggaaa

SEQ ID NO: 179652 - DNA, 100 bp, Homo sapiens
tggaaataagtcaccctgacacatctcagttcatcttcctcaaaactatgcgaggtgctggagaatctggtaaaagcaccattgtgaagcagatgaggat

SEQ ID NO: 179653 - DNA, 82 bp, Homo sapiens
gcgactggctgtacactttcaacgtgaggccggaggtggtgcaggttttcctttggaatatggataaatacaccatgatacg

SEQ ID NO: 179654 - DNA, 84 bp, Homo sapiens
tttgtgactggcgagtggggccgagcccacaaggcggaaggcaaggtcccagcatttgagggtgatgatggattctgtgtgttt

SEQ ID NO: 179655 - DNA, 90 bp, Homo sapiens
ctatccttcagagcaagaaaaagcgttgctgtcccagcaaacacacctgtctacgctacaggtccaagacaagctgctgctatctgcgtg

SEQ ID NO: 179656 - DNA, 96 bp, Homo sapiens
gaccgtgaccgagagcgtgaccgagagcgcgaatatcgtcatcgttagaaggttttgatgatgatggttcagaatttcatgaacatatatttctgg

SEQ ID NO: 179657 - DNA, 74 bp, Homo sapiens
ctgggagagaggtacctctccttttccctctccctttccctaaggtgtagaatgagccaaggagactcaaaccc

SEQ ID NO: 179658 - DNA, 90 bp, Homo sapiens
cttacagctaacatgttgtacctggaaaacaatgcccagactcaatttagtgaggcaggtccgatcagaaaacaaagaaaagagtgcagt

SEQ ID NO: 179659 - DNA, 98 bp, Homo sapiens
acaagttgtatcgcctcccgtcctggtagcctttccggcggcgactggcggcgcgatggacctgaccgggctcctgctggacgaagaaggcaccttct

SEQ ID NO: 179660 - DNA, 82 bp, Homo sapiens
atcgtatgtccgctatccagaacctccactctttcggtgaaatgacaatggatgctctgttggctcgattgaaacttctgaa

SEQ ID NO: 179661 - DNA, 100 bp, Homo sapiens
ggagcgtcaacagcagcaccatggtagaacttcatggaggaacacggagtgacccaaaccgaacatatggctaccatagaagcacatgcagtggcccagc

SEQ ID NO: 179662 - DNA, 75 bp, Homo sapiens
gaaagtattgtactgaaattgcaaaaggaatttcccaattttgataaacagttccatgccattgcagtgtcaact

SEQ ID NO: 179663 - DNA, 51 bp, Homo sapiens
agacaagttcaccccgaagtctgccgtacctggtgtgtaagaggaagctgg

SEQ ID NO: 179664 - DNA, 100 bp, Homo sapiens
cctttgcctttttctttctggaatcagaaggctttgctggcctgaaaaagaaaatatttacaccagcagctccagttcataccaataaagaagatcctgc

SEQ ID NO: 179665 - DNA, 100 bp, Homo sapiens
ccgaacccaggagctccgcacggtggatccataaagaacccagccaacccgcagagggaggggaggggctgagctgtgaggagagcggggcccaagaacc

SEQ ID NO: 179666 - DNA, 82 bp, Homo sapiens
cagcccccgaaggccctatcaggacatggagtatgaaagacggtgtctgacttccagcaactgctggcctgtgccagggtgc

SEQ ID NO: 179667 - DNA, 100 bp, Homo sapiens
ccacctccatgttgaccaagcctctacaggggcctcccgcgccccccgggacccccacgccgccgccaggcatctaataggattcaggaatcaaagaatc

SEQ ID NO: 179668 - DNA, 83 bp, Homo sapiens
tgtcttcggtggactccttcggcagtccacccaccgccgccgcctcccagaaggagctggaggaccttgtccggagggagcac

SEQ ID NO: 179669 - DNA, 100 bp, Homo sapiens
cccagatgtctgacagccctgtgtgacaccaagataagtaacgggaattttcaggctactaataaaataccagctggacaaccaggataacccttcttac

SEQ ID NO: 179670 - DNA, 75 bp, Homo sapiens
atcatcagacagaattggaagtccctagaacacctcgaacacctacaaggatcgatttgcttagtggtataatac

SEQ ID NO: 179671 - DNA, 82 bp, Homo sapiens
ttggaagcagccgatccagcctgcggagcctgtggggcagtggggacgccctactacatgtcaccggagaggatccatgaga

SEQ ID NO: 179672 - DNA, 90 bp, Homo sapiens
ctccttctacctgctggggttgcttgtcagtagcgggcaagacagaaaaggggagtgcacttcatgaagcagctttgtttggaaaggtgg

SEQ ID NO: 179673 - DNA, 50 bp, Homo sapiens
cagggcaccagttcgacgcgctttttggagctggctaaatatgaatacat

SEQ ID NO: 179674 - DNA, 75 bp, Homo sapiens
gggaagctgcagaatatggaaaacatatattggagctacatggatgtcgtttatacgcaatgcagactggaatga

SEQ ID NO: 179675 - DNA, 100 bp, Homo sapiens
ataatgcctcaactgattgtgaacgcactgtctttcagtttgatgtccagaggaagtacttcaaggaagctcttgatagctcaagtttccaagtctctta

SEQ ID NO: 179676 - DNA, 98 bp, Homo sapiens
tctcattacaccaacccaactgtgaggcgttatgctgttgcccggttgcgacaggccgatgatgaggtcatcaccgagtggtcttctcacatcatcct

SEQ ID NO: 179677 - DNA, 75 bp, Homo sapiens
cccttcctgcccctcgaggctcaggaactgtcctcctgcatatgcccaagaggattgggagtggaatggacacca

SEQ ID NO: 179678 - DNA, 100 bp, Homo sapiens
caggaattcaagactagcctgcacaacatagggaaggtgtggctcattgactttaatccatttggtgaagtcacagattcactgctgttcacctgggaag

SEQ ID NO: 179679 - DNA, 83 bp, Homo sapiens
cccaaatgtctgactctgactctcggactgagaaacgcaagatcttttatgacctagtgcggcaaattaacagaaaaactcca

SEQ ID NO: 179680 - DNA, 96 bp, Homo sapiens
gacagatctgagagatactgaggaacagttgggaccctaggaggcagcggcagttgtcaatgagctctgcagacagtgcggacgctaagcggactc

SEQ ID NO: 179681 - DNA, 80 bp, Homo sapiens
agcagctgccggagcccgagtggatcggggacggagagaacacgagcccatcagatggagttttaacattgaatgcggag

SEQ ID NO: 179682 - DNA, 98 bp, Homo sapiens
ggttccagaccctgccttctcttctgaaagatttgataatgggctgcattaaaagtaaagaaaacaaaagtccagccattaaatacagacctgaaaat

SEQ ID NO: 179683 - DNA, 90 bp, Homo sapiens
agaatctcgagaatggagctcttcagccatcggacttggacagaaataagagtttattgacattcagtacaaagtctccagaagaaaaac

SEQ ID NO: 179684 - DNA, 74 bp, Homo sapiens
tcgagaccccgagctctggagctggaaaaacccggatggcgttcaggaagtggcttatattcactcaaaccaga

SEQ ID NO: 179685 - DNA, 75 bp, Homo sapiens
atatcgcatcctatggctcaaagaaagatgattataggcccccagaatgagaagtgacaacaaggaaaatccaca

SEQ ID NO: 179686 - DNA, 101 bp, Homo sapiens
gcggctgcggcgcagtctgcagcatggcgtacccggggcatcctggcgccggcggcgggtactacccaggcgggctctagaggacaaaatcccagtccttg

SEQ ID NO: 179687 - DNA, 75 bp, Homo sapiens
tgtaccactgtggatgaagcaggaacgactaccaaaatcactacaatcccaatgacttccaagcccaacgtgatt

SEQ ID NO: 179688 - DNA, 74 bp, Homo sapiens
gaggccgagccgggatctcaggtcctcgggggcggcggccacgccaaggacggtgtgctggaattgatgttcgt

SEQ ID NO: 179689 - DNA, 97 bp, Homo sapiens
catgaaaaatcaaaaggagttcatgcttatgaatgctcgacttcaggataaagtggccagtgtgtacgaagccccgggctttttcctggacctggag

SEQ ID NO: 179690 - DNA, 100 bp, Homo sapiens
agatccactagaaattaacccagaatcttagcctctcagtggcctatcggcaagaactcccctggagcaggaaattttcaacctcctccataagaacaag

SEQ ID NO: 179691 - DNA, 83 bp, Homo sapiens
agcaagaggagcagtccagcggcatgaccattttcttcagcctccttgtcctagtgattcgcctttgccagtctcatctcgtg

SEQ ID NO: 179692 - DNA, 100 bp, Homo sapiens
atttttacctcattacttcaagggcgtgctcagtatctacaaagacccaggccttgccccgggccagctgtatacataccctgcccgctgctggcgcaag

SEQ ID NO: 179693 - DNA, 50 bp, Homo sapiens
ctacgagacgctggtctccctggaaattaagctgctcagcaaggaactgc

SEQ ID NO: 179694 - DNA, 82 bp, Homo sapiens
gtcagttcgaggcgccgccgccgccgccgcagccgccggagccgcaatgcctaaaggagatgtgaagttcatttccaatccg

SEQ ID NO: 179695 - DNA, 78 bp, Homo sapiens
atccctgacgagacctgcaacaactaccaggccaaggaccagggcatcatggaccgatctaaagaaaactgcatttca

SEQ ID NO: 179696 - DNA, 80 bp, Homo sapiens
gatccagcctgcggagcctgtggggcagttggaggtccccctccccactaagtgcctctttgcatagcaccagtccccac

SEQ ID NO: 179697 - DNA, 100 bp, Homo sapiens
tcagcaccttggcgaagccttgggtttctttcttaaaggactgatttttagaactccacatttgaggagttgctctgaaacctaccgcatgccagtgatg

SEQ ID NO: 179698 - DNA, 75 bp, Homo sapiens
actcgaagaacagctgtggaaagaagttgcaaaacactgggaaaagaagcccatctgtgtccagagatcagaata

SEQ ID NO: 179699 - DNA, 75 bp, Homo sapiens
gcacagaagtgggttcgaaacatcagctacttcctccgggaccatgtctggagaactaccaccaaacattaacat

SEQ ID NO: 179700 - DNA, 100 bp, Homo sapiens
gtgcttccatgactaacttggtcaaggtgtgggcccatcgctggatggatctgtcagaacacggctttgggctggccctgctcaacgactgcaagtatgg

SEQ ID NO: 179701 - DNA, 74 bp, Homo sapiens
gtgccctctatgaggagttttggattaaggccaagaataaggagacgggtgctttggctgcggccaaagtcatt

SEQ ID NO: 179702 - DNA, 100 bp, Homo sapiens
atggtttcaactgtgcagaatctacaaattttgctactgtcagatggattgactatggaaaagttgccaaattggagctggtcaggctcaccatcgagaa

SEQ ID NO: 179703 - DNA, 100 bp, Homo sapiens
agagaaactgttggaactgctttacaaagtattttagaagatgagaatgtgcctactgctcctgatcctccaagtcaacatttacgtgggcatgggacag

SEQ ID NO: 179704 - DNA, 127 bp, Homo sapiens
gtacattctgtacctcttgttcttgatagtgcgggcgtgttccgagctacgtcacatgccttatgtgggttcgattgagtgaaacagacttcaaagttatggcaagagatgagttaattctaaggta

SEQ ID NO: 179705 - DNA, 100 bp, Homo sapiens
gtggactccctttaatccagtgactgtcaggtcgatcatatatcaacaggcggtccttcgggtcggagtggacatcggatggtggcctggaagagacaat

SEQ ID NO: 179706 - DNA, 83 bp, Homo sapiens
cgctgctgggcacccacggagcctccggggctgctgcatatctatgtgagactgaattttcctcttagacttcagctaaaact

SEQ ID NO: 179707 - DNA, 100 bp, Homo sapiens
gtgaatgaacacccattgactgaagtgagctgtggtgctcccattcaagtttccgaggtgaagctgctttccttttcatcagggcagcgaaccgttttcc

SEQ ID NO: 179708 - DNA, 101 bp, Homo sapiens
gaaaaactggaaatcccaaagcctcgaatggctgccactcagaaacttgttaaagacattattgtgacctgaaaaaaatgtctggatttctagagggcttg

SEQ ID NO: 179709 - DNA, 101 bp, Homo sapiens
cttcttgttaaatggggttgtagcatagaagatgtggactacaatggaaaccttccagtgacaaagctgcaggtgagcaaatcgaagaggaccctcaccct

SEQ ID NO: 179710 - DNA, 83 bp, Homo sapiens
tatggcaaaatatgtgtggattgctgagtatttttaccaaggttttaagcgatgcttagtggtgaagaaaacagactgtggag

SEQ ID NO: 179711 - DNA, 90 bp, Homo sapiens
gctgtgaccagaggaatagctccagccatccgggtctcggcgcggaagatggccggcggcgtggacggccccatcgggatcccgttcccc

SEQ ID NO: 179712 - DNA, 82 bp, Homo sapiens
ggcgtggagatatggcgcaactgcggcgctttggtgccctggttgtcagatgttggaaagcagtaggacggaacatactctt

SEQ ID NO: 179713 - DNA, 75 bp, Homo sapiens
cccgttcttccgaggcgttaccatcaagagatacttgtttgccttgcaacttaagagagacctgctggaagagcg

SEQ ID NO: 179714 - DNA, 100 bp, Homo sapiens
tcggcgggagccagcgagccacgggagcgagccagtgaggccgtctgggagaacatggcgcgcatgtgcgtgaagacccagcggctggacgtggccaagg

SEQ ID NO: 179715 - DNA, 90 bp, Homo sapiens
cggaggtcgataagctggaactgatgtacctggagtagaacagaaaaattattatgtctgtgttcccttgggactcattggaaattgtac

SEQ ID NO: 179716 - DNA, 83 bp, Homo sapiens
agttcatgcttatgaatgctcgacttcagtgagctttctcttaagtgtgccaagctgccatccaactttcttgagcatttttt

SEQ ID NO: 179717 - DNA, 100 bp, Homo sapiens
ccgagaggtaccgggggtgacagctccgggaccggccgaaaggcgaggaaccgggctggtgaattaccatatctccgtcaagtgcagtaaccagttcaag

SEQ ID NO: 179718 - DNA, 50 bp, Homo sapiens
agctcccagtcctacagacacagtgaaagaaaggatgtcttaagagaagc

SEQ ID NO: 179719 - DNA, 96 bp, Homo sapiens
gtggtgaaaacaggagttgtgccccaacttgtgaagcttctaggagcttctgaattgccaattgtggactattagaagacacattagtgcagaagc

SEQ ID NO: 179720 - DNA, 100 bp, Homo sapiens
ttcagtgcccgcagccagccgcccgccgacgccgttccgtgcagctcacggagaagcgaatggacaaaggtcaagggattggttccaaaataatcaaaaa

SEQ ID NO: 179721 - DNA, 101 bp, Homo sapiens
ttctccattctgttggttttatgcatctttatccaatcaagtgcccttggacaaagcctgaaaccaggaagctctggaggaatatgtgaaaaaagtaaact

SEQ ID NO: 179722 - DNA, 82 bp, Homo sapiens
gtgggaccccacgtggctgtacctgtgcaagagagatagcctgggctggaagctcttctacgtcacaggctgcctgtttgtg

SEQ ID NO: 179723 - DNA, 100 bp, Homo sapiens
caccaatattaactttttactagaagaatatggaatcatggttaataatgcaggattttatgagctccagtcaacaattttactggattggactctctta

SEQ ID NO: 179724 - DNA, 100 bp, Homo sapiens
ttgtacttacaaagtccatgctaacctactatgagggtcgagcagaggcatgaagctttgctgtattatgttttagcagcagaaactggaattgaagtgt

SEQ ID NO: 179725 - DNA, 100 bp, Homo sapiens
ctatgatctgcagggagacgcacagccaggacatcctggaacctgggaaaggggagggacattgcttgggcctccagactctgtggttgatgtggggagt

SEQ ID NO: 179726 - DNA, 83 bp, Homo sapiens
ggcccggaggcggcggagggcaccccgggcgggcggcggctgctgtgagaagccctaccactgcaactgggacggctgcggct

SEQ ID NO: 179727 - DNA, 100 bp, Homo sapiens
ctggccagctcaaccgcttcgtgcaactctccgggcggccgcacctgccaggcagttgcagtggtgcagaatggctgacctcagtcttgcagatgcatta

SEQ ID NO: 179728 - DNA, 90 bp, Homo sapiens
ctctgggcgaaaattggatgtgaaaatgaagccagaccgagatgtggtcaaaggtgaaaagattcttccggtatttgatgagccaccaaa

SEQ ID NO: 179729 - DNA, 100 bp, Homo sapiens
aaataaaaacagaacaggaggtggtagagggcatggatatctctactcgctccaaagatatgaggccccaggattcctggcgaggtcctcctcccctttt

SEQ ID NO: 179730 - DNA, 100 bp, Homo sapiens
ggacgccactacagttcatcaacatcaactacgtccctctgaagctggaggaaagcaggaatgttcagaggcaaatgaagattctgcagaataagcaagc

SEQ ID NO: 179731 - DNA, 100 bp, Homo sapiens
ggggaccgagcctgggaggccggccggtgccagcacctttcggcttctgagacggcggcagcagcggcattcaggctttaccgccagcacctgttcagaa

SEQ ID NO: 179732 - DNA, 100 bp, Homo sapiens
ttcgactccactgctaacaaagataagttgcttcgcttgaagttaggatcaggaaaagtcatcaagggtatggacagtggatttgcaggtggagaagatg

SEQ ID NO: 179733 - DNA, 87 bp, Homo sapiens
gaaacgggcagccatggccctccacagcccgcagacaatgcagatcttcgtgaagactctgactggtaagaccatcaccctcgaggt

SEQ ID NO: 179734 - DNA, 75 bp, Homo sapiens
gcccaggagaggaagacccagtacagctggacgtttgccgtccactctgaggttttcctccctcaagcaattcga

SEQ ID NO: 179735 - DNA, 75 bp, Homo sapiens
gcgcgaggttcggggagctcggccaggctgctggtacctgcgtccgcccggcgggtctcgctctgttgcccaggc

SEQ ID NO: 179736 - DNA, 90 bp, Homo sapiens
caaaaagaaagctgcgttaatgtttgcaaatgcagaggaagaatttttctatgagcacttttctgtagaaggtcagttggaattcagggc

SEQ ID NO: 179737 - DNA, 74 bp, Homo sapiens
attgaaaggcttcaaagctagcagatccataatgagatggcatcaacatcagataaaggtgcccaaggaagaaa

SEQ ID NO: 179738 - DNA, 83 bp, Homo sapiens
gggacccaccgctgccctcagctccgagtccagggcgaggtaagtaaggaggtctctgtaccatggctcgtacaaagcagact

SEQ ID NO: 179739 - DNA, 100 bp, Homo sapiens
gaaggccagcaacccatcgtcagaaaagtgaaatgacaatggatgctctgttggctcgattgaaacttctgaatccagatgaccttagagaagaaatcgt

SEQ ID NO: 179740 - DNA, 83 bp, Homo sapiens
cctcctaagcagcagctggtactacagacagagaaacggaggcacagagaaggaagcggcagttaaagctgcgaagaacctaa

SEQ ID NO: 179741 - DNA, 88 bp, Homo sapiens
gctcctggtggctccagcagcagatcgttaactgaagacaatatgcaaaattctcacatggatgaatacagaaattctagtaatggca

SEQ ID NO: 179742 - DNA, 88 bp, Homo sapiens
ttaccgtcgccagcggagcgaacccgagagcgtggagcgggctgggccagagcgcttcgaccatcactgcccctgggtggggaattgt

SEQ ID NO: 179743 - DNA, 100 bp, Homo sapiens
aggaggtccgcacacttgaggagttactgaagcccccagaagatgaggctgagcattacaagtgtgtagcccacaatgccctggagtgtgcacgagccat

SEQ ID NO: 179744 - DNA, 90 bp, Homo sapiens
cccagtcccacttcaaacattcgtctcggaaaccccgcctcttacagtcacgagggggatccagaatgactgctggagttactactgtca

SEQ ID NO: 179745 - DNA, 74 bp, Homo sapiens
ctgagacggcggcagcagcggcattcaggcactgaagtggcagcagcatcagggattgcttcctcctggtatga

SEQ ID NO: 179746 - DNA, 75 bp, Homo sapiens
ggctgcccagagagaactagtggcccaagggaaggtggcattggtgaggctgtgtccagtgcagtagtgggcgag

SEQ ID NO: 179747 - DNA, 100 bp, Homo sapiens
tcctgcatcgacatggggaaggagctgctggccaggagccactatgcggccgaggagattccacaggttttggtgaagttgaagaagtactctcatggag

SEQ ID NO: 179748 - DNA, 75 bp, Homo sapiens
aggtgcgggcgcggctggcggccacgcagacgaagttatacggaagcgtctcctcattgatggagatggtgctgg

SEQ ID NO: 179749 - DNA, 95 bp, Homo sapiens
gaacatgtcatcaaggtagcacatacttgtctccatcctcaggaatcccttcctgatactagaagtgaggtttactggactcatgcgggtggtag

SEQ ID NO: 179750 - DNA, 74 bp, Homo sapiens
ctgtggctcccgctgtagctctggcatcatcgacctgtcccaagtgccacacctgcctgtgctcgtgcccccga

SEQ ID NO: 179751 - DNA, 100 bp, Homo sapiens
tcgcaggagcgctgcatcctcctgcgtcgctccctggaagccattgagcttgggctgggggaggcccaggcctgggcggatgatgtggagcggtttcaga

SEQ ID NO: 179752 - DNA, 87 bp, Homo sapiens
cagctgatcagactcctggtgccactcccaaaaaactatcaagttgggatcaggcagagatgaggaaactgaggtccagagaagttg

SEQ ID NO: 179753 - DNA, 82 bp, Homo sapiens
agcgcccagaggcgagccctggtggaggaagaggtttggtgcacctcgatttggaggaagtagggcagggcccttatctgga

SEQ ID NO: 179754 - DNA, 83 bp, Homo sapiens
aggaaggaacttggttccccctccctcagcttccgccccaaaagatacctgaaaaaagcggcagtctgcaacccagaagaggg

SEQ ID NO: 179755 - DNA, 100 bp, Homo sapiens
tggtgaaaaaggaagaattgacccttgaaggaatcaaacagttttatattaatgttgagagagaggaatggaagcaactggatcctgctcagagcaacct

SEQ ID NO: 179756 - DNA, 100 bp, Homo sapiens
ccgccgcccgagcgctcgagaaagtcctctcgggagaagcagcgcctgttcccggggcagatccaggttcagatgaaggatttgggggcagagcacttgg

SEQ ID NO: 179757 - DNA, 100 bp, Homo sapiens
gcattctttaccgcgttcatatgataaactcatcctgaaagtcgctgttgttctcctgctgagcaagaatggaggccccactggtgagtctggatgaaga

SEQ ID NO: 179758 - DNA, 130 bp, Homo sapiens
aggaatccaggtgcacccaattcaaggcctgccgttggctatagcaaatgccccaggtgctggaggtggtgagagccaactatgacacgctcacgctgaagctgcaggatggcctggaccagtatgagcg

SEQ ID NO: 179759 - DNA, 83 bp, Homo sapiens
aggaggtcctgccgtccatgcggaagatcgtcgccacctggatgctggaggtgtcccgacccaggctaagcttgagcatggct

SEQ ID NO: 179760 - DNA, 100 bp, Homo sapiens
ccgggccgtgaacgaaagcagtgacggaggagcttgtaccaccgctcagcaaaacccagcagctcagattcctgccaggcagcgggagattgaaatgaac

SEQ ID NO: 179761 - DNA, 75 bp, Homo sapiens
gtagtttggagaggccttatggtaatgtcggccattgagaaattgttgaggcagtatgacctgtcagcctctaca

SEQ ID NO: 179762 - DNA, 83 bp, Homo sapiens
gtgaacagtgtgcttctctttaccatcctgaaccccatttattcgatcaccacggaaaagaaccagcggcctacgcacttggc

SEQ ID NO: 179763 - DNA, 100 bp, Homo sapiens
tgaagcggcagctgaggagactccggcgctcgccatggccgacgaaaagcccaagaaaatgtggacacagacttgccaggcagcctggggcagagtgaag

SEQ ID NO: 179764 - DNA, 75 bp, Homo sapiens
tgctggaaaaaatgacatccagcgacaaggactttagactcctgggagagttggctctcaaggttctgatttaga

SEQ ID NO: 179765 - DNA, 90 bp, Homo sapiens
aaaatgaattacagaatcaattggataaatgtcgtaatgaaatgatgaccatgactgaggaccctgatgctcccataagacagaaaatgc

SEQ ID NO: 179766 - DNA, 75 bp, Homo sapiens
cctggatgaagtgcacaccataccaggtggatatggttatagaagaagtggccgagataaatatggccctcctac

SEQ ID NO: 179767 - DNA, 135 bp, Homo sapiens
agtcgaagcgagggtctgaagttcacgactactagaaggggaggggagtggaaaggctctcagtgaaaaagaaatggcgaaaagtcttttgaagacagcctctctgtctggaaggacaaaattgctacatcaaac

SEQ ID NO: 179768 - DNA, 100 bp, Homo sapiens
gcttaggaatcttgacttctgttcctataacacccagggtggtttgctttctctgtgccagtagtgggcatgtagagggatgatatcgctgatttagtag

SEQ ID NO: 179769 - DNA, 82 bp, Homo sapiens
gcctgaacatctgaaattgacagattttttatcaagcagaaatgcatcgaacaacgagaatcaagatcactgagctaaatcc

SEQ ID NO: 179770 - DNA, 75 bp, Homo sapiens
tgtcctggcccggatgatgaggccagtgagtgatcaagtggttaaacactttaagatgagaaaaattgatctctg

SEQ ID NO: 179771 - DNA, 74 bp, Homo sapiens
gtgcgaagaagctgcagccgcacctggccaaggacctagaggatcaagacataatgggagcatttttagacaag

SEQ ID NO: 179772 - DNA, 75 bp, Homo sapiens
ggatgcacgtacagaatacattcagccgtcagattgtgcctctgctggagaaagcagataaaaatggcatgtgtg

SEQ ID NO: 179773 - DNA, 95 bp, Homo sapiens
ccagtaccaaaaacgtcaacaacagttttacgtggtacgtaaatggggtgaattattttactgacctgtggaatgtgatggacacgctggggctt

SEQ ID NO: 179774 - DNA, 83 bp, Homo sapiens
gaaggaacgaggcaaggagctaaagcagcgtgcgttcagccctgggcaccagcaggcagctggctccggttttggggtatctg

SEQ ID NO: 179775 - DNA, 51 bp, Homo sapiens
cttaccctcaggtccaacaatgcagatttggggatattccctgcccaaaaa

SEQ ID NO: 179776 - DNA, 74 bp, Homo sapiens
tttggagaaattgaggaaactgaggaaagaggctgcagcgaggaaagagtgttgcggagataggaacatgggag

SEQ ID NO: 179777 - DNA, 82 bp, Homo sapiens
cggcgaacgcggagagcacgccatgaaggcctcgggcacggaagttctactacatcaccctgctacgagaccccgtgtcccg

SEQ ID NO: 179778 - DNA, 75 bp, Homo sapiens
ccaccggcggtctgataggctacatcgcggcatgagatgaagctgtgacagcatcagccactatgtgattgtcat

SEQ ID NO: 179779 - DNA, 83 bp, Homo sapiens
atgggcagttgtgaaatataccctcagactattcagcacaatcctaatgggcggaacgtccttgtgaagacctttatctgagc

SEQ ID NO: 179780 - DNA, 131 bp, Homo sapiens
atcgagcagctgaacgagtgcaagcagctgtccgagtcccaggtcaagagcctctgcgagaagaaaaggcgacggcggattgacagaagtatgattggagagcccacaaactttgtgcatacagctcatgt

SEQ ID NO: 179781 - DNA, 100 bp, Homo sapiens
tttacacatctcacccaattcaggaatgccatctccaaccacactgaagaagtcggagaagtctggtttcagcagcccctccccttcacagacctcctcc

SEQ ID NO: 179782 - DNA, 101 bp, Homo sapiens
agcagtacaagtccagcggagaaagaaaatatgttgtgttcttcttttaccctcttgacttcacctttgtgtgccccacggagatcattgctttcagtgat

SEQ ID NO: 179783 - DNA, 100 bp, Homo sapiens
gcggcagaggattcgctcccagagcagctgcggccagggagggcaatgagccaggggagaccactcagatcacataccatcagcttctggtccaagtgtg

SEQ ID NO: 179784 - DNA, 75 bp, Homo sapiens
ccaaccccttcgcggacccagtggatgtaaaccccttccagaggctgacccgcggctgattgagtccctctccca

SEQ ID NO: 179785 - DNA, 50 bp, Homo sapiens
cccggacagagcccgtggtcgcgcagaacccttaggagaaatcttgagag

SEQ ID NO: 179786 - DNA, 87 bp, Homo sapiens
ccaagcacagagtcaccagtttccatatgtaatgcaaggcctaccgtatgtgaacgggagctgtgtgtgtttgcttttcaaaccctg

SEQ ID NO: 179787 - DNA, 83 bp, Homo sapiens
gaaacaattgatttgctcttacgtatttgtgtgacttgactcttcaaacacaaagcccaataggggcacaaaacgtccccggg

SEQ ID NO: 179788 - DNA, 100 bp, Homo sapiens
ctcactgcagaggtgctggagctggcaggtggctgctgagatcttggtgagtgtcctgttcttcatttgggttttaacggcctctgagtaaagtccgcct

SEQ ID NO: 179789 - DNA, 100 bp, Homo sapiens
agtccacggacacttcaggctatggccagagcagctattcttcttatggccagagccagaacatatacgctcaacggcaagaaagtggaagttgccgtca

SEQ ID NO: 179790 - DNA, 100 bp, Homo sapiens
gagcagttgtctgatgaagagaaggatcaaaaccattcaagtgcaagatatgccattttgcaacagctcagcttggagatgccagaaaccatgtgaaaag

SEQ ID NO: 179791 - DNA, 90 bp, Homo sapiens
gcctatgtgaaactgctttctaaaacaccagaactcaacctggtcaggttggtgacattggtccatcacatgggtggagttattcgaaaa

SEQ ID NO: 179792 - DNA, 90 bp, Homo sapiens
agggtcctgggccccgggcggcggtcgccaggtctcagggccgggggtacccgaggagctgacatggacccaaatcctcgggccgccctg

SEQ ID NO: 179793 - DNA, 75 bp, Homo sapiens
tggctgctaaacttatggagttactagaggagatttcagaaagactgcaaaattcaaaatggggctcaaggtatt

SEQ ID NO: 179794 - DNA, 97 bp, Homo sapiens
tgtgaatttgtgacagctgcagttgctccccgcccccgagcagccgagataacgaaggaggcccaacttcattcaataaggagcctgacggatttat

SEQ ID NO: 179795 - DNA, 90 bp, Homo sapiens
ggaatggaccagagaattggaaacaagtttctaaaagccagtgttggtcctgaggagcgacaattcaagggtttaggtgactgtattatg

SEQ ID NO: 179796 - DNA, 90 bp, Homo sapiens
ggcgaagatcgccaagactcacgaaggcctggcccttcccagatgtgctggagtgctgcctcgtcctgcttctcatcaggtcccactttc

SEQ ID NO: 179797 - DNA, 75 bp, Homo sapiens
ggagaactgggcgacggagcctttgggaaagtgtacaagaaaacacgagatttttctcctatttcagcagttggc

SEQ ID NO: 179798 - DNA, 100 bp, Homo sapiens
gagttgctgatcgcggaggagaagctgagccccgagcaggagggccagctcatgcccaggcttctagagcagggcatccacagtgacgtggtctttgtag

SEQ ID NO: 179799 - DNA, 108 bp, Homo sapiens
ccgggaggaaggaacgaggcaaggagctaaagcagcgtgcgttcagccctggggtgtggacactgccagcggctgcagccgacttggaatgacctgggagacaaatac

SEQ ID NO: 179800 - DNA, 83 bp, Homo sapiens
gtggatttcagtgtcttttctgcctgctcagttccagttgtcacgtcctcagaatggttggaatgaccctccagctttgaaca

SEQ ID NO: 179801 - DNA, 95 bp, Homo sapiens
ctgcaccgcgcgggacaagtcgccggcggcgcccgacggagcagctgtgccctcctggctgaagaagccccaagacagccagctggaggagggca

SEQ ID NO: 179802 - DNA, 100 bp, Homo sapiens
acgggtgacagatgtgccagatacccaaagacatcgacgagtgccagtcctcgccctgtgcctacggggccacgtgtgtggatgagatcaacgggtatcg

SEQ ID NO: 179803 - DNA, 75 bp, Homo sapiens
tccagaagatcacacagtgttaggagaaggcagagcccccccaggctatgaatgccctgatgcggttgaaccagc

SEQ ID NO: 179804 - DNA, 90 bp, Homo sapiens
tgtgtcttccccagctctgcagccacatactatccgtttgttcaggaaccaccagtgacagaacagtacaatgtagattataaactggag

SEQ ID NO: 179805 - DNA, 50 bp, Homo sapiens
aaacccggagaccaaatccttggaacgagctagagcgacagtttcttgaa

SEQ ID NO: 179806 - DNA, 75 bp, Homo sapiens
attggtccttcgccgtcagtatttgaggagaaagcatttggctaaatttggccgaagatggaccaaaatttcaaa

SEQ ID NO: 179807 - DNA, 74 bp, Homo sapiens
ggaaagttgaaggggacatgtatgaatctgcaaacaatcgagtggggtggaagacaacccgtgagtattacacc

SEQ ID NO: 179808 - DNA, 100 bp, Homo sapiens
cgtcatcagagagcgccggaagcggtccgagaatgaagaacgattcctcctcgtgctggagttatcagtgccccacagagccacgcgcgggcatctgctg

SEQ ID NO: 179809 - DNA, 97 bp, Homo sapiens
gctacacaaatctggaacgggtggccgattactgcgagaacaactacatacaggattgtcaccagacctgcaatctatggagcagattcggagaatt

SEQ ID NO: 179810 - DNA, 50 bp, Homo sapiens
gttccttattgagatcccattgtcaggcacacgtcacatggagatgggcg

SEQ ID NO: 179811 - DNA, 51 bp, Homo sapiens
gttcatagttgactccacagatccggggtctgctcaccaggtggccagata

SEQ ID NO: 179812 - DNA, 90 bp, Homo sapiens
ttcgcagtggtcgcttcttctccttggtttaaaatgctacctgaagttctatatcgtatcttcacacttgaaacaattctgattagtaat

SEQ ID NO: 179813 - DNA, 98 bp, Homo sapiens
aatgcgctgccgggattaccggctgaggtcaagggggtcaattttgaggcagttctgagggtggaggaagaagaggccaattctaagcaaaatataac

SEQ ID NO: 179814 - DNA, 83 bp, Homo sapiens
cccgcgagcacagagcctcgcctttgccgatccgccgcccgtccacacccgccgccaggttcaagggcagcaggaaagacgag

SEQ ID NO: 179815 - DNA, 82 bp, Homo sapiens
ccagctgccgaggcgttcggtcctgctgttgcggccgctgccccagggctgcggggacgggcagttgggtgagaagcagctt

SEQ ID NO: 179816 - DNA, 75 bp, Homo sapiens
ttcggatcatgtctggtggctccgcggattataacagactgtgccctgtccacggtgcctcctgcatgtcctgct

SEQ ID NO: 179817 - DNA, 100 bp, Homo sapiens
tcaagttaatccaggtgagactttcacaataagagcagaggatggaacacttcagtgcattcaagacttaagcccttagatgtggcgtttatgaaggcaa

SEQ ID NO: 179818 - DNA, 50 bp, Homo sapiens
agtgactccactcattggggagctccatgagggcaggggattttgtctgt

SEQ ID NO: 179819 - DNA, 75 bp, Homo sapiens
aattgaaaatgaatgaatgtacacacctcattgtgcaagaaccaaaagggtgaagatgtcccccttacggagcag

SEQ ID NO: 179820 - DNA, 100 bp, Homo sapiens
aggatttctcagctatggcacaagcttcagtacccctcaacctggacaggcaccatacagctaccagatgcaagattttctctgtgggcagttctttttg

SEQ ID NO: 179821 - DNA, 50 bp, Homo sapiens
gcagcgagcaagacagcaagcaggccaccagcttgggctccccacggagg

SEQ ID NO: 179822 - DNA, 74 bp, Homo sapiens
agaaggagaacctgaaggctgcgcaggaggagtatgtcaagcgagccctggtggcagggcccagccccgaacca

SEQ ID NO: 179823 - DNA, 100 bp, Homo sapiens
tcaagtacctcatgttcgccttcaacctgctcttctggggtgtggtaactgcagccacaagtctgatcaccactttagcacagaagaacccagaagagtt

SEQ ID NO: 179824 - DNA, 87 bp, Homo sapiens
actgcaaaccgagctcccgtctgccttgcagttacagttacatgatcgacaacgtgatcctgctcatcacaggcacgctgcaccagc

SEQ ID NO: 179825 - DNA, 101 bp, Homo sapiens
agggaaccaggggtccgggctagagctggagtcgtgagcgcgcgcccgccccgctctgggaggaccgcgaggaccagtttggacaacatataaaatcagat

SEQ ID NO: 179826 - DNA, 90 bp, Homo sapiens
aaagtgggaaagggaagcttagcccgccgctgccgcctccgagcagcccgccaggtgctggagaatctggtaaaagcaccattgtgaagc

SEQ ID NO: 179827 - DNA, 50 bp, Homo sapiens
gaggccttccagctgtttgaccgaacagatacctctaacctatttggaaa

SEQ ID NO: 179828 - DNA, 100 bp, Homo sapiens
gctatacctcatcggggcggtgattgccggactgaagatggcaaactaattgttgaaggaatgctggacattttctggggagtaaaacgacctatacagc

SEQ ID NO: 179829 - DNA, 100 bp, Homo sapiens
taaaggctggcagcctccccgggtgcctccgcggactacaaatccctccaggatatcattgccatcctgggtatggatgaactttctgaggaagacaagt

SEQ ID NO: 179830 - DNA, 83 bp, Homo sapiens
ggccgccagcctcggcaccgtcctttcctttctccctcgcgttagtaccatggggcgcaagttggaccctacgaaggagaagc

SEQ ID NO: 179831 - DNA, 74 bp, Homo sapiens
agattcgcagtggtcgcttcttctccttgactgttggtagagaaaatctttgctcagtatcttgtcccccacaa

SEQ ID NO: 179832 - DNA, 100 bp, Homo sapiens
agacatcaagctcaaagacattgaacacgcgttgtctgtgtcggttttcaataacaagaacaaggaggaggtggaggaggaggaggatggagagctgccc

SEQ ID NO: 179833 - DNA, 75 bp, Homo sapiens
aattgaagcactccaaggagagcttaaaattgctgttttacagaagggccactgtttgtggaagatataatgaca

SEQ ID NO: 179834 - DNA, 90 bp, Homo sapiens
ggaagagtacactgggaccgaccctttgtatgtcggcaaggtgaaaaaccatttcaatgtagtcaatgtgacatgcgtttcatacagaag

SEQ ID NO: 179835 - DNA, 100 bp, Homo sapiens
aagaaaagcatgggtacaacatggaacaggaaacttttgagaagaactttgaaagagaaacccataaaataagtgagcaaaatgatgctgataatgctag

SEQ ID NO: 179836 - DNA, 74 bp, Homo sapiens
ggacttcaccactgcctcggaatgggaaaggaagaaggcctggatatggtgaacagagaaactgcacatgaaag

SEQ ID NO: 179837 - DNA, 131 bp, Homo sapiens
actgttcctggaggaatccgagaagagcagagcggagggagccccagacacggttcgtgctggccgtgggcagcgccgtctttgatgccatgttcaacgggggaatggccacaacatccacggagattgag

SEQ ID NO: 179838 - DNA, 75 bp, Homo sapiens
gtgcgttatggatacataacctgaggagccgggggaagctggccttgggagaggacatgtactcccaggattcca

SEQ ID NO: 179839 - DNA, 96 bp, Homo sapiens
gacggattcatttagagctgcggaacaggacgccctctgattgagaaagatcagtctaaagaaaaggagaagaaagtgaaaaaaacaattccttcc

SEQ ID NO: 179840 - DNA, 99 bp, Homo sapiens
cctacgtgcacaacatcacccgcaagggctttgttcgcgggggtcacagctctcatggctgcagctagcgtgaccccccctggctccctggagttgcta

SEQ ID NO: 179841 - DNA, 98 bp, Homo sapiens
aagtggttcttttgacaaatgtgtacacatctggaacacgcaggcaccatacaggaagattacttgagagagctgctgacaaccatgggggatcggtt

SEQ ID NO: 179842 - DNA, 100 bp, Homo sapiens
tgttaccctcggacgtagcccggcttgtattgggaccagatctttatggaaaatgtaggtgcagtgaagcaactgtgcaaactaactaacaaccttgagg

SEQ ID NO: 179843 - DNA, 83 bp, Homo sapiens
cgcgttctcgcacgcgtcatggtgagaagccctaccactgcaactgggacggctgcggctggaagtttgcgcgctcagacgag

SEQ ID NO: 179844 - DNA, 113 bp, Homo sapiens
caccgcggaaagcatgttgtggctgttccaatcgctcctgtttgtcttctgctttggcccagatttggaaatagtgggatttattgatatagctgatatttcaagtcccccag

SEQ ID NO: 179845 - DNA, 100 bp, Homo sapiens
agtttgagtatggagatgcagatgggcatgcagccgagttgtcaggtgaagcatatatgcgtttaagcaaactccccgaagcagagcattggtatatgga

SEQ ID NO: 179846 - DNA, 80 bp, Homo sapiens
agaactgcctgtgcgccctcaacctgctttacaccgaactgtggctgcaccatctgtcttcatcttcccgccatctgatg

SEQ ID NO: 179847 - DNA, 83 bp, Homo sapiens
tggggcgatgcttgtgaccctgcagctcctcaaagtgggaggaggagctcgccaagcgcatgaaccttcagaccatggtggac

SEQ ID NO: 179848 - DNA, 100 bp, Homo sapiens
ccctgtgggcctccatcccgtgccctcgctctgagctgcgcctggacctggttctgccttctggacaatctttccgggaaaaagacctcgatgaagttct

SEQ ID NO: 179849 - DNA, 73 bp, Homo sapiens
aaacctttccaacacagatgtccaagctgccaactgctgggcatgctgtgtgcttgcatcgtgttgtgcagaa

SEQ ID NO: 179850 - DNA, 95 bp, Homo sapiens
acagagtcaccagtttccatatgtaatgcaaggacggtctggaaaatcccgaagcagaagcccgtattcatctaggcattcaagatctcgtagca

SEQ ID NO: 179851 - DNA, 88 bp, Homo sapiens
acggattatccggagccaaggtccgctcggatctcacattcttgaaggtggcattgaagagcactaagatcggaagatgagtgagctt

SEQ ID NO: 179852 - DNA, 82 bp, Homo sapiens
ggaatcagttccttgatgagctcatggagattcgggaactggagcctctcctctgtcacagtgacaatccatctcagctcat

SEQ ID NO: 179853 - DNA, 100 bp, Homo sapiens
ccggacctccacaccaggctactgtttccccaaacgaataacagacgagtacctttggaaaggtcacgctctcgccacaatggagctatctcatctaagt

SEQ ID NO: 179854 - DNA, 50 bp, Homo sapiens
ggaccgaagtgagcgtggacctgccgtgcaaattgggaatcgtgaaattc

SEQ ID NO: 179855 - DNA, 49 bp, Homo sapiens
ggatcaagatggccatgtggcaggtgagaaagatcagtctaaagaaaag

SEQ ID NO: 179856 - DNA, 74 bp, Homo sapiens
ctgcacagcacagaggggcagccggagagcctgggaaagttacagaatgtctgaaggggacagtgtgggagaat

SEQ ID NO: 179857 - DNA, 100 bp, Homo sapiens
ggcctcccttctagagattactatgaatgcactggaatctataaagagctggagaatgctggaggagaccttaaggatggccaccaccactatgaaggag

SEQ ID NO: 179858 - DNA, 75 bp, Homo sapiens
gcgaggctatcacaagctgcaccagcttctaaccgaaaatgaagctgttgtcatttctggaaggaaactggccca

SEQ ID NO: 179859 - DNA, 98 bp, Homo sapiens
gcggccggcaagagcggcggtagcgcaggggagattacttttctggaaggtgattttcttccacccccacctccacctctagatgattccagtgccct

SEQ ID NO: 179860 - DNA, 100 bp, Homo sapiens
ccctcggctcggcgccttctgcgtctcccggctggtggggaagcctctgcgccgccggcaccatgagagcaaatcatggaggaagataaaaaacatggtg

SEQ ID NO: 179861 - DNA, 98 bp, Homo sapiens
gccacacagtgtccagatacgaggcatgattttgaagtcagaggagatgtggtcaatggaagaaaccaccaaggtccaaagcgagcaagagaatccca

SEQ ID NO: 179862 - DNA, 80 bp, Homo sapiens
aaaacaagactggggctgctcccatcattgatgtggtgcgatcgtttcctcactgcttggaggaagatgagaattctcag

SEQ ID NO: 179863 - DNA, 97 bp, Homo sapiens
gtcgggaatgaggagatacgaggtggcgctggaggcggaggaggagatctactgggtggatgcgcatctggaccggatcgagagtgctgacctcaat

SEQ ID NO: 179864 - DNA, 74 bp, Homo sapiens
catgctttgatagtgtaaactcagcacgagccattttgcaggagtccttcaataatgttaaacagtggctgcag

SEQ ID NO: 179865 - DNA, 74 bp, Homo sapiens
atccgcagggttcggatgagaccaggcatgcccaagagaatcgtaaatgcaaaaattgcttgccttgacttcag

SEQ ID NO: 179866 - DNA, 100 bp, Homo sapiens
cctgggacccgcggaagccggcatgctggagaagctggagttcgaggacgaagaaaagttgccagacggccagcattgccactgccagtgcatccgccca

SEQ ID NO: 179867 - DNA, 75 bp, Homo sapiens
gtcgccaaacgtaagagctctatgcctcagaaatttcttggtgaatctggattgggaaagtcgacattaatcaac

SEQ ID NO: 179868 - DNA, 150 bp, Homo sapiens
cagcctccggccgctcttcttttgaggcttttccttctgcagggcatcctgaggcttctgtggggggacctggaggcctgcccgacagccccagcaacttgctgcgcttcatccaggaggtgcacgcacattacctgcatcagcggccgc

SEQ ID NO: 179869 - DNA, 75 bp, Homo sapiens
gtgggcacctggcaaagatctatgccatgcactgggggaccgactcaagagctccgagaggccttcagagaattc

SEQ ID NO: 179870 - DNA, 100 bp, Homo sapiens
ataagcagaaacatcagttgaaacatagggaactctttttgtcacgccagtatgaatctctgcccgcaacacatatcagatctcacattcttgaaggtgg

SEQ ID NO: 179871 - DNA, 75 bp, Homo sapiens
gcagagcacaaggagatggaagacgtctcccacaacctgctccgggcgctggacgttgggctcctggcgaacctc

SEQ ID NO: 179872 - DNA, 98 bp, Homo sapiens
ggtggaggctgctggcaatggcctacgtcgtcataccgggcttccttgccctgtccggggaatagctattcagtcagacagaaccacttatcacgttt

SEQ ID NO: 179873 - DNA, 100 bp, Homo sapiens
gactctgacttaaccggggaatgagggacttggtctggcggcagattccaggagggcttcgtgtatggacctcaagcgttggaggtagcagacttttcag

SEQ ID NO: 179874 - DNA, 100 bp, Homo sapiens
ccccgccgccgccgccgccatcatgagggaaatcgtgcacttgcaggccgggcagtgcggcaaccaaatcggcgccaagtcaccttcaggccattcagag

SEQ ID NO: 179875 - DNA, 82 bp, Homo sapiens
atgaaccaaacccacttcgttcaagacaggtgtttaagcgaactgtggctgcaccatctgtcttcatcttcccgccatctga

SEQ ID NO: 179876 - DNA, 90 bp, Homo sapiens
cacctttaactctccttatgctgggtgaaaacaaagccaacaggcactgtgcccctttcggttactgctgctttgcagctaacacacagc

SEQ ID NO: 179877 - DNA, 100 bp, Homo sapiens
tctcctgctgataaattggattctcgatttaggaagggaaattttgatgcgggctccgggtgcgggcgcggcctcggtggtctcgctggcgctgttgtgg

SEQ ID NO: 179878 - DNA, 100 bp, Homo sapiens
cgttgaggcccttcttgtgtatctggagaaaatagagatcatggaagggaagtggttgctgtgtatgttactggtgcttggaactgctattgttgaggct

SEQ ID NO: 179879 - DNA, 105 bp, Homo sapiens
tcgcattttggcattgacatttaattttagggtcctttatatagaagggagagtagactgttggtagagaaaatctttgctcagtatcttgtcccccacaacctg

SEQ ID NO: 179880 - DNA, 90 bp, Homo sapiens
catctgaagatgacaatttattagatggtgacactgcagttggcccatcaaactccagagaagagagtgaatactggagaagaaaggagg

SEQ ID NO: 179881 - DNA, 100 bp, Homo sapiens
tggaaagaagttgcaaaacactggagtacccaaaggcaagtggaacagctctaatggggttgaagaaaaggagacttgggtggaagaggatgaactgttt

SEQ ID NO: 179882 - DNA, 75 bp, Homo sapiens
agaaactgcaccttatcacccggaacctgcagtcggagtctagccagtcagaggcgtctgtccggagggaggaat

SEQ ID NO: 179883 - DNA, 82 bp, Homo sapiens
aggcgagtccggtctcaaaatggagtttggtgccctggttgtcagatgttggaaagcagtaggacggaacatactcttcgtg

SEQ ID NO: 179884 - DNA, 100 bp, Homo sapiens
gccggttgcgggcagtggacgcggttctgccgagagccggtgctggagaatctggtaaaagcaccattgtgaagcagatgaggatcctgcatgttaatgg

SEQ ID NO: 179885 - DNA, 89 bp, Homo sapiens
atgctatgaggatgacaaactctggagtaattggagccaagaaatgagtataggtatattgaagcaagtcaaagattacattaaacagt

SEQ ID NO: 179886 - DNA, 80 bp, Homo sapiens
aacagatgagaaacccggcaatgaaagtgggcccatctggggcagggaagagcacaattttgcgcctgctgtttcgcttc

SEQ ID NO: 179887 - DNA, 50 bp, Homo sapiens
cttttaatttttaaacttggtttgaaagatgcgtctgttactagagtgga

SEQ ID NO: 179888 - DNA, 100 bp, Homo sapiens
ggaagttcaagtcagcgcagtttgggatacagcaaatactatttcagaaacagcctatgagggaaggaaactgaaaaggccaaggaacgatacgacaaag

SEQ ID NO: 179889 - DNA, 90 bp, Homo sapiens
gtcgctgcccgcctgccctgaggagtccccgctgcttgggactttcagttaccttgatgatgtcccatttaagacaggagacaaattcaa

SEQ ID NO: 179890 - DNA, 100 bp, Homo sapiens
agcgggaaagtggtggaggatgatcttgcggccaaaggggacctcggcgcagtaatgtcaacatgagtcagtggatcggtggggaaaatgctgcttaccc

SEQ ID NO: 179891 - DNA, 73 bp, Homo sapiens
ctcaatgaagggattaaccgaggcaaaaacaaggctttcgatgaggctgtagtggactccattttggccatta

SEQ ID NO: 179892 - DNA, 83 bp, Homo sapiens
gaaaatagcacacttttactctacgcaactgttgctttttcatggtcagatgggcagacctggaagagaagaaggatgcagat

SEQ ID NO: 179893 - DNA, 100 bp, Homo sapiens
acagacatttacaaacagatacgtgctaataagaacactcgtgaaactgctcaggccatcaagggtatgcatatacgaaaagccacgaagtatctgaaag

SEQ ID NO: 179894 - DNA, 75 bp, Homo sapiens
tcgtggatacccatgatcttcgcttcccctgggtggccttctttgccagcaaagctcccctgaacagcagctgca

SEQ ID NO: 179895 - DNA, 100 bp, Homo sapiens
cggctctgtaggaaggaacttggttccccctccctcagcttccgccccaaaaggctctttggtgtaacgggaaactgcgctgcctgtagtaagctcatcc

SEQ ID NO: 179896 - DNA, 74 bp, Homo sapiens
ttgcattggaaaagctgcgggaactcagctttagtggcatccgtgtcattctggaccttactcccaactaccgg

SEQ ID NO: 179897 - DNA, 100 bp, Homo sapiens
gatgcaactgatagcagctctgatgacgatttggatgaatatacccttagaaaaaatgtggcagtatgacgaagatgatcctgcagaagctgaaaaggag

SEQ ID NO: 179898 - DNA, 90 bp, Homo sapiens
cccaggagcctgccccgccctggggacgaagagctgcagctcctcctgtgcggataattcttgctaatcacttcaatgaaggaggagcag

SEQ ID NO: 179899 - DNA, 75 bp, Homo sapiens
gaagacaaatatggaaacaaatactatgaagacaacaagcaattttttggccatccactgcagagcaatccttcc

SEQ ID NO: 179900 - DNA, 100 bp, Homo sapiens
ctacagatgagagcaagacagagcaaccaagatgcccaagatattgtgcactagtgaaattgatgaataagtcaatagaggggacagcagatgatgaaga

SEQ ID NO: 179901 - DNA, 97 bp, Homo sapiens
tttatacttgcacagaggcagctctatgagggatgtgtggacactgcactgaagacagatctgctgatttgggtcctactttaatgacaagacctgg

SEQ ID NO: 179902 - DNA, 78 bp, Homo sapiens
gagtcttcaatgtcttctgcttatatggcaatgtggagaagaaacctgctcctccaaagccagagcccaagcctaaaa

SEQ ID NO: 179903 - DNA, 100 bp, Homo sapiens
attcctcctcctgttggcctttcttctgacccctggggctgggacaggaagtcagcctcataccaaaccatccgtttttgtcatgaaaaatggaacaaat

SEQ ID NO: 179904 - DNA, 100 bp, Homo sapiens
tgcgagtggccaatgaggagtcagagcacaatcaagcctacaaggagaagatgaaggagctgtcggtgctgtcgctcatctgctcctgcttctacacaca

SEQ ID NO: 179905 - DNA, 100 bp, Homo sapiens
aagcagaccacctccaagatcctggtgcggaacatccccttccaggcccacagccgggagatccgagagctcttcagacaatgtggagctcatactgaaa

SEQ ID NO: 179906 - DNA, 74 bp, Homo sapiens
agatgatccttctgcctcagcctcccgagaagatgtcccaggagagaggagtacagccagcacctttcctacag

SEQ ID NO: 179907 - DNA, 96 bp, Homo sapiens
ccaaatggaacacggaggataaagtcagccatgtgagcactgggggtggtgccagtttggagctcctggaagttcacagacattgggaccttcgag

SEQ ID NO: 179908 - DNA, 83 bp, Homo sapiens
cgggacccggaggaccgtatccccagcccactgggctacgcaggttcccagaccagaggactgttgttaggtgattggctgtg

SEQ ID NO: 179909 - DNA, 90 bp, Homo sapiens
cacggtttttattgacagagctctgatagttgttccttgtgcagaagtaaaccaagaggagttcattgctattatgactggtgacattta

SEQ ID NO: 179910 - DNA, 100 bp, Homo sapiens
aaacatagagaattctgggcttccacacaactccagtgctaactcaacagatatggaatgtgcagatgtcccactattaactccaagcagcaaagaaatg

SEQ ID NO: 179911 - DNA, 100 bp, Homo sapiens
agacaacaccgggagcctcatctctctcctcaccctgctgtgactccaccacaggacgttgatgctacaaacccaaattatgaaattatgtgtatgatca

SEQ ID NO: 179912 - DNA, 98 bp, Homo sapiens
ggagatctctctcatctcgctcggctgcgggaaatcgggctgaagcgactgagtccgcgatggaggttttacagaaggcgacacatgttgttcagagt

SEQ ID NO: 179913 - DNA, 75 bp, Homo sapiens
cgtgacggctggcatcatcattgttggagatgagatccttaagggttaaagcacgaattgggagctctcagcgac

SEQ ID NO: 179914 - DNA, 87 bp, Homo sapiens
cctttcgagcatgacgaagagatcatcaggggccaggttttcttcaggcagagggtctcttcaggcacagaaaactgaatctgtaga

SEQ ID NO: 179915 - DNA, 100 bp, Homo sapiens
tgaagcggaaccatctgggagccttcctgatccgggagagtgagagctccccaggggagttctctgtgtctgtgaaggagtgcatccgccccaacccttt

SEQ ID NO: 179916 - DNA, 51 bp, Homo sapiens
aggagctctgcattgaaggcactgggaataactgaagtgaagtgatggact

SEQ ID NO: 179917 - DNA, 75 bp, Homo sapiens
caggcatgtctcccgaggagtgcaggcgcttcaccacagacgcactagaaagtttgggatttggctcttacatca

SEQ ID NO: 179918 - DNA, 74 bp, Homo sapiens
tcccggatagcgagggcggccgcgccggctccaggagtgagctgagtcgacagaaacttcatacccaagagctg

SEQ ID NO: 179919 - DNA, 98 bp, Homo sapiens
tggcccatgcaggccagacgggcacacaggacagtcattttgtttactcattcagccctgttgcaggtcccaataaactcttcataaggttgacagaa

SEQ ID NO: 179920 - DNA, 50 bp, Homo sapiens
ccagcccctgatgtcccagcaggaagcggggagaggtggtgagagatgac

SEQ ID NO: 179921 - DNA, 99 bp, Homo sapiens
taagctgaataaagctgttttggaactgtcaggtacctcaaagcgaaagaacggtgaccatcagaagacaaacagtaggaggatttggattaagcataa

SEQ ID NO: 179922 - DNA, 100 bp, Homo sapiens
gccagccgctgttttgccggaggagcccctcaggccatgacttcctgaagccacagatcatcacccagccagaaaccaccatggctatggtgggcaagga

SEQ ID NO: 179923 - DNA, 101 bp, Homo sapiens
gggcgatcaaatggtcccggctgctgcagggcgggggcgtccccaggagccggacagttggcaaacatgaattgactgggcataaagtagctgtgaagata

SEQ ID NO: 179924 - DNA, 128 bp, Homo sapiens
ggcatgtcctcagtgcaatgctgaatacctaatagtttttccaaaattggatatcaatgatgtcaaacggctgaaacctggctacttagaagctactgtggactggtttagaaggtataaggttcctg

SEQ ID NO: 179925 - DNA, 100 bp, Homo sapiens
tgcccgtgaccgtcgctagaactcagttgtgcgttgcggccagtcgccactgctaccaatgatgccttaggagccacctggaattggctgtacttcatcc

SEQ ID NO: 179926 - DNA, 80 bp, Homo sapiens
ctggagctgctggcggcttacgaggaggtgatccgagaggagagcgcggccgactgggtggtgaaggaggagatctttga

SEQ ID NO: 179927 - DNA, 73 bp, Homo sapiens
gacgccctctgcccgctccagaagcaggaaggatcgagatcgagaccgggatcgtgaagatcggtctaaagat

SEQ ID NO: 179928 - DNA, 100 bp, Homo sapiens
ggttgctttcattgtgggagagatgaagaacctgagtcaggacgtaaatggaaccctggctttatgaaggcaaagaacagatggagtttgaagaatccat

SEQ ID NO: 179929 - DNA, 101 bp, Homo sapiens
cgccgcggtttgtcgccagaaggaagatggcggatctggaggagcagttgtctgatgaagagaagggtgccttcaccagggatggaagaggcaggctgcag

SEQ ID NO: 179930 - DNA, 78 bp, Homo sapiens
gaagctggcggggccttggagaagggcaagtgattttcaaggcgaaagggcgtgtggttgcgcctgaggaagatactt

SEQ ID NO: 179931 - DNA, 100 bp, Homo sapiens
aatggaggcctggactctgaggaatcctatccatatgaggcaacaatcacaaatcgggacaaaccgctgtcatttggtatttcccttcaaaatctgagca

SEQ ID NO: 179932 - DNA, 89 bp, Homo sapiens
gtacatcggcgagggcgcctacggcatggtgtggtttcagtgttgactggtgggctcttggagtgctcatgtttgagatgatggcagga

SEQ ID NO: 179933 - DNA, 83 bp, Homo sapiens
cgcgcgcgcctccaggagcaaggatggagaggctgggttcaattaaggaccaattaaaagcatatggcgctcttactgagaat

SEQ ID NO: 179934 - DNA, 50 bp, Homo sapiens
ccgcgggatacgcctcagcgcgaccttcacggcatggtgcaactcccacc

SEQ ID NO: 179935 - DNA, 82 bp, Homo sapiens
cggcgagcgcgagcggcgcgagaaaatgtcgtgatctcaacagcttgtcacccaacagaaaacatcatcgcctctgctgcgc

SEQ ID NO: 179936 - DNA, 80 bp, Homo sapiens
gtttgcagtacacaactcccagctgaaaggtcagcccaaggccaaccccactgtcactctgttcccgccctcctctgagg

SEQ ID NO: 179937 - DNA, 96 bp, Homo sapiens
gtctgaccctccgccaggcaaaaggaaggaaaccactgattgcttgtgtggagaaacagctattaggagaacatttaacagcaattctgcagaaag

SEQ ID NO: 179938 - DNA, 90 bp, Homo sapiens
atatagcatctggacagtcaacacgggcaccatgaagcacttcctgaggaccaaaatgtctttgactccaagaagaaagtgaaattaacc

SEQ ID NO: 179939 - DNA, 82 bp, Homo sapiens
gacgctgccagcatcgccgccgccagatttggtcgtattgggcgcctggtcaccagggctgcttttaactctggtaaagtgg

SEQ ID NO: 179940 - DNA, 100 bp, Homo sapiens
gaagcattgcatttccaagctgtgggtttgtgacgaggatccagactgtgcagatgcatcagacgaggccaactgcgatggagtttcgctcttgtcaccc

SEQ ID NO: 179941 - DNA, 75 bp, Homo sapiens
accagcaagggctctgtgtgcccaggatgcgccggcctccagtggaatcccccaaagaaggtaaagggagcaagc

SEQ ID NO: 179942 - DNA, 75 bp, Homo sapiens
gcaggggcagatggcaagtggagacagcaatctcaacttcaggtctgctttggagactttccaacaatgcccaag

SEQ ID NO: 179943 - DNA, 100 bp, Homo sapiens
catccctgaccagccgccaacaaaggtctatgacacacagctggagaatgtggaggcctttgagggcctgtctgacttttgtaacaccttcaagctgtac

SEQ ID NO: 179944 - DNA, 74 bp, Homo sapiens
cctcgacaccatggtggacacttttcttcagaagctggtcgccgccggcagtgtgtgcctcctgacgaagcctg

SEQ ID NO: 179945 - DNA, 75 bp, Homo sapiens
atcagattttgcattggatattcgcatgcctggggttacacctaaacagataagaatgtgccttttgatgaaaga

SEQ ID NO: 179946 - DNA, 75 bp, Homo sapiens
gtcccgcgctgcgcatccccgcggacgccacagcgctctcccatggctattgaagaacaagtggctgttatctat

SEQ ID NO: 179947 - DNA, 96 bp, Homo sapiens
ctcctctcagatgatagtaaagatcaaaagaattcgaagggagttggtaaacgctggattcatctaattgatgagtttaataccgatatggatatc

SEQ ID NO: 179948 - DNA, 100 bp, Homo sapiens
cgttgtttttcctgatcatctatatgggatccttcatgctgatgcttcttggactgttgacatttagggatgtggccatagaattctctctggaggagtg

SEQ ID NO: 179949 - DNA, 75 bp, Homo sapiens
tgtggctcagcccgttcgctggactgcaaaccgagctcccgtctgccttgcaggcatgctgcagacagacctttc

SEQ ID NO: 179950 - DNA, 96 bp, Homo sapiens
gatgactcaccagaatgttgaactttttaaagaactcagatctccaagacgacatagatccacatctccttccccttctcgactgaaagaaagaag

SEQ ID NO: 179951 - DNA, 144 bp, Homo sapiens
gccggcctgggctcagtgcgctcctggatgcagggcgcgggcatcctggacgccagcaccgcggcgcagaggcactttcccacacaggatggagccgggccaccctcacagctcctgccctgcagacgctggccttgtggaggg

SEQ ID NO: 179952 - DNA, 100 bp, Homo sapiens
tcctgcttggtgtaccagaattcggccatgagccgctacatactcatcatggggctcctgtacaaggagatctattgggaaactgattataaccactcgg

SEQ ID NO: 179953 - DNA, 96 bp, Homo sapiens
gcagcagggacgtcggtttgctatcgggactcggcgaggacgcctgtttctgcgccggaccagtcgaggactctggacagtagaggccccgggacg

SEQ ID NO: 179954 - DNA, 98 bp, Homo sapiens
gggcttcctgaggaagcgcgggcggacgacagaggatgccgaaccactccaatgtcaagccctccaacatcctagtcaactcccgtggggagatcaag

SEQ ID NO: 179955 - DNA, 88 bp, Homo sapiens
tgggagaatatttaatggaaaatcgcttggttaaaacctgacacttttaacagcagcgtcaccctttacaccagaaagctggcgggca

SEQ ID NO: 179956 - DNA, 98 bp, Homo sapiens
tcccagaggctcttcatgattctttggctcaaaggagttgtatttagtgtgacgactgttgacctgaaaagaactgagagaagatggtttccagcctc

SEQ ID NO: 179957 - DNA, 75 bp, Homo sapiens
cacgggcccggtgcggccccgtcatcagaagctggcagggcggagatgctggaccacgccgtcctgcttcaggtg

SEQ ID NO: 179958 - DNA, 101 bp, Homo sapiens
caggaggacacgctgcagttggccttcatcgacttgagacaagttccatcataatgaatggatccaatatggcaaatacatcaccgagtgtaaaatccaaa

SEQ ID NO: 179959 - DNA, 75 bp, Homo sapiens
tggagaccgttacgacggcatgctcatggatttacagtcgcactttggcaccgatgacagattccgcatggactc

SEQ ID NO: 179960 - DNA, 88 bp, Homo sapiens
cttcacctgggaacctgatggtggtgcagccggaccgcattcgctgtgggaaagatgttctcgtccgtggcgcacctggcgcgggcga

SEQ ID NO: 179961 - DNA, 96 bp, Homo sapiens
gtatttccaagtaacagtggagatagatttaccctttctaaactattagctgtaattttaagggattgtgtgcacactctgcattccagggacacg

SEQ ID NO: 179962 - DNA, 111 bp, Homo sapiens
ttgttggggagaagaggattggaggtgtcagtgttaaaggaacctctacaacgaaggtgaagccacggaagataaggtgctccatacttgcttgcagtgcctacgtggctc

SEQ ID NO: 179963 - DNA, 88 bp, Homo sapiens
gagaccctgcctgcctgaggaggcctcggttggatgcgaaggagctgcagcatccagatccagcggaggccctgcagctcccaatgga

SEQ ID NO: 179964 - DNA, 100 bp, Homo sapiens
attaaaaccaataaaaacaatcctgggaagactaagactttagatccaaaggctgtctttcagagaacaaagacatttgaagacagtgatttgttccatt

SEQ ID NO: 179965 - DNA, 82 bp, Homo sapiens
cgtgccgttacggccatcacggcggccgcagtggcgtcctggagccctcctcaggggaggtcatcaaggcttgggacattgc

SEQ ID NO: 179966 - DNA, 100 bp, Homo sapiens
tgagagaatgggggcaggagctctagccatctgtgcggtggagtacaacatcttcgagggtatggagtgccacggctccccactagtggtcatcagccag

SEQ ID NO: 179967 - DNA, 98 bp, Homo sapiens
ctgaagcaccagccgggaggcgggaagaaaatccattcctcgctgccgaagaattaacaggatgctctccaatgaatccctccatcctcctgccttca

SEQ ID NO: 179968 - DNA, 79 bp, Homo sapiens
tcaatcacacgtaccacctggatgttgtggtggatgaggatcgcagtacggaacctgaccgattgcaggtgtttcacaa

SEQ ID NO: 179969 - DNA, 75 bp, Homo sapiens
acacctccaccctacaagtactgaaaaggcacaggaagctgattaaaagaagctcctaaaccagaggtgcagaca

SEQ ID NO: 179970 - DNA, 82 bp, Homo sapiens
gccaggccgactacctcaacctggtgcagtgcgagacgctagagggaattgaatgatctggcacgggaccctccagcacagt

SEQ ID NO: 179971 - DNA, 80 bp, Homo sapiens
cgcggacctagacctggaatcgcccaagtccctctactcgcgagggagtgcatccgccccaacccttttccccctcgtct

SEQ ID NO: 179972 - DNA, 75 bp, Homo sapiens
cctcatcctggtcactagcggactcttcttcgccttcgagcctactctgtgtatgatgaagacattgggtactgt

SEQ ID NO: 179973 - DNA, 82 bp, Homo sapiens
gtccgcgggggaggcggcggcgccaagcaagtgctctacgtgcctgtcaagaccacgtcgcccatgtttgatggaaaagtcc

SEQ ID NO: 179974 - DNA, 74 bp, Homo sapiens
caacacccccagcggccgccggctcccccacgaggttttaaaatcaaagatgggaaaatcggagaaaattgccc

SEQ ID NO: 179975 - DNA, 74 bp, Homo sapiens
catgcctctaacactcatcttcaaaagactgagatggacagagacgtatgtgcgttggtctcctaagggcacct

SEQ ID NO: 179976 - DNA, 105 bp, Homo sapiens
cgcgtgtcctcggagcgcggtccctgtattggtctcctgctcctagaggattttttatcaagcagaaatgcatcgaacaacgagaatcaagatcactgagctaaa

SEQ ID NO: 179977 - DNA, 83 bp, Homo sapiens
gaatccagaaccccatctcgctggaggactacaaatccctccaggatatcattgccatcctgggtatggatgaactttctgag

SEQ ID NO: 179978 - DNA, 82 bp, Homo sapiens
agaagggagaaactcttcctacagaggccagatttgattccaactgtatcacaccaggtttgtggtggtgtgtggtgatggg

SEQ ID NO: 179979 - DNA, 75 bp, Homo sapiens
gctgtggggttgacccagaacaaagcattgccagaaaacgttaagctctaatggtaccaagtgacaggttggctt

SEQ ID NO: 179980 - DNA, 75 bp, Homo sapiens
ccttagtcgtttatttcttccgagttagaaatcctacaaaggaccttgttgttcttgcagaacatgccagcagaa

SEQ ID NO: 179981 - DNA, 75 bp, Homo sapiens
actacagccagtactacaggacaattgaggagctgcagaacaagctggattatcaccgaggcctcttggtggacc

SEQ ID NO: 179982 - DNA, 101 bp, Homo sapiens
gccgctgccgccgctgccaccatccgcgaggcaggagagaggaggaggagtgcggcgcggcggccccgggaccaaggaggacaggctgcgggaggagctgc

SEQ ID NO: 179983 - DNA, 71 bp, Homo sapiens
tggtgtttgatgaggagggccaggatgccaagcagcccctggaagagatcatcacctactacccagccatg

SEQ ID NO: 179984 - DNA, 96 bp, Homo sapiens
tcacactgaagagcaaccctgaaaaattactgaatgtgaagaaatcggttcaagctctacgttcgtgacatcaaacctcctgttgggccatttccg

SEQ ID NO: 179985 - DNA, 75 bp, Homo sapiens
agatgcacacagtctgttttggcaggccgccgactcgaagcgtgagcagttccggaggtacttggagaagtcggg

SEQ ID NO: 179986 - DNA, 50 bp, Homo sapiens
ccgccccggactttgaccgcgtacaggtttgcagattccgccagcagcac

SEQ ID NO: 179987 - DNA, 85 bp, Homo sapiens
cgcgacccttggcgcctgcccctgcaacgggagtaagactttgaccccgacgcaggcttcagtgattgccgcggatcagaagcct

SEQ ID NO: 179988 - DNA, 101 bp, Homo sapiens
cgaagggatactggttcgtccttactgcggaaagcttgtcctggtataaagatgatgaggtggatgaagacctgatcattgaagttcaccagttatttttc

SEQ ID NO: 179989 - DNA, 82 bp, Homo sapiens
agctctgtggaggagcagcagtagtcggagggtgcaggtttggtgcacctcgatttggaggaagtagggcagggcccttatc

SEQ ID NO: 179990 - DNA, 82 bp, Homo sapiens
cgaatacgtgagcccggagcagctggctggctttgataagtacaaggggtacacatctttctggaatgactgcatatcatca

SEQ ID NO: 179991 - DNA, 82 bp, Homo sapiens
tggtgttgtcgtggccggagcggcccgcgcctgggctgccggcacttcgcggcaggtcatcatcagatttgaaatatttaaa

SEQ ID NO: 179992 - DNA, 90 bp, Homo sapiens
gtagccaatgcaattgtgggtgtatggcaggaaccgggaagagcagaatttggtggcttatcctcatgatggaaaaatctttttctgcac

SEQ ID NO: 179993 - DNA, 100 bp, Homo sapiens
cgacaagtccgggagctgggcggccatttaccagctcagagtcaagatctccactgaagttggcatcacaaatgttgatctttccaccgtggataaggat

SEQ ID NO: 179994 - DNA, 87 bp, Homo sapiens
ccccggctgaggcagcgcggccgcagcagcccttttgtgaagtgtggatatgcaggctctaactttccagaacacatcttcccagct

SEQ ID NO: 179995 - DNA, 83 bp, Homo sapiens
ctcagacttccagccttcagaactggaagtcgagataacatgagtattgtactagtttgcttttcaaatgctcccaaggtctc

SEQ ID NO: 179996 - DNA, 100 bp, Homo sapiens
accaggcctggctcgcgcctctcccaggacccgcctggctgcgagatatgtgctggagaatctggtaaaagcaccattgtgaagcagatgaggatcctgc

SEQ ID NO: 179997 - DNA, 50 bp, Homo sapiens
ccgcatcccattttttatgtccacagggtgataaaagaaaatgtggctga

SEQ ID NO: 179998 - DNA, 83 bp, Homo sapiens
ctcagcccacatgcccgctcacctgcgctgtgatgcctgcagagctgtggcttaccagatctgcggaaccagccctacatccg

SEQ ID NO: 179999 - DNA, 100 bp, Homo sapiens
tttgatcagtgatccttcacgttggcactactgggttggggtctccacgaccgagctggtctcatcaagtggcgtccaacaaggggctcaaacccgggtt

SEQ ID NO: 180000 - DNA, 99 bp, Homo sapiens
tgcactacacctgttttgaccaacggaaaagagcaaatgcagcatttttgataggtgcctatgcaggttgaagctttgagagaagcagcaactgctgtt

SEQ ID NO: 180001 - DNA, 76 bp, Homo sapiens
ctgcatcctcctggccatgttcctcgtccactacgggcatcgaaatttaaaagcctgttgattcaagaactttcta

SEQ ID NO: 180002 - DNA, 108 bp, Homo sapiens
caaagttgaagaagtcttgaatgactggaaactgattggaaactctttgggaaagccactcgaaaagaaatcatgcccaagttcaaacaacgaagacgaaagctaaaa

SEQ ID NO: 180003 - DNA, 78 bp, Homo sapiens
tcattgtcttttccgcccgcttcgatcgcctcgcgccggctgctctttccgggagcatcagatccatgctgctgctga

SEQ ID NO: 180004 - DNA, 51 bp, Homo sapiens
cggctcgtcgccgttcgccacccaagggggtcctgatgacaacttaattga

SEQ ID NO: 180005 - DNA, 50 bp, Homo sapiens
tgagtcgcatcttcaacccccatctgagtctcgctctcagtcaaaatctc

SEQ ID NO: 180006 - DNA, 97 bp, Homo sapiens
agggaagccatttttctgcaatggaattaaatggccaagatctcaaagatttcatgagacaagctggggaagtaacgtttgcggatgcacaccgacc

SEQ ID NO: 180007 - DNA, 100 bp, Homo sapiens
ctctggcagcagcggaccggctccagaaaatattccccggtgtgtatgccaccacgggctgttccctgaccctgcaccatacggagaaaccagaacatga

SEQ ID NO: 180008 - DNA, 82 bp, Homo sapiens
ggatcctgatgatatttggcagctgtcctccagtcttaaaagggagctgctcacagaccaccgggtccccggccttctgctc

SEQ ID NO: 180009 - DNA, 100 bp, Homo sapiens
ccagaactacctgtaaattatgtgaaacctccaaatgtggatggcgttcaggaagtggcttatattcactcaaaccagaatgtaattggatcgagcaaag

SEQ ID NO: 180010 - DNA, 100 bp, Homo sapiens
gctctgagctgcgcctggacctggttctgccttctggacaatctttccggacaccagccataccctttgcttcctatggcctccaccacactagcctcct

SEQ ID NO: 180011 - DNA, 82 bp, Homo sapiens
cagggcctgcagcgggagctggacggcgagcgcgagcggcgcgagaaagtatgacctggacgcgtgtgacattcaagaaaaa

SEQ ID NO: 180012 - DNA, 90 bp, Homo sapiens
ggcaagtcggcgctcaccatccagttcatccagcccacagcccccatcccgtagcccttcctggatctggagagagcagctgctgctgcc

SEQ ID NO: 180013 - DNA, 101 bp, Homo sapiens
aggcgctgggagccgcaccacctaacgctggccgacaacagcctggcgtccgccacgcctcctgacagtgggcctccaccattgccaacatcctccctccc

SEQ ID NO: 180014 - DNA, 75 bp, Homo sapiens
cccagatatagccgttggtacaaaggaaagcggagggaaaggccacttccaccactgagctgccccccgagtacc

SEQ ID NO: 180015 - DNA, 100 bp, Homo sapiens
atttgtgaaagtcagtttctgaggaatttcatcagattagtgatgatgaaccaggttatgaccttgatttattttgcatacctaatcattatgctgagga

SEQ ID NO: 180016 - DNA, 50 bp, Homo sapiens
ctaaatggctccctgattcatgaggaaaggccatgtgaggacacagtgag

SEQ ID NO: 180017 - DNA, 74 bp, Homo sapiens
ttctgctcaactgcttgttgaggctcgagttcagcctaatccatcaaaacatgatgctcacaactgtattcctg

SEQ ID NO: 180018 - DNA, 83 bp, Homo sapiens
ggggagggaagaagccggagccgccgcaagccacacgacaatgcagatcttcgtgaagactctgactggtaagaccatcaccc

SEQ ID NO: 180019 - DNA, 124 bp, Homo sapiens
ctgtcgctggagcacaaaagagtctccgcggtggaggtctgcgttgctcttgcttttcctcgctggggtgtacggtgggaagtctgaagctcagagagcctgggccaatggtacaggtcacaca

SEQ ID NO: 180020 - DNA, 100 bp, Homo sapiens
aggagctggagcagctcaaagagcaacatctgaatgaattgatgacgaagaagtggctattagggtcaaacgctgtagacattatctgtgtcaccgtgga

SEQ ID NO: 180021 - DNA, 76 bp, Homo sapiens
gacaaagagaggctgtttgagcctctgagccaggaatggttttagggaagactgttgccggatgacaaggctgtca

SEQ ID NO: 180022 - DNA, 100 bp, Homo sapiens
tctcagacatgaatactgtgacactgaccaccaggccaacttaacatcagcagatatcctgtctcagatgaagagtgagaaagatcagtctaaagaaaag

SEQ ID NO: 180023 - DNA, 130 bp, Homo sapiens
tcacattggagtcacaatcaaagaactggatctttatctggcttactttgtccacactccggtagctgcagctgaggacagccaccctttcttcgtctctgctgagcgaaggctacacggcccttcctcc

SEQ ID NO: 180024 - DNA, 100 bp, Homo sapiens
gactttatacagggatgtgatgttggagaactacaggaacctggtctccctgggtgtcatggagaaactccagctgggcccagagattctgcagcgggaa

SEQ ID NO: 180025 - DNA, 100 bp, Homo sapiens
agaagatagccaaccaatgtgctattcaaactgccctgatgggcagtcaacagctaaaaccttcctcaccgtgtactgtcctggatgaagccctcctcag

SEQ ID NO: 180026 - DNA, 135 bp, Homo sapiens
ttgggcgccgctgtgacctctgtgcccctggctactatggctttggccccacaggctgtcaagtgctacagcctgctgtcgaggccttctttctggtccatgccacagagcgggagagcaagcctcctgtccgag

SEQ ID NO: 180027 - DNA, 96 bp, Homo sapiens
tgggactgaagttcttggagaagggagtccaactcttcaaggtgggctatgccatccgctttgaagactgcacttcagagaacaccttgatcaaat

SEQ ID NO: 180028 - DNA, 75 bp, Homo sapiens
gcagtcctgtgtcctccgacagtgcttggcacttctcagatgaccaagatggtgctgcagatggtgctgaggatg

SEQ ID NO: 180029 - DNA, 50 bp, Homo sapiens
gttcgctgcgcgtgcacattccgtgaagtgactcagccacttaagaatgt

SEQ ID NO: 180030 - DNA, 90 bp, Homo sapiens
aaaagattgtaaaggtttgggattcagcattttggattaccaggaatgtatcctgtcaggtataatgtcagtgaatggcaagaaagttct

SEQ ID NO: 180031 - DNA, 100 bp, Homo sapiens
tggaggcctcgctgaggaacgacgccgaggaagttggaaaatggatataccttatttgattatgatgttggactgaatgatataattcagctgctagttc

SEQ ID NO: 180032 - DNA, 100 bp, Homo sapiens
tgcaacagtacgttttgctggtgttgtccctcccgtggcagaatcaaaggcatgggaggttgatacctgccggggccattacaacaatgtatcttgtgcc

SEQ ID NO: 180033 - DNA, 74 bp, Homo sapiens
tggtctttctcaacctcatcttctggatgatgtgatgccagccacttactgtgaaattgatttagataaagaaa

SEQ ID NO: 180034 - DNA, 98 bp, Homo sapiens
ccgaaggggcgtctgcggctctccgccgtccccagccctgcctctccctgggctctgggcattgtctaaatataggagcagatctgcagatggggcca

SEQ ID NO: 180035 - DNA, 103 bp, Homo sapiens
gttttctactgtaaagtcaccaacgagatcttccgccactacgagtgctggagaatctggtaaaagcaccattgtgaagcagatgaggatcctgcatgttaat

SEQ ID NO: 180036 - DNA, 100 bp, Homo sapiens
cctctggttctacttcacactgcagaactgggttctggactttgggcgtcccattgccatgcatcagacaacagtcagcgctttcgagaaacctgttttg

SEQ ID NO: 180037 - DNA, 82 bp, Homo sapiens
ttagtgcttggattggtgggatgtttcggaatgggcattgtcgccaattttcagacggcctttcttagcatcttgatgagat

SEQ ID NO: 180038 - DNA, 98 bp, Homo sapiens
agctgcgacggggagcggcggagaccgcctctgctcccgcctgggaatactctggagcagtgcaatgtgtgttccaagcccatcatggagcggattct

SEQ ID NO: 180039 - DNA, 75 bp, Homo sapiens
ttgccagaacttggaatactctactggacaaacatttcctccaaggctgcaagaaagcgtaagattgccattcga

SEQ ID NO: 180040 - DNA, 51 bp, Homo sapiens
ttgtggcgaatggggctcacgtcgaacccgaccgcatgtctgtcatggacc

SEQ ID NO: 180041 - DNA, 82 bp, Homo sapiens
tcttggccctggctgatttgtcatcctatggatgattcaattagatgccatggacaatattaccaggcagaaccaattctac

SEQ ID NO: 180042 - DNA, 74 bp, Homo sapiens
tggggatggtatgctggatatacaggatcatcaaaattttttgagactcctcacagaaactgaagactggctgt

SEQ ID NO: 180043 - DNA, 50 bp, Homo sapiens
gtttctgcgacttgtgttgggactggtggacccccaaaagtacaagggca

SEQ ID NO: 180044 - DNA, 98 bp, Homo sapiens
ggattatgaaaaaacctttaaaaagtaccaggggcttgtggtaaaacaggaacagctattacgaggcttcccagctggcgtgtatgttgtaaagagag

SEQ ID NO: 180045 - DNA, 82 bp, Homo sapiens
acaccctcaacaaacaccagcgctttggatcgcaccccctccctccctggcggagcccctgaaggagctgttcaggcagcag

SEQ ID NO: 180046 - DNA, 100 bp, Homo sapiens
agcttcattgttttcagctaacagtaaccccagactgagaactatgagcagagaatacgtgaacaacaggaacagctgtcacttcaacagactattattg

SEQ ID NO: 180047 - DNA, 90 bp, Homo sapiens
gttctactccttctacaggtgtgtatgagagcacgttttcaatatcataggagcatttgatattccacgctttgtgtacaattcagaaag

SEQ ID NO: 180048 - DNA, 75 bp, Homo sapiens
ctgcacatccacactccgctgctcgacagtttctttccgcagtgtgacgtggtgaatttcggctcctggttcatt

SEQ ID NO: 180049 - DNA, 102 bp, Homo sapiens
ggcggcggcggcaacatggcagagaccgcggccggagtgggccgcttcaagaccaaatgacacctttgaggccctgtgcatcgagccgttttccagcccgcc

SEQ ID NO: 180050 - DNA, 100 bp, Homo sapiens
ttagtattcttgaaggagagcttgaagcaagggaccttgttatagaagccttaaagctgcaagctttcttcctggtggcagatgacatcatggattcatc

SEQ ID NO: 180051 - DNA, 87 bp, Homo sapiens
gagccggatagacctattggatatggagcctttggtgttgtctgaaatcgagctatagcagattatcttcgttcaaatggctatgaa

SEQ ID NO: 180052 - DNA, 75 bp, Homo sapiens
gcagtgccaagacttggttaaagtcattgaggactttccagcaaagctcaagagcaagatgacgttctcatagtt

SEQ ID NO: 180053 - DNA, 75 bp, Homo sapiens
tgtgaaggcgaagcgcgggagaccaaagcctgcaagaaagacgcctgccccagacacagcattgttggttttgcc

SEQ ID NO: 180054 - DNA, 100 bp, Homo sapiens
cccgcgtagacgcagtggcctccaaggtgcagacagctgtgactatgaagggggcccttcctcaccagactctgtcctgagacctcggcggtacccccag

SEQ ID NO: 180055 - DNA, 100 bp, Homo sapiens
gagcaagtctgtcagcaccatctttctaacagaaacttttgagaagaactttgaaagagaaacccataaaataagtgagcaaaatgatgctgataatgct

SEQ ID NO: 180056 - DNA, 50 bp, Homo sapiens
cccaaatccaagcgcgacaagaaaggggagctctttgctcaggccccggt

SEQ ID NO: 180057 - DNA, 82 bp, Homo sapiens
ctccatcacccaccaacaacaccacaataatccacagccaaggtaccgttttgcagagattcgctaccatcgccctgaggag

SEQ ID NO: 180058 - DNA, 87 bp, Homo sapiens
ccaatcagcatgctgtgtctagctcaaggtgcgggagatgttaaagatgagggactccaatggggcccgcatgttgaccttgataac

SEQ ID NO: 180059 - DNA, 82 bp, Homo sapiens
atatgtcatgtatcccatagctgtgagtggcgatcacgagaacaataagggaactctaatgatccaggacaaagaagttacc

SEQ ID NO: 180060 - DNA, 100 bp, Homo sapiens
cggacgatgaggctcccaggctcagccagaatggagaccggcaggcctctgcttctgagagctgtgggaatcactttaaccctgatggagcatctcatgg

SEQ ID NO: 180061 - DNA, 51 bp, Homo sapiens
tcgacgatctccatatttcattgcaagaagtggtgaaaatacagcatcagt

SEQ ID NO: 180062 - DNA, 90 bp, Homo sapiens
gccatcctgctctgcatcatcatcctgcttaccaaatgatttctcagtatcactaaaagcacaagggaaaaacaagcattttaaagtcca

SEQ ID NO: 180063 - DNA, 100 bp, Homo sapiens
cctcccctagcttcactcaatgttagtaagaccttcacggcatggtgcaactcccacctgcggaaggcaggcacacagatcgagaacattgatgaggact

SEQ ID NO: 180064 - DNA, 75 bp, Homo sapiens
ccggctcctggaacggagccctctgccggctgctcctgctgaccctcgcggttgcagagaacacatcttagaaga

SEQ ID NO: 180065 - DNA, 98 bp, Homo sapiens
agcatcccagtttttggtcttctgtcaaaaacacagggatgagtatctggcaccaattctgacccagtcatttgtgatccctggctcttgtgatatgc

SEQ ID NO: 180066 - DNA, 97 bp, Homo sapiens
gggaaaagtggcactgaggctctggaacttctgcccagctctccttgtttcgcaagagggaagtcctgaaagaaatagatgtgaactatgttccttc

SEQ ID NO: 180067 - DNA, 75 bp, Homo sapiens
actacaaccagagcgaggccgcaagccacccgaggggactgcctggccttccagatgcgagctgggttgcttccc

SEQ ID NO: 180068 - DNA, 99 bp, Homo sapiens
gcctgggactgcaccgcaccgagggcgagctccagcttcagtatcagacacagcacagcagccatctgaagagcaaagcaagtctcttgaaaaaccgaa

SEQ ID NO: 180069 - DNA, 82 bp, Homo sapiens
tgcagtacctgcagaaggtctctggagacatcttcagcaggaaaaggagaaggcccagttggcagcagaagctctaaagcag

SEQ ID NO: 180070 - DNA, 100 bp, Homo sapiens
ctgttctggggacagtttggtattaaaagtggatattccatctattataaccaagaaactattaaaagcagcaatgaagcatatagaagtgatagttaaa

SEQ ID NO: 180071 - DNA, 101 bp, Homo sapiens
ccaggtgcttggcaaaatcgagcgggccattgattctgatagttggtggtggtgttgctgggcttgcttctgcaggcgcagcaaagtcgatgggtgcaatt

SEQ ID NO: 180072 - DNA, 82 bp, Homo sapiens
atcggaatgtgatcacagagcctatttacccagaagtagtccatatgtctctagtgatccctgaaaagttccagcatatttt

SEQ ID NO: 180073 - DNA, 100 bp, Homo sapiens
aacgtcaaacactccaacgattgagagcatttaaagatccaactcgtctaaatgttattaggaatgacaatgacagttgggactacactaaaccatattt

SEQ ID NO: 180074 - DNA, 100 bp, Homo sapiens
cccagttcgtgcagatggtggcggagctggcgactagaccccaaaacatcgagacgctgcagaacgcggagtgcagtgaatagaagacacttctctgcac

SEQ ID NO: 180075 - DNA, 100 bp, Homo sapiens
gcgagtggagctctgaagaagctctgagcggagttgtgttcttccccagctgcaggtggagctggagcaagaataccaagacaaattcaaaagactgccc

SEQ ID NO: 180076 - DNA, 80 bp, Homo sapiens
tccagcctgcggagcctgtggggcagaataataataacctggatgcctgctgtgctgttctctctcaggagagtacaaga

SEQ ID NO: 180077 - DNA, 100 bp, Homo sapiens
accgtggtagccgagggcggaggcgacactctcaggaactgtggaaggtgcatcagtgaagaaatggaccaatgtgtataatcatggaatctccttgcta

SEQ ID NO: 180078 - DNA, 80 bp, Homo sapiens
ggcagacggattcatttagagctgcggaacaggacgccctctgatggcagctggtggaatttttgaagaaaatggaatct

SEQ ID NO: 180079 - DNA, 98 bp, Homo sapiens
gatggtgttgtgagagatttctgcagtgaagattgctgtaaaaaatttcaggattggtactacaaggccgttaattaaggaaaagttgagccagggcg

SEQ ID NO: 180080 - DNA, 49 bp, Homo sapiens
ctcgcttgcagttcagcgaccacgttcctccgtgtcacaaagcagtacc

SEQ ID NO: 180081 - DNA, 75 bp, Homo sapiens
ctgcacacagccacgatttgcaaagatgaacgactttcgaagtaaaatgcaatcaatatttccaacaattcccaa

SEQ ID NO: 180082 - DNA, 100 bp, Homo sapiens
agaggtctgcctggttctgggaaaacaacattgtctcgtcatctcaactcgaactccacctccaccttcaccgttgccatttccaacacaagctatcctt

SEQ ID NO: 180083 - DNA, 98 bp, Homo sapiens
acgtgggcacggaccaattcgggaacaaatactactacatcccgcagtacaagaactggagaggtgcgggagatgttaaagatgagggactccaatgg

SEQ ID NO: 180084 - DNA, 50 bp, Homo sapiens
gaaactcgtacctgcggctaagagcagggttgagaatgcttgcaccaagc

SEQ ID NO: 180085 - DNA, 50 bp, Homo sapiens
tcacaccccttccagctacatcgaaacacttaattcagtgcacaaatgag

SEQ ID NO: 180086 - DNA, 100 bp, Homo sapiens
gcgtctggccaagaatcagaggaagtgggaagatgcaatcacacccaatgataagacccttttccctgatgttgattggttaatcggtaaccattctgat

SEQ ID NO: 180087 - DNA, 101 bp, Homo sapiens
gtggattttcctgttccattttgtgcctcctggacacctcaggtgatggcttggacaacagtgtagcttcccccagcacaggtgacgatgatgaccctgat

SEQ ID NO: 180088 - DNA, 75 bp, Homo sapiens
ggctggttccggctgcagcccgaccagtccaagagccggcggcatgacgagaccctgctgcaggaagactatggg

SEQ ID NO: 180089 - DNA, 89 bp, Homo sapiens
cgcgctgcctggtcgctggtgaagcccgcggcgcgcgcctctcccggaccctgcaggtattatcagaaaatccacccagcttcaccatt

SEQ ID NO: 180090 - DNA, 100 bp, Homo sapiens
ggacctcctggcactgggaaaaccacgactgtggttgagatcattcttcaagctgtgaaacaaggcttaaaggaagcaatgaggctccccaagaacacac

SEQ ID NO: 180091 - DNA, 88 bp, Homo sapiens
agagagcgagctgagtggttgtgtggtcgcgtctcggaaaccggtagcgcttgcagcatggcgcaagcggcggaatttcagcaagcag

SEQ ID NO: 180092 - DNA, 97 bp, Homo sapiens
aacaggacgattagatgagcttgagaaagccatcaccactcaaaactgtaatactaaatgtgttaccataccaagtactaaggctcgtacgtctgca

SEQ ID NO: 180093 - DNA, 97 bp, Homo sapiens
tggaaaggctctcagtgaaaaaggccttcccttcttcttggtggtgttcttgagtaagataatctggactggcccccgtctttgcttccctgcctgc

SEQ ID NO: 180094 - DNA, 82 bp, Homo sapiens
cgctgttccacctcattcaacttcagggagaagtggtgccacatgacccaggaggagcgcgacgacagcctccggttcaacg

SEQ ID NO: 180095 - DNA, 83 bp, Homo sapiens
gcagtggaccacagtcatcgagaggaccttccacgtggattctccagacgagagagccaaatctcctcagccacctgttgaag

SEQ ID NO: 180096 - DNA, 98 bp, Homo sapiens
cccggcccacagtgggggtgtgcaaacccgagagaactgggcgtattttggggtcaaagcagagtgaacaccgtccctcattacctcgatttattagc

SEQ ID NO: 180097 - DNA, 83 bp, Homo sapiens
catcctcagccgaagatctcacttcctcccagaggcctttgctgactgacccctcagtttgggatatgagattgaaaatgacg

SEQ ID NO: 180098 - DNA, 75 bp, Homo sapiens
ccagttttctaatggattattgttatcgggcaggttttctctgaaggttatcaatactctggctgaccatcatca

SEQ ID NO: 180099 - DNA, 75 bp, Homo sapiens
aaaaacatgtcggatgaagagaaacagagctctgaggaacatgaatacagtgatgaagctcctcaggaagatgag

SEQ ID NO: 180100 - DNA, 90 bp, Homo sapiens
agaaggtggaggaagacttaaaggcagacgaaccatcaagtgaggaaagtgatctaggccctcgggaccaaggatcacgtcatgactccg

SEQ ID NO: 180101 - DNA, 75 bp, Homo sapiens
gcggtagcaccagcactagcagcatgttgagccgggcagtgtgcggatgtgaacgattggaagaacagctaaatg

SEQ ID NO: 180102 - DNA, 90 bp, Homo sapiens
cccaaccagaggacctggagtttcaggaaggggatataatcctggtgttatcaaagggcacttgctgctggaggagtagggtccattgtt

SEQ ID NO: 180103 - DNA, 75 bp, Homo sapiens
cgcgcccgcggagaggccgggagaggaggttcagatgagcccctgctgacttgagagagacagagagaccacgcc

SEQ ID NO: 180104 - DNA, 80 bp, Homo sapiens
gtcatactgcatcagaaccatgaagaagataacttcactcttctctgcaacgaatcccaaaagtatataattgagctgac

SEQ ID NO: 180105 - DNA, 100 bp, Homo sapiens
acatgcaggacttggaggtggagcaggccctgactccagcacgtagaaaatctaattgtgtgaaagaagtagaaaaactgcaagaaaaacgagagaaaag

SEQ ID NO: 180106 - DNA, 51 bp, Homo sapiens
ctgggacactgctggtcaggaacggtatgcttcagaagatgcagagcttct

SEQ ID NO: 180107 - DNA, 100 bp, Homo sapiens
aaatcgaagtagagagcgaaaccatcttcaagttagcagcgtttattttacagtggctgacaagattttgaaaaagaaagaataccctctttatataaat

SEQ ID NO: 180108 - DNA, 74 bp, Homo sapiens
aaacttcaccaagacctaaaaaaccccaacaacagctcccttaggtttctgggtgtctctggggagcccctggg

SEQ ID NO: 180109 - DNA, 88 bp, Homo sapiens
acctccaggccctgaacgcggactggcacgcagactgcttcaggcgaccatggccttgctgggtaagcgctgtgacgtccccaccaac

SEQ ID NO: 180110 - DNA, 74 bp, Homo sapiens
caccagcgtgcccgggagtacatctacatgcattttggggagatggagtttgacgagaaggacttacgacggga

SEQ ID NO: 180111 - DNA, 75 bp, Homo sapiens
ggtagcaggaacatggggggaccatatggtggagggctgaaagaatcaggattcctgaaccttggatcacacctc

SEQ ID NO: 180112 - DNA, 85 bp, Homo sapiens
tcgctacacagcaatgcatcgagcactttcagaccatgctgaagtctaaattgaatgtcttaacactgaaaaaggaacctctccc

SEQ ID NO: 180113 - DNA, 121 bp, Homo sapiens
agtttgtcttttcttacctgagactgggcctgaagggagagtttcagttcttcattgacggaactttatattgctgttggaatatctggagccatccaacatttagctgggatgaaagaca

SEQ ID NO: 180114 - DNA, 87 bp, Homo sapiens
tcggcctgccatgtggaaaatgatgcttaatatcgatgacgtgaacgatcaagagagagggaccatagtagatcacgagaaaagagt

SEQ ID NO: 180115 - DNA, 100 bp, Homo sapiens
agaagacctgacaaaggacatggacgagccctcaccagtccccaatgtagaagaggtgacacttcccaaaacagctctttcaccatgcctggatcacttc

SEQ ID NO: 180116 - DNA, 75 bp, Homo sapiens
tgaacacgtggaagatgaaggagaatccaggggcaagattcttgccaagagaattaatgtgcgtattgagcacat

SEQ ID NO: 180117 - DNA, 100 bp, Homo sapiens
agaaggagcgcattggccagttcgtctttgcccgggacgctaaggcagccatggaattatccagactgccttgccactagatgaatggaagacaatgatt

SEQ ID NO: 180118 - DNA, 74 bp, Homo sapiens
ttgaagagatcgactacaaggagatcgaggtggaagagtcaggtagcattggtgctgcagatagtcctgagaac

SEQ ID NO: 180119 - DNA, 90 bp, Homo sapiens
tggaggtggaggttggaggtggtgctgctggggaacgggagctggatgaggcatgtaatgaatttactacacatgtgatgaaccttctcc

SEQ ID NO: 180120 - DNA, 101 bp, Homo sapiens
ggagctaagtccccagattggaggaggctggctctggtcttcgatgcacaggagtggccgttatggaacgcaggaggaggaagccaagaatctggtgagcg

SEQ ID NO: 180121 - DNA, 126 bp, Homo sapiens
accggcagggcttctcctatgactacgtctttgactggaacatgctgaaattcgtcttctcgtgggcaccctggacgtggtgctggactccagtgcccgcgtggccccttaccgcatcctgcacca

SEQ ID NO: 180122 - DNA, 109 bp, Homo sapiens
ctgagggtggcggcggtcgacatgttccaggtcccggatagcgagggcggccgcgccggctccaggcctacagattcctggaggagatgcggcggcggcttcccttggc

SEQ ID NO: 180123 - DNA, 98 bp, Homo sapiens
cggttgccaggccaaggagtggactagggtcgccggggaagcggggaatgcagcctcatctccaggctttgttgtcactgtataagttctttgctcct

SEQ ID NO: 180124 - DNA, 50 bp, Homo sapiens
ccgggagactggagtcgaaggccgtgaggcagcaatggatttttgcatga

SEQ ID NO: 180125 - DNA, 80 bp, Homo sapiens
tgcgggcgcccagagccgcgccgtccgcgccgcccgttctgccctggcctcccacgactacatcctgaagattgtgccca

SEQ ID NO: 180126 - DNA, 80 bp, Homo sapiens
gaaatcgggctgaagcgactgagtccgcgatggagagcctcattttacagatgaggaaactgaggctggctgcgtgctca

SEQ ID NO: 180127 - DNA, 73 bp, Homo sapiens
ttgcaaggatattcctcatgtatcatgcaaggatattcctcatatatcatgctccaccaaagcctgtacccaa

SEQ ID NO: 180128 - DNA, 100 bp, Homo sapiens
acgacagaaaaacatacaagactccttcagccaacatgatggtactgaaagtagaggaactgcatttggccctggttgatttctcttctgaatagtttcc

SEQ ID NO: 180129 - DNA, 100 bp, Homo sapiens
tgatatctcaaaaggtgatctggacaaaggaacaggtatctcaggtattatacctgaagaaccttagccctcgggtgactgaaagagatcttgtgtcatt

SEQ ID NO: 180130 - DNA, 73 bp, Homo sapiens
tccccggcccacagtgggggtgtgcaaacccgagagaactggggtttttaatgaccacaacaagcaagcatgc

SEQ ID NO: 180131 - DNA, 82 bp, Homo sapiens
gcctgtgggcacagacaaggagctcagtgacctcctggacttcagcatggtacctgccgtgggcagatctgagctttcttct

SEQ ID NO: 180132 - DNA, 101 bp, Homo sapiens
tgggaaattattttgggtcttcttcttaatcccatatctggacatctggaacatccatgacaccccaaagtcttgtactaagtcttctaaaagctccactc

SEQ ID NO: 180133 - DNA, 100 bp, Homo sapiens
accctgctcagaggatcttatacagggacgtgatgttggagaactactggaaccttgtttctctgggatcgaagtgagaacgaagtggagaaggtgaaga

SEQ ID NO: 180134 - DNA, 75 bp, Homo sapiens
cgggtctgtcatcatgtcgcgttacgggcggtacggaggaggctgccctgaggatctgtgtttggtgaaaaggag

SEQ ID NO: 180135 - DNA, 100 bp, Homo sapiens
aaagtggtggcgctggccagactgacacccataccttttgggcttcagaatgcagtgttttcgattatcgacatgatggtcgagatcttcaaagctcaac

SEQ ID NO: 180136 - DNA, 75 bp, Homo sapiens
gcggagaggaggctggaagaggaagatgcctagcacagaccttctgatgttggaagctgccacttttgctagaga

SEQ ID NO: 180137 - DNA, 75 bp, Homo sapiens
cttcagggtttaggagaagcactgttgttttccacacaggtccggaccctatttgtcagtggccttcctctggat

SEQ ID NO: 180138 - DNA, 98 bp, Homo sapiens
agatcctttcctgcttttggtttccctggcaggggttgaactgtggagtgtgtgggccaagaataaggagacgggtgctttggctgcggccaaagtca

SEQ ID NO: 180139 - DNA, 50 bp, Homo sapiens
gggtcatctcttctattgtacctgcagtgcctccggagccagcgtggtgg

SEQ ID NO: 180140 - DNA, 90 bp, Homo sapiens
gttggcctcgccgcccctgctcgggttacgaagtgacagtgctggtgcgggactcctccaggctgccatcagaggggccccggccggccc

SEQ ID NO: 180141 - DNA, 83 bp, Homo sapiens
acctctacctcctgcgaggcctcccgggctccgggaaaactacactggccagttcaaatctgaacatcaatgatgtactaggg

SEQ ID NO: 180142 - DNA, 111 bp, Homo sapiens
ctaaagagccgagcacgcgggtctgtcatcatgtcgcgttacgggcggtacggaggaggctttatcctgtggataaacgcagagtgaacgagtttggggagtcctacgagg

SEQ ID NO: 180143 - DNA, 88 bp, Homo sapiens
gctccctgcagtaccctttaacgaagacagcagtgtgggaggaaggaccaggtggggagctggttatccaacagaagcttctggtgcc

SEQ ID NO: 180144 - DNA, 100 bp, Homo sapiens
cggacaccaggaccgcgagccagacagctcccggaagccgcgccgccgccgccagacaatgcagatcttcgtgaagactctgactggtaagaccatcacc

SEQ ID NO: 180145 - DNA, 100 bp, Homo sapiens
tgaagctgggtgacctgctgctgctggcccagtccaagctgccctcgtccattgtccagatgttgctcatcctgcaggattgacttctaaggactcttgg

SEQ ID NO: 180146 - DNA, 75 bp, Homo sapiens
gcacccacgcggccctgctgaaagtggcgcaaatggaaggaaaatcacctcggcagtgtttgaaggaaggatact

SEQ ID NO: 180147 - DNA, 150 bp, Homo sapiens
tagcgggagcccggccggagctgggtctggagacgccgtggcagcctgaacggagtgtgcgacggattgggagggcatcatccgagttccagcgccttgccactatgcccacaagctggcttacctcgtggggcagtccattcaccagga

SEQ ID NO: 180148 - DNA, 100 bp, Homo sapiens
gtgaatcccctgtttgagaaaaggcctaagaattttggcattgacggtctggaaaatcccgaagcagaagcccgtattcatctaggcattcaagatctcg

SEQ ID NO: 180149 - DNA, 119 bp, Homo sapiens
ggaaggcagacttcagactgaaggacagagaaggcaactgccctacagccctgcagagatcctgaaatgattgaaaaggaagagcacaagctgctgctgaaaaagctgtgatcaaggag

SEQ ID NO: 180150 - DNA, 135 bp, Homo sapiens
gaacttcctcaactcagacttgctgcaatctgtaaagaacaaaatcttcactgcagttcttaacagatgagcaacaagcgttccaacagcttccgccaagccatcctgcagggcaaccgcaggctaagcagcaag

SEQ ID NO: 180151 - DNA, 75 bp, Homo sapiens
acaagggacactcaaactaccagaggtagtgggcagcagtcagtgacaggtgtaacctctgtggatgacagcaac

SEQ ID NO: 180152 - DNA, 100 bp, Homo sapiens
cgcgtttcccgcctgagcgcaactagcggcgggtcgtgggcacctccaggacggctgtcctcagcgaggggccgtgcacccgctcctgagcagcgccatg

SEQ ID NO: 180153 - DNA, 100 bp, Homo sapiens
ctaggatctgcaagtaaccagttctgtttgcctgttttggatagcaatgatcccaatttccagatgccttgttcaacagcttattcagctgattctgaat

SEQ ID NO: 180154 - DNA, 100 bp, Homo sapiens
cgggaagtccgtggacgacgtgctttcccattttgctcagcgactgtttgatgacgtcccgcaggtaatttcatctgtgccaaagcctccagaggacaag

SEQ ID NO: 180155 - DNA, 100 bp, Homo sapiens
ttccacctggagggcatgactacatctgtcatgcatggcggacaccgacctgttcatggaatgtgaggaggaggagttggagccatggcagaaaatcagt

SEQ ID NO: 180156 - DNA, 100 bp, Homo sapiens
cccctcgggcagtgacaccacctacttctccgtcaatgtttcagactttggcttcatgtttgaaagctcgccgggcggcaatctcggctgggaacccgac

SEQ ID NO: 180157 - DNA, 100 bp, Homo sapiens
ggatccagtacgagttgaatcattgttcaaataaggcctaagcagcgagagctggtccatcatgaagaacatggccacggagctgggcatcatcctcatc

SEQ ID NO: 180158 - DNA, 101 bp, Homo sapiens
atgtcagcacgcagaaggtttgaggagcattgcttctcatacagtaagaaaagaggcacagttagatgaagaaggacagtttcttgtcagaataatatatg

SEQ ID NO: 180159 - DNA, 126 bp, Homo sapiens
cagcgcgacgtcgtgtcgagttcccaaaaagctccgcaggggctgtagggaggtttggacatatttgactcttttccccccaggttgaattgaccaaagcaatggtgatggagaagcctagtcccc

SEQ ID NO: 180160 - DNA, 83 bp, Homo sapiens
attgggattgaggaggaagatcggaagcatacctggatggaggatgctgacagtacaatgcagatcttcgtgaagactctgac

SEQ ID NO: 180161 - DNA, 101 bp, Homo sapiens
gacgaggaatacgatgtgatcgtgctggggaccggtctcaccttggaatcgaagcctcttaaaatggcagatgacttggacttcgagacaggagatgcagg

SEQ ID NO: 180162 - DNA, 100 bp, Homo sapiens
ggccgttcaggagctgtggctgcggttgtaccagtccaacctggtgctggtctccgccatcaacgatgaaacaggcgcctatttaatcgacagagacccc

SEQ ID NO: 180163 - DNA, 74 bp, Homo sapiens
attttagggtcctttatatagaagggagagtaggccaagaggcaacagcgaaaactcaacttcttaattaccca

SEQ ID NO: 180164 - DNA, 80 bp, Homo sapiens
gcctcatcacccggctgctggaggtgtactaatggtcacttgatgtgcgctggctgttttatccacctactagcagatgc

SEQ ID NO: 180165 - DNA, 50 bp, Homo sapiens
cctgctcccacctcaggcccaggccaacctttgccctggggccccagcct

SEQ ID NO: 180166 - DNA, 80 bp, Homo sapiens
catgggactctacctggggatatacatgcatgcaccaaaacgaggacagatcctgataacttaagtgactctctcttttc

SEQ ID NO: 180167 - DNA, 100 bp, Homo sapiens
ccacagtactatcgtctatcattggatgaagtggctccggagatgacctgaaggagaagaaggagaaggtggaggagaaggcaagccggaaagagcgaaa

SEQ ID NO: 180168 - DNA, 100 bp, Homo sapiens
gactccaaaatggcgtcagttgccatcgtcagccagtggcagcaggagtccaaagagaaggtggtgtccctcctgctgtcccaccttcccctgcttcagc

SEQ ID NO: 180169 - DNA, 51 bp, Homo sapiens
cacgaggcttcacggaggaggtggggcgtgatggtgggcatgggtcagaag

SEQ ID NO: 180170 - DNA, 100 bp, Homo sapiens
agggctaccagcgccgctggttcgtgctgggcaatggtttgctctcttactacaggacctgaaggagaagaaggagaaggtggaggagaaggcaagccgg

SEQ ID NO: 180171 - DNA, 51 bp, Homo sapiens
agcgctggacggagaggaaagcggacagtcattttgtttactcattcagcc

SEQ ID NO: 180172 - DNA, 98 bp, Homo sapiens
tgattattgagcataagattgtcatagctgatgtcaagttggttgctgatttccaaaggtttccctaggacttctgcatgcccatgccacacatatcc

SEQ ID NO: 180173 - DNA, 74 bp, Homo sapiens
gacggacagcccatcgtgtgaactatagagtttgtggacagatttatattgtagccggatcgagctgggagatg

SEQ ID NO: 180174 - DNA, 90 bp, Homo sapiens
gatctgagccccaggcagaaggaggcattggccaaggccgccatggcatcagatgaaggcaaactttttgttggagggctgagttttgac

SEQ ID NO: 180175 - DNA, 100 bp, Homo sapiens
ccgtaaccacaaggaggacgagcttctcacctggggcgggtgggttctgcaccaccctcccaccctccttcctccgtgtggacgatagagccacatccag

SEQ ID NO: 180176 - DNA, 100 bp, Homo sapiens
ccggccatctcgctgcccgacgatgtccgcaggcggatcttcttcactctggaggtgccacccatgagaacaaagagctctggagagatgtggattcctg

SEQ ID NO: 180177 - DNA, 98 bp, Homo sapiens
catggccaccctgaccggggctcaggatctcaaagatttcatgagacaagctggggaagtaacgtttgcggatgcacaccgacctaaattaaatgaag

SEQ ID NO: 180178 - DNA, 120 bp, Homo sapiens
agattgcaaagagttatggatattctggtggggagatgaacccaacctagtgggtgtaatacatcatgaactgcaggtctgttcggcacttgaagtactccttgtttaagaaatcactac

SEQ ID NO: 180179 - DNA, 123 bp, Homo sapiens
aacatgaactccagtgacccagacctggctgtggtcaaacccacccggcccaactcactagccatttcctgcttttaagtcttggcaggaggactctgagtctggagaagctcagctgtctcc

SEQ ID NO: 180180 - DNA, 76 bp, Homo sapiens
ttgtagcctattggaggaaaacacaccaaggaccaagaatcgccttcagccctgtctggtgcatccttggcagaaa

SEQ ID NO: 180181 - DNA, 82 bp, Homo sapiens
ggacgtgcggggcctgggcctcccggtccgcaagcaggtgcccgtggttgacacgagctgtgtccccagctgttcccgtcta

SEQ ID NO: 180182 - DNA, 101 bp, Homo sapiens
gaatgggctgaaggaggaggacaaagagcccctcatcgagctcttcgtcaagtgacctgaaaaaaatgtctggatttctagagggcttgagatgctcagaa

SEQ ID NO: 180183 - DNA, 75 bp, Homo sapiens
gaggagacgggcagaagaagaaaagaggagagttgaaagagaacagggtgtcaaattgagaaccaggtagatccc

SEQ ID NO: 180184 - DNA, 51 bp, Homo sapiens
gcttcctgctggccgtgctgctgcaggtttgctgtaatggcacaagagtat

SEQ ID NO: 180185 - DNA, 74 bp, Homo sapiens
aacatggaagtacaggtcacccaggagatgcgcaacgtcagtatagtcccaggggcagccactggcctcccagc

SEQ ID NO: 180186 - DNA, 100 bp, Homo sapiens
gcaaacggcaggctgagctgaaggcacttagtgcccacaaccgcaccaagaagcacgacctgctgagggacagagcagaatgggctgatatagatccggt

SEQ ID NO: 180187 - DNA, 89 bp, Homo sapiens
agatgccaggacatcctggaagctgggaaaagctcatgatggagcagtccaagaagtcctccctcatggtggcccgcagtattctcaac

SEQ ID NO: 180188 - DNA, 100 bp, Homo sapiens
gccatgaagcatgtgttgaacctctacctgttagcatcgagagtaaacatgaggttacgatcctgggaggacttaatgaatttgtagtgaagttttatgg

SEQ ID NO: 180189 - DNA, 100 bp, Homo sapiens
tggtgaataaaagcattcggcagcgtcgtcgcttcactgtggctcatacatggtgcaacagctgcagcccggaaagaggtgataaggaacaagatccgag

SEQ ID NO: 180190 - DNA, 100 bp, Homo sapiens
ggtgctcttcatcaccttcgtggtcgtctggtcctactacgcgtacgtggtggagctctgcgtgtgtaccaaaggcttagaatgttctccttcaactccc

SEQ ID NO: 180191 - DNA, 98 bp, Homo sapiens
ttgatatatggtccaaatccaactatcaagtattccagaaggcctgaccttcataagaagacccagagtaaacacagcctcgctgaaatcctacgttc

SEQ ID NO: 180192 - DNA, 100 bp, Homo sapiens
tatgtgtatccatggagacaagagtcaaccagaaagagattgggtacttaatgatgcagttacacacatatgagaacactttgcttaataaagatacaag

SEQ ID NO: 180193 - DNA, 75 bp, Homo sapiens
ggacagatctgagagatactgagtctccaaaaaaagttggtgatgacattgccaaggcaacgggtgactggaagg

SEQ ID NO: 180194 - DNA, 100 bp, Homo sapiens
gcctctcgcccacactgaccccgggggagcggcagcagggttattttggagctgttggagcactccttgagctgttgaagatcccgtgatcattacctgg

SEQ ID NO: 180195 - DNA, 50 bp, Homo sapiens
gccagaagctacatgacccctaaacgaacccttaggagaaatcttgagag

SEQ ID NO: 180196 - DNA, 110 bp, Homo sapiens
gatagtagagatgttgtcatgatcataatatttggatattctgcaatatatggttatacaagcagcatacaggaataccatatcttgtgtggctgtgacctggcacaagg

SEQ ID NO: 180197 - DNA, 87 bp, Homo sapiens
aaagagccctggaatatgaagagacatgcgatggtagatcaacccccagatcgagctgggagcattagtacccttgattctttagac

SEQ ID NO: 180198 - DNA, 100 bp, Homo sapiens
agccgcccaccggtttttctgccacttttgcaagggcgaggtcagccccaaactaccggagctcgaggccatgagcagatataccagcccagtgaaccca

SEQ ID NO: 180199 - DNA, 100 bp, Homo sapiens
tcgaggaggtcatgaaggacctgagcctgacgcgggccgcgcggggctgaagaagatgcagagcagcctgaagctggtggactgtatcatcgaggtccac

SEQ ID NO: 180200 - DNA, 100 bp, Homo sapiens
tcgtcagcactgactttcagctatggaatcgtgaataaccctataccttccaatttgaaatcagaagcaaaaaaggctgccaaaatattaagagaattca

SEQ ID NO: 180201 - DNA, 90 bp, Homo sapiens
tgtgcagtgctcgactgtgaggatggagtggctgcaaacaaaaaggacaggaagatgtcacccaagcgcatagctaaaagaaggtccccc

SEQ ID NO: 180202 - DNA, 121 bp, Homo sapiens
gaataaatggcgtccaaagtcacagatgctatagtctggtatcaaaagaaggtaattccagtggagaagctagtgaaaggacgtttccaggacaacctggattttattcaatggtttaaga

SEQ ID NO: 180203 - DNA, 80 bp, Homo sapiens
ccagggccagatcctaacccatttggggcagctttggaagaagtagaaggtgatgtggcagaattggaactaaaacttga

SEQ ID NO: 180204 - DNA, 100 bp, Homo sapiens
gccgggcgctggtcgtcagcgccgaggctgggctgaggcgccgcggtaccatgaggcgccggttctggatatcctgtgctccctctgtctctgcaatggg

SEQ ID NO: 180205 - DNA, 50 bp, Homo sapiens
atgtgttactccattgctgaggagtgacagaccttccagaacttgataca

SEQ ID NO: 180206 - DNA, 99 bp, Homo sapiens
aaggtcggcagagcaaggggcttacgcagaaggacctggccacgacaccttccagttccccgacatggaccacagctacgtcccttcgcgcgccgagat

SEQ ID NO: 180207 - DNA, 75 bp, Homo sapiens
cacccatctggccgggcagtaccttcttcaagagaaatggagcccttctccaagcttagcagtgtctgcaaaaac

SEQ ID NO: 180208 - DNA, 100 bp, Homo sapiens
gctgagagcaagatgggtcaccagcagctgtactggagccacccgcgaaaattcggccagggttctcgctcttgactggcacagcctccaggttggcggg

SEQ ID NO: 180209 - DNA, 75 bp, Homo sapiens
gcagagccggcccgaggcgctcgccgtggaactcgcgcgccaccagatgtggacgagtgtgcccaggccctgcac

SEQ ID NO: 180210 - DNA, 100 bp, Homo sapiens
ttccccatttgagaacaagactattgaacgcaccttaagtgtggaactctctggaactgcagtgtatatgaagtgggtttatggtttaaagcaagacgtg

SEQ ID NO: 180211 - DNA, 90 bp, Homo sapiens
gcctcagcctctcgagtagctgggattacagtgataacaatccatattcctcatttggagcaactctggtgagggatgatgagaagaatt

SEQ ID NO: 180212 - DNA, 100 bp, Homo sapiens
ctgactgagcaggaatggtgagatgtttatcatgggcctcgtcctggctataagtcaccatggcacagcaagctgccgataagtatctctatgtggataa

SEQ ID NO: 180213 - DNA, 97 bp, Homo sapiens
caccttagcctcctaagtagctgggaccacaggaagagccagtgaagtggaggtgaaaaatgaaatcgtggcgaatgtggggaaaagagaaatcttg

SEQ ID NO: 180214 - DNA, 74 bp, Homo sapiens
attatttgcagttgggggaatggattcaacaaaaggagcccgatggtgctggagccaagtccccgacatgccag

SEQ ID NO: 180215 - DNA, 101 bp, Homo sapiens
gacgcagcccgagagctccgctcttgccttctccacctcacactgttgtggtcagaaatgagaagacatgaaatgttgagggaggagctgcgacagagaag

SEQ ID NO: 180216 - DNA, 75 bp, Homo sapiens
cagaacagttggatcttgctcagtctctgtcagaggaagatcccttgtctggatgtggatagtgaagctaagaaa

SEQ ID NO: 180217 - DNA, 76 bp, Homo sapiens
ctggaaggccatgaaaatgcagaggcacgtgtggttctcaaatataggcattctgatgggaacttgtgtgttaaag

SEQ ID NO: 180218 - DNA, 82 bp, Homo sapiens
cggagatcggtagcgcctgctgcccccaccagaaaccaaggtgtatgttggtaacctgggaactggcgctggcaaaggagag

SEQ ID NO: 180219 - DNA, 80 bp, Homo sapiens
ctcctgatgctactgacaacgtggcttctccacagtcaccaaaccagatggactagaggcttttaccagatttcttaaaa

SEQ ID NO: 180220 - DNA, 98 bp, Homo sapiens
gtggggagaagaaatggggcctgggggacggtaggagcctccgtgcggagaccactgttcaaggccacagaaaatgtacaaacagggtgtttatcttc

SEQ ID NO: 180221 - DNA, 100 bp, Homo sapiens
gatgacggcaaccagatgctcctcagggtgcagcgatccgacgcaggaatctccttttccaacacggatactcgatactccaagctattatggaaaaagc

SEQ ID NO: 180222 - DNA, 100 bp, Homo sapiens
gcctcagcctcctgattagctgggattacagcctctacggcagacacatgcaggccaacccagaaccaccgaagaagaataatgacaaatcgaaaaagat

SEQ ID NO: 180223 - DNA, 101 bp, Homo sapiens
cgaaggcggggcctgaggaggactgagctggggcgggacccagggttcttcatcactaggaactggctctcctagaatacaactaataacactaaaaggat

SEQ ID NO: 180224 - DNA, 75 bp, Homo sapiens
gtaggaagccggagacagcagggtgacagatatggaatgtgcagatgtcccactattaactccaagcagcaaaga

SEQ ID NO: 180225 - DNA, 89 bp, Homo sapiens
gaatagattctcttgaccatgtgacatctgatgctgtggaacttgcaaatcgaaggagtttggatcataatacaagagaagcacagggc

SEQ ID NO: 180226 - DNA, 96 bp, Homo sapiens
cattttgggtgtacaggcatcacaagatggcctaccctcctgtacttgttccaactcaatatcctgtggagcacccagacaaattcctgaagtttg

SEQ ID NO: 180227 - DNA, 100 bp, Homo sapiens
gctgaggaactgcatgaggctgagcaggagctgctctctgacatgggagaccccaaggtggtcttccgggatccgtatcggtttaagaagcggacggagc

SEQ ID NO: 180228 - DNA, 100 bp, Homo sapiens
cgccatcttggatccgcgggacaagaaaattcatgcggattgttaaaatgagtcttcggaagcaaacccctagtgacttcttaaagcaaatcatcggacg

SEQ ID NO: 180229 - DNA, 82 bp, Homo sapiens
tggacggcgagcgcgagcggcgcgagaaagaaacttcctcctggccaaccctgtgtctggcagccccatcgtgacgggtgtg

SEQ ID NO: 180230 - DNA, 51 bp, Homo sapiens
ctgggagcttgctgcagcttcaggaccgaccagctgggcatgttcacgcac

SEQ ID NO: 180231 - DNA, 98 bp, Homo sapiens
tggcgtgctagaggaatgggacgtgaagcgcttgcagacgcactgctacaaggtccatgaccacaaagaagtatgctgatgtgatcatccctagaggt

SEQ ID NO: 180232 - DNA, 83 bp, Homo sapiens
cactgtgttacatgagagagccaatcttggacctaccacttgaaaccattagtgagctgctatccagtcagttcgctgctatt

SEQ ID NO: 180233 - DNA, 74 bp, Homo sapiens
taagatgctgccgactctgggcggcgaggaaggcgtctcccggggtgtgggccgaagatatgctcatgtggtgt

SEQ ID NO: 180234 - DNA, 82 bp, Homo sapiens
gtccacagctcatcatgatggacttggagctgccgccgccgggactcccgtcccagcagctgtgaattcctttggacaattg

SEQ ID NO: 180235 - DNA, 88 bp, Homo sapiens
taaaaaaggacagaggctgttccctatggcagaactgtcaagtaatccacctctggctaccatccttattcctcctcatgctcggatt

SEQ ID NO: 180236 - DNA, 75 bp, Homo sapiens
cagaccttattttcctaaggatgaggaaattgatgaagcctgtaagagaataaagcgtgaagttgatgatttggg

SEQ ID NO: 180237 - DNA, 122 bp, Homo sapiens
ttgcctttggtggagtctttagatgcactgttggcttgcgagacaaatatgataagcgtgtggaaaattggcctctgatgcagtctccttggcctacactaagtataagcactctttatctc

SEQ ID NO: 180238 - DNA, 110 bp, Homo sapiens
actggccgaaggggcgtctgcggctctccgccgtccccagccctgcctctccctgggctctggaattgaatgatctggcacgggaccctccagcacagtgttcagcaggt

SEQ ID NO: 180239 - DNA, 97 bp, Homo sapiens
cggagcacgggcaaggcggagagtgacggagtcggcgagcccccgcggcgacaggtgtcatggagaaactccagctgggcccagagattctgcagcg

SEQ ID NO: 180240 - DNA, 103 bp, Homo sapiens
acctcgacgtcttgcctgtgtcccacttgttcgcggcctatagcaaattgtggctactaatttgccccctgaagatcaagatggctctggggatgactctgac

SEQ ID NO: 180241 - DNA, 75 bp, Homo sapiens
cgcagatgtggacttgaaagaagctgcagcggaggaaggcgaggatgtggaaagctacgatccagttttgaaccc

SEQ ID NO: 180242 - DNA, 100 bp, Homo sapiens
gccgtgcgtctccacgtgcaagaggaactggagcgagctccccgacgaggagcgcggcgagatctacgtgccaggtccgggcactataaaggggcctgcg

SEQ ID NO: 180243 - DNA, 100 bp, Homo sapiens
attccccgattccatatggcatgtccaacattcagggtgtctatagcccgattgtggatgattcaacagccacacaaagcagcaacattttttggatgca

SEQ ID NO: 180244 - DNA, 75 bp, Homo sapiens
ctatcacaaagggattgcttccttaacaagtgcacatttggccatgatcgataccctcatgatggcttatactgt

SEQ ID NO: 180245 - DNA, 74 bp, Homo sapiens
acgatgtttcccttggtcaaaagcgcactaaatcgtctccaaggacttggaaaacagtgtgggtgaacttagtg

SEQ ID NO: 180246 - DNA, 100 bp, Homo sapiens
tatctgtcttcggtggactccttcggcagtccacccaccgccgccgcctcccaggaagccatcttcgacaagagcacagggaaggttgttttgaagacgt

SEQ ID NO: 180247 - DNA, 100 bp, Homo sapiens
cagcatcatcctaaggacgcagctgtctgtgagggtccatgcctgcatcggtaagaatgattgatgttggctgatattggagtgctcattcacatgaagt

SEQ ID NO: 180248 - DNA, 100 bp, Homo sapiens
attatgaagaaggagatgaatattttgataaaaatttggcactctttgagatgctgcacttaaaaggatgcttgttttgatgtcctgctcattgttttcc

SEQ ID NO: 180249 - DNA, 75 bp, Homo sapiens
tgaagaatattcccaagtccttcacccggttacagaatgtctgaaggggacagtgtgggagaatccgtccatggg

SEQ ID NO: 180250 - DNA, 88 bp, Homo sapiens
caacattctctttaccttagatggagatatcaaattgggaggagatgttaaagtaacccatcttgcaggacgacattgaagattggtc

SEQ ID NO: 180251 - DNA, 82 bp, Homo sapiens
gggccgcgtcgaagacatggaccagggctacggaggatcccatgacagattctgttgtcacgtctccttacagagtttgagc

SEQ ID NO: 180252 - DNA, 82 bp, Homo sapiens
gagcctggcgcagcctccctctattaccaggatgaatttcatcctttcatcgaagcacttctgccccacgtccgagcctttg

SEQ ID NO: 180253 - DNA, 100 bp, Homo sapiens
cccggactcatacagagattgaaatgttccttagaaaggagcagcaggttccagcgccagaacaagttgaaaaaggtggtgtgagcaatgtaacagaagc

SEQ ID NO: 180254 - DNA, 82 bp, Homo sapiens
gagtgatgtggaggaaaacaacttcgagggcagacagcctcccgcgacgatgcccctcaacgttagcttcaccaacaggaac

SEQ ID NO: 180255 - DNA, 75 bp, Homo sapiens
gtggatttccatatgaaagctgtgccagggacagaagtgccagggcataaggaaaaatgccagctgtgggacaag

SEQ ID NO: 180256 - DNA, 75 bp, Homo sapiens
gctgggcgaggagcgcagaggagtcagaggcaaaaatctccagccctacagagactgagcggtgcatcgagtccc

SEQ ID NO: 180257 - DNA, 100 bp, Homo sapiens
atcaattctgttgcagtcatatgcggtggaatctgttcttcttttgcatcctacgtaaccagaccaagctgtgggaatttctacagacagttcaaggaaa

SEQ ID NO: 180258 - DNA, 90 bp, Homo sapiens
ggggaccagagatggacggtcactcagcctatggagactgtttatgaccagtggttcatcaccctttttaacattgtttacacatcactg

SEQ ID NO: 180259 - DNA, 100 bp, Homo sapiens
acaggcttaactccaagactgtgttcgggagtccttggaactgtggtccatggtaaagttttacaggtttctgacgtagaagagcttacccctccagagc

SEQ ID NO: 180260 - DNA, 51 bp, Homo sapiens
ggggatcctctgtacgcccgttcactggtttcagtgttgactggtgggctc

SEQ ID NO: 180261 - DNA, 73 bp, Homo sapiens
tcttttggatagtgatgggaaaagaaatggagaaggtagaggagatgccacataaaccacagaaagatgaaga

SEQ ID NO: 180262 - DNA, 87 bp, Homo sapiens
aaagagacctttgcgttcctctggggtggcactttccatagctgtaggactgctggaggttgctgatcagctctgtgccaagtatag

SEQ ID NO: 180263 - DNA, 90 bp, Homo sapiens
tggaactgaccgaattaaaatttatacttcgcaaaactcagcaattttttgatgaggaagagagaagggcacagttacctaagtatcaac

SEQ ID NO: 180264 - DNA, 100 bp, Homo sapiens
cagaaattcaggaagctgctttcaaaagactttttaaaactgtggacttaaatgttctgcaaagtcttacacaaaagcccaatacagtacatgaactacg

SEQ ID NO: 180265 - DNA, 83 bp, Homo sapiens
tggacggcgagcgcgagcggcgcgagaaagtcggcagcttcactcccgagggtgccgcgagcccaggcggcgaacacccggta

SEQ ID NO: 180266 - DNA, 101 bp, Homo sapiens
ggctcattcataggatataaagagaaacctcaagatgtggatttaccttatcccctcaacaacttttcagtggcaaagtgtgaacatggctacgcctcttc

SEQ ID NO: 180267 - DNA, 51 bp, Homo sapiens
agcgcacgtttaaacatctcaagacatggtggctcatacctgtaatcctag

SEQ ID NO: 180268 - DNA, 82 bp, Homo sapiens
ccggcttggagaggccgagggtttgatgaaggtggaggcagcgcggctctcagggtgcggggggcaatggcactgcagctct

SEQ ID NO: 180269 - DNA, 76 bp, Homo sapiens
gaatttgagcagacccttgctgccaatgaacaagcaggtctcttagacatcttctcaagattatgctaagagaaat

SEQ ID NO: 180270 - DNA, 83 bp, Homo sapiens
caagcatgctcagaccttcattgctctgtgtgccaccggtacaggtttgcagattccgccagcagcacagcaagctctacaga

SEQ ID NO: 180271 - DNA, 74 bp, Homo sapiens
tcggatacgatagaaaatgtaaaggccaagatccaggataaggaagatgcctgaaaacttcatgcctcctgttc

SEQ ID NO: 180272 - DNA, 100 bp, Homo sapiens
aagaagagcaaaaggcggagctgtagccactgtagcagcaaggttcaaaccttgtactactcagctgatcacaagctgcttgatgggaacctactagatg

SEQ ID NO: 180273 - DNA, 75 bp, Homo sapiens
gtacgtggcctgcgacctgcaccgcctagaggagctcgtgctcgacaggatgggagtcccagcttctggagacgg

SEQ ID NO: 180274 - DNA, 82 bp, Homo sapiens
caacatcctgctcctgctcatggacgacgtgaaagaaaatggcccgaaccaagcagactgctcgtaagtccaccggtgggaa

SEQ ID NO: 180275 - DNA, 101 bp, Homo sapiens
aagtggacgagctgtccctcattgaccacaacgaaattatgtccaggctgacgctcaagcaggagctgtgccctccccgagaggattctgtcctttcgtgg

SEQ ID NO: 180276 - DNA, 96 bp, Homo sapiens
ttttccccccttgctcgggatggtgccacaggaggctgtgcgggccccgctccgcttcgaatggctttctttagcttgcccatggtgatgtgaaga

SEQ ID NO: 180277 - DNA, 75 bp, Homo sapiens
ggaggcagggacccttgcctactatgaggccccaatcttcatctccttcttcattgctttgagagagatggccaa

SEQ ID NO: 180278 - DNA, 110 bp, Homo sapiens
ccgaggccccccggcaccgcgcctgctgccgggttgcgctccgtgcacctcttgcgggttgttaaaaaagcagacatgatcaacaaaaatatgactcatcaggtccaagc

SEQ ID NO: 180279 - DNA, 75 bp, Homo sapiens
ccccatggggctggcctgcggcgcctgggcgctctgaggccaaagaggtgctgaaaaaatatttggagtccaagg

SEQ ID NO: 180280 - DNA, 100 bp, Homo sapiens
gtcctggctggagtcgctttcatggtcttgctgattccactcaacggagctgtggccgtgaagatgcgcgccttccagacagaagccctgcagcagctgc

SEQ ID NO: 180281 - DNA, 97 bp, Homo sapiens
ctgctacgtgaccagcattgccgtagaccctgggaagcagcagtgaacaggtgactacgaagtctcagtcaagttcaacgaggaacacattcccgac

SEQ ID NO: 180282 - DNA, 50 bp, Homo sapiens
tgccccgtggccgcggccgtctcgtaggagcaggacatcgagactttaca

SEQ ID NO: 180283 - DNA, 98 bp, Homo sapiens
gggagtctccgcgtcccgctcgctgggagagagctgagcttcagtcattgtctattcctggaacttaccaagagaagatcacccacctgggacattct

SEQ ID NO: 180284 - DNA, 50 bp, Homo sapiens
gaaggtctctggagacatcttcagcaggctttccatctgatggtcccctg

SEQ ID NO: 180285 - DNA, 90 bp, Homo sapiens
cccctatcctatccgcaaacaccattgctgtgaattacgtgagggaaagatattgaagaggagttggacactccgagagtgcagctgttc

SEQ ID NO: 180286 - DNA, 100 bp, Homo sapiens
cgctaaacgtgccctactctgccccgggggagaggaaccacgtgaatgttgagggggcgacacacaagcaggtggtggacctgattcgagcaggcgagaa

SEQ ID NO: 180287 - DNA, 96 bp, Homo sapiens
cagcaggcccgagcccaccgcgccgggccccggacgccgcgcggaaaagcctactcatgaaggttacttctcttgtttggatatctggacgctgtt

SEQ ID NO: 180288 - DNA, 100 bp, Homo sapiens
ggtatttgcaagtcatcagactgcataaaatcagggccgttgctccagggagaactgcaaatatcttcatccacccccacatttaaaaacgcagttggag

SEQ ID NO: 180289 - DNA, 101 bp, Homo sapiens
gcactttctcctcagggaagttttctggaagacacaacaggggagcagttcctcacttatcgctatgatgaccagattgatgaactcccagagggcgctgt

SEQ ID NO: 180290 - DNA, 100 bp, Homo sapiens
agcctcctgagtatctgggactacaggaaaaatggacattttcctctccccctaaaaaaagataaaactccttcctggttattaactgaaatgctgatcg

SEQ ID NO: 180291 - DNA, 74 bp, Homo sapiens
ccctgctgagatgcgcaaattcactccccagtacaaagggcctaggaaaaactattcaagccattgcatttctg

SEQ ID NO: 180292 - DNA, 50 bp, Homo sapiens
agaggagcctcggccccgtacccagtgtaaacaggaacatcgataagtag

SEQ ID NO: 180293 - DNA, 51 bp, Homo sapiens
gcgcgggcggcggcgccggcaggaagcactgccagtgaaagatgtagaaga

SEQ ID NO: 180294 - DNA, 98 bp, Homo sapiens
ctctgaatgtagtttgggtctcagtggtggactggcatttgaagcttgcagatgagtatctcagagtcctcaacgtgggtgtggccgaggtgaagaaa

SEQ ID NO: 180295 - DNA, 90 bp, Homo sapiens
aataaacatgcaatgaacccaaaagggcttccatctggagcaccagttgagtgaagttgcattgcagacagccctcgcaagctcttcaag

SEQ ID NO: 180296 - DNA, 83 bp, Homo sapiens
cagccgcgaggaggcgcgggaggtgttcgagaacgaccccgagacgatcgcaccccctccctccctggcggagcccctgaagg

SEQ ID NO: 180297 - DNA, 58 bp, Homo sapiens
tgcacttgttgcagaaacagccaaggactcagtgacctttgaggatgtggctgtgaac

SEQ ID NO: 180298 - DNA, 50 bp, Homo sapiens
acatcctgacctagagcccatcctaagccgatcaaagtccagatctccat

SEQ ID NO: 180299 - DNA, 100 bp, Homo sapiens
tcacctcctgggatcagatgtgcattgagatcggcttcagctccccaggaatatgattgaaaacagcatgtttgaggaagaaccagatgtggtggattta

SEQ ID NO: 180300 - DNA, 50 bp, Homo sapiens
gcaagcgcctggagcggctggccatcggctgaccccgcactacatctacc

SEQ ID NO: 180301 - DNA, 100 bp, Homo sapiens
gatacttgccgcaaagcaaatgccattccagatggtccccgaggaatgaagaatccctccattgttggagtcctgtgcacagattcacaaggacttaatc

SEQ ID NO: 180302 - DNA, 100 bp, Homo sapiens
ggaattggagaaaagtggtgctctcctagaaagtgggacttatgaagtgatttgctgtcctctgaatacatagagagacacattgaacatggaggcaaga

SEQ ID NO: 180303 - DNA, 75 bp, Homo sapiens
aggaggagattctgaagataaggaggtatgatctcgtgaaatcttgagagaaactgaatgacgaatgaaactatt

SEQ ID NO: 180304 - DNA, 82 bp, Homo sapiens
gacataaatccctgagtgcccgggaggagccttaacaagcgcacggagccctcaagagaatgtaactggtcactacatttcc

SEQ ID NO: 180305 - DNA, 75 bp, Homo sapiens
ctgcgggatcccaaatcggaagtgaattcggattgtttgctggtctatgctccatcagcaagcactgccgactac

SEQ ID NO: 180306 - DNA, 100 bp, Homo sapiens
gaaatgcttctctcgttacctgccttacatcttcagacctccgaacaccatcctttcttccagctgccacacagaaggttactcctggatggagcacctc

SEQ ID NO: 180307 - DNA, 75 bp, Homo sapiens
gctgggaaaagccatctcctattcagggacaaaagtggctctcaatccagcacatgcacattgaagcaagttaaa

SEQ ID NO: 180308 - DNA, 89 bp, Homo sapiens
tcatcttgtcctacctgaagtatgccattagttcccaggtgtacctgaaggaaatcttaaaagaaattggtgttcagaatgtaaaaggg

SEQ ID NO: 180309 - DNA, 100 bp, Homo sapiens
ccccagttccaaagtgtcttaaagttccagtctcatcagattttccatgtcctggtggtggcagcagcctttgtccacttctatggagtctccaaccttc

SEQ ID NO: 180310 - DNA, 75 bp, Homo sapiens
cggcggctcagttgtccatgaccctgaaggtccaggagtacccgaccctcaagctcttttgaaacagatggtcac

SEQ ID NO: 180311 - DNA, 100 bp, Homo sapiens
gcggagaggagatgcacacggcactcgagtgtgagatcactgagacccagaggctgggcctggctatggccctagaacctaacaccaccttcctgaggaa

SEQ ID NO: 180312 - DNA, 100 bp, Homo sapiens
cgagacagacagcatactgaagtggtttgcaacatccttcttctggataacactgtacaagctttcaaagtcaattgccggtggtggtgtgcacattgag

SEQ ID NO: 180313 - DNA, 80 bp, Homo sapiens
cctgggtaaccgtgttgggcgcgccacggagtgtctcataaacggctccttcctttgagtgcccttaaagatagccgttt

SEQ ID NO: 180314 - DNA, 116 bp, Homo sapiens
cctggagtctgcgaaggccgggacccggttccccggcccacagtgggggtgtgcaaacccgagagaactgggaaaaccaattctgtgtcctcggaggaccacagcccagttgggcc

SEQ ID NO: 180315 - DNA, 98 bp, Homo sapiens
caagatcgatgatcccacagactccaagcctgagggtctccgtctctccaccgggggcttcatccttccagggaggagaagagggactccagaatggc

SEQ ID NO: 180316 - DNA, 90 bp, Homo sapiens
gtgtatggaggaggggctgctgagatatcctgtgccctggcagttagccaagaggcggataaggaagagctcgccaacaccattgcacag

SEQ ID NO: 180317 - DNA, 100 bp, Homo sapiens
gctttagcggtgtcttttgcgaaaatagaagcacgagtgtctgctgatgaagacctcaaactttctgatcttttaaaatattacttaagagaatctcaag

SEQ ID NO: 180318 - DNA, 95 bp, Homo sapiens
actttgtggctgcctttgttgctgctgcacattaggttgcagtatgtggccagttatttgcctcagtaaaagaaataatgatctcctttgggaag

SEQ ID NO: 180319 - DNA, 133 bp, Homo sapiens
caacagaccagacagtgttaccagggaggagcagtgaaagagaagggaatgctaagaactgctgggaggatgacagtcacccgtgtgaacagaaagtgagaggttgtagcacattgccaccgtccagatctcg

SEQ ID NO: 180320 - DNA, 101 bp, Homo sapiens
ctgcctggccgcggcggggaagatgttcagcgtagagtcgctggagcgggcggagctgtgcgagagcctcctcacttggacttaattcagtgcacaaatga

SEQ ID NO: 180321 - DNA, 82 bp, Homo sapiens
gccaggccgggggcgcctgcgactgcggggacagcaacgtgatgcgggagagcggctgcagaaccttggcctgaaaatgcta

SEQ ID NO: 180322 - DNA, 90 bp, Homo sapiens
gtgtttggagacttcaaagatgtattcttatgttcctgaggaagaattgaaggcagcagaaatagatgaagagcacgtggaggatgacgg

SEQ ID NO: 180323 - DNA, 98 bp, Homo sapiens
gacaagtgatggagcagcaccagcagcagcgtcaggaatctctagaaagaagaacctcggccacagggccactgtgcatgtgcgggtcaacgatgtga

SEQ ID NO: 180324 - DNA, 82 bp, Homo sapiens
ccaaaccaaactggagctggtgcagcaggaattgggatcgtgtcgctgcgcaattctgtggtgttcttggtcacacatttat

SEQ ID NO: 180325 - DNA, 100 bp, Homo sapiens
gctcttgagtttattccttcagaccagcaggtaattatgctttgggaaaatggaattaatggcattttagcagatgaaatgggattgggtaagacagttc

SEQ ID NO: 180326 - DNA, 75 bp, Homo sapiens
cggaaacaaagttattttgctcggaacaggaaatatagtggtcattatgattagctatccaaaaggaagagaaat

SEQ ID NO: 180327 - DNA, 90 bp, Homo sapiens
cggcatgtaacactccactttccaacttcgagtcacaccagaattataagaattcaattcgccacaatctctctctgaatcgttatttca

SEQ ID NO: 180328 - DNA, 100 bp, Homo sapiens
acgaaaacgtagggaccacatcaaagacagctttcacagtttgcgggactcagtcccatcactccaaggagagaagatcagggagctgattttggatgga

SEQ ID NO: 180329 - DNA, 51 bp, Homo sapiens
catcaccatgaacactagcaacaaggacgagtgctccaaggataacggcgg

SEQ ID NO: 180330 - DNA, 147 bp, Homo sapiens
tgtcaccataggagaaggggagtcaatacctccggatactcagtttgtaaaaacatggcggatccagaattctggttcactaagaatctttccccagacaaaatcaacctgagcaccctgaaaggggagggtcagctgaccaacctg

SEQ ID NO: 180331 - DNA, 75 bp, Homo sapiens
aagcaaggttccttggaagaagatgtctgcagaggaaaatatatgcagatgatgaacattcttaagccaattgcc

SEQ ID NO: 180332 - DNA, 99 bp, Homo sapiens
actaatggacagttagtcacccacctacatgttgagatcttttagagaaatctcgggttgttaaacagccaagaggtgaaagaaacttccatgtgttct

SEQ ID NO: 180333 - DNA, 74 bp, Homo sapiens
tgttccactaccaccaaatcctggcccggctgcaggttaggaattttagacccagttctgctactgactttctg

SEQ ID NO: 180334 - DNA, 75 bp, Homo sapiens
gggcgcggaggcgaccgccatggcgttcctcaaactccgtgaccaggttataaagtcagcccgggttatgaagaa

SEQ ID NO: 180335 - DNA, 90 bp, Homo sapiens
ctacgatgagaactggttctacacgcgagctggtgacgcatccaaagaagacattgacactgctatgaaattaggagccggttaccccat

SEQ ID NO: 180336 - DNA, 83 bp, Homo sapiens
ccctcatcagccagtgtggaaaaccagtggtaaatgtcagctacaggccagcttatgaccagaactcccccactggaaaggat

SEQ ID NO: 180337 - DNA, 75 bp, Homo sapiens
tcaggaaggattcctgagattccaggaggaagtactggcgaagtgctccatgtctatgcatggaacattgaaaag

SEQ ID NO: 180338 - DNA, 80 bp, Homo sapiens
aggtggaactgcagcactgtggataacacctctgtttttggcagggtgatgcagatagtgagaaggcaaccaaagtgcag

SEQ ID NO: 180339 - DNA, 90 bp, Homo sapiens
tccacctgtccgctacgctcgccggggctgcggccgcccgaggagaagtacagcatcggggagcccacagtgccatccaccctggcagag

SEQ ID NO: 180340 - DNA, 121 bp, Homo sapiens
aagccacggcagtaataccaaggccattcgcacaactgcccactacgatcctgccactgagccctgccctgcttggatagaggcctccgaacaggagtaaagaatggctgttgaacatcca

SEQ ID NO: 180341 - DNA, 122 bp, Homo sapiens
tatatcaagccacaatttccatcaaaaagtgattaagcagagaatggagaagaaggttgattccagatggcgtttaatgattgcttcagtttgaactaccctggcaacccctgcccagggga

SEQ ID NO: 180342 - DNA, 100 bp, Homo sapiens
gcagcactgtctctgtgcccatgatggctcagaccaacaagttcaactataaacctgagccagcagaagagtacactgagcaaagtgaagttgaatcaac

SEQ ID NO: 180343 - DNA, 97 bp, Homo sapiens
gcagaaatcacattggaccctcctcccaactgtaggcaaaaactgattattccaagtggaagttgccctgttattctgaatacttacttttgtgaga

SEQ ID NO: 180344 - DNA, 80 bp, Homo sapiens
ccgacttcttgtatgcatactccacagcacctgagtgttgcggagataggaacatgggagagaaacaatctgggtaacat

SEQ ID NO: 180345 - DNA, 100 bp, Homo sapiens
ctcagagttctacagagtcaccactgaacaatatcagaaagctgctgaagaggtggaagcaaagttcaaatctattaatgagatgaagcggttggaagaa

SEQ ID NO: 180346 - DNA, 100 bp, Homo sapiens
gagctattagagattgtgaagaagaatttcgatctccgccctggggtcattgtcaggtcagaatggcggcagtggagcatcgtcattcttcaggattgcc

SEQ ID NO: 180347 - DNA, 75 bp, Homo sapiens
tggaagggaggagactcctgaccctcagaatgggccgttgctccagggagaactgcaaatatcttcatccacccc

SEQ ID NO: 180348 - DNA, 100 bp, Homo sapiens
attaacaagacggggaaagctgctgatttaagaatgaagaacaaattttggtattttgagtttggcacatctgaaactttctcagccacctgcaagaagc

SEQ ID NO: 180349 - DNA, 100 bp, Homo sapiens
cctcggccggggccacccactacctggtgcgatgttctcctgcttcccccaagggtgaagaggaggagcgagagatggcccactgcgtgaccttggttca

SEQ ID NO: 180350 - DNA, 82 bp, Homo sapiens
aagatcctcaagaagaagaagttgcgaaggatccccaacggggaggccaacgtgaagaagtcccaggtgtgacaccttcagc

SEQ ID NO: 180351 - DNA, 50 bp, Homo sapiens
tgtcgctgacggcgactgcgggaggccagaagaacatgtgatcatccagg

SEQ ID NO: 180352 - DNA, 75 bp, Homo sapiens
caccctggggggctgcatccagataatgtgaaggctctctatgagaacatgctggtggagctgccctttgcaggc

SEQ ID NO: 180353 - DNA, 100 bp, Homo sapiens
tgcaaatacttgtgcactgggagagagaatagtgacagtggtacaggaaagaaagaaaaagaaaagaaaaacagaaagggcaaagacaaggaaaatggct

SEQ ID NO: 180354 - DNA, 82 bp, Homo sapiens
gccgctggcgagcgccaccgcatgggttcgaccttgaaactacaagagtgaatctgaaagttagttcaaaaagtcaaacggg

SEQ ID NO: 180355 - DNA, 76 bp, Homo sapiens
ggagtcagacacggggcaggctgagttcctcttgctcacagagctctgtaaaggaggaagagcaagcaggccctga

SEQ ID NO: 180356 - DNA, 86 bp, Homo sapiens
acagagtgctgttttagagctggcagcagcatctcagcccaagagaaggcactacctggcagcaccatctaaacctgtatcatctg

SEQ ID NO: 180357 - DNA, 75 bp, Homo sapiens
aaaataacaagaatgggaggagaagggtgactctgacatcattagaagcatgccagaacagactggtgaaaagta

SEQ ID NO: 180358 - DNA, 76 bp, Homo sapiens
gaccaagatgcccgagtgctacttctactccaagttcggactggacctacagagacatctgggattttctgcgtca

SEQ ID NO: 180359 - DNA, 75 bp, Homo sapiens
gtcctacgctgctgtgaatcacatatcccaactgtcagaggagcaggtgcgggagatggaggcagagctggagga

SEQ ID NO: 180360 - DNA, 83 bp, Homo sapiens
ggcagctacaaaatcaatggccggacgaaaacaatgcagatcttcgtgaagactctgactggtaagaccatcaccctcgaggt

SEQ ID NO: 180361 - DNA, 50 bp, Homo sapiens
tgaagaagcaaacggattttgagcataaacttggaggaggcagtggagag

SEQ ID NO: 180362 - DNA, 123 bp, Homo sapiens
cggagcgcggagcccggctcccgcaccatggaggaggacgacagctacggaacaaaaggtcccaggtcattcttggggctcactcaataaccagggaagagccaacaaaacagataatgcttg

SEQ ID NO: 180363 - DNA, 50 bp, Homo sapiens
gatgctggagaagtccccttatgaccagccagatgaattatactttgagg

SEQ ID NO: 180364 - DNA, 100 bp, Homo sapiens
gcaggatggtgcacgtagccaggctgctgctgctgctcctcactttcttcctccgcacggatgctgagagtgaccatagccgatgactactcagatccct

SEQ ID NO: 180365 - DNA, 98 bp, Homo sapiens
ccagccgcccgcgggccagcgcaccggtcccccagcggcagccgagcccgcccgcgcgccggttgactttggcagaatatcatgaacaggaagaaatt

SEQ ID NO: 180366 - DNA, 100 bp, Homo sapiens
gctgcggtgtctgctgctattctccgagcttcgcaatgacatggctccttactatgaagccttgtgcaaatccctcgactggcagatagacgtggaccta

SEQ ID NO: 180367 - DNA, 100 bp, Homo sapiens
cctctccacccctcgcctgctcatcaacaaggagaaagctggccagaaaactacccctgagtgtggtcccacaggatatgtagagaaaatcacatgcagc

SEQ ID NO: 180368 - DNA, 101 bp, Homo sapiens
cagtaaccctgagacaaccacttctggtggttgccactcacctgaggatcatttggaacagctccgcgcaaatagaaataatttaaatccagcacagaaac

SEQ ID NO: 180369 - DNA, 50 bp, Homo sapiens
tccggaagtgctcagtcatgttcatagacatgttgctggatgacactggt

SEQ ID NO: 180370 - DNA, 50 bp, Homo sapiens
atcctatggctcaaagaaagatgattattgttcctgcaagggctggtgtg

SEQ ID NO: 180371 - DNA, 87 bp, Homo sapiens
agtacaaccttcaaaacaactggaatatttagcaaggattcaaggctttcagggagaactaatgccgacgtgatgaccgccctgtcc

SEQ ID NO: 180372 - DNA, 100 bp, Homo sapiens
aatgacaccagggtttggagataaaacatttgttgttcagactcagattgatggacaacttttcttaattaagcaccttttgatacttcgtgaacaaatt

SEQ ID NO: 180373 - DNA, 75 bp, Homo sapiens
gcaagcagttcagaagagccaaggaataaacatgcaatgaacccaaaagggtggctcgaacatggcacaagttga

SEQ ID NO: 180374 - DNA, 100 bp, Homo sapiens
ccggagagtggagaggaggcagtggccctggtggaagacttgcagaaagaacctggaagacagaggctggagggttttgtctccacaattatccgtttac

SEQ ID NO: 180375 - DNA, 74 bp, Homo sapiens
ggcggctttgaccgagaggctgctggagctcgtgtttggacgcgaaaatgtttataggaggccttagctgggac

SEQ ID NO: 180376 - DNA, 50 bp, Homo sapiens
gaaactccagcgtgtctccagccgtggtctcctctgagcctccggcctcc

SEQ ID NO: 180377 - DNA, 82 bp, Homo sapiens
cgggcagctgggctgcagtgaccccgctttcctcacgcccaggtggtacagaagttggtcctgccctttgggcgactgaact

SEQ ID NO: 180378 - DNA, 100 bp, Homo sapiens
gcagcccttcaagaaagacttgatggtctggtagaaacaccaacaggatacattgaaagcttcatcactggtccagctgtaataccagggtacttctccg

SEQ ID NO: 180379 - DNA, 100 bp, Homo sapiens
ttacatctgattccaatgctccagaagcagcggctggaatttgcgttttatgtcattgaacagagccttccccaattgtaaatttgctgaaaaatgtttg

SEQ ID NO: 180380 - DNA, 90 bp, Homo sapiens
ttaatttcagtgactgaattaaaaggtgtcaagaagctcagaatggctactggcgcaactacttgagctgcacgtctgcccacaccagca

SEQ ID NO: 180381 - DNA, 51 bp, Homo sapiens
ttgtccctcccagttttagatgatcagccatgctgtgacctacaagcaaac

SEQ ID NO: 180382 - DNA, 75 bp, Homo sapiens
gcttcaatgtccgcatcgcaaccaccgccctggccatctaccatgtgatgtgaagttcatttccaatccgccctc

SEQ ID NO: 180383 - DNA, 87 bp, Homo sapiens
gctgaggaggggccccagcagcccccgaaggccctatcaggacatggagtatgaaagacgaccaatgatgcgagctcagagtcaata

SEQ ID NO: 180384 - DNA, 50 bp, Homo sapiens
ggaaaggctctcagtgaaaaaggcatgttatgttacccagagaactttcc

SEQ ID NO: 180385 - DNA, 100 bp, Homo sapiens
atgtggtgcttttgaaccactggaaagtgaggaattttgaagtacaccgtggtgacattgtatcattggtgcccactctgtatgttgggaaatactctac

SEQ ID NO: 180386 - DNA, 101 bp, Homo sapiens
tgccctgggcccgacaggagctgcacaagctgctggacaaggaccctgacctgcctgtcgtcgtggtggccaacaagcagttcacacaaaagatgttggac

SEQ ID NO: 180387 - DNA, 101 bp, Homo sapiens
ggcggagcaagatggcggacatctccctggacgaactcatcaggaagcgcggggcggcggcgaaaggacggccggtctaattgaagccaacggagaactca

SEQ ID NO: 180388 - DNA, 90 bp, Homo sapiens
ctcctgtattaggtcactacaggaatcaggaatacttgacccacaggattattctacaggtgaaaagaccgtccaggctggacttgaact

SEQ ID NO: 180389 - DNA, 106 bp, Homo sapiens
ctattgccttattttttctcatggatgttcttcttcgagtatttgtagaagggaactctaatgaatcattgattgaccagcactattttaccagttggaatgaatg

SEQ ID NO: 180390 - DNA, 90 bp, Homo sapiens
gttacattgtcgctcactctgcccatcacgtgccacatttgcttggggaagtgccggtggtggtgtgcacattgagccccggtatagaca

SEQ ID NO: 180391 - DNA, 100 bp, Homo sapiens
ttggagaaaagcgaaggattgtggtcccgcctcacctggggtatggagaggaaggaagaggatcactactcttggaatcaaagataaatccaaatactgc

SEQ ID NO: 180392 - DNA, 97 bp, Homo sapiens
tcattacaccttaactccatatattcatccacatccaaaagattgggttggtatattcaaggtgatgcagaagatggggaagaatatgatgaccctt

SEQ ID NO: 180393 - DNA, 83 bp, Homo sapiens
gacggacgtcatcctgatcttggaactatttgatggtagagtggtggcaaagcttccttttacccctctttcttacatccaag

SEQ ID NO: 180394 - DNA, 90 bp, Homo sapiens
cagagccgggagttcaagaagaacactccagagctgtcttgtcgacggtctcactgatgcctcttctgcattcaaagttcctcgacccgg

SEQ ID NO: 180395 - DNA, 100 bp, Homo sapiens
cagcaactttggcaccatccgctctaccacatgcgtgtacaaagggtggtgaagactcccggctctcagctgccccctgcatcagacccagcagctcccc

SEQ ID NO: 180396 - DNA, 98 bp, Homo sapiens
tcaagctgccaatgaagacctcaggaccaagctcacagacattcagatagagctgcatcaagagaagtccaagagtcactttgtggcatgtatgacag

SEQ ID NO: 180397 - DNA, 82 bp, Homo sapiens
cgagtggtgggagaaccagccgactggagcaggcagcagcccagccttatgccagcctggaccatcttggaggcagtgtagg

SEQ ID NO: 180398 - DNA, 100 bp, Homo sapiens
caaacagagactgcgaaacgatcctctcaatcaaaataaggagctggaagctatcaaagctcgagtcagggagatggaggaagaagctgagaagctaaag

SEQ ID NO: 180399 - DNA, 75 bp, Homo sapiens
aggaagcacttctgagccagtgaccactgaaaggtatgaagaggagatcaacaaacgcacagcagccgagaatga

SEQ ID NO: 180400 - DNA, 83 bp, Homo sapiens
cctggagttaaggaacagatccccggaggagtttgctggcctagacctgaactcttcagataatcagagtggaggaagtacag

SEQ ID NO: 180401 - DNA, 50 bp, Homo sapiens
gctccgcctggtggaatctgaggacagtctcatcgaactcaaggaatctt

SEQ ID NO: 180402 - DNA, 100 bp, Homo sapiens
ccggcacccccggaccgaccatgggcagatcccaggatttaagtgccctgtatgctcaaaatttgtatcctcagatgaaatggatttgcatcttgtaatg

SEQ ID NO: 180403 - DNA, 75 bp, Homo sapiens
aagaaagaagattcctctgacagtgatgcttgctctgtcaaggcacagcctattgtctcctttgctcagtgtgac

SEQ ID NO: 180404 - DNA, 100 bp, Homo sapiens
cggcctgagtgagtcttaatccgtggccatctgcgttcctgcaggcttcatctggccctatggtcccctgtctcccttgagaatgttttgctggatgtca

SEQ ID NO: 180405 - DNA, 75 bp, Homo sapiens
ggatggcagagctaggtgacggccgggaaagtaaccagaagcttcaggaagagcatcctggtggggaagaagttt

SEQ ID NO: 180406 - DNA, 74 bp, Homo sapiens
acagattgaatgccagtattttgtcaactgtgctggccaggtattggtcatcattgatgtgaagccgaaggacc

SEQ ID NO: 180407 - DNA, 100 bp, Homo sapiens
gtggcggcggcggcggaggcgacggcagcggtcccagcggcagcagcagcggcgggaggagcctccggggttgtggcagcactgcctgaaggtatgagac

SEQ ID NO: 180408 - DNA, 100 bp, Homo sapiens
ccagatgaccagcggcaacctcatcgccttcatcatctacgagtttgtcctgggagattgtatggagctatcatggtgaacttacttcagattgtgcggg

SEQ ID NO: 180409 - DNA, 90 bp, Homo sapiens
tcaaagaccacacagacatcaccaagcttgaagaagcaaacagcatgctaaccaaagatattgaaatattaagaagagagaatgaagagc

SEQ ID NO: 180410 - DNA, 100 bp, Homo sapiens
aggaaaaacagaacgttgcaaactctggaaaaaaacttgggcagtgaaatcaactgtgcagaccatcactgttggaggagtgagcacatcacagtttaag

SEQ ID NO: 180411 - DNA, 100 bp, Homo sapiens
aaattaactataaaggagagcgccaaaccattactgatgatgtggaggttaacagctatctttctggattaatgaaaatcaagttccatcctcagacaag

SEQ ID NO: 180412 - DNA, 75 bp, Homo sapiens
ctgtgtgagcaggagcccgctgctcttccccactcaggtgaaaggtgtagcagtcactcggcctacacccacagc

SEQ ID NO: 180413 - DNA, 100 bp, Homo sapiens
ccttggaatgtgtactgttcggttctggttctacatgattgatcccaggagtatgggaatattaaagctgaacatgacttagaagtagcatcagaagaag

SEQ ID NO: 180414 - DNA, 75 bp, Homo sapiens
catctgtcccaagcaggagaacattgcagatcctgggtttgagcagtttaaaatgtcagaaagattgcatgggaa

SEQ ID NO: 180415 - DNA, 101 bp, Homo sapiens
ggctaagtcccggcagcgggaacacagagagcgaagccaggaatggcgtcatgctcatggcatgaggtgtttgggcatcccaaacactgctcactttgcta

SEQ ID NO: 180416 - DNA, 97 bp, Homo sapiens
aggtgactattttggcctcgagtttcctgatcacaaaaagatcacgtcagtgaaaggggatggagggatcacccactcagaagaaataaatgggaaa

SEQ ID NO: 180417 - DNA, 101 bp, Homo sapiens
tcatcagtgagctgtccctgctggaggagcgcttccggttcttctcaccactaaatccaatacgagttcatattgatattggagctgatggcagagccaca

SEQ ID NO: 180418 - DNA, 74 bp, Homo sapiens
acagagattcatatgagagttatggaggactcagagagagtaatgataattaccggaccaaacatgggtggaaa

SEQ ID NO: 180419 - DNA, 75 bp, Homo sapiens
tggatgccccctggaaaatcatctgcccggcctgtgggatgcaagtgggaggatgggactgaggaagacccacag

SEQ ID NO: 180420 - DNA, 75 bp, Homo sapiens
agcacaaagcatggagaccctccctccaggtttgtgtctggagaaaagagtcttctataagcttatatcgggact

SEQ ID NO: 180421 - DNA, 92 bp, Homo sapiens
gggacctgcgagcagcgcgggcggcagcccgggggaagcgagcttgacctcatggacctcgtaggggaagacagaaagtggatgatggcgag

SEQ ID NO: 180422 - DNA, 100 bp, Homo sapiens
cccaaatattgttgcttattttggaagctatctcagagacctccccgattttgacagagaagcaggccaaacagctcctaagatctcggcgacaggatag

SEQ ID NO: 180423 - DNA, 100 bp, Homo sapiens
attcgtaatgcgactcaaagctgcacggcagtctgtttatgaggtaaaataccatgaagattttgaaaaaacaaaggggagaggctttactcccgtcgtg

SEQ ID NO: 180424 - DNA, 98 bp, Homo sapiens
ttatgaattggatatcaagccagagaagtgcccgaggagagttaacagagagaagaagaaggaggttcctgctgtgccagaaacccttaagaaaaagc

SEQ ID NO: 180425 - DNA, 101 bp, Homo sapiens
cttgctcacaacatccgccgccactgtgacttgcagtcatcatccattaccacaaaattaggggctttgttatgcacctaaagccatattggaagctccag

SEQ ID NO: 180426 - DNA, 100 bp, Homo sapiens
tgaatgttccaatggccccactctcagagccgaatgccgtaggcattgtcattgctcatggtaaatcagaagactgaagcacggcatatactcaccttag

SEQ ID NO: 180427 - DNA, 82 bp, Homo sapiens
ggcgacagcaacagctctgccggctggaagatgccttcaattaagttgcagagttctgatggagagatatttgaagttgatg

SEQ ID NO: 180428 - DNA, 100 bp, Homo sapiens
ctcaagtagccagagttgtcatcgagagaatcgcacggaaggaacagcatatgccatatatgagctggctgtggcttcatttcccaagaagcaggagtga

SEQ ID NO: 180429 - DNA, 100 bp, Homo sapiens
cgccatggcccgctggatcccgaccaagaggcagaagtacggggttggagtagctcggagaggaggaaggagaagtcccgggatgctgcgcggtgccggc

SEQ ID NO: 180430 - DNA, 100 bp, Homo sapiens
ggaccgccgccaggcaacgccgccggggacacagggcagcccgcagaggacagcgaccacggccaccagcccctcgggttccaagatgcagctactggag

SEQ ID NO: 180431 - DNA, 89 bp, Homo sapiens
tcggccaagaaagacaaagacccagtgaacaaatccgggggcaaggccaaaaagaagaatgagtccctggaacgccagatgcgtgaaat

SEQ ID NO: 180432 - DNA, 95 bp, Homo sapiens
cccccgcaaggtcaacctgggagtgggagattgtggtggtgccatgcagcaagaatcagagagatgcagagttagagccagaaggcctgacatgg

SEQ ID NO: 180433 - DNA, 87 bp, Homo sapiens
cgagcagcggacgccggtctctgttccgcaggatggaggactggaatgaaattgaccccattaaaaagaaagaccttcatcacagca

SEQ ID NO: 180434 - DNA, 75 bp, Homo sapiens
gcgtgggacagccacctggagcgcagctgccaggtgatctgcaactctttcaccatctgtaatgcggagatgcag

SEQ ID NO: 180435 - DNA, 83 bp, Homo sapiens
cttggtttcgggatctcggtgctgcagacggcgagacctcctgcacaggttaacacagaaatctgcctcctgggccatgccgc

SEQ ID NO: 180436 - DNA, 80 bp, Homo sapiens
tagatgcgcgtcatccttctttcttcctctacagaagtgttaccaccaccctgtgaatctgcctgcacagtaccaacaga

SEQ ID NO: 180437 - DNA, 89 bp, Homo sapiens
gaagtgattttagctacatcaagtgatgaaaaacacccacctgaaaatatcattgatgggccccttttggatatgtgccacgttggtct

SEQ ID NO: 180438 - DNA, 100 bp, Homo sapiens
gtcctcagtcaacgctgacctgcccatcgccactgcctcagctgatgtcgccgctgatattgccaagtacactagcaaaccatccagtccaatggatcag

SEQ ID NO: 180439 - DNA, 50 bp, Homo sapiens
cttcctgatttctgcagctctgtgtgaagatatcttcaagtacgtcccac

SEQ ID NO: 180440 - DNA, 75 bp, Homo sapiens
tgaagagggaagacacgcggaaacagggagactgcattgcttattgatccaaaaaattcctgttcttcatcccgc

SEQ ID NO: 180441 - DNA, 100 bp, Homo sapiens
cggagatgcctggaatacagtaagaaactatgttccaacttcctgtcaacaatcttggcagtttaagaaaagcccggaaaactgtgaaaaaaatacttag

SEQ ID NO: 180442 - DNA, 51 bp, Homo sapiens
ggcacacagtctactatcaccgacaggtctcagcgtatcctttgccggagc

SEQ ID NO: 180443 - DNA, 83 bp, Homo sapiens
gagatgtcgaaccccgggacacgcaggaacggctccagcatcaagatccgtctgacaggggccagtgtcattcaaagatgtgg

SEQ ID NO: 180444 - DNA, 71 bp, Homo sapiens
cgcggacagcgggctggagcctgacgagctggcgggtgaatgaaaactttgccattgatttgatagcagag

SEQ ID NO: 180445 - DNA, 82 bp, Homo sapiens
caaacatcaagcagaatgtgatttgcttgaagatatgagcctctactcttcatggatcttttggatgaaagaacactcgtgg

SEQ ID NO: 180446 - DNA, 100 bp, Homo sapiens
tccaggaggcagtggaggaagtgggggttatggtgggaggagccgatactgagcttcttcctatttgccatgggaactgggcaggcaaaaggcttctctt

SEQ ID NO: 180447 - DNA, 90 bp, Homo sapiens
gaaaaagcagaggagaacactgaccaagcaagcccacaagaagattatggtctctaattaacagaagatggcaaagcccagccacagcag

SEQ ID NO: 180448 - DNA, 100 bp, Homo sapiens
tattttggaagtgtgccagaattgtgaaagctggtggaatgcgaattgtgcagaaacacccacatacaggagacaccaaagaagagaaagacaaggatga

SEQ ID NO: 180449 - DNA, 100 bp, Homo sapiens
tttacctgcgatggaaattcagttatcagtcccgtgggcaatagagtcactgtatttgaccttaaaaagtgaaatcttgtgctgagtgggtgtctctctc

SEQ ID NO: 180450 - DNA, 80 bp, Homo sapiens
tcggagctgaggatgctcgtctgatgagggacatatactgggtcgtcaggatggagttttgcaagactgggtcattgacg

SEQ ID NO: 180451 - DNA, 82 bp, Homo sapiens
aatcattccttctcacttggcctatggaaaacggggatttccaccatctgtcccagaaatgcccggcgaagccacagaaacc

SEQ ID NO: 180452 - DNA, 100 bp, Homo sapiens
tcctcggctgcggatacctcgcccatgttctggccgagcaagaagtctatgtgccccaggatcctggattacctgaggaagaagagatcaaggaaaaaaa

SEQ ID NO: 180453 - DNA, 75 bp, Homo sapiens
gaaccagatatcttgaaaagctgccagaaagggaggagtggacaaccgccatccagactgtggctgacggcctca

SEQ ID NO: 180454 - DNA, 51 bp, Homo sapiens
ccggagaggagtggcctcgcccgcttggcaaatgaaagctactgacactgc

SEQ ID NO: 180455 - DNA, 51 bp, Homo sapiens
gtggtgggtggaaaagtgttcgccgaggaattatccagactgccttgccac

SEQ ID NO: 180456 - DNA, 50 bp, Homo sapiens
cccagtcatcctaaatgtcctctatggcccagacgaccccaccatttccc

SEQ ID NO: 180457 - DNA, 90 bp, Homo sapiens
tacgaggcagaaatcagggagctggaggccctgcggcagcacgtatctcccatgcgccaagtggagcccccagccaagaagccagccaca

SEQ ID NO: 180458 - DNA, 51 bp, Homo sapiens
ctggaacttctgcccagctctccttggaaaacggacgatgtattactaagc

SEQ ID NO: 180459 - DNA, 75 bp, Homo sapiens
agctcttggaaccaattgaacagaagagatacaactcgtcaacgaatcaaattcagtgatgacagagtatgcaag

SEQ ID NO: 180460 - DNA, 83 bp, Homo sapiens
gtcttggcagcagcattgggactcctccagaagactttgagaatcactacaagaaaaactccttgtggtgaaggttctaagac

SEQ ID NO: 180461 - DNA, 50 bp, Homo sapiens
gatctccacaaggggtacatcaggtggtatcacggaaaacttgacagaac

SEQ ID NO: 180462 - DNA, 50 bp, Homo sapiens
tgatcctgtgtctcccgtggtgcgagaattacatgaacgacagccttcgc

SEQ ID NO: 180463 - DNA, 90 bp, Homo sapiens
ccttgtctgcaaacagtggtatcgacttatcaaaggtggcgacatgtctaagaatgtgagccagtcacagatggcaaaattgaaccaaca

SEQ ID NO: 180464 - DNA, 75 bp, Homo sapiens
ggatgaaaagaatgaacactgtccttcaaaacgagttcagccgtctgtatatctccccagatacctgaaactgac

SEQ ID NO: 180465 - DNA, 96 bp, Homo sapiens
cacaatggccagagaagattccgtgaagtgtctgcgctgcctgctctacgccctcaatctgctcttttgggacctccggctagcctgtttcagcca

SEQ ID NO: 180466 - DNA, 83 bp, Homo sapiens
ctatgaccagcaagaggatggggccctggatgagggggaagggcctcaaagccagaaggttgattgtacacagcactatgaac

SEQ ID NO: 180467 - DNA, 100 bp, Homo sapiens
tatggtgttattaaggaacctatggttactccacaggatccgctgaacataggatgttgccacaaaatctacctcgtgtatttttctctttcactcatga

SEQ ID NO: 180468 - DNA, 75 bp, Homo sapiens
ctttggtggagattatattttcacgtggacaaacttcattggtttaaatatcagtgacaacactgcagctgaagg

SEQ ID NO: 180469 - DNA, 90 bp, Homo sapiens
gcaggccacacaggcacaggccggtgagggacctgcccagacctggaggcacggagtgtgaatgtgaagacacaagctctttctggatac

SEQ ID NO: 180470 - DNA, 75 bp, Homo sapiens
ccgggcccggcgccgccgcccgcagggtctccatcacccaactccatgcttcgagtcctgctctctgctcagacc

SEQ ID NO: 180471 - DNA, 100 bp, Homo sapiens
cgacgtgggcggtgggccccagccccacagaccagcccagcattcagagccatccaaaactctgtttgtcaaaggcctgtctgaggataccactgaagag

SEQ ID NO: 180472 - DNA, 91 bp, Homo sapiens
ctgcgcacgaccggcgcctcggacaccttcgagggttgggtccaatcacatgtgtgggtgcgaggaggctgtgagtccgggcgctgcgacc

SEQ ID NO: 180473 - DNA, 100 bp, Homo sapiens
tgcaagggaaggaaatgtgcccaacatcatcattgcggggaacttacgttactggcttgaagaggcagaatgcagagatcagtacagtgtgatttttgag

SEQ ID NO: 180474 - DNA, 74 bp, Homo sapiens
tgccatgagcgagcgcctccgtcccagagttgccatggagaaaattccagtgtcagcattcttgctccttgtgg

SEQ ID NO: 180475 - DNA, 90 bp, Homo sapiens
gatccttgagtgataaaggagtagaggtcaatgtgacggtggactacattagaccagccagcccagccacagagacagtgcctgcctttt

SEQ ID NO: 180476 - DNA, 101 bp, Homo sapiens
cctggtctgcatgggcagccgaccaaggggactctatactgacttctgttgaaaccattcaaagctaaagacatggaccttcagcagtgtaagaagatatt

SEQ ID NO: 180477 - DNA, 98 bp, Homo sapiens
gagccaagcatatggaaatgtctctaaaagtagcaatagtatggttacagaaccgacgtgaagccactgtggagcgaacgagaaccacaagcagtgtt

SEQ ID NO: 180478 - DNA, 100 bp, Homo sapiens
aaaaagctcaatgcctcagaaattcattggaggctctgtcggtggtgagcgacgaccagtccctctttgactcagcgtacggagcggcagcccatctccc

SEQ ID NO: 180479 - DNA, 75 bp, Homo sapiens
cagacctcctgaaaaccaagccgaggactgcggggtccggtgtccacgcagactgtttgcagacaaggtcccaaa

SEQ ID NO: 180480 - DNA, 83 bp, Homo sapiens
ccctgctgggccgtgtttggactcctgcctcggcctgtttaaagaagaaaacccgtatgctagatttgaaaacaactaaagcg

SEQ ID NO: 180481 - DNA, 88 bp, Homo sapiens
ttgcgttctactgtgtcagtaggtattcacttacaagcagagcacaattacccaccagaaggtgactgctatgcaccccacgaacgag

SEQ ID NO: 180482 - DNA, 82 bp, Homo sapiens
gtttcaactctccgccgagggcgagcaggagcgagagtgtgtcgaaacactctgctccagccaaggtggtgagggcagctgt

SEQ ID NO: 180483 - DNA, 90 bp, Homo sapiens
tagcccttcagtactgttgtacggcaatgaacaccagggaaagtggcaaagcttcatccagtctaggtcttcaggattttgatttgctcc

SEQ ID NO: 180484 - DNA, 90 bp, Homo sapiens
ccaagtgtttgaagccgtgggaactacagatgaattaagttcagctattgggcgaaagttcaccaaaaaggccccaactagcagctccca

SEQ ID NO: 180485 - DNA, 51 bp, Homo sapiens
ggggagattctgctcacggaactgcaggcaacactggactatggaatgtat

SEQ ID NO: 180486 - DNA, 98 bp, Homo sapiens
atgcctggactctgctcagcagcgtttgtatagggatgtgatgttagagaactatggaaacctggtctccttgggcaaccccattccagctgccattg

SEQ ID NO: 180487 - DNA, 90 bp, Homo sapiens
gctggagcaggtccgcagcctgtctgccatctacctggagaagtaccgtctggagcagctggagggaagatggctgaatctccctgctcc

SEQ ID NO: 180488 - DNA, 82 bp, Homo sapiens
ccgctctccatgaagcagttcctggacttcgacaatgcagatcttcgtgaagactctgactggtaagaccatcaccctcgag

SEQ ID NO: 180489 - DNA, 82 bp, Homo sapiens
ggccagttttgaaatcgacacacaaagaatagagttgagcctgtgggacacttcggttttgacaactactctgccaacgtga

SEQ ID NO: 180490 - DNA, 75 bp, Homo sapiens
atcgtgtgtcggatgaggagaaggttagtggatgacagatgtgtggtgcacccagaggccggggaccttgccaac

SEQ ID NO: 180491 - DNA, 49 bp, Homo sapiens
ctgatgcccctgggccaggctaatggaaatgaggcaagttatcctttgg

SEQ ID NO: 180492 - DNA, 82 bp, Homo sapiens
cgcccgcaccacagaccttcgcctcgccccgccggttcctcaccctcggggagcaacatggctgggatctagcaattgggag

SEQ ID NO: 180493 - DNA, 51 bp, Homo sapiens
aaaccgacgagaggacctcagctccaaggaccagcacttccgcacgacgcc

SEQ ID NO: 180494 - DNA, 74 bp, Homo sapiens
cgagcaggaggcgccatcatgcttggatcctagcatgactatacattgtgacatggtcattacatatggattag

SEQ ID NO: 180495 - DNA, 87 bp, Homo sapiens
agaggatctggtgtaccaggcgaagctggccgagcaggctgagcgatacgacgaattggctgtgaaaggactgaggcagccatctgg

SEQ ID NO: 180496 - DNA, 100 bp, Homo sapiens
caccactcggatcccgggcaaggacacagtgattcgcctttgccagtctcatctcgtgtctgctttgttaagttccatgatccagactcagcagttgtgg

SEQ ID NO: 180497 - DNA, 100 bp, Homo sapiens
tatttatggagcatatattatggaacacagtggatccataaagaacccagccaacccgcagagggaggggaggggctgagctgtgaggagagcggggccc

SEQ ID NO: 180498 - DNA, 74 bp, Homo sapiens
gccagcccgtgccgcgagcgcggcctgcaggagcagaagatggctgtgccacccacgtatgccgatcttggcaa

SEQ ID NO: 180499 - DNA, 75 bp, Homo sapiens
gcggtgcggaagggcacgtgcagcttcccggtcagggtgcctttcctgaagactatcttctggtctcgaaatgga

SEQ ID NO: 180500 - DNA, 100 bp, Homo sapiens
tcctttctccgcagctctgctcccctagcaacgctcgccacacccttgttttgagatcctctctaagcacacagcaagaaggaggccatcagcaaactgg

SEQ ID NO: 180501 - DNA, 87 bp, Homo sapiens
aaggggtgtttttccgtaagcatactcaggcagaaagtgaaactcttcactgctcacaacaatatgaccaactatgctaccgtatgg

SEQ ID NO: 180502 - DNA, 96 bp, Homo sapiens
tcgcagtccggaggtgaggcggaactctgaggagtatgctgctgctgttccgctttgcgtcctcgctacaaacgcctggtggacaacatattccct

SEQ ID NO: 180503 - DNA, 83 bp, Homo sapiens
tgaaggtgcgagaagaagtcagaaatctacagttactcacacaagtgctgtggccttgctggtgggagagaaggtacaagagg

SEQ ID NO: 180504 - DNA, 145 bp, Homo sapiens
aatgccatccagagctgtgcctcccagcaccacagtccttctgcagtccctcgtccagccacccccaggcatccgtgtcattctggaccttactcccaactaccggggtgagaactcgtggttctccactcaggttgacactgtg

SEQ ID NO: 180505 - DNA, 100 bp, Homo sapiens
gttcatcaccctcctgctcggctggtcctactacgcctacgccatccagctgtgcatagggatctaccgaacagaaagggacaaagggacattgtatgag

SEQ ID NO: 180506 - DNA, 100 bp, Homo sapiens
ggaaaaacccacaaacatgttcacaacgggcatgcaaatggttatgagccttagagtttctgaactccaagtactgttgggctacgccgggagaaacaag

SEQ ID NO: 180507 - DNA, 100 bp, Homo sapiens
cgtgtcgactcagatagcgtacgaagtccccaaaactgtaagctttgcgtcctcacagcaggtgtctcccggaggacccagaaattcggaacgttccctg

SEQ ID NO: 180508 - DNA, 99 bp, Homo sapiens
caggagctatatgaaaaaggttatgtgaaagatgtggatgatgggctacagattatgtctactttgagaattcctccagcaacccatacctaataagaa

SEQ ID NO: 180509 - DNA, 74 bp, Homo sapiens
ccatctcttcatcaccccaaaaggacctgactcaggcaaagatcttgcttctgaaatatctacctgggatggag

SEQ ID NO: 180510 - DNA, 75 bp, Homo sapiens
acaaaatgtcaacaaattgatggataggaatgatgtcacaggtggaagaagagacccaaatcattctgaaggctc

SEQ ID NO: 180511 - DNA, 50 bp, Homo sapiens
tggggatcctctgtacgcccgttcactgccccacaccagtgagaagcatc

SEQ ID NO: 180512 - DNA, 98 bp, Homo sapiens
taatgtgacacagattgaagatgctgtctcctctgaaaattcaggtggccgcaaagactgtctttgaaggcttcacagagggtgagctcacattccag

SEQ ID NO: 180513 - DNA, 101 bp, Homo sapiens
tggaagcagcaccatcggggagacaagcaagcctctactacgtggacagtgaagggaaccggatttcaggggccaccttctctgtaggttctggctctgtg

SEQ ID NO: 180514 - DNA, 100 bp, Homo sapiens
ggaagatttctttcatcattggtcggcataaagttcgaacgacaaggagactggctttcacagaggtttgggttgggttcagttttcttcagaagaagga

SEQ ID NO: 180515 - DNA, 100 bp, Homo sapiens
aagaagcttagggaagaaaggctcccgggccgttgctccagggagaactgcaaatatcttcatccacccccacatttaaaaacgcagttggagataaatg

SEQ ID NO: 180516 - DNA, 85 bp, Homo sapiens
agcttcctggggatggtatgctggatatacaggcctaagatctggcaaacttggtgaacagtgtgaagcagttgttcgctttccc

SEQ ID NO: 180517 - DNA, 101 bp, Homo sapiens
gtgccgcgttcctgctgctctgcctgctccacaagcggcgccgcgccctcggcctgcacggagtggagactgctgcacggactctggaaccatgaacatat

SEQ ID NO: 180518 - DNA, 74 bp, Homo sapiens
gcatcctcatataattaaactaatttacatagtacatgacgaagttaaggataaagcttttgaactagaactca

SEQ ID NO: 180519 - DNA, 83 bp, Homo sapiens
catgatgctgccatctttccaggaggctttggagcggctaaaaaccttgttcagcctgcaggacctctgctgccgggccatcg

SEQ ID NO: 180520 - DNA, 76 bp, Homo sapiens
gcgaaggtggcggcgctgctgctcgggctgctcttggagggccgttgctccagggagaactgcaaatatcttcatc

SEQ ID NO: 180521 - DNA, 97 bp, Homo sapiens
cgctccgtggccttagctgtgctcgcgctactctctctttctggcctggaggctatccagcattgcctgtgccgctgttgactgtgtcaaagacaag

SEQ ID NO: 180522 - DNA, 90 bp, Homo sapiens
agaacttctgccacattcgctttgctgaggagtacatggtggacaaagccctgtatctgtctggtaagaagcgcaattccacactctaca

SEQ ID NO: 180523 - DNA, 100 bp, Homo sapiens
gagcactaagatcggaagatgagtgagcttgaccagttacggcaggaggccgagcaacttaagaaccagattcgaaaacgtatgtttgtgggatactctt

SEQ ID NO: 180524 - DNA, 106 bp, Homo sapiens
ggcgggtggaggttcgagcgctgttctcgctccggagccgctgcacatttcggtcccagcagctggggttccccctcagcccgtgagcagccatgtccaaccccag

SEQ ID NO: 180525 - DNA, 75 bp, Homo sapiens
attatttgtggtgtacttctgggaccttcaggactaaatagtattaagatgattaaacttcaggaagtatttaag

SEQ ID NO: 180526 - DNA, 123 bp, Homo sapiens
gtgctacaaacaagctcatctttggaactggcactctgcttgctgtccagccaagttcatcatgcctagtggcgtataagaagaccccgccaccggtccctccacgcaccacttcaaagccgt

SEQ ID NO: 180527 - DNA, 138 bp, Homo sapiens
ctccgcacaggcggggggcgtaggcgcgcggggcccgccatggctgcgtcggagctctacacaaaggtactccaaagattcaggtttactcacgtcatccagcagagaatggaaagtcaaatttcctgaattgctatg

SEQ ID NO: 180528 - DNA, 100 bp, Homo sapiens
gccgtccagcagatggcggatgccctgcagtacctgcagaaggtctctggagacatcttcagcaggggattacagtgacgcaattgagacgctgctcaca

SEQ ID NO: 180529 - DNA, 100 bp, Homo sapiens
ctggggcctggaccagcctcttctgaaacactggggagccagtggggtgggtcgcagccacattaagaatgccctgctcagccagaatccggagaagttt

SEQ ID NO: 180530 - DNA, 116 bp, Homo sapiens
ctatggagttctggaacgggactttgcagaaatgtgtgcagactacatggcatctaccataggggaactttatattgctgttggaatatctggagccatccaacatttagctggga

SEQ ID NO: 180531 - DNA, 98 bp, Homo sapiens
gggtgaagcctcctgcgccggccttgcctcggatccgtgattctaactgcaactatgaggcctttatgaacattattaaattgagtgacaatattgga

SEQ ID NO: 180532 - DNA, 98 bp, Homo sapiens
accaaagggccggttggagactctcaccttggagagatgaagtggctgtaattgatgaaattcaaatgattagagatccagccagaggatgggcctgg

SEQ ID NO: 180533 - DNA, 97 bp, Homo sapiens
cattttgttaagaagcacctcatgcaagcgagggacctgggactgctcacagccaggtgtcatggagaaactccagctgggcccagagattctgcag

SEQ ID NO: 180534 - DNA, 95 bp, Homo sapiens
cttcctctgctcgcggttagcccgtcagtccctgctctgtgcgcgcctccatctgggccatggatggctgttcgggggtcttgtctggattttgg

SEQ ID NO: 180535 - DNA, 75 bp, Homo sapiens
aaatgattttgctagtacagttcgtatcctagaggttgttaaggatctagtttgaagcactaagaagaataagac

SEQ ID NO: 180536 - DNA, 101 bp, Homo sapiens
ggaatgcaccacagccatctcacatttccaagtacattctcaggtggagacctatgaccaaaatgttagacttgcttgaggacttcttagactatgaaggc

SEQ ID NO: 180537 - DNA, 90 bp, Homo sapiens
cctggcaaccaccccgtctgagaaatatttcacattttcaggaacaaaatgatttaaaagcattgctagaaaatctccttcaaaatatcc

SEQ ID NO: 180538 - DNA, 98 bp, Homo sapiens
cgcctgccctcagccgcccgctggccgggagcggagcccctgtggtgatccgtatgtgaaactttcattgtacgtagcggatgagaatagagaacttg

SEQ ID NO: 180539 - DNA, 100 bp, Homo sapiens
ctcctacgcctgctagtcctgcatcgaacagagctgttaccccttctagtgaggaaacctctgtagaggagcaggatgcaaccgacaggctgtggccgga

SEQ ID NO: 180540 - DNA, 88 bp, Homo sapiens
ctctctcaactctctcccttaagcactgggatcagcagaaggtgatttactacctctgcatcttattgaaagatccagtggaaccaca

SEQ ID NO: 180541 - DNA, 75 bp, Homo sapiens
atgcttgaggctccttacaagaagcagcccttgccttttctcttgcagcaacagcccaggctgctccaaggatca

SEQ ID NO: 180542 - DNA, 101 bp, Homo sapiens
ctgctggagcgcgtggaggagccggtgctgcagaaccagatccgggagcacgtcatcgccatcgaagggcaactccaacaacattgccaccgtggacatct

SEQ ID NO: 180543 - DNA, 98 bp, Homo sapiens
taaaaatccttgtatattttttgaacctaaaatactttacagggcagcagataagcgtgtggaaaattggcctctgatgcagtctccttggcctacac

SEQ ID NO: 180544 - DNA, 104 bp, Homo sapiens
ggcactaccaccctcaccccgtcctcacaaggccgggttctgagcttgttccgcctccctcccccgggaatggcgctatccgggtcgaccccggccccgtgctg

SEQ ID NO: 180545 - DNA, 50 bp, Homo sapiens
caggtccaggaggagctgggggagcgggcccaggcggccctgcaggcggt

SEQ ID NO: 180546 - DNA, 98 bp, Homo sapiens
gacagaacatgatgttgacacgggctgggcgcccccagaagcccgggaacaaacgtaccacaggttgaagtgtatttttttgtggaactatatgaagc

SEQ ID NO: 180547 - DNA, 82 bp, Homo sapiens
ggagtggacatcagccccaaacaggacgaaggcgtgctgaaggctgaaggtgatgtggccgccctcaaccgacgcatccagc

SEQ ID NO: 180548 - DNA, 82 bp, Homo sapiens
gcaaccgcatcgtgctgcctttcagtttcgcctggccgctgccccagagcacatcagctatgtgccccagctctcaaacgac

SEQ ID NO: 180549 - DNA, 98 bp, Homo sapiens
ccccagggctgccaacagtaccgcaaggaccccaaagagtgctgcaagttcatgtgtctggacccaggtggcaactatggcggtggtcctggttatag

SEQ ID NO: 180550 - DNA, 99 bp, Homo sapiens
agaagaaagattctggaggaaaggtttacaagcaggccacgattgaatctctgaagaccaagatacttggtagtgaccgggtgaagctgatggagagtc

SEQ ID NO: 180551 - DNA, 82 bp, Homo sapiens
cgagcacccgcctccgggcatcttcaactacatatcaagtggatttgaagcccaatgggtcagaaataatggtcacaaatga

SEQ ID NO: 180552 - DNA, 100 bp, Homo sapiens
gtccgagccagccgctgttttgccggaggagcccctcaggcctgtggacgaatgtggaacctcgctctgtggctgtgttcccttggcactccttagtccc

SEQ ID NO: 180553 - DNA, 98 bp, Homo sapiens
cgccgagcccgacctcgggcgccccgccggtcacctccgcgcggacaccaggtcgtccctgatggcccctggaggcgaagctcatcacaggatgagga

SEQ ID NO: 180554 - DNA, 75 bp, Homo sapiens
tcgtcttccacttgcacgaaagctttcctaggccaaaaagaggttcacctttccttgccagtgaagatggcgtgc

SEQ ID NO: 180555 - DNA, 100 bp, Homo sapiens
ggcgtttgtcatcagaatcagagggccttccggagcagtactacagcctcacctggttcctgagccccatccttggcctcatcttcacacctctcattgg

SEQ ID NO: 180556 - DNA, 100 bp, Homo sapiens
agctgctgtggagcacccagaagcagggctcgaagggagtattgggagaatctgctgccagcttcaggcagacctttctgtccttcgctgtcaaagccag

SEQ ID NO: 180557 - DNA, 98 bp, Homo sapiens
tgaggaggaagggatggctgtggatctgctgtctgctcagacttaattcagtgcacaaatgagatgaatgtgaacatcccacagttggcagacagttt

SEQ ID NO: 180558 - DNA, 87 bp, Homo sapiens
ggagaacaagacccgtcttcgtgttgtcagaggagacagtagcctgagcaaggttgctccttgagggcaggacagttcttatggctt

SEQ ID NO: 180559 - DNA, 89 bp, Homo sapiens
caataaacttgatcgcattatggccagcactattaagtccaagtggtaagaagttcagaagcaagcctcagttggcaaggtacctggga

SEQ ID NO: 180560 - DNA, 83 bp, Homo sapiens
ttactataaactggcaagaggatggcctgaagtttgggctggaagtagtgttgcggagataggaacatgggagagaaacaatc

SEQ ID NO: 180561 - DNA, 100 bp, Homo sapiens
tttggggtgaaatgtgaggcgtgtcaccagtttatcacagggaaagtcctggaggacctgaaggagaagaaggagaaggtggaggagaaggcaagccgga

SEQ ID NO: 180562 - DNA, 100 bp, Homo sapiens
gctgccgtcaagatggaggggcctttgtccgtgttcggtgaccgcagcactggggaaacgatccgctcccaaaacggggatggagaagtttatgtttggg

SEQ ID NO: 180563 - DNA, 75 bp, Homo sapiens
atcgactgtctggctgcctggggttcctctcctggctgaaatttatggtatagaaggaaacattttcaggcttaa

SEQ ID NO: 180564 - DNA, 83 bp, Homo sapiens
agagtggatgggctggcatttgtgaatgaggacatcgtgggagcagctgatgagccagatccgggagacgcagcagctctgcc

SEQ ID NO: 180565 - DNA, 75 bp, Homo sapiens
gcacccaaactttgcaaggaattcggtccagaggattacggcgaagaggcctgcactgcccaaagtcttggaaac

SEQ ID NO: 180566 - DNA, 101 bp, Homo sapiens
cacagatctacatctgtctccagaaaccagcagatattcctgcgggacatagaacaggtgccacaggaataaatccagatctactactgaactggatgatt

SEQ ID NO: 180567 - DNA, 87 bp, Homo sapiens
cccaactgcatcctcctggccatgttcctcgtccactacgggcatcgaaatgcactcggtgatggaaagagagccactattctgaag

SEQ ID NO: 180568 - DNA, 80 bp, Homo sapiens
aagctcaccgcttacctgccggctatgtcggaagacgacgaggactgctatggcaatgcttcaacggaccacaccaaaat

SEQ ID NO: 180569 - DNA, 100 bp, Homo sapiens
tatttgagcagccagagtctgtcgtgaacacaatgagaggaagagtcaactttgatgactatactgccctactgccaataaagggaaaataagagatgct

SEQ ID NO: 180570 - DNA, 50 bp, Homo sapiens
ggacatcctggaagctgggaaatgccattaagaagcctgtgggaaagaca

SEQ ID NO: 180571 - DNA, 74 bp, Homo sapiens
gctgtcctcgtccccagcggtcccgcccaacgcccgactctgtaagaatgattgatgttggctgatattggagt

SEQ ID NO: 180572 - DNA, 75 bp, Homo sapiens
agaaggagctggcggacatcactttagaccctccacctaattgcagtagccggatcgagctgggagatgtgacac

SEQ ID NO: 180573 - DNA, 75 bp, Homo sapiens
gactgtaagcaatctacgaagaccgaggaaaagctgcggttccgagactactgtgctatctgcttaagatgggag

SEQ ID NO: 180574 - DNA, 73 bp, Homo sapiens
ccaaacccaagttggttggagatgtggattttgaaggagccaaggcaaagagggaccactgtgctcatggacc

SEQ ID NO: 180575 - DNA, 87 bp, Homo sapiens
cacattgccaaccggagttccccaagtagagatggtttcagcatgttggccagtctggtctcagactcctgacctcaagtgatccac

SEQ ID NO: 180576 - DNA, 100 bp, Homo sapiens
agttcttcccatccgtgtccctgggggaccccacgctggagacgctgctcaggcagtttggactacaggacactctgattgtgtggtctgaagcagaaaa

SEQ ID NO: 180577 - DNA, 95 bp, Homo sapiens
caggagggggaccaggtggctctcacatggggggcttgatcatgggcacaggcatcgagtcatcatcccacaagtacggcctgttccaacacatc

SEQ ID NO: 180578 - DNA, 100 bp, Homo sapiens
ctcaccgctgctaaggaggagtctggtggccgaagccgtagtgggagtattgtggaacttataggtggtgaagcagtattttccaatttgaagattcatt

SEQ ID NO: 180579 - DNA, 80 bp, Homo sapiens
ctgaagtggaagacagcattggtactaatggccaactcaaggtctcaacaaatggcagctattacatcagacagtgacga

SEQ ID NO: 180580 - DNA, 100 bp, Homo sapiens
cgaaacgggaattgctgctttgaggagagtcttgacggcctatgcccaccggaaccccaagattggatactgccaggtggggtggaagacaacccgtgag

SEQ ID NO: 180581 - DNA, 75 bp, Homo sapiens
ttccttctccagggagagtcgctgcagccagaatctggtgatttagaagagaagattgaacaaccaagatgaaaa

SEQ ID NO: 180582 - DNA, 100 bp, Homo sapiens
gaggcgagctcgcgatgagtggtctcggcaggctcttcgggaagggggacaggcaaatggtatgaattacaagacctccaggtgactgacatccttcccc

SEQ ID NO: 180583 - DNA, 74 bp, Homo sapiens
acttaaatacttgacatctaaaatttttggtattgcagatgacgctggtgtgcaatggtgtgatcttggctcac

SEQ ID NO: 180584 - DNA, 93 bp, Homo sapiens
ggcaaaggcaagagtaacagcagcgccgtcccgtccgacagccaggcccgggagaagtgcgcgcggagccatggttatcatgtcggagttcag

SEQ ID NO: 180585 - DNA, 97 bp, Homo sapiens
gtggtgaaaacaggagttgtgccccaacttgtgaagcttctaggagcttctgaattgccaattgtgaacggccggtttgtgggcgatgctgaccttg

SEQ ID NO: 180586 - DNA, 75 bp, Homo sapiens
ctggagcctcagttggaagcagccgatccagcctgcggagcctgtggggcaggtctttcactaccattcctacag

SEQ ID NO: 180587 - DNA, 83 bp, Homo sapiens
tatactcctcccagtgacgggtctggagtgcgtgggggaccggctgttggcggtttttggtgttgagccagacttgaccaggg

SEQ ID NO: 180588 - DNA, 75 bp, Homo sapiens
cgagaaaccatgagtgtaaggttaccccagagtatagacagatatgatgcttcctggtgtgtttagtggttggtg

SEQ ID NO: 180589 - DNA, 108 bp, Homo sapiens
gtctgcaaggcctgcatgaaggagaacagacgcatcactggccgagcccactggggctcacaccacgcagaaaccagcctggacaccaagtctgtgtcagaaggccac

SEQ ID NO: 180590 - DNA, 89 bp, Homo sapiens
tggtgttccttgactggagacaacctgcagcctcctggcaccaaagcaacatggccaatctttcctaagctgctcagcttacaagaaaa

SEQ ID NO: 180591 - DNA, 100 bp, Homo sapiens
ctcagacatactccatagatattaatggctatattcttgtgtattctgttacatcaatcaaaaggagctacagggagctggccgactgcacctggcacat

SEQ ID NO: 180592 - DNA, 100 bp, Homo sapiens
tgtccgagttgccgccggagaggagtggcctcgcccgcttgagagcggaacaggcgaggaaaagtagtcccttctcggcgattctgcggagggatctccg

SEQ ID NO: 180593 - DNA, 87 bp, Homo sapiens
gaaggaacgcgacggcggcgcccgcagacatccgggaactgatcgaggtggatgatgtaatggaggatgattctctgcgattcggtc

SEQ ID NO: 180594 - DNA, 73 bp, Homo sapiens
cactggtagcccccacccctctccgtccatggccccagatgacacttcaggagctggaaaatgcagaatttat

SEQ ID NO: 180595 - DNA, 75 bp, Homo sapiens
ggaactgaaggagcggatcagagagtatttaaaggctgaagacctaactgcagcatgtctgtatttggagatggg

SEQ ID NO: 180596 - DNA, 75 bp, Homo sapiens
catttatgccgtaacaccgttacttgaagatgctttaatggataggtgtgatgttagctgttgatgctgtaattg

SEQ ID NO: 180597 - DNA, 113 bp, Homo sapiens
aggtcctcgggggcggcggccacgccaaggacggcatttaaatcaaacggtattgagatggattgggttatgaaacataatggtccaaatgacgctagtgatgggacagtacg

SEQ ID NO: 180598 - DNA, 75 bp, Homo sapiens
taacacctctgaaattgaggaagaagaggtggtgaagcagtattttccaatttgaagattcatttgaaggtggct

SEQ ID NO: 180599 - DNA, 74 bp, Homo sapiens
ctcaggacacggcctacaacaccaagagggccaattcctgtccccccagcagcatggcatcgtgtgctgaaccc

SEQ ID NO: 180600 - DNA, 97 bp, Homo sapiens
gaagtggagaagaaatcagtcagccgcaggcaatgaatcgctccctggctaatgtgattcttggaggctatggcaccacttcaacagctggtggaaa

SEQ ID NO: 180601 - DNA, 83 bp, Homo sapiens
atcttcaaccttgcagatacacatctgttcttcaatgacctggaggaactgtggctgcaccatctgtcttcatcttcccgcca

SEQ ID NO: 180602 - DNA, 100 bp, Homo sapiens
ggtatcattacccacatcctacctgaagatcatcttcttttggcttcttcaaagagggtgaaagctgtgctcaagtacatgggcgactacccgtccaaga

SEQ ID NO: 180603 - DNA, 98 bp, Homo sapiens
atgaccacaaacagccatcaagctcagaattctgcaaatgcagattttgcaaactttgatgcatttggacagtctagtggttcgagtaattttggagg

SEQ ID NO: 180604 - DNA, 82 bp, Homo sapiens
ctcgggccctgcccctacatttggagcctggacacgcagtacagcaagctgttcttccacctgtcccgggagcgtgtcttca

SEQ ID NO: 180605 - DNA, 73 bp, Homo sapiens
tcggcaggaagtgggaccggtgtctggcggatgcggtcgtgaagatagatggagaaggatgaaactgtgagtg

SEQ ID NO: 180606 - DNA, 143 bp, Homo sapiens
gccgtcaagatcctcaagaagaagaagttgcgaaggatccccaacggggaggccaacgtgaagaacgcccgggggctggagaaggccaggcagcagctgcaggaggagctccggcaggtcagcggccagctgttggaggagag

SEQ ID NO: 180607 - DNA, 50 bp, Homo sapiens
ctcaagtgcttctgcattacagtgtgggttgctgaccgaggaaataaaag

SEQ ID NO: 180608 - DNA, 100 bp, Homo sapiens
ctgctggcgctctggctgtgctgcgcggcccccgcgcatggttagtggatgacagatgtgtggtgcacccagaggccggggaccttgccaaccctcccaa

SEQ ID NO: 180609 - DNA, 75 bp, Homo sapiens
ctttgggacgagtgctgtgactgtgttgctgctgataaagatgatagttcagaagacatttcagtgccgagtagt

SEQ ID NO: 180610 - DNA, 75 bp, Homo sapiens
ctgctccttgcagccatgctcctgggcaacccagcctcctgctcttcatggatgaagcagacgccttccttcgga

SEQ ID NO: 180611 - DNA, 75 bp, Homo sapiens
caccggatcaacttcgacaaatacaggctctccccggaggctcagccccctctgctccccatgggcaactgccag

SEQ ID NO: 180612 - DNA, 100 bp, Homo sapiens
gcaatgaggccaattcgaagtggttggatgcgcactacgacccaatggccaatatccacaccttttctgcctgcctagatttggtgcttccagatgtgag

SEQ ID NO: 180613 - DNA, 74 bp, Homo sapiens
ggagctggggctactgctggcaacattcctgtgtatgcaacagcgttattgcaacaggctaacgaaaacagaca

SEQ ID NO: 180614 - DNA, 82 bp, Homo sapiens
gcgtcctctggggctgcttgctgaccgcttcgtgagatggagaataaagaaactctcaaagggttgcacaagatggatgatc

SEQ ID NO: 180615 - DNA, 114 bp, Homo sapiens
ccgggagcgccgagcgtcgccgccgccgccgccatgaacaactcgggcgccgacgagatcgggcaagagcggtgagcggggcgcctatgcctccttcgggagagacgcaggcgt

SEQ ID NO: 180616 - DNA, 96 bp, Homo sapiens
tggagatgtccgagcccaaggcaattgatcccaagttgtcgacgaccgacagggtggtgaaagtcttgctggaatgagtacctgacaactcggatc

SEQ ID NO: 180617 - DNA, 90 bp, Homo sapiens
ctcggtcagtggactcttattcttcaactcagcatgttcctaccacattgtgcaacacatcattggacaacccaacccagagaaacaagg

SEQ ID NO: 180618 - DNA, 82 bp, Homo sapiens
ggggtcggcgccgagtgggaggatggcggaaatggactcaccctgtcacccaggttggactgcactggcctcaacctcctga

SEQ ID NO: 180619 - DNA, 75 bp, Homo sapiens
cgcagccctcatcctgccatacagcctctgcagatagctttggctctgcggcactgtcacttgttaaacattgcg

SEQ ID NO: 180620 - DNA, 82 bp, Homo sapiens
ggccaatgtcagagaaatctttgacaagcccaagccttgtcagtactgtaacataattgcagcatttattggtaccaagtgt

SEQ ID NO: 180621 - DNA, 100 bp, Homo sapiens
tctcttacgtctgcggaagtgcagctgcctcagttcttagcgcagggctgatggagttatgagaacaatgaacacagaaaaactcctaaaaactgtacca

SEQ ID NO: 180622 - DNA, 76 bp, Homo sapiens
agacctttctgtggaaatagatgacatcaataccagtgataagttttctgaatttccagatcccatgtggggttca

SEQ ID NO: 180623 - DNA, 115 bp, Homo sapiens
gtcggctactgcgacgccaaatacgtctgggcagccacggccgggggcgtctttcagagcattacggaattgaatgatctggcacgggaccctccagcacagtgttcagcaggtc

SEQ ID NO: 180624 - DNA, 90 bp, Homo sapiens
tggaggttcgcggctctaacggggctttctacaagttggaatgccaagatgccttggaaacagcagcccgagccgagggcctctctcttg

SEQ ID NO: 180625 - DNA, 51 bp, Homo sapiens
ttcttgcatgcgagggaccattgcgttgacctgacagttcaagaaaaggag

SEQ ID NO: 180626 - DNA, 50 bp, Homo sapiens
agctggtgcctgtgcaagttgttgaggccgttcatattctgtgtgttctc

SEQ ID NO: 180627 - DNA, 96 bp, Homo sapiens
gtgggagcccctgctcctgcctcccccgtcccaccactgaggctgttgggccaggccagtcatgctagaacatgatggatgccaaccagcgctggg

SEQ ID NO: 180628 - DNA, 76 bp, Homo sapiens
agatgagaatatggttttggcatcttataaacaagttatgcaaagggtgacctggacatatcttacatcacatcca

SEQ ID NO: 180629 - DNA, 98 bp, Homo sapiens
gggctgcaacctgcagcacatcagcgaccgggagaacatagacgtgagtgacctgcaggaagaaggcaagaatgccatcaactcaccgatgtcccccg

SEQ ID NO: 180630 - DNA, 100 bp, Homo sapiens
tatggcgtgggagaggccacagcccggactccatcgactcccccggctcttagactagtggtgagcttcttctccctcaagtcggactcggcgcccccct

SEQ ID NO: 180631 - DNA, 78 bp, Homo sapiens
agcactggggcctggaccagcctcttctgaaacactgggctttgtgcaaatgacatattagatggtgttgatgagttc

SEQ ID NO: 180632 - DNA, 100 bp, Homo sapiens
gccgagccgggatctcaggtcctcgggggcggcggccacgccaaggacgggtcatcatcagatttgaaatatttaaagtggatacaaaactatttcagca

SEQ ID NO: 180633 - DNA, 83 bp, Homo sapiens
cagagcgccgcgcacttcgtcatgttcttcgcgccctggaaaactttattctcaagagatttctcattccgcagaaataagga

SEQ ID NO: 180634 - DNA, 90 bp, Homo sapiens
cagggaactcaaacagcagatgcaggtgaaagaaaagatgttgtcccggttaagagtagtttccaccacttgtactttggcatgtcgaca

SEQ ID NO: 180635 - DNA, 156 bp, Homo sapiens
tttattatggctgctgttgtccaacagaacgacctagtatttgaatttgctagtaacgtcatggaggatgaacgacaggacccagatgatgtggtaccagttggccaaagaagagcctggtgttggtgcatgtgctttggactagcatttatgctt

SEQ ID NO: 180636 - DNA, 100 bp, Homo sapiens
ccatcttcttcggcgccctgcgctccgtacgctgcgcccgcggcaaggtgcataaggcaaatccaatacgcaagtaccagggtctggagataaagtcaag

SEQ ID NO: 180637 - DNA, 82 bp, Homo sapiens
gagcctgccacactactgccttccctgcaagaagtttttgcaagcatctcttccacagatgtaaaatggggtaaactgagag

SEQ ID NO: 180638 - DNA, 75 bp, Homo sapiens
cgggcagggctctaggaaacatatgttacgatagccagaatgtaactggtcactacatttccccctttcatgata

SEQ ID NO: 180639 - DNA, 100 bp, Homo sapiens
caaagatattcaaactctaaaccatctgaattggctcaatgatgagactgcttttcaggaagccttggacgctgcaggtgataaacttgtagtagttgac

SEQ ID NO: 180640 - DNA, 100 bp, Homo sapiens
ttcattgtggaagcagataccccaggaattcagattgggagaaaggagagaaaggaaagcgcgaggagccgccgccaccaccagcgcagcagtcctggag

SEQ ID NO: 180641 - DNA, 73 bp, Homo sapiens
cctgcacagagaagccctataatcacaggtctgatggggaccagtacagtggagcagctgctggagaatgtgt

SEQ ID NO: 180642 - DNA, 75 bp, Homo sapiens
ccgaaaggggccactccccaggatacctcgaacatacatatgatagttgagaaagacacatattctgatcatgaa

SEQ ID NO: 180643 - DNA, 100 bp, Homo sapiens
ctggaggtggactggagcagtgagaaagcaaaggctgctctgaagcgcacgacctccgactactttctccttcaaggcttttatcttgagaacatggtgt

SEQ ID NO: 180644 - DNA, 100 bp, Homo sapiens
cctagatggatatgtgatttctcagaaggaaaggtgccagcacgtgccctttggagtagtacagggaatgaagactcgaagaggagatgtcactttcctg

SEQ ID NO: 180645 - DNA, 98 bp, Homo sapiens
tggcctggtctgctgatggccagggtgatgcccggtatctgatctccaactctaaagaccagaccatcaaactctgggatatccgacgcttttccagc

SEQ ID NO: 180646 - DNA, 87 bp, Homo sapiens
ctgtccgggctgtgagcaagaggaagctgcagcccacccgggcagccctcaccctgttgtcgagatgtccacagaaggaggatttgg

SEQ ID NO: 180647 - DNA, 88 bp, Homo sapiens
attaaagacctggaaaccaagtcatatgaagctatggagttactagtagagaaagcaatcagcagtgcttctagccctcagagccctg

SEQ ID NO: 180648 - DNA, 50 bp, Homo sapiens
ccgacgccgtcgcggtggactgcaagggcgtctctggccgagcctctttt

SEQ ID NO: 180649 - DNA, 100 bp, Homo sapiens
gggagccgtggagggaactttcccagtccccgaggcggatccggtgttgcatccttggagcgagctgagagctcgagaaaccaaagcccaaaccccggcc

SEQ ID NO: 180650 - DNA, 100 bp, Homo sapiens
gctttagccgagagtacacagctgctgtagaagccaaacaagtgggtcgagtcccagacaccagaagtctgaatttggagaaggctggggtagatactag

SEQ ID NO: 180651 - DNA, 100 bp, Homo sapiens
atggatgatcgagaggatctggtgtaccaggcgaagctggccgagcaggctgagcgatacgacggtctccaattgagaaacatggcactgtttttcctgc

SEQ ID NO: 180652 - DNA, 100 bp, Homo sapiens
tgaaccaaggtgacttgaaaatgccaacctttgagtcaggtaagtcaaatctcatggatgccatcagctttgtgctaggtgaaaaaaccagcaacctgcg

SEQ ID NO: 180653 - DNA, 75 bp, Homo sapiens
cagagagcagagacatcccgatctggggaaaccctctttcccagctgcccgctcctcagcacccgaagattcgcc

SEQ ID NO: 180654 - DNA, 96 bp, Homo sapiens
aacaaatcaagcacatccttgctaatttcaaaaactaccaggtagcgctggtatatggtcaaatgaatgaaccacctggtgctcgtgcccgggtag

SEQ ID NO: 180655 - DNA, 101 bp, Homo sapiens
cgtgcctgtcttcagatcttcacagcacagttcctgggaaggtggagccaccagcctctccttggggagcgtgttcaatacgtggaaacccatgtgggttg

SEQ ID NO: 180656 - DNA, 100 bp, Homo sapiens
ggagacaggtgctctcggttgcacaataaaccgacgtttagccagatgaagactggcccatttgcagagcactccaaccagctgtggaacatcagcgccg

SEQ ID NO: 180657 - DNA, 74 bp, Homo sapiens
gacccggttccccggcccacagtgggggtgtgcaaacccgagagaactggtgccggtggtggtgtgcacattga

SEQ ID NO: 180658 - DNA, 100 bp, Homo sapiens
gtgtcattaatcgctcaccaagacacatgatagaagaaattgttctagtagatgatgccagtgaaagagtgtgaagcctcagtttaggtcatctggtggt

SEQ ID NO: 180659 - DNA, 75 bp, Homo sapiens
cagagatacttcaggaccatcacaaacagcttatgtgcgactggctcaacaattaccacctgacctgcagggatg

SEQ ID NO: 180660 - DNA, 75 bp, Homo sapiens
agatcatagcagagtacgatactcaggtcaaaggttttgaagggagcacctgtgagaggaatattgatgactgcc

SEQ ID NO: 180661 - DNA, 82 bp, Homo sapiens
aattttaccccctcccccctgagcccgaggtgctgacgtcgcaaaaaaattggatactctctattggaggcatcatcattct

SEQ ID NO: 180662 - DNA, 100 bp, Homo sapiens
cgctggacaaacactaggctcagccattccctgcacacctttgctaagccctcagaatggaacaatgacctgtgttcaacctcttggaagttccagttat

SEQ ID NO: 180663 - DNA, 75 bp, Homo sapiens
cagcaactggtctattatatcatttaaaccacatggctatctaaagaggcacgtgtggttctcaaatataggcat

SEQ ID NO: 180664 - DNA, 90 bp, Homo sapiens
ggaggaagaattcccaagccagagctttccagtcaccaggagactaaagtccatcaaaaacatccagaaaattaccaagtctatgaaaat

SEQ ID NO: 180665 - DNA, 100 bp, Homo sapiens
cggcggcgtggatggctccggcgcaggttttcctttggaatatggataaatacaccatgatacggaaactagaaggacatcaccatgatgtggtagcttg

SEQ ID NO: 180666 - DNA, 83 bp, Homo sapiens
cttcaccgccgcagaccccttcaagttctagtcatggttgtgaccgagattcccgacgagagagactgaggggaagagaggaa

SEQ ID NO: 180667 - DNA, 101 bp, Homo sapiens
gtgagaaagcttctggcaagaggtgctgatatcaacacggtcaacgtggacggcttgacagccctgcaccaggctaatggaggttggcaggatgctactac

SEQ ID NO: 180668 - DNA, 99 bp, Homo sapiens
gccacggtggataacgacaagaaaaacaatcgcttcaatgatgggaaggtggatcccgccgggaggtactttgctggtgtgtgcagtggcctcagggat

SEQ ID NO: 180669 - DNA, 101 bp, Homo sapiens
tggggcccaaagggaccataaagatgtaacaactccaagtttcctttggataatacacctgttcgaaatcggggcgatggagatggagattttcagttcag

SEQ ID NO: 180670 - DNA, 100 bp, Homo sapiens
cctgggcaaggaggactccaagaccttcgaccagctcaccccggacgagagcaaggagaggctaggagttgtggaaagtaaaaatgtagccctaccaaaa

SEQ ID NO: 180671 - DNA, 100 bp, Homo sapiens
ccgcacgccccgaccttccatccctcctgacaaggtgatccgggcgggccccgcaggaattttatcccctcaccggcctcacactagtatcgcatgtcca

SEQ ID NO: 180672 - DNA, 100 bp, Homo sapiens
cacgagtctcagtccgaccgggctagctttggcgaggggacggagccggatcaggagccgccgccgccatatcagataagaaggctgactgcacaatcac

SEQ ID NO: 180673 - DNA, 74 bp, Homo sapiens
ccgaggcaccgaggcactcagaggagggcagcgggtggcatgagacgtgggaacatgggccacctcacacggat

SEQ ID NO: 180674 - DNA, 73 bp, Homo sapiens
gtaaggaacggatatggtttcatcaacagaaatggcacctcgaaaggggaaggaaaagaaggaagaacaggtc

SEQ ID NO: 180675 - DNA, 119 bp, Homo sapiens
ggccgcccacgtagccccgcagctgcagccgcctgaccacggcgactggacttacgaggagcagtttaagcaggccgccatggcatcagatgaaggcaaactttttgttggagggctga

SEQ ID NO: 180676 - DNA, 98 bp, Homo sapiens
ttccaactgcgggacaggaagtggccgtagcggcttgttggataaggaggactgtgtccggggtccaacgatccttgtgtggagaagccgtgtccagg

SEQ ID NO: 180677 - DNA, 83 bp, Homo sapiens
taagcttcgaatggacagagccatccctgacacccggcatgaccagtcagcccaaggccaaccccactgtcactctgttcccg

SEQ ID NO: 180678 - DNA, 101 bp, Homo sapiens
cggacagtatgaggcaagcgcagggggacggggaccagcagctgtcgccgccgctctcaggtagttcctgaaatgactgagatattgaagaaaaaatgaat

SEQ ID NO: 180679 - DNA, 50 bp, Homo sapiens
cgaatgaataatcaaaagtttccttgtttctatgcagattttggaccgct

SEQ ID NO: 180680 - DNA, 90 bp, Homo sapiens
gcttgtccaacagtatgggatgctgctggaacacagcttcactttgctgggcatcattgcagaatacaacaaaatcaatgatgtaaagga

SEQ ID NO: 180681 - DNA, 74 bp, Homo sapiens
cagatcaacggcaggagaggtttgttccctgacaactttgtaagaatttctcgaatgctggcagccaaaaccgt

SEQ ID NO: 180682 - DNA, 74 bp, Homo sapiens
ttttccccgctgctcaacgccatacagcaggtatgtgcactgcgcgtgaccagccgggcccgcagccgcatcct

SEQ ID NO: 180683 - DNA, 101 bp, Homo sapiens
acactggaaacaaacagtatttctactggaaaaaccattttcagttaaagcagggccaagaccagcttcaagtctccatggtaccagaaaacaacaacctc

SEQ ID NO: 180684 - DNA, 87 bp, Homo sapiens
ttccgccctaatggaggtctccagtttcggtgccatcatggaagaacaggcagcagaactccttggagtgaagatgtgcacgtttgt

SEQ ID NO: 180685 - DNA, 83 bp, Homo sapiens
ttcgggtgggagtgacccgattttccaggactaaaaacagcccttgtagaaagagatgatttctcatcagggaccagcagcag

SEQ ID NO: 180686 - DNA, 100 bp, Homo sapiens
ccaaactccaggctcagatgtcacaggaggctgaaccgtctgagcccagaagtgctgaggtgacgaggaagcccaaggctgctgttccttctgtgaacaa

SEQ ID NO: 180687 - DNA, 74 bp, Homo sapiens
ttaccatttggactccagtggtagctatggactgacaggctccaactacccgggactcagtattagccttcgcc

SEQ ID NO: 180688 - DNA, 96 bp, Homo sapiens
tcacagcctctggatgagagttggccaagtgctctggtctggggtctctctgtgaaacacaatcctcagaaagtgggtaaagaccatacgttggag

SEQ ID NO: 180689 - DNA, 98 bp, Homo sapiens
tcagaggagcctggctaagcaaaaccctgcagaacggctgcctaatttacagcaaccatgagatgcatcatcccattcagatgaaacctgcagatagt

SEQ ID NO: 180690 - DNA, 90 bp, Homo sapiens
ctgcttggcaaatcaggctgacctcgacacagagtggaatctgtttatagggccgttgttcgagagagaactgcaagtatcttcaccctc

SEQ ID NO: 180691 - DNA, 87 bp, Homo sapiens
acatgaagaccaatttttacgtctagatttccatgcccatggaaggattcactccttctccagttgcacagccacacccttcagctg

SEQ ID NO: 180692 - DNA, 98 bp, Homo sapiens
ttcgtacatatgagagggttgccttttcgtgcaactgaaaatgacattgctaatgaagatgagaatgtgcctactgctcctgatcctccaagtcaaca

SEQ ID NO: 180693 - DNA, 98 bp, Homo sapiens
accgagagcgcgaatatcgtcatcgttagaaggtcaggaaaactgccattgcctctgtgagcaccctgagaaataatgaaccaaattcacaatcaaaa

SEQ ID NO: 180694 - DNA, 75 bp, Homo sapiens
gtgatcccggcgacatactacctctggccccgagatcagaatgccgcggacaaggcaaaatctcagcaagttcgg

SEQ ID NO: 180695 - DNA, 83 bp, Homo sapiens
tgccattcctcatttggcctgagcagctcagagtcaggaagtcagagcgcagggacttccttccccgcggttcaggaatcgtc

SEQ ID NO: 180696 - DNA, 74 bp, Homo sapiens
attgaaggaggtggcttattgggtagatttagacgttactttacctggggaaggtggaaaagatcgacctttca

SEQ ID NO: 180697 - DNA, 75 bp, Homo sapiens
taatcccccaacgaggaaggaaggagcagttggttcaatctctgggttaaacccatccagagtaatggctgcggc

SEQ ID NO: 180698 - DNA, 83 bp, Homo sapiens
ctcgaagtgcgcaaacttgacactcaccctgaccgaacatccatgatagcagtcttctgtaaatcgaacttttcaagaattct

SEQ ID NO: 180699 - DNA, 100 bp, Homo sapiens
tgagttcctatccaaatacttttgaatggcaatgtaaacttccagccatcaagcccaagactgaatttcaattgggcatccgtgtcattctggaccttac

SEQ ID NO: 180700 - DNA, 75 bp, Homo sapiens
cagtctgcggccaagactccgtcctgcaagggagtccacggcctttgcggggaaacatgttgtattccggaagtg

SEQ ID NO: 180701 - DNA, 75 bp, Homo sapiens
gaaacatcattcacccatactgactagtttcacatctctttggagatacaactcgtcaacgaatcaaattcagtg

SEQ ID NO: 180702 - DNA, 74 bp, Homo sapiens
gaaggtccaggagtacccgaccctcaagcgtacacagactttactaaaagagtacaaagaaagggataaatcca

SEQ ID NO: 180703 - DNA, 74 bp, Homo sapiens
agcacctgggcgtccccaacgggcgcatgccatcccaggcctcaggacctgagttctccgacgcccacatgaca

SEQ ID NO: 180704 - DNA, 98 bp, Homo sapiens
catccaggccaccactgcggcgggctctggttatgagccagagttatttcctggtttaatctacagaatgatcaaacccagaattgttctccttattt

SEQ ID NO: 180705 - DNA, 50 bp, Homo sapiens
gtggagtccggcccccgaaagaggatacgatgaatggattaaagcagata

SEQ ID NO: 180706 - DNA, 75 bp, Homo sapiens
cgcgcgcagggcctgcagcgggagctggacggcgagcgcgagcggcgcgagaaatctgcgctcctcagaccaccg

SEQ ID NO: 180707 - DNA, 124 bp, Homo sapiens
ctgaagcccccgggcccactggtgccacctgaccagcaggacaaagtccagtggcaccagtgtcttgtcacctggactccacataggactaattattatactggcaataatgatctataaaaag

SEQ ID NO: 180708 - DNA, 96 bp, Homo sapiens
gcagttgccctctggcgccatgtcgcagaacggagcgcccgggatgcaggaggagagcctgcagggaactcgaatcatttatgacagaaagtttct

SEQ ID NO: 180709 - DNA, 78 bp, Homo sapiens
gacctgctgctggagacctggatctcgcgccacaaggagatggttctgcggggagtgtctccagccctgcctgcaggt

SEQ ID NO: 180710 - DNA, 90 bp, Homo sapiens
gcctacagaatggcaaagagtatgccgtcaaagtggagccgccaccaaaatgcagattttcgtgaaaacccttacggggaagaccatcac

SEQ ID NO: 180711 - DNA, 100 bp, Homo sapiens
gacttcctcaaggactacagtatgcacttaatgtccctcttgtgaaactttgtattgcaatgattgatactggaaaagccttttgtgttgcaaataaaca

SEQ ID NO: 180712 - DNA, 83 bp, Homo sapiens
agaaacattaccgtcatattccacccattactaaggtctcctaaaaacccagaacagaagatcattaagagagtgattgctct

SEQ ID NO: 180713 - DNA, 96 bp, Homo sapiens
ggaggggaggaggaggaggattcagggaataggagctggggagcccttctgcgccacagccgtgctatcaagactaatcaggaccttctcccagaa

SEQ ID NO: 180714 - DNA, 82 bp, Homo sapiens
tcctgcttctccttttcatgagtgttcctgtggtctctgcacctcctttctcttcagctttagctgcagctgcctctgttca

SEQ ID NO: 180715 - DNA, 87 bp, Homo sapiens
ggttctacttattcatcttctagaccacagaagtaaatggtttgtctcggaagagttgaagaatgctgaaatagctttaagaaccca

SEQ ID NO: 180716 - DNA, 83 bp, Homo sapiens
ctacgggaagatcctggaggtggatctgaagaacgggcggcgtgcaggaccagcggcggccgtgcaggcggaggacttcggcg

SEQ ID NO: 180717 - DNA, 124 bp, Homo sapiens
cccagatgcaggtggactagaacacgttcctctgggttggagttactggtatgccttgaaagtggaagatgcgaagattgcaattctcacatgtccatttgaaccacccaaaccaaaaacaaag

SEQ ID NO: 180718 - DNA, 90 bp, Homo sapiens
ggggaatagactccatctatccatatgagcatcttcctcatcgaccacgcctggacgtgccgtgtggagcacgcgcgccagcagctgcag

SEQ ID NO: 180719 - DNA, 82 bp, Homo sapiens
atagctgactactttgagacgagcagccagtgctccaagcccggtgtcatgtaatagcctgcagctggtgttttgagaagcc

SEQ ID NO: 180720 - DNA, 75 bp, Homo sapiens
gatggtcaattgccatgcacacttctggaagcgcatactgtgctgcctccgtagcctcgctgaccaacatcatca

SEQ ID NO: 180721 - DNA, 97 bp, Homo sapiens
ttcgcctccttcaccgccgcagaccccttcaagttctagtcatgtgaaggagaacgacctgctcagaatgagaagaggaaggagaaaaacataaaaa

SEQ ID NO: 180722 - DNA, 98 bp, Homo sapiens
taagaggaagaagctgcggacctcaggatatagctgacctggcatttgaggtatcagggaggaagcctcacccattccctagtgtcagcaaaataatt

SEQ ID NO: 180723 - DNA, 50 bp, Homo sapiens
gcagaaggagggagaccccaaaaagaggacctcattaatcaaggaagaga

SEQ ID NO: 180724 - DNA, 80 bp, Homo sapiens
ggaggtcctgccgtccatgcggaagatcgtcgccacctggatgctggagctgctgatgcaaggaatcccctgggctcccg

SEQ ID NO: 180725 - DNA, 75 bp, Homo sapiens
cagcgcgtcgtggggcgagcggcagcccgtggaccgggagcccgtggaccgggagccggtggtgtgccaccccga

SEQ ID NO: 180726 - DNA, 75 bp, Homo sapiens
taaggacctcaacccaggagttaaaaaggaccagcaacggagcgaggagctggctcgaatcatgggggagtttga

SEQ ID NO: 180727 - DNA, 82 bp, Homo sapiens
gtggaggtggccgtggaggcagaggtggcatgggtgcctccggagccagcgtggtggccatagacaacaagatcgaacaggc

SEQ ID NO: 180728 - DNA, 82 bp, Homo sapiens
ctcctcctccagcccatgaagcttatgaagaatatgagccctggcctccttgcagaaacatcgaggtgacatgtagcatgac

SEQ ID NO: 180729 - DNA, 80 bp, Homo sapiens
gtcagtgacgcgatggagcgggcaaggatattagaaatggctactccccagtcaattttcatctttgcaatctgcatttt

SEQ ID NO: 180730 - DNA, 83 bp, Homo sapiens
ccaacagcaggaatagctcccgagtggagcctttcaggctggcatggagagcttaaggggcaactgaaggagacacactggcc

SEQ ID NO: 180731 - DNA, 88 bp, Homo sapiens
ttactctgggagcccagaaacccgctgccgatgctgacctccagcaacatggccaatctttcctaagctgctcagcttacaagaaaag

SEQ ID NO: 180732 - DNA, 75 bp, Homo sapiens
gctttggagcctgagctcgaggcccggctggcgcacctgggcgtgcagatttggagcaagaggtggtggtggcct

SEQ ID NO: 180733 - DNA, 80 bp, Homo sapiens
aagttcatgtcacgctgggtaatgaggatttgactgtgaaggaatgaatctgaagtctgctgcagtaaaacacagaaggc

SEQ ID NO: 180734 - DNA, 80 bp, Homo sapiens
gcagtgctgaggcggaacaggccgggcaccaaggcgcaggggaatccgtaccagagtaccagatggcttttcagacagag

SEQ ID NO: 180735 - DNA, 50 bp, Homo sapiens
cccagcaacaattcttctgccagtctcaacaaggcaaaccgttaagaaag

SEQ ID NO: 180736 - DNA, 74 bp, Homo sapiens
gccttctgcatctggatctcttgttggaagagaaaatgaggccataggaaaaggatacagagtagagtttcatg

SEQ ID NO: 180737 - DNA, 51 bp, Homo sapiens
ggacttccaggtcacggaggaggtgaaacttggatttacactgggcaacgt

SEQ ID NO: 180738 - DNA, 83 bp, Homo sapiens
ccagtaccggggcatgggcctctctatgggcagtatgatctgtggctgggataagaaggttagctccattcagaaccaaatgc

SEQ ID NO: 180739 - DNA, 100 bp, Homo sapiens
cctgcagtacctgcagaaggtctctggagacatcttcagcagagactacccagtaaagaactaccagattcatcatctccagttccagcaaacaacatcc

SEQ ID NO: 180740 - DNA, 90 bp, Homo sapiens
ctgttagtgagtccacggttccgccaaggtatggaaaagttgaggccactcgcatattgttagagaaaggaaagtgcaatccaaaccttt

SEQ ID NO: 180741 - DNA, 51 bp, Homo sapiens
accgtcgcctcccactgcaaaaaggcctggctatatgttctcctttcagcc

SEQ ID NO: 180742 - DNA, 100 bp, Homo sapiens
ttcatggctgtgctcctggcagtctctggggttgtcattgtggtcctggcctcaagagcagtttgcctatctggggcgcctggctcacgaggttggctgg

SEQ ID NO: 180743 - DNA, 99 bp, Homo sapiens
ttcagctgttatgggataatatcaaccttcatcaggaaccaagagaacctctgtatgtctcatggaggaattttattgcagttgccaatacctatgcct

SEQ ID NO: 180744 - DNA, 75 bp, Homo sapiens
gctcccgaggaagagtgagggcgcgacgcgcaccaacggtggaggtatcgagaaccttccctgcgaacttcagag

SEQ ID NO: 180745 - DNA, 80 bp, Homo sapiens
ctgtgagggtttcaatgaggtgctgaaacagtgccgacttgcaaacgcatggcttctcgctgtttctgggatgctgacac

SEQ ID NO: 180746 - DNA, 74 bp, Homo sapiens
cacagccaagatgccgggaccccttagaagcctagaaatgagcaaatttttcagaacataaaacaagaatatag

SEQ ID NO: 180747 - DNA, 76 bp, Homo sapiens
ttgtattgctgttttggaaagaattagcagattggccgatgattcaggctgttgcttaccgtcagatgtctctgtt

SEQ ID NO: 180748 - DNA, 110 bp, Homo sapiens
gaagtgggtccttcaatagtgctgaaggctttgccgacttcagccagatgtccaaggtgagaagccctaccactgcaactgggacggctgcggctggaagtttgcgcgct

SEQ ID NO: 180749 - DNA, 83 bp, Homo sapiens
ctcttcgtggggcagcacaaaggtctttaactgctcatagtagtagagaaaagattgtcctgggtcacataatgccagctgag

SEQ ID NO: 180750 - DNA, 100 bp, Homo sapiens
ctcccagctgcgcaaagcttgcgaggtggcgttagatttcaggaatagagtcagatgatcattgtcagagagaacaggagcttcagaaggaaaacttgaa

SEQ ID NO: 180751 - DNA, 100 bp, Homo sapiens
ctgaagttcacgactactagaaggggaggggagtggaaaggctctcagtgaaaaagctccatcaagtatgatggtgaaggatgaatatgtgcatgacttt

SEQ ID NO: 180752 - DNA, 101 bp, Homo sapiens
ggcgttttcttggatgaattgcttgctttggagttaattggccttggtcctcacagctccaaaaagaaacaggatctcgataagctctatgagctgaagtc

SEQ ID NO: 180753 - DNA, 135 bp, Homo sapiens
tgtgaagtccgtccgggaaacggaggaaaaaaagagttgcgggaggctgtcggctaataacgggcctactctaggtgcggtacttcactatagtttataaaagatggtccctgtcagcaaagaactgtaacctgt

SEQ ID NO: 180754 - DNA, 85 bp, Homo sapiens
cacccacagcggggcggcggcggcggcggctgcggcccaatatagcatgcaatgatgctacctgttctgacccatcatatccgct

SEQ ID NO: 180755 - DNA, 90 bp, Homo sapiens
cctttgcctcatcccaggttgccttggaaaatgccaacgccgtgtctgaaggattacggggcgctgaaagacatcgtgatcaacgcaaac

SEQ ID NO: 180756 - DNA, 100 bp, Homo sapiens
gaaaaacgagccaaacttcgtgaaattgagagacgagttgtactgctgtcacaggaaatggacgctggattacaagcatggcagctcaggcagcagaagt

SEQ ID NO: 180757 - DNA, 99 bp, Homo sapiens
agatgagaaggctaaacataaccttagtcctttgaatgggacccttcattttgatgaggaaataaagtctttgcttttgctttttggaggtcagtttgc

SEQ ID NO: 180758 - DNA, 83 bp, Homo sapiens
ctcgctgggagagaggtacctctccttttccctctccctttccctaagccttatgccagcctggaccatcttggaggcagtgt

SEQ ID NO: 180759 - DNA, 83 bp, Homo sapiens
gccgccccgaaactttcaccgcgagcggcgcccgggagctcttcgccgcccgctcgcggtcgcagaagctgccccagcgctcg

SEQ ID NO: 180760 - DNA, 101 bp, Homo sapiens
tgcgactgtcgctgctttctgaggccacaggaaaggggccgtcggtcgccgccatgacagcgagcgaggcggagttacagaatgtctgaaggggacagtgt

SEQ ID NO: 180761 - DNA, 139 bp, Homo sapiens
ctggactgcaacctggctgtacagctcctcaagtgcaacaagtcccacttccgaaaccacaagtttgccgatctggtggatgattacgtggcctctgagggtgcagtacagcgagttctggtccctgcttatgccaagc

SEQ ID NO: 180762 - DNA, 97 bp, Homo sapiens
aggaagcagctctccaagactagtctcttccaaggaagatcttgcagctgcagatctgggacacggccggccaggagcggttccgcaccatcaccca

SEQ ID NO: 180763 - DNA, 83 bp, Homo sapiens
cagtcttcccgcgtccgccgattcctcctccttggtcgccgcgtccttggctggcgtaagatgcagatgcctccagctattac

SEQ ID NO: 180764 - DNA, 100 bp, Homo sapiens
gcccgccgctcctggcgctgctggccgcgctgctgctggccgcacgcggggctgctgcccaagtgttatgtgccaagaaccttgcaaagaaagacttctt

SEQ ID NO: 180765 - DNA, 100 bp, Homo sapiens
tcaataccccggcccctctgccgacctcttgcaatccaagtgacatgagccatgggtacgtgacagtaaagagctgagctcaatgtgcagcaatggatga

SEQ ID NO: 180766 - DNA, 100 bp, Homo sapiens
atggtcgcctgggtccctctgagccccggggcatctatgccagtgagaggcccaagtccctagttgttgacctcctgtactggagagacattaagaagac

SEQ ID NO: 180767 - DNA, 82 bp, Homo sapiens
caactggctgagggactcacagctgatgacctgctgctcgtgctgatctcagggaatgacgttggccggagctcctatggcg

SEQ ID NO: 180768 - DNA, 82 bp, Homo sapiens
cccaccgctgccctcagctccgagtccagggcgaggcacttccgttccggcgcccctccggtcatcaacccgctgggcacca

SEQ ID NO: 180769 - DNA, 116 bp, Homo sapiens
gaaggctcaagatggcgtgcttgttggagaccccaatccgcatgagcgtcctttcgtgctgaagctgctgaaagatggcagaagaagtggtggtagtagccaaatttgattatgtg

SEQ ID NO: 180770 - DNA, 125 bp, Homo sapiens
tggtgtaccaggcgaagctggccgagcaggctgagcgatacgacgatctttaatctcatgaagtacgacagctacagccgcttcttaaagtctgacttgtttttaaaacacaagcgaaccgagga

SEQ ID NO: 180771 - DNA, 75 bp, Homo sapiens
gaggacttaaatgaagccactgattagcaatttaaagatcctctccaaggaactgtggctgcaccatctgtcttc

SEQ ID NO: 180772 - DNA, 76 bp, Homo sapiens
gagcttatagaaactaatcaacagcttaggaagtaacagctagcagtcgccactatgttgacaggctatttgaccc

SEQ ID NO: 180773 - DNA, 106 bp, Homo sapiens
ctgcgcgaagctggccaaagcctgcccagacggctcacctgtgcgggatggaacaaaagaggctgaggggatctggcggtggagcgctaggatcagacgcccccgc

SEQ ID NO: 180774 - DNA, 100 bp, Homo sapiens
ccggctccgcagcaagatggcggacgagaaggacagggaagattctttgtgggaaagagattcctcgctggatcaatcgacttgcctacttcagctcctg

SEQ ID NO: 180775 - DNA, 75 bp, Homo sapiens
gggactctacctggggatatacatgcatgcaccaaaacgaggacaggaactctaactccttgccactcaagaaat

SEQ ID NO: 180776 - DNA, 82 bp, Homo sapiens
ctttatcctggtcatcttctatttccaaagtgatgtgtccaatctagatcccaacttctcatttgaaggcaccaaactggat

SEQ ID NO: 180777 - DNA, 100 bp, Homo sapiens
cagccctgtggagcctgtggtgaccaccgaaggcagttcgggtgcagcaggggccatcagcatcagcaaagccatcaacacccaggaggcccccgtgaag

SEQ ID NO: 180778 - DNA, 51 bp, Homo sapiens
ctccagccccagccccaagggcagaggaatgggtaccacagaccatgtcat

SEQ ID NO: 180779 - DNA, 75 bp, Homo sapiens
gagatcctcctgcatcagcctcccgaagtgctgggattataggtcacagggattatggacccagaacagatgctg

SEQ ID NO: 180780 - DNA, 98 bp, Homo sapiens
ggcattgggcgggggcttcacctgcagctgcccggcaggcaggggaggcgccgtctgtgagaaggatcacgagctgctcaggcaagagctgaacacgc

SEQ ID NO: 180781 - DNA, 82 bp, Homo sapiens
cttcagaccccaggttctttgcacctgaactcctggggggaccgtcagtcttcctcttccccccaaaacccaaggacaccct

SEQ ID NO: 180782 - DNA, 75 bp, Homo sapiens
cgcagtctccacacccgtcactgagagccgacctcggtcctcggcattgcgcgcctatgtgcttcccaagctgta

SEQ ID NO: 180783 - DNA, 100 bp, Homo sapiens
cgggcgggcccccggagacgcgcaggatgccacacgaagagctgccgtcgctgcagagaccccgctatggctgtcactggaaggactgagcgcattcagg

SEQ ID NO: 180784 - DNA, 82 bp, Homo sapiens
cggatggcagagtgtcccacgagttcccactgacaatgcagatcttcgtgaagactctgactggtaagaccatcaccctcga

SEQ ID NO: 180785 - DNA, 100 bp, Homo sapiens
agaatggcatgctggtgacggacagtgcagggaagcaactgcagaggattatgtatatcacgtagtgagtgcgatctgtgaatggacagtggcctttggt

SEQ ID NO: 180786 - DNA, 100 bp, Homo sapiens
tgaagtgacacaacacatgttttcttctggtatctggctaaacttcctgcctgacacagctcacttcaagaagtgcacaatgtcagaacgtggaattaag

SEQ ID NO: 180787 - DNA, 75 bp, Homo sapiens
ggcgtgagcgacagcggcaaagtgttttacaactgcagttgtttggaagtaactggtctccagaacagaaattac

SEQ ID NO: 180788 - DNA, 100 bp, Homo sapiens
tccaacagggatgcgctgagcgatttcttcgaggtggagtcggagctgggacggttggagtccgtgcggctggagtaccgtgcggggctgaagaacatcg

SEQ ID NO: 180789 - DNA, 75 bp, Homo sapiens
agaggactctgaggatagcaaatgtgttctaggtcagtggcttcaaagactccagttggattcattggactgggc

SEQ ID NO: 180790 - DNA, 101 bp, Homo sapiens
agataatgctgtatcactatttcagactcctcagacccctgcacaattgagagaaaagcccgaagaattagcgtgacctccaaagtacaggcagacatcca

SEQ ID NO: 180791 - DNA, 82 bp, Homo sapiens
ttatactcctcccagtgacgggtctggagtgcgtgggggaccggctgttggcggcacggggtcactctggtgcccattgagg

SEQ ID NO: 180792 - DNA, 97 bp, Homo sapiens
ggttgtgactttagtatacagtgtcatggagaaactccagctgggcccagagattctgcagcgggaaaatccaaggcttatttatgccaggctgagt

SEQ ID NO: 180793 - DNA, 98 bp, Homo sapiens
gtttcgacaggcagatctttattggatatgggccctcacattttccaaacctgtccatctgctaactattttgactgcagagccatgtccattggagc

SEQ ID NO: 180794 - DNA, 100 bp, Homo sapiens
cccattcatgtgcctccaggttatatctcacaggactttccttatcccagttgattgtgcagaatacactgcctgtcgcttgtcttctattcaccatggc

SEQ ID NO: 180795 - DNA, 100 bp, Homo sapiens
caagaagacaggcaaggaggtggtgctggagggaaaaccaattctgtgtcctcggaggaccacagcccagttgggccccaggcgaaacccagcctggagc

SEQ ID NO: 180796 - DNA, 75 bp, Homo sapiens
tgcggaaacagtatcggccagacatgattattttacagttacgatatcagaagtgcttggtagccaggccgcctt

SEQ ID NO: 180797 - DNA, 90 bp, Homo sapiens
atacatccaggaaagacatggagattctcttaaaaaggctcctggcgacctccctgctgcagggggccctcccagcggggccatgccctt

SEQ ID NO: 180798 - DNA, 51 bp, Homo sapiens
cttcaatactacctttatttccaccatagcaaattgtggctactaatttgc

SEQ ID NO: 180799 - DNA, 73 bp, Homo sapiens
gatatggtggcagtggggatggctataatggatttggtaatgatggtgcagtcagcctcagtttccaaagccg

SEQ ID NO: 180800 - DNA, 73 bp, Homo sapiens
ccaagctccctgcggggaagaacgtgctactgctgggacaaacagaggatgtgcagatgctcctgcgctttgg

SEQ ID NO: 180801 - DNA, 98 bp, Homo sapiens
cctgctgtggggactggcacggcaaggactcaagtgtgatggccctggccaacgtcaacattgggagcctcatctgcaatgtaggggccggtggacct

SEQ ID NO: 180802 - DNA, 100 bp, Homo sapiens
gggacggccgcctagagtggttcagccacaaggaggtatttcctgccaattcagacccagaaactccagtgctgaacctcctgccggagccccaggtggc

SEQ ID NO: 180803 - DNA, 100 bp, Homo sapiens
cctggaatgtgaagagacaggaggcagcagacggacatccagtatttaggtcagttaacgtccataccaggatacctgaatccctccagtaggactgaaa

SEQ ID NO: 180804 - DNA, 90 bp, Homo sapiens
taatctcattccatcttcattcatgactccagacagattctggaacttttcaaagcctgactctcttcttgaaacagtggagcatcatac

SEQ ID NO: 180805 - DNA, 100 bp, Homo sapiens
ggcactgctcctgctggccgcctggacggctcgggcgctggaggtgaatgaaaactttgccattgatttgatagcagagcagcccgtgagcgaggtggag

SEQ ID NO: 180806 - DNA, 90 bp, Homo sapiens
aattacaactgaagatataaaagctgcttttgcaccatttggaagaatatccgtactgtgaaccgagaggagctgctgaaacaggcggag

SEQ ID NO: 180807 - DNA, 98 bp, Homo sapiens
ggaagagccacgaacaggtgctggaggagatgctggaggctgggctggacccgagccagcgaccgaagcagaagatctgtgacttcctccgcggagcc

SEQ ID NO: 180808 - DNA, 100 bp, Homo sapiens
gccgagatgccgggggagcggggccttccacaccccctccgtgggtgtgtgggccaattcctgtccccccagcagcatggcatcgtgtgctgaaccctct

SEQ ID NO: 180809 - DNA, 75 bp, Homo sapiens
aagtacttcgacgaacactacgagtaccgactgtgccctgtccacggtgcctcctgcatgtcctgctgccctgag

SEQ ID NO: 180810 - DNA, 75 bp, Homo sapiens
cagatgaatacctgacaaagcagtggaagtatccaattgagcttcatgggattgctccttgcccgacttgaaggt

SEQ ID NO: 180811 - DNA, 100 bp, Homo sapiens
gaaaccgctgccaacactgtcgattacagaaatgccttgccgtagggatgtctcgagatggtactgcaactactgtgacttacagtgagacaaaagatac

SEQ ID NO: 180812 - DNA, 90 bp, Homo sapiens
tacaaggagaagcactggatccaaagcatgtctgcaacccagccattttcaggtctattattagcagaagatttttctgcatagttggca

SEQ ID NO: 180813 - DNA, 107 bp, Homo sapiens
agcttcatcaaaaatagtgatagctttgataaggtggttctcttcccaaagtggaagccaaattcatcaattatgtgaagaattgcttccggatgactgaccaagag

SEQ ID NO: 180814 - DNA, 101 bp, Homo sapiens
ttaacaatacagagaatcttgtgcgggaattgctatcagacactcctctaatttacaaagcagtgcccagctggtttgtgcgagtggagaacatggtggac

SEQ ID NO: 180815 - DNA, 82 bp, Homo sapiens
gccgatccagcctgcggagcctgtggggcaggcgttcctgttttaaatcctgccttggtccctcacctggcacaaggacaag

SEQ ID NO: 180816 - DNA, 71 bp, Homo sapiens
gcctcaggcctgcacggacggtgttggttgggattatcttgacaatggtaataataaaatggcaattcagc

SEQ ID NO: 180817 - DNA, 100 bp, Homo sapiens
ctggccagataaagagatgaccccagggaacatcctgaccaggggccctcctcgccaaagacagcctagagaggacggcaatgaagaagataaagaaaat

SEQ ID NO: 180818 - DNA, 75 bp, Homo sapiens
cgggtgggctttcgcccgcggctcctgagggatcggtctcagccgcgcgggtgccagatgtgacatccagatgac

SEQ ID NO: 180819 - DNA, 51 bp, Homo sapiens
gaagcagcggattcccaaagtggccaagaaaaagcttgtggtgaagggggg

SEQ ID NO: 180820 - DNA, 100 bp, Homo sapiens
tcgactacaagaagagggcggagcggagacgggagtattatgaaaagatcgacctcagcatggccctgccctcagggcaggtctgccacgaccagcagag

SEQ ID NO: 180821 - DNA, 85 bp, Homo sapiens
gcaactttgggcagactccctgtcagctgctgaagctgattgggcagaaagtggcccatgctctggcagagggactcggagtaat

SEQ ID NO: 180822 - DNA, 76 bp, Homo sapiens
gtaattgcaaagaagacgaacagaggaaggagatcttctcttcctgtgccatttccagcagtttaaaaggtttcct

SEQ ID NO: 180823 - DNA, 100 bp, Homo sapiens
ctgtagcccccccagtcagtggagacttaaccaaagagtgcttgacaacatgaagaaagctctcaagttgctgaagactgaattgtaaagaaaaaaaatc

SEQ ID NO: 180824 - DNA, 89 bp, Homo sapiens
cgcggccgcacggccctcggcagcgatggcactgaaggactacgcgctagagaaggggaaatcctcattgacgattcaatttgttgaag

SEQ ID NO: 180825 - DNA, 100 bp, Homo sapiens
ggagggctccgctagcccggggggccctccccgcggggcagatgacactacaacaacaggagtgcaaacttctctacagccgaaaagagggtcaaaggca

SEQ ID NO: 180826 - DNA, 100 bp, Homo sapiens
gtgggcctctgagatatgccgtttacggagagattctccctgagaaacaagcagaattttttgaaccatgggtgtactcattttcatatgaattaatttt

SEQ ID NO: 180827 - DNA, 100 bp, Homo sapiens
agctcccagaaccttcagtgaaagtaaaagaaccttcagtacaagaggctacttctactaggaggtcacaagccccaaagtggacgtgttcaatgctaac

SEQ ID NO: 180828 - DNA, 90 bp, Homo sapiens
ctcagcttcggagaatggagtcttccatcaatcatatctcacagtaagtacaaggtggactgtgcatgcctcaaagaaaacccagagtgc

SEQ ID NO: 180829 - DNA, 100 bp, Homo sapiens
cacgaattggccttattaatgatatgagtgttgcggagataggaacatgggagagaaacaatctgggtaacatgaaagtgatgctggttgctaagggaag

SEQ ID NO: 180830 - DNA, 100 bp, Homo sapiens
ttcatgtttcctgttgcaggtgggataagaccccctcaagacctcagagatagcagttgccgactggaacagctgcctgggatcttcccaaaagacgtga

SEQ ID NO: 180831 - DNA, 100 bp, Homo sapiens
ctggccaggccggcctgtctgccgcgatggatgacagtaaggaaagaatacccacctcatgtccaaaaagttgaaattaatcctgtaaggttaagtcggc

SEQ ID NO: 180832 - DNA, 83 bp, Homo sapiens
cgcagccgggagacagatgcgaggcggcggtcaggttttttattggcacctcagtctcaacattttcttttcggattcatgag

SEQ ID NO: 180833 - DNA, 100 bp, Homo sapiens
aacatccctggcttcccgactgtgaggtatcctagaaggaaaacatcaccatggctacagaaattggttctcctcctcgttttttccatatgccaaggtt

SEQ ID NO: 180834 - DNA, 146 bp, Homo sapiens
cgcctgttcctgctgcagcagcccctggcgccctcgggcctcacgctgaagtccgaggcccttcgcaactggcaagaaatcaacagcagtgatatgtcggcccacgtcaccagcccctctggccgtgtgactgaggcagagattgt

SEQ ID NO: 180835 - DNA, 100 bp, Homo sapiens
gctgaagatgttgatggagaagctctaagtacactcgtcttgaataggcatttcagaagatggacacaaagaagaaggaggaacagttgaagcttctcaa

SEQ ID NO: 180836 - DNA, 75 bp, Homo sapiens
aggaggcgcaggagactgaccgcaacggcaggttcttcgtgccatgaaggaggacagtgaaaaagttccgagctt

SEQ ID NO: 180837 - DNA, 58 bp, Homo sapiens
cagagcaccccctgggacagcgccacattcgccggctgcaagctttcttcctggtggc

SEQ ID NO: 180838 - DNA, 99 bp, Homo sapiens
cttcaaccaggattgtcttttcttaacctgggaagtggaaccggatatttaagtacaatggtgggcttaattttagatgatgaagaacgagagcttcaa

SEQ ID NO: 180839 - DNA, 100 bp, Homo sapiens
ggcagagtggagtatctggtgaaatggagaggctggtcgcccaagcagagaaggttgatgcagcgcttcacaccatgctgttgaaacaggaaccccaaag

SEQ ID NO: 180840 - DNA, 50 bp, Homo sapiens
cttttcctccacctaccttcccgagctatcaagtactagctccaactgcc

SEQ ID NO: 180841 - DNA, 75 bp, Homo sapiens
atgcagatgacttgagagaaggtgcacagtatttgatgcaggcagctatcaatggtgtaataccacaggaaaatg

SEQ ID NO: 180842 - DNA, 75 bp, Homo sapiens
gtggtttttcggatcatgtctggtggctccgcggattataacagttggttaccacagagaagcgcttcctcaaag

SEQ ID NO: 180843 - DNA, 82 bp, Homo sapiens
ccagaccaagtgcatcttcagcctccacggtgccaggtcacgcatgaagggagcaccgtggagaagacagtggcccctacag

SEQ ID NO: 180844 - DNA, 88 bp, Homo sapiens
cagagacctcattggctgtctccagaagctgctgtttggaaaggtggcaaaggatagcagcaggtcggcttcttcaagcggaaccggc

SEQ ID NO: 180845 - DNA, 74 bp, Homo sapiens
ctcaggacggacaagcacagtcttcggaagtctattatcctcccagtccacaacgctgaaccgtggctggacga

SEQ ID NO: 180846 - DNA, 74 bp, Homo sapiens
ttttcagaagcggctgcgcacggactgctggagatggtggagtccgtcagtgattctcctaggtcactggctgc

SEQ ID NO: 180847 - DNA, 78 bp, Homo sapiens
agtcaggaccgcgacggcagcagagcatagagatggagtttcaccgtgttgcccaggctggtgtcgaactcctgagct

SEQ ID NO: 180848 - DNA, 100 bp, Homo sapiens
ctctgccgtatccaagacagtatgcaaggccacgacccacgagatcatggggcccaagaaaaagcacctggactaccattactgggacttccacccccac

SEQ ID NO: 180849 - DNA, 100 bp, Homo sapiens
ctgacgagccagtacatcaagttcatcagcgagactctgcggcgcatggaggaggaggagagagagcaggagattcggatgggtcagatggctatgggag

SEQ ID NO: 180850 - DNA, 90 bp, Homo sapiens
ccttacagccgctcgtcagactccagcagccaagatggtgaagcagatcgagagcaaggttacttaaatgaccatgatgctgtcaccaag

SEQ ID NO: 180851 - DNA, 100 bp, Homo sapiens
gaaactcccatcaaccctcggaaatgtgcccacatcctcaccaagattctttatctcataaaccaggggggagccaaaagggtcatcatctctgccccct

SEQ ID NO: 180852 - DNA, 100 bp, Homo sapiens
agggactgcagtacttggagagactctatatgaaaaggaactccctgacatccttgttgtggacatcggatacccaaggagacgaagctgaagcaggaga

SEQ ID NO: 180853 - DNA, 75 bp, Homo sapiens
cacccaccaacaacaccacaataatccacagccaaggtaaaatgtcggttccaggaccttaccaggcggccactg

SEQ ID NO: 180854 - DNA, 78 bp, Homo sapiens
tgctatgaggatgacaaactctggagtaattggagccaagaaatgagtatagcctccggcctctcctcctctccgtca

SEQ ID NO: 180855 - DNA, 74 bp, Homo sapiens
ggactgggcatccacccggccaggttcccaggaaggctgaggccgcggaaggagcagggcacatacgccctgtc

SEQ ID NO: 180856 - DNA, 105 bp, Homo sapiens
ccggttttatggtgcagagattgtctcggctcttgagtacttgcactcgcgggacgtggtataccgcgacatcaagatgacagccgtgacgccagtcctcctgag

SEQ ID NO: 180857 - DNA, 74 bp, Homo sapiens
gaatacctcgtatgcaacctcaggcttcagccaatacgtaggtaacctttccagagatgtgacagaagtcctta

SEQ ID NO: 180858 - DNA, 90 bp, Homo sapiens
gggtgcgggagagccccttgcagaagacgccgtacgagatattaataaggcagcggaaagaagaaatatgaatacggctccatcaagacc

SEQ ID NO: 180859 - DNA, 90 bp, Homo sapiens
cccctttctcgcccagcgcccccaggccgctcccggggctcacggcaccacctacctatgatgccgtggtacagatggagtaccttgaca

SEQ ID NO: 180860 - DNA, 98 bp, Homo sapiens
ctcaagtccctgctggagcactctctgccttggccagagaagagaacagaacattgacatcaccaatttcagcagcagctggagcgatggcctggcct

SEQ ID NO: 180861 - DNA, 82 bp, Homo sapiens
tcagggccggacagcgagcggcggcgacttgccagtaaggacacagcattgttggttttgccatgtactattttacctatga

SEQ ID NO: 180862 - DNA, 73 bp, Homo sapiens
acagccttggaaagtcaggaccgcgacggcagcagagcagcctgttcctgaacttcctgggaagtcaaccttc

SEQ ID NO: 180863 - DNA, 74 bp, Homo sapiens
ccctgcgtggtcctctgtggcagccttctctcattcagagctaacattgacatcaccaatttcagcagcagctg

SEQ ID NO: 180864 - DNA, 101 bp, Homo sapiens
aaagaggacagcacttccggtcacgccatcgttgctgccttcttcgtcaagcccgagcgggaagaagttccgcagcaagccgcagctggcgcgctacctgg

SEQ ID NO: 180865 - DNA, 90 bp, Homo sapiens
gtcggaggaaacgctagtgcaacaatgattgaagctcacgttgatgtcaagactaccgatggttacttgcttcgtctgttctgtgttggt

SEQ ID NO: 180866 - DNA, 83 bp, Homo sapiens
ccttagctgtgctcgcgctactctctctttctggcctggaggctatccagcgagctggaggatcttcagaagaagcctccccc

SEQ ID NO: 180867 - DNA, 83 bp, Homo sapiens
cggctccaggagtcctgtgactcaggttcgtgctggccgtgggcagcgccgtctttgatgccatgttcaacgggggaatggcc

SEQ ID NO: 180868 - DNA, 96 bp, Homo sapiens
atccgtcattggattggctgcggggcccacctctctaagcctatggaaaagcttctggatatgagggaaggcaccattggagatatggctatcctg

SEQ ID NO: 180869 - DNA, 100 bp, Homo sapiens
acaaaacttgagaaaggaagtactcgccgagtggaacgggcaatgaggcagacacaggacccaatgttgtcttccagttgtgaaagcaccccagagaccc

SEQ ID NO: 180870 - DNA, 100 bp, Homo sapiens
ctgacgacctagagagatcccggctcccagcccactgagtggcttcagcctcgctggaacggtgctggaccacctggtcggggaggagaccatggctgac

SEQ ID NO: 180871 - DNA, 100 bp, Homo sapiens
ttcggagtacctgcgctatgaagacacgcttcttctggaagaccagccaacagatgggccgtctcccacaggcagcgcctgctggaactcaacagctccc

SEQ ID NO: 180872 - DNA, 90 bp, Homo sapiens
accaaatgtctggacaccatgattcaaaccgccaggttaccatgaggaggatttctggccttcgaatgtgtcttgctgaatcagggctct

SEQ ID NO: 180873 - DNA, 50 bp, Homo sapiens
ttggtttggacatactacatggatcagctccggaccaaaatttaacagtg

SEQ ID NO: 180874 - DNA, 101 bp, Homo sapiens
tttgaatttgctagtaacgtcatggaggatgaacgacagaaatcgaaacgagttggctgagactcttgcactcctgaaagcacaaattgatcctgtactat

SEQ ID NO: 180875 - DNA, 113 bp, Homo sapiens
cagccatgatcaaggcgatcctaatcttcaacaaccacgggaagccgcggctctccaagttctaccagccctacataataacaaggactgttctggtgtgtccttacacctca

SEQ ID NO: 180876 - DNA, 101 bp, Homo sapiens
cgacgagaaggccataatgacctatgtgtccagcttctaccatgccttttcaggagcgcagaaggaacggcagagtcgaaacaaacaatgagggcgaacca

SEQ ID NO: 180877 - DNA, 100 bp, Homo sapiens
gcagtagatgatgatgtagcagaaggtgggactcttccctggacactgtgttgagttaattaaccaaaaagttccccagtcagtgaccaactcagtgcca

SEQ ID NO: 180878 - DNA, 100 bp, Homo sapiens
ttccatggcaatttacaacccccatactgtaccaggcaagctattgacctgaaaagtggttctggaaaagtgtaccaaggccctgcaaaaggtgctgctg

SEQ ID NO: 180879 - DNA, 101 bp, Homo sapiens
cctgagcctcgggctccggcccggacctgcagcctcccaggtggctgggaaggtgaccaagaatatggcccaggtgaccaaagccctggacaaggccctga

SEQ ID NO: 180880 - DNA, 75 bp, Homo sapiens
actacagttcatcaacatcaactacgtccctctgaagatgctgtgggccctgagggaaaggatcacagaggcgct

SEQ ID NO: 180881 - DNA, 50 bp, Homo sapiens
aaagaatattgatggtacaatagaggtgtcacgtcttgaaattttaaatg

SEQ ID NO: 180882 - DNA, 100 bp, Homo sapiens
tgccaggtgatcgacggcaggaacgtgaccgtcactgacgtggacatcgtcttcagcaagatcaaatcatggaagggaagtggttgctgtgtatgttact

SEQ ID NO: 180883 - DNA, 100 bp, Homo sapiens
aaatgggacccaactggcaatctcttggcctcctgttctgacgacatgactttaaagtctacaaataagaaacctcgaaaatctccaggtgagaagagca

SEQ ID NO: 180884 - DNA, 100 bp, Homo sapiens
ctgctccattggttaaatacttccaggaaaaggggctcatcatgacaatatttccctttgctggctaaacagaagcctgggcacccagaatgtgatatcc

SEQ ID NO: 180885 - DNA, 75 bp, Homo sapiens
tgcacgacctgctcctacagccggcgatccactcccggctgttcccccggaggctggggtgcagtggcgtgatct

SEQ ID NO: 180886 - DNA, 101 bp, Homo sapiens
ttaacgaatggggttgtgatggcccaggttcttcaaaagatgatttaagtgccctgtatgctcaaaatttgtatcctcagatgaaatggatttgcatcttg

SEQ ID NO: 180887 - DNA, 75 bp, Homo sapiens
ccaatcacctcgcaggagccctaggtttgccaaggcacgagtaacaagctcacgcagttgggcacttttgaagat

SEQ ID NO: 180888 - DNA, 90 bp, Homo sapiens
tatccttgaattcaaagaaaaatgtaaagacaagaagaatcctttagatggagcagcatattgtatgggacgtatgaattctgactgttg

SEQ ID NO: 180889 - DNA, 133 bp, Homo sapiens
ggcaaatggaaggtgcccacatacaaagactacgtggatctcttcagacatctcctgagctctgaccagatgatgaaaaagcatgctttacgctgttattgtcaagccatgcaagtttacaaaggaaaaggct

SEQ ID NO: 180890 - DNA, 88 bp, Homo sapiens
gaagcaggtttaaaattttacataagaagttacctttttcaggagccaaaaacctgtatatcatctccgtgaaggggatcaagggacg

SEQ ID NO: 180891 - DNA, 75 bp, Homo sapiens
tggcacgtgtcagagaatttgacgtgtgtggaccagttgacaaagatccaaactgaattacaagagacagtgaaa

SEQ ID NO: 180892 - DNA, 83 bp, Homo sapiens
ggacaaagagcccctcatcgagctcttcgtcaagctgaagaaatcaggggagaaacccctgcttggtggaagcctgatggaat

SEQ ID NO: 180893 - DNA, 100 bp, Homo sapiens
aattacagtgcctacttggaaagaagaagagatagcgacttgccccagtccaaccccagagcgggatctatcttgggatcccatggctttctttactggg

SEQ ID NO: 180894 - DNA, 75 bp, Homo sapiens
tacgccctcatggggaaaatctccccggtgactttcagggtcaaggtggaaggtccaaggactgagaaagaccct

SEQ ID NO: 180895 - DNA, 50 bp, Homo sapiens
gccatctggaggctgtatggccgcaggggtgacaagaaagtcatctgcaa

SEQ ID NO: 180896 - DNA, 51 bp, Homo sapiens
agaaggcagcgcgttgtacccgagactggcataaggtcccagctggtgata

SEQ ID NO: 180897 - DNA, 96 bp, Homo sapiens
cgcctcagaagaaagaagatgacttcctcaacaacgccatgtcctccctgtactcgcagaacagccctgtggcccccacagcccagcccaaagccc

SEQ ID NO: 180898 - DNA, 75 bp, Homo sapiens
ggcgaaaggaacggctgaaggccctacgggagaaaaccgggcgcaagtttggtgccctggttgtcagatgttgga

SEQ ID NO: 180899 - DNA, 74 bp, Homo sapiens
cggagccagcctgagttgggagaagagctccagagagccaatgagaacagcctgctgagtgcgcagctcaaggg

SEQ ID NO: 180900 - DNA, 77 bp, Homo sapiens
ggttctgtatgaacttttcacatacattgagaagagtaaaagtccaccagcgtttcagtctgatggaagcaaacaag

SEQ ID NO: 180901 - DNA, 98 bp, Homo sapiens
actgcatcatgctgtctggagaaacagccaaaggggactatcctctggaggctgtgcgcatgcagcacctggaggaagaacgtgcaaaacgtgaggag

SEQ ID NO: 180902 - DNA, 90 bp, Homo sapiens
gttatatcccctttagaatatatcaggacgggctctacgagtgcattctctgtgcctgctgtagcaccagctgccccagctactggtgga

SEQ ID NO: 180903 - DNA, 100 bp, Homo sapiens
agcccgttgacactgacctcatctgggccaaaatgctgagttctaaggaggctgggacaagatcgcagaggaaggtgggcggcgggagtgcccagccgtg

SEQ ID NO: 180904 - DNA, 90 bp, Homo sapiens
atggggatccgtcgcacacagcatctccaacaggaggagatgttaaagtaacccatcttgcaggacgacattgaagattggtcttctgtt

SEQ ID NO: 180905 - DNA, 82 bp, Homo sapiens
gtggtagagagaaaaatcctggatctgtatgctttgagcaagttgatttatgaagactctatggatctaatcgcaaagctac

SEQ ID NO: 180906 - DNA, 74 bp, Homo sapiens
tgttaccctggaagttcttcatcagacttgggaagatccccatgaaaaagataagagcacgaactgctttggag

SEQ ID NO: 180907 - DNA, 100 bp, Homo sapiens
agctgccaacagatggctggaggtcaggacgtcttcaggaaccagtattactgtggacatcgccgtcatgggcgaggcccacggcctcattaccgacctc

SEQ ID NO: 180908 - DNA, 50 bp, Homo sapiens
taccagtttgcgtcaggagacacaggtactctgtggatatccccttggac

SEQ ID NO: 180909 - DNA, 100 bp, Homo sapiens
aaaaggataagcaatctatcagggatgtcagagacatttttggagtcagtgaatctcctgaagttgaagaccatgtggcgtttctaataacagttccaac

SEQ ID NO: 180910 - DNA, 98 bp, Homo sapiens
attggccgaccgcaggagaagcccccagaaccaggcccccaactcagccatctgcggaggtcaagctgaaactatttgattcaaataatgatgggaag

SEQ ID NO: 180911 - DNA, 100 bp, Homo sapiens
agccgccccgcgcccccgccgcgccctcaggtcagtggctttgtatgactgccgaagtccagatgaaagccatcgaatgtggcgattcagtgggcagata

SEQ ID NO: 180912 - DNA, 100 bp, Homo sapiens
cccggacatctgctttatatttctctcagaccattcccatcagtgagcattacaggtaaggtactcaactgtgtggggtactacataaatcctgaaagac

SEQ ID NO: 180913 - DNA, 100 bp, Homo sapiens
tccactcatcctctgagtttgagattgtcaaggccataaaagaagatgatgactttgagttcactggcagccacctgacagtaaggaatggctactcgtg

SEQ ID NO: 180914 - DNA, 87 bp, Homo sapiens
gacttggaatggatcttactaaggtagaaacgttgaagcacaatgatccttttgctcctggtggaacagttgttgcagcaagcgatt

SEQ ID NO: 180915 - DNA, 100 bp, Homo sapiens
tggtggtggtggtggtgtcttcctgtctcaacgatacctattttctagtgctgagatcctgagacaatggaaaacgggccttactatacatcatatcccc

SEQ ID NO: 180916 - DNA, 98 bp, Homo sapiens
gagagcgagctgagtggttgtgtggtcgcgtctcggaaaccggtagcgcttgcagcatgagttgctggagaatgtaaccctaatccataaaccagtgt

SEQ ID NO: 180917 - DNA, 96 bp, Homo sapiens
ggcagggatcctgtcagccctgggttctaagacatcactgatgatacggcatgataagacagatgcccaaatccttgcagagaagtgtgtccatga

SEQ ID NO: 180918 - DNA, 100 bp, Homo sapiens
ctctctgcagctactgaaaacaaattgtattcccattggagagcagcttcagtcggtgttgggcaattctggatacaagcatatgattggactacaatcc

SEQ ID NO: 180919 - DNA, 96 bp, Homo sapiens
ccttctcatggcaatcgagttgagtacttggatagacttatacctcagcctggcacctgtgtttgctctgtttgtaccattttactgctccatacc

SEQ ID NO: 180920 - DNA, 90 bp, Homo sapiens
gtttgagaatgttcagacactaacagatgccatttatgacattattcttgatatgaagtggtgttggctccctgactggcagtcctcacc

SEQ ID NO: 180921 - DNA, 90 bp, Homo sapiens
gtgaccagcattcagctggagttccgggagctctcccgtctcacaggggataagaagtttcaggaggcaagtgaggcctatctggttggc

SEQ ID NO: 180922 - DNA, 100 bp, Homo sapiens
ccctgtccatgccgttgatgtggtgctacgacatctgccctccatgaatgtttctggtggggagctctttgaccggatcctggagcggggtgtctacaca

SEQ ID NO: 180923 - DNA, 88 bp, Homo sapiens
cttcatattggcgatcctgttgtcttttacaaagttgatcacagtaaatggacaagaatatcatcttcaacttgtagacacagccggg

SEQ ID NO: 180924 - DNA, 82 bp, Homo sapiens
caaggcagacatcagctcctggttcaacgaggccattgacttcatagaaaaatggctacaaacttcctagcacatgagaaga

SEQ ID NO: 180925 - DNA, 144 bp, Homo sapiens
attccatccctgaatgtagattgtgcagtgctcgactgtgaggatggagtggctgcaaacaaaaagatgtccggtctgtgctacgacagcaaaatgttccaggtgcatcaggtgctctgcatccccagctggatggcaaaattc

SEQ ID NO: 180926 - DNA, 97 bp, Homo sapiens
ttcatcgaatgcatcataagcgaatagtccaggaaaaaaacaaattaattaatgacctcaaaggtactatactggcaattgctggagaagattttgc

SEQ ID NO: 180927 - DNA, 90 bp, Homo sapiens
caacttggaccaagaactcaaactttttgtatctcgacactctgcaagattctctcctgaagtcccaggcagagatcctacaagaatcca

SEQ ID NO: 180928 - DNA, 121 bp, Homo sapiens
ttgagagaagtttaagagaagaaatggacatgattgcctaaatcagccaaacacagggtgcaatggatgagcttcatagtctggatccaagaaggcaagagttattggaagctagatttac

SEQ ID NO: 180929 - DNA, 98 bp, Homo sapiens
acatggccactccagtcggtgttgagcacggcgagcagtctcaggcctttagtgatgatgatcaggcctttgtgacactaaccacaaacgatgcctac

SEQ ID NO: 180930 - DNA, 100 bp, Homo sapiens
aaagagcatcttatggatgtgttcaaccttaatagtaacccatgcgctacataaagatgtagtggaaccaaaggagaggggcaagctcctagccacccag

SEQ ID NO: 180931 - DNA, 100 bp, Homo sapiens
tgttgctgccgccatacgcgctctccctgtttaggtgaaatgacaatggatgctctgttggctcgattgaaacttctgaatccagatgaccttagagaag

SEQ ID NO: 180932 - DNA, 82 bp, Homo sapiens
gacgggcactgggcgactctgtgcctcgctgaggctcaccatggatgatgatatcgccgcgctcgtcgtcgacaacggctcc

SEQ ID NO: 180933 - DNA, 100 bp, Homo sapiens
tgggcatcctccatgcctcctacagcgtcagaatcggtcgaggtggacggtttggccgtaaaggtgtggctattaacatggtgacagaagaagacaagag

SEQ ID NO: 180934 - DNA, 75 bp, Homo sapiens
gctcaagatggcgtgcttgttggagaccccaatccgcatgagcgtcctttcgatgtaggaggagctcaagtgctg

SEQ ID NO: 180935 - DNA, 51 bp, Homo sapiens
agaaaatatagcagatatggaaggtgcactcatgctacaagtgaaaactga

SEQ ID NO: 180936 - DNA, 108 bp, Homo sapiens
cctgccgtccttctccactttcgccagcccgtgccgcgagcgcggcctgcaggagcccgagcgggaagaagttccgcagcaagccgcagctggcgcgctacctgggcg

SEQ ID NO: 180937 - DNA, 78 bp, Homo sapiens
gccaccgcctcatgcactgtgttttaaaatcaaagatgggaaaatcggagaaaattgcccttccccatggccagcttg

SEQ ID NO: 180938 - DNA, 100 bp, Homo sapiens
cgagtttccgatttaaagctgagctgcgaggaaaatggcggcgggagcaaatcaccgatgttcatatggttagtgatagcgatggagatgactttgaaga

SEQ ID NO: 180939 - DNA, 100 bp, Homo sapiens
ctgtccttactccctctttaagattgcgtacccactgcagagtgctgaagacggggtagccacgagcatgaagaggaaccacctcagaatatgaaaccac

SEQ ID NO: 180940 - DNA, 83 bp, Homo sapiens
cttggccattccctcggcggtcgtcactggcagggcctcctcgagctccacggacatggtccagggagtcggtagtaagggat

SEQ ID NO: 180941 - DNA, 100 bp, Homo sapiens
cgcagccctccttgtcccccttcttcattcacccccttgttgaggcccttggcttttgcataatgtgcagtggcttatgcctgttatcccagaactttgg

SEQ ID NO: 180942 - DNA, 107 bp, Homo sapiens
ggagtgggaagtacatgtgtcgtatcatagttcattttatgtgggaggatgttcagcagcgcggcagagtcatggggaatagcctaacatggcagaccagagacagc

SEQ ID NO: 180943 - DNA, 99 bp, Homo sapiens
cactgtgcttccccagaggggtggcctcgctgttcccatggacatggcccaggtccaggagccggctgtgcacatcccaggacaggagcccctgaccgc

SEQ ID NO: 180944 - DNA, 55 bp, Homo sapiens
gacttgttgagtgacctccagaaagcaggccctcgggaccaaggatcacgtcatg

SEQ ID NO: 180945 - DNA, 111 bp, Homo sapiens
cgctgttgctgccgccatacgcgctctccctgtttaggtctggagcccccaactcccttgacagtgtacgctggagcaggttccagggtggggctgccctgccgcctgcct

SEQ ID NO: 180946 - DNA, 95 bp, Homo sapiens
agcaggcctccgggcccggcgccgccgcccgcagattttggtttcagtaacctcttcactcctgggcagctgctgaagacctggtgtggcagccc

SEQ ID NO: 180947 - DNA, 96 bp, Homo sapiens
ggacggcgggaagaggagtgcggaacccgcgggagagctgttgcgcagccattggtacctgtattggggaaacatagcatacaagcaagaagctta

SEQ ID NO: 180948 - DNA, 100 bp, Homo sapiens
cttatactcctcccagtgacgggtctggagtgcgtgggggaccggctgttggcggtttgtttcgacgccggaccgcgtaagagacgatgatgttgggcac

SEQ ID NO: 180949 - DNA, 100 bp, Homo sapiens
gtggaaggcatggaagtcatcagaaggatgctttcattggatttggaggaaatgtgatcaggcaacaagtcaaggataacgccaaatggtatatcactga

SEQ ID NO: 180950 - DNA, 100 bp, Homo sapiens
cgtggccccttcgacctgcgctccgcgctctggcgctacggtctggccgtcggctgcggcgccatcggtcgagtcccagacaccagaagtctgaatttgg

SEQ ID NO: 180951 - DNA, 80 bp, Homo sapiens
ggagcagcgcgtcgtggggcgagcggcagggtgcttcaaggatgaccgcatcgtcttctggacttggatgttctccacct

SEQ ID NO: 180952 - DNA, 100 bp, Homo sapiens
tgagaacccttccggtgggctaggtactgagcgcgcgagatgctggagcacccacctacatgtatgagtttcagtaccgtccaagcttctcatcagacat

SEQ ID NO: 180953 - DNA, 98 bp, Homo sapiens
tgtggtgcctacccccatcactgcttccctcagccataacaggtatgagaaagtgccagtcatcttggttgggaacaaagtggacctggaaagtgaga

SEQ ID NO: 180954 - DNA, 50 bp, Homo sapiens
agggtgttcccgaactagagtgggactctgtctacatcttccgggaaggg

SEQ ID NO: 180955 - DNA, 91 bp, Homo sapiens
ggaggaccccagatggcaggaaccggcccagccatgtctggcttcttggacacttaatgattgttggcaagaaatgtgctgctgatctggg

SEQ ID NO: 180956 - DNA, 83 bp, Homo sapiens
ctggtgaccttctgtgaagaactgggattggagctggagtgagccttccaggaattttggctgccaaatgtggtgcagaagta

SEQ ID NO: 180957 - DNA, 74 bp, Homo sapiens
gatgattgtgactgtcatcctgaattttcaccaccatcaaagaggtgagagacttcagaggctgccctttcttt

SEQ ID NO: 180958 - DNA, 83 bp, Homo sapiens
gccgcttggggcccgcacggaccctctacttcagtaatctgtaagtcagatgctccaacaggggatgttcttcttgatgaagc

SEQ ID NO: 180959 - DNA, 96 bp, Homo sapiens
caaggtggcctaccaggaggccaggggtgtcgccatggaagctgcagtaaaggaagatgaagaagaagtttcagataagggcagtgattctgaaga

SEQ ID NO: 180960 - DNA, 100 bp, Homo sapiens
ccagggcagactggtagcaaagcccccacgcccagccaggagcaccgccgaggactccagcacaccgagggctgaccccgcactacatctacccaccagc

SEQ ID NO: 180961 - DNA, 90 bp, Homo sapiens
gcagtctgtggtgtgtttgctgttcccagtattcatgtgattgaacggcgtgctcttcctgagttcttcaatggaaaaaacaaatccaag

SEQ ID NO: 180962 - DNA, 75 bp, Homo sapiens
tctgttgcagcttgcgtttggggctttcgacatgacaggtcactagagggtgcaaaaatgcagagtaataaaact

SEQ ID NO: 180963 - DNA, 75 bp, Homo sapiens
agatctggagcatcggctgcaggggtcagtgatggagctgcttcaggatgtggggcaatcaagttggggatgaag

SEQ ID NO: 180964 - DNA, 76 bp, Homo sapiens
acgacctatcctaggcgccatgtttcaccagtgatcattaaagaatgggcagcttacaaaggaaagtctcctcaaa

SEQ ID NO: 180965 - DNA, 50 bp, Homo sapiens
gtgaaactacatgttcagaaagtggagccgccaccaaaatgcagattttc

SEQ ID NO: 180966 - DNA, 50 bp, Homo sapiens
cttcaaggcactgggctgggctggcctgtccccggacctgcagtctatgg

SEQ ID NO: 180967 - DNA, 75 bp, Homo sapiens
ccaggacttgatgaatataatccattctcggattctagaacaaactgataaatttcaaacggaagagagtggcag

SEQ ID NO: 180968 - DNA, 90 bp, Homo sapiens
agcggccggtactgttgaaagcgacaagtggaggcgccgctctagcggccgggactctgaactatggcgcctcttgtcctttaagtcctg

SEQ ID NO: 180969 - DNA, 75 bp, Homo sapiens
ttgattaccactgacctgctggatcgtgtcctgataaaccgtattgacctcgtctgccaggctgtactctcaggg

SEQ ID NO: 180970 - DNA, 100 bp, Homo sapiens
cgcgtcctcaagccggcacctgagcggcggagacggctgtagcacaagaactgccattggatgtccagaatcccctgtagttgataatgttgggaataag

SEQ ID NO: 180971 - DNA, 100 bp, Homo sapiens
caaagcctccagaggacataccacctccaggatcaggatgcagagtttcaccagtgatcattaaagaatgggcagcttacaaaggaaagtctcctcaaac

SEQ ID NO: 180972 - DNA, 100 bp, Homo sapiens
ggcgaggcgcagctgtaccgccagttcaccaccaccgtgcaggtcgtcatcttcataggctcgctgctcgacgagctggagccggtggtgcaggatgggc

SEQ ID NO: 180973 - DNA, 98 bp, Homo sapiens
gagctgtggtccagcctgcgcggcgggaagcggcggcggcggctccagcgtcctaagaggcactgaacgcagaggaggcccgccttcttcatgtcaag

SEQ ID NO: 180974 - DNA, 51 bp, Homo sapiens
tcttcatggtgcggctcatcttcgagagcattagtgccagcagtagttccc

SEQ ID NO: 180975 - DNA, 90 bp, Homo sapiens
ccgtggaagcggccaccgactactgtcagcagctgtgccaggtgaactggcacaaaggttaatctcaagatgccgctagtgaaaagaaac

SEQ ID NO: 180976 - DNA, 97 bp, Homo sapiens
ggagtacgagacgaggttcctgtgcaactcttcacagatttgagttctgtgaacctgcatttgttgttggtaattgcctccagatagcttctgacag

SEQ ID NO: 180977 - DNA, 83 bp, Homo sapiens
gtgaaactggggaaaagtgcaatgcagatgccttcaattaagttgcagagttctgatggagagatatttgaagttgatgtgga

SEQ ID NO: 180978 - DNA, 75 bp, Homo sapiens
ctgaccttggcaaagctgccagagatattttcaacaaaggatttgaactcagcctcctcccaagctccctgtggg

SEQ ID NO: 180979 - DNA, 82 bp, Homo sapiens
attgctgtgggtgctgggacttcccgtccgcggcgtggagggtgttcatgaagtctgtgaagctggagtgggtgcaagacaa

SEQ ID NO: 180980 - DNA, 96 bp, Homo sapiens
cgaatgctccacttgccgagcctgatgatggggacgtgccgcccctttgcggggtgaggacgcttgagcggaagttagaagcaaaaatgatcaagg

SEQ ID NO: 180981 - DNA, 74 bp, Homo sapiens
aacgcggctcccagccacaccaagttcaggtacaccaggggttggaaaaaccacactaggcaaagaacttgcgt

SEQ ID NO: 180982 - DNA, 99 bp, Homo sapiens
ggaggcctcggttggatgcgaaggagctgcagcatccagcccctgcagatcaagtcagtagtggcaccagagcatgtgaagggctacatctacgtggag

SEQ ID NO: 180983 - DNA, 98 bp, Homo sapiens
aagaaactgagaataagctagaaaaatcatctggtcaactggaccttttttctatcagtgcttatgtttatgctcagaaaccacaaatggacattcac

SEQ ID NO: 180984 - DNA, 87 bp, Homo sapiens
ccaggagtaagagcccatagcagtctgccagacaatagagcatatggattgagaggatccagaatccagatctctggaatagctacc

SEQ ID NO: 180985 - DNA, 50 bp, Homo sapiens
cgcgtggaacggctgcttttggaagatgcctgaggaaacccagacccaag

SEQ ID NO: 180986 - DNA, 100 bp, Homo sapiens
ccgacacacagtctacaatatcatcaccaattttatgcgaacccgggaagaagagcacaagcgggagatttacgaccgctatggccgggaagggctgaca

SEQ ID NO: 180987 - DNA, 75 bp, Homo sapiens
tcctgtacagcctgcagaactacccccagaggagcccaccacctggaccgggtacttcgggaaagtgctcatggc

SEQ ID NO: 180988 - DNA, 100 bp, Homo sapiens
ttcagcgcctgcgggaggagctcagtgaagccatgagcgaggtggagcaggccaggaggaagcagcgagaagaacgcctgcagcagctgcagcacagggt

SEQ ID NO: 180989 - DNA, 100 bp, Homo sapiens
gctgcaggaagtggctttttatcagttgcaacaggactgtgacctgagctgtcagatcaccattcccaaagatccagacatttaatgtggatgcaccatg

SEQ ID NO: 180990 - DNA, 93 bp, Homo sapiens
ccagggaaccctggtcaccgtctcctcagaacccagcgggtgccgcttctccacccgaggcttccacctccaacgagccatgttccaggctgc

SEQ ID NO: 180991 - DNA, 101 bp, Homo sapiens
gtactccattaactggaaatgcagccactgaagaaggacaagaagctctctctcagacaaccatctcatgggccccattccaggacacttctgagtacatc

SEQ ID NO: 180992 - DNA, 90 bp, Homo sapiens
gccttggtcctagcacccactcgagaattggctcagcagaccgagacatgggtgcccggcaccgcgcccgagcccactccattcagatca

SEQ ID NO: 180993 - DNA, 90 bp, Homo sapiens
cttctgaactgagtgaaaatacagccaagatcttggcaaagcttctccctcagtatttagaccagattcatgttacatgtaaagctgtcc

SEQ ID NO: 180994 - DNA, 100 bp, Homo sapiens
ccgagtgctgccgcgaggagcggccgctcaacgcttcggaatctttggaagaactaccagaaacgagtgggaaaacaacccggagattcttctttaattt

SEQ ID NO: 180995 - DNA, 100 bp, Homo sapiens
ctgttcgccaacacctgcgaggagtgtgggaagcccatcggctgtgactgcaagagagtgaaccacgagacgctggaactgaccaacgtagctctggcat

SEQ ID NO: 180996 - DNA, 75 bp, Homo sapiens
cggcggagacagctggtgtctgaagccgctcgcgcccaggacagagcgggatgccaccagcttgtccaaagggaa

SEQ ID NO: 180997 - DNA, 97 bp, Homo sapiens
ctggggctcagggcatagtttggttacctaaccaaactcctgcaaaaccacaccacctatgcctgtgatggggactatttgaatctacagtgccctc

SEQ ID NO: 180998 - DNA, 75 bp, Homo sapiens
aggatcagaaaccaccaactgtactgcaacgactgctatctcagattcaaatgtggctttcctggaggacagatg

SEQ ID NO: 180999 - DNA, 80 bp, Homo sapiens
ttagagtggactgtgcccccagcagcccccaagcaatccccaaggtgagactggagacaatctatatttgcggagtagat

SEQ ID NO: 181000 - DNA, 89 bp, Homo sapiens
tggttggaaacaatccatatgcgaccacagaaggaaattcaacagaacttagcataaatgctgaagaatcgcctaccatttggtgcaag

SEQ ID NO: 181001 - DNA, 75 bp, Homo sapiens
ggccggggccgcgctgagggcgcccagctggtcccttcaccgatgttgtcaccaccaacctaaagcttggcaacc

SEQ ID NO: 181002 - DNA, 90 bp, Homo sapiens
ccgggaagtgcttggggatggagtgcctccaaaggttgctgagtagaacttcatggaggaacacggagtgacccaaaccgaacatatggc

SEQ ID NO: 181003 - DNA, 80 bp, Homo sapiens
aacagaaagaagaaaagaaagatgcagaggaagaggaaagcgaactggagtaaacatggaagtactaacttcattccaga

SEQ ID NO: 181004 - DNA, 100 bp, Homo sapiens
aagcggcggcggcggcgccgggcccgggggtggtgacagcaggtctgagctgttccatttcctccaagtcaccggcttacagcaaaagaagtgtttgata

SEQ ID NO: 181005 - DNA, 82 bp, Homo sapiens
gtttcttctcctcggtatcagaagctctgtaaggttattggagtgatgagtaaagaatacataccaaagggcacacgttttg

SEQ ID NO: 181006 - DNA, 100 bp, Homo sapiens
aggacccatttgtgtccattgatctcttggagcagctggggatcatgattcctacgagaagcaacaggcacaaggctctggtcggaaaaaattactgtct

SEQ ID NO: 181007 - DNA, 96 bp, Homo sapiens
ttggattcacccacagcggggcggcggcggcggcggctgcggcccaatatagaatgtaaaaagggcagctctctggcatgttcctgactgaggatc

SEQ ID NO: 181008 - DNA, 82 bp, Homo sapiens
agtattgctgtgggtgctgggacttcccgtccgcggcgtggaggatatggctcgtggacagcagaaaattcagtctcagcag

SEQ ID NO: 181009 - DNA, 75 bp, Homo sapiens
cgactactagaaggggaggggagtggaaaggctctcagtgaaaaaggtccacgctgcttttatgagctgtaacac

SEQ ID NO: 181010 - DNA, 99 bp, Homo sapiens
agcgttttggggacgggggctggtgaggctcacgttggagggcttcgcgtctgcttcggagaccgtaagggggactcattggcgccccctgaggtggac

SEQ ID NO: 181011 - DNA, 75 bp, Homo sapiens
agaacatcatggttttcaacaagtgctccatcaatggccacagctatgtgcacagccagagaacaacacatcaca

SEQ ID NO: 181012 - DNA, 145 bp, Homo sapiens
ttcacacatggagagatgcaagaccagtccatttggggaaatccttcggatggtgaactcattagaatttctgatgaagaattgaaaagaagagtagctgaggagctggcattggagcaagccaagaaagaatccgaagatcaga

SEQ ID NO: 181013 - DNA, 101 bp, Homo sapiens
gccgcagtgggtcccggacaaggagttttgggaggtcatcagtgatgagcatgggattgaccccactggcagttaccatggagacagtgatttgcagctgg

SEQ ID NO: 181014 - DNA, 73 bp, Homo sapiens
gggatcctcatgagttaagaaacatatttctacagccgtgctggtatagaggactctaagaagtggggcatgc

SEQ ID NO: 181015 - DNA, 74 bp, Homo sapiens
cggccttcatgctgggctcgctgctgcggacgttcaagcagattctgaaaaagagttccacgtcctcccttatc

SEQ ID NO: 181016 - DNA, 100 bp, Homo sapiens
gcttgttgctcttcggggactccatcacccagctttggacatcagacagtgcaggagaagaatgtgatgcggcagaaggggctgaaaactaaatccatac

SEQ ID NO: 181017 - DNA, 75 bp, Homo sapiens
ttgccttcaaccgggaacagagaatgtttaagtgagtgagatcattggccgagacctgagtggcttccctgcacc

SEQ ID NO: 181018 - DNA, 83 bp, Homo sapiens
gatgttggactcatagtcactgccagaaagcagctaccaagggggtgccagctggaaacagtgacacagaggggggccagcct

SEQ ID NO: 181019 - DNA, 82 bp, Homo sapiens
gcggaaggagctggagacggtcgtagctgcggtcgcgccgagaaagcttgcaaaccatactgggtacatcaaagttgactgg

SEQ ID NO: 181020 - DNA, 82 bp, Homo sapiens
cgcagcgacggggcgctgcctggcccaggcgcacacggaagtggttctctacttaaaagacaatgactactgatgaaggtgc

SEQ ID NO: 181021 - DNA, 82 bp, Homo sapiens
tcaactatctcgctgacacgcaggcctccaggcccaaggtcagcatcccactgtcagccatcattgaggtccgcaccaccat

SEQ ID NO: 181022 - DNA, 83 bp, Homo sapiens
gcgaaggtgaagagttgtcccagctcggcccgcgggggagccccgggagccgcacgagtttatgtggccgaggcagacaagtg

SEQ ID NO: 181023 - DNA, 74 bp, Homo sapiens
aagacttgcttcgagaaaggaaacctgtgagcatttctactccttccaagaagagcagcaaagctgaagtagca

SEQ ID NO: 181024 - DNA, 83 bp, Homo sapiens
cataaacatgtgtcactgtaacagggcagacaggggcaagtgtccgagtggtgaatcagctacttacagagatggatggtctg

SEQ ID NO: 181025 - DNA, 109 bp, Homo sapiens
gcaacggccaacttcggcaagatccagatcgggatttacgtggagatcaagcgcagcgatgaatatcctccgaatcctaaatctagagctccaaggatgctggtcatta

SEQ ID NO: 181026 - DNA, 83 bp, Homo sapiens
atgcctggcagccccgctctctgcagcaaatgttctgaaaaagactctgcatgggaatggcctgccttacgatgacagaaatg

SEQ ID NO: 181027 - DNA, 74 bp, Homo sapiens
tttgcttcagctgacctcatcgagggtctaaaattcccaggactccacagctttgcaccagataagcctggagg

SEQ ID NO: 181028 - DNA, 98 bp, Homo sapiens
gggcgtctgcttgggaatctattgtggaaacccagagatcctgcatattttgatgaaaattggctaaacagaatcaaaactgaagtaggagataattg

SEQ ID NO: 181029 - DNA, 83 bp, Homo sapiens
cggattccgagaacagaggcgtcggggccaaatgggctgaatctggtagatgtgaggtttccactatcaatgcctctgggggc

SEQ ID NO: 181030 - DNA, 102 bp, Homo sapiens
gtgcacgagaccggctacttctcggcgctgccgtctctggaggagtactggcaacagacaatgcagatcttcgtgaagactctgactggtaagaccatcacc

SEQ ID NO: 181031 - DNA, 100 bp, Homo sapiens
aaattaactacccttgcagatctattccggccacccattgatttgatgcataaaggcagctttgaaacagtcagtatgggaatcctttaaataaatatat

SEQ ID NO: 181032 - DNA, 75 bp, Homo sapiens
ggccagtcgcctccaggccaagagggatccttcacccgtgtctgctctccctgtccagccgcctgcagctgaccc

SEQ ID NO: 181033 - DNA, 89 bp, Homo sapiens
cgtcctctctgtctgtgccatcgccaccaatggagccgtgcaggggggcggagcctactatgtgtcgtggaggccgaatgtttgcacca

SEQ ID NO: 181034 - DNA, 83 bp, Homo sapiens
gccctgctcctctcgctgtgggcgctgtgcacagcctgccgcaggccactgagaatgcaaaggaggaagtgaggcgaattctg

SEQ ID NO: 181035 - DNA, 100 bp, Homo sapiens
gaaaacatcatcgttttgaagagttctgcgttttgccagtcacctctcaactgtgtgccaaagggagcatgataaagatccagaaagcttttttaaggta

SEQ ID NO: 181036 - DNA, 111 bp, Homo sapiens
agaaattctgtgtggcttcaagagactgatcaaattgtgagaggaaaacagcctacccgaaacagatatgcagtatgcagcaaaagtataccgtgatgatcgactccgaag

SEQ ID NO: 181037 - DNA, 75 bp, Homo sapiens
ttttattctcggctttcaggtggagtcccatgaagctgaggtcttgaagcagctggctgagaaacgagagcacga

SEQ ID NO: 181038 - DNA, 100 bp, Homo sapiens
cgggccgtcaccctgcctcccctgcgtcccgccaccggccgcttctgtcctcgagtgaaattcacatgtctgaagaagctatacaggacatattggaaca

SEQ ID NO: 181039 - DNA, 100 bp, Homo sapiens
tgcaaccagtaagttgatccatccagatgaggatatatccctggaatcacatgcagcccaactacagattcttatggaattcctcaaggttgcaagaaga

SEQ ID NO: 181040 - DNA, 100 bp, Homo sapiens
ccaagccttccttgattctctctcagccagcacagctcaggccagttcgtcggctgccagcaacaatcaccaggtgaaatgtatagatgttgttcaggct

SEQ ID NO: 181041 - DNA, 74 bp, Homo sapiens
gctcgggtggcgacttcctccccgcgccccctccccctcgccatgaagttacagaatgtctgaaggggacagtg

SEQ ID NO: 181042 - DNA, 83 bp, Homo sapiens
agatggtgtcctggatgatctccagagccgtggtacaatgcagatcttcgtgaagactctgactggtaagaccatcaccctcg

SEQ ID NO: 181043 - DNA, 50 bp, Homo sapiens
aaaacatcatggatcaatctcaaacaaagcttaagagttggacagtggag

SEQ ID NO: 181044 - DNA, 100 bp, Homo sapiens
gcgaaggctgaggtggcagcggcaggagagtccggccgcgacaggacgcggaagatccatccaaaagctatgtgaaattacgagactttgtgcttgtgaa

SEQ ID NO: 181045 - DNA, 86 bp, Homo sapiens
cactgattccccatcctatccagagattagttttagttgcagcatggaacaattacaggttaatttggagtggcccctggagtcag

SEQ ID NO: 181046 - DNA, 75 bp, Homo sapiens
gatttgaatgctgtcctttataccaaccgggcagcagcacagtactatctggccgtggtccttcagcatatctct

SEQ ID NO: 181047 - DNA, 75 bp, Homo sapiens
ctgctcagggtcttcatccagaaacgagcgtggggtagagcagcggctgccatgctcttctgtggcttcatcatc

SEQ ID NO: 181048 - DNA, 82 bp, Homo sapiens
atcttccaagtccaaggatgtgaagcggggagaggtggtgagagatgacccctgttgaggatttcattggtgtctgccacag

SEQ ID NO: 181049 - DNA, 85 bp, Homo sapiens
tttacggggtttgctgcatactatgttgccacagaatctgaattatccagaacagaaagttgtgactgttggacagttcaaaatt

SEQ ID NO: 181050 - DNA, 78 bp, Homo sapiens
ggttgtctgacactatatactggccgtgggggtgatctgcagaagattggagacctggagatgcccaaagatgagctg

SEQ ID NO: 181051 - DNA, 75 bp, Homo sapiens
tcgcagtggtcgcttcttctccttgatggagaaggaggtgtcagatttcattcaagacagtgggcagatcaagaa

SEQ ID NO: 181052 - DNA, 80 bp, Homo sapiens
cgacagcagccaggagtcatgagcgacagcggcgagcagaactacggcgagcggtgactctgatctctacttcacacaag

SEQ ID NO: 181053 - DNA, 100 bp, Homo sapiens
gacgacttcaactatggcagcagcgtggcctccgccaccgtgcacatccgaatggatcctgataacttaagtgactctctcttttccggtgatgaagaaa

SEQ ID NO: 181054 - DNA, 83 bp, Homo sapiens
gaagccgtgcccgttcttcctggagggaaagtgccgctttaaggagaactgcagaatgaagatgttcgaccacacatcagaga

SEQ ID NO: 181055 - DNA, 83 bp, Homo sapiens
gccatgagcgagcgcctccgtcccagaatggctattcaagtggacaagttcaactttgagagtttcccggagtcccctgggga

SEQ ID NO: 181056 - DNA, 145 bp, Homo sapiens
ggtaataccacctttaaaacagatgtgtaccttaagtcactcaaccctcagtggaactcggagtggtttaaatttgaggcacagtctcactctcttacccaatctggagtgcagtggtgtgatctcggctcactgcaacctctgc

SEQ ID NO: 181057 - DNA, 82 bp, Homo sapiens
ctgcatttatcaagaagtactcagcatttcaagacatgcgtcgggatgtccaggaaatttttcgcatgaccccccacgagaa

SEQ ID NO: 181058 - DNA, 80 bp, Homo sapiens
ggagctgaggaaccggaccccggcagctaaatggaccaattttgacaagatatagtgctgcagcgtgcctgatgggatat

SEQ ID NO: 181059 - DNA, 99 bp, Homo sapiens
cggggccctcctgtgacctgcatgtactgggggattcgcagggaggatgtcgggacaccccggaagctgggaaatggaaaatgtttataggaggcctta

SEQ ID NO: 181060 - DNA, 74 bp, Homo sapiens
ctcgggagctggctgaagatggctactctggagttgaggcagagaagaggcgatggcggcgatggcatctctcg

SEQ ID NO: 181061 - DNA, 83 bp, Homo sapiens
ctcaacgaatacggcgacgacatgtatgggccagaaaagagttttactacccttggatgctgctgttgacatggaaaagattg

SEQ ID NO: 181062 - DNA, 98 bp, Homo sapiens
tctgcagacttcagattcgtttctgagatttccttcgtccctgacatcatctctgtgcactgataataaccctgcagtacactaccagaagatcatcc

SEQ ID NO: 181063 - DNA, 51 bp, Homo sapiens
cgatgcttgaactgtgaaactcagatcagccagtagacatgatgagcatca

SEQ ID NO: 181064 - DNA, 78 bp, Homo sapiens
tgaagaataccaaggaggatcttttaggtcacgagaagagaatgccttctagatgcaaaatcacctccaaaccagacc

SEQ ID NO: 181065 - DNA, 82 bp, Homo sapiens
tgttctggaaattgtccagaaggtactacataaggacaagtcattagaggaggagatgttaaagtaacccatcttgcaggac

SEQ ID NO: 181066 - DNA, 131 bp, Homo sapiens
ctgtcttcagatcttcacagcacagttcctgggaaggtggagccaccagcctctccttgcggacaaggcaaaatctcagcaagttcggacctctagtacaataaggcgaacctcctctttggatacaataa

SEQ ID NO: 181067 - DNA, 76 bp, Homo sapiens
gaccttctgtgaagaactgggaaatggtggagtcaatgaagaaagtagcagggatggatgtggagctgacagttga

SEQ ID NO: 181068 - DNA, 136 bp, Homo sapiens
gctgagcctgccgccaagatgccggcctattttcagaggccggaaaatgccctcaaacgcgccaacgtgcaagccagtggaatgaatgtctacatgtcccgaagtcttgaatccattaaggggattgcggtcatgg

SEQ ID NO: 181069 - DNA, 74 bp, Homo sapiens
tctatgacaatctcatcattttctccccttcggtagaaggtgggaacatccagttgcaggaaaacaagcttaac

SEQ ID NO: 181070 - DNA, 82 bp, Homo sapiens
ttatactcctcccagtgacgggtctggagtgcgtgggggaccggctgttggcgggcgtcacaatgtagcagggaccccaggc

SEQ ID NO: 181071 - DNA, 83 bp, Homo sapiens
tagatttcgagacaacagtggccttctgatgaatactttaactctctcaacaggacaatcatctatctctccttggtgtatgt

SEQ ID NO: 181072 - DNA, 100 bp, Homo sapiens
cggcactccgggccgctcggcccccatgcctgcccgaccgcgctgccggagccccagtcaccacgttctgcgcttttccgagtcggacatatgagcagcg

SEQ ID NO: 181073 - DNA, 100 bp, Homo sapiens
tcgacacctacgacgatcgggcctacagcagcttcggcggcggcagaggcagagagtgaggaagaagatgaaatggaagttgaagaccaggatagtaaag

SEQ ID NO: 181074 - DNA, 83 bp, Homo sapiens
aaaagaaatagcaagaactgaggagcaccaggagacgcaactcatcggctacttttccaggtatgtgggagagaacaataaca

SEQ ID NO: 181075 - DNA, 100 bp, Homo sapiens
cgtgaacactctggcaactggggagtcatctgtagccccctcagaggaggagtttggccagctctatggctatcggagggcagctggaggggtccccagc

SEQ ID NO: 181076 - DNA, 48 bp, Homo sapiens
ttagagtgaatgtagttgcaccagacctgatggccaaaagaaaggaag

SEQ ID NO: 181077 - DNA, 100 bp, Homo sapiens
cagaccattgcaatggaaatgatgacagtcatgtccctttccagggacctcaaggacgactttcacagtgacacggtactctccatcttaaatgagcagc

SEQ ID NO: 181078 - DNA, 124 bp, Homo sapiens
tcaaatcagctacctggtggacaatttaaccaagaaaaattaccgagccagccagcaggaaatacagcatctcctggtggacccatgtggaaatgggacctccagatcccattctgggagtcac

SEQ ID NO: 181079 - DNA, 82 bp, Homo sapiens
ggagctgggcgcggattcgccgaggcaccgaggcactcagaggagaagatgctcatgaagcagcaggaccggctggaggagc

SEQ ID NO: 181080 - DNA, 100 bp, Homo sapiens
tccatcatcacccaggcgcggagggaagacgccctggtgctcaccaagcaaggagtggagtcaacatatcaatggagcaagtcacagtcgtcgatgccag

SEQ ID NO: 181081 - DNA, 90 bp, Homo sapiens
ggagcgagagctggagaagctgggattggagattccacccaaacttgctggtcactgggagtcttcgagtgcttcgactgaccatgatcc

SEQ ID NO: 181082 - DNA, 100 bp, Homo sapiens
caagtgttgaaaatgttaaaggctgtgctgaagaagagccgagagggaggaaagggaggcaagaaggaagcagatcatcagccatgacacccggcgcttc

SEQ ID NO: 181083 - DNA, 100 bp, Homo sapiens
gaggccgccgatcgtcaagaggatagggagacaggagttcctgctggcgggccccggagggctgggatcataaaaggattcctctgtactagcacactcc

SEQ ID NO: 181084 - DNA, 98 bp, Homo sapiens
tttcccagaagttgttctaacgctgcctttgctttaaaacagtattacttgcgattagccgatgaattacatatgccatctctccctgaaatgatgtt

SEQ ID NO: 181085 - DNA, 90 bp, Homo sapiens
cgttggtcggcggcagtcgggccagacccaggactctgcgactttacgtccaagaggctaaatgtgagaatccagaatttgagagaaatg

SEQ ID NO: 181086 - DNA, 50 bp, Homo sapiens
cagcgctcagcccacctgtgattatggagaccagccactaactggggcgt

SEQ ID NO: 181087 - DNA, 100 bp, Homo sapiens
gggacatgcatcgtcccctggactctctcaactgaagaaatcaggggagaaacccctgcttggtggaagcctgatggaatatgcaatcttgtctgccatt

SEQ ID NO: 181088 - DNA, 97 bp, Homo sapiens
gccaggaccggccgaacgcagagtaagcccagaggtctccaccccacgggaggaaggctgaggccaagaccccggaagagatggaccgcgtgaccag

SEQ ID NO: 181089 - DNA, 100 bp, Homo sapiens
gtcaataacctgaacactgaccagctctcagttgcacttctcaaagagctcctgaaattattcttgggttaccattttgtgaagctattgatatgtggtc

SEQ ID NO: 181090 - DNA, 82 bp, Homo sapiens
cgcctccctggccggggcgcagttcggaggttcagtaagactttgaccccgacgcaggcttcagtgattgccgcggatcaga

SEQ ID NO: 181091 - DNA, 74 bp, Homo sapiens
tacctgcagactcgggccgtggccgcctacaggttgaaccatgattccggtgacagagctccgctactttgcgg

SEQ ID NO: 181092 - DNA, 90 bp, Homo sapiens
aattacatgatgtatcagaaaaactctctcagcggctttctgaactagattggttaagtgggcagaccaacatccacctcagcaaaaact

SEQ ID NO: 181093 - DNA, 74 bp, Homo sapiens
agagtctttggaggatgcggctttgatgggttccaggtgccctggctggagtcagtcctcatcgtagtcagcaa

SEQ ID NO: 181094 - DNA, 99 bp, Homo sapiens
tctgagaacagcagcagcagcagtgatggtggcagcaacaaggagggaaaaaagagcaggtggaaaaggaaagcaaattatgcgcacagccatgaagta

SEQ ID NO: 181095 - DNA, 100 bp, Homo sapiens
ctcagccgaataagcctggaaagttctgcatccttggaagctccctgggaagctgaatgaagcggatcataacggagatctggcattagatctagccctc

SEQ ID NO: 181096 - DNA, 50 bp, Homo sapiens
cctggaggaggtgttgaaaggggggccctcctcgccaaagacagcctaga

SEQ ID NO: 181097 - DNA, 131 bp, Homo sapiens
cggggctgcagctgcaggggctgagctggctgggcaagcgcgggccgcggaggaggtctcaggccctgaccctctattctgcaccctgtgagccaccgagactgaaccaaacccaggaagcggcgccacca

SEQ ID NO: 181098 - DNA, 90 bp, Homo sapiens
ggcccgggcgccatcgagccttggcggcggacgtgcagctgcatatctatgtgagactgaattttcctcttagacttcagctaaaactgt

SEQ ID NO: 181099 - DNA, 98 bp, Homo sapiens
caaatttgaaagacaagagttctttagtttcatctctctataaagttatccaggagccacaaagtgagctggaagaagaaagatctgtgctcaataat

SEQ ID NO: 181100 - DNA, 129 bp, Homo sapiens
cagtcaaaaccccagcgtttgcagaatctgtcacagagggagatgtcaggtgggagaaagcctccagggtcgtatagacctccccctcctatgggcaaaccaccaggttcaattgtaagaccctctgct

SEQ ID NO: 181101 - DNA, 50 bp, Homo sapiens
ctgttacttccaagtcatcaccagaaaggacttcaaacaagtgtgaagag

SEQ ID NO: 181102 - DNA, 50 bp, Homo sapiens
tggaagtcagagctgcacaaagggaaaggttggttgaatctggcgatgtg

SEQ ID NO: 181103 - DNA, 98 bp, Homo sapiens
tgctgcataaagtttgtgatacaggtatcagcagatgttgcacacaaacttggtataccttgctacaatagcagattctaatcaaaatatgcagtctc

SEQ ID NO: 181104 - DNA, 73 bp, Homo sapiens
cctactcccagatgcatccgtgtcaaaatgggacgtcggtcatcagatactgaagaagaaagcagaagcaaga

SEQ ID NO: 181105 - DNA, 75 bp, Homo sapiens
agaaacttaaccatcttttgaaagcccttgaaacgtcaaagatgcacgggaacaagcagcacctgcagaaggact

SEQ ID NO: 181106 - DNA, 100 bp, Homo sapiens
tggcccgggacctgcagtgccccaagaaggacatttcatatatatggatttcacagctacactcgatccacgccccacaccacatacaggctgctgtctc

SEQ ID NO: 181107 - DNA, 86 bp, Homo sapiens
agaccgtgaccgagagcgtgaccgagagcgcgaatatcgtcatcgttagaagcggagaaaacccctttgccactgtgaaactccgc

SEQ ID NO: 181108 - DNA, 98 bp, Homo sapiens
gagcggtggcgtcgttgtcgccccctcctcgtcgggaagaatcgtttggtctcctgccgtgcccggttcatcatgcctagtggcgtataagaagaccc

SEQ ID NO: 181109 - DNA, 100 bp, Homo sapiens
gcaggatgaaagtgagcagtccagaaagcggcttatcgaacagagccgggagttcaagaagaacactccagagatatttggagttcttacaacatggcag

SEQ ID NO: 181110 - DNA, 89 bp, Homo sapiens
cggacaccgacgcgctcatctgctggagcccgacaatgcagatcttcgtgaagactctgactggtaagaccatcaccctcgaggttgag

SEQ ID NO: 181111 - DNA, 82 bp, Homo sapiens
gtgctgaccctgtaacccaaaggaggaaacagctggctaagctcatcattgttactgggtgtccatcgcgcttccttcactg

SEQ ID NO: 181112 - DNA, 99 bp, Homo sapiens
atctggaagacgcgctcctgcgccgaaagctgacttcatgagaccgaggatctcgttcgttgatcgatgctacatattcagcatgttagataatgaggt

SEQ ID NO: 181113 - DNA, 100 bp, Homo sapiens
tacgctggaaaaactccaacagcttcatatggacagatggacttcaaatgctgtttgtattccagagactaggttcgatacaagaggctgttttcctagc

SEQ ID NO: 181114 - DNA, 50 bp, Homo sapiens
acaggggccactcagagtcgcccgagaattgttctggagaatcatgtagc

SEQ ID NO: 181115 - DNA, 100 bp, Homo sapiens
cttttctgccttcaggatcctccgctcccgagctctctatcaatatcagctcacatcattgaaaagataattttgaagacatgttttgctgaaaagacac

SEQ ID NO: 181116 - DNA, 98 bp, Homo sapiens
tgtctccttccgcagacgggctatgtgcacccagatgagttcttccagtcccctgaggtgatggcagagttagcacgacatcagtatgagctggtcac

SEQ ID NO: 181117 - DNA, 98 bp, Homo sapiens
gacaacatggcctttggaaagcctgccaagtcaataactgggagatggacaaactagagatggaagatgcagtcacatttttgaagactaaaatctat

SEQ ID NO: 181118 - DNA, 148 bp, Homo sapiens
tgcccaggtggaccccaagaagaccattcagatgggatctttccggatcaatccagatggcagccagtcagtggtggagcttctgcagaaagccgtcattacacctgattttgaaaaaaaccactgtgttccaccatatagtgaatca

SEQ ID NO: 181119 - DNA, 97 bp, Homo sapiens
tttccctcaaattttgtgaaagaattagaggtaacagatgatggtgaaactcatgaagcccaggacgattcaggcttttaaagaagcagttttttca

SEQ ID NO: 181120 - DNA, 98 bp, Homo sapiens
tgacagacgcaagatggcggacagtgcggaactaaagaacatgaaaggctcccggagcagcgctgactcctccaggaaacactgaggcagacgtgtcg

SEQ ID NO: 181121 - DNA, 75 bp, Homo sapiens
ccggccccgccaacgctgccgccgggtatgctaaaggttacccaccttattctccatatataggaagttcaccca

SEQ ID NO: 181122 - DNA, 88 bp, Homo sapiens
gttgctgagccgggagcgctgactggcccggctgggcaggataaagagttctatctgtcttctacgcgggaaaatctatgatgctcta

SEQ ID NO: 181123 - DNA, 75 bp, Homo sapiens
atctcagaataaacaaaaaggagttggatattttaacagtatcggcacttcagatgctaaagaaaacccttatgg

SEQ ID NO: 181124 - DNA, 51 bp, Homo sapiens
agtcacctactgtaccagagtttcagacgccttctggcaagaggggagagc

SEQ ID NO: 181125 - DNA, 50 bp, Homo sapiens
tttaagcctgatctaacccctagaaacagatggaacagatttggagttga

SEQ ID NO: 181126 - DNA, 97 bp, Homo sapiens
caggaggtgctcaaaacgcccgtgcggaccacggcctgtcagcacgtgtaaaatttatgaagaccattcctggtacagcactggtagaaatgggtga

SEQ ID NO: 181127 - DNA, 75 bp, Homo sapiens
aaggagatcaacctgaggccgcagatgtcccagatcgtcagtatttaaacagatcacatcatgcgtgagtacaag

SEQ ID NO: 181128 - DNA, 100 bp, Homo sapiens
cgctggtcccgcggcccaggctccggctctggcccaagctccggcccggccggccgctgcgttcgaaagccacaatggtgcgcatgaatgtcctggcaga

SEQ ID NO: 181129 - DNA, 83 bp, Homo sapiens
gggagggcaggagagcctgaggagtggcggggccgccaggtctcggcgcggaagatggccggcggcgtggacggccccatcgg

SEQ ID NO: 181130 - DNA, 100 bp, Homo sapiens
aaggtcccccttctgggaaagaccgagtgaagaaaggtggatcctacatgtgccataggtgaacagcagagaatttcaaaggaccttgctaatatctgta

SEQ ID NO: 181131 - DNA, 75 bp, Homo sapiens
agagtgacagcagctttctggtcaaggttgagactgagctaaagttaatctgttgtgacattctggatgtactgg

SEQ ID NO: 181132 - DNA, 75 bp, Homo sapiens
gaaggggttaattcaacagttcaccaccattaccggctgatgggaaccaccctgtagaggtccatctgcgttcag

SEQ ID NO: 181133 - DNA, 87 bp, Homo sapiens
aaaactcgctgacttcggccttgcccgcatctatagtttccagatggctctaacctcagtggactatgtcaaagctggtggcattct

SEQ ID NO: 181134 - DNA, 82 bp, Homo sapiens
caaaaatagtgatagctttgataaaatagcctaacatggcagaccagagacagcgctcactgtctacctctggggagtcatt

SEQ ID NO: 181135 - DNA, 97 bp, Homo sapiens
cagccacccatgttcatgaggccagcagcagatcccacgccattttcacgatccactacacgcagtccccagaacagtttttcaactgtatctcaag

SEQ ID NO: 181136 - DNA, 90 bp, Homo sapiens
cccgtgctgccgccgcatctgctggactactgctgctccttgcccgacttgaaggtagaagttccttgaaagaaatagaaccaaatctgt

SEQ ID NO: 181137 - DNA, 82 bp, Homo sapiens
cggggcttccggaggtcgcggagatggaattggagcagagagaaggggagcatcgagtacagctgtccggcctccaacgagt

SEQ ID NO: 181138 - DNA, 101 bp, Homo sapiens
tgtgagggtccatcttcttctgatcacagatggagtggaatggcttgaagatggtcatcatcagatttgaaatatttaaagtggatacaaaactatttcag

SEQ ID NO: 181139 - DNA, 74 bp, Homo sapiens
gaacctaacagaagacattggccaagacgatcaccaaacagggatatagaagtggtggaagcagacagaagagg

SEQ ID NO: 181140 - DNA, 80 bp, Homo sapiens
gcagctgatttgaaattaaaagtgaaagaaaatggcccgaaccaagcagactgctcgtaagtccaccggtgggaaagccc

SEQ ID NO: 181141 - DNA, 75 bp, Homo sapiens
tgcctcaccaagtcacatgacaagcaattctctaaccatggcacaggtagagaaacgtggaggtttgctccggaa

SEQ ID NO: 181142 - DNA, 75 bp, Homo sapiens
gtgacactggagaactacagccacctggtctcactaggccagctgcgggccgtccagcggctgtgccacttctac

SEQ ID NO: 181143 - DNA, 83 bp, Homo sapiens
ctccgcgctatggctgcgttcggccgtcaggaaaacgcagcacagttcccttgaccagagttctccaccccagagcggagtgt

SEQ ID NO: 181144 - DNA, 100 bp, Homo sapiens
taaagggctctgaaagctagaagaaaaggtgtacttgcaagaaacctcaggacttgagtaacagcaacatggttgaaggggcccggccaggactcgggga

SEQ ID NO: 181145 - DNA, 100 bp, Homo sapiens
gaacaagtttctcatggcactcaaaatagtgagacctcgctacagtggtccagcacctcctcccaacagatttaatatctggcctggatatcgctgggac

SEQ ID NO: 181146 - DNA, 100 bp, Homo sapiens
ctgttcggcgaggacaacgtgcgcgccgctcagaagtatacgctcaacggcaagaaagtggaagttgccgtcaaacagatcatcgctggaaaagccgtgg

SEQ ID NO: 181147 - DNA, 82 bp, Homo sapiens
aggatagaccaagcaaacccggattccccgatgagccaatgcggagagctatttgtccaagaactctgaagatgatgagcta

SEQ ID NO: 181148 - DNA, 99 bp, Homo sapiens
gtctatcaacctgctcactgctgttggcaccaccacccgagactccttaaccgagatcaacctgtctgatgaggacggggacttggttgccttttccag

SEQ ID NO: 181149 - DNA, 100 bp, Homo sapiens
cttcttctcagctgagtcctgtgagaatgggaacagaactgtttgaaaatctgaacacagttgctgagtgtctgttttctctggtcaacggtgatgacat

SEQ ID NO: 181150 - DNA, 100 bp, Homo sapiens
ctaaactggttgctaaatggaaagatctttccctagatcattctgacctagttgcagagttgttgaaggagctgtctaaccataatgagcgtgtagaaga

SEQ ID NO: 181151 - DNA, 97 bp, Homo sapiens
ttcgcctgtgcacagcttgccactggcgctgcctgccgcctggtggaggctgtgctctcaggagaggaaatggtgttcacactggccctgaatcaag

SEQ ID NO: 181152 - DNA, 100 bp, Homo sapiens
gtccagagccaaggtccagggggcaaggtcgtggaggaagctggcccagttgcaggtggcctatcaccagctcttccaagaatacgacaaccacatcaag

SEQ ID NO: 181153 - DNA, 82 bp, Homo sapiens
ccccgcaccacctcctgctgccttcccgtcgccgctcccgaagcttttccagggtttccaggcctgaggtgcccgccctggc

SEQ ID NO: 181154 - DNA, 107 bp, Homo sapiens
ggcgagcggacggggtcgagtcagtgcgttcgcgcgaggccaggtcagagcagcccaccatgggatggggagggggtggaggctgcaccccgcgcccacccatccac

SEQ ID NO: 181155 - DNA, 100 bp, Homo sapiens
ccgcagcgggaggaagcactgaaacaacacaaaaccctatctcaagaacttgttaacctccggggagagctagtcttactactttgaccgcgatgatgtg

SEQ ID NO: 181156 - DNA, 75 bp, Homo sapiens
cggaatcccgcgcgctgcccacgattcgcttctgaggtatcatgaactgatcactaaatatgggaagttggagcc

SEQ ID NO: 181157 - DNA, 74 bp, Homo sapiens
cagaaaccccgttgacaaggcactgctttttcatgacgcaaacggggattcagcgtccgatcctttggaacagg

SEQ ID NO: 181158 - DNA, 76 bp, Homo sapiens
tacatagaaagtgaattttgtagaaggagaaggaccatgacttcttccagcatgtggaaatgcacctgcggtctga

SEQ ID NO: 181159 - DNA, 75 bp, Homo sapiens
cctttatcaaaatcccaggctgtcggaagcaagaactcttagctgtggaagaacatcatgcctatttataaccac

SEQ ID NO: 181160 - DNA, 50 bp, Homo sapiens
tcctgtggaacgttttccagagtccacctaaacccactgtgttcatctct

SEQ ID NO: 181161 - DNA, 88 bp, Homo sapiens
ggcggcggcgcccgcgggtggtataaaatggcggatttcgaagagttgaggcaataatgacgatgaggacctgacaccagagcagaag

SEQ ID NO: 181162 - DNA, 74 bp, Homo sapiens
gcctttgaaaatcaacgacaacttgagcacaggctgcctgctcgaggagggcctctgcggagcgtccgaggcct

SEQ ID NO: 181163 - DNA, 98 bp, Homo sapiens
gaagttcgaccccaacgagatcaaagtcgggaagatcagttttcctgccatccaggctgctccctccttcagcaactcattcccacagatcttccgag

SEQ ID NO: 181164 - DNA, 101 bp, Homo sapiens
gcgattatgacctctctccaaagtctatgtcccggaactcctccattgccagtgatattgagatggaagattttcgaggtatagcagaagaatcatttcca

SEQ ID NO: 181165 - DNA, 96 bp, Homo sapiens
taagtaactggtcgaggttgtatcagtaagaagggagcacggaacagattcaagctcaggtgtcatggagaaactccagctgggcccagagattct

SEQ ID NO: 181166 - DNA, 82 bp, Homo sapiens
ttttcttctcgtagagtaatgtttgaaaatgaacaggattttcctaagcccagtgaagagaagattaagttaattctcaatc

SEQ ID NO: 181167 - DNA, 51 bp, Homo sapiens
ctgtaatccagagtatcatattcaaagattattcagagctgggagagcttc

SEQ ID NO: 181168 - DNA, 100 bp, Homo sapiens
atctcagactactgtgtgtggattcagaaagtcaaaacatatgctgtcaggaggataagagatgccttcagagaaaataaaaatgtaaaggatcctgtag

SEQ ID NO: 181169 - DNA, 87 bp, Homo sapiens
tgcggagtctgcagggccgcgccttgcggctcgcagcctccacggttgtggtctccccgcaggaactttatattgctgttggaatat

SEQ ID NO: 181170 - DNA, 120 bp, Homo sapiens
tcagcttccaaagagatacagggcagaggaaaatgcaagaagactgatggagcaggcttgcaatattaaatgtaaacaggaacatcgataagtagtgtaaaaacttgcacaatgaaatcc

SEQ ID NO: 181171 - DNA, 145 bp, Homo sapiens
atctattgcatcaactgcacgttggtacctactgagacacttatatgccaaagatgactatgagcttattgacgatggaaggttaacatttcatccaggaagtcaggtagtgaaacttccttttatcaactttatgaagacacgt

SEQ ID NO: 181172 - DNA, 75 bp, Homo sapiens
ctcccctactccggaaacattccaaatgctcagccccccaaaggtccccttcccctgagcccatctacaatagcg

SEQ ID NO: 181173 - DNA, 106 bp, Homo sapiens
ggaggcgggagcaggagcccgcggccggccagccgaagatggtggcggctactcctcctgatccagagacaatggccccgatgggatggagcccgaaggcgtcatc

SEQ ID NO: 181174 - DNA, 98 bp, Homo sapiens
ctgccgacaccgtctggcctgccatggagcaagatgaagaagtcgagatgacgcggatggcggtccagtttgagctggaggacctgaacctgcggcct

SEQ ID NO: 181175 - DNA, 51 bp, Homo sapiens
ctgcagcctcggcggtcagcagcagcgtcaccctttacaccagaaagctgg

SEQ ID NO: 181176 - DNA, 89 bp, Homo sapiens
ctggcctctgggcatcgcagccttctacttgtcccatgagagagaactcgatgccaccgcaacggtattggcgaaccggcaggatgaaa

SEQ ID NO: 181177 - DNA, 107 bp, Homo sapiens
cttcctggccgaactaatagaggcccaagatgaagagaatcatgctgttgtgtgtgagataacaacgaacttgatgcaagtgataggtttgccaaggtcagacctct

SEQ ID NO: 181178 - DNA, 82 bp, Homo sapiens
aaaacaacttcgagggcagaggtctcccttgatctgagaatggctacctctcgatatgagccagtggctgaaattggtgtcg

SEQ ID NO: 181179 - DNA, 75 bp, Homo sapiens
cattcttgcagctgcctacaaattcaagagtgaccagggatggagcacgtttgccgtggacgggaaagattgcaa

SEQ ID NO: 181180 - DNA, 110 bp, Homo sapiens
ggatgggagtgaaggacggaagaggccctgcggaggcggcggtgcagcgctccgacaatgcagatcttcgtgaagactctgactggtaagaccatcaccctcgaggttga

SEQ ID NO: 181181 - DNA, 100 bp, Homo sapiens
cggcgctgctgaccgacatcgaaggatctcatctggccaccgcgttctggaagaggcgagagggagagcgtgcgcgagaggagagagacggcgggggaaa

SEQ ID NO: 181182 - DNA, 82 bp, Homo sapiens
cgctggcagccgcggatctcaccgccgctcagggtattgacctgatggacatggcttcggacatcctgcagcccaaaggaga

SEQ ID NO: 181183 - DNA, 100 bp, Homo sapiens
gcttctgagacggcggcagcagcggcattcagcggggatctgatgagcttctttcttctggcatcattaacggaccttttaccatgaatagttctactcc

SEQ ID NO: 181184 - DNA, 87 bp, Homo sapiens
tcgcgcctcttcgccgtcatccgcttcgaaagcatcatccacgagttcgacccgtggattcagtggtcccaatttaaaggctatttt

SEQ ID NO: 181185 - DNA, 50 bp, Homo sapiens
ctagtggccacgctgcagagcctcggcccagctctgaccagactccatgc

SEQ ID NO: 181186 - DNA, 100 bp, Homo sapiens
gtattacatccagcagccagaatggcccagcagcaaagaaacctggataacatcgtcttgcaacaacccagaataggtagcaagaggaaatctaagaaag

SEQ ID NO: 181187 - DNA, 75 bp, Homo sapiens
ttgcagccctatgagcatctcatctgcggcaagaacgccaatggtgatcccattaagatactaatgccatcactg

SEQ ID NO: 181188 - DNA, 100 bp, Homo sapiens
aaaaaaattcctggaaaaagaagtccaagaagcaaaaaagggactgctaagaagataccaccagtttggctgtagcagcaattcctgaaggtctccccat

SEQ ID NO: 181189 - DNA, 75 bp, Homo sapiens
tgcaacctgttgccaaagttacacatagtacaggtggtcttcgagggatagcacgaggtggtctgacaggactaa

SEQ ID NO: 181190 - DNA, 82 bp, Homo sapiens
ccaggtgtaagcgcagaaagcaggcgaacccgcggcgcaataacggatattgacggccaagcactcctgcttctgacccttc

SEQ ID NO: 181191 - DNA, 100 bp, Homo sapiens
caacgccgagatcgagaagcagctgcggcgggacaagcgcgacgcccggcgcgagctcaagctgctgctgctcgggtggactccgacgaccagtggggag

SEQ ID NO: 181192 - DNA, 112 bp, Homo sapiens
cctggagcctcagttggaagcagccgatccagcctgcggagcctgtggggcagtgtaaacaggaacatcgataagtagtgtaaaaacttgcacaatgaaatccgaagccaag

SEQ ID NO: 181193 - DNA, 100 bp, Homo sapiens
gggtcccgaagccccctgcaggaactctacaacccaatccagagctcttcagtatccccatcagccagtttccgaggtgctgagaagcacagaaactccg

SEQ ID NO: 181194 - DNA, 50 bp, Homo sapiens
ctgcttacctcattgaaacaagcatgccttggactttattgtgggaagac

SEQ ID NO: 181195 - DNA, 90 bp, Homo sapiens
tgagaatgctaatggagcccctgccatcacactgctaatacgagaaaagcagcccataacggtacgtgaaggccaaaccatctgtgtgcg

SEQ ID NO: 181196 - DNA, 83 bp, Homo sapiens
ccatgtctaccatgactccctgggaatccatcaagggaagctctgtcagttcctctgtgacgagggtgcaggtatctctgggg

SEQ ID NO: 181197 - DNA, 98 bp, Homo sapiens
gaagggtggcacattttacagaataagtcagatgactttctgtacgtcattgtccctgagaatggagaaccagtaggcaccagagagatcaaatgctg

SEQ ID NO: 181198 - DNA, 100 bp, Homo sapiens
ctggcggctgctgcttgcgactgcggaggccgggcgaggccggtgaggacgcggcgggcgagcgagaggccgaggaacagcgatttcttgcgggagctcg

SEQ ID NO: 181199 - DNA, 51 bp, Homo sapiens
gcgtatttcgtcgagaatttttggagagcctcaggagaggggcaccatctc

SEQ ID NO: 181200 - DNA, 100 bp, Homo sapiens
cgctcattgggaatttagttaagctacgaaatgtgggaattgtggacccggctactccacccctctggaggccatgaaaggtaattgcccatggtctgag

SEQ ID NO: 181201 - DNA, 100 bp, Homo sapiens
ggcggcagcgctggactaggtggcaggtgctggagaatctggtaaaagcaccattgtgaagcagatgaggatcctgcatgttaatgggtttaatggagag

SEQ ID NO: 181202 - DNA, 83 bp, Homo sapiens
tcccaagaacaggctttgacccttctttaaaagacatatctgaagagatggattaagaatgctttggattaaggattgtggag

SEQ ID NO: 181203 - DNA, 98 bp, Homo sapiens
agttgttctccgtaaccagaaacaggttcattcattggagcaggccgggctctcgccatgggtcactgtcgcctctgccacgggaagttttcctcgag

SEQ ID NO: 181204 - DNA, 100 bp, Homo sapiens
cgcctagcgacgcccaacacctgtccaaacaggtgtatcaaccattttaaatctgccctcaaaagcacagaacaaatcagacagcattttgctcacagag

SEQ ID NO: 181205 - DNA, 100 bp, Homo sapiens
ccactgcagccatgatctccttaacggacacgcagagcattgcttctatgacagtgccagtgtacattgcggaggtctcaccacccaatttaagaggccg

SEQ ID NO: 181206 - DNA, 51 bp, Homo sapiens
gacccgcctggctgcgagatatatgtgtatccgccttctatccagccggca

SEQ ID NO: 181207 - DNA, 100 bp, Homo sapiens
attaaattgaaaggagagacaaaaactcctaagaaaaccaaaagttctccagctaaaaaagagttcctggcagacatggaaaataatgtactttttcggg

SEQ ID NO: 181208 - DNA, 90 bp, Homo sapiens
cgccgggttgctgtgcgactattctccgggagccgtccgtgtcaccgccggaacctggcgcaggatgaatttgacaagctgaggcctctc

SEQ ID NO: 181209 - DNA, 83 bp, Homo sapiens
catttcctcctgacggctgtacttgagcagtcacctggcacagttcgatcctttggtacagaagacagaccgacagatcgtcc

SEQ ID NO: 181210 - DNA, 98 bp, Homo sapiens
accgagagcgtgaccgagagcgcgaatatcgtcatcgttagaaggttctatttcaccaattggcatggaaccaacgacaatgagcagtcagtgtggcg

SEQ ID NO: 181211 - DNA, 100 bp, Homo sapiens
taacaatcgcaaagggaaacttatcttcttttatgaatggagcgtcaaactaaactggacaggacaaggagactggctttcacagaggtttgggttgggt

SEQ ID NO: 181212 - DNA, 100 bp, Homo sapiens
tttcttcaaaccaagtccttaaaggtttccaacattcctgtcactgctattaggatatcttatactgcaatggcaccagcatgatatcattgatcattcc

SEQ ID NO: 181213 - DNA, 98 bp, Homo sapiens
cgaaattagaggagtgcgtcagaagcattcaagcagacggcttagtctggggctcatatacttgccagaactaatacagctgatgaaatacctgacct

SEQ ID NO: 181214 - DNA, 100 bp, Homo sapiens
cttcttggtgccttggttcatccctaagggtcctaaccgggggttcaaagacactattataaatgccaagtatggagggcacacagaggcagtacgccgg

SEQ ID NO: 181215 - DNA, 100 bp, Homo sapiens
gaggacacagccctgtcagaggcgagtgagaaggacgaaggggactcggatgaaggccaaggcagaggcttcctcaggagaccatcccactgacacagag

SEQ ID NO: 181216 - DNA, 99 bp, Homo sapiens
ccggaataattcatgaagaaggggctggatccgtgggtcagagaacacaggaccagtttgccatcccaaggccgaagttacagaatgtctgaaggggac

SEQ ID NO: 181217 - DNA, 100 bp, Homo sapiens
actgctaattcagtctgacaatgacactgttattaatgattggtttaaagttcttagtagtacaatcaataatcagctgattttggagtatctgcacaga

SEQ ID NO: 181218 - DNA, 100 bp, Homo sapiens
aatttgttacgcaagtatcgccatggcgacagattatgactgctggaaggagcacgaggaagcagtccaggggcaagttcatcctactctcgagtctaat

SEQ ID NO: 181219 - DNA, 90 bp, Homo sapiens
gtgaagattccaagttcaggagaactcgaccgcatcaacaacagcaacttgtgattggcggtgaccggatattcagttgcacatccccac

SEQ ID NO: 181220 - DNA, 101 bp, Homo sapiens
caagagtagagccaaatattaaatggtttgatattgatgatgttaagaagttcaaaccgggttacctggaagctactcttaattggtttagattatataag

SEQ ID NO: 181221 - DNA, 100 bp, Homo sapiens
gatgagtctgtttgggatcccgctgtggtacttctcgcagtccccgcgcgtggtcatccagcctgctatgggatggatgaagaagagaaccactatgtct

SEQ ID NO: 181222 - DNA, 97 bp, Homo sapiens
ttcaggcaaacctttctctgttcctagaggcagctagtggcttctatactcagcccagaagaatcagtgcggtttctgtggcagagcgagttgcatt

SEQ ID NO: 181223 - DNA, 74 bp, Homo sapiens
cggagcttctcagaagacagagggttttcttttgaggaatgggtcgggaagttgagaatcttatattagaaaat

SEQ ID NO: 181224 - DNA, 75 bp, Homo sapiens
cttcatctcctcaacatggaaactaagtgtacagtattttctccaaggtacactccgatcggaatgtatacccat

SEQ ID NO: 181225 - DNA, 98 bp, Homo sapiens
cagctttttacttgtgcccttctggagtttcaaatcctgctctactcacagctatatttgccttccctccatgatctccaacactatccgataaagta

SEQ ID NO: 181226 - DNA, 75 bp, Homo sapiens
tgcaaaggctgtgtgtgaaatgagtaaacaatctttgcaagtcctaagctggtggaggacaccttcaccatagat

SEQ ID NO: 181227 - DNA, 100 bp, Homo sapiens
tactgacctgtaaatcatcctttaggtgaatgaaaactttgccattgatttgatagcagagcagcccgtgagcgaggtggagactcgggtgatagcgtgc

SEQ ID NO: 181228 - DNA, 100 bp, Homo sapiens
aaacagctctggaaaatgacagccttcatttctctgaacatactgccttatgggacagatcaagcagaatggctaatgcggatctggtgaagtatggttt

SEQ ID NO: 181229 - DNA, 100 bp, Homo sapiens
ccaggtacaatgcaaagcttaatgggaccccaggatgttggaaatgattgggaagtccttggtgttcaccagtttagtccttatgagtggtataatccac

SEQ ID NO: 181230 - DNA, 51 bp, Homo sapiens
gttcctcaagatggagactttgactttgttatgtgcagagtctgattagac

SEQ ID NO: 181231 - DNA, 74 bp, Homo sapiens
acaaaacttcaagccaaacatcaagcagaatgtgatttgcttgaagatatgagtttctcaagtcaaagaaggcc

SEQ ID NO: 181232 - DNA, 75 bp, Homo sapiens
ggccaccggaggagcgggagccaagcagatcttcagtttagatcttggaggcatatcaactgtggttctaaatgg

SEQ ID NO: 181233 - DNA, 75 bp, Homo sapiens
ggaggctgatcgcgcccagaagaaaaagcttgtggtgaaggggggcaaaaaaaagaagcaagttctgaagttcac

SEQ ID NO: 181234 - DNA, 82 bp, Homo sapiens
ggtgcttttgcacttgtgtttaaaagtgttcattttcccgggcaagcagttggcacaaggctgaccaactgactgaagagca

SEQ ID NO: 181235 - DNA, 101 bp, Homo sapiens
ctgtgaacagtacgcagtgaatgttatccgttcttccccctctccttcctggtcaacagctggctcccagggatgctggatgacctctttcagtccatgtt

SEQ ID NO: 181236 - DNA, 75 bp, Homo sapiens
gggcttcacttccttaggaatggaagaagaaagaattgaaaccgcacagcaggcagtgtgtgaagaaaccctgaa

SEQ ID NO: 181237 - DNA, 95 bp, Homo sapiens
ccctcttgataaaaagagatgtggggggattctcgacctgctaacagaactggaccttttcggtggggacccaaactgtatgcattgttccagat

SEQ ID NO: 181238 - DNA, 83 bp, Homo sapiens
tcatcaaggacttggcctccatggtgtcagagcaaggagaagctgttgatatggctcgtggacagcagaaaattcagtctcag

SEQ ID NO: 181239 - DNA, 101 bp, Homo sapiens
cccatctggatgccagccacctcacagagaacctgcccaaagctgcatcagagctggggcaacaacccatgactggtagtccatcctttctacgcttattg

SEQ ID NO: 181240 - DNA, 138 bp, Homo sapiens
tggacactgcttagagaatcctctccaggaatgccacccagcacagttagaagaatgggctctcaaagggtggatggaagcatgcctaggggaagatctgcctcccaccacagaactggaggaggggcttaggaatgg

SEQ ID NO: 181241 - DNA, 75 bp, Homo sapiens
gagtcagtgcgccgctctccagcccgcttgaacggtaccagatccccaggggctgcagggctcaccagcagagat

SEQ ID NO: 181242 - DNA, 75 bp, Homo sapiens
gttgagcactcggtcccaaaaaggcaaagactaatagggatgccaaaggaaaaatatgatcctccagatcctcgc

SEQ ID NO: 181243 - DNA, 100 bp, Homo sapiens
aacttatttccagggagtacgtcttgataactgccactcaacacctcttcacgtagctgaggagctgatggtacacacatggatggtgatcaaattgttg

SEQ ID NO: 181244 - DNA, 83 bp, Homo sapiens
cgaggataagccaacctttataggaattacatgaatgacagtcttcgaaccaatgtgtttgttcgatttcaaccagagactat

SEQ ID NO: 181245 - DNA, 100 bp, Homo sapiens
atgcagttcatcagccaccgattcccagaagatcatgatcccaccattgctggactgggcagcctttggggtcatgacccttccctccatcggcatcccc

SEQ ID NO: 181246 - DNA, 100 bp, Homo sapiens
gaggttcagctgatgaagcttctgaaccatccacacatcataaagctttaccagggtctgggagagtcgggggtgttcctggggtgttccgtgtttttcg

SEQ ID NO: 181247 - DNA, 50 bp, Homo sapiens
cagagcggcctgcgccagcgagggtgagcccctccagactccgaatagga

SEQ ID NO: 181248 - DNA, 98 bp, Homo sapiens
cagcatcgaccagtccaagctgcctggagtcaaggaagtggttggaagtgtgccagatgcgacctgcgagaaaacctctggttgaatctgactgacgg

SEQ ID NO: 181249 - DNA, 100 bp, Homo sapiens
gttccagagaacgttcgagatctcgtgggtcgaaatcaaggacctccacaaaaagtactcgtacatccgcaagaccaggcctgacggcaactgtttctat

SEQ ID NO: 181250 - DNA, 74 bp, Homo sapiens
gaaagtgtataactacaatcacctaatgcccacaaggctggagtatagtggcatgatcatagatcactgcagcc

SEQ ID NO: 181251 - DNA, 83 bp, Homo sapiens
ctgtggccaaagaccttaggagagacgagcagccttcagggagcgtggagacaggaaacttggatttaactggccagaagcag

SEQ ID NO: 181252 - DNA, 98 bp, Homo sapiens
tgtgaaaacagaagctgtggctgttgaggaagaatttgaaatcattcatcattgttcatccatcttggttcatcagaacaatccttgctgtgacacga

SEQ ID NO: 181253 - DNA, 100 bp, Homo sapiens
gcctggctaggagcgccgaccgcagggcctctacggcaatcagaaacggagactgttcatctgtttatcccagctctatcagtcggtgccatcatcggca

SEQ ID NO: 181254 - DNA, 75 bp, Homo sapiens
ttgtcttccactaaagagttggacctgtcagtgaaattaaatggtggcagacatgtccaaggaatattgcgggga

SEQ ID NO: 181255 - DNA, 100 bp, Homo sapiens
ctgcggcgccgaggcgcggcggcaggacgggaaccacgcgagctgcagccagatgacatcatggattcatcccttacccgccggggacagatctgctggt

SEQ ID NO: 181256 - DNA, 85 bp, Homo sapiens
aaatgatagaaacaactttagatatggatcaggttcaaaatcaaaggaagcccagaagggaggtcatttttacagtgcaaagcct

SEQ ID NO: 181257 - DNA, 83 bp, Homo sapiens
gacagcggcccggaggacctgcctctcgtcaggagcccagcagccggggccgccctattacaccgacccaggaggaccgggga

SEQ ID NO: 181258 - DNA, 90 bp, Homo sapiens
ccttgacctgcgacctggagtctctgcgcggcacgaacgacctgggaggctgcaatgggacctcgtccatggccgtgatcaaagattact

SEQ ID NO: 181259 - DNA, 100 bp, Homo sapiens
ctgcatagcatcagcgactctgtgttgtttctgcagatgctggactgcagccttatctggatcagatcaatgtcattgaagagcaggtagcagctcttga

SEQ ID NO: 181260 - DNA, 83 bp, Homo sapiens
ctgttcaccactcatttgcaacttatatcgccagtccagcagctaaggatattttgtgcagatccccgtcgaggtcaagatca

SEQ ID NO: 181261 - DNA, 75 bp, Homo sapiens
cactgcctccatggaaccttcagcaattgaactcccagattatttgataactgttcaagctaagccaagtagtag

SEQ ID NO: 181262 - DNA, 101 bp, Homo sapiens
atccaggcattcttcatgagcatagacagtctgtgtaagaagtactccagggaaacctcccagtctttagaaagaaactggaagttaatccgagatgaagg

SEQ ID NO: 181263 - DNA, 83 bp, Homo sapiens
cttgccttgagtcagtgcgccgctctccagcccgcttgaacggtgcagaccatgaattacgtggggcagttagccggccaggt

SEQ ID NO: 181264 - DNA, 100 bp, Homo sapiens
accggtcggctggcgtccctcttcagttctctggagccccagattcaacccgtgtacgtgcctgtgcctaaaattctccccgaggagaggcggagagctg

SEQ ID NO: 181265 - DNA, 97 bp, Homo sapiens
aagatattcagccgttaataaagcagtgggtagagtatgaagcccgcttggaaaggtacagtgagcgcatttggacgtgcaagagtactggaagcag

SEQ ID NO: 181266 - DNA, 90 bp, Homo sapiens
aggtaggctgcgttgaggatctttgctcttccatccgcctttgatcgtcttcctcttcagccatccagaattaacactgaatcctccgga

SEQ ID NO: 181267 - DNA, 100 bp, Homo sapiens
gcttcacctgtgggtttcacgtggacgaagactgcctcaggattccttcaaccaaaagagaggaaagagggttttcattcccttctgaatgttaggaggg

SEQ ID NO: 181268 - DNA, 100 bp, Homo sapiens
gcctggtgccctgctgacgggcaccaccgtggccaacctccaggtggcccggctcccacatgaaatgaagatcacctctgcctatctacaggacattgag

SEQ ID NO: 181269 - DNA, 75 bp, Homo sapiens
acatctcaagctcatattttgaagtgtttacggcacctgcccgcccagagaccagggcacccctgaagtccagcc

SEQ ID NO: 181270 - DNA, 97 bp, Homo sapiens
gggcggcgggcggagacgtgggcgccctccccgccaaggcccgtgcgaggttggagaaacgtacggtaaggatataacctcccggggcaaagacaag

SEQ ID NO: 181271 - DNA, 55 bp, Homo sapiens
cccgaagaaagccagggcctatggcagagctcttttggaagaagaaagaaaagcc

SEQ ID NO: 181272 - DNA, 100 bp, Homo sapiens
tagagctgacgaaacagatctgctctttcctgcagggccccggagctgcagttctacaccagcgccgctgcggtggccatgctcgtcccggcccgggttt

SEQ ID NO: 181273 - DNA, 49 bp, Homo sapiens
caagaatgaagccacggactgtcgcgaaatggcccatgcgatcaagatt

SEQ ID NO: 181274 - DNA, 112 bp, Homo sapiens
gctttgccattggggtgcagcagctgcaccccaccttgatccagcggacttacggttgatattcactgatggactccaaagaatcattaactcctggtagagaagaaaaccc

SEQ ID NO: 181275 - DNA, 100 bp, Homo sapiens
catttcaaaccctgaaggacagtgacttattatcagcaagatgaagagcgacgtcggcagctgagagagagagctcgtcagctaatagcagaagctcgat

SEQ ID NO: 181276 - DNA, 83 bp, Homo sapiens
tcctcccagtgacgggtctggagtgcgtgggggaccggctgttggcggaacaccttccaccatgaccacctcagcaagttccc

SEQ ID NO: 181277 - DNA, 82 bp, Homo sapiens
ggcttcttccttagtgacaaccagcatacctgcatccaccgctccaatgtctcacagaaagttctccgctcccagacatggg

SEQ ID NO: 181278 - DNA, 101 bp, Homo sapiens
agagagccactcccgcccacgtcccatttcgcccctcgcgtccggagtccccgtggccagcctctacggcagacacatgcaggccaacccagaaccaccga

SEQ ID NO: 181279 - DNA, 82 bp, Homo sapiens
ggaagtgcagctgcctcagttcttagcgcagagcactacaaacaccactggtttcccgaaaagccgtccaagggctccggct

SEQ ID NO: 181280 - DNA, 82 bp, Homo sapiens
ggccgccgggggcctgctgcgcccgggattcctagatgaggttatgaagaagtatggcagtttggttccactcagtgaaaaa

SEQ ID NO: 181281 - DNA, 75 bp, Homo sapiens
acttgggatcccccagttccaaagtgtcttaaagggcacacgtgtttcacgttgacaggtttgcttgggacgcta

SEQ ID NO: 181282 - DNA, 82 bp, Homo sapiens
ggccagggaaccctggtcaccgtctcctcaggttcgtgctggccgtgggcagcgccgtctttgatgccatgttcaacggggg

SEQ ID NO: 181283 - DNA, 96 bp, Homo sapiens
cggttgtcctggagcaggggcgcaggtattatagctgcaaatgtccttgtattctgtttatggagagtaccttctctgcagcggacaatgatcaga

SEQ ID NO: 181284 - DNA, 101 bp, Homo sapiens
cggccccctggagggggcagtcccgggagaacctgcggcggccggagcgctttgccctttcggatgaagcatacagatccctacgagatcaagataaggac

SEQ ID NO: 181285 - DNA, 100 bp, Homo sapiens
attccaagtaactcttatttggtattctttaggtgatgctagaaggcctcttcatgaaacagcagttttggtagaagatgtggtacacactcagttaatt

SEQ ID NO: 181286 - DNA, 118 bp, Homo sapiens
gacagggtcgggggacacgcaggatgagccccgcgaccactggcacattcttgctgacagactgggctggcttagatgaagatgaagatgcacatgtctgggaggataattgggatga

SEQ ID NO: 181287 - DNA, 75 bp, Homo sapiens
tccggatcaatccagatggcagccagtcagtggtggagcattcctcctcttcctcctcctcttccagcagtgatt

SEQ ID NO: 181288 - DNA, 97 bp, Homo sapiens
ctctgtttacgaatgtttgggcgcgaattactctaagcgcggctctcagaagggtgcaagaagaatcagtggggatggtttagacaacagtgtagct

SEQ ID NO: 181289 - DNA, 137 bp, Homo sapiens
ggggacggcaggagggaagtgagaagcccaactaaagccccacatttgcagctcattgaaggaaaggaaaatcaggaaaatgtttccaacctggtgattgaggacacagagctgaaacaggtggcttacatatacaa

SEQ ID NO: 181290 - DNA, 82 bp, Homo sapiens
cgtgccctacttcaaggataagggcgacagcaacagctctgccggctggaaggtccctgtgcgttttattgcgacctgccgg

SEQ ID NO: 181291 - DNA, 104 bp, Homo sapiens
acaaataatgaagaagaatctttttggctgttagatgctcttgttggaagaatactaccagatcgcccaggaccacaccgcagcgtaactgcaggcctctcagc

SEQ ID NO: 181292 - DNA, 75 bp, Homo sapiens
caatgatggggctcttccccagaactacaggggctctggccatcttcgtgatcttcagtcgtgctggtgaagcct

SEQ ID NO: 181293 - DNA, 101 bp, Homo sapiens
ctacctggtgcagggcctgattgaggactgccagctggcgctgcaggtcttgggcgtctttggtactggcttttttaggggtctgcctggggattaccctt

SEQ ID NO: 181294 - DNA, 101 bp, Homo sapiens
cacgcctgatggctccacgcatttcccttcgtggtagttaaaccagagagcaatgacaaagaaacagaagctgcgtatgaatcagatatccccgaggagct

SEQ ID NO: 181295 - DNA, 100 bp, Homo sapiens
cctctctcggagttggcaggaagccaggttgcagggtgtccgcttcctcagccgcctgtcttggttagatggctctggattaggattctcactggaatac

SEQ ID NO: 181296 - DNA, 100 bp, Homo sapiens
ctaggatttgtcacgaatgggaagccaagtgccatcttcaaaatttcaggtcttaaatctgctattgacctgaaaagtggttctggaaaagtgtaccaag

SEQ ID NO: 181297 - DNA, 75 bp, Homo sapiens
ctaagtgatgagatgaatgaagacttcagatctggttatgtagaagacagaagtagctcagggtcctgggggaat

SEQ ID NO: 181298 - DNA, 90 bp, Homo sapiens
gctgacaggagagacagaagcggacccagaaatgatcaagtcctccatcctggacttggctgacatcttcgtacctgccctggccccgcc

SEQ ID NO: 181299 - DNA, 100 bp, Homo sapiens
atccatggaatcagagggtgcattcaaaaaacattgaatgaggaggataaagcaaagattgctaaaagcaagaagaagatgaggcagaaggttcaacggg

SEQ ID NO: 181300 - DNA, 100 bp, Homo sapiens
cagagtccgcggccggggcgcgggaggtggtgaaaacaggaatgagaacgaggagtcaacctcaaaggctgaaacctcggaagattcagcatcacgcggg

SEQ ID NO: 181301 - DNA, 100 bp, Homo sapiens
tatatcagcagggagacctggataaggcacttttgctcacaaagaagcttcttgaactagagttaaacatgaagtttctggagagacagtggtatttcaa

SEQ ID NO: 181302 - DNA, 75 bp, Homo sapiens
tggcaaagtacttcagaacttttattccttccagaagcagtaatctatgccagcaattatgacaatgttagcaga

SEQ ID NO: 181303 - DNA, 100 bp, Homo sapiens
gccaattacttctcccgcttctttcctgtctcggttccagcagcacctggagcaggagcagtgggcgctgcagcagcaacggcagcggctgtacagtgag

SEQ ID NO: 181304 - DNA, 74 bp, Homo sapiens
ctacgctaacctatcgggttctctctccgcgcgttcagctctattaccaggttttaaacttcgccatgatcgtg

SEQ ID NO: 181305 - DNA, 75 bp, Homo sapiens
ctccggagagtgctagttcttatggcctcgaagcatgctttcttggcattatgactacgcccaagcaaggtttga

SEQ ID NO: 181306 - DNA, 82 bp, Homo sapiens
gaaccgttcccgggccgttgatcttcggccccacacgcatctccgagacccagcagcagctctgtgtccagctggaatttcc

SEQ ID NO: 181307 - DNA, 75 bp, Homo sapiens
ggccccctggagggggcagtcccgggagaacctgcggcggccggagcggtttggactggtctgaagagagcggag

SEQ ID NO: 181308 - DNA, 83 bp, Homo sapiens
gttgagcctgtgggacacttcggaaagaagcttccggttctgaggtcctggaggtgccatttccctctctgttgaagcaaagg

SEQ ID NO: 181309 - DNA, 109 bp, Homo sapiens
atggcggatggccccaggtgtaagcgcagaaagcaggcgaacccgcggcgcaataacggtgagaagccctaccactgcaactgggacggctgcggctggaagtttgcgc

SEQ ID NO: 181310 - DNA, 100 bp, Homo sapiens
tggagttctttgagctgtgaagtgctgtgcatcgtgtgattctgtgtcccttttgtgcagggcagcagaagaagcctttgtaaatgacattgacgagtcg

SEQ ID NO: 181311 - DNA, 90 bp, Homo sapiens
gagaatgtggcctccagggggagcccagcaagagtgagccatggagctacgtgtggggaacaagtaccgcctgggacggaagatcgggag

SEQ ID NO: 181312 - DNA, 95 bp, Homo sapiens
ctggaatttaaacctgagccactatctgaagatcattataaacctgcaatttcccatcgagatttaaacagcagaaatgtcctagtgaaaaatga

SEQ ID NO: 181313 - DNA, 100 bp, Homo sapiens
gacgtgcggggcctgggcctcccggtccgcaagcagagtggagcctttcaggctggcatggagagcttaaggggcaactgaaggagacacactggccaag

SEQ ID NO: 181314 - DNA, 75 bp, Homo sapiens
ggggaatggagccgcacagagaatttcaggcatcagaggggaagcgcagccaacaaatggaattttcttgagcat

SEQ ID NO: 181315 - DNA, 100 bp, Homo sapiens
cgcagcctgcctttccttccccctcggaaaatggttcccactgccgggcgagttatttgaaggattgaaggcatttcgaggagtagataataaaattcga

SEQ ID NO: 181316 - DNA, 98 bp, Homo sapiens
agtccacaatcaagttccaaatgaagaagaaccacatccctgtgtttagtcccgcacttacagacggctcgctgggcgacatgatcttcttccattcc

SEQ ID NO: 181317 - DNA, 75 bp, Homo sapiens
ggctggaactgaccaatgaagaatttaaggagatgggtcatgctgacagccctgctcctgtgaacgggatcaatg

SEQ ID NO: 181318 - DNA, 74 bp, Homo sapiens
gaaaaagaggaaagtggactgtccggggccgggctcaggagcagaggtccttgaatgggcaagagggcacatga

SEQ ID NO: 181319 - DNA, 50 bp, Homo sapiens
gagcaacttaagaaccagattcgagtggttggaggcaaagtaaagaagcc

SEQ ID NO: 181320 - DNA, 100 bp, Homo sapiens
ggtggtggtggtggtgtcttcctgtctcaacgatacctattttctagtgctgagatcctgagacaatgacttgtgtatgcggatacctgcttcagtacca

SEQ ID NO: 181321 - DNA, 101 bp, Homo sapiens
ctcagatgaagcggtgaaaaaagattcagagttggataagcacttggaatcacgggttgaaggtgatttgatgaaggctgctgcaggagagttcgcagatg

SEQ ID NO: 181322 - DNA, 101 bp, Homo sapiens
agcgcgatgtggagcgcttctttaagggctacgggaagatcctggaggtggatctgaagaacggaaaaatcctgggtagaagctggatcagcaagaatgtc

SEQ ID NO: 181323 - DNA, 50 bp, Homo sapiens
ctaaagcagcgtgcgttcagccctggggtggatccataaagaacccagcc

SEQ ID NO: 181324 - DNA, 50 bp, Homo sapiens
ccgacggtatcagcgccctgcaccaggccgaggagtcttgtaaatgtaat

SEQ ID NO: 181325 - DNA, 100 bp, Homo sapiens
ggtagcaaagcccccacgcccagccaggagcaccgccgaggactccagcacaccgaggcaattctgtggtgttcttggtcacacatttatggagtttctg

SEQ ID NO: 181326 - DNA, 103 bp, Homo sapiens
ccccaggcccgccgcctccctgccaagtaagactttgaccccgacgcaggcttcagtgattgccgcggatcagaagcctgagcactttggctcgagacaatta

SEQ ID NO: 181327 - DNA, 82 bp, Homo sapiens
gcattcccattgctgtgcctacaccttcgccacccactattggaccagggaggtggggaagacagggctccagctaccacag

SEQ ID NO: 181328 - DNA, 100 bp, Homo sapiens
ctcagccacaggaactagagacagcttgctttctgtcgtggcaatgttttgaaactggcaaaatcagaccaatgatgcgagctcagagtcaatagcatcc

SEQ ID NO: 181329 - DNA, 83 bp, Homo sapiens
aagcagagtctgggggagctcatcggcactctgaacgcggccaaggtgccggccgacaccggagacggatgcgctagagagta

SEQ ID NO: 181330 - DNA, 100 bp, Homo sapiens
ggagcaagctgaagaggaaaagaagcccaaggatagcacaacccctttgagtcacgaactgataaatttcaaacggaagagagtggcagcatttagaaag

SEQ ID NO: 181331 - DNA, 100 bp, Homo sapiens
aaaccttgactctccagttgaccactgtgtctctcgacacacggcatatgaaagcaacagcccacaattgcctgcattttctttcctcttcaaaaccact

SEQ ID NO: 181332 - DNA, 75 bp, Homo sapiens
agaagcctcccttccagtcagggttgataagcaatacaaatcggtaacaaaaccaaagccactaagtcaagctga

SEQ ID NO: 181333 - DNA, 101 bp, Homo sapiens
cgctgcctacggaggtggcagccatctccttctcgggatcttgcctcggagctggtcccactacacggtgcctgccggcatgaccgtcatccagtgggtgt

SEQ ID NO: 181334 - DNA, 100 bp, Homo sapiens
tattatggctgctgttgtccaacagaacgacctagtatttgaatttgctagtaacgtcatggaggatgaacgacagggttcatgcttgaaccagatccgg

SEQ ID NO: 181335 - DNA, 75 bp, Homo sapiens
tttggctgttactactttatttcatgcaaggattgacaattgccaaacgcatccagatttctgatttacctcaat

SEQ ID NO: 181336 - DNA, 100 bp, Homo sapiens
gcattgttcaagtacccactggaccgtggttttgcaggaaatgtgaatctcaggagagagcagccagagtgaaaataatgttgagtttccatgaagaaca

SEQ ID NO: 181337 - DNA, 99 bp, Homo sapiens
tacactcacagtatcagaatacaactgtttccttttctccggaacaggagtacagctgtgtagtaaagatgccttctggtgaatttgcacgtatatgcc

SEQ ID NO: 181338 - DNA, 48 bp, Homo sapiens
ctcctgagtagctgggactgcagacccaaaggacggatgatgtcacag

SEQ ID NO: 181339 - DNA, 100 bp, Homo sapiens
gttctgacacgttctcacctcgcgggatggcagctgctgatttgtcccatggtgaacagcctccagacggtgtgcaccaacatctacaagatcctcctgc

SEQ ID NO: 181340 - DNA, 76 bp, Homo sapiens
tacaaactggccaagaagggccttactccttcacagatcgctatcagaggactcctgaaacctggagagctacctg

SEQ ID NO: 181341 - DNA, 90 bp, Homo sapiens
ctgaatgaatgttatttaatggtgccaatgatgttggaggatacctgtgtctccaaaaaaagttggtgatgacattgccaaggcaacggg

SEQ ID NO: 181342 - DNA, 75 bp, Homo sapiens
catccgcatcaacaagatgttgtcctgtgctggggctgacagccgaatttgccacatacctgaatttctgccgtt

SEQ ID NO: 181343 - DNA, 75 bp, Homo sapiens
cccagtgacagtactgggagaaaccaaggctgaagagtcaggttgaagcacagtgcccaccagaagtatgtccga

SEQ ID NO: 181344 - DNA, 50 bp, Homo sapiens
ctcgggggagcgtgagttgcagttgaagactgggatagtttccaagctat

SEQ ID NO: 181345 - DNA, 90 bp, Homo sapiens
atttgatgtgactcgtcggcgaatgcaattaggaactgttctgccggaatttgaaaagtgcctacaacaagggaggtgtcacagttttcc

SEQ ID NO: 181346 - DNA, 97 bp, Homo sapiens
gggggatcagctctattatttcaaagatgaagatgaaaccaagcccttgcctccacctcagatatatgacaagcagttggatgaaagagaacacaca

SEQ ID NO: 181347 - DNA, 93 bp, Homo sapiens
cgaacggctcccacagccgggcgttgggggaaagaatcctgaggttggcttgaagcctgtgtggtatagtcccaaagttttcattgaaggtgc

SEQ ID NO: 181348 - DNA, 95 bp, Homo sapiens
cagaaagtgctcgcttcccttcgggggctttcgcgaatcccgaggcaatctcggaggcgggcgaactttctgaccaagtatacaactacccagag

SEQ ID NO: 181349 - DNA, 101 bp, Homo sapiens
aaaggcctgggcctgagaactgaatcagttttcggctttgtgagaaaccttaccatcaaacacgatggccagcaacgttaccaacaagacagatcctcgct

SEQ ID NO: 181350 - DNA, 80 bp, Homo sapiens
agaggagcggagtctgccaggtggtgtccatcatgacaatgcagatcttcgtgaagactctgactggtaagaccatcacc

SEQ ID NO: 181351 - DNA, 74 bp, Homo sapiens
gaagatcttatctgccctatttgcagtggagtcttggaggagccagtacagtgaccatgagggtggcaatgtaa

SEQ ID NO: 181352 - DNA, 74 bp, Homo sapiens
ttcgcagtggtcgcttcttctccttggtggcattgcagacagtgtagccaagtggatatttaaacaggacttca

SEQ ID NO: 181353 - DNA, 50 bp, Homo sapiens
ccactcaacaactctttatgtgacaggtatcccggaagcctgaagggaaa

SEQ ID NO: 181354 - DNA, 50 bp, Homo sapiens
cttcctggacatgaccaactggacagaactgtaccgctctctttttggcc

SEQ ID NO: 181355 - DNA, 75 bp, Homo sapiens
ctcgctgcaggccatcctgaaagtggtctccattgaggacccatttgaccaggatgattgggctgcctggtccaa

SEQ ID NO: 181356 - DNA, 100 bp, Homo sapiens
gtccatagcctctgttcgttttcactgcaggaccaggcacgaaagggaggaagttgccttgtactgtgccaaatatcttcctgatatcatcaaagatcag

SEQ ID NO: 181357 - DNA, 74 bp, Homo sapiens
agctgtcggcactgtaactctgagtcttgctttgtcgcccaggttggagtgcagtggcacgatctcggctcagt

SEQ ID NO: 181358 - DNA, 100 bp, Homo sapiens
cctggctcccggaggccctggtagctcgtgggtgtgggagctgagcaggaaggaggagccgaggaaggtctgcttcacctacgacctgttcctgaacctg

SEQ ID NO: 181359 - DNA, 100 bp, Homo sapiens
cgagctcaacgggcccctgcgggagggtgagaactctgtctcagtcgacgggaagtgcagtgactccacgctactgagcaacttgttagaagagatgaag

SEQ ID NO: 181360 - DNA, 100 bp, Homo sapiens
ctttggctatattcatgcaatcaagttagcccaacaaggaaacctcttagaaaaaagagtagggcatgaccattcggcccctggtagacctgttggctgt

SEQ ID NO: 181361 - DNA, 100 bp, Homo sapiens
cagatggcggatgccctgcagtacctgcagaaggtctctggagacatcttcagcaggcagtggagtgggagtgaagaagctgtgtgaactgcagcctgag

SEQ ID NO: 181362 - DNA, 83 bp, Homo sapiens
taatatggctccgatgggctcaaaggatgaaacgaggaggaagagatagtgaccgtaattcatcagaagaaggaactgcagag

SEQ ID NO: 181363 - DNA, 100 bp, Homo sapiens
gcgccgcccggcagcctcggcaggttggtgttcgaggaagagacattgttgttcttggtgtggagaagaagtcagtggccaaactgcaggatgaaagaac

SEQ ID NO: 181364 - DNA, 100 bp, Homo sapiens
cgccgaggcaccgaggcactcagaggaggcctgtcccctcagttcccaggtgccatgaggaagcctcgtcggaagtcccggcagaatgccgagggccggc

SEQ ID NO: 181365 - DNA, 75 bp, Homo sapiens
ccgtgctggaccgcttttacaatgcaggtccacaaaaggtggctccgattcctccctttctgagccagggccagg

SEQ ID NO: 181366 - DNA, 83 bp, Homo sapiens
caaagttttgcagatcttcaacaagaggacccaggagaaattcgccctcaaattcaaatctgaacatcaatgatgtactaggg

SEQ ID NO: 181367 - DNA, 74 bp, Homo sapiens
gcggatggccgtaaccccgaaggaaatgctatttttatgattcccacaaatccaccaccaacattcagaaagcc

SEQ ID NO: 181368 - DNA, 100 bp, Homo sapiens
aaagacttagcttttaaattaaaaaggaagctattcaccattgaggctgcccttttcttgggcctgggggtgttgttctccttggtcagcattcccttgg

SEQ ID NO: 181369 - DNA, 50 bp, Homo sapiens
cctctcgagtagctgggattacagtgctaatgaaggcacgggacatttta

SEQ ID NO: 181370 - DNA, 83 bp, Homo sapiens
ggactccgtgcaggagctggccccgccgcccgccctaccccccaagcagcggcagctggtgctggagaatctggtaaaagcac

SEQ ID NO: 181371 - DNA, 95 bp, Homo sapiens
ttgttgccattgaaaaccctgctgatgtcagtgttatatcctccaggaatactggccaggaacccaagacagaccaggatgaggagcattgccgg

SEQ ID NO: 181372 - DNA, 75 bp, Homo sapiens
ggacggctccttatttcactccacagctattaagaatggcaaaggattgcatagcaagaaggaagtgcctatcca

SEQ ID NO: 181373 - DNA, 48 bp, Homo sapiens
ggcagtcatctcgcggccgttcaggttatgaagacagtatggagtttc

SEQ ID NO: 181374 - DNA, 100 bp, Homo sapiens
cactacatgctgaagaagctgcagctgcatgaggaggagtatgtgctgatgcaggccatctccctcttctccccagatgctaatactggagaccgtggac

SEQ ID NO: 181375 - DNA, 82 bp, Homo sapiens
ctacaatatggatggctatccagacgctctggtcatactaaagaacacatctggaagagaaacagcacccaggactatcttc

SEQ ID NO: 181376 - DNA, 50 bp, Homo sapiens
gcaatatttcgagcagtttggcaaggctgaccaactgactgaagagcaga

SEQ ID NO: 181377 - DNA, 83 bp, Homo sapiens
aacatagatgtgcagtctgaggcttcagataccacgatttccatggtgtcagtgattcatattcctgataggacttataaact

SEQ ID NO: 181378 - DNA, 100 bp, Homo sapiens
gatgacaccttacacttatggaatttacgtcagaagaggcctgccatactacattcgcttaaattttgcagagaaagtattgctgacagacagaacgcct

SEQ ID NO: 181379 - DNA, 100 bp, Homo sapiens
gtatttccaagtaacagtggagatagatttaccctttctaaactattagctgtaattttaaggattttgcctaccattttacagtatttgtcttctattt

SEQ ID NO: 181380 - DNA, 75 bp, Homo sapiens
agtagaaggaaaaacagaacgttgcaaactctggaaaaaaacttgggaaaccacccctactcctaatcccccgac

SEQ ID NO: 181381 - DNA, 101 bp, Homo sapiens
cagacctgtatcctgtgggatgagacggatgtggaaaaagacctcgatgaagttctgcagacccactcagtgtttgtaaatgtttctaaaggtcaggttgc

SEQ ID NO: 181382 - DNA, 85 bp, Homo sapiens
cctcagttggaagcagccgatccagcctgcggagcctgtggggcagccactgaggcggctcccagctgcgttggcgacatggccg

SEQ ID NO: 181383 - DNA, 74 bp, Homo sapiens
cctggaacttcatcatcatctacttcacaggaattgccattttgatcactctgagatctatggtacagttcatt

SEQ ID NO: 181384 - DNA, 98 bp, Homo sapiens
ccaggtgctctgtgggtaccttggaaacttggatttaactggccagaagcaggtattcaaagcagagaacaatccctgggtgacccccattgcagacc

SEQ ID NO: 181385 - DNA, 99 bp, Homo sapiens
cactggccaagctgggaagtccggcgcaactccgcaccgcagagccggcgcctcctcggcaggaaacatgccctgaactgtcacagaatgaaaccagcg

SEQ ID NO: 181386 - DNA, 100 bp, Homo sapiens
ctgtagaagaggctcctacctcaagagcaggtgctggagaatctggtaaaagcaccattgtgaagcagatgaggatcctgcatgttaatgggtttaatgg

SEQ ID NO: 181387 - DNA, 81 bp, Homo sapiens
tgccttggagaaggacagcagagaataagctggacaccaaatacccgtacgaccagcatctcagacatgtcgaaaaagatg

SEQ ID NO: 181388 - DNA, 75 bp, Homo sapiens
caaggcagaaccaccccagtgcacctccctggcctggtctgctgatggccaggcattgaacctggccacatccca

SEQ ID NO: 181389 - DNA, 100 bp, Homo sapiens
cacgcacacgtggtgcgacctctgtggcgacttcatctggggcgtcgtgcgcaaaggcctgcagtgcgcgcgggtcgggccccggctcagtggtcccagg

SEQ ID NO: 181390 - DNA, 100 bp, Homo sapiens
tcataaagaggacgccgggacaccaagaagcagggaaatgccttcctaatgatggtgatgaaaaatatgagaagaccataattaaaagtggagatcagac

SEQ ID NO: 181391 - DNA, 100 bp, Homo sapiens
tcgatgggcggcggaaaatagcctttgccatcactgccattaagtcgacattactctgaagggacgcacagttatcgtgaagggccccagaggaaccctg

SEQ ID NO: 181392 - DNA, 50 bp, Homo sapiens
acagagacagatcaaagcagctcacagaatgttgctgcgggatgtaaaag

SEQ ID NO: 181393 - DNA, 100 bp, Homo sapiens
catgggtagcctttgataaacagggatccagagaagaactggaatagaaattgtgtgaaaggacttgtggcttctctgattagtgtgaaagacacttctg

SEQ ID NO: 181394 - DNA, 100 bp, Homo sapiens
tgtcaagtatgtggagtgttctgcacttacacaggaatgtatcctgtcaggtataatgtcagtgaatggcaagaaagttcttcatatggatcgaaaccct

SEQ ID NO: 181395 - DNA, 74 bp, Homo sapiens
ttgctctgggaatcctgattgagaacattagcagtgttgtggctgcattttccgaccttcttcacgtccgaatc

SEQ ID NO: 181396 - DNA, 75 bp, Homo sapiens
ccaaccactgccacaacctgcgcagcagacagacaagttggatggcttgaggactggtactaaaaggaaacgtga

SEQ ID NO: 181397 - DNA, 100 bp, Homo sapiens
tctggcacaacggctgggagaggaaacttgatgcttctgggccaccatttgccagggcctcgctcgaggtgctggagaatctggtaaaagcaccattgtg

SEQ ID NO: 181398 - DNA, 97 bp, Homo sapiens
ggctttcgacaccaaccccttcgcggacccagtggatgtaaaccccttccagaggtctcctgtaactttgagcgggacacatgcagctggtacccag

SEQ ID NO: 181399 - DNA, 90 bp, Homo sapiens
gggccagagttccaggggctctgggagtggctgccagccagacccggtccgtttggaatgcctgggatggtgccgccgcatgttcctcct

SEQ ID NO: 181400 - DNA, 100 bp, Homo sapiens
cacaaaatcaatttgctccagcaacagatccaggtggtggacataatgcgagttaacgtggacaaggttctggaaagagaccagaagctctctgagttag

SEQ ID NO: 181401 - DNA, 98 bp, Homo sapiens
cttcatctggatttacccaacacctgagcacaaagaagaggaagcagggggcttcattgcaaacctggagtctctggctgatgaacttgctcttgtgg

SEQ ID NO: 181402 - DNA, 99 bp, Homo sapiens
gttttcgcctgcagctgctcaccggaagcaagatttccagatgtagcaaatgggtttattgaggaaataattcattttaagaattattatgatctgaat

SEQ ID NO: 181403 - DNA, 75 bp, Homo sapiens
cgtgaccgagagcgcgaatatcgtcatcgttagaaggggtccctgtgaaggtgaccaacgtcaaggatggcacca

SEQ ID NO: 181404 - DNA, 100 bp, Homo sapiens
cagccagtgcccgttcccggcctctccctgtacatgtgcgggaggaaggtgtgcagcaatgacaacaagaccttcgactcttcctgccacttctttgcca

SEQ ID NO: 181405 - DNA, 100 bp, Homo sapiens
ctaagaagagtcttggtcttgatgaattcaaagcacacttttctggccttgtattagccgatgaattacatatgccatctctccctgaaatgatgtttgg

SEQ ID NO: 181406 - DNA, 51 bp, Homo sapiens
gtgcaacactggaggaagaatgcatctggcaaaaataatgtgttcctcaat

SEQ ID NO: 181407 - DNA, 82 bp, Homo sapiens
cttaatccacttacgttcagggttatcattcatagacgtgccaccttgcttagcgcccgtcaaggaatgatgtctgcacgag

SEQ ID NO: 181408 - DNA, 50 bp, Homo sapiens
ttgtatgaattcatctttgccagataaatgcagagggaacaccagaggac

SEQ ID NO: 181409 - DNA, 100 bp, Homo sapiens
aacgaagttaagtaatttccaagaacctgcacttgttgccaagtcttccatcttactagatgtgaaaccttgggatgatgagacagatatggcgaaatta

SEQ ID NO: 181410 - DNA, 89 bp, Homo sapiens
aggacagggggttcatcatggctgaaaatgtgtgtctgacatgcaagctcagtggggcagagacccgtggattgctgtgccctgccctc

SEQ ID NO: 181411 - DNA, 74 bp, Homo sapiens
gggcccttgtctttggcagcgaaatggcctcaggaggttgtgcccagacatttccttcttccagagggccactg

SEQ ID NO: 181412 - DNA, 82 bp, Homo sapiens
acaaataaccctatcgcagccgggaggttggatggcaagcatgtggtgtttggcaaagtgaaagaaggcatgaatattgtgg

SEQ ID NO: 181413 - DNA, 83 bp, Homo sapiens
ttcctgtacagcctgcagaactagctccaaacgagaatggaagccgctggaggaccgtagctgcacagacataccatggctgc

SEQ ID NO: 181414 - DNA, 74 bp, Homo sapiens
ctctcgctttccctctcgcgtctctggctgcaggctgagaagaaagccaaggtcattgcaggaatgaatgctgt

SEQ ID NO: 181415 - DNA, 83 bp, Homo sapiens
agccaatttcatgctccactatagccccataggctccttcaatttccgtgatcctcggagtccccaggagaccaggtgatggc

SEQ ID NO: 181416 - DNA, 82 bp, Homo sapiens
gttcgagaacgaccccgagacgatccagcacacggaagacatggagaacgagatcgacgagctgctgcaggagttcgaggag

SEQ ID NO: 181417 - DNA, 75 bp, Homo sapiens
ccagattgaagctattcctttggccttacaagacgctgaccggaaaggagattgagattgacattgaacctacag

SEQ ID NO: 181418 - DNA, 98 bp, Homo sapiens
ggcgtcctcggcgctgaaggggttaattcaacagttcaccaccattaccggtgatgccacactcaatcagaaactatgctactgctgaagaggtatat

SEQ ID NO: 181419 - DNA, 75 bp, Homo sapiens
agagcttgctccctacgatgagaactggttctacacgcgagctgaggagctgatcacgcagtacctggctgagct

SEQ ID NO: 181420 - DNA, 75 bp, Homo sapiens
ccgcctcaaagacgctgctggagaaggcccctacggtgagcgggacgaccagcaagtgttcatccagaaggtggt

SEQ ID NO: 181421 - DNA, 98 bp, Homo sapiens
ctttactaactagccccagtggaccaggctatcatatcatgttgcctttcattactacgttcagatctgtgcaggctcaggcagctgtccaaggacct

SEQ ID NO: 181422 - DNA, 75 bp, Homo sapiens
actgtggatccagagacacaggcacgactagaagcattgctagaagcagcagtgtatgtggtagaagaccaaaga

SEQ ID NO: 181423 - DNA, 97 bp, Homo sapiens
tcttttacaaatcttctgttgaactgcattgtgtttacagtttcacgtctgtgaaaaggaaaacaggaaatcattttcacaactttataagttggca

SEQ ID NO: 181424 - DNA, 75 bp, Homo sapiens
gagaggagctgtggataacgggaggtgaatttccatgtcaacatagtcctgcaaatcgcagtcttctccaggctg

SEQ ID NO: 181425 - DNA, 100 bp, Homo sapiens
cgattccgctctgcggcgggtgtccctaaactagcagtttagggtgtcagctgtgccgaagcgagtgccacttgtctgcagggccgtaccgcggaaccct

SEQ ID NO: 181426 - DNA, 91 bp, Homo sapiens
ctcgcgcctcccattgcagcctttgtgataactgcgtagatgaacgactttcgaagtaaaatgcaatcaatatttccaacaattcccaaga

SEQ ID NO: 181427 - DNA, 75 bp, Homo sapiens
ctctttgacatggagagaatttcactatattcaggacttggatgttgtgggtgatggtatgcagtgtcctccttc

SEQ ID NO: 181428 - DNA, 100 bp, Homo sapiens
tggaagcccctgcttggatgcctgtccaccactgtactgtcctcttcctgatggatgggaacaagccatgactcaggatggagaaatttactatataaac

SEQ ID NO: 181429 - DNA, 90 bp, Homo sapiens
aaaaaagagaaacctgggtgaactttcacggacaacctcagaggacaacgaagtgttcggcgtcacaatgtagcagggaccccaggcgtc

SEQ ID NO: 181430 - DNA, 90 bp, Homo sapiens
gggttgcgctccgtgcacctcttgcgggcgcctgtgtctggcagagctggtgtgagacgagacaatcctgccccgccgccgggataatca

SEQ ID NO: 181431 - DNA, 80 bp, Homo sapiens
actctgtgcctcaacaaccatttctaagtgggaataaccagcaagtacctgtcaagaatgaagtagatcattgtgaaaat

SEQ ID NO: 181432 - DNA, 95 bp, Homo sapiens
cgccagtatgaatctctgcccgcaacacatatcagtcaaaccggcacgatgtccaggcaccagaaccagaacaccatccaggagctgctgcagaa

SEQ ID NO: 181433 - DNA, 83 bp, Homo sapiens
gggggccttcttcaaccccaagtaccaacacgaaggcttctacttcggtcaaaatgcagatcttcgtgaaaacccttaccggc

SEQ ID NO: 181434 - DNA, 100 bp, Homo sapiens
gcagtttagacaaacactgggcgacggtggctccagcatgtatcagccgaggtggagctgcggggccctggcatgaaagcttcgttccagagcccagcat

SEQ ID NO: 181435 - DNA, 100 bp, Homo sapiens
ctcaaagaagtttgtccttctgctattgatcctgaaggtgatctttagacagtgactgagtatggatcatttgaacgaggcaactcaggggaaagaacat

SEQ ID NO: 181436 - DNA, 100 bp, Homo sapiens
gtgaagaaagtgagcgaggagtcagaaactcagccactggttgccttggtaggcaataaaaacatgctgctgctgaagaaacacacggaggacatcagca

SEQ ID NO: 181437 - DNA, 82 bp, Homo sapiens
tgtgtgccctgggcacctccgtggtaggcaatttccaggcagaaaatctatttcaggaacttcaggaacattttcaagctct

SEQ ID NO: 181438 - DNA, 75 bp, Homo sapiens
cggaggcagagcggctgccatggtcagccatgtcatctgagcctcccccaccaccacagccccccacccatcaag

SEQ ID NO: 181439 - DNA, 75 bp, Homo sapiens
cccgttcggcctggaggagccgcagtgggtcccggacaaggagatgctggacgagaaccaccacctgatccagtg

SEQ ID NO: 181440 - DNA, 100 bp, Homo sapiens
aagcaatgtttgaacaaactcgaagaacagctgtggaaagaagttgcaaaacactggcccatgactgaagagttgctgaaacaacaaaagctgaattcac

SEQ ID NO: 181441 - DNA, 75 bp, Homo sapiens
tcccaatgaaacgggcagccatggccctccacagcccgcagccttggcctcgctgatcgagaagtgtcccaaaga

SEQ ID NO: 181442 - DNA, 75 bp, Homo sapiens
cttctcctggagacgcaactcaagtgaaagctggtggaatgcgaattgtgcagaaacacccacatacaggagaca

SEQ ID NO: 181443 - DNA, 101 bp, Homo sapiens
cgcgggcctcgcctccgccctccgccacctcgagctgcggtagcagcgactcatgagagcgcggccggaggacaggagaggcagatgcgaaccagaacaat

SEQ ID NO: 181444 - DNA, 100 bp, Homo sapiens
gccacaatggagtccgttcctgcattagctgcctcaactccaatgagtcccacgtgccttaccggaacagcaaactgacctacctgctgcagaactctct

SEQ ID NO: 181445 - DNA, 75 bp, Homo sapiens
acaagatgaagtctttctgccaggtctctaattaacagaagatggcaaagcccagccacagcagctatgtccttc

SEQ ID NO: 181446 - DNA, 98 bp, Homo sapiens
ccctcactggcacagaaaagctaattgagacctatttctccaaaaactaccaagactatgagtatctcatcaatgttgaacacctacctcttcatgat

SEQ ID NO: 181447 - DNA, 90 bp, Homo sapiens
gggactcacggcagaagtgagctggaaggtcttggagcgaagagctcggaccaagcgctcaggatgactatcctccctccagtggagaag

SEQ ID NO: 181448 - DNA, 75 bp, Homo sapiens
aagactcccgaatacttcagaagtggggaaatggtgtctggaaatgaagtatggaaatgaaatcatgaataaaga

SEQ ID NO: 181449 - DNA, 75 bp, Homo sapiens
ggcaagcgcagggggacggggaccagcagctgtcgccgccgctctcaggtagttaaaccagagagcaatgacaaa

SEQ ID NO: 181450 - DNA, 74 bp, Homo sapiens
agatctgtgccatactttcatcaaagatggagcggtgaatgagtggcaggatgactggccgacctttttcgccc

SEQ ID NO: 181451 - DNA, 100 bp, Homo sapiens
ggacggacgccgatgcccggggctgcgacggctgcagacaatgcagatcttcgtgaagactctgactggtaagaccatcaccctcgaggttgagcccagt

SEQ ID NO: 181452 - DNA, 94 bp, Homo sapiens
cgacgtcttgcctgtgtcccacttgttcgcggcctataggctgaaactgccgccaaccggatctgtaaggtgctggctgtcaaccaagagaacg

SEQ ID NO: 181453 - DNA, 98 bp, Homo sapiens
tacttcatcctgctcctcatcatctttctgctggagatcatcgctggtatcctcgcctacgcctactaccagcagctccaagccctcagtgagcctca

SEQ ID NO: 181454 - DNA, 95 bp, Homo sapiens
tttggctgcgggcggcttgggcagcccgcgggcgcctcaggatggcagtggttctgaagagaagcggaaaagtgtattggcctcaactaccaagt

SEQ ID NO: 181455 - DNA, 85 bp, Homo sapiens
aaccggcaccatgtggagcgggtggagatcatcatgaaagagaccgtggatgctgaagttttagaaagagcgttttcgctacgta

SEQ ID NO: 181456 - DNA, 100 bp, Homo sapiens
cgctgatctacaagaaaatccacaagaacgcactttcctcccagggaaagcaggcaggatgggagagtcgccgatagaaccacctcttccctgcctcctg

SEQ ID NO: 181457 - DNA, 83 bp, Homo sapiens
ggaagtcgcgaccagagccattggagggcgcggggactgcaaccctaatcaggtttatgaaaaccccagatgaaatcatgagt

SEQ ID NO: 181458 - DNA, 100 bp, Homo sapiens
caaatttacatacgagaatggcttgtgaaatcatgcctctgcaaaggtagctacagcaagctgggtagcaggcagatccaaaggatatcatgaagtttcc

SEQ ID NO: 181459 - DNA, 90 bp, Homo sapiens
gcttgcagtgtttctttataatacattccatgggaggaggatctttggaattagacactccttcacagccagtgaacaatcaccatgctc

SEQ ID NO: 181460 - DNA, 98 bp, Homo sapiens
cttccaggatcctgagatccggagcagccggggtcggagcgggaacatcatttacagcgagcaatttcagcacagcaagtgtttagagaaaaaaaaga

SEQ ID NO: 181461 - DNA, 96 bp, Homo sapiens
cgaactgggtggcgaacggggcgagcctggaggattgtcactccaacctcttttcgctggcctccccatggccacccatggaccagtcggcattca

SEQ ID NO: 181462 - DNA, 140 bp, Homo sapiens
gattgtagtgatgagattgctgtaaaaaaggacaatattcttgttcgatctttcaaagatggaaaattacaaggaagctgaagcacaggaagcgattaaataacttgaccagagtaagccatttataagtgtcagaagca

SEQ ID NO: 181463 - DNA, 75 bp, Homo sapiens
ctcagcgggatctggagtcaggggttattcagcttctcaaggctggaaaagcgaaggaagtttcctacaatgcac

SEQ ID NO: 181464 - DNA, 82 bp, Homo sapiens
ggtgctggcagctgagcccgaggctgacaagacaatgcagatcttcgtgaagactctgactggtaagaccatcaccctcgag

SEQ ID NO: 181465 - DNA, 89 bp, Homo sapiens
atggcctacccgggatacggaggaggggccggaccagaatatggccaagggatgaaccctattagccgcctggcgcaaattcaacaggc

SEQ ID NO: 181466 - DNA, 100 bp, Homo sapiens
tgcttcaagccctggctcaaaatatgtttgtaagcggtgcattcggaagatggaccaccactgtccctgggtcaacaactgtgtaggcgagaacaaccag

SEQ ID NO: 181467 - DNA, 50 bp, Homo sapiens
ggctgcagcgtcgcggtgcatcaagatttggatcctacaaagaaggacac

SEQ ID NO: 181468 - DNA, 100 bp, Homo sapiens
ggagcctcccctgcagcgactcggaagattcgaggcggcgggggacaagtcggcgccccagagcggacgagggttgcttttgtaatgaagaagcacttaa

SEQ ID NO: 181469 - DNA, 100 bp, Homo sapiens
aacgttctcattcccaaaatgaaaatttctccaaaaaggatgtcatgttcctggcctggtgtagagaggagagagagtgaacagggagcggggcttttgt

SEQ ID NO: 181470 - DNA, 82 bp, Homo sapiens
ctggacgccctggacaagcagcaaagataacaacgaacttgatgcaagtgataggtttgccaaggtcagacctctcatcatc

SEQ ID NO: 181471 - DNA, 100 bp, Homo sapiens
cttactttgaagcagccaagatgttttgtattaatggatcacattttgaatttgaaggggacagtatttattcaaaaacaaacctcctgacgggaatgct

SEQ ID NO: 181472 - DNA, 75 bp, Homo sapiens
cagacggcgagacctcctgcacaggacctgaaggagaagaaggagaaggtggaggagaaggcaagccggaaagag

SEQ ID NO: 181473 - DNA, 100 bp, Homo sapiens
gcggccccggagcgcccggcggcggtttcggcgcgcggccgggctggcgatggaagatggaaggaaggagcgcagcggaagaaatctttcctgttttctg

SEQ ID NO: 181474 - DNA, 75 bp, Homo sapiens
gccaagaggaggacagttcgctacacagcaatgcatcgaggatgatcgtggagctacatcgaaaggtctccagcc

SEQ ID NO: 181475 - DNA, 100 bp, Homo sapiens
ctggaaaaagaagtccaagaagcaaaaaagggactgctaagaagataccaccaggtttcatatacactggagaagtcgtacatcgaatgctaacagccac

SEQ ID NO: 181476 - DNA, 75 bp, Homo sapiens
ccgcggtcggcagcatgggtcgggagtcacggtgtgtggaggtcattgcaaaggaaggacaaaacctgaaagagc

SEQ ID NO: 181477 - DNA, 96 bp, Homo sapiens
agagatggacggtcactcagcctatggagatcccttcccactggaggcatgtgatgagaggaaatcaccgaaaacgtggctgcttcaaggatcctg

SEQ ID NO: 181478 - DNA, 75 bp, Homo sapiens
ctcgaatgaatccaagacctgtcatggtatgtgaaagcaagaacagagctaacatgggattatggctatgaagct

SEQ ID NO: 181479 - DNA, 76 bp, Homo sapiens
tgcctcaacaaccatttctaagtgggaacctagaaaagttgttcttcatcgtggctcaacgggccttggtttcaac

SEQ ID NO: 181480 - DNA, 106 bp, Homo sapiens
ggggtcacagtgtcccacgcatccctgctggcacagtgccgggctctgacccaggcgtgcgggtactcagaagccatcgacgagtacaagccccaggatgctacca

SEQ ID NO: 181481 - DNA, 75 bp, Homo sapiens
ccattttatggccacttcctacgtgaaatcactgtggcaaccgggggaagaaggtagataatgactataatgccc

SEQ ID NO: 181482 - DNA, 100 bp, Homo sapiens
ggacttggggctagctgcggcggggctggaaaaggcgacggcggattgacagaagtatgattggagagcccacaaactttgtgcatacagctcatgttgg

SEQ ID NO: 181483 - DNA, 96 bp, Homo sapiens
ccggaggcgacatggggcacccggtgtaccgcggcgagaagccccagctgcactacgcgctctggacttattggacaaaatgttgacattcaaccc

SEQ ID NO: 181484 - DNA, 95 bp, Homo sapiens
cacaagacatttcctgctcggaaccttgtttactaattgtgacttaagagattaaaattaatttggttgctgttggttctgaacaaataatgagt

SEQ ID NO: 181485 - DNA, 98 bp, Homo sapiens
gcaagaggtggccccacccttggaggctaacaaggacttggtacacttgctgacggatctcaaagatttcatgagacaagctggggaagtaacgtttg

SEQ ID NO: 181486 - DNA, 100 bp, Homo sapiens
ctggccctggactacctctgcaggttgacatcatggacatatgtgagtccatcctggagaggaagcggcatgacagcgaaaggtctacttgcagcatctt

SEQ ID NO: 181487 - DNA, 100 bp, Homo sapiens
tgaccgacgagctgccactgcccccgggctgggagatgaccttcacggccactggccagaggtacttcctcaaatgacagtcatgtccctttccagggac

SEQ ID NO: 181488 - DNA, 100 bp, Homo sapiens
gttaatcctcaatttaagcctgatctaacccctagaaacagatttgatggtagagtggtggcaaagcttccttttacccctctttcttacatccaaggac

SEQ ID NO: 181489 - DNA, 83 bp, Homo sapiens
agccaatatatcttcacagaaatggcctcgaatggcttattcagaagagcataaaggtatgccctgtggtttcatccgccaga

SEQ ID NO: 181490 - DNA, 100 bp, Homo sapiens
cgcagccacccgggagccagtcagaatccagttcccatcccgccttgagccagtcaccaatgccacaggaaagagggctctgtgtatgaatgacaaggat

SEQ ID NO: 181491 - DNA, 83 bp, Homo sapiens
tcctatgatcatgcacacaagcagctccagaaacatgacaaggaggactttcctgcctcttggagatcagaggaggaaatggc

SEQ ID NO: 181492 - DNA, 98 bp, Homo sapiens
agacccgtagctaagacgccaggatttcctggaagcagagaaatgatcgtcctggccttctaaacgtaggacacattgaaaaaatgcaggagggtatt

SEQ ID NO: 181493 - DNA, 82 bp, Homo sapiens
ggaagaagagacgaagagacagctggatgaagagcagagggagagccgggctcggcgaggccctcgagggcccagcgccttc

SEQ ID NO: 181494 - DNA, 100 bp, Homo sapiens
cgataatggaatgctttacctggaatggatgtttgtatttcagcagtcagaaaaatttgcaaaggtggaaaaccaataccagttactgaaactagaaacc

SEQ ID NO: 181495 - DNA, 100 bp, Homo sapiens
gcgcctgtagctcgcgggcctcgcagaacccagacctggactcagaggcgctgctagccctgcccctgcctcagctggtgcagaagttacacagtagaga

SEQ ID NO: 181496 - DNA, 75 bp, Homo sapiens
gggtccccgagtggttccatggtgcaatctcaagagacaattaccagctctggctgggtcgccacaacttgtttg

SEQ ID NO: 181497 - DNA, 83 bp, Homo sapiens
agccgctcgtcagactccagcagccaagatggtgaagcagatcgagagcaaggtttggtgcacctcgatttggaggaagtagg

SEQ ID NO: 181498 - DNA, 90 bp, Homo sapiens
ctggaggtggcagcagaaatcctactccacccataggaagacccacgtccacacctactcctcctcagtttgaacacaaggtcataaaag

SEQ ID NO: 181499 - DNA, 75 bp, Homo sapiens
tcaaatcatctggaggtggtgaagctaatcaaatcctcccgcgacgatgcccctcaacgttagcttcaccaacag

SEQ ID NO: 181500 - DNA, 99 bp, Homo sapiens
tggggaccagcgaagaccaccagcacttcacctgcaccatctggagattctgccggtggagacagataaaaagcctcaggggaagcagctacagacccg

SEQ ID NO: 181501 - DNA, 100 bp, Homo sapiens
taatacggggatctgtgagtcttctggcaaacagtgtttgcctctggttcagctcatacaacagcttcttaggatgaaactgtaacaattgaaacagtct

SEQ ID NO: 181502 - DNA, 98 bp, Homo sapiens
ctcagcaccacctagttccgtgccattgaagtcctcagtcttgccctcaccatcagattgctgctaaaattgattcaattcctcacttgaataattcc

SEQ ID NO: 181503 - DNA, 80 bp, Homo sapiens
tctggctccctcctcccagggccaggcgccgctcagaacgtgtgccggtccaacaaaagcccttgggtctgtttgacttg

SEQ ID NO: 181504 - DNA, 98 bp, Homo sapiens
tggaagtcgaacatggcacgaaagagatcaagattcaagtcaatctgaaagtcccagccagccaagtgacgctgacattaaggaccagccagaaaatg

SEQ ID NO: 181505 - DNA, 95 bp, Homo sapiens
gtggctggaagacatggccactccagtcggtgttgagcacggcgagcagtctcaggcctttagtgatgatggtgctggagaatctggtaaaagca

SEQ ID NO: 181506 - DNA, 75 bp, Homo sapiens
cttcaacgctctgctgcccgctgtgagggaaaaggattatatctgtccaagatgcgagtctggttttatcgagga

SEQ ID NO: 181507 - DNA, 100 bp, Homo sapiens
ctcccccgagtggatgaacatgtgcttggtgtcgtttttccttgagctgaacgtcttgcaacagtggccgcacgcatagtgtttcctgaggttataggcg

SEQ ID NO: 181508 - DNA, 83 bp, Homo sapiens
cggggaggcaagatgatccaccagcggttccatcctacacttggttgcagagtgggcaggatcttaagacccgataggtgcag

SEQ ID NO: 181509 - DNA, 97 bp, Homo sapiens
ccaggccccggcagcgcctgggacaaggcagtcatggccaaccaaaattgatgtaccccaggaccttgaggatgacctcacggccactcctttgtcc

SEQ ID NO: 181510 - DNA, 105 bp, Homo sapiens
gaagaagatttgtaaagaaaactcttagggggtgctcaaaggatttaaaggagaactaattcatgtatttaacaaacatgatggtgccttgaggaatacagaata

SEQ ID NO: 181511 - DNA, 75 bp, Homo sapiens
gacttcttgtatgcatactccacagcacctgctcctacgactttcctgctcttcagtcaaaagagtgccatcaac

SEQ ID NO: 181512 - DNA, 75 bp, Homo sapiens
ggcaacatgacagaggaccatgtgatgcacctgctccaggaatggaagttggatacactttgtgacttgtacgag

SEQ ID NO: 181513 - DNA, 99 bp, Homo sapiens
ggacgacgcccggcgccagcacatcgcaggatgtggagagcatcttgtgcgcaccatactggctagagaatgttcacatgctttacaagctgaggatgc

SEQ ID NO: 181514 - DNA, 100 bp, Homo sapiens
gtcaaggtggcctaccaggaggccaggggtgtcgccatggcacctcggaactgaacccattctccgacccccgccagtttgaccgctccttccccacgct

SEQ ID NO: 181515 - DNA, 88 bp, Homo sapiens
catcttctatgatcttcgaggagagggggtgaagttgcaagtcatggccaattccagaatgcagccaatcggggcttaaaagccagcg

SEQ ID NO: 181516 - DNA, 95 bp, Homo sapiens
ccggcgggaccataagggcttaactcatatatttaacccccctccaaaaacaatacgaggattctctccaccacatagaatctgcagttttgaag

SEQ ID NO: 181517 - DNA, 75 bp, Homo sapiens
gagaaagcccgctgggaggccgagcgcgccgagttacagaggatgccagcccccatcagattgcgggagctgatc

SEQ ID NO: 181518 - DNA, 101 bp, Homo sapiens
cggaggaaaaaaagagttgcgggaggctgtcggctaataacgttaacaagcacaagccctggctggagcccacctaccacggcatagtcacagagaacgac

SEQ ID NO: 181519 - DNA, 119 bp, Homo sapiens
gccccggcaactccagggtgtctggtccacgacctatcctaggcgccatgattctgtttctggcgtctgcatacgcaagtccccaactcgctgaggagagctgttcagctatggctgct

SEQ ID NO: 181520 - DNA, 80 bp, Homo sapiens
tccacgacaccggctacttctcagctttaccatccctggaggagacctggcagcaggattaagcatgaaaatattgttgc

SEQ ID NO: 181521 - DNA, 49 bp, Homo sapiens
cctggtacatcgccgagttctggctgatggagttatgagaacaatgaac

SEQ ID NO: 181522 - DNA, 51 bp, Homo sapiens
acttgatgtcttgcagatcaaggatcacagaagaactgcagcttcctgggg

SEQ ID NO: 181523 - DNA, 100 bp, Homo sapiens
tccatagattggaatattggtgggccagcaatcctcagacgcctcacttaggacaagtactaggttttgacaagcttgcatcatgcgtgagtataagcta

SEQ ID NO: 181524 - DNA, 75 bp, Homo sapiens
gccagatcctgctgccattccggaagccggtggctttggctgaagcctaattccacagctccttgttttttgaga

SEQ ID NO: 181525 - DNA, 75 bp, Homo sapiens
ttgagagagacttggttccctgtcccagaaagaccaagcggagcagccagctggcagtagcgccctgtaggaccc

SEQ ID NO: 181526 - DNA, 50 bp, Homo sapiens
acacatgctcattacatcgatgttgccagtgaatatcacctctgccaggc

SEQ ID NO: 181527 - DNA, 75 bp, Homo sapiens
aattgaagaaaataggattgctcctttagcctggataaatcaagactgattgccatcgcaacaggagggcggatc

SEQ ID NO: 181528 - DNA, 100 bp, Homo sapiens
ctcgctgggagagaggtacctctccttttccctctccctttccctaagggttatatcctgtgttgtgacctcatggtttaagtgggaataaagatgagta

SEQ ID NO: 181529 - DNA, 100 bp, Homo sapiens
cggcgcggcgagagagcggctgacagaggggatgcgagtttccaagccagcgccctactgggaaggaacagctgtgatcgatggagaatttaaggagctg

SEQ ID NO: 181530 - DNA, 50 bp, Homo sapiens
tggctgtacatgaagaagtcaaagagtcggatggtcagggctgccctttc

SEQ ID NO: 181531 - DNA, 99 bp, Homo sapiens
gcttggcaggctatactgggcagcgctgtgaaaatcatttgaatataacctgccgctttgcaggtgtattccacgtggagaaaaatggtcgctacagca

SEQ ID NO: 181532 - DNA, 100 bp, Homo sapiens
gcttggtgaagagttactagctcaagctatgacatggtgcattacggccactccaaccagctgcgccaggcacgggccatgggtgactacctcatcgtag

SEQ ID NO: 181533 - DNA, 98 bp, Homo sapiens
ctgaacaaggagaactggacggttgtgaagactctgcgttttagaaagagcgttttcgctacgtaaagcacattcgataaaggatatggaaaatactt

SEQ ID NO: 181534 - DNA, 51 bp, Homo sapiens
ggggagagctgccgcaggctgctaaggtatcagacttggtgataattctga

SEQ ID NO: 181535 - DNA, 75 bp, Homo sapiens
aacaatcttttgttggattgaaacagctaatcgtttgatctgtggatgaaatgaatcatgattttcaagctcttg

SEQ ID NO: 181536 - DNA, 100 bp, Homo sapiens
tttaccaggtgtcctacttctcatttaagctactcaagaaagagtgcccaattccaaatgtacagtggacaacagatgaagacttaactgaagcagttca

SEQ ID NO: 181537 - DNA, 101 bp, Homo sapiens
tttagctccaatgaatttgaggaagaattagtgtctccatcgtcatcagaaactgaaggcaactttgtctatcgcacagaaaccaatagagccatggcgac

SEQ ID NO: 181538 - DNA, 88 bp, Homo sapiens
ggcagctgctgagttctcggtgaaggattttttatcaagcagaaatgcatcgaacaacgagaatcaagatcactgagctaaatcccca

SEQ ID NO: 181539 - DNA, 109 bp, Homo sapiens
acaaacagcccgcccgaccccgtcccgaccctggccgccccgagcggagcctggaggtgagaagccctaccactgcaactgggacggctgcggctggaagtttgcgcgc

SEQ ID NO: 181540 - DNA, 51 bp, Homo sapiens
ggacacccctggtggcctgcttgataaccagttcaggatgtccatcctgga

SEQ ID NO: 181541 - DNA, 100 bp, Homo sapiens
ttacaacatggcagacattgacaaagtttatgtggccgaggcagacaagtggaattaggccttgctgcaggggacttcatttccttctcagtactggacc

SEQ ID NO: 181542 - DNA, 71 bp, Homo sapiens
aacccccaaattggctgggacaggagccaaaaacctgtatatcatctccgtgaaggggatcaagggacggc

SEQ ID NO: 181543 - DNA, 100 bp, Homo sapiens
gaagctgcacaggaagccgtgaaactgaaactaatctggattcactccctctggttgatacccactcaaaaaggacacttctgattaagacggttgaaac

SEQ ID NO: 181544 - DNA, 126 bp, Homo sapiens
gctttacagaaattccatgctgccttcagcttcctttgccgctctgcatcatgttgattcaccaaggcctgaaaagagggagaccaagtgcccgatccctggatgtgatggcacgggacacgtgac

SEQ ID NO: 181545 - DNA, 100 bp, Homo sapiens
cagccggggcctccgtattgaatgaaagacccagtgcaaagacatcaccatgaacactagcaaggctaagaatattgtacacaaagattcttgatgttct

SEQ ID NO: 181546 - DNA, 75 bp, Homo sapiens
cttccttattactctggacaacaatgcggaaaacgccatgcggtacataaatgggacgcgtctggatgaccgaat

SEQ ID NO: 181547 - DNA, 80 bp, Homo sapiens
catggagatgaagaagaagattaacctggagttaaggaacagatccccggaggagacggaccagcaggctgaggccaggt

SEQ ID NO: 181548 - DNA, 100 bp, Homo sapiens
ctgcagcagctccctcattctcacaggcccaacagtatcaccttttgccatgatagcatttctttcattggacagttccttacaagggctccactcagtg

SEQ ID NO: 181549 - DNA, 100 bp, Homo sapiens
caagtgatcagaacactaccgttcaagaggatgctcacttcaaagctttcttccagttgtcgccgtgatcctgaaggcgctgacctacgacgagaagcgg

SEQ ID NO: 181550 - DNA, 88 bp, Homo sapiens
tatctgcccggaggcaccacaggactgcagctccccagcacggtggtgatctttgtgaagtctgtgcagcggtgcattgccttggccc

SEQ ID NO: 181551 - DNA, 100 bp, Homo sapiens
tcagggttcaggcaatgcaaataaggtttgagcacaaaatgaacataattagggaaaataaggatctggcatgtttctacacaacaaaacattcatggag

SEQ ID NO: 181552 - DNA, 75 bp, Homo sapiens
agcagaacaactgcggaatcagattcagggctgttgataatcaggtgtatgtggccacagcctctcctgcccggg

SEQ ID NO: 181553 - DNA, 75 bp, Homo sapiens
caagaatgaatgaagagatgcgggaatcagaaggactttatggacagccagctttaatgaagcaccagttgagat

SEQ ID NO: 181554 - DNA, 100 bp, Homo sapiens
cagcaagttcatggtcacggagaaggcagcctacatagcatcccagccatcactcttccacctgctccttagagaagggaagatgagtgagtcgagctcg

SEQ ID NO: 181555 - DNA, 75 bp, Homo sapiens
ctgggcgcggccctgctcctgtcttccattgaggcagaagggaaatcctcattgacgattcaatttgttgaaggc

SEQ ID NO: 181556 - DNA, 90 bp, Homo sapiens
gaagagatagagcttcgcggagacggcggaagcggagagcaacagcgcgccggtctattattagcagaagatttttctgcatagttggca

SEQ ID NO: 181557 - DNA, 90 bp, Homo sapiens
ggaaccctggtcaccgtctcctcagggctgaagaagatgcagagcagcctgaagctggtggactgtatcatcgaggtccacgatgcccgg

SEQ ID NO: 181558 - DNA, 100 bp, Homo sapiens
agagaggcttccttaagacatttgtccttgaaactgcaccaaactcttggaagaacccagaacgtatcacaacaactttccccaaggatccagtttacac

SEQ ID NO: 181559 - DNA, 75 bp, Homo sapiens
ccgagaagtcatggacctaatcaggtgagaactctgtctcagtcgacgggaagtgcagtgactccacgctactga

SEQ ID NO: 181560 - DNA, 82 bp, Homo sapiens
ccagaccctggagcctcagttggaagcagccgatccagcctgcggagcctgtggggcagggctattgagtggccagacttcc

SEQ ID NO: 181561 - DNA, 76 bp, Homo sapiens
gagcggaaacagcggcagccagagaatatgcttttaaggctattaaccagggtggccttacatcagtagctgtcag

SEQ ID NO: 181562 - DNA, 75 bp, Homo sapiens
gcgcccggagcggtccgcgagccaccgaggcccaggacagagcgggatgccaccagcttgtccaaagggaagttc

SEQ ID NO: 181563 - DNA, 96 bp, Homo sapiens
tttctggtttctgatccagaaaatacaacttgggctgatatcgaagctatgccccagggctcctgccagagcgagctgcaccgggcgctggagcgg

SEQ ID NO: 181564 - DNA, 125 bp, Homo sapiens
ttcagttctctggagccccagattcaacccgtgtacgtgcctgtgcctaaactgggagtgtccactcgccttccaccagcatggcaacgtcttcacagtaccgccagctgctcagtgactacggg

SEQ ID NO: 181565 - DNA, 75 bp, Homo sapiens
cttggacaatacagaatgcccttcgcttgggctgccagatgttctcagtgcagctgagtcttggtgagcagacat

SEQ ID NO: 181566 - DNA, 98 bp, Homo sapiens
ggagaccaaaagtatgttgtaccttgtgacagaatatgccaaaaatggagaaatttttgatgatctcaatgccacccaccaacactgtgttttggccg

SEQ ID NO: 181567 - DNA, 80 bp, Homo sapiens
gcgcgcccagagccccgcgtttcagccctagggaaggttaatttggagtggcccctggagtcagtttcctacaccatccg

SEQ ID NO: 181568 - DNA, 82 bp, Homo sapiens
acagatttgtcatgaagaaactcaatgatcgtgtcatgagagtttaagaattgtttaagctgcatcaatggagcacatacag

SEQ ID NO: 181569 - DNA, 75 bp, Homo sapiens
ggagcccggagctggggcgacgaggcgattgcgggggcctgggctagactgcttttcaggaagccttggacgctg

SEQ ID NO: 181570 - DNA, 96 bp, Homo sapiens
cactggactcatggaggctgagcatttattcaggtgggtcctacgtgtatgaactcagcgcagtcctcatacacagaggagtgagtgcttattctg

SEQ ID NO: 181571 - DNA, 100 bp, Homo sapiens
aatcgcatcatcggtgccaaggaccacgcatccatccagatgaacgtggccgagctgctgatgcaaggaatcccctgggctcccgtccactccactgctg

SEQ ID NO: 181572 - DNA, 75 bp, Homo sapiens
ctgacggcgtgaccgacccgagccggaggactcagagagagtaatgataattaccggaccaaacatgggtggaaa

SEQ ID NO: 181573 - DNA, 88 bp, Homo sapiens
tgcccaaatcccggaaactccagcgtgtctccagccgtgagagaagaagaaggaggttcctgctgtgccagaaacccttaagaaaaag

SEQ ID NO: 181574 - DNA, 74 bp, Homo sapiens
agccactgacgccgggaccgggaccgccgccgccgccgccaccatgagctccacgcaggagatcggtgaggagc

SEQ ID NO: 181575 - DNA, 82 bp, Homo sapiens
gccggggaggcagcgcgggatcccagcctcaggcgtgcgcggacggtgtgcggattacaccaccaccttcactgtcagatcc

SEQ ID NO: 181576 - DNA, 85 bp, Homo sapiens
aggttgtcaatcaagggactgggaaagaccttgatcccaacaatgttatcattgagactgcatcaaaacatgtaaacaaggacct

SEQ ID NO: 181577 - DNA, 50 bp, Homo sapiens
cggaaatgcccttacagcagcaggacccagatgatgtggtaccagttggc

SEQ ID NO: 181578 - DNA, 98 bp, Homo sapiens
gctgttgtcactcaggtcaacaaggttggacgtgataagtatgagcctgcagctgtttcagaacaaggtgataaaaagggcaaaaagggcaaaaaaga

SEQ ID NO: 181579 - DNA, 75 bp, Homo sapiens
aagaaatccaggaacaactgtgtcagcagctagcccttttcctcaaggtactgcttctccgagatggccccagtg

SEQ ID NO: 181580 - DNA, 50 bp, Homo sapiens
cggaggggaagcttgggatcatgatgaacaagagaactgggcaacccatg

SEQ ID NO: 181581 - DNA, 90 bp, Homo sapiens
tggcttcttgtgggaaccaaacaaggacatcttcttctctataggattcggaaggacgttgcggagctggagtttgttcagatcatcatc

SEQ ID NO: 181582 - DNA, 75 bp, Homo sapiens
gaaggttcagttggcaaaccagatatatgacttggtgattgctggcttcaaccgccttcggcaggaacagcgagg

SEQ ID NO: 181583 - DNA, 71 bp, Homo sapiens
ggaaggaagatgtctctcagaaacaaaggcattgtgaaatcccctcttgctggagactttattactatgca

SEQ ID NO: 181584 - DNA, 51 bp, Homo sapiens
gaggacgagaagcagcggctgcagaatgagcggaagtgaccgtggtggctt

SEQ ID NO: 181585 - DNA, 98 bp, Homo sapiens
gctttaggatatacaagggtgtgatccaagctatccagaaatcagatgaaggccacccattcaggtaaatatctaagtgtggaattgctggattatga

SEQ ID NO: 181586 - DNA, 75 bp, Homo sapiens
gcggcggtggcatctgcggccatggcggcgactactgccaaccccgcttggaagctcgaagtctggctgtggcca

SEQ ID NO: 181587 - DNA, 82 bp, Homo sapiens
gacaagcaggctgctgctaagtgagacacagtaacctggttgaactctgcatctggaaagctgaagactgaagaaagataag

SEQ ID NO: 181588 - DNA, 139 bp, Homo sapiens
ggtatctctgtttcaggagtggtgacgcctaagctatcactggacatatcaaggacttcactaaattagcagcagcgatggattttgggtggggaagtcctccttgcggagttggcgccagctagctcttgaacagctg

SEQ ID NO: 181589 - DNA, 75 bp, Homo sapiens
cagaaagagtcaacagcagtggcaacagggcttttttccagacttcaagctcccattccaacagtaagagcttct

SEQ ID NO: 181590 - DNA, 90 bp, Homo sapiens
attaaaatttatacttcgcaaaactcagcaattttttgatgaggacacagcattgttggttttgccatgtactattttacctatgacccg

SEQ ID NO: 181591 - DNA, 82 bp, Homo sapiens
gtccacccaccgccgccgcctcccaggcatgccagatttcctggagaagctgcacatggccactctgaaagccaagaatatg

SEQ ID NO: 181592 - DNA, 100 bp, Homo sapiens
atcgtgtccctgtacgcggagggctcggtcaacggcttcatcagcaccttgggctggagctctcaaacactgctgtcctgcaccagatgcggcgggacca

SEQ ID NO: 181593 - DNA, 74 bp, Homo sapiens
atggctgcagtccgtatgctgagaacctggagcaggaatgcggggaagctgaccatagtcttgagtttacttat

SEQ ID NO: 181594 - DNA, 100 bp, Homo sapiens
ggctcaagcgatcctcctgccttggcctcttgaggagctgggactacaggcatcttgacagcagtagcaatgagcgtccagacatcagttccatccagag

SEQ ID NO: 181595 - DNA, 155 bp, Homo sapiens
cttaactgaagaattggacaaagcattagcttgttttcgaaatgctatcagagtcaatcctagacattataatgcatgtagccacgatggaggtgatgaacctgatggagcagcctatcaaggtgactgagtggcagcagacatacacctacgac

SEQ ID NO: 181596 - DNA, 83 bp, Homo sapiens
tcggaaaccggtagcgcttgcagcatgtaatcaagatgattaccaactggttcgaaaacttggtcggggaaaatatagtgaag

SEQ ID NO: 181597 - DNA, 74 bp, Homo sapiens
tcatccacagagccacatctgttaggattatctgaaccttcttctattgcaaaacatgaagatagtttgcttaa

SEQ ID NO: 181598 - DNA, 75 bp, Homo sapiens
ctttcctgccagtgccgacaggacggagcttctggaagaggtgaagaaggaattgcagaaagtgaaagaggaaat

SEQ ID NO: 181599 - DNA, 90 bp, Homo sapiens
cagaggcgggcgcggaggcggctagaaggtgaccgcggatcccagcttcctgcagccaggctgagaagaaagccaaggtcattgcaggaa

SEQ ID NO: 181600 - DNA, 90 bp, Homo sapiens
ggcgacctcaagaagcagctccacgaaaggcagccgcggatcgccgcgctcagcgacaaacaagtaaatgagctggatggtatcccgttg

SEQ ID NO: 181601 - DNA, 82 bp, Homo sapiens
gggaggagccttaacaagcgcacggagccctcaagcttgccctatacacagagaagtttgaggagttccagaacacactttc

SEQ ID NO: 181602 - DNA, 100 bp, Homo sapiens
gggatagtagtcaagatggataaaaagtcctttgaaatggtgctggatgaaattagaaagggtcgacatgttaaaacgggtcagttggcagccatcaaag

SEQ ID NO: 181603 - DNA, 100 bp, Homo sapiens
gcctccacacgggcctccgaagagctgccgcgacgcccggcccgcagggcaggcagcaagaattattgccaagttagcagcttggggaaaagaactgatg

SEQ ID NO: 181604 - DNA, 100 bp, Homo sapiens
gaaagcctacaaaagtgtggagaggttccttcaggaggatcagaaaaatggagtgctggcatacattgggaattttcgcctgcttgcagagctttccagc

SEQ ID NO: 181605 - DNA, 100 bp, Homo sapiens
tggcaccgcaagccgtccccggccacgcgggacgggactgcaatgtgccgatcttagctgctgcctgagaggatgtctggggtgtccgagcccctgagtc

SEQ ID NO: 181606 - DNA, 88 bp, Homo sapiens
cttcgtatgcagggtacattgaagaccttaagaagtttctaaaacataccgggtccatccgtagtttacagacaggtgtgggagagct

SEQ ID NO: 181607 - DNA, 100 bp, Homo sapiens
actctgcggcgcatggaggaggaggagggggtgatcgctgagctgaaggtgcgcagggacccccaggtgagccccatgcactgcctggacgaggaaggcg

SEQ ID NO: 181608 - DNA, 90 bp, Homo sapiens
agacggagtttatcatcaccgcggaaatactgagaaccgagacatgggtgcccggcaccgcgcccgagcccactccattcagatcatgaa

SEQ ID NO: 181609 - DNA, 83 bp, Homo sapiens
cgggcgcagtttctcacgacgggccgagcctgccactgtactccaaagattcaggtttactcacgtcatccagcagagaatgg

SEQ ID NO: 181610 - DNA, 98 bp, Homo sapiens
gacggaggtcccccctctgtttgtcattgagtttcttcaccgagtggtggacacatttcagggtgtttgccagcttcccagtaaaaatgatgaaaaag

SEQ ID NO: 181611 - DNA, 75 bp, Homo sapiens
caatagcatacattatgctgccgcctatgggcacaggcagtgtctggaattggaagatgttaccgagtacttcag

SEQ ID NO: 181612 - DNA, 82 bp, Homo sapiens
ctgcctgaatggcgggaagtgtgaagcggccaatggcacggaggcctgcgtgctcacagaacatttcctgcctgttgctcac

SEQ ID NO: 181613 - DNA, 75 bp, Homo sapiens
tggctgcgcgcgcggcccctcctccccggcgcctcccaggagctgaacaagcggctcactgctcctcctgcagct

SEQ ID NO: 181614 - DNA, 98 bp, Homo sapiens
ttttgcatcctacgtaaccagaccaagctgtgggctgccactgcagagccccgccatggaagacacgccgttggtgatatcgaagcagaagacggagg

SEQ ID NO: 181615 - DNA, 98 bp, Homo sapiens
tctttgcagaccaaccaattcagatttatgaaaagattgtttctggaaagagctatttatgaagaaattgatgctcaccagcacaaaggagctcaaaa

SEQ ID NO: 181616 - DNA, 80 bp, Homo sapiens
ggagattatattttcacgtggacaaacttcattggtttaaatatcagaccgattattgaccgacctattcgaggtcgtgg

SEQ ID NO: 181617 - DNA, 90 bp, Homo sapiens
ttgctttcattgtgggagagatgaagaacctgagtcaggacgtaaatggaaccctggtgtctgctttttcaacgtgggagaaggagttgc

SEQ ID NO: 181618 - DNA, 90 bp, Homo sapiens
gggacttctcccgcagcgacgcggctggcaagactgtttgtgttgcgggggccggacttcaaggatctcattttgcccaacggtggtact

SEQ ID NO: 181619 - DNA, 100 bp, Homo sapiens
ggctggctcattaacatgcatcctattttctctgtgggcagttctttttgttttgggaagacttctgactttaattctttcagtactgactgttggtttt

SEQ ID NO: 181620 - DNA, 97 bp, Homo sapiens
ttaaaagaggagcagcatggcatttcagtcactggtttgcagagtccaggccaaactgcaggggcacgtggaaccactgaggaagcacctggaggca

SEQ ID NO: 181621 - DNA, 74 bp, Homo sapiens
gcctctgggagcagaagggaggctccaagacctcatcaacaattaaggatgaatgctatcaagtaagacaagtg

SEQ ID NO: 181622 - DNA, 100 bp, Homo sapiens
acgaactgaagaaggccgcctatgacatcgaggtcaacacccgccgagcacaggctgacctggcctatcagcttcagttctgggaggtgatcagtgatga

SEQ ID NO: 181623 - DNA, 74 bp, Homo sapiens
ccgagagcgtgaccgagagcgcgaatatcgtcatcgttagaagttgacattttgctaaaggctgtgggagacac

SEQ ID NO: 181624 - DNA, 50 bp, Homo sapiens
acaatgcaggactgctctcctactacacgattgtccgtgtggagcccttg

SEQ ID NO: 181625 - DNA, 75 bp, Homo sapiens
ggggagagcggccgccgccgctgccgcttccaccacagcttgcccagtttcgacaaagaaaagctcagtcggatg

SEQ ID NO: 181626 - DNA, 82 bp, Homo sapiens
ctcattccagacaggctgctttcagtagccccatttttccagagtgtggattctttggcatgtatgacaaaattcttctctt

SEQ ID NO: 181627 - DNA, 87 bp, Homo sapiens
gatgatgttcaggtagagacaatagaaccagagccggaaccagcctttattgatgaagttacagattatgccattgccaggcgcata

SEQ ID NO: 181628 - DNA, 75 bp, Homo sapiens
gtttccattgacactgatatgacttcacatgtatcattctccgagcctgatattccgtcctcaaaaagtactgag

SEQ ID NO: 181629 - DNA, 102 bp, Homo sapiens
agtcttgggctttcactggttaacaatgaaagcaagcaggaagtttcctatattgggataaccaggatcctaagcacttcaagtcagagaagacaggacggg

SEQ ID NO: 181630 - DNA, 98 bp, Homo sapiens
tcccggcccgccccggagcccccaagatgcgccccagagcccgcggagccgccgcccgcggggagacgcctgtggcctgtcggatgcggcccacatcg

SEQ ID NO: 181631 - DNA, 90 bp, Homo sapiens
gcctcactgagcaaccaagacctcagggatttagagatactgttgttacttctgcatgttcattgcaaacagaaggttccttgagcaccc

SEQ ID NO: 181632 - DNA, 98 bp, Homo sapiens
tgaatataaggaaaaacagacacctgaaagtcttcctcaaaataacaatccagcaccactccttctgggtgggcgacgtggtccgggtcatcggcgac

SEQ ID NO: 181633 - DNA, 50 bp, Homo sapiens
gaagatcgaaaattaaacctcaggtataaaggaccattgttagaagagca

SEQ ID NO: 181634 - DNA, 100 bp, Homo sapiens
tgatgatgctcagtttgatgcgtcacactacgacagtgagaaaggagcgccctcacaaagccaatgctgaggagatgaccaagtaccacagcgatgacta

SEQ ID NO: 181635 - DNA, 108 bp, Homo sapiens
atcctcttacctcaacctcctgcgtatctgggaccacagcatctattgttggggtgatcggacctaacaccaggttgtggggacaacgaagtccagaagagtgaaagg

SEQ ID NO: 181636 - DNA, 119 bp, Homo sapiens
aagaattttactgcgaagttttgctcctggatgaatccaagttaacccttaccacccagcagcagggcatcaagttttctgagtttaaccagtaatgccattcagttgccaatctcaag

SEQ ID NO: 181637 - DNA, 100 bp, Homo sapiens
atactgatgagtcccactgtgctgagggagaaaactggttgtcctggatgtttgaaaagttggtcgttgtcatggtgtgttacttcatcctatctatcat

SEQ ID NO: 181638 - DNA, 74 bp, Homo sapiens
taaccacttaccccttctcaccgaggaagagcgggagaaaggggtgtctgatgccatcaagtgttgcaggagaa

SEQ ID NO: 181639 - DNA, 100 bp, Homo sapiens
aggaagtcccacggcactgagagctgaattgtgggctctcattttgaatatttccagccaacctgagggccgttgctccagggagaactgcaaatatctt

SEQ ID NO: 181640 - DNA, 100 bp, Homo sapiens
cagcctcccgagccagccctgcaacgaggtcaccccgcggatctacgtgggcaacgccggagtttaagagagctgtgaaagtagcaacaggacaagaact

SEQ ID NO: 181641 - DNA, 50 bp, Homo sapiens
ggatgaaatagatctctcggctctgaggggatttatcaaagatgttcatg

SEQ ID NO: 181642 - DNA, 96 bp, Homo sapiens
aaaccccgttgacaaggcactgctttttcatgacgagttgtctgctggttctcagcttgaagaagattctgcagtccttattgatcctttttcttg

SEQ ID NO: 181643 - DNA, 100 bp, Homo sapiens
ccgagcgccgcgccttcgcgcacaagatcaacaggtccggacactgtttgtcagcggcctccctgtggacattaaacccagagaactctacttgctcttc

SEQ ID NO: 181644 - DNA, 74 bp, Homo sapiens
tctcggcagcagggccgctacgcccccagctatacccccagctgcttctgaacacagtgactgccagatctcca

SEQ ID NO: 181645 - DNA, 51 bp, Homo sapiens
gcggagaggagagcggtgcggaggactgagttggagtgcttagtgcagttg

SEQ ID NO: 181646 - DNA, 90 bp, Homo sapiens
tgaacacacacattccagagaactgtggctgcagtactttgcacggggcctgcaagtttatatcagacaacttcgcttagctctccaggg

SEQ ID NO: 181647 - DNA, 100 bp, Homo sapiens
ctgaaaggcctgtctgtggaattcgcgctgctcgccgacaaggctgcacaacagtccttcagctcctacttaatggaagcctcgcagatgcaagatggct

SEQ ID NO: 181648 - DNA, 100 bp, Homo sapiens
gacacccagcggtctgacatcgcgacgctgctcaaaacctcgctccggaaaggggacacctggctaggcagctggaagagaaagaccgagtgctaaagaa

SEQ ID NO: 181649 - DNA, 100 bp, Homo sapiens
ggtgggaactgggaacactggagacctgatttctaactgacgctaccgtcgcggccgccgtgcttatgaggtgatcaaactcaaaggctacacatcctgg

SEQ ID NO: 181650 - DNA, 90 bp, Homo sapiens
ctggccaccaccatggtgcccactgctgcgcttgccaagcctcatgggccccggcagcaagagcaactcaccaccagccttgggcccaga

SEQ ID NO: 181651 - DNA, 71 bp, Homo sapiens
ccttatgagctggatcccttcgacaggagcatgcaagttgtccccttggacaaacagatcacaatcataga

SEQ ID NO: 181652 - DNA, 75 bp, Homo sapiens
ctgggagagaggtacctctccttttccctctccctttccctaagggcatcatggtgggaggcttgaagaggaaac

SEQ ID NO: 181653 - DNA, 74 bp, Homo sapiens
aatttctcctgcatctctcaatcttgaggtcattgagactgcctcttctcaaagggacactgtcctcagcactt

SEQ ID NO: 181654 - DNA, 90 bp, Homo sapiens
gcaggcgcagacccacccgccatgaagccccccgcaggaataggatgagtgataatccacccagaatggaagtgtgtccttactgtaaga

SEQ ID NO: 181655 - DNA, 100 bp, Homo sapiens
ggcgaccactgcctggctaccactgatgttctctcaaggcccaagagctcttcagtcagcaggttttgctgttactgctcagtgtagtcacaccttgaat

SEQ ID NO: 181656 - DNA, 75 bp, Homo sapiens
atcgcaggagagaagcgcggaagaaggcctccgtggaggccagattgaaggtggacccccaaaagtacaagggca

SEQ ID NO: 181657 - DNA, 96 bp, Homo sapiens
tccctgcagaggctcttcctcatcatctcagccacgaagtacagccggaggattccatgtcctttatctacaaggctttggaaaggaacataagga

SEQ ID NO: 181658 - DNA, 75 bp, Homo sapiens
aaggagttcgagcagatcgacaagtccgggagctgggcggccatttaccagatcaatgaactgagccatgttcaa

SEQ ID NO: 181659 - DNA, 127 bp, Homo sapiens
cgagaccgtgaccgagagcgtgaccgagagcgcgaatatcgtcatcgttagaagcacttttccagccattaactccaggctctcgagaatttgaagatgttgtaaatattctccattcttcttacct

SEQ ID NO: 181660 - DNA, 100 bp, Homo sapiens
ccccgaaggccctatcaggacatggagtatgaaagacgtgatcagggccaaagcggtcagtgagaaggaagtggactctggaaacgacatttatggcaac

SEQ ID NO: 181661 - DNA, 100 bp, Homo sapiens
tcgtcgacatgagtgatgtggaggaaaacaacttcgagggcagaaaggacagaataacgggctcccagattcacaagccccaccaagaggatcaccccag

SEQ ID NO: 181662 - DNA, 89 bp, Homo sapiens
caccaagatgcggatccgggcctttccggtcgtccttggtggaaggaaccatgaactggcatctccccctcttcctcttggcctctgtg

SEQ ID NO: 181663 - DNA, 74 bp, Homo sapiens
cacggaagcgcggacggcgcacgacgagtactggcatgcgcacgtggacaaggccatgttacaggagctgaatt

SEQ ID NO: 181664 - DNA, 100 bp, Homo sapiens
tcgtagaaaaggagtggataagctttggacacaggtttgcactgaagcgaagcacacggatgaacatcctaggtagccaaagtcccctccacccttctac

SEQ ID NO: 181665 - DNA, 109 bp, Homo sapiens
cgcagatcggcgcccagcaatcacagaagccgacaaggcgttcaagcgaaaacatgaccgctgagcccatgagatggcccactgcgtgaccttggttcagctgtccatt

SEQ ID NO: 181666 - DNA, 50 bp, Homo sapiens
ccccgtgccatcgccacagacctacaggggccatggaacgtatatgggag

SEQ ID NO: 181667 - DNA, 88 bp, Homo sapiens
gggttggctcgcgcttcgttgtcagatctgaggcgaggctagggggagcacctggggaccacggaagcgaccgaggccttctttgcca

SEQ ID NO: 181668 - DNA, 98 bp, Homo sapiens
cgagtggagtgtccgctgtgcccgggcctgcaccatgagcgtcccggccttcatcgacatcagtgaagaagatcaggacctgaaggagaagaaggaga

SEQ ID NO: 181669 - DNA, 100 bp, Homo sapiens
gcggctgcgggctgagcggcgagtttccgatttaaagctgagctgcgaggaaaatggcggcgggaggttccatgcctctgcagcggtgcctcatgtttgc

SEQ ID NO: 181670 - DNA, 83 bp, Homo sapiens
ccgggagcaggaggagctgctggcgcccgcagatggtgacttaagagattaaaattaatttggttgctgttggttctgaacaa

SEQ ID NO: 181671 - DNA, 100 bp, Homo sapiens
actatgaagactctcagggcgcgatttaagaagacagagctgcaagctttcttcctggtggcagatgacatcatggattcatcccttacccgccggggac

SEQ ID NO: 181672 - DNA, 75 bp, Homo sapiens
atctctggctccagggaatgtgagctggacagtgccacatcgcttatccaggcagctaaaaacctgatgaatgct

SEQ ID NO: 181673 - DNA, 101 bp, Homo sapiens
aaacaaaacaaatatgaactatgataagctgagcagagccctgcgatactattatgacaagggactttcagttaccttgatgatgtcccatttaagacagg

SEQ ID NO: 181674 - DNA, 100 bp, Homo sapiens
ctggagcagggcccggccatcatcgaatgcatcaatgtgcgggacccatactggaatgacacagagcccctgtgcagagcaagatggaattggggaggag

SEQ ID NO: 181675 - DNA, 120 bp, Homo sapiens
gtgcagcaagattgtcattgactttgattcaattaacagcagaccgagtcaaaagcttcagattacagagtgaatatctttcttcgtcagaaatggaatgatccccgcctcgcgtacagt

SEQ ID NO: 181676 - DNA, 100 bp, Homo sapiens
agagagcatcgttaaagataaggtttttaaagacaattgttgcaaaagagaagtcctcaacttatatgtatattgcagcaatgctcctggatgtaatgcc

SEQ ID NO: 181677 - DNA, 50 bp, Homo sapiens
caagtctgtcagcaccatctttctaacacgaagctgccgcccatgctgtc

SEQ ID NO: 181678 - DNA, 89 bp, Homo sapiens
caatggtacagaaatcacccaggataacccctccagcggcaaagccaggctctccccagctttaccgatttgttacaactcaagcaagg

SEQ ID NO: 181679 - DNA, 83 bp, Homo sapiens
ctacaaaggaagacttgtaacctggagaagagctctggtcccattttggcagaagaagctgtcctgaagcagaagtgtttact

SEQ ID NO: 181680 - DNA, 83 bp, Homo sapiens
agacagcccaaatatcctcggaagagcgctcccaggagaaacaagttggatggcaagcatgtggtgtttggcaaagtgaaaga

SEQ ID NO: 181681 - DNA, 97 bp, Homo sapiens
ccggctacagcgggaagagcgattttgcaagaacgaggctcaaggatgtgagggacacagtattgacagctgaagaaatgatttacgttttcccgag

SEQ ID NO: 181682 - DNA, 51 bp, Homo sapiens
tgcaaactctggaaaaaaacttggagtccctgtgaagcaggaagagtgagg

SEQ ID NO: 181683 - DNA, 100 bp, Homo sapiens
ctcggccgatatcctccttggccaggaaaggtatgaacatgctaatgatgataagagcagtttgaaatcagatcccgaaggggaaaacatccatgctgga

SEQ ID NO: 181684 - DNA, 101 bp, Homo sapiens
caggttcccatggttgccggctcccctctcaggacaacccagatgtgcaacaaagtgcgatgagttgcatgctgagaatttgaaaaatgaagatgatgtag

SEQ ID NO: 181685 - DNA, 74 bp, Homo sapiens
tatcctacatgcagatatcaagccagacaatatcctggattccccagctttccgttgcacaaacagtgaagtga

SEQ ID NO: 181686 - DNA, 131 bp, Homo sapiens
agaaaagaaactcttcgactacttcaaccaggaggttttccgagacaacaacggcaccgcgataaccagcccgagtcatgcagtcttttcgagaaaggtgtggtttccatggcaaacaacagaactaccag

SEQ ID NO: 181687 - DNA, 75 bp, Homo sapiens
gaggcggagaaactgacgaattctctaatgttagaagaggaagaggaggaggaggaagagcagccgcaggcagca

SEQ ID NO: 181688 - DNA, 83 bp, Homo sapiens
agacgtctgcgtgagaatagagaccaccgagaaatgagccgtcagactgctacagcattacctaccggtacctcgaagtgtcc

SEQ ID NO: 181689 - DNA, 80 bp, Homo sapiens
agttggaagcagccgatccagcctgcggagcctgtggggcagtgggcctttggagtgacgctgtgggaactcatgactct

SEQ ID NO: 181690 - DNA, 75 bp, Homo sapiens
aggtctcaaggcaagcctattgagttaacacctctgccgctgctaaaagtgctgattcctaaagaaaagccccca

SEQ ID NO: 181691 - DNA, 75 bp, Homo sapiens
cctgtactttgtggacttgcaggatgacttagacgactagatctgaaactggacaatgtcctgttggaccacgag

SEQ ID NO: 181692 - DNA, 100 bp, Homo sapiens
gacctcttccatctaaatgacagtggattctccacagttttcctcgtgcgtactcacggtggaatccgatgtgcattgaagcgaatgtatgtcaataaca

SEQ ID NO: 181693 - DNA, 82 bp, Homo sapiens
caccagctcatgaaagacacgactttgaactggaagatgtggaagatgtgaaatttgtcatcaattatgactaccctaactc

SEQ ID NO: 181694 - DNA, 139 bp, Homo sapiens
gcagattgaacattggaagaagatagtgaaaactcaggaagaattgaaagaacttcttaataaggtgggtgacatcaccatcctggtgaacaatgccgccgtggtccatgggaagagcctaatggacagtgatgatgat

SEQ ID NO: 181695 - DNA, 90 bp, Homo sapiens
catcgtcctgcagcgcggagcctgcggccaagctcaatcacctaagaagaccaaagaaaaatcccctgcaaagaggatcatcatttcctt

SEQ ID NO: 181696 - DNA, 100 bp, Homo sapiens
tgtttgaagtcaacattcgatttattggaggcctacttgcagcatattacctatcaggagaggagtgtctcaatgagatcttggagtcagcagatgcacc

SEQ ID NO: 181697 - DNA, 74 bp, Homo sapiens
cgacggcggggtccgcgcggccagggggggccctcagcctcttggccttgaacgggctgttcatcttgattcac

SEQ ID NO: 181698 - DNA, 89 bp, Homo sapiens
gaaatgtgggcagatcaactgacatccttaaagatgtggaagatgtgaaatttgtcatcaattatgactaccctaactcctcagaggat

SEQ ID NO: 181699 - DNA, 100 bp, Homo sapiens
gtggtgaggcaggctcgcctcctccagctgttgttgctgctggtcatcatcagatttgaaatatttaaagtggatacaaaactatttcagcaatgcagac

SEQ ID NO: 181700 - DNA, 51 bp, Homo sapiens
cggaggtggcagccatctccttctcggttgggagccacgtgtaccagtgtg

SEQ ID NO: 181701 - DNA, 90 bp, Homo sapiens
ggcggaggcaggatgaagatgactgtggatttcgaggagtgtctgaaggactcgccccgcttcagcttccttcaaaatgtctactgttca

SEQ ID NO: 181702 - DNA, 100 bp, Homo sapiens
tctacaatagcagccatttcaaatcactagccactggaggaaatgttagccaggcactggttcaaaccttgtactactcagctgatcacaagctgcttga

SEQ ID NO: 181703 - DNA, 75 bp, Homo sapiens
cctgatgataagcagctgctatacagtgaggccaagctatccgtggtcctgaaccagttatgtgtgttgcatgag

SEQ ID NO: 181704 - DNA, 75 bp, Homo sapiens
cggccccctggagggggcagtcccgggagaacctgcggcggccggagcgatcttagcaaagcaatgtctcaagat

SEQ ID NO: 181705 - DNA, 83 bp, Homo sapiens
cagctggagaccgtgggccccaaggacaatgcagatcttcgtgaagactctgactggtaagaccatcaccctcgaggttgagc

SEQ ID NO: 181706 - DNA, 83 bp, Homo sapiens
ctctggtggaggcgctcttcctggtgtcccgcccagtaggctactgcagcactggggtgtcagttgttggtccgacccagaac

SEQ ID NO: 181707 - DNA, 51 bp, Homo sapiens
agtggcatggaccacacccagcggaacgcctagaagcctgcagctccggag

SEQ ID NO: 181708 - DNA, 98 bp, Homo sapiens
accggcagttcttgggtcaaatgacacaattaaaccaactcctgggagaggtgaaggaccttctgagacagcaggtttgcaatggtctggagcagcca

SEQ ID NO: 181709 - DNA, 50 bp, Homo sapiens
ctggggagcccttctgcgccacaggtaaaccccacagcccagtgtaccca

SEQ ID NO: 181710 - DNA, 100 bp, Homo sapiens
tgaaatgctgactaaggaacaaggtcctaaaggggatccaggtcagactataacccagccggggaagcctggcttgcctggtaacccaggcagagatggt

SEQ ID NO: 181711 - DNA, 100 bp, Homo sapiens
gtgcgttgcctatactttgccgacacattccttcgagatgcaaattgtggctactaatttgccccctgaagatcaagatggctctggggatgactctgac

SEQ ID NO: 181712 - DNA, 98 bp, Homo sapiens
tgtacatagattttggtggaaagtttcattgtgtatgtagaagaccagaagtggatggagaatctaaatcggaaggtagcacacagacatatgccagc

SEQ ID NO: 181713 - DNA, 78 bp, Homo sapiens
ccctgcaggctgagaaactggaccaccatcctgaatggtttaacgtgtacaacaagattctggatgaaattgaagaac

SEQ ID NO: 181714 - DNA, 76 bp, Homo sapiens
ctcaatttaagcctgatctaacccctagaaacaggcttgtgacatcacgggaggactgtacctgaaggtgcctcag

SEQ ID NO: 181715 - DNA, 51 bp, Homo sapiens
tgtctgcgagccaggattcccgtaaaatgtttattggaggcttgagctggg

SEQ ID NO: 181716 - DNA, 100 bp, Homo sapiens
gagaagaaggaagttgtggaagagtaccacttccgctgtcacggtaaagtccgccatcagaagactgaaggagttgaaagaccagtagacgctcctctac

SEQ ID NO: 181717 - DNA, 100 bp, Homo sapiens
ggaagctgtgcacctccctcactttgtggctctccaagggttaaagtcctttcttgctttcaaatatgctatggagccacagttgaggacagtagtttcc

SEQ ID NO: 181718 - DNA, 98 bp, Homo sapiens
gcagatcctggtcctcgatccgcccacagacctcaaattcaaagggttgtctcctcacagactatgagctccttgaaagagggaatcgtgtcttactc

SEQ ID NO: 181719 - DNA, 75 bp, Homo sapiens
gccggcgtcaccgccgcggacttcgctttgggccatgaccagtgtatcccctactccgtgttgctgaaagacctg

SEQ ID NO: 181720 - DNA, 90 bp, Homo sapiens
cttagattcttatcacaaccaagtagaactggctcttcaaattgaattgactaatctccttcagaatcaagcagtgaaaggaaaagttgc

SEQ ID NO: 181721 - DNA, 75 bp, Homo sapiens
cgttttgaaaaaccaggacgaaaagatgtagctgggaacttctggggtaggacgttgtctgctatctccagttcc

SEQ ID NO: 181722 - DNA, 100 bp, Homo sapiens
ggaacaccaaggtcaccaaacattccgcataaacgaggtggtcaaggaatgtcagccacctcctaagctgcccaacggtgtgttcacccccgacttccag

SEQ ID NO: 181723 - DNA, 75 bp, Homo sapiens
cccgccgcttagcctgatgctggaaggacgaagaccaagatcactccatggatgaaatgacagctgtggtgaaaa

SEQ ID NO: 181724 - DNA, 90 bp, Homo sapiens
gcggaggaggagacggcaggtcggagaatggatcttggagaatgtctgaaagtccatgacctggctttaagagcggattatgaaattgca

SEQ ID NO: 181725 - DNA, 98 bp, Homo sapiens
cttttctcagaatcaccagccttcttcagcaccacctttttggggaagatttacctagctgccagcttttcaggctgcctttcgagctcaggggcccc

SEQ ID NO: 181726 - DNA, 82 bp, Homo sapiens
gtgaaggcgtccgtcctgcgcatcgcaacttcccaagtaagaagcggaagaggagccgctggaaccaagacacaatggaaca

SEQ ID NO: 181727 - DNA, 100 bp, Homo sapiens
aggctcgcgggcggcgggcccgggtgtgagttcttgatacgaatgaaaggccaagagtttgttgatgagattcaaggtagatatcctcatcttcttgaac

SEQ ID NO: 181728 - DNA, 82 bp, Homo sapiens
cccctgtccaggctgaagaagactctggtactccaaagattcaggtttactcacgtcatccagcagagaatggaaagtcaaa

SEQ ID NO: 181729 - DNA, 98 bp, Homo sapiens
cgccgtgagagaggaggggtgccggccgggattcgcggcccggagctcgggaccgggtctattgacattcagggatgtggccatagaattctctcagg

SEQ ID NO: 181730 - DNA, 82 bp, Homo sapiens
ctgaagccatggcgccagacatcttagccaggaagtcgagatgacatgaaagcagactgtattttgtactacggctttggag

SEQ ID NO: 181731 - DNA, 100 bp, Homo sapiens
ccagctcgaaagcttcactagtgatctcatggaaaacacttatggagtacaagcgcaagctagccagagtttccctggtgcgcaaagaactcaggtcccg

SEQ ID NO: 181732 - DNA, 50 bp, Homo sapiens
ctcaagagcaatcagtaccatctgacaagccatctatgatgcatttgacc

SEQ ID NO: 181733 - DNA, 50 bp, Homo sapiens
accaggatagctgttgtttcagagaaagtgagaaggcaaccaaagtgcag

SEQ ID NO: 181734 - DNA, 101 bp, Homo sapiens
ccggagccgaaacaccggtaggagcggggaggtgcaagcggtcttctctgtcttctttatggccagtaaaattctccagaagagatttatggcagcctcac

SEQ ID NO: 181735 - DNA, 100 bp, Homo sapiens
ttctggaactgggagaagatggctttaaagaatacacttcaaacattgctacaagtggttggtgtggtctctgtggctgtggccgtgattccttggatcg

SEQ ID NO: 181736 - DNA, 74 bp, Homo sapiens
cctgagcccgaggtgctgacgtcgcaaaaaaattggataatagtacacatcctaaatatgacttctgcaaagat

SEQ ID NO: 181737 - DNA, 100 bp, Homo sapiens
ggcaacctggaccccaaaattaccgagataagaaactctttaagcctccagtgttagtatttgtggactgcaaactaggagcagatcttttgagtgaagc

SEQ ID NO: 181738 - DNA, 75 bp, Homo sapiens
ggtctcacctcgacggtgatttgcaggtgttgattatggaagattcccacaagagtaccacgtcagagacagcac

SEQ ID NO: 181739 - DNA, 100 bp, Homo sapiens
ccgaagccccctgcaggaactctacaacccaatccagcaggaggatgcattagcacaacaggcctttgaagaggctcggagaaggacacgcgaatttgaa

SEQ ID NO: 181740 - DNA, 82 bp, Homo sapiens
gcatctcagtggttgaatcataggcaagtggtgtgtggcacaaaatgcaacacgccgtcatttcaccaagctgataatgttc

SEQ ID NO: 181741 - DNA, 74 bp, Homo sapiens
ctcggccggcaaccgagggacccgcgtccaggccatgacgctgatggagtacctcatcaagaccggctcggagc

SEQ ID NO: 181742 - DNA, 90 bp, Homo sapiens
agctttacaggagcgacttgacaatgtccctcacaccccttccagctacatcgaaacaatgatggtcgactgaggttgagccgtcagggc

SEQ ID NO: 181743 - DNA, 90 bp, Homo sapiens
gacagcaccattcaggatgctggtttataccaaggacaggtaaaataccatgaagattttgaaaaaacaaaggggagaggctttactccc

SEQ ID NO: 181744 - DNA, 83 bp, Homo sapiens
gttgtgggctttctgcggccgctgagggcgcgtctcccctccgccatgatgctgagctttttataccaccaaagatcaacaga

SEQ ID NO: 181745 - DNA, 83 bp, Homo sapiens
cgaggaggagataacgcggccttgggctctgctccccgcagccaccgccacccattggaatggccaacaggggacctgcatat

SEQ ID NO: 181746 - DNA, 50 bp, Homo sapiens
caacagcctggcgtccgccacgagtgatcagcagctggactgtgccttgg

SEQ ID NO: 181747 - DNA, 100 bp, Homo sapiens
gcgacgagctgaccctgggagacatcgacgcgtttgcctcagcatggagggcggggccgcggcagccacccccacagcactgccttactacgtggccttc

SEQ ID NO: 181748 - DNA, 50 bp, Homo sapiens
gaccaagtaacacagctttcacaagagctaagaaacctttccagcttgga

SEQ ID NO: 181749 - DNA, 100 bp, Homo sapiens
gtgattcggcacagctctctgactctggctctgctgatgaggttgatgaatttgaaatccaagctcttttggtacaccagaaggccagaatggaacgact

SEQ ID NO: 181750 - DNA, 75 bp, Homo sapiens
gccattacggggagcacgtgtgcactgctaagatacagaaggtggtcatggcactaggagactacatgggcgcct

SEQ ID NO: 181751 - DNA, 80 bp, Homo sapiens
gagtgagagctccccaggggagttctctgtgtctgtgaagaagctcttcgtgggcggtcttgactggagcacgacccaag

SEQ ID NO: 181752 - DNA, 83 bp, Homo sapiens
cttgggcctcgcgccggctatggccgtgccctggggctgagccctcaggtgaggcggaaccaaccctcctggccatgggaggg

SEQ ID NO: 181753 - DNA, 100 bp, Homo sapiens
acccgcgagagatggaagcggcggcgacgccggcggctgccggggcggcgaggcgcgaggagctaggctaccaaagtgacagcagatggcgagcagaccg

SEQ ID NO: 181754 - DNA, 97 bp, Homo sapiens
ctggatgtctttgggccgaagcatcctgctctgaagatcactcgtcgctatgccttcgcccatatcctaacggacaccatccggaagatgaagaacg

SEQ ID NO: 181755 - DNA, 100 bp, Homo sapiens
ctcaagctctcttaagagattatgataatgtggatgcaaatgatcttaagcagttttttgagaccaactattctcagatatatttcatcttctatgaaaa

SEQ ID NO: 181756 - DNA, 83 bp, Homo sapiens
aaggacagttagaagacagtaggaatgaatctgaagtctgctgcagtaaaacacagaaggctttaaaatgttttcttgcataa

SEQ ID NO: 181757 - DNA, 50 bp, Homo sapiens
caattcctgtgatgtatcagggtatccaattggtttggcaacaaacgaat

SEQ ID NO: 181758 - DNA, 83 bp, Homo sapiens
gtgtctcttctcgccctggcggggaagagacaagaggagcagcagcggcaccgcccctcaccctggagggtcctgtacaatct

SEQ ID NO: 181759 - DNA, 50 bp, Homo sapiens
agctcccccgcctcggggagggcaccagtgaaatcccattctctggctgg

SEQ ID NO: 181760 - DNA, 82 bp, Homo sapiens
agttttgaaatcgacacacaaagaatagagttgagcctgtgggacacttcgggtaattggtacgcctcagagaccggcagcg

SEQ ID NO: 181761 - DNA, 83 bp, Homo sapiens
acatcctcctggccaccgactcctacaaggtgccagaaccctgtggagcatcatgaactgggaagagtagctgagccccagag

SEQ ID NO: 181762 - DNA, 83 bp, Homo sapiens
ctggaacttcatcatcatctacttcacaggaattgccattttataactttgaaaatgcatctcagacatttgatgacctccct

SEQ ID NO: 181763 - DNA, 79 bp, Homo sapiens
gccgtccgcaccgggaccggagaggaagcggaggtctgaagggggacaggattgtcagtggcttcgccccgaggagagc

SEQ ID NO: 181764 - DNA, 100 bp, Homo sapiens
agctcgttggcagtagcagcttatgaggatggtgcagtgtggtgactttcctcatctgttagtgtacggaccatcaggtgctggaaaaaagacaagaatt

SEQ ID NO: 181765 - DNA, 74 bp, Homo sapiens
tttatttacagcttcatggagacctggtcaggtggaaccgtcccaaaatgtcccttgctcagaagaaggatcgg

SEQ ID NO: 181766 - DNA, 50 bp, Homo sapiens
gacgctgccagcatcgccgccgccagacgcaaacatgcagatctttgtga

SEQ ID NO: 181767 - DNA, 100 bp, Homo sapiens
gccatatccatcaaacttggatcaagtgtcatgaagaaggatatttcacagctataatgttgaagaaatcaagagtgaaattaaaaagccaagagattat

SEQ ID NO: 181768 - DNA, 82 bp, Homo sapiens
ccccagtcctcatcctggatgaagccaccagcgctttggatgccgagagcgagtatctggcactttgtgagtgtgccctcca

SEQ ID NO: 181769 - DNA, 83 bp, Homo sapiens
tctctgctcctctagaagatttcacagcaatgctggactgcagtgactatgttctagcctgattcagaagtagccaatgctgg

SEQ ID NO: 181770 - DNA, 98 bp, Homo sapiens
cagatactctctccatcagaacatggacaagatcaaggttccgacgcagatcatctgggggaaacaagaccaggtctagtgacggagcccgcgcgcgg

SEQ ID NO: 181771 - DNA, 75 bp, Homo sapiens
ggaccatgctgctgaaagagtaccggatctgcatgccgctcaccgtagacgagatcacctctgcagcctgcacag

SEQ ID NO: 181772 - DNA, 74 bp, Homo sapiens
ggaagaagaggatgaagatgtggatctggcccagtggccttcaagtcacaggacgcagcgattccctgccctct

SEQ ID NO: 181773 - DNA, 100 bp, Homo sapiens
cgaccatatctgccaggacaatctcggcatctccttcagcttcccaggattccaactccacagagtgaccagagagaggacgtggctgaagacaccaaag

SEQ ID NO: 181774 - DNA, 90 bp, Homo sapiens
agtcagtcattttactgtcaagacatttcttcggcattctgcaacagaagaaaaagtcagcactttttgaagtgtctgaggttataccag

SEQ ID NO: 181775 - DNA, 96 bp, Homo sapiens
acgatggcctagcacgtggaattcgcgaagctgccaaagccttagacaaaggcaagaagctagttgagctgccatacactgtaaaggggatggacg

SEQ ID NO: 181776 - DNA, 82 bp, Homo sapiens
agtatgataacgaaccacaaatacctggctatattgtcgatgattcagtcagagggaatctctgcatatagctacaaagtca

SEQ ID NO: 181777 - DNA, 74 bp, Homo sapiens
ccggattccagactcgtgggggaaaggctggatcttcagcctgttaaacaagaaaacgaaaaaccccttccaga

SEQ ID NO: 181778 - DNA, 88 bp, Homo sapiens
ggagaagcagaggcactgcctggagctgcagatgactgtccaagtgcctccaaagtgtacaaagcatcagattcagcagaagcaattg

SEQ ID NO: 181779 - DNA, 82 bp, Homo sapiens
ggcgttggctatgtgcccatcacaggccaccagcttgggctccccacggagggcagcaagtgggacttggggaacccggctg

SEQ ID NO: 181780 - DNA, 97 bp, Homo sapiens
tgtccttaaagcaattgagcaggctgatctactgcaggaggccaggtgtggtgtcttacacctgtaatcccagcactgtgggaagccagggcaggtg

SEQ ID NO: 181781 - DNA, 80 bp, Homo sapiens
agctgaggcggtcgcggccatgaagcagcctcccgcgacgatgcccctcaacgttagcttcaccaacaggaactatgacc

SEQ ID NO: 181782 - DNA, 100 bp, Homo sapiens
ctggggtcggcgccgagtgggaggatggcggaacttcatggcggctgaagagatgcattggcctgtccctatgaaggccattggtgcccagaacctgcta

SEQ ID NO: 181783 - DNA, 90 bp, Homo sapiens
aggacctggcctgaagacatttcctctcctcccctctggatttctcagagatcctggccaatttggagcaaggcttagcagaagacggcg

SEQ ID NO: 181784 - DNA, 82 bp, Homo sapiens
gctggatgttctcatcgtccctgccaactttccaagtctggggatggccaggaatccagatcttacataagatggaagtctc

SEQ ID NO: 181785 - DNA, 101 bp, Homo sapiens
cttagggagttttcagctacagtcgtttttagaaggagcactgacagcgagttgctgatgtatattcaagatgagtggattaggagaaaacttggatccac

SEQ ID NO: 181786 - DNA, 100 bp, Homo sapiens
tccaggacagcaatgccttcacccgggatacgctgcaagagattttccagaggagccgcaaagacagcctggaaagtgacagctccacggccatcattcc

SEQ ID NO: 181787 - DNA, 101 bp, Homo sapiens
cagaagagtgagagagagctattagagattgtgaagaagaatttcgatctccgccctggggtcattgtcagatcaaagccatcggccagacagagttgaat

SEQ ID NO: 181788 - DNA, 50 bp, Homo sapiens
ctctcagcaagaacgggaacaaaactctgtttcttggcagtacagaagtg

SEQ ID NO: 181789 - DNA, 100 bp, Homo sapiens
ccgagtcctggtatcagaccaagtccttgctggtgcagacgaagcggcgggctctggagaagattgaccttaagttcattgacaccacctccaagtttgg

SEQ ID NO: 181790 - DNA, 88 bp, Homo sapiens
ccctggaacaagttgccggccaacgtgagacagtggtactgctggactttgctgcagctggaggggagctcggctggctcacacaccc

SEQ ID NO: 181791 - DNA, 90 bp, Homo sapiens
tggacctgcaggtacttggatctccagtgggagctgccctctcgaaggcaggacagcggtggcggcagaccccatatcatgtgaacctcc

SEQ ID NO: 181792 - DNA, 101 bp, Homo sapiens
tccgagctgaagcggcggaacttagacatcaccggagtcaagaccgtgctcatctcccgactcaagcagtttttcccctacatcctgctgctctttgcgat

SEQ ID NO: 181793 - DNA, 88 bp, Homo sapiens
caatgcgttgcctggctccacgccctgctgggtcctacctgtcagagccccaaggtactccaaagattcaggtttactcacgtcatcc

SEQ ID NO: 181794 - DNA, 90 bp, Homo sapiens
cagaagcgggcggcgcgggggagatggttgttcagcagaagtcttggagtgcattttcagtggttaaggtgaaaaaatgactactaaaaa

SEQ ID NO: 181795 - DNA, 98 bp, Homo sapiens
gactgtcgacctaaagcctgactggggcaaggctggacggcagtctggaaacgaccaatgagatcttggactctgcctctcacgactgccccttagtc

SEQ ID NO: 181796 - DNA, 98 bp, Homo sapiens
aacactctaattgcctcctgatagcacacagaaagcagagagagatcatcattgcctgaatttagctttgtgactgcaagagcaagaccagttcctgt

SEQ ID NO: 181797 - DNA, 90 bp, Homo sapiens
ggatgaagaaaggaaggaacctgggatggttgtgagggaagggacaagaagatactgccctggtttctggaggaacaagtttgacccgag

SEQ ID NO: 181798 - DNA, 99 bp, Homo sapiens
gtgaaggaaaggccatgtacattgacactgagggtacctttaggccagaacggctgctggcagtggctgagaggtatatttgcttacttaaactaccat

SEQ ID NO: 181799 - DNA, 97 bp, Homo sapiens
agctaggccagcggctcggcggtgagatcgtcagcgctgactccatgcagggaccatgggctgtggctgcagctcacacccggaagatgactggatg

SEQ ID NO: 181800 - DNA, 82 bp, Homo sapiens
agggagccaactgtttctttgaacagtaaatcagcagttccaagagcctctgagttcctgccttttttcatctctgaatccc

SEQ ID NO: 181801 - DNA, 100 bp, Homo sapiens
gacctggttccgggacggccgcaagatcccgcccagcagccgcattgccctcggctagcatgacccgcctgatgcggtcccgcacagcctctggttccag

SEQ ID NO: 181802 - DNA, 100 bp, Homo sapiens
tggaggcttcaaagagacaatcaagataggatccgaggttcagcgggccaatccgagcctacatccttgcccacaaggatgccatccagctctggaggac

SEQ ID NO: 181803 - DNA, 100 bp, Homo sapiens
gctacgtggagaaaacctcggataagccgggccagcacatggctcccagcccccatctgaccgtgtacaccgggacctgcatgcccccgtctccttctag

SEQ ID NO: 181804 - DNA, 102 bp, Homo sapiens
cttaaaaatcaccagttactttaatgagaggtggacatctataccgtcaaggtggaagacctgaccttcacctccccgttctgcctgcaagtgaagcggaat

SEQ ID NO: 181805 - DNA, 97 bp, Homo sapiens
cagaggaggagcgcagcccggcctcggtgagacgtggtcttgtaacacagtggttaagaatgtgactttggagccagcctgctaggggctgaattct

SEQ ID NO: 181806 - DNA, 100 bp, Homo sapiens
ctggccctcttcaatttctgacaaaaggttatgatgagtttaatgctgtggacttcagtggcaccttcttcatcaacaccgaaagggacgatgactatgc

SEQ ID NO: 181807 - DNA, 96 bp, Homo sapiens
gcaggatggctgcgttgacacgtcttatttaatccacatcatagacttcccaagtaagaagcggaagaggagccgctggaaccaagacacaatgga

SEQ ID NO: 181808 - DNA, 100 bp, Homo sapiens
cttttatgtatgcaaacaaaagcattgtaaatcaggtttttctaagattgattgatattacaggcaagaaccaggatgaatgtgtgattgctttgcatga

SEQ ID NO: 181809 - DNA, 90 bp, Homo sapiens
ttttattccacgaggaggagtacctggaaattaggtctatcagccacagtctctgcaagtttccaagagcagcagaaaatgaacacattg

SEQ ID NO: 181810 - DNA, 111 bp, Homo sapiens
ccgggtcacagtgaagcatctcgaagagattgtagagaagctaaaaggagaacttgaaagttcggaccaggatgtcctggaacaggtggaggcctatcaagctgaggctcg

SEQ ID NO: 181811 - DNA, 90 bp, Homo sapiens
gctgtggagagcgacccgtggccttgtgtttcaggagcgagaacccgagcagcgccatgagcaacactaccgtcgtccccagcactgcag

SEQ ID NO: 181812 - DNA, 101 bp, Homo sapiens
ctcagcatcgaggtcgagttcgagtaccccttcagtattgcctaagtgtaatcttgaacatgggcggtgctgtgagtgctggtgaagacaatgatgagctg

SEQ ID NO: 181813 - DNA, 83 bp, Homo sapiens
gcattcagaatttgaccatcttggtgagaaacattaagacctactaccaggtttttagaacttcagccataaaaatgggcaga

SEQ ID NO: 181814 - DNA, 82 bp, Homo sapiens
aatcatgtcaagcgaagccttgaaaaagctgccctgagacggtgtcccgccgaaaggtttaactatagatcaacacatcatc

SEQ ID NO: 181815 - DNA, 75 bp, Homo sapiens
gaaaaactgcagtccaatcctctacagcatctctttgaagatgttggcaaaggatgaactgatgaccatacttga

SEQ ID NO: 181816 - DNA, 98 bp, Homo sapiens
actccgacggcggctcggacgccgactcggaggtgggtccggggagcccgactcggaccgcggaggagttggtgtcctgcctgcgctcaggatgaggg

SEQ ID NO: 181817 - DNA, 100 bp, Homo sapiens
ctgctacaagacaacaccctgatctggcatggacatggctgcgaataaaggagaccaaggaagtttatgaaggtgaagtcacagagctaactccgtgtga

SEQ ID NO: 181818 - DNA, 90 bp, Homo sapiens
cttttatgtagagactctgcctatgacagtgaccccgagtatagtgaaagagtttctagccaaagccaaagaagactttttgaaaaaatg

SEQ ID NO: 181819 - DNA, 75 bp, Homo sapiens
acaagatctaccacctgcagagcaacacagtcactcctggcggcaaaccaaacaaaaccagagtcatctggggaa

SEQ ID NO: 181820 - DNA, 98 bp, Homo sapiens
gtcagtggtggaagtgagaccgaaatagactctgaagtaatatctggactttgaaattactgtggcacgtttcaggcaggattcctccttcattcaaa

SEQ ID NO: 181821 - DNA, 83 bp, Homo sapiens
ccgctgccgctgccgctgccgcacctccgtagctgactcgtgcctccggagccagcgtggtggccatagacaacaagatcgaa

SEQ ID NO: 181822 - DNA, 49 bp, Homo sapiens
gcttcttctggaagaccagccaacagatgtggacgagtgctcactagca

SEQ ID NO: 181823 - DNA, 75 bp, Homo sapiens
ggtccccgtccattgatagcattcagaaagatcccagaaaggcctaaagaatgtatttgacgaagcaatattggc

SEQ ID NO: 181824 - DNA, 51 bp, Homo sapiens
tgcaagtgagaacatatttaacaggatatgggccctcacattttccaaacc

SEQ ID NO: 181825 - DNA, 51 bp, Homo sapiens
ggcttcatgctgtgcagcaagaacccggtataaagaaatatgaggccccaa

SEQ ID NO: 181826 - DNA, 80 bp, Homo sapiens
gccgcccgtccccggcacacgcgcagccccggcctctcggcctctgccggagaaacagacggttgatgatgaagcgccgg

SEQ ID NO: 181827 - DNA, 75 bp, Homo sapiens
gaagctgccggcagccctgcggctacggagacagggcggcgactggcggcgcgatggacctgaccgggctcctgc

SEQ ID NO: 181828 - DNA, 101 bp, Homo sapiens
cttcatttcttctgtggccttcagcactgataagaatctattattggagtctccccaggacagtgctatcacccgggatattaaccgaacattcccagccc

SEQ ID NO: 181829 - DNA, 80 bp, Homo sapiens
cagaacaggaggtggtagagggcatggatatctctactcgctccaaagatgtccagctcgccgctgtccaagaaacgtcg

SEQ ID NO: 181830 - DNA, 73 bp, Homo sapiens
tgaagaccggctgtgagacagtggatgccgtacaagaaagagtcctaggcctacttacaagcctccagtctca

SEQ ID NO: 181831 - DNA, 100 bp, Homo sapiens
gcttcggccacgactgggatcctacgtgcatgaagatggacgaggtcctgtacagcatcgccgagaagcatcaacaccattctggagtttttgccaaagc

SEQ ID NO: 181832 - DNA, 101 bp, Homo sapiens
gcggaggcgacggtggcggctctcggagccggcgcgaatccggcccccgcagcgggacccggatataacacgtgggaaccggaggagaacatcctggaccc

SEQ ID NO: 181833 - DNA, 90 bp, Homo sapiens
gcggagtagcaagtggccatggggagcctcagcggtctgcgcctggcagcaggattactacagcatcccatttcccacacccactactcc

SEQ ID NO: 181834 - DNA, 76 bp, Homo sapiens
gcgccttctcagggctcgacagcctcagcaagctgctgaggccgcggaaggagcagggcacatacgccctgtccct

SEQ ID NO: 181835 - DNA, 87 bp, Homo sapiens
aaagcgcactgacaatccagctaatccagaaccactttgtagatgaatatgatcccaccatagagggctacttctacaagtccgaac

SEQ ID NO: 181836 - DNA, 97 bp, Homo sapiens
ggccggggcgctcacggccacggcgctggtcaccggggtctgcctggagcgcatcagcgaggaggtggggctgctgcagctccttggggaccccccg

SEQ ID NO: 181837 - DNA, 75 bp, Homo sapiens
ttgaccccaaagttgcatttcctcgtcgagcgcaacccaagttctgtggcaccatcgtgctcatcttcttcctgg

SEQ ID NO: 181838 - DNA, 100 bp, Homo sapiens
ctgaaccccgaagacttttgggagattataggagaactgggcgacggagcctttgggaaagtgtacaagggatttgtcttggctgttactatgacacggg

SEQ ID NO: 181839 - DNA, 75 bp, Homo sapiens
gtcaccctgcctcccctgcgtcccgccaccggccgcttctgtcctcgagagcggaacaggcgaggaaaagtagtc

SEQ ID NO: 181840 - DNA, 100 bp, Homo sapiens
tcgtcccaggaactagaggatgcctcctgctgttctcttaagaaagattccaacccaatgttctagacctggaaggcctcctaagaggactcaaagtgtc

SEQ ID NO: 181841 - DNA, 73 bp, Homo sapiens
gggcctacagcgatcccacattttatatgaccgggcagcgtgttgctttgtcgcccacgctggttgcagtggt

SEQ ID NO: 181842 - DNA, 97 bp, Homo sapiens
aaacagcgatatcagtaagaagagcaaagtaaatgctgtcttttcccaaaagacaggctcttcacctgaaggctttttagaccccgagaagaagctt

SEQ ID NO: 181843 - DNA, 75 bp, Homo sapiens
cacgttcctccgaaaccggtttgcaagtccttgtagagcttttgaaatgacattaacagaaggaagtaagttgga

SEQ ID NO: 181844 - DNA, 88 bp, Homo sapiens
gacctaggtcgcggcgacatggtatgaaaatgaaagtcttcagaatggaaggaagtcaactgaatttccaagaaaaatacgtgaacag

SEQ ID NO: 181845 - DNA, 74 bp, Homo sapiens
gcgtttctatcgggacgtcctggggatgaaggtgtttccaagccaggaccctctagatcgagcagatttcaatg

SEQ ID NO: 181846 - DNA, 98 bp, Homo sapiens
ctttattgacctcgactcccatgcgcccccttacccaggaatggaacaacctccacaccatccttactatcagcaccatgctccacctcctcaagctc

SEQ ID NO: 181847 - DNA, 100 bp, Homo sapiens
gacatggggcacccggtgtaccgcggcgagaagccccagctgcactacgcgacatccacgacagcgatggcagttccagcagcagccaccagagcctcaa

SEQ ID NO: 181848 - DNA, 96 bp, Homo sapiens
aatgaagctgaatttatcctgagcaggcagagagcagaagatattcacagacatgcggaatttgaggcatcctctggtatcacgattccaaaaccc

SEQ ID NO: 181849 - DNA, 73 bp, Homo sapiens
gcacattaccattaaccagtacctgcagcaggcagacatctggtccctgggcataacagctattgaacttgca

SEQ ID NO: 181850 - DNA, 75 bp, Homo sapiens
ccgcagcccgggcccaggccccggcagcgcctgggacaaggctctggaagaggatctgaaccagaagaagcggga

SEQ ID NO: 181851 - DNA, 101 bp, Homo sapiens
cttgcccccttcctcaatctgctgtggtcagcacccctgcagatcatcctggcgatctacttcctctggcagatgctcctggagaggtggtaccctctggg

SEQ ID NO: 181852 - DNA, 98 bp, Homo sapiens
tttttttttaattgtctttgtacctatgattgaaaacagtagttggtctatgacttttgaggagacttccattagtttgatgaatctgacttccacac

SEQ ID NO: 181853 - DNA, 100 bp, Homo sapiens
tgccaagggctacattgaggtgatgagtgggcatccccaccatcagatggtgcggggcagagggggactacaacgtcatggtgatggagctgctggggcc

SEQ ID NO: 181854 - DNA, 90 bp, Homo sapiens
tattaacgatcaataaacttgatcgcattatggccagcactattaaggatcaaaatggtttcaatcccagaatactatgaaggcaagaac

SEQ ID NO: 181855 - DNA, 99 bp, Homo sapiens
aagaaacaaaagttcacctctgcgaaggtgaagtggagctggaggagtactacccggccttcctggacatggtgcggagcctgctggagggcagcatcg

SEQ ID NO: 181856 - DNA, 132 bp, Homo sapiens
cgctgctgccgccgccgcctcgggtcgtggagccaggagcgacgtcaccgccatggcaggcatcaaaggccaagaagcttgagagaagaaaaatttcagaaaaattgtctcaatttgactagaatatcaatg

SEQ ID NO: 181857 - DNA, 99 bp, Homo sapiens
gatgccgccatgagcgagatgacggggaatacagcactgcttgctcaggcctagagagcgtggaccactatcccattctggtggcagtgacgggcatcc

SEQ ID NO: 181858 - DNA, 75 bp, Homo sapiens
ctgtcctttcaggaaggagccattatttatgtcatcaagaagaatgacgatggccgcaccaggatgtcggacacc

SEQ ID NO: 181859 - DNA, 75 bp, Homo sapiens
cccgctgggaatcgtgcagggattcttcggatcttatggttggtgatgaggcaagtgaattacgatcaatgttag

SEQ ID NO: 181860 - DNA, 74 bp, Homo sapiens
agtgttaaaggaacctctacaacgaaggtgaagccacggaagataagcattgtcccagatatagccgttggtac

SEQ ID NO: 181861 - DNA, 100 bp, Homo sapiens
tgaccttcatcacgaggccacccagtcccacttcaaacattcgtctcggaaaccccgcctcttacagtcacgaggaatttgctgacacaatatcttccgc

SEQ ID NO: 181862 - DNA, 75 bp, Homo sapiens
caggagtcatcggacgccagaatctgattcttctaacagagaaaatgccattgaggatgaagaggaggaggagga

SEQ ID NO: 181863 - DNA, 75 bp, Homo sapiens
ggaaactggggtgatcaaaagaaagctcatcaagccagagctggagtatctcagattgaaaatattgaacttccc

SEQ ID NO: 181864 - DNA, 82 bp, Homo sapiens
atgaaggagctggagcggcagcagaaggagactttatattcagagcaccaatcaaattaagcaagcctggggaacttcgtga

SEQ ID NO: 181865 - DNA, 96 bp, Homo sapiens
acccggtactgtgcactattctttcccaggaaccattggataaggataaagcggatactctgttttcaaggaagctgaatgggaaatacagacttg

SEQ ID NO: 181866 - DNA, 100 bp, Homo sapiens
atggccatgggcagaggcgaagggctggtgggcgatgggcccgtggacatgcgcacctcacacagctgccgcagcgggaaccgcaagagcttggtggtag

SEQ ID NO: 181867 - DNA, 100 bp, Homo sapiens
acagcctacaaagagctcttgactgtgagctcgcagaggcccagttgcataccactgccattgacaaagaggcccgggtcctttttgtgctgattgtgct

SEQ ID NO: 181868 - DNA, 96 bp, Homo sapiens
ggaaaatctgtggcctagatcctacatctacacttggcatctattttgaagttgtcaatcagctgtcaaagctcgaaaaacagcagcagaggaaag

SEQ ID NO: 181869 - DNA, 83 bp, Homo sapiens
accaggccgggaagcccatcgggagcaggccgggctctcgccatgggtcactgtcgcctctgccacgggaagttttcctcgag

SEQ ID NO: 181870 - DNA, 97 bp, Homo sapiens
tcccattctcgtcctcatggtggacaagaaactggtggtggttttcggaggcacagaggatgaagtttttgctgctgcagcagaagtacctagaata

SEQ ID NO: 181871 - DNA, 97 bp, Homo sapiens
caaaagaagagaagcagaattatacctagaagtctactaatggacagttagtcacccacctacatgttgagtttcagaacaagcttcctggaaccca

SEQ ID NO: 181872 - DNA, 92 bp, Homo sapiens
agttggaagcagccgatccagcctgcggagcctgtggggcagttatgcaaagggtgacctggacatatcttacatcacatccagaattgcag

SEQ ID NO: 181873 - DNA, 100 bp, Homo sapiens
tggagcctgtggagacaacattcagtcttatactgccacagtcattagtgctgctaaagaaagtgttcaggatttaaaaaagagaatcatggtactcgac

SEQ ID NO: 181874 - DNA, 83 bp, Homo sapiens
tgaccacatccctgctcatctcacctatgggaagctgctagctctaacaatatttggagttcttacaacatggcagacattga

SEQ ID NO: 181875 - DNA, 74 bp, Homo sapiens
gcctcagtttctctatgaagcaggcttcagcagacaatgcagatcttcgtgaagactctgactggtaagaccat

SEQ ID NO: 181876 - DNA, 75 bp, Homo sapiens
gaaaagcctctgggagcagaagggaggctccaagacctcatcaacaattaagtgaatgtggtggaggcacttcag

SEQ ID NO: 181877 - DNA, 82 bp, Homo sapiens
tcagttggaagcagccgatccagcctgcggagcctgtggggcaggtgaatacatcaagacctggaggccacggtacttcctg

SEQ ID NO: 181878 - DNA, 97 bp, Homo sapiens
tgaaatcaagaactataacttccagcagcctggcttcacctcggggactggtgtcatggagaaactccagctgggcccagagattctgcagcgggaa

SEQ ID NO: 181879 - DNA, 50 bp, Homo sapiens
ggagaaaatacggcattgctaggctgtgggtgagcgtggaggatgctcag

SEQ ID NO: 181880 - DNA, 100 bp, Homo sapiens
cgcccagcgcgcccgtggccgctgccgcctccgccccagggattttttaacctggccctgctaatcgaggaaggtacgataatcccacaccatatcttgg

SEQ ID NO: 181881 - DNA, 100 bp, Homo sapiens
ttgccaggagcacagtggccacaccatagtctccctggatgcagcccgcagggacaaggaggtgtcggtgtcagaggtcaaagcagtggctgaaatgcag

SEQ ID NO: 181882 - DNA, 85 bp, Homo sapiens
gggagccacgcagaggacgccggaacaccctggaagccgagaaatggaggtcccaggtgattgaaaagtttgaggccttggacat

SEQ ID NO: 181883 - DNA, 82 bp, Homo sapiens
aagaatttctcagggttagaaaagaggttttgcagaatcatcacagactcagattgatggacaacttttcttaattaagcac

SEQ ID NO: 181884 - DNA, 75 bp, Homo sapiens
taggagaggtcatcaaagatgatatttggccaaacccattacagtactacttgctggttgtcttcttgcctgccc

SEQ ID NO: 181885 - DNA, 75 bp, Homo sapiens
tcagtcttttgaatgatttccactctggaaaacttcaagcatttgcctgaacacttgcctttgcagactcagttc

SEQ ID NO: 181886 - DNA, 75 bp, Homo sapiens
ctgctatacaacacaattataaaatgtcagcttttaaggagcacaaagttatcattgttgggctggataatgcag

SEQ ID NO: 181887 - DNA, 73 bp, Homo sapiens
ggtgagaccctcacttcatccggttctaaggcccagcagctactacaaggattgcaagccagtgatgaaagtc

SEQ ID NO: 181888 - DNA, 83 bp, Homo sapiens
ctgctattccggcgcctccactccgtcccccgcgggtctgctctgtgtgccatggacgggtaactaggatttctacctcaacc

SEQ ID NO: 181889 - DNA, 82 bp, Homo sapiens
cgaatgtgaagaaatgttgaaactatttaaagaggttgctagcttacaggtaatctcagccaggaaaggagagtttgaaact

SEQ ID NO: 181890 - DNA, 129 bp, Homo sapiens
atgttcatctttagagcaagaggagcttcaagcattgcagatagagcaaggaggtgttgaaattccgtaaacttaacttcaatggggagggtgaacccgaagaactgatggtggacaactggcgcccag

SEQ ID NO: 181891 - DNA, 99 bp, Homo sapiens
cccaggcgtcggccacgagagagcgggagcctcgctggtccccatttcaggtaaaggcgacacaggaggagaaccgggagctgaggagcaggtgtgagg

SEQ ID NO: 181892 - DNA, 100 bp, Homo sapiens
taaggggggtctggaacactgtgagccgctcacagtgtctaagttgttgacctcctgtactggagagacattaagaagactggagtggtgtttggtgcca

SEQ ID NO: 181893 - DNA, 98 bp, Homo sapiens
ttgtactatcctcggtgctgtggtgcagagctagttcctctccagctcagccgcgtaggataaaagaatcagagtgtctcaacccttgacaagaggac

SEQ ID NO: 181894 - DNA, 97 bp, Homo sapiens
tcatggtaaaaagcagtgggatttggatgtgggatccggttccttggtgtcatccagccttagcaaaccagaggtttatcttgcagattatggactt

SEQ ID NO: 181895 - DNA, 100 bp, Homo sapiens
gctgcgagcgagccgcgaaccgagcgggcggcgggcgcgcgcaccatgggggagaaacccgggaccaggaactcattatacaatgacaaatggaggcagc

SEQ ID NO: 181896 - DNA, 100 bp, Homo sapiens
ggacctgcctgacaaccccgagaggaatccccttctggtcgaaggaaagctcttgctactagcagcatcaatatgaaacagtatgcaagccctatgccaa

SEQ ID NO: 181897 - DNA, 101 bp, Homo sapiens
ataggacctcgggcctgctacgatgaaggcaaacgtgttgcagagaccatgtgctatgcctacatgaagcagaaaactttagaaactgttcctttggagag

SEQ ID NO: 181898 - DNA, 101 bp, Homo sapiens
ccgctggccctctgtctgcctgtgtccctgaccatggctccctgcagtaccctttaacggtgcgtatagcagcaaaattcatcattcatgcccctcctgga

SEQ ID NO: 181899 - DNA, 100 bp, Homo sapiens
actttgaaggatcactttcccctgtcattgcacccaaaaaagcaaggccttctgagactggatctgatgatgaactccaggatggcattgggcagcggca

SEQ ID NO: 181900 - DNA, 82 bp, Homo sapiens
caggaatttatggtcgcctttttgaatgagatcgtattcacctagaaggcggccaagcccaagaaggcggccatctcctcga

SEQ ID NO: 181901 - DNA, 96 bp, Homo sapiens
gccggcagaggatccagtgttcaccatcctggccccggaagaggagcccaaggtgggcatcaagaccatcaaggtgtactgccagcgcatgcagga

SEQ ID NO: 181902 - DNA, 88 bp, Homo sapiens
tagggtcctttatatagaagggagagtagctctgagcccagaggaagccgagtcagccctggaggcggcccattatttcacagaggac

SEQ ID NO: 181903 - DNA, 74 bp, Homo sapiens
accgcttcgtgcaactctccgggcggccgcacctgccaggtagcggaattggtactggtccaggagttatccag

SEQ ID NO: 181904 - DNA, 75 bp, Homo sapiens
caggaacgtggcgctcatcaccggtatcacaggccagatgagcaccatgccaggactgcccacccggccctgctt

SEQ ID NO: 181905 - DNA, 50 bp, Homo sapiens
tacctagaggactcaggccacactcttagacagtggccaagaacaaggac

SEQ ID NO: 181906 - DNA, 75 bp, Homo sapiens
gtaccgcgctctttggaaacgaattacaaactgggaagattgagcctgtggtcctgccgctgctctggtttgcag

SEQ ID NO: 181907 - DNA, 83 bp, Homo sapiens
gacggagcagcgcgtcgtggggcgagcggcagcagaaaggacccaggagcgataacagtaaatcaaataagatatttgtcggt

SEQ ID NO: 181908 - DNA, 50 bp, Homo sapiens
ccgccgcccccgggctcgcggcctgcaggagaggcagatgcgaaccagaa

SEQ ID NO: 181909 - DNA, 50 bp, Homo sapiens
ggcggccatggtccaaccttgaagtgtttgagcaacacacctccacttac

SEQ ID NO: 181910 - DNA, 100 bp, Homo sapiens
ccgaaagccacgcgagtcacggtcctgcctgcgaagaactcccagggcgaccttggggctgaggagtggattcctgacattcagacaactgacttgtaac

SEQ ID NO: 181911 - DNA, 100 bp, Homo sapiens
cgcaatcagaaaatcaagtaaaggaacccaacagagatctcttctgttctccactgctagatcccctagacccttccttcccagtggagtttgtaagaca

SEQ ID NO: 181912 - DNA, 100 bp, Homo sapiens
ttgttggggccctcttgataaaaagagatgtggggggattctcgacctgctaacagaactggaccttttcggggtttgccaacttgttaataagatggag

SEQ ID NO: 181913 - DNA, 50 bp, Homo sapiens
ggcaattttggagaattacgattaggttcgatacaagaggctgttttcct

SEQ ID NO: 181914 - DNA, 90 bp, Homo sapiens
gattcagccgtgaagcaagtgcagatagatggccttccgattacacctcaacaagaaggcaactgacaaacagccttatagcaagctccc

SEQ ID NO: 181915 - DNA, 118 bp, Homo sapiens
gaagtaacctcaagaatagaattccttttggggaagaaagagtcgtgagatggagaataaagaaactctcaaagggttgcacaagatggatgatcgtccagaggaacgaatgatcagg

SEQ ID NO: 181916 - DNA, 100 bp, Homo sapiens
gctaagactccaggaccctctggaagcctagaaatgagtgatggtgatgattttaattacatcattgcatttttccttggaacagcagcctgcctttacc

SEQ ID NO: 181917 - DNA, 83 bp, Homo sapiens
gggcttcgtccagatcgggaaggcttccccgggcgctgcctggacaggcctgcctgcgtgctgggacatgtctggcctccaag

SEQ ID NO: 181918 - DNA, 137 bp, Homo sapiens
ccagttggaacaaagggaaggcgcatggatgctggagggcgaagacctgcgaagtccctctccagcacctgcctttgaaggagaccagactccggctccgcccggcccgtgccgggtggtctgcggccccgagtccg

SEQ ID NO: 181919 - DNA, 75 bp, Homo sapiens
cagagtgacctttcactaattgccgaaaacatttgaagagtcggagattagtcagtgcaaaacagcttggtgtgg

SEQ ID NO: 181920 - DNA, 100 bp, Homo sapiens
cagctgtggcatgtcaaccagcttggcttcctgttggataaaaaaattggagtaaatcaaccaaaacgaattgaaaatgctaaaattcttattgcaaata

SEQ ID NO: 181921 - DNA, 75 bp, Homo sapiens
atttgctggatttaagcactgctgcactttatgagtctgaaccggacggcttttctcatttccacttgtacgtgt

SEQ ID NO: 181922 - DNA, 74 bp, Homo sapiens
gcccatggaagtgcacttaaccccagaaccaacaaaccacctgccaagctgtgaccaggaaaactttcatgcaa

SEQ ID NO: 181923 - DNA, 75 bp, Homo sapiens
ccaaaaccacaaacttgcctacgtcagtaacagccaccaagatctacaacttactgctttgtaaacttcgccgag

SEQ ID NO: 181924 - DNA, 97 bp, Homo sapiens
gtgcggtcagctcgctgcagcttcaacggagacttcgtgtgcggacagtgtgtgtgcagcgagggctgtgtccaggtgaaacttggagactcctggg

SEQ ID NO: 181925 - DNA, 90 bp, Homo sapiens
cagccaacacaccagcccagacagctgcaagtcaccatggacgctgaaggtctgaaggggcgtctcgattacctgagctctctgaaggtg

SEQ ID NO: 181926 - DNA, 100 bp, Homo sapiens
cagccctgtccggcatctgtcttgagctcccagcaaggcttgtctggagcgggaaagactactgtgagcatggccttggaggagtacctggtttgtcatg

SEQ ID NO: 181927 - DNA, 82 bp, Homo sapiens
caatgatcttttcaatgctgcgaaagctgccaaaagtgacatgcaggtatttctgggaaaagccagcttctgtttgcactgg

SEQ ID NO: 181928 - DNA, 113 bp, Homo sapiens
cagagcctgatatacttgaagaagaaaaaatctatgcttaccccagcaatattacctcggagactggattcaggctgtgggtgagcgtggaggatgctcagatgcacaccgtc

SEQ ID NO: 181929 - DNA, 60 bp, Homo sapiens
agaccttcaagcagcgccgcaccttcgtaatcaagatgattaccaactggttcgaaaact

SEQ ID NO: 181930 - DNA, 55 bp, Homo sapiens
tgcaggaacaccgtcacgctgctggaggagattctgaggttgggaccaagaagga

SEQ ID NO: 181931 - DNA, 100 bp, Homo sapiens
tcgcatctccgacacgggctctgcgggcctcatgctcgtcgagttcttcgccccctggtttttggattcaaagcataaaaaccattacaagatatacaat

SEQ ID NO: 181932 - DNA, 75 bp, Homo sapiens
ggcgcgatgggagacgagatggatgccatgattcccgagcgggagatgaaggcagcctcagtcagagcaccctga

SEQ ID NO: 181933 - DNA, 73 bp, Homo sapiens
ttcccgcagagtggataaagaactgggagaaatcagggagaggcgaattcatctggaatcaagagacccatgg

SEQ ID NO: 181934 - DNA, 82 bp, Homo sapiens
gcctgatgcaagccattgatgcagatgggcactctggttttttaaaaatgataaaagcaaaacttggcaagcaaacctgcgg

SEQ ID NO: 181935 - DNA, 83 bp, Homo sapiens
gctgctcccatcattgatgtggtgcgatcgtgtgtcccggcatggatatccggaacaacctcactaggttgcatgagctggag

SEQ ID NO: 181936 - DNA, 82 bp, Homo sapiens
catactgtgccttgtatgccacctgcaaactctaagcgaaagacatgaggcctcagcctgaaatgaggttgttttgaggtca

SEQ ID NO: 181937 - DNA, 74 bp, Homo sapiens
aagcagcaaccaatgatatatatctgtggagggtctaccttctgcttccctggaaaggatgaatttacatcatt

SEQ ID NO: 181938 - DNA, 51 bp, Homo sapiens
tgtcactgtgcactgctcttctcgctgggattccaggagggcttcgtgtat

SEQ ID NO: 181939 - DNA, 113 bp, Homo sapiens
cctgactggacctgcattgtggtgggttttacttcaggttatgtacgcttctacactgagaagatgaatttgctgtcatgttttgtggaatgagggaccgttgagctcactac

SEQ ID NO: 181940 - DNA, 50 bp, Homo sapiens
atgaaatgggaattcaccagctgggaacccacctggctttcaaccaactt

SEQ ID NO: 181941 - DNA, 75 bp, Homo sapiens
ctactctctctttctggcctggaggctatccagcgtgtgatggatgtcagatgtttcctatcaatggatccagat

SEQ ID NO: 181942 - DNA, 98 bp, Homo sapiens
ggtcgccaccatgccagtctctccggcaggcagtcacaagcagcagaacttcgggttgaatgtgccataccgaatccgtgtgcggctgtccagaaaac

SEQ ID NO: 181943 - DNA, 100 bp, Homo sapiens
tcttaccctcctgggaactgagagagatccacatcttcatttgaatattgaggaatcaaaccaagagtttatggtgaaaagtgaagaactctacgactcc

SEQ ID NO: 181944 - DNA, 87 bp, Homo sapiens
tcaagttctacgccaagccatactttctcaggtagtaagcattaataatgtctttcatctttgagtggatctacaatggcttcagca

SEQ ID NO: 181945 - DNA, 100 bp, Homo sapiens
cgccactacagttcatcaacatcaactacgtccctctgaaggaacaaggagagccagttctcgaaacacctgtggagagccagcaacatgagattgaatc

SEQ ID NO: 181946 - DNA, 75 bp, Homo sapiens
tttcagtcccagacagcagtggccccgagcggaggatgaaggagaagatgactaaatagaacactgatggattcc

SEQ ID NO: 181947 - DNA, 50 bp, Homo sapiens
aagccgccgggcgccgcgcctttggcggatactctgttttcaaggaagct

SEQ ID NO: 181948 - DNA, 111 bp, Homo sapiens
atgtcttcatttgcttccacaagaaccgcgaggacagaggtgaccaagaatatggcccaggtgaccaaagccctggacaaggccctgagcaccatggacctgcagaaggtc

SEQ ID NO: 181949 - DNA, 110 bp, Homo sapiens
gtggggggattctcgacctgctaacagaactggaccttttcgtactaaggctcgtacgtctgcatcgattatcttacgtggggcaaatgatttcatgtgtgatgagatgg

SEQ ID NO: 181950 - DNA, 76 bp, Homo sapiens
attttgatcagaaaagggcaacgattcagtttcaccaacctcagagatttaaggaaaatcctgccttgcttcgttg

SEQ ID NO: 181951 - DNA, 101 bp, Homo sapiens
tctggaagcagaggaagtagtttaaatgatacctatcactcaagagactcttcatttagattggattctgaatatcaggatctcactctgttgcccaggct

SEQ ID NO: 181952 - DNA, 82 bp, Homo sapiens
cagcctcccgagtggctgggactacagtttggagaccctgacacacccaccttctcacctgggctctgcgtatcccccagcc

SEQ ID NO: 181953 - DNA, 82 bp, Homo sapiens
ccttcggcagtccacccaccgccgccgcctcccaggtgccgtgagcgatgtggagatgcaggaacactatgatgagtttttt

SEQ ID NO: 181954 - DNA, 100 bp, Homo sapiens
atgggctgctgcagctccgcctcctccgccgcgcagcccggccgcaccacctgggtctccgccatgaacgggcctgccctgcagccctcctcgccctctt

SEQ ID NO: 181955 - DNA, 98 bp, Homo sapiens
gcaggcctttgctggacagatgaagagtgacttgtttctggatgattctaagagcattggcatcaacaaaagtcagaattcccgggaacttgaacaga

SEQ ID NO: 181956 - DNA, 95 bp, Homo sapiens
gtacccagagtgcagagccgcctttccagcatgcaggggctgctcagccatcatcgtctacagactgccgtggacctggaaatgcagcaagctcc

SEQ ID NO: 181957 - DNA, 50 bp, Homo sapiens
aaactgacggaaaaggagagagagctgctggtcttggtcgtatgaagcca

SEQ ID NO: 181958 - DNA, 50 bp, Homo sapiens
attccagatcagattctgtgacagggtcgacatgttaaaacgggtcagtt

SEQ ID NO: 181959 - DNA, 100 bp, Homo sapiens
ccaaagccctgtgagttcatcagagtcagctccaggaaccatcatgtttctattccaaggacaatgaaggcagctggttccgctccctctttgttcacaa

SEQ ID NO: 181960 - DNA, 99 bp, Homo sapiens
tatgtccattttcttcagtgtgcaaagatgtaatgcaacgttgtgatctggaggcacatctcaaaaacagatttgagttctgtgaacctgcatttgttg

SEQ ID NO: 181961 - DNA, 100 bp, Homo sapiens
ttcacttatcatctattccaccgtgttctggcctacaacacagcagtcccctcaggatgagcaggaaaagctcttggatgaagccatacaggctgtgaag

SEQ ID NO: 181962 - DNA, 75 bp, Homo sapiens
acctcaaggacatcaacttccggccgcagatgtcccagatgaagatctccttcaacgacaaaagcctgcagacca

SEQ ID NO: 181963 - DNA, 90 bp, Homo sapiens
acttggaagcaatgtttgaacaaactcgaagaacagctgtggaaagaagttgcaaaacactgggtataagtgtgctagcggagtgtctag

SEQ ID NO: 181964 - DNA, 90 bp, Homo sapiens
cgctgctctaatggtccggacttccgtgtggtcccctcctaaccgcaagcgtcctgctaacgagaaggcaactgatgactatcattatga

SEQ ID NO: 181965 - DNA, 83 bp, Homo sapiens
gcctgggaatcggtcgcctggaggaccagtatttcccatggaggataaccagcccgagtcatgcagtcttttcgagaaaggtg

SEQ ID NO: 181966 - DNA, 75 bp, Homo sapiens
agagagggcccacacgactagaaggacgactgcctggcgcgatacaaaaattcttgaatccagataatagttttg

SEQ ID NO: 181967 - DNA, 100 bp, Homo sapiens
acgacttgtgacacggacggcgcgtcctgctgaccccagccggcgccgagggcttggaatctcgagcgggaaaagataaataggatttaccaatccttgg

SEQ ID NO: 181968 - DNA, 100 bp, Homo sapiens
cccggtcaccgcggacgtgctggccttgagcttctaaagggcatcgacctaggcagtctggtggacaatgaggtggacctgaagatcgaggactttaatc

SEQ ID NO: 181969 - DNA, 50 bp, Homo sapiens
ctttgggaaacctgattgttgtaaatgccactttttactactaaactgag

SEQ ID NO: 181970 - DNA, 101 bp, Homo sapiens
atccgccaccaccgctgccgcagcctggctggggagggggccagccccccaggccccctacccctctgagaaggtgcctaccagtaacacagagggaggct

SEQ ID NO: 181971 - DNA, 83 bp, Homo sapiens
tcgcgtctctctgctgcggcgcggggaccgctgtgctctcggtgcagatgaaggattttcggttttcttacaagtttaaaatg

SEQ ID NO: 181972 - DNA, 90 bp, Homo sapiens
ctatgcatgctgcttttgatgtctgacaacgtggatcgttgttttgaaacggtgaagttgaacaaattgctatgatgaaaccaaaaggcc

SEQ ID NO: 181973 - DNA, 75 bp, Homo sapiens
caaggatggggtggtgaccatcggctgtgtggctgggacgatgccggagtgtgaaggagtttgagaagctgaacc

SEQ ID NO: 181974 - DNA, 50 bp, Homo sapiens
cagatttctttaaaagccatagttatgtggaggtttagccgttggaacag

SEQ ID NO: 181975 - DNA, 100 bp, Homo sapiens
agaacaaaatggagccaaaatagttgcaacaaaagagtgattcgctcaattgaaggccagtatggcacactacaagcatatgtgactccaagaattcaac

SEQ ID NO: 181976 - DNA, 90 bp, Homo sapiens
gagtaacagttctgggagggatggtctacgctattggaggcctgaattattggaacaactttggaaagccagagctgaaaaaaagaaact

SEQ ID NO: 181977 - DNA, 90 bp, Homo sapiens
caaatttgtctctgactacgaaacacatggtgcaggattttccatacgttatgaaattttcaagagagctggatctaccatgaaagactt

SEQ ID NO: 181978 - DNA, 100 bp, Homo sapiens
acgaagatgacgtgtatggaaactcatcaggacggaagcacaggggccactcagagtcgcccgagaagaattgtacaggctagtggttggggaatatttt

SEQ ID NO: 181979 - DNA, 75 bp, Homo sapiens
ctgcgaattgacgccttttataataaagacacttatcttgcccaagagctgggttttagctaaagaagatactga

SEQ ID NO: 181980 - DNA, 75 bp, Homo sapiens
gctcaggactcttccatgcgtgggcacacgaagggatttgaaaaatactttcctaatggaaaaaatggaaaaaaa

SEQ ID NO: 181981 - DNA, 90 bp, Homo sapiens
acaagtggcccaagactgtgggactgacgtacttgacctgtggaccctgatgcaggacagccaggcatccaggctggagaagcagaacag

SEQ ID NO: 181982 - DNA, 100 bp, Homo sapiens
agaacacagtggacagtgacaagggggcagctggcattttatgctatgtgggagcctatgtcttcatcacttatgatgactatgaccacttctttgaaga

SEQ ID NO: 181983 - DNA, 87 bp, Homo sapiens
tgggccaacctcaccaacgccatccgcgagactggaaaccaagctctgtccgtatcgatcaactggatcgtgaacagttcaaccccg

SEQ ID NO: 181984 - DNA, 97 bp, Homo sapiens
cccagaccctggagcctcagttggaagcagccgatccagcctgcggagcctgtggggcagagaggtggagaagagcgagtacttgagaaagaagagg

SEQ ID NO: 181985 - DNA, 83 bp, Homo sapiens
cttcactacccttatcccggagagctgacaatgatgaatctcatgaacacctacctcttcatgatgcaagcccaaggcattct

SEQ ID NO: 181986 - DNA, 101 bp, Homo sapiens
gagttctctaaaaaaactggctgtgaataatatagctggtattgaagagggaaatcctcattgacgattcaatttgttgaaggccaatttgtggactccta

SEQ ID NO: 181987 - DNA, 75 bp, Homo sapiens
gggcagctcgggccggtagtgggacccttgggggacagaggcctctgtgtcctttgtcccaatagtaacaactcc

SEQ ID NO: 181988 - DNA, 114 bp, Homo sapiens
agctcagacctgccaatttaccagagataattgataacaccctgtaacagctgaagaaatgttctttactaccatggaaagccaccttctgcgctgcaaagtgttagaaatcat

SEQ ID NO: 181989 - DNA, 100 bp, Homo sapiens
aggttatctcctcagccaacagagctgtggttggtgtgtgggctgtgaggtcgtgctgtcaggcattgaggagcaggtgagccgtgccaaccaacacaag

SEQ ID NO: 181990 - DNA, 80 bp, Homo sapiens
tgttccatttgtccacgtccggagagtcaacaatgttaccagcgagcaaggagtaaataatgctgaaaaatttgactatg

SEQ ID NO: 181991 - DNA, 75 bp, Homo sapiens
tggcactacccgtcttgaggaatgttcagtcctcagtggctgtaggaactccagattatatctctcctgaaatcc

SEQ ID NO: 181992 - DNA, 100 bp, Homo sapiens
cggaaccggacccagtccctgagccgcccctacacccacagtgtggcaaaggagcagagaactttgacaagttcttcacacgaggacagcccgtcttaac

SEQ ID NO: 181993 - DNA, 50 bp, Homo sapiens
gttggctgcctctgctggagaagtggggtcctggcttgcctggatggcta

SEQ ID NO: 181994 - DNA, 87 bp, Homo sapiens
ccgaaaaacactgaatgctggggcgtactccaaagttgttcaggaacggcactttgaggtgaatgaccggaaggacccccaagagac

SEQ ID NO: 181995 - DNA, 100 bp, Homo sapiens
aagtatccagcgctcattgggaatttagttaagttggaatcgaagcctcttaaaatggcagatgacttggacttcgagacaggagatgcaggggcctcag

SEQ ID NO: 181996 - DNA, 100 bp, Homo sapiens
gatttacgtggagatcaagcgcagcgatggaatcctatgaggatggttgtgaggattatcctactctatcagaatatgttcaggattttttgaatcatct

SEQ ID NO: 181997 - DNA, 51 bp, Homo sapiens
aaacatttctaaaagtggttcttgcagcggcgcgcgagcgggccgggcggg

SEQ ID NO: 181998 - DNA, 98 bp, Homo sapiens
gacagcagcgcagtaccaccttccagagatagttcaggatggtcaacggcagcagcagctgtgagggccgcgtggagttccaggtgcaggggtcctgg

SEQ ID NO: 181999 - DNA, 75 bp, Homo sapiens
acactttcagtcctgatgagcatttctgggtgacactcaataggattccaggtagtcagatgcctccgcagccac

SEQ ID NO: 182000 - DNA, 75 bp, Homo sapiens
caagcgtcagcggcccgcgcctgtcgggctgaactgaggctttgtccagggatctgaaaccactttgcagtcgac

SEQ ID NO: 182001 - DNA, 109 bp, Homo sapiens
ggccttggaccccgcggcgcccctcggcctcggagcaacgagcgcagcgccggagtgcctgtgaagaaaacggggtattgccctgaggcttatattctgcctcagttgt

SEQ ID NO: 182002 - DNA, 74 bp, Homo sapiens
ccagctccagttcccagagaatatggactcatctgatgatgtgagaagagttcagaggagggagaaaaatcgta

SEQ ID NO: 182003 - DNA, 75 bp, Homo sapiens
cgcagaaagcaggcgaacccgcggcgcaataacggcagtatttggcagtcgtattcagagataaacccctggagc

SEQ ID NO: 182004 - DNA, 100 bp, Homo sapiens
ggggtgttcagcaaagtgcgcttctgcagcggccgcaagaggccggtgaggcggagaccagtctctcctgctgcagaacgcatccgattcatcttgggag

SEQ ID NO: 182005 - DNA, 83 bp, Homo sapiens
agtgaaagagttgctgaactacaaagaaaggcggcttacagggagaacacagttggcctccaccgtttctgccccacagaaaa

SEQ ID NO: 182006 - DNA, 51 bp, Homo sapiens
gtttccagtatatacatcaagtcactgaggatttaagaggggtgcagatcc

SEQ ID NO: 182007 - DNA, 101 bp, Homo sapiens
gctggctctgtgcggctcatcaaggttgtgattgaggacgcagtggacacgcatgtgcacagaatcgccaacaggctgaggtggaccaagaaggcaaccaa

SEQ ID NO: 182008 - DNA, 90 bp, Homo sapiens
ctcagaaagacctgctgaattttactggcacaattcctgtgatgtatcaggactataatgtaactgcaaactccaagctggtcattatca

SEQ ID NO: 182009 - DNA, 75 bp, Homo sapiens
agcctgatgctaccaaaggtggaaagtcctgaagaaatccagtggtggctgagaaaccctggcccccagcatgag

SEQ ID NO: 182010 - DNA, 90 bp, Homo sapiens
ttcctcaggagtcatttctgttccgcacaggcctgctgaactgggtgctttatataggccccattgacaaaccttcagattctctcagta

SEQ ID NO: 182011 - DNA, 110 bp, Homo sapiens
acaaagtgatactgcagacttgcttggaggaatggctgttgatggtgggtgtggggacactggagactgggaaggtcgctggaaccatgtaaagaagttcctcgagcgat

SEQ ID NO: 182012 - DNA, 100 bp, Homo sapiens
catcttcctgacccgcttcaagaagcctgctgagttcaccacaggttgttcgccgcaggacccagcggaggaagtccaccatcactgctctgctcttcgg

SEQ ID NO: 182013 - DNA, 75 bp, Homo sapiens
agaaaggtgacttggtcctcgcggacgccagcatgtggagagggccaaatgtgaactgtgttgacagcactggct

SEQ ID NO: 182014 - DNA, 80 bp, Homo sapiens
ggcaagcgcagggggacggggaccagcagctgtcgccgccgctctcaggtgtacgaagccatcgacagcagagatggagc

SEQ ID NO: 182015 - DNA, 51 bp, Homo sapiens
caaactcttgtgaacctggacacgtcaggatcaggcaaaaatgatcatgcc

SEQ ID NO: 182016 - DNA, 89 bp, Homo sapiens
ctctggtcgcggcggctatcgacggtttgacttctccgtgacagtgttcgccttcctgggactgctggcgctggccctcaacatggagc

SEQ ID NO: 182017 - DNA, 100 bp, Homo sapiens
caacaacccgtacgtgcggaaggccctcaacatcccggagcagctgccacaatgggacatgtgcaaatacagaagatcattgagacactgacacagcagc

SEQ ID NO: 182018 - DNA, 96 bp, Homo sapiens
agcatgaataaaaatacatctactgtagtatcacccagtctacttgaaaagttaaatcttcgtgaacttggacccctggcatctcatatgcgttgg

SEQ ID NO: 182019 - DNA, 90 bp, Homo sapiens
atgcctagaagaacttcgtgaagctctggagatctcccccttcttcaagacccacgagatcattgagaagcagccaggccacattcggag

SEQ ID NO: 182020 - DNA, 100 bp, Homo sapiens
tcccctccaaggaagcgccgccccttcctacggctacgggaaggatcgtccagtggctgaggctggacagagcacagtagagatggggtttcaccatgtt

SEQ ID NO: 182021 - DNA, 100 bp, Homo sapiens
cgggtgtccagcaacggcatctttgatcttcagaaaacttcccttggaggggatgcaccagaagagccagagacacgaatgcagagtttgagtccagatc

SEQ ID NO: 182022 - DNA, 91 bp, Homo sapiens
gtctcttacgtctgcggaagtgcagctgcctcagttcttagcgcagttttcagataactattatcgtgcagaaatgattgatgccctggcc

SEQ ID NO: 182023 - DNA, 100 bp, Homo sapiens
ttttcttgttcctactgtaaaggagatgggttagatgttgttttgctgttactgctcagtgtagtcacaccttgaataagaaatggaaaaccttgggatg

SEQ ID NO: 182024 - DNA, 75 bp, Homo sapiens
ttctttgagggacccccattcaagttcaagttcacaattggcggggtgtgtgcgtggccactgaacctaaggagg

SEQ ID NO: 182025 - DNA, 100 bp, Homo sapiens
gggactactgcctaatgcctgacccacacagtgaggagggagcccaggagtatgtatcgctgttcaagcatcaggctctgtgtgctccgggatggagcag

SEQ ID NO: 182026 - DNA, 100 bp, Homo sapiens
ctggccagatgtggaaccatatccgtggacctccatatgctcataagaacccacacaatggacaagtggtggctgaattatatgaagaattgaagactag

SEQ ID NO: 182027 - DNA, 74 bp, Homo sapiens
ttcgagaactggaaggctatgataaggatggaaaaattcgagtcaccattcttgcacggagcacagaataccgg

SEQ ID NO: 182028 - DNA, 100 bp, Homo sapiens
gaagttgataaagtaacagagaggggacgctgcattttcattttgcattgagcctcacaaattacacagctaggcttgctgctgaatacggcagtgaggg

SEQ ID NO: 182029 - DNA, 75 bp, Homo sapiens
aaaggtattcattaaagaaaataatgggaaggaagaagtatccaaggtacgaattttgcggttattaagaatttt

SEQ ID NO: 182030 - DNA, 76 bp, Homo sapiens
tcagttaaacctactcaaactattgatctcaggaaacaggctcgacagctggaaaatgaacttgacctgaaactag

SEQ ID NO: 182031 - DNA, 100 bp, Homo sapiens
gtctatttcttgatatcataaagaaggtctttgaccgacacctccaccctacaagtactgaaaaggcacagggagagtggtgaatatcagtagtttgcag

SEQ ID NO: 182032 - DNA, 74 bp, Homo sapiens
gaggaggacatcgtcaggctggcccaggaccaggaggagatgaagatggagtcatcagaacccactgtgaggaa

SEQ ID NO: 182033 - DNA, 74 bp, Homo sapiens
tttatgccaaatcaactgccttacagaaacgatggaaagaactttctaaggaagacttatctcctgcctttgat

SEQ ID NO: 182034 - DNA, 95 bp, Homo sapiens
atgatcatgatacagttgataaaattgttgctcctgggcaacgtgctggtctgtgtgctggcccatcactttggcaaagaattcaccccaccagt

SEQ ID NO: 182035 - DNA, 75 bp, Homo sapiens
gggaaatcgtgcacatccaggctggtcagtgtggcaaccagatcggtgccaagtgccccaggtgctaaagagctg

SEQ ID NO: 182036 - DNA, 87 bp, Homo sapiens
atgtgggcatggcagacaaatctgtaggtttggacatatttgactcttttccccccaggttgaattgaccaaagcaatggtgatgga

SEQ ID NO: 182037 - DNA, 96 bp, Homo sapiens
ggagtattttgagattggagaattaagatatcagttttagagaatgtggcgtggagaaattctcaaggaaagagtaaaatgctggtgatgtgctga

SEQ ID NO: 182038 - DNA, 49 bp, Homo sapiens
aatgtggagctcaacatccacagcccccctccatgcgcctgaaggcccg

SEQ ID NO: 182039 - DNA, 90 bp, Homo sapiens
ctggctgagggactcacagctgatgacctgctgctcgtgctgatctcaggtgcccgagaatatcatgtccagttttttagcaaccagcca

SEQ ID NO: 182040 - DNA, 100 bp, Homo sapiens
gcatgtgtcttccccagctctgcagccacatactatccgtttgttcaggaaccaccagtgacagagtgggtcttcaaacaactctatgataaaggccttg

SEQ ID NO: 182041 - DNA, 82 bp, Homo sapiens
cgaagagctgccgtcgctgcagagaccccgctatggctatgatgataattccgaagaaggcttccacactattcattcagga

SEQ ID NO: 182042 - DNA, 100 bp, Homo sapiens
ctggttctggaatcctcagttcaagacttgaaagagggctccagaaaaagtagatgcgtatctgtacaaacagatcctactgatgaaattcccactaaaa

SEQ ID NO: 182043 - DNA, 82 bp, Homo sapiens
ggcttacgcagaaggacctggccacgccttatgccagcctggaccatcttggaggcagtgtaggatcatggaagaactttga

SEQ ID NO: 182044 - DNA, 110 bp, Homo sapiens
ggtgggcgaacgagtgacattggctgacatcacagttgtctgcaccctgttgtggctctataagcaggtactggtgtggcatactcggacagagaagcccaagatgaagc

SEQ ID NO: 182045 - DNA, 83 bp, Homo sapiens
cagctgcagctgattccattaaaatatggaacaggctgaagggtatgtgattggcagctgtattaaacacattccaatcgcag

SEQ ID NO: 182046 - DNA, 100 bp, Homo sapiens
taggcgagacattatcagagtttaaagaattttcacaaagttttgatgcagctgaagagcctaggctggatgtcttgatcaataacgcagggatcttcca

SEQ ID NO: 182047 - DNA, 82 bp, Homo sapiens
tcagcttcgagcttgtgccaaataccacatggaaatgaattctaagaagcatcagatggtgaaggagaaggagacacagaag

SEQ ID NO: 182048 - DNA, 100 bp, Homo sapiens
ctctagcaggctccactaactggggctacgactctgatgggcagatctccatttgccaggagatgcccagcctggaggtgatcacgctcaggtacctcgc

SEQ ID NO: 182049 - DNA, 96 bp, Homo sapiens
tttaattacttaaaacaccacgatgaaaagaaatacctgtgatttgctttctcggagcaaaagtaatcatccagaaccgcatcctgctcgtcatcc

SEQ ID NO: 182050 - DNA, 110 bp, Homo sapiens
cagcctactcagtgtgaagatgatgtggtgtaaattggtccaatgtaacttgccaggcaactcagaaaaaaccttggatggaaaaaaatcagacattttctagaggtgga

SEQ ID NO: 182051 - DNA, 90 bp, Homo sapiens
gccagagtgcatacggatttcacgccaagtccctatgacactgactccctcaaaatcaaggtacgtcagcctgtcatatgcatcaacaac

SEQ ID NO: 182052 - DNA, 75 bp, Homo sapiens
aatgcagattccagaaaaattacagcacatctcagtgaatttgcaagtgtgtatatccagtactggtgtttaaag

SEQ ID NO: 182053 - DNA, 75 bp, Homo sapiens
ccttgtgacagaatatgccaaaaatggagaaatttttgccacagctccggagcaagccccagccccggcccggcc

SEQ ID NO: 182054 - DNA, 96 bp, Homo sapiens
caagatcttgtcaagctgtgtcagccgcgcatattaaatttcctattgactacccctattcaccacctaccttcagattcttgaccaaaatgtggc

SEQ ID NO: 182055 - DNA, 100 bp, Homo sapiens
aaagctttgaaaagtcgaattcatggtcgtggaagctgagcccatattaagagatgtcagccctgggcgctgcctatggcacagccaagagcggtaccgg

SEQ ID NO: 182056 - DNA, 100 bp, Homo sapiens
ctcttctgctgggaaatcccagtacagatcatcactactggttacaacctggaagatgaccgctgtgagtgtgtggctctgcaggattttcgggctggag

SEQ ID NO: 182057 - DNA, 156 bp, Homo sapiens
cacggccgggagaagcatgggaaggaggccgagccgggatctcaggtcctcgggggcggcggccacgccaaggacggagaaaagaaaccttgtttattccctgtgaaaatgagaagatttctaaacagctccacctttgttacaatattgtgaaag

SEQ ID NO: 182058 - DNA, 51 bp, Homo sapiens
gctttacctcgctgaccctatgaagagggagcactatgtctgcggaagtcc

SEQ ID NO: 182059 - DNA, 100 bp, Homo sapiens
cctgaccctgggcgccgcgccgcacgagcaccagcctagagccaggtcccacgacagtgatgtccgagggcgcccggaacattgtggcagccatgaaggc

SEQ ID NO: 182060 - DNA, 100 bp, Homo sapiens
tggatatgttggcagctattgctggaccagacatctgccaccaaatcctggatctttactcacaaggaaaacaacagatgcctcatcacaccccccatca

SEQ ID NO: 182061 - DNA, 51 bp, Homo sapiens
ggcaatgacggacctctttatggcaccgacagtaaatggttcacggccgac

SEQ ID NO: 182062 - DNA, 83 bp, Homo sapiens
ccaacattcccaacagccaccaccaccaccagatgcccccaaatacatcaagatgtttgtactggatgaagctgacgaaatgt

SEQ ID NO: 182063 - DNA, 106 bp, Homo sapiens
cggtaatgctggtggtctgcatcaccaccggatcaacttcgacaaatagaattgaatgatctggcacgggaccctccagcacagtgttcagcaggtcctgttggag

SEQ ID NO: 182064 - DNA, 75 bp, Homo sapiens
gaccccacatgagggtgaggctctctgcacactccagaacagctggaaatgatccctattgttttgtggagtttc

SEQ ID NO: 182065 - DNA, 101 bp, Homo sapiens
ctgaacccctgaagggatcaccagagtacctcaaatcgtttgtgggctgaggatagtactgagaaagaaaaggacagtgttcctacggcagtgaccattcc

SEQ ID NO: 182066 - DNA, 96 bp, Homo sapiens
atgtcgcacgagcccagacgcctttgtgcagctggccctccagctggcgcactacaaggacagtcattttgtttactcattcagccctgttgcagg

SEQ ID NO: 182067 - DNA, 100 bp, Homo sapiens
cctggtcctggcccaggctcctgcagctttagcagatgttctggaaggagacagctcaggacgctgccaaggtctgcagagaattcaccgagcgtgagca

SEQ ID NO: 182068 - DNA, 100 bp, Homo sapiens
ggaggagataacgcggccttgggctctgttccagggtctccctccactgctgtagtaacccgggtccggggcctcggtggtgctcctgatgcccctcacc

SEQ ID NO: 182069 - DNA, 71 bp, Homo sapiens
gaacctatcgaaggacatgaagactaccacatgatggcatggattccgtgaaggaacaacacctaaaccca

SEQ ID NO: 182070 - DNA, 75 bp, Homo sapiens
gttgtcacacctcagttacctcagggaaagtcgggtcacaaatcttcgaagagtgacatatgttgttttagatga

SEQ ID NO: 182071 - DNA, 100 bp, Homo sapiens
caccaggagtttgacaatcacattaattcatatgaccatgctcacaagcaggacaaaactttcggtttgaagaataagaaaggagcaaagcaacagaagt

SEQ ID NO: 182072 - DNA, 84 bp, Homo sapiens
accctcgctccctctgctcttcctcccttcgctcgcaccatgcaaattgtggctactaatttgccccctgaagatcaagatggc

SEQ ID NO: 182073 - DNA, 100 bp, Homo sapiens
gagaagatgcccgccctgcgccccgctctgctgtgggcgctgctggcgctctggctgtgctgcgcggcccccgcgcatgccttctcctgcaacgccgggg

SEQ ID NO: 182074 - DNA, 75 bp, Homo sapiens
cacggtggaggagctgctccgcgggtgcatcgaagccttcggtcccggaacctgcagtgccagcggatcttccag

SEQ ID NO: 182075 - DNA, 75 bp, Homo sapiens
ggaagatggaccaaagcgatacagtggtggtatcatggatacagaaatgtctgaagatatagaccacaacttaac

SEQ ID NO: 182076 - DNA, 100 bp, Homo sapiens
ggccctgggcgggcgccgcgagccggaccttcacggcatggtgcaactcccacctgcggaaggcaggcacacagatcgagaacattgatgaggacttccg

SEQ ID NO: 182077 - DNA, 90 bp, Homo sapiens
tcacagagaatgcagttgtcttgacttcaggtccttttggaataaatcatgggattgagcttcattcagatgtggtggaatatgccaagg

SEQ ID NO: 182078 - DNA, 99 bp, Homo sapiens
acagcaagaggcaaaacttcggacatagaggccaaccaacctttggaggttatctaccttgcctgctcctatgccacagtgtacctgatctacctgaaa

SEQ ID NO: 182079 - DNA, 135 bp, Homo sapiens
aaacatgattgaacgatctgtggtggaagcagcagtccaggaatgcagtcagtctgttgatgaaactatacagtgatgtgtgttctgaaattgtgaaccatgagtctagtacttaatgatctgcttatctgctgc

SEQ ID NO: 182080 - DNA, 84 bp, Homo sapiens
gaaagacccaggagaagccgcccaaagaactggttcttcacacacccccattcggcgtagtacccagagagctcaagatgtgtg

SEQ ID NO: 182081 - DNA, 75 bp, Homo sapiens
ccacttcctgtggcaactacaggggttctacatgaaacattttctcaacacacattcctcatgaatggtctcatt

SEQ ID NO: 182082 - DNA, 100 bp, Homo sapiens
ctcggccgcgcaatgggcacccgcgacgacgagtacgactacctctttaaagggcctgtgccagcagtgagacagagagtgaagcgggagacatcatgga

SEQ ID NO: 182083 - DNA, 98 bp, Homo sapiens
cgacaccatggatctctcctttatggccgcgcagcagaggctgaccatgtggaggccgccatcctcgaagaagacgagggtctggagatagaggagcc

SEQ ID NO: 182084 - DNA, 74 bp, Homo sapiens
ccaaacagttcacctattaccctctggtggaagaccccaccaacaactgaacgctttggtcaggctgctacaat

SEQ ID NO: 182085 - DNA, 90 bp, Homo sapiens
cgacgcgggctccgatgcagctcgctccctgccggatgggtcatgggattctaaacatgaggcagagaacgccagacagaggcaggaggg

SEQ ID NO: 182086 - DNA, 89 bp, Homo sapiens
caccccgatcatcatgagccggagtcccacaggtctggtgagctgtaccttctttctggcagtgaatggtctgtattcctctagtgatg

SEQ ID NO: 182087 - DNA, 100 bp, Homo sapiens
tctgcagtccctcgtccagccacccccagacggtgtgaagggagacctgctgattgacatcggctctggccccactatctatcagctcctctctgcttgt

SEQ ID NO: 182088 - DNA, 85 bp, Homo sapiens
aagtcaagctgccttaggcttataacatcacatttaaaagcatctcaggtcccccacggcccttcaggatgaaagctgcggtgct

SEQ ID NO: 182089 - DNA, 74 bp, Homo sapiens
cggaggcagagcggctgccatgcaatggctgccatccggaagaaactggtgattgttggtgatggagcctgtgg

SEQ ID NO: 182090 - DNA, 100 bp, Homo sapiens
tgatgatccactgccatttaatgaatagagaatccagctttggcggttgcaattaaaacatgtaaaaactgtacttcggacagcgtgagagagaaatttc

SEQ ID NO: 182091 - DNA, 97 bp, Homo sapiens
cagaaacaaccccagcaagcccctgcacgtcatcaagctgtttttggaaggaagaaagatggaaagcggtgcagttctgctggaatccaaatcctcc

SEQ ID NO: 182092 - DNA, 100 bp, Homo sapiens
aaacagttgccaatttggacactctagtagctgtaatagaatgccagcaaccagaagcagacttatacaggtgaagctgtacttcacaaaaacagtagag

SEQ ID NO: 182093 - DNA, 75 bp, Homo sapiens
gggaagacgccctggtgctcaccaagcaagaggctgtgatcaatagccaggaatggactttgagccgctccattc

SEQ ID NO: 182094 - DNA, 90 bp, Homo sapiens
ctccaaaacctaagtacaacccatacaaacaacctggaggtgaggtgcgagcagtcccacctcatgagagagcatgaggatgtccaggag

SEQ ID NO: 182095 - DNA, 82 bp, Homo sapiens
agaagaaactgcaccggaaatgtgcctaccaggacactgaagccatgaagagagcattggcctccatagactccaaactgaa

SEQ ID NO: 182096 - DNA, 100 bp, Homo sapiens
ctcctgtgacctgcatgtactgggggattcgcagggaggatgtcgggacaccccggaagctgggaaatggacaatagcagaagccttttgtcatatattg

SEQ ID NO: 182097 - DNA, 100 bp, Homo sapiens
gcattggcatttttgtcacctccaacaacatccgcgagatcgagactgacttccttttggtagtactgcgtgatgttgttcaggcttatcctgaagttcg

SEQ ID NO: 182098 - DNA, 90 bp, Homo sapiens
gcgcctccctccacgccggtgggagcccggctctggcttcttcagcggagtgccaggtcaccagatggaaagcgaaaaagaaagaacggc

SEQ ID NO: 182099 - DNA, 98 bp, Homo sapiens
gcctcctcctgctgctgctgcgctacctggtggtcgccctgggctgtctaccctgaactgcagatcaccaatgtggtagaagccaaccaaccagtgac

SEQ ID NO: 182100 - DNA, 98 bp, Homo sapiens
cctgcccaacaaacagaggacagtgtttggctttggttgaaataagaatttagcctgtatgtactgctttaactcctggaagaatgacagatgacaaa

SEQ ID NO: 182101 - DNA, 98 bp, Homo sapiens
gcccacttccaccagagacacattgagaaggaggaaactatggcctccaggcttccgacggcctggtcctgtcttgatcagttactggcagtcgcaga

SEQ ID NO: 182102 - DNA, 100 bp, Homo sapiens
aacttgaggttgccccgatttctgacatcattgcaatcaagtcacctgacacatttgtgagaactatttatgcagggggtgctcaaaggatttaaaggag

SEQ ID NO: 182103 - DNA, 75 bp, Homo sapiens
gtttcttctgggtccatcaccaaagagcagatgccaaatctggttgtttcacgaagaaatccagaggatgtccag

SEQ ID NO: 182104 - DNA, 126 bp, Homo sapiens
caaagcccccacgcccagccaggagcaccgccgaggactccagcacaccgagggactgggcgttcatcaacaccaacatctttgccaggaccaagatagaccccagcgccttggtgcagaagctgg

SEQ ID NO: 182105 - DNA, 82 bp, Homo sapiens
ctgctgctcaaagctgctgccgccccttgggctaaaaggctatgactttgcagccgtcctggagtggttcgcggagcgtgtg

SEQ ID NO: 182106 - DNA, 98 bp, Homo sapiens
accgactcttcgggaaagcgaaacccaaggctccgccgcccagcctgactgactgcattggcacgcacccacaacacaagatcagaccccaagttctg

SEQ ID NO: 182107 - DNA, 113 bp, Homo sapiens
ttcactgctcttcagcctcagcggcagtgttctgtgtgcaggtatggcgactacccgaagctccctgaccgctcacagcatgagagagatccatggtatagctgggaccagcc

SEQ ID NO: 182108 - DNA, 74 bp, Homo sapiens
ggactgatttttagaactccacatttgaggctcttgcagccaatgccggaacaggatttgctgttgctgagcct

SEQ ID NO: 182109 - DNA, 84 bp, Homo sapiens
ccccgggacaccctggaagccaggaaatggtgagaagccctaccactgcaactgggacggctgcggctggaagtttgcgcgctc

SEQ ID NO: 182110 - DNA, 82 bp, Homo sapiens
caaagcctcctggaccgtccaagaacatcaagatggtgctcatgtggaccagtggtgacgccttcaagacggcctacttcct

SEQ ID NO: 182111 - DNA, 107 bp, Homo sapiens
tcaatatctgtcttcggtggactccttcggcagtccacccaccgccgccgcctcccagttgcagagtgggcaggatcttaagacccgataggtgcagaacccatctg

SEQ ID NO: 182112 - DNA, 83 bp, Homo sapiens
cctacggtgccgtgtgtgcgtgagagaagaccagtctttcctctaggttgaattgaccaaagcaatggtgatggagaagccta

SEQ ID NO: 182113 - DNA, 75 bp, Homo sapiens
gcgaaggcggctggagaccgagctagatgggctcagtgtcctactgtccgtggcagagctgtactggcgatcttc

SEQ ID NO: 182114 - DNA, 100 bp, Homo sapiens
gctgtagtcacaggagctgtagagaggaccccggtacatctgaaagccgggaaatggttatgatgtgattgctcaagcccaatctgggactgggaaaacg

SEQ ID NO: 182115 - DNA, 74 bp, Homo sapiens
ctagtgcaagccttgtttattttcctcaccactgaatctacagacagttgaatttctgaatgaaaagctggaaa

SEQ ID NO: 182116 - DNA, 75 bp, Homo sapiens
attttatgtgggaggatgttcagcagcgcggcagagtcatgggggtgattcctgactctgatgcacatagagcag

SEQ ID NO: 182117 - DNA, 96 bp, Homo sapiens
aacaagcaagcatgcagcttactgcttgaaaggtgttgctctcttgccattcgtggatgagcgaaggctacgagctgccctagaagaggtataccc

SEQ ID NO: 182118 - DNA, 75 bp, Homo sapiens
gcttttgatatctggggccaagggacaatggtcaccgtctcttcaggactgaatatagttgacattacttttgtg

SEQ ID NO: 182119 - DNA, 51 bp, Homo sapiens
tcggggtgccagaaggaaagcatagcttcagtatcagacacagcacagcag

SEQ ID NO: 182120 - DNA, 74 bp, Homo sapiens
gtcgggtggttttactggagtattggaactcaggatactgaggatttggaattaaagaaatcattcaccagaca

SEQ ID NO: 182121 - DNA, 100 bp, Homo sapiens
ctcacgggacgcgacgcgccccgcctcccccgtccggtccctctctccacggtgtggtgtggaacctataggccagagtatgcggttaactccattaaaa

SEQ ID NO: 182122 - DNA, 75 bp, Homo sapiens
ccaggctctacctcaacgtgctcaacagattacaccaccaccttcactgtcagatccacttaaagagctttttcg

SEQ ID NO: 182123 - DNA, 98 bp, Homo sapiens
ttacaacatggcagacattgacaatgtccggtttttctacagaccctggcttatggagatatgaatcatgagtggattggaaatgaatggcttcccag

SEQ ID NO: 182124 - DNA, 82 bp, Homo sapiens
gggaggagaagacaagctaaaaatgattcgggaatatcggcaaatgcaaacggggattcagcgtccgatcctttggaacagg

SEQ ID NO: 182125 - DNA, 75 bp, Homo sapiens
aagaatatgctgccaaaattatcaacaccaaaaagctttctgctagggaatgacagcccatatcaaggcggtgta

SEQ ID NO: 182126 - DNA, 130 bp, Homo sapiens
gagaaaagtaggatgaacctgcccaaggggccggacacgctctgcttcgacaaggacgagttcatgaagatcgtcagtatttaaacagatcacatcatgcgtgagtacaagctagtggtccttggttcag

SEQ ID NO: 182127 - DNA, 90 bp, Homo sapiens
gacagatgccagcgtagctgaatccagtaccaaaaacgtcaacaacagttttacggaacaagctgaaagctggatacctaatgtcagtgg

SEQ ID NO: 182128 - DNA, 90 bp, Homo sapiens
ctgcttctgctgctggtggggctcacggcgcctgccttggcgctggccggctacatcgagagctcatctcctgtcctgggtgtgaacgag

SEQ ID NO: 182129 - DNA, 51 bp, Homo sapiens
tttgtggatggacttgattctgatgagagtatgattcatccagccttccag

SEQ ID NO: 182130 - DNA, 101 bp, Homo sapiens
ggctgacctggacccctccctggatttcatggactccttggagcatgacattcccaaagggagaagcagaatttgcccgcatcatgagcattgtggacccc

SEQ ID NO: 182131 - DNA, 75 bp, Homo sapiens
cctatgtgaaactgctttctaaaacaccagaactcaacctgatttctcgaatgctggcagccaaaaccgttttgg

SEQ ID NO: 182132 - DNA, 82 bp, Homo sapiens
ggtgcatgagcaagctgctggatggcattcagatgccatggacaatattaccaggcagaaccaattctacgatacccaagtc

SEQ ID NO: 182133 - DNA, 100 bp, Homo sapiens
cctacctggtgctgcacacggccaagacgagccgaggcttcacctaccacctgcacttctggctcggtgtgatgaatgcagactctgctaccattttggc

SEQ ID NO: 182134 - DNA, 100 bp, Homo sapiens
cggatccagcgcagccgggagacagatgcgaggcggcggtcagtggttatggccagtgagaatgtgcggtgttgcattgcagaagaagctaggaaagctc

SEQ ID NO: 182135 - DNA, 75 bp, Homo sapiens
cgcagccgtagacaccagctccgaaatcaccaccaaggaggaggaaggtgaggacggcgatccatcgtcagggcc

SEQ ID NO: 182136 - DNA, 100 bp, Homo sapiens
agtttctggacactctccgagaggtgaaggtggtgatctttgtgaagtctgtgcagcggtgcattgccttggcccagctactagtggagcagaacttccc

SEQ ID NO: 182137 - DNA, 75 bp, Homo sapiens
gcaagacctctccccctcggaggcggcgggcggaggcggcggacctacattgccccaccagctgccattttttac

SEQ ID NO: 182138 - DNA, 100 bp, Homo sapiens
aggaaagtcccaggatgactactgtgtcaacaacgggtaatgacttgcttcagagcatgggaagattgggcaatttatccagaaccatttttgatcaaac

SEQ ID NO: 182139 - DNA, 75 bp, Homo sapiens
atctttttgaaccaaattatgctgcaaatggggatatgagactttctactcggaatatcctgagtgttgcgtgga

SEQ ID NO: 182140 - DNA, 99 bp, Homo sapiens
gcaccatgccgtcggagaagaccttcaagcagcgccgcaccttcggtcaaaatgcagatcttcgtgaaaacccttaccggcaagaccatcacccttgag

SEQ ID NO: 182141 - DNA, 100 bp, Homo sapiens
cgcggaatcggggagcgtccggagctagctggatcctctaggcaggggcaagattcttgccaagagaattaatgtgcgtattgagcacattaagcactct

SEQ ID NO: 182142 - DNA, 88 bp, Homo sapiens
cgcgcagcgcgggaggcaggttccgcacgggtgtgcccttactacctgtcccggaacctgaagcagcaagccgacatcatattcatgc

SEQ ID NO: 182143 - DNA, 146 bp, Homo sapiens
tcaaggtgaaaaatgctcagggatggagccctctggcggaagccatcagctatggagataggcagatgagcagtggccattcaccaccgagtagcagtctcacttctccaagccacgtgaacttgtctccaaatacagtcccagag

SEQ ID NO: 182144 - DNA, 94 bp, Homo sapiens
tgtgtttcagctttttacttgtgcccttctggagtttcaaatcctgctctactcacagccacactattacggaaagaagaaaaataaaagaatt

SEQ ID NO: 182145 - DNA, 144 bp, Homo sapiens
ggcgactagcggcggcgggagcggcgccgagaggccgtgcgggacgcgggcgccaggaccggccgaacgcagaggtacatgtcccagagcaagcacacggaggcccgggagctcatgtactcgggagccctgctcttcttcagc

SEQ ID NO: 182146 - DNA, 100 bp, Homo sapiens
tgaacatcagtgaagtcctggcggtcatggacactctcgtctctgttgctgctcgagagtgactgtgaagtgctgaccacactcaccccagacactggcc

SEQ ID NO: 182147 - DNA, 96 bp, Homo sapiens
gctggcagctgagcggcggaacccttcgctggcgggagcgcggttcggggccgcagagcaaaacaagctatcgatcagggaagatctccagttata

SEQ ID NO: 182148 - DNA, 83 bp, Homo sapiens
ctgtgaggcccgccgctcgcatgagcacctcatacggctgcttctggagaagaaatgcactcggtgatggaaagagagccact

SEQ ID NO: 182149 - DNA, 60 bp, Homo sapiens
ggaaaacactatcctctgagatcccagatcatgaggagtagtgaagaagttctcactgca

SEQ ID NO: 182150 - DNA, 100 bp, Homo sapiens
tttggactctcttgttcttgaaaacttaagtacccaggaggtaggaaaagtaattggaattgctattatgaaacactttggatggaaagcagacttgagg

SEQ ID NO: 182151 - DNA, 100 bp, Homo sapiens
agaccctcgaagtgcgcaaacttgacactcaccctgaccgcacggccttgctacgatgtcataatgtttgatgttgacagtaaggacccaacactgggaa

SEQ ID NO: 182152 - DNA, 74 bp, Homo sapiens
cccggagacagcggcacagaggtgcttctgccagtgtgccctggtatgtgaatgtacagccccggaaagtgtga

SEQ ID NO: 182153 - DNA, 100 bp, Homo sapiens
aaatggattggagtgaaccggagaccccgaaaacggaagcgcagggagaaggaagaggtgtttgaaaaggtactggctcctgtatcacccagctctggag

SEQ ID NO: 182154 - DNA, 60 bp, Homo sapiens
ccgccgcattttttaaccctagatctcgttcaaatctgaacatcaatgatgtactaggga

SEQ ID NO: 182155 - DNA, 88 bp, Homo sapiens
gcgcagttaggcagcagcagccgcggagcagtagccgccgtgggagggagccatgaagcattacgagttattaccccattcaagttga

SEQ ID NO: 182156 - DNA, 82 bp, Homo sapiens
acagtcccaagtggaagcaaccccttacagtcttggctctctggcagatttcctctagtaagaggtggctctggaggccccg

SEQ ID NO: 182157 - DNA, 116 bp, Homo sapiens
tatatgaacaatccgtctggatcacggatgtaggaagtggttatggaggttttgatgactatggtggctataataattacggctatgggaatgatggctttgatgacagaatgaga

SEQ ID NO: 182158 - DNA, 79 bp, Homo sapiens
caagccccttggaggcctgtctggaggctgaagaggccggcttgcctctgcaggcccaccgtttccatggtcgaaggtc

SEQ ID NO: 182159 - DNA, 78 bp, Homo sapiens
ctgttccccgcgctgcggcctggcggcttccaggcgcactaccgcggagcatcagatccatgctgctgctgactcgga

SEQ ID NO: 182160 - DNA, 90 bp, Homo sapiens
agatgagacgagaaagaacacgctttgttgcttctaaacctctggaggaggaggtacccactgatggtaatgctggcctgctggctgaac

SEQ ID NO: 182161 - DNA, 98 bp, Homo sapiens
atatgttgagattctacttattcatcagtttgttgtgcttgtcaagatcagaaaatgctcgccaagcaggaggcccagatgaacctgatgaagcaggc

SEQ ID NO: 182162 - DNA, 75 bp, Homo sapiens
cgaagaccagccagaccatggagctcgcccccaacttccagggggccaaaccagtgctcctgccacctctctggc

SEQ ID NO: 182163 - DNA, 100 bp, Homo sapiens
cccttcctgatgatcccggacctgagcagcccgtacctctccaacggacccctgtctcccggaggagcgcgcacctgcacttgcaggaaagacatggtga

SEQ ID NO: 182164 - DNA, 82 bp, Homo sapiens
gcgaagctggccgagcaggctgagcgatacgacgctcaccatggatgatgatatcgccgcgctcgtcgtcgacaacggctcc

SEQ ID NO: 182165 - DNA, 83 bp, Homo sapiens
ctccgaggacgccctgacggtcatcaaccagcaggaggactccagcgagccctgggcgctgcctatggcacagccaagagcgg

SEQ ID NO: 182166 - DNA, 90 bp, Homo sapiens
actgcgtctaccagagcatggtgctcttcttcttcgagaattacaccggggtccaggttttaaatgcacagagagcaggatacaaggcag

SEQ ID NO: 182167 - DNA, 74 bp, Homo sapiens
ctgggggtggtgccagtttggagctcctggaaggcccctccagccagcgtcaggtgcagaatggcccctctcct

SEQ ID NO: 182168 - DNA, 75 bp, Homo sapiens
cagccacctgcccactttgtgatcagagccgtgttcggggagtctttcaggtattgacctgatggacatggcttc

SEQ ID NO: 182169 - DNA, 100 bp, Homo sapiens
gaacatggagttcaacccagtgttatcatcctactcagtctgttctccactcctcatgcctgctgatcttaagaagagaatagaatctttaattgaccgg

SEQ ID NO: 182170 - DNA, 74 bp, Homo sapiens
actctgaggaaaagctcgcaccagatggatttgcagccgctgcaagtgtgtggaagggccgtgttcgtgttggc

SEQ ID NO: 182171 - DNA, 74 bp, Homo sapiens
acaatttctggctggccatagacacaggctctaagcagaataaattccctgaaaaaagaaaaaggaactctgtg

SEQ ID NO: 182172 - DNA, 100 bp, Homo sapiens
tggcatttacagaaagagtcaacagcagtggcaacaggccaaacgtaccaagaaagtcgggatcgtcggtaaatacgggacccgctatggggcctccctc

SEQ ID NO: 182173 - DNA, 100 bp, Homo sapiens
gatcatgttgccttgtgaattttgtgaggagctctacccagaggaactgctgattgaccatcagtgtggcaaaggagcagagaactttgacaagttcttc

SEQ ID NO: 182174 - DNA, 100 bp, Homo sapiens
ataatggacagaatcatctagaaggacaaatgaacttcaatgcagattctagccaacataaaggttaatccctatatcctgaagaagaacatgatcctca

SEQ ID NO: 182175 - DNA, 100 bp, Homo sapiens
ggccgcgctgagggcgcccagctggtgcctgtgaagcatgtgtaccgtgtgctgcagtgccaggaggaggagctcacgcagatggtgtccaccatgtccg

SEQ ID NO: 182176 - DNA, 82 bp, Homo sapiens
agccggcggtgcagcagccggccgacccagagtgttgattcttcaccacactgaaaccattaggaaaaatccttgtggttaa

SEQ ID NO: 182177 - DNA, 100 bp, Homo sapiens
ggaggaatggcaggacgaagatcttcccagatggcctgatatgaaggagtcacgcctcccgcctcccggagctgcccagtggctgccttgtccttcaagt

SEQ ID NO: 182178 - DNA, 82 bp, Homo sapiens
agacaggacgcgggaccgtgcagccgacaggactcagtggcctctgaggatgtggctgtgaacttcacacttgaggagtggg

SEQ ID NO: 182179 - DNA, 75 bp, Homo sapiens
gtccggagtaacttggccaggctggccccgagcggaactggagaaagctgagggaagaaggtagataatgactat

SEQ ID NO: 182180 - DNA, 51 bp, Homo sapiens
cgtgagcaactttgtccggaagtgcagtcgatgatgtgaagaaaggttaca

SEQ ID NO: 182181 - DNA, 87 bp, Homo sapiens
atttgggcaactttaattatggattatgaagaggatgaggaagatgatgatgatgatgaagatgacacagggatgggagatgagggt

SEQ ID NO: 182182 - DNA, 88 bp, Homo sapiens
cgatgttatgtgaatggtgagctggcttcctatggagagataacatggtttgtcaacactagcgatccatttcgtagagtgacgtttt

SEQ ID NO: 182183 - DNA, 100 bp, Homo sapiens
ttggctgcgtcatttttgaactgcttaccttaaagaggacgtttgatgctacaatccggaccatcgccatcatagctgaaggcatccctgaggccctcac

SEQ ID NO: 182184 - DNA, 97 bp, Homo sapiens
tgtcatataactcctgagaatagtggttcttaactctggtagggctctacttcactgggcctgtgatcgaggacataaggaactagtcacagtgttg

SEQ ID NO: 182185 - DNA, 89 bp, Homo sapiens
aataagatcactgtagtgggtgttggacaagttggtatggcgtgtgctatcagcattctgggaaaggtgtatgcccacgcaggcgcgac

SEQ ID NO: 182186 - DNA, 75 bp, Homo sapiens
gaaaaatagggatcgtccaacccgagtgatcaccagcagcttgcaaaacttatccaggagtcgccaaccgttgaa

SEQ ID NO: 182187 - DNA, 100 bp, Homo sapiens
tagaggaagacgacgagtttgaagagttccctgccgaaggtgatctgcaactctttcaccatctgtaatgcggagatgcaggaagttggtgttggcctat

SEQ ID NO: 182188 - DNA, 75 bp, Homo sapiens
acagaaagaatttactgacaatgtgagcagtgcttttgaacaaggtaatatctctttgccaaagctggatgaaca

SEQ ID NO: 182189 - DNA, 100 bp, Homo sapiens
ccatttttgcttgatttcagagcagttggtgttctttagtcttcttgcaacagcgattttgggagcagtttcctggcagttccaattgctaatccagcat

SEQ ID NO: 182190 - DNA, 100 bp, Homo sapiens
ctgccttcttggacgcctttcagaaagtggctgacatggccaccaacacacgtgcccacacatcttgctgacttcactcaagtgcaaaccattcagtatt

SEQ ID NO: 182191 - DNA, 100 bp, Homo sapiens
tcagttagaggaggcagaagatttctggccagtggagagaggaattcctcaagacaccattccagattaaatctcttgatgaacagtgtgtggttggcaa

SEQ ID NO: 182192 - DNA, 98 bp, Homo sapiens
gcgcggcggccgggccctcgagacggggacggttattcagcttctcaaggctggaaaagcgaaggaagtttcctacaatgcactagcctcacacataa

SEQ ID NO: 182193 - DNA, 76 bp, Homo sapiens
gatttgcatcttgtaatgtgtttaacaaagccacgaataacctataatggtgcaaattgagcatgacccagaatta

SEQ ID NO: 182194 - DNA, 50 bp, Homo sapiens
ggctgctgcaggcgccgcacaagcaaagttctcatatagatgtggttcgt

SEQ ID NO: 182195 - DNA, 98 bp, Homo sapiens
gggaggtgatgatgccctattcgacagaactgatattttatattgaaatggatcctccaggactaagtgtcattgaatccactcctgactcacatttg

SEQ ID NO: 182196 - DNA, 98 bp, Homo sapiens
gcgagtgaggaaaggaggtactgtaggtcatgcagaccatggaacccaagcagcggccagctgcgggggcacctccagaactccattccctgaggaca

SEQ ID NO: 182197 - DNA, 82 bp, Homo sapiens
tgaagatgagcttcttcagttagtaacccaggcagatgtggaaacagagatgcaacaggtacttgctaaagaagctcctcca

SEQ ID NO: 182198 - DNA, 100 bp, Homo sapiens
caaatactactgaaagtgcaatatttgagtatcactgcgaggcgtggcctggagggactcagcaaattctcctgccttcaacttggcaacagttgcctgg

SEQ ID NO: 182199 - DNA, 82 bp, Homo sapiens
ctggactccaaagccttcttattgactcctaggaatcaaggccctgggaggagcggggacactgaggacctctctccaaatt

SEQ ID NO: 182200 - DNA, 100 bp, Homo sapiens
tgttccccaaacaagtgctcctacattctggttttaaaacatgaatcctacactcatccttgctgccttttgcctgggaattgcctcagctactctaaca

SEQ ID NO: 182201 - DNA, 97 bp, Homo sapiens
caatgatgacaacttctgcaaggcggtttctagtgcaaatcccctgctcagggtcttcatccagaaacgagatacaaggcagatccaaccatcccca

SEQ ID NO: 182202 - DNA, 50 bp, Homo sapiens
ccatggcttccgaggagctgtacgagggagagataatgcatgtgagaaaa

SEQ ID NO: 182203 - DNA, 75 bp, Homo sapiens
cagaaatggaagtaccagcagaagattacgctctggggaaggactgtattatgcacgggtacatgctgaaactgg

SEQ ID NO: 182204 - DNA, 85 bp, Homo sapiens
agatgcttacaagaaacagttctctcaatacataaagaacagcgtaactccagacatggatgtggacaacaaagtagagaggatt

SEQ ID NO: 182205 - DNA, 112 bp, Homo sapiens
cgcctcccggctctcgtcagcctcccgccggccgtctccttaacaccgaacaccggccctcatctttgtgtcccatggagccggagagcacagtggccgctatgaagagctg

SEQ ID NO: 182206 - DNA, 50 bp, Homo sapiens
gcatgtggagtatgaggtttccagccagcgtcaagggttccacactgttg

SEQ ID NO: 182207 - DNA, 100 bp, Homo sapiens
cagatactgaatgtaaaccctgcaggacagcctgggcggaagggttcgtgtaattgtcactggagctgcccccatgtccacttcagtcatgacattcttc

SEQ ID NO: 182208 - DNA, 75 bp, Homo sapiens
ggaaccggggtttggagggcagaaattcatggaagatatgatgccaaaggtctgggctcctttcccttcaagacc

SEQ ID NO: 182209 - DNA, 75 bp, Homo sapiens
gtcacctccaaatcttgctgcttttaattcaactcagagctgcagccccctaaacccaggaggcgccctggcccg

SEQ ID NO: 182210 - DNA, 75 bp, Homo sapiens
cttcagtggtgattccagtgactggggatagtgaaggtgctacggtgcagagtggtgcacgtatcaacatctcag

SEQ ID NO: 182211 - DNA, 74 bp, Homo sapiens
ctactctgtgagctgttcccccttccacaggccccagctggacagccacctttgacccagtgcctacagatgcc

SEQ ID NO: 182212 - DNA, 75 bp, Homo sapiens
cactgcgcagaccagacttcgctcgtactcgtgcgcctcgcttcggatttagagggaaagatcattgtagatgaa

SEQ ID NO: 182213 - DNA, 88 bp, Homo sapiens
gctactcggtcgccctccatcggcagacagagcggcagcagcgctacctgtgtacccaggaaggatgtgggaaacactttgcatcacc

SEQ ID NO: 182214 - DNA, 90 bp, Homo sapiens
tgccagcgtagctgaatccagtaccaaaaacgtcaacaacagttttacggtgaccccagtggctgaaagcaggagaaagtgtttcatcac

SEQ ID NO: 182215 - DNA, 50 bp, Homo sapiens
aggatgaaagaagttctcagaaggatactgctggtcaagagaggtttaga

SEQ ID NO: 182216 - DNA, 98 bp, Homo sapiens
tcggacccgccggcgacatggccagctccggagagaatgcgttgatatcaatgttactccagataaaaggcaaattttgctacaagaggaaaagcttt

SEQ ID NO: 182217 - DNA, 98 bp, Homo sapiens
ctccacacaggcgatttcaccgagctgggactgccctcagaggttaagaagtttaatgactggttagccggctcagttcggggaagctgcaggagttc

SEQ ID NO: 182218 - DNA, 74 bp, Homo sapiens
agctctttcctttccgtctggcggcagccatcagcttttcctccgcaaccatgtctgacaaacccgatatggct

SEQ ID NO: 182219 - DNA, 76 bp, Homo sapiens
tgaagagggaagacacgcggaaacaggctacagcatgctggccatagggattggaaccctgatctacgggcactgg

SEQ ID NO: 182220 - DNA, 82 bp, Homo sapiens
ccgccgccgccgttggctggagcaaattgtggctactaatttgccccctgaagatcaagatggctctggggatgactctgac

SEQ ID NO: 182221 - DNA, 75 bp, Homo sapiens
tctctgttcaagggaattttgatctaaataggattcctgccagctcccaggggctttggttatagaagtgaagtg

SEQ ID NO: 182222 - DNA, 100 bp, Homo sapiens
aatgcctggaccctgcccagcagaatttgtatagagatgtgatgttggagaactacagaaacctggtctccctaggaaagaccacagcaagattctttca

SEQ ID NO: 182223 - DNA, 97 bp, Homo sapiens
gcagctgctcaagtactcgccggacccggtggtcgtccgcggctccggtcacgtcaccgtgtaccagtgtgctgctgcaacaaagtgagaaaaagct

SEQ ID NO: 182224 - DNA, 105 bp, Homo sapiens
ccgggacccggttccccggcccacagtgggggtgtgcaaacccgagagaactgggccattgagaaactagtcgctcttctcaacacgctggacaggtggattgat

SEQ ID NO: 182225 - DNA, 75 bp, Homo sapiens
gtgccatgatgagtgtggatgaaacactaatgtgttcttttcaggtttctaagcatgaattgaggaacagaagaa

SEQ ID NO: 182226 - DNA, 76 bp, Homo sapiens
tctgtttggggctaccttgagccaggagggcctccaggtgtggatcttgtgtgaagctcactgcctcaaggtggcc

SEQ ID NO: 182227 - DNA, 98 bp, Homo sapiens
atgccatgcacctcagcatgctggaagagttcttcaagttcaagggctttgggagtctctccaacctccctcggtccttcactctgagacgatcctca

SEQ ID NO: 182228 - DNA, 83 bp, Homo sapiens
tccagtcggtgttgagcacggcgagcagtctcaggcctttagtgatgatggtcatcatcagatttgaaatatttaaagtggat

SEQ ID NO: 182229 - DNA, 98 bp, Homo sapiens
agcgggtcttgggtcctccgagagcagcagcggttctgagatgcagtaaaatcgctggtgtgaaagtagcagaaattacagagctaatattgaaagct

SEQ ID NO: 182230 - DNA, 73 bp, Homo sapiens
atggacccagctcagcgggacgcgccgctggagaatgaagctatgtgatgatgatgccatttaaacgacaggc

SEQ ID NO: 182231 - DNA, 106 bp, Homo sapiens
cacaatcttcaatgagtaaacatattcctctcaccatggatgatgatatcgccgcgctcgtcgtcgacaacggctccggcatgtgcaaggccggcttcgcgggcga

SEQ ID NO: 182232 - DNA, 92 bp, Homo sapiens
aataaaggtgctaagaaagagaatgtaagacaggaaaataattaaatattcttaccgagaattaacactgaatcctccggaaggaattgtag

SEQ ID NO: 182233 - DNA, 87 bp, Homo sapiens
ctagaatggcccataccatgattatgcaagattttgcaagatggattctggatatactctgagtattgtaacaaccacctggatgct

SEQ ID NO: 182234 - DNA, 50 bp, Homo sapiens
cccggacccaaagtgccatgtctttaattgaccaatggggctgaggctgt

SEQ ID NO: 182235 - DNA, 100 bp, Homo sapiens
ccgcttgctgctgcttctcttactcgtgttccctgccactgtcttgttccgaggcggccccagagttttttgaagaggcgcagtctactgaagcatacct

SEQ ID NO: 182236 - DNA, 90 bp, Homo sapiens
cgccttctgcgtctcccggctggtggggaagcctctgcgccgccggcaccatgagaaaacatcggttgtgaagagaaagccaaaaagaat

SEQ ID NO: 182237 - DNA, 100 bp, Homo sapiens
taatgctggggaccctgagatcgtcaagtctcccagcgaccccaagcaataccggataatttcttgagaggagataactcccgtaaagttcagcaccagc

SEQ ID NO: 182238 - DNA, 100 bp, Homo sapiens
tgatcatgctgggagccatctgtgccatcatcgtggtagttattgtaaccaaaatgaagtttaatccctttgtgacttccgaccgaagcaagaatcgcaa

SEQ ID NO: 182239 - DNA, 98 bp, Homo sapiens
tacgcctcgataaacagggccgtgccgcagatgcccaccggaatggagaaggaagaggagtcggaatggcggcgctagatagtaaggcatcagggaag

SEQ ID NO: 182240 - DNA, 75 bp, Homo sapiens
ttgtgtgtattgatcaatggaagaacaaaatctggcctgaaataaaaggaactgtggctgcaccatctgtcttca

SEQ ID NO: 182241 - DNA, 100 bp, Homo sapiens
tgggctgaggcgccgcggtaccatgaggcgccgttttctgagtttaaccagtaatgccattcagttgccaatctcaagcaaagcaaacataagccagttt

SEQ ID NO: 182242 - DNA, 100 bp, Homo sapiens
aatacctaggagtgggcttttctagatcacatgatgcctgaggaagtgcaccatggagaggaggaggtggagacttttgcctttcaggcagaaattgccc

SEQ ID NO: 182243 - DNA, 90 bp, Homo sapiens
cgtagggaggacgccgggacacctggaagccgagaaatgacttccaccgctgtcagaaggcaatgaccgctaaaggaggcgatatctctg

SEQ ID NO: 182244 - DNA, 83 bp, Homo sapiens
cagatcttcaacaagaggacccaggagaaattcgccctcaaaccacgaaggaagacaggaggtccgaggagaaagcggcagcc

SEQ ID NO: 182245 - DNA, 101 bp, Homo sapiens
cacaggggtacaaccagaacacatacagtacttgaaaaattatttccacctttggacacgacagttagctgaacagcagagaatttcaaaggaccttgcta

SEQ ID NO: 182246 - DNA, 109 bp, Homo sapiens
cgaggatgcgtgttcgcgggtgtgtgctgcgttcacaggtgtttctgcggcaggtgagaagccctaccactgcaactgggacggctgcggctggaagtttgcgcgctca

SEQ ID NO: 182247 - DNA, 82 bp, Homo sapiens
ctgcacctcagcctgtgtggccgtctataagacctgcctagagctggaacgttacctccagagcgagccctgctatgtttca

SEQ ID NO: 182248 - DNA, 90 bp, Homo sapiens
tgcgacggaaatgtgtcatcgaaagccagaggcaaggtcttgctatgttgctcagactgatcttgaactcctgaccctaaagtgatcctc

SEQ ID NO: 182249 - DNA, 51 bp, Homo sapiens
catgcttctggactatttccaggccaaccccttcaaggagcgaatctgcag

SEQ ID NO: 182250 - DNA, 100 bp, Homo sapiens
aaacacactggaaacaaacagtatttctactggaaaaaccattttcagttaaagcagatattgatgatgttaagaagttcaaaccgggttacctggaagc

SEQ ID NO: 182251 - DNA, 101 bp, Homo sapiens
cacagcctaccgggctcacggctttactttcacccggggcctttccgtccgagaaattctcgcagagcttacagcaatcagaaacggagactgttcatctg

SEQ ID NO: 182252 - DNA, 130 bp, Homo sapiens
ggcggccggcggcggctgcgggctgagcggcgagtttccgatttaaagctgagctgcgaggaaaatggcggcgggagagtttattaaccacttaacctctcagaactgaacaaagacaacattgttcctg

SEQ ID NO: 182253 - DNA, 90 bp, Homo sapiens
ggcgcatggatgctggagggcgaagacctgcgaagtccctctccaggcaaaagaagctggggcagatgacattctcgacatctctaaatg

SEQ ID NO: 182254 - DNA, 100 bp, Homo sapiens
gcatggagggccccgacgatagcgaggtcacctttgcattgcactcagtacgaattggagcaatgttggcttatacacctctggatgagaagagccttgc

SEQ ID NO: 182255 - DNA, 83 bp, Homo sapiens
ctgaaataagtcaagtgtttgagattgcacttaaacggaacttgcctgtgaatttcgagactactacatgctcagtacggtga

SEQ ID NO: 182256 - DNA, 98 bp, Homo sapiens
ttgcagcacatcctcatccgagcctttgatttgagtggatgatgaggagtctgatgaggaagctgtgaagaaaaccaacaaatgtgtactagtctggg

SEQ ID NO: 182257 - DNA, 51 bp, Homo sapiens
gtttctggtcactccccaggattatgcgcgagaaaatattctctttggaat

SEQ ID NO: 182258 - DNA, 100 bp, Homo sapiens
ttctcttcactcgagagatgaggacactgaaattcagagaggggaagtgatttgcctcagcttgtactgaaatgggtcctgatgaatatgaagagatgga

SEQ ID NO: 182259 - DNA, 100 bp, Homo sapiens
tccccggggaccgggccggcgccatggaccgaggccaggcctggttcattccatagcacatctcatcttctgagtcttggtctcgcgtttagcattcgtg

SEQ ID NO: 182260 - DNA, 90 bp, Homo sapiens
aaactgtatgatatggcagatgtatgggtgaagatccaagatgttctacagtacttgattctaaagctcgaaaggcctgctatagttcag

SEQ ID NO: 182261 - DNA, 103 bp, Homo sapiens
catgaacagctatggctcagagggcaagtggccaccagactttctctgcttgtatcctcccaggaccacagaactcatcgcatcccaaggcagcctattccat

SEQ ID NO: 182262 - DNA, 75 bp, Homo sapiens
gcgatgccacgggagatggaaccaaggagaaaccatttaaaacaggtctaaagatgcgctggctccctccctccg

SEQ ID NO: 182263 - DNA, 90 bp, Homo sapiens
aggctggaagagctgctcaactccaccttctacctccagcctgccgacgtctacgggcacctgatatctcttccaaatgcatgatgaagg

SEQ ID NO: 182264 - DNA, 98 bp, Homo sapiens
ccagcttaggaataaccagcgatggattttttcagctggaagaattgcccggtgccggtggtggtgtgcacattgagccccggtatagacagttcccc

SEQ ID NO: 182265 - DNA, 82 bp, Homo sapiens
tgggcagtatagagacgtcggacttcacgggggatatgagactttctactcggaatatcctgagtgttgcgtggatgtaaaa

SEQ ID NO: 182266 - DNA, 71 bp, Homo sapiens
aaaatattctccagaattactcaaataccgatcatcaatgctgtggtactgttgattttattgagtgccct

SEQ ID NO: 182267 - DNA, 100 bp, Homo sapiens
tgatctctatggtgacaacagagtccatgagtcatgatgatgggcagcgcccgagtggcggagctgctgctgctccacggcgcggagcccaactgcgccg

SEQ ID NO: 182268 - DNA, 90 bp, Homo sapiens
gtcgcttccccgcagcatggaggacgatgcaccagtgatctacgggctggagttccaggctggaggcaaagctggaaaggacagtgggaa

SEQ ID NO: 182269 - DNA, 122 bp, Homo sapiens
gccgtatccaagacagtatgcaaggccacgacccacgagatcatggggcccaagaaaaagcacctggactttcacacaaaagatgttggacaatttctacaattttgcttcatcatttgctg

SEQ ID NO: 182270 - DNA, 83 bp, Homo sapiens
agcaataccaggatagctgttgtttcagagaaagtcatcaagagttcatataactagagctgtcctggagcaatttttatctt

SEQ ID NO: 182271 - DNA, 98 bp, Homo sapiens
ccgcagccccgggcacggcggaggcagcggagccctgggccatcggtgtgtggaggtcattgcaaaggaaggacaaaacctgaaagagctatatttgg

SEQ ID NO: 182272 - DNA, 88 bp, Homo sapiens
aaaatcttccccaaaataaaaaaattgcaagagagagactattttcgttattacaaggtctttgaagaaactggttttgatatcaaag

SEQ ID NO: 182273 - DNA, 101 bp, Homo sapiens
aagggaacaggcatcatggactgtgcgcccaagagtgacaaagacctcgatgatgccttggataaactctctgacagtctaggacaaaggcagcctgaccc

SEQ ID NO: 182274 - DNA, 96 bp, Homo sapiens
gataacgggaggtgaatttccatgtcaacatagtcctggccagaggacgtgcgcatttctaggtatggagtgtgacaataacaatgactttgacat

SEQ ID NO: 182275 - DNA, 82 bp, Homo sapiens
ccagaccttcctctgaaggcaaagtgacctgtgtacctggagtagaacagaaaaattattatgtctgtgttcccttgggact

SEQ ID NO: 182276 - DNA, 90 bp, Homo sapiens
gaccctcgaagtgcgcaaacttgacactcaccctgaccggttaatttggagtggcccctggagtcagtttcctacaccatccgaggcccc

SEQ ID NO: 182277 - DNA, 100 bp, Homo sapiens
gcagggccagcaggggcagatggcaagtggagacagcaatctcaacttcaggtcctacaggtcatcagacggccggacaaccccccagctgggcagtgcc

SEQ ID NO: 182278 - DNA, 98 bp, Homo sapiens
caaaccagaccaccttcataattggagaaacaccaaaaggaatccgcaggttatgaagacagtatggagtttccagaccatagtagacatttgctaca

SEQ ID NO: 182279 - DNA, 75 bp, Homo sapiens
ctgcccttgttgctggtgtcgtctactggctgtacatgaagaagtcaaaggaatgacagaggaagaggaagacaa

SEQ ID NO: 182280 - DNA, 98 bp, Homo sapiens
aagatgctctgcggtttttgggctgtgttgacatcaaggatctaccaggtgggcaaacgcagaggcgggaacaaactagccctcaagacgggaatagt

SEQ ID NO: 182281 - DNA, 75 bp, Homo sapiens
ctgtgacctgtggagacacggccagatctgccctccattcttcctgtccaagatccggtcccacgtggctacttg

SEQ ID NO: 182282 - DNA, 100 bp, Homo sapiens
atgtctactggtcccatagcagaaagctggtgttacacacagcgtgtgaaggcaaagaagaatgctgctccattcagaagtgaagtctgctttgggaaag

SEQ ID NO: 182283 - DNA, 75 bp, Homo sapiens
gctgccgcaagacctgctgctgctaaagctatggcctgctgtgcagttagccaacttctacctggtcccccttca

SEQ ID NO: 182284 - DNA, 48 bp, Homo sapiens
acaggaaaaactttccagccattggaattactctgcttaatgtaagca

SEQ ID NO: 182285 - DNA, 136 bp, Homo sapiens
ccggaaataggggttgtcggtagccgccccgggaacaaggaccggagctggatccgcggtgcggctgtggctctgcttatgataatgtcaacaaagttcgagtagctatcaagaaaatcagcccctttgagcacca

SEQ ID NO: 182286 - DNA, 100 bp, Homo sapiens
tcgagtgacccgggtgccgaggagcgggaagagttgctggggttctcgcaaccttgggattaatcttgctcactgcctactttgtgattcaacctttcag

SEQ ID NO: 182287 - DNA, 75 bp, Homo sapiens
tggccacttaaaatgctcaggctataccatgcactagagcatctacctgggttctgccctgatgtttcctggaat

SEQ ID NO: 182288 - DNA, 50 bp, Homo sapiens
gtcagcactgactttcagctatggaatcgagagaaaaggaacagttccgt

SEQ ID NO: 182289 - DNA, 74 bp, Homo sapiens
cctggacctatgaatatccagtttgagccatcggatctaagatccaaaaggatgtgatggagctgcttgaagaa

SEQ ID NO: 182290 - DNA, 75 bp, Homo sapiens
ctcagcagccttggtgctcaggtgccagatgcaaagtttctcctggcggcgctggtcctgtctctcattctgccg

SEQ ID NO: 182291 - DNA, 83 bp, Homo sapiens
cttattcccttcaattcaagtaacaggcattgctaccatttatgttcgttataagcaagttcatgctctgagtcctgaagaga

SEQ ID NO: 182292 - DNA, 100 bp, Homo sapiens
gttgtcttagtctttgctctcagcatcggtgcacttgtaatatacttcatagattcatcaaactcagcaaaacccagcagctcagattcctgccaggcag

SEQ ID NO: 182293 - DNA, 100 bp, Homo sapiens
ggcagtcgaaacagccgatttcagatgctcttcacatcctttcaagaacaacactcctatgccaccttcaccagctgtacaagtgcagggccagcctaac

SEQ ID NO: 182294 - DNA, 83 bp, Homo sapiens
gtgaggagccagacgacaagcacacactatggcgctgaaacggattaataagtttcgccgtgaggaagatgcggaaaaggctg

SEQ ID NO: 182295 - DNA, 100 bp, Homo sapiens
aggaaaacatccatcatattgaaagtttcctacactactgaggtttaggggcactgtgaagcaaaagccacgcctcagaatcccaggcggagactccgac

SEQ ID NO: 182296 - DNA, 80 bp, Homo sapiens
ttggagagctgctgaaacaggcggatctctacatttctgaagcccttttagacaatgaagatgatgaaatgcaacacaat

SEQ ID NO: 182297 - DNA, 98 bp, Homo sapiens
ttaagttttgaagggaggtagcatccgttggatatccacaccatccttctcgctgcaggctggtccacgacaaagagttggcagcagaagatgagcag

SEQ ID NO: 182298 - DNA, 76 bp, Homo sapiens
cccagctgaagaccactttagaaactcaattaaggcacacgtgtttcacgttgacaggtttgcttgggacgctagt

SEQ ID NO: 182299 - DNA, 75 bp, Homo sapiens
tgtggacagaggctatttcagtatagaggagctttttggtgcggtccaggtgactcctctgagctctggctatgc

SEQ ID NO: 182300 - DNA, 100 bp, Homo sapiens
gtatcgatgaaatctacaaatacgacaagaaacagcagcaagaaatcctggcggcgaagccctggactaaggaagagattctccctgagaaacaagcaga

SEQ ID NO: 182301 - DNA, 100 bp, Homo sapiens
gggaaagccaggacttcctgaaatgcatgcaaaggttcagagaagtggcagatatctacctagcatctcagtacacatcctatgccataagtggtcccac

SEQ ID NO: 182302 - DNA, 82 bp, Homo sapiens
atcacagctgttaaagatgccactgatgactataaactaatctggattcactccctctggttgatacccactcaaaaaggac

SEQ ID NO: 182303 - DNA, 100 bp, Homo sapiens
gtggactccctttaatccagtgactgtcaggtcgatcatatgtgggcctgggtcctccaggatgccctgggcatcgccttctgcctctacatgctgaaga

SEQ ID NO: 182304 - DNA, 51 bp, Homo sapiens
ctccctggcctggtctgctgatggccaggcccaggatgttttggtgcagga

SEQ ID NO: 182305 - DNA, 82 bp, Homo sapiens
ggcatgccaagaagatgagaccgggggaggcgacgctaagttgctgatcgtggcggatttttagactctgaggagcagttgg

SEQ ID NO: 182306 - DNA, 82 bp, Homo sapiens
tacgtctgtgcggctgcgtggggctcggccgcgcggactgaaggagactgaagttaccggtattgtaagaacaagccgtacc

SEQ ID NO: 182307 - DNA, 90 bp, Homo sapiens
tgagaagtgacatcctcctcgaatcaaaaggcttctccagggaaagtgaccgaggcagtgaaagaggccattgacgcagggtaccggcac

SEQ ID NO: 182308 - DNA, 100 bp, Homo sapiens
tgtcatgggccagtttgagggcactgacaccctgtgacctgagccaggggattcagccagtacaaggcctggccttgtgcactttgagcaccatgggctc

SEQ ID NO: 182309 - DNA, 90 bp, Homo sapiens
aaatggcagagttggaagagaagatcttggctggagatcctcagtttgtggtctgccagctaaaggtgaagatatattcctccaattcag

SEQ ID NO: 182310 - DNA, 83 bp, Homo sapiens
cgccgccgccgctgccgctgccgctgccgcacctccgtagctgactcggaggatcccttttcccccagaaattactcaatgct

SEQ ID NO: 182311 - DNA, 100 bp, Homo sapiens
ggaaacttaggggccacgtgagccacggccacggccgcataggagacggtggctcagggagtaaaggaaggccagttgagcaaacagaagtgttcctctg

SEQ ID NO: 182312 - DNA, 90 bp, Homo sapiens
catctacctggacatcgatggacgcattcagaaggttgatgttgatgcaaattcactgaattctaacgatgtttttgtcctgaaactgcc

SEQ ID NO: 182313 - DNA, 100 bp, Homo sapiens
attgcactgtggccagcacgggaggcacagacaccaaaagcttcatcttggtgagaaaaggccatcgaagacggcaatttggaggaaatggaagaggaag

SEQ ID NO: 182314 - DNA, 83 bp, Homo sapiens
ctgtctgtgcagggctcatagtgagtgttctgtgagacgcaggaggagggagacgcactgatgacatcgggccgctcctgcag

SEQ ID NO: 182315 - DNA, 82 bp, Homo sapiens
cctgccatgcaggcaggccctgagcacgctgctgtgtgagcagcagacctcccacctcctgccccccatgaggcagctgcgg

SEQ ID NO: 182316 - DNA, 90 bp, Homo sapiens
ctacaagaggctggagatctacctggaacccttgaaggatgcaggtgatggtgttcgatacttgctcagtttcaccagtgatcattaaag

SEQ ID NO: 182317 - DNA, 84 bp, Homo sapiens
cttggtttcgggatctcggtgctgcagacggcgagacctcctgcacaggattttttatcaagcagaaatgcatcgaacaacgag

SEQ ID NO: 182318 - DNA, 82 bp, Homo sapiens
ttctagaccctactgcggtctcggatattgccgggaaaagcaggtgatattctcagtggagaccaggacaaggaacagaaag

SEQ ID NO: 182319 - DNA, 82 bp, Homo sapiens
gaagaactaccacctatatagatccccgcacaggaaaatctgccctaatgagagaagacagtgctagagtctatgaaaacgt

SEQ ID NO: 182320 - DNA, 101 bp, Homo sapiens
cttcaatatcttcacccagcatggaattgaagccattttttatgaaggaagttggcagtcactttgatgattttgtgaccaatctcattgaaaagtcagca

SEQ ID NO: 182321 - DNA, 100 bp, Homo sapiens
caagaggacagggccggcgtcggtcaaggtcaattggcaggataaggagccccgtggaatcatccctttagagaatctgagtatccgggaagtggaggac

SEQ ID NO: 182322 - DNA, 100 bp, Homo sapiens
agtgacaagtgagcctgcttctgtcaattactgaagctataaggagattttttaaaaattaaacttcaacacaatgaggcctaccccaattatttactgg

SEQ ID NO: 182323 - DNA, 98 bp, Homo sapiens
tgagcggtcccgcatcaaggctctggcaggttattgttgtgggtaatccagccaataccaactgcctgactgcttccaagtcagctccatccatcccc

SEQ ID NO: 182324 - DNA, 75 bp, Homo sapiens
ctggagcctcagttggaagcagccgatccagcctgcggagcctgtggggcagattctctttgtggccagatgggt

SEQ ID NO: 182325 - DNA, 99 bp, Homo sapiens
cggcgttcttctgtgtggcccgcctgcagggaattcacaattgaaactgaagggaaaacatttcagttaacaaaagacatgatcaatgtgaagagattc

SEQ ID NO: 182326 - DNA, 100 bp, Homo sapiens
ggtggccgcaccctcccggctgcggtggctgtcgccccccaccctgcagccaggactcgatggagtgccctgggcttgctgtacttcatccggcgaggaa

SEQ ID NO: 182327 - DNA, 90 bp, Homo sapiens
agcagttctaccactacaaggatctctgggtcctgcatttggccaccaagacctgggaacaagtcaaactgtttcaatcttggagcagcg

SEQ ID NO: 182328 - DNA, 99 bp, Homo sapiens
agcaaatcagcgcagcatctgtgtggggaaaccttgctggtctaaatactcttggaccccagtatttagcatgtaaggcaaacattggtgggcaccgat

SEQ ID NO: 182329 - DNA, 78 bp, Homo sapiens
atggaaggagaaacaaacttcagctctgaaatagaagatcttgcaaggaaactgccaagttttggaccttatctggaa

SEQ ID NO: 182330 - DNA, 75 bp, Homo sapiens
tatcactcaagagactcttcatttagattggattctgaatatcaggaaataatgcaaaaggtgtcccaaggctcc

SEQ ID NO: 182331 - DNA, 100 bp, Homo sapiens
tgaagctataaggagattttttaaaaattaaacttcaacacaatgaggtcttgaggaccggcccagctcaggctcctggggcagcggcgaccagagcagc

SEQ ID NO: 182332 - DNA, 101 bp, Homo sapiens
gccggcgggagcgcgaacgagcgacggcggaacccgtgggcctgtggactgcagcctcggcggtcagcaggattcggacggagagcgcgaggactcggcgg

SEQ ID NO: 182333 - DNA, 100 bp, Homo sapiens
gtgacctgctcactggaaaggaagaaatgaccgagggagaagggagggcatttgaggtcatgttggcagcttcctattggtctcttctggccccagcagt

SEQ ID NO: 182334 - DNA, 100 bp, Homo sapiens
cgcagatatccaggcattcttcatgagcatagacagtctgtgtaagaagtactccagggaaacctcccagtgatcagggccaaagcggtcagtgagaagg

SEQ ID NO: 182335 - DNA, 75 bp, Homo sapiens
tgggtccggccgctctgcgggactctgaggaaaagctcgcaccagcctcttctgaaacagtctccctggagcaac

SEQ ID NO: 182336 - DNA, 80 bp, Homo sapiens
cttatatcccaccattgccacgggcattctccatctccttgcaggacttggtggggaaacttaaagatgcttcgaaaagc

SEQ ID NO: 182337 - DNA, 75 bp, Homo sapiens
tcgaaagtgaaattttcctttggccaacgtgacaggtacaggtttgcagattccgccagcagcacagcaagctct

SEQ ID NO: 182338 - DNA, 75 bp, Homo sapiens
taccgggttttggaggctggcaagattgggatatttgagagtccaactggcactcctctgcctgtgagtttctgg

SEQ ID NO: 182339 - DNA, 75 bp, Homo sapiens
caagggcaagtttgggcacgagtttctggagttcgaatttcggccggacgaagcagctgacacaggatgatgata

SEQ ID NO: 182340 - DNA, 48 bp, Homo sapiens
ccgaggcgcaggtggcgctgggctccccacaggtgcaggaagccgccg

SEQ ID NO: 182341 - DNA, 100 bp, Homo sapiens
cacagctaagatgccaggaccacctggaagcctagaaatggttctttggcatggacacaagttcagtgggaggattagaattgactgatcagactcctgt

SEQ ID NO: 182342 - DNA, 75 bp, Homo sapiens
gtcgctttgctgtacatcgtattacacctgaggaggccaagagtaactggaatgagattgttgacagctttgatg

SEQ ID NO: 182343 - DNA, 95 bp, Homo sapiens
ttacctgaaagagcaatattacagaggcggggtttcaccatgttgcccagactggtcttgaactcctgagcttaagcaatccacctgcctcggcc

SEQ ID NO: 182344 - DNA, 74 bp, Homo sapiens
tggaacacctcgccaaagcagagaaatatacctggagtagaacagaaaaattattatgtctgtgttcccttggg

SEQ ID NO: 182345 - DNA, 100 bp, Homo sapiens
acctcttttaagcctgttttctcatccatacaatggagataatggcagcacccactgcttgacttaattcagtgcacaaatgagatgaatgtgaacatcc

SEQ ID NO: 182346 - DNA, 80 bp, Homo sapiens
tcaccatgcccttctgcttcaaacagggcttccgagtggacctgccaatcaagtcggcccgctaccgtggccagtacaac

SEQ ID NO: 182347 - DNA, 83 bp, Homo sapiens
cccttgccttgagtcagtgcgccgctctccagcccgcttgaacgatccagagacaatggccccgatgggatggagcccgaagg

SEQ ID NO: 182348 - DNA, 100 bp, Homo sapiens
cggagcttgttactggttacttgtggaccctgatgacatacatggttgagggtggtggctcaagcaccatggctcaggccaagcgctggctctatcagag

SEQ ID NO: 182349 - DNA, 87 bp, Homo sapiens
ttcagcttctttgtcaccataggagacatggacgaagccttcaaatccatcaagctcatcaaaaggacactggcctgagactgtctg

SEQ ID NO: 182350 - DNA, 89 bp, Homo sapiens
gggtcttggcacaagcacatatgtttgtgaagctcaagcttcttggacacttaatgattgttggcaagaaatgtgctgctgatctgggc

SEQ ID NO: 182351 - DNA, 100 bp, Homo sapiens
ctggaggcgacaccggcaccgagagcaggagcggcagtggcgggccgtcatgctcatccaggcagagtgcaaacccactgttagacctcttggttctgac

SEQ ID NO: 182352 - DNA, 100 bp, Homo sapiens
atcactgagctattgaacaagacagacaaccgccccctaaagaaactggaggcccaagggtctggaacagaatctgacagtgatgaatcagtaccagagc

SEQ ID NO: 182353 - DNA, 50 bp, Homo sapiens
ggcacatgaaagtggctttttttggccgagcaacttttagtgaatttgca

SEQ ID NO: 182354 - DNA, 100 bp, Homo sapiens
ctgagtattgtctttatatcctgacactatgaatgctacttggatgcctcttaaggaggaagtattctgcttcatcaggtggtctatgcgaagaagcgac

SEQ ID NO: 182355 - DNA, 98 bp, Homo sapiens
cggccccggagctgcctggaggcggccgcactcgggatgtggtttcccacagtaaaaaacttaccaaaaaaaataaggaacagttgtctgatatgatg

SEQ ID NO: 182356 - DNA, 95 bp, Homo sapiens
aaccaaatattatggatcctatctgaagggaaatgatcttcattggttagcatgtgccttatatgtggcttgcagaaaatctgttccaactgtaa

SEQ ID NO: 182357 - DNA, 50 bp, Homo sapiens
tttctttccagaattatacaatatttggctttggtatcaggatgatgctg

SEQ ID NO: 182358 - DNA, 50 bp, Homo sapiens
agcagaggtaccagccgcagcaggaagcaagatttccagatgtagcaaat

SEQ ID NO: 182359 - DNA, 100 bp, Homo sapiens
aaaagtcgcgcccgcccctcccagcgcctgattggtgaaagggaaagggaaaggaagaggctctctggagattggttgacggagtctccctctgtcgccc

SEQ ID NO: 182360 - DNA, 82 bp, Homo sapiens
tgcagcccctcagagtaccgcttggagatcctagagtggatgtgtacccgacagctccaatgaaatggtgcccaatttgggt

SEQ ID NO: 182361 - DNA, 100 bp, Homo sapiens
agccagaagaggactgggaccgggacctgctcctggacccggcctgggagaagcagcagagaaagattgggatcaaagccactcacattaagttaccaag

SEQ ID NO: 182362 - DNA, 75 bp, Homo sapiens
ccacagtactatcgtctatcattggatgaagtggctccggagatgttctctacttaaaagacaatgactactgat

SEQ ID NO: 182363 - DNA, 73 bp, Homo sapiens
gaaggttgtgaaaaaactactaggatcacgcggcatgtattgagatgcaatgaacctcattttacttttagtc

SEQ ID NO: 182364 - DNA, 100 bp, Homo sapiens
cagccggcccgcagcgcgttctcccgggagagtgttgacatccctgcctgcgctggcggtcccacccccgactcccaccaaagcggcacctcccgcgttg

SEQ ID NO: 182365 - DNA, 82 bp, Homo sapiens
gcggtggcggcttggacgactcggagagccggcaatagccctctggaacaagacaattcatgtgagataagaaagaagagcc

SEQ ID NO: 182366 - DNA, 98 bp, Homo sapiens
caaagagctgagcacattccagcagggaaacgaactccgatgtgcgcccattgtaaccaggtcatcaggaagcatatgtgcctcttttcttacccaaa

SEQ ID NO: 182367 - DNA, 97 bp, Homo sapiens
ggggctgctccccaggacctgagcaggaacctggagttttcagttcttggccaggctgactgagagatttgtgctgggagtggatatgttcgtggag

SEQ ID NO: 182368 - DNA, 100 bp, Homo sapiens
cctttcaagtgcatgcagctcactgatttcatcctcaagtttccgcacaggcttttgaacacttgcagcaattagaattaataaagcccatggaaagaac

SEQ ID NO: 182369 - DNA, 82 bp, Homo sapiens
gcctgccctgctcctggtggcacccagtggcctgtactactgaggacaagaattttgggcagatttgaatgccatgaacgtg

SEQ ID NO: 182370 - DNA, 100 bp, Homo sapiens
cgataattaaagagtaaagttgtgctcaacgagtacaggggctcaggtccaggtggcaggggatatgctacccaactcaactgagcgggccatcactatt

SEQ ID NO: 182371 - DNA, 100 bp, Homo sapiens
cagctttgtcacttttgaagcgctggagaatgctgaccccctgaaggtgtacccgccactgaaggggagcttcccggagaacctgagacaccttaagaac

SEQ ID NO: 182372 - DNA, 75 bp, Homo sapiens
tgctgtttctgtcagtcaccatgtgtctttcagatgcttgcacataccacccaggtgttccggtctttcacgatg

SEQ ID NO: 182373 - DNA, 101 bp, Homo sapiens
cccacggctgccgtacaaagtagccaactgtgtttattccccagtccaaatactccgttgaagaagatgttggtgagctgttcattcccatcaggaggagc

SEQ ID NO: 182374 - DNA, 100 bp, Homo sapiens
gttgataccaatggaatcacggtttttggaacaaggattttggatgaagaagtttttgagccaaaagaatgcaatggtgtaaagattccagttgatgcca

SEQ ID NO: 182375 - DNA, 93 bp, Homo sapiens
tatattaaaagagaaagtaaaagaattgaatttacatgaggcctcaggagtgcaagtagctgatgaagtatgtcgcattttttatgacatgaa

SEQ ID NO: 182376 - DNA, 75 bp, Homo sapiens
gtgaatgtgtttgctctcatgaacatgcaatgagaagactgatcaatctggaacccttaacattcagggatgtgg

SEQ ID NO: 182377 - DNA, 83 bp, Homo sapiens
cggacggaggctccgggcacccccgagggccccgagcccgagcgccccagcccgggtgcattcatccctggagcgcccgtcca

SEQ ID NO: 182378 - DNA, 75 bp, Homo sapiens
cctgttctcatcaccatggcaacaggcaatagccctctggaacaagacaattcatgtgagataagaaagaagagc

SEQ ID NO: 182379 - DNA, 96 bp, Homo sapiens
ccggccgcaggcgggacccggcggggcgcaccacagagaccggcttcaatatcttcacccagcatggtatggaaggctttgttacaagaaatgccg

SEQ ID NO: 182380 - DNA, 101 bp, Homo sapiens
ggaggccatccggctgcgggaggaggccatcctgcagatggaggattttttatcaagcagaaatgcatcgaacaacgagaatcaagatcactgagctaaat

SEQ ID NO: 182381 - DNA, 75 bp, Homo sapiens
gcctcgtgtcacatctgaaactcatctgtacctcacttagaaagggtgtcaaattgagaaccaggtagatcccca

SEQ ID NO: 182382 - DNA, 99 bp, Homo sapiens
attcagcagagagctattattccctgtattaaaggaacagtacgtatttggcattcaagcacctaccggcttgagagcacactgaattatggaatggag

SEQ ID NO: 182383 - DNA, 76 bp, Homo sapiens
agaaccgtgagaagtaaatttctgtttttggttgaatctggcgatgtggaacccatggatatggagggctgactat

SEQ ID NO: 182384 - DNA, 124 bp, Homo sapiens
ctggaaggacgacgacaaacacgtcatgaggaaggagcagcgcaagccagcagaaaactgagcttccggtcacagagaacgtgcagacgattcccccgccatatgtggtccgcaccatccttgt

SEQ ID NO: 182385 - DNA, 99 bp, Homo sapiens
cgggattccgccgttggtattcaggtccaacactaagactgtgtccatgttagaactcatagaagggcatatctggaatctgaagttgctatatctgag

SEQ ID NO: 182386 - DNA, 73 bp, Homo sapiens
acggcatcttgtcttgttatgaccacagagtttggtggtaatccatttgcttccttggtgagcaatacatcct

SEQ ID NO: 182387 - DNA, 75 bp, Homo sapiens
ccctgctaaaccagtacagacaatcactccacatggggatgttcgtctaaccccagaagactttgctagagctca

SEQ ID NO: 182388 - DNA, 74 bp, Homo sapiens
ccccggaaaaccttcgcctcaagcaacagagtgagctccagagtcaggtgcgcgtggaattcatggacgacacg

SEQ ID NO: 182389 - DNA, 100 bp, Homo sapiens
ggaattgcatgggaaaatcatggaagttgattactcagtctctaaaaagctaagaatttcgctaaggagtttgtgatcagtgatcggaaggagctggagg

SEQ ID NO: 182390 - DNA, 100 bp, Homo sapiens
ccgagggtaggaccttccaatcagccatctacatcagctcgtgcccgtcttattgatcctggctttggaatatataaggctcatccaaaatacttgagtt

SEQ ID NO: 182391 - DNA, 75 bp, Homo sapiens
gccgattcctcctccttggtcgccgcgtccttggctggcgtattcctggtcgggtggcttccagtggtcttcagt

SEQ ID NO: 182392 - DNA, 74 bp, Homo sapiens
gtttcgtgagtttttactgactcgaggtaagaatgattgatgttggctgatattggagtgctcattcacatgaa

SEQ ID NO: 182393 - DNA, 100 bp, Homo sapiens
ggaatttctcctggggctcagagtattaaagagtctattgttggggaaatcagacgggaaattgtaagtggacttttggcagcagtatcttcaagtaaag

SEQ ID NO: 182394 - DNA, 100 bp, Homo sapiens
agaaactgaggcatggaaatgttaaagtgctttagcctggattgcacagcagaatctgcaaaatggctgataatttggatgaatttattgaagagcaaaa

SEQ ID NO: 182395 - DNA, 74 bp, Homo sapiens
gaccccagcttttcagaactgcagggaaacagccatcatgagaaagaatcttcaagagggagacatagggaaaa

SEQ ID NO: 182396 - DNA, 98 bp, Homo sapiens
gcgtggctgccggggaggccagagcgtggagcgctgcgcggcgcggcggccgggccctcgagacggggacggctgagtcatcactagagagtgggaag

SEQ ID NO: 182397 - DNA, 100 bp, Homo sapiens
tgggttatgctcaaggaagactagagtttccagagtgtggattctttggcatgtatgacaaaattcttctctttcgccatgacatgaactcagaaaacat

SEQ ID NO: 182398 - DNA, 100 bp, Homo sapiens
caccttctgtggaaaggaagctgcacaggaagccgtgaaactggttgactatagtcaatggggccaatggagccaagtgtatggaaacccacaacagtat

SEQ ID NO: 182399 - DNA, 100 bp, Homo sapiens
tccagccaggagacatagtcatgacctcagttggatgaacccattccactgtatgaggcaaaagtttccatggaagctgttcagaaaaatcaaggaagaa

SEQ ID NO: 182400 - DNA, 100 bp, Homo sapiens
acccccgacagcgccatggcccagattctgccaattcgttttcaggagcatctccaggcaccacactgtaactcgaggcatcaccaaaggcgtgaaggag

SEQ ID NO: 182401 - DNA, 75 bp, Homo sapiens
gaaaacttcactttcttcattcacaatcccaagcgccaggaccttgaagttgagctccgccgcatgcaagagatg

SEQ ID NO: 182402 - DNA, 83 bp, Homo sapiens
tacagacagctcaggctgcccagatggtggctcccggagtccagacgattgcctacagcattttatgggacttgaagtttttg

SEQ ID NO: 182403 - DNA, 74 bp, Homo sapiens
ctcgagtaaaagtggcagaagatggttccattattttggatgaagaaaggcacgtgtggttctcaaatataggc

SEQ ID NO: 182404 - DNA, 100 bp, Homo sapiens
aaggagccactcatttatgagagcgaccgtgatggggccattgaagacatcatcacagatggcagtggcagcaccatgatgcaaaccaagaccttctcct

SEQ ID NO: 182405 - DNA, 100 bp, Homo sapiens
gcaagcagcaggagctggaggccgtgcggaagaaatattattcatctgtgccagaggaaggaggggcaacccatgtctatcgttatcacagaggcgagtc

SEQ ID NO: 182406 - DNA, 82 bp, Homo sapiens
gcgtgcgtgctggcgtgcgttcattttcagcctggtgtgggaagaggactgtcagaaggacgtagaaggcacggttttactg

SEQ ID NO: 182407 - DNA, 75 bp, Homo sapiens
gaggtcaacctgcgcccccagatgtcccagtgtcaaatcaacagtgccttgacatctttccacactgctttggaa

SEQ ID NO: 182408 - DNA, 50 bp, Homo sapiens
ccaggagaagctgaagctggagggtgaccatgaagagtttaaccagtgcc

SEQ ID NO: 182409 - DNA, 50 bp, Homo sapiens
aagaggcgtttctataagaattgccttcgttcagaaaaacctggtctatg

SEQ ID NO: 182410 - DNA, 99 bp, Homo sapiens
gaacaaaggaaggggagcccgggacccccgggggcgcaggtcttgagagctgatgacaataacatgggcaatggctgctctcagaagctggcgactgct

SEQ ID NO: 182411 - DNA, 98 bp, Homo sapiens
aatgtgcctgtgccaccagaaggaagtgaggccaatgaagaactgcggcagaaatttgagaaggggcttgttccctgcaactaccttgaaccagttga

SEQ ID NO: 182412 - DNA, 74 bp, Homo sapiens
tgggctctatcaaggaaaacaagtgtctgcttatgtcgcctccccagtttaaattagacccccgcctagctcga

SEQ ID NO: 182413 - DNA, 75 bp, Homo sapiens
gtggaggaagtacagccagcaacttcacatgtatcattctccgagcctgatattccgtcctcaaaaagtactgag

SEQ ID NO: 182414 - DNA, 98 bp, Homo sapiens
tggaagaaggccctcaccagaacccaacccttggacttcagcctccagaactgtgagaaatacatacctgctgtttatggtctcctgatcctggctga

SEQ ID NO: 182415 - DNA, 83 bp, Homo sapiens
cagcgctgcggcctttcggcagccgaacggccgcggcagcgtgagtgcatctccatccacgttggccaggctggtgtccagat

SEQ ID NO: 182416 - DNA, 100 bp, Homo sapiens
gcatttcaagctgccaaggtggagagagggattacagaaaggagaacaccttatttcagacgagctcatctgcgcctttgtttagaacgcttaaaagttc

SEQ ID NO: 182417 - DNA, 80 bp, Homo sapiens
tcacttgttccctccaagacaactgaatggtgaaatgacaatggatgctctgttggctcgattgaaacttctgaatccag

SEQ ID NO: 182418 - DNA, 74 bp, Homo sapiens
agggaaccctggtcaccgtctcctcagctgcatcttcctcccgtgaggctggccgagctccacgctgatctgaa

SEQ ID NO: 182419 - DNA, 88 bp, Homo sapiens
cgcgaatatcgtcatcgttagaagatactgagccttcataagggttgactacctcagatttgctgcactcattgtggacttcatgtgg

SEQ ID NO: 182420 - DNA, 98 bp, Homo sapiens
gagagagagaggcagagagggagagagggagagtgacagcagcgctcgcaggaggccactgtctgcagctcccgtgaagatgtccactccagacccac

SEQ ID NO: 182421 - DNA, 96 bp, Homo sapiens
gtcttttgtgctcccctcccccatcaaaggaaaggggaaaatgtctcagtcgaaaggctaaaagagatgctaagagaatgcctgcaaaagaagtca

SEQ ID NO: 182422 - DNA, 82 bp, Homo sapiens
gcctcgctgggcagcctcaacatcccctacaagatcgaggccgtgcagacacatgattaagtaccggtacatcccgttcaca

SEQ ID NO: 182423 - DNA, 100 bp, Homo sapiens
gtttgaagtcaacattcgatttattggaggcctacttgcagcatattacctatcaggagaggagcctcaaggaataggttctcctagtgtctatcatgca

SEQ ID NO: 182424 - DNA, 122 bp, Homo sapiens
aggacgagggccagctgacggagatggtgcagaagatggaggagagtgcaaattcacctgcaccagtggtaaatgcttgtatcttggttcgctggtctgtaaccaacagaacgactgtgggg

SEQ ID NO: 182425 - DNA, 82 bp, Homo sapiens
cttttccctctccctttccctaagatgaaggatttgggggcagagcacttggcaggtcatgaaggggtccaacttctcgggt

SEQ ID NO: 182426 - DNA, 82 bp, Homo sapiens
tgcgactcctggaccaccgggcgctggtctgctcccagccggttaatttggagtggcccctggagtcagtttcctacaccat

SEQ ID NO: 182427 - DNA, 88 bp, Homo sapiens
ttgattacccgttaagtcccccaaagatgagatttacctgtgagatgtttcatcccaacagttttgattcccaccatggccatcaccc

SEQ ID NO: 182428 - DNA, 75 bp, Homo sapiens
ttctctacgggatctcatagcagattcaaatccaatggaacaatttgaaactgaattaaagtataaaatgacaat

SEQ ID NO: 182429 - DNA, 98 bp, Homo sapiens
agaaggtcacggtccccaagacccagcaaactgccaaggacttgccaacattcaaagacaatgacttcctcaatgaagggcagaagctgcatgtggga

SEQ ID NO: 182430 - DNA, 100 bp, Homo sapiens
aagaactggaggtttgtgcaatttgagaccggtcggcactgtgcagagatcagagtactaagagacagtgctatgctggaaaatgagaagaagaagcgtg

SEQ ID NO: 182431 - DNA, 89 bp, Homo sapiens
agtggtataccaggaaattctgttctactcgtcacaaatctcaatcctgatacccctccacgtcgctgcgcgcaatggcttaaaggtgg

SEQ ID NO: 182432 - DNA, 100 bp, Homo sapiens
agaaaaagcatccccgaggaggaagacgaatcgttaaacatctgaaagggtcagtgataccaagaagaagcaggggatgaagaagaggagcaacagtgaa

SEQ ID NO: 182433 - DNA, 75 bp, Homo sapiens
caaatttagagaaacctcggcagatattgatgatgttaagaagttcaaaccgggttacctggaagctactcttaa

SEQ ID NO: 182434 - DNA, 76 bp, Homo sapiens
atttcatccctcgtcgaaaggattggattggcatctttagagaactttatattgctgttggaatatctggagccat

SEQ ID NO: 182435 - DNA, 75 bp, Homo sapiens
ttggtgaaactgaatcacaggagatatttccagaatcttgcctcctggaatccttcaaatcctgaatgtctctta

SEQ ID NO: 182436 - DNA, 100 bp, Homo sapiens
atctccctgctccgcagcgacatcaccaagctggaggtggacgccatcgtcaacgccggtgaagcaaatcatggaggaggctgtcaccaggaagtttgtg

SEQ ID NO: 182437 - DNA, 100 bp, Homo sapiens
ttgctgtggagcatagagacagggaagtgcctagtcaagtacgcaggccacgtgggctcaggacttcatagacctcacgttgtcgaagactcaacgaaag

SEQ ID NO: 182438 - DNA, 74 bp, Homo sapiens
gcagctcagcttctgtccccaagccaggtggagccgccaccaaaatgcagattttcgtgaaaacccttacgggg

SEQ ID NO: 182439 - DNA, 75 bp, Homo sapiens
ctccaccacaaaccaggccctttgctacccggggacagtgccttcagtggtttgagtccagccaatgacactgga

SEQ ID NO: 182440 - DNA, 74 bp, Homo sapiens
cggacggggagctgaacgtggacagcctcatcacccggctgctggaggttgctgattgttggaggttcttttgg

SEQ ID NO: 182441 - DNA, 71 bp, Homo sapiens
ttgatgctgaacttcaccgttaagaggctgggaggcggcagaatgcagccagaggagggcacaggctggct

SEQ ID NO: 182442 - DNA, 82 bp, Homo sapiens
aggagaagatttgcagtggtggcctgataagtggaagtatgcgagacttaagagctcaagtgactagtggtctcctgccatt

SEQ ID NO: 182443 - DNA, 96 bp, Homo sapiens
aaacctcatagcagctgcctgccagaatggaagcatacagatctgggaccgaaatttgactgtgagacatggaatccattaaaattgcattatcag

SEQ ID NO: 182444 - DNA, 100 bp, Homo sapiens
cagagacgatggtcggaatcagatttgaaaatgaaagtcttttatcaaaatacaactcaaacctagctactccaatagcaattaaagcagtgccacccag

SEQ ID NO: 182445 - DNA, 137 bp, Homo sapiens
agaacatttacttaacacatcatgaaggctagtttggatgtggaggggaatagactccatctatccatatgagccaccctgaagggtcccttcccaagcccttagggaccgcagaggacttggggaccagcaagcaa

SEQ ID NO: 182446 - DNA, 75 bp, Homo sapiens
cgagcttccctcgtggccgacggaacaatgaagcatgactatatgaaggaagaggaaggttttcctgaagatgag

SEQ ID NO: 182447 - DNA, 98 bp, Homo sapiens
cggccgctgcctggacgacgtgaaggagaaattcgactatggcaacaagtacaagcggcgggtgccccggggtgttctaaggatacattttattgaag

SEQ ID NO: 182448 - DNA, 75 bp, Homo sapiens
ggtccgtgcgcccagcgtcccagggcccaggccgagcagccgccgccatgtctgcgcatctgcaatggatggtcg

SEQ ID NO: 182449 - DNA, 100 bp, Homo sapiens
aacagaagaacctcagaacatacccaagaggacaaatcccccagaggatcaagctcctccttcctcccttttagttcataagcttattttccagtacgtt

SEQ ID NO: 182450 - DNA, 97 bp, Homo sapiens
attggccacctacagaaacaaaatgtcaacaaattgatggggatagctgggagtatggccaccctgctccacgatgcggtaatgaatccagcagaag

SEQ ID NO: 182451 - DNA, 88 bp, Homo sapiens
agaatactgtgaattatgcaagcacagatttgcttttacaccaagctacagctccagttggaggtccaaaacgtgttctcgtgactca

SEQ ID NO: 182452 - DNA, 85 bp, Homo sapiens
aagcaatgtttgaacaaactcgaagaacagctgtggaaagaagttgcaaaacactggctgcagaaccttggcctgaaaatgctac

SEQ ID NO: 182453 - DNA, 80 bp, Homo sapiens
cttcaccctttctggagattattataaccgtgctctttcagactaggactcaatgaaattgctgcccccatgttcctgag

SEQ ID NO: 182454 - DNA, 100 bp, Homo sapiens
accagtgtcagcagtacgtggtctttgagaggagtgccaagcagggaagtgttcgccagttactacatgaaaagataagagatgcttatactcacccaca

SEQ ID NO: 182455 - DNA, 82 bp, Homo sapiens
aagatccagaaaagaggcaaagcaagcgagaagtcgcgggcccagcccacagcaggggcgtctctggccgagcctctttttg

SEQ ID NO: 182456 - DNA, 112 bp, Homo sapiens
cgctagggaagatcgcaccgcggacgcccgctgagcttggcgcacgggccgaccagggtttccaggcctgaggtgcccgccctggccccaggagaatgaaccagccgcagag

SEQ ID NO: 182457 - DNA, 124 bp, Homo sapiens
cagctctgcagccacatactatccgtttgttcaggaaccaccagtgacagagaaagaccacagcaagattctttcattcgtctcctcctagcctgggggaccaggctcgaactgaccctggaca

SEQ ID NO: 182458 - DNA, 100 bp, Homo sapiens
ggacacgagtttctttaaagtctccaagaagatgcccaagatcccagtgttggttagattattggaagcgctggtgtcatttcttgatttctcggataag

SEQ ID NO: 182459 - DNA, 101 bp, Homo sapiens
ccgggccgctcggcccccatgcctgcccgaccgcgctgccggagccccagatgaccgcacctcgagcaggagtggggatgccacgtctgcccccagcgccc

SEQ ID NO: 182460 - DNA, 104 bp, Homo sapiens
aacacaggagaggaaggaatggctgctggtctcctcacagctgggccccggacagttgcatctataaaaaggtttgcccctttaatggtggctcttttttggtt

SEQ ID NO: 182461 - DNA, 100 bp, Homo sapiens
cgggaagatcctggaggtggatctgaagaacggctcagtcaaaggccaactgtcgctgaactccttgccaggaagattctgaggtttaatgaatatgtag

SEQ ID NO: 182462 - DNA, 100 bp, Homo sapiens
gaacgtggggcaggatggacggcaaaaaaactgattgcttatcaacgagaattccttgctttgaaagaacgtcttcgaatagctgaacacagaatctcac

SEQ ID NO: 182463 - DNA, 71 bp, Homo sapiens
gctctgaagcgcacgacctccgactactttctccttcaagtactatatgtctgcgcgccacatggcgctgt

SEQ ID NO: 182464 - DNA, 100 bp, Homo sapiens
ggactgcacttttattcatcaattcatagaatgccagactccctacaccatcatcaccttccccttcctgtttgctgtgatgttcggggatgtgggccac

SEQ ID NO: 182465 - DNA, 100 bp, Homo sapiens
acagccccatccaggttcccatggttgccggctcccctctcaggacaacccagatgtgcaacaaagtgcgatggtgctgcagggtgcacagctgatcgcc

SEQ ID NO: 182466 - DNA, 90 bp, Homo sapiens
gacctacactagtcgcgggagccacgcagaggacgccggaacaccctggaagccgagaaatgatcccagattacaggaatgcagtaatcg

SEQ ID NO: 182467 - DNA, 100 bp, Homo sapiens
ggtttggctttccagagggcagtgtagagatgccagaagtgggtggagaactgtaggagagcagacttagaagataaaacacctgatcagctaaataaac

SEQ ID NO: 182468 - DNA, 75 bp, Homo sapiens
cctataaatctcgcccaaacaggaaaggtctctgaaagaagatgaatttggctgagatttgtgataatgcaaaga

SEQ ID NO: 182469 - DNA, 100 bp, Homo sapiens
ctggcatgttctccttgagcaccatccggggtcaccagttctgggaggtgatcagtgatgaacatggcatcgaccccaccggcacctaccacggggacag

SEQ ID NO: 182470 - DNA, 100 bp, Homo sapiens
cggaaacagagcacccaagatgaagatgctgttagcctttgcagtctcgacataagtggcggcgactggcggcgcgatggacctgaccgggctcctgctg

SEQ ID NO: 182471 - DNA, 75 bp, Homo sapiens
agcatcacctctcagcacgattttcccgagagttcacagacatgcaagaaagcacttcagccaagcagaagggag

SEQ ID NO: 182472 - DNA, 100 bp, Homo sapiens
ggcttacacccgaggtccctctttggggtggctctttgctaagtgctgctgttgcttcccgtgtagaggtttttcgttggaatatacgttgcacatttat

SEQ ID NO: 182473 - DNA, 101 bp, Homo sapiens
gcaaaactgtacaatctaaagtggactgcattttggaaaccacccctactcctaatcccccgactacagaagaggagaaaacggaatctaatcaggaggtt

SEQ ID NO: 182474 - DNA, 100 bp, Homo sapiens
aggcgcctcttcttagttgatgatttagttgattctctgaaggtgtcagctgtgatgcatgtttaaaaggaaattttcgaggtcgcagatataagtgttt

SEQ ID NO: 182475 - DNA, 83 bp, Homo sapiens
ctttttgcttcaccgacatagtcattatgccgaagagaaaggacttcgagtaagaaggtgatttacagccagcctagtgcccg

SEQ ID NO: 182476 - DNA, 100 bp, Homo sapiens
gatagcagctgcgattgaggaagagcgagccagcgcccggagcaagcggagctcccccaagagccggaaagggctgacagatgaagagattgatatggcc

SEQ ID NO: 182477 - DNA, 110 bp, Homo sapiens
cgagcaccagctcctgaccaaccccaaggctcttgcagccaatgccggaacaggatttgctgttgctgagcctcaaatcgcaatgttttgtgggaagttaaatatgcatg

SEQ ID NO: 182478 - DNA, 75 bp, Homo sapiens
ccaagcggcagtgatttgcctcaagatcgtcagtatttaaacagatcacatcatgcgtgagtacaagctagtggt

SEQ ID NO: 182479 - DNA, 75 bp, Homo sapiens
cgcatctgtctgaggagcggtcagtgacgcgatggagcgggcaagactatggaaatgatgttagacaaaaagcaa

SEQ ID NO: 182480 - DNA, 82 bp, Homo sapiens
agaggacacgaggcggcgggctggagacatggaccgcggcgagcaagtgagaaggcaaccaaagtgcaggacatcaaaaaca

SEQ ID NO: 182481 - DNA, 82 bp, Homo sapiens
cgacagcaacagctctgccggctggaagagacgctctcctggtctgtgttctgactctttggaaaagagcttaaggatcact

SEQ ID NO: 182482 - DNA, 100 bp, Homo sapiens
ccgagtgtgagcggaaaggggcccggcgtctgcctcgagactgaagaccggtgcaggagaacccggggaggaggcccaggctctgctggagggcttcgag

SEQ ID NO: 182483 - DNA, 50 bp, Homo sapiens
catccctttaatagaaactcaagttcttctgtgtggcagttcagaatgat

SEQ ID NO: 182484 - DNA, 74 bp, Homo sapiens
tgtgcaaacccgagagaactgggacctttgcaagaatgtggaactgctgagtgcaaagctaaggatgtatcaaa

SEQ ID NO: 182485 - DNA, 100 bp, Homo sapiens
taaggctctgttccttagagatccaaaggaaaggcagactacaagttactgagcacctccctgagaaaattgaaagtagtttacaggaagatgaacctga

SEQ ID NO: 182486 - DNA, 75 bp, Homo sapiens
ctcgcctgtctccgtcggaagggagcccaagctttgcagaggggaaagacgcctcagccttcgccgccaagatga

SEQ ID NO: 182487 - DNA, 100 bp, Homo sapiens
cagacgttagcgtgagtgatcactctcaatcccggtctttcccagggaactccgatgaagtgttccaacaaaatgagcgagtgaaccaagaagaggatga

SEQ ID NO: 182488 - DNA, 87 bp, Homo sapiens
ggtcttcgcccaggtggccggcgcttcagctctgttcactcggagagcccgccggctgcctgagtgtgggttcgggtggacacagcc

SEQ ID NO: 182489 - DNA, 74 bp, Homo sapiens
gtgtgttcctgtggggcgtagcccactcgaacatggtccaagacaattcctgggaaagttcagttcttctcaag

SEQ ID NO: 182490 - DNA, 100 bp, Homo sapiens
caaggacgtcctggacagcgaaggggaaagcaggcaggatgggagagtcgccgatagaaccacctcttccctgcctcctgggcttgggggaagcttgaat

SEQ ID NO: 182491 - DNA, 83 bp, Homo sapiens
tatccaggtgctgagccaggagcagcagcctttctgtgtcgtgaaaactacccctaaaagccaaaatgggaaaggaaaagact

SEQ ID NO: 182492 - DNA, 100 bp, Homo sapiens
ccagctcgcaggaggaggaggtcatcgacggcttcgccatcgccagcttcagcaccctggaggccctggagaaaaagcttgtggtgaaggggggcaaaaa

SEQ ID NO: 182493 - DNA, 75 bp, Homo sapiens
cggcggcggccgaggaggaggagggggaagcggcggcggcaaaggggttggatgactgcctgcaacaatatgtcc

SEQ ID NO: 182494 - DNA, 90 bp, Homo sapiens
ttcgcattttggcattgacatttaattttagggtcctttatatagaagggagagtagagtaagaaggcagtgctttccatcaccactggt

SEQ ID NO: 182495 - DNA, 82 bp, Homo sapiens
tcttctctcacctaccccagtacagcagacaaaactctctgacccagtttatgagacatatctgaagagatggattaagaat

SEQ ID NO: 182496 - DNA, 75 bp, Homo sapiens
cgggggcctttcctgaggacggcgtacggagtgtgggtgttacacataatattgcattacttcgagaggtgataa

SEQ ID NO: 182497 - DNA, 115 bp, Homo sapiens
agctggctgcagtaaaaatcattaaattggagcctggtcctcatgctgataccgccagtggatgccagaatttgcagtgtggttttcgagcctgctgccgctctggcgaatgacc

SEQ ID NO: 182498 - DNA, 83 bp, Homo sapiens
ctgctgcaggccatcgacccccagagcaacatgaacacaatgacgtacagaagaaaacctttaccaaatggataaatgctcga

SEQ ID NO: 182499 - DNA, 83 bp, Homo sapiens
gttgcaaactgttgcaaagaaattcgacttcagtaatttgagtagtagcaacggcagcctttaacagttgagcacatgtatga

SEQ ID NO: 182500 - DNA, 75 bp, Homo sapiens
cggcgctgctgctcgggctgctcttggagaggccacaagaggaagctgaatgaagaggacgccgccagcgagtcc

SEQ ID NO: 182501 - DNA, 82 bp, Homo sapiens
gtaggaaacattatggatctgtggagctggaaagcaatctcccgggcaggcctccagcatctggctcctgcacatcccctca

SEQ ID NO: 182502 - DNA, 95 bp, Homo sapiens
ttcaattagaacaaatggtgtgcttctatttataccaagtcttcccatgcacaagatgattaatacagatcttagcagaatcttgaaaagcccag

SEQ ID NO: 182503 - DNA, 75 bp, Homo sapiens
aggaaaatgttggggcttttcaggaagcataataagattcctaggagagagcaagccacatcagtgctcctggca

SEQ ID NO: 182504 - DNA, 74 bp, Homo sapiens
ggagaggagatgcacacggcactcgagtgtgaggtagttaaaccagagagcaatgacaaagaaacagaagctgc

SEQ ID NO: 182505 - DNA, 100 bp, Homo sapiens
cggaaaccgatctgcccgttgtgtttgtgaaacagagaaagataggcggccatggtccaaccttgaaggcattgtgtccagatctggcaccctgacttat

SEQ ID NO: 182506 - DNA, 100 bp, Homo sapiens
gaacttggtagtagtcaatcagcagggaggctgtgacattcaaggatgtggctgtggtcttctccagggaggaactgcgactgctcgatcttacccagag

SEQ ID NO: 182507 - DNA, 100 bp, Homo sapiens
aactttatggagaccgagtcctgaaactgggaactaacatgaaaggccgagggggacggcaagatgcacatcaccctctgtgacttcatcgtgccctggg

SEQ ID NO: 182508 - DNA, 96 bp, Homo sapiens
cctgccgtctgctcttctgcctcttgatctccgccaccgtcttcaggccagttatagctgaggtggtaccagtttaagaagtgagaacttcttcac

SEQ ID NO: 182509 - DNA, 75 bp, Homo sapiens
cagagaatgacacaggtgaaagttacatggacacagaacagtatgaagaagcagtacgagactatgaaaaagtat

SEQ ID NO: 182510 - DNA, 74 bp, Homo sapiens
gataggctgcgctaccggaatgtcatccagcgagtgattagccaggactaaaagaagtggtagaatcctgtcga

SEQ ID NO: 182511 - DNA, 100 bp, Homo sapiens
caggagctccggagaggaaccctccgaaggtgacttcagaactggagagccaacagaagttggggataaaggtaactctgtgtcagcaaatcttggcgac

SEQ ID NO: 182512 - DNA, 100 bp, Homo sapiens
aaggctgcgagggactaagagcagagtagagttggctttgtgggacacagctgggcaggaagattatgatcgcctgaggcccctctcctacccagatacc

SEQ ID NO: 182513 - DNA, 100 bp, Homo sapiens
gaatggagctgctggaccggcagctgatgttctctcagtttgcacaagggaggcgacagagacagcagcagtgtctttctcgagaagcaggtggaaacat

SEQ ID NO: 182514 - DNA, 100 bp, Homo sapiens
ccgagggactgggagtcgttagtgaggcgtggtgaccaagatgaagatgcagaggaccattgtcatccgccgagactatctgcactacatccgcaagtac

SEQ ID NO: 182515 - DNA, 100 bp, Homo sapiens
cgtggaacctcataaaatctccaagaaacatcattcacccatactgactagtttcacatctctttgggtgtcaaattgagaaccaggtagatccccacca

SEQ ID NO: 182516 - DNA, 51 bp, Homo sapiens
atgcctacagcgacaacagcctggaccccgacatcaaggagcacgtgaaac

SEQ ID NO: 182517 - DNA, 82 bp, Homo sapiens
gccgatccagcctgcggagcctgtggggcagaaaaggcaacagatggctccctgcaaagtgaggattggacgttgaatatgg

SEQ ID NO: 182518 - DNA, 75 bp, Homo sapiens
cccctccaaagatttactttcccatccgtgactcctggaatgcagagctcttccccgcagctctgggagacgtgg

SEQ ID NO: 182519 - DNA, 87 bp, Homo sapiens
atgtcaactatgagaagctcaaaactgacattaaggtggcagaactggtgaagccattgtagatgctgcgctgagtgctctgcgcca

SEQ ID NO: 182520 - DNA, 90 bp, Homo sapiens
gaagatctggtcagctatgggaccgggctggagcctctggaagaagttcgatcctttggtacagaagacagaccgacagatcgtccaata

SEQ ID NO: 182521 - DNA, 100 bp, Homo sapiens
gatagaaaacggcgagagtgggcgagaacgtccactgcgggccggcgaaagctggtcctcgatgggcttcctggaatattggtgtgtttatttgcatcag

SEQ ID NO: 182522 - DNA, 100 bp, Homo sapiens
cccgcggctagccccttcccacaggctctctccgctcgattttgtcaccgttatgtgggaagcgaatccagccaagatagccaggttaaccaaacgcttt

SEQ ID NO: 182523 - DNA, 51 bp, Homo sapiens
tttaaaacagtattacttgcgggaaatcctcattgacgattcaatttgttg

SEQ ID NO: 182524 - DNA, 90 bp, Homo sapiens
cagcatccttggggagagcagcaccgaggccagcaagacgctgcccgccatcgagttaagtgggcagaccaacatccacctcagcaaaaa

SEQ ID NO: 182525 - DNA, 75 bp, Homo sapiens
caacagtgatgaggaaagctgtgaaagttctcaagctttgcttgtcaggcccttggggaaggagcacaccgtgtc

SEQ ID NO: 182526 - DNA, 88 bp, Homo sapiens
gatctcagcgctcaccgacttctctggtgttctttgcagaagatgtgggttcaaacaaaggtgcaatcattggactcatggtgggcgg

SEQ ID NO: 182527 - DNA, 98 bp, Homo sapiens
cagaattcagaaggagctggcggacatcactttagaccctccacctaattgcagtggatgaggatcgcagtacggaacctgaccgattgcaggtgttt

SEQ ID NO: 182528 - DNA, 80 bp, Homo sapiens
cagaccctggagcctcagttggaagcagccgatccagcctgcggagcctgtggggcagatggctctgagagattcctctg

SEQ ID NO: 182529 - DNA, 101 bp, Homo sapiens
gcgggcgcggccaccgggaccggcgtgggagcgacgccagcgcctcaacaggatcaaatctaaatcgctgtggtttccgaggctcttcatacctgggtatt

SEQ ID NO: 182530 - DNA, 75 bp, Homo sapiens
gtgtcccgaggaagtgcaagacccgcttttgtctggtcctctgagccccagtgagagtttcctgaggtacctcac

SEQ ID NO: 182531 - DNA, 98 bp, Homo sapiens
ttaagcatgaaaatattgttgccctggaagacatttatgaaagcccaaatcacctgtacttggtcatgcagctagatggtgaattgtctttgagtcgg

SEQ ID NO: 182532 - DNA, 100 bp, Homo sapiens
ttgtgggccgccgtcggcagcaagaacagagagagaggtggacagatctgagagatactgaggagtctgagggatttggagacaggctgttccttaagca

SEQ ID NO: 182533 - DNA, 113 bp, Homo sapiens
cacgacttgaagacacgcacttatcattcagtgggaaagggggctgtatacagctttgatccagtagggtcttaccagagagactccttcaaggctggaggctcagcaagtgc

SEQ ID NO: 182534 - DNA, 75 bp, Homo sapiens
ggccaacatggcggaacgcaggagacacaagaagcggatccagtcttctcacaagactttcaggattaagcgatt

SEQ ID NO: 182535 - DNA, 82 bp, Homo sapiens
acaaacagggctttgccatccccggctccagcttcctgaccctgctggaaacaacaaccagccttctaaaccaagatctcca

SEQ ID NO: 182536 - DNA, 98 bp, Homo sapiens
gtggagtttgatgttgttgaaggagaaaagggtcctgctggagagcgtggtgctccaggccctgcagggcccagaggagctgctggagaacctggcag

SEQ ID NO: 182537 - DNA, 75 bp, Homo sapiens
ctggtatacacctccttctcccaaggcatccgtgtcattctggaccttactcccaactaccggggtgagaactcg

SEQ ID NO: 182538 - DNA, 75 bp, Homo sapiens
tccccttgtggaattacaagagatttcgactgtggaaggtacctcaataataatgagttgacagcggtaccatcc

SEQ ID NO: 182539 - DNA, 100 bp, Homo sapiens
aaacgagaagaagaagaagtgttagaccagggtacagcaggtacagactgtgcagcaggtacaacatgtctatcccgctcaggtgcagtatgtggaagga

SEQ ID NO: 182540 - DNA, 100 bp, Homo sapiens
atacctgccattgatcccgcacttttcaatacaatttcccaggcatcagatggtgaaggagaaggagacacagaagtgatgcagcaggagacagttccag

SEQ ID NO: 182541 - DNA, 82 bp, Homo sapiens
tcatttagagctgcggaacaggacgccctctgatgcatgtcgggccccaggcctgtggtgctgagcgggccttcgggagctg

SEQ ID NO: 182542 - DNA, 99 bp, Homo sapiens
gagtagctgatcaaaccaaggatggaaattccttgagctcataggcattgctcagggtcagatgacagttctgagactcactgagttgctggaacgagg

SEQ ID NO: 182543 - DNA, 75 bp, Homo sapiens
cagatgatcgtcaagtgaagatctggcgcatgaatgctccatcaagtatgatggtgaaggatgaatatgtgcatg

SEQ ID NO: 182544 - DNA, 97 bp, Homo sapiens
tgaaaagctgagatatgatgattttgaagtcatttcacatcgaagccatgatttaaatatcggcgttaagacagcccacctgaggatattgaccata

SEQ ID NO: 182545 - DNA, 50 bp, Homo sapiens
ctgctcagcctggtgaaccacacagtctcttcttgtgacagtgaggactg

SEQ ID NO: 182546 - DNA, 75 bp, Homo sapiens
gacggtcgtagctgcggtcgcgccgagaaagagaatgtgatcaatgggcaggactacgaagtgatgatgcagatt

SEQ ID NO: 182547 - DNA, 98 bp, Homo sapiens
caatcggcaaggggaattttgcaaaagtaaaattggcaagacatatccttacaggcagagaggtttgaattttgggaagattttgaagaagaccatgg

SEQ ID NO: 182548 - DNA, 95 bp, Homo sapiens
cgtaatgcgactcaaagctgcacggcagtctgtttatgaggtaatccctcagtttgtccagatgaagtatggcctgactggcccttggattaaaa

SEQ ID NO: 182549 - DNA, 97 bp, Homo sapiens
gccgggggagcggggccttccacaccccctccgtgggtgtgtgaaaagttgccagacggccagcattgccactgccagtgcatccgcccaggccagg

SEQ ID NO: 182550 - DNA, 51 bp, Homo sapiens
ttcgcagtggtcgcttcttctccttgctctccagtgaagaagccaagtctt

SEQ ID NO: 182551 - DNA, 100 bp, Homo sapiens
ttaaagagctccacattcaggggaaccgcctcaccgttctgcccccagaactagcagagagagatcatcattgcctgaatttagctttgtgactgcaaga

SEQ ID NO: 182552 - DNA, 80 bp, Homo sapiens
tctccatcacccaccaacaacaccacaataatccacagccaaggtacatgtgaagattttttggcagcttagcgtggaaa

SEQ ID NO: 182553 - DNA, 100 bp, Homo sapiens
cgatcggttacatggacctcagaccagagtggcagagttcctgagttggaggtagaagaagaaacccaagttcaagagatgactttagatgagtggaaaa

SEQ ID NO: 182554 - DNA, 153 bp, Homo sapiens
gtccccgcagctcagcgcccgcagccagggcgggggggatggcgtctccccgactccacctgagggactggctcctgggaaaaatggctacaaacttcctagcacatgagaagatctggttcgacaagttcaaatatgacgacgcagaaagga

SEQ ID NO: 182555 - DNA, 82 bp, Homo sapiens
accggctgttcgaggccttgactgtagcaaccatgtccaagggacctgcagttggtattgatcttggcaccacctactcttg

SEQ ID NO: 182556 - DNA, 100 bp, Homo sapiens
ccaagcgcttccattttcgatcggaagtaaatcttgcccaaagaaatgtagccttggaccgagacatgatgaagaaaggggataaaaacattcagatggc

SEQ ID NO: 182557 - DNA, 71 bp, Homo sapiens
ccttagaggagccatttttccaggttgaaatcacaaagattagacacctttttagataggtgttcttcagc

SEQ ID NO: 182558 - DNA, 83 bp, Homo sapiens
cggattcgccgaggcaccgaggcactcagaggagggtggctcctatggacggaaaacagtcttaagaggcaactccgatggta

SEQ ID NO: 182559 - DNA, 101 bp, Homo sapiens
ctgaaatgagacatgcacataatatagggagaaaactggttgtcctggatgtttgaaaagttggtcgttgtcatggtgtgttacttcatcctatctatcat

SEQ ID NO: 182560 - DNA, 82 bp, Homo sapiens
attggattggcatctttagagaaataatgcaaaaggtgtcccaaggctcctgaccagtgaacaaagatttgagaaagacagc

SEQ ID NO: 182561 - DNA, 76 bp, Homo sapiens
aaataacaagagactcaaaggatcacacagtttcagaaaacgttgtgtgacgtgatcctcatggtccaggaaagaa

SEQ ID NO: 182562 - DNA, 101 bp, Homo sapiens
gctcgacaggcggcgcgggcggcgcatggactggaggaaacagctgccaaatgcaagggactgggtgccaaggttcatacctttgtggtagactgcagcaa

SEQ ID NO: 182563 - DNA, 74 bp, Homo sapiens
gcagcgctggagatcgagaaaccaagatcactccatggatgaaatgacagctgtggtgaaaattgaaaaaggag

SEQ ID NO: 182564 - DNA, 100 bp, Homo sapiens
ataatatggaatgttcttaacccagaagtagctgaatgtgttactccattgctgaggagtgggaaaggaaaacctcttcagcgcaaggtgaaaccaccta

SEQ ID NO: 182565 - DNA, 98 bp, Homo sapiens
gatcttgttagatgacactggtttggcttatatatgtcagacgtatgagcgtttctcccatgttgccatgatcttgctgtgtcagcgtgttatgatgc

SEQ ID NO: 182566 - DNA, 82 bp, Homo sapiens
tgcactacgcctttcaggacgagaaccacctgttcatagccctgatgaagcaagttactctgctctcctaataaatgcaaga

SEQ ID NO: 182567 - DNA, 100 bp, Homo sapiens
gggagaggagtctccaccaggactgaccgctgccgcccagcacgtccagtagccggatcgagctgggagatgtgacaccacacaatattaaacagttgaa

SEQ ID NO: 182568 - DNA, 75 bp, Homo sapiens
tcatggagttcacagaagagtcgaggaggtgatgtacctgctcccccttcaccttctgccataattggaagcttc

SEQ ID NO: 182569 - DNA, 90 bp, Homo sapiens
agaagtgggactggagcgaagtagaggatgccgaggagaaaacagcaggcacccaagcgggcggcagagtatgcagagaacatcggggac

SEQ ID NO: 182570 - DNA, 75 bp, Homo sapiens
aaatctcgcccaaacaggaaagagactaaggtgtcagtatgttcttcaagctgctctgctcctgggcccaagcta

SEQ ID NO: 182571 - DNA, 98 bp, Homo sapiens
agtgcccgcgcagccggtttccggtgcaggtggggaaaatggcggtgtctacagtgttctcgacttcgtcgctggaccgtatccttgatgagcttgac

SEQ ID NO: 182572 - DNA, 128 bp, Homo sapiens
agctgccgaagtcagttccttgtggagccggagctgggcgcggattcgccgaggcaccgaggcactcagaggaggtttggtgcacctcgatttggaggaagtagggcagggcccttatctggaaagaa

SEQ ID NO: 182573 - DNA, 100 bp, Homo sapiens
gaggagaaaaaccatcgaagaatgaaaccggcttgttgtcttcaattaaaaaatttattaaaggaagcacacctaaggtcacctcatcatctcaaggagg

SEQ ID NO: 182574 - DNA, 51 bp, Homo sapiens
gagaagttctagaaaaatgtatgagggttgttggtacagaggaacgtattc

SEQ ID NO: 182575 - DNA, 109 bp, Homo sapiens
gcttgaggggctgcgtgaggcgcggaggcagtaacagatcaactcctagcaatcatgatcggatacagcgtctgaggcaagaatttcagcaagcaaagcaagatgaaga

SEQ ID NO: 182576 - DNA, 82 bp, Homo sapiens
gaggatggccggaggctcgccgacgaccttggacggctgtcctcagcgaggggccgtgcacccgctcctgagcagcgccatg

SEQ ID NO: 182577 - DNA, 80 bp, Homo sapiens
cagcgagggcaaagagctggtggcctcaggtgaaaaaccttgtgccggagccgactactggagatgacagtgatgctgcc

SEQ ID NO: 182578 - DNA, 90 bp, Homo sapiens
caggaacacaacctcaccttgatcagagaggaaaatatgatgttcccaagtggctctctcccagtagcattctgcttcttcaacaaatgc

SEQ ID NO: 182579 - DNA, 100 bp, Homo sapiens
atggcccacctaatattgtagttgccattgcaggaaataaatgtgatcttatcgatgtaaggtgggaagaagagcgctatcctgaaggcatcaagtggaa

SEQ ID NO: 182580 - DNA, 100 bp, Homo sapiens
cggccgatgaagtgcagaggtttttttctggttgaaaggattgttgacaaaaggaaaaataaaaaagggaagacagagtatttggttcggtggaaaggct

SEQ ID NO: 182581 - DNA, 75 bp, Homo sapiens
tacagacttccacaagcaagtcactagaataatcatgggccagactgggaagaaatctgagaagggaccagtttg

SEQ ID NO: 182582 - DNA, 89 bp, Homo sapiens
gacagagcttcctatgtgtgttgagccatgcacattatcttttactgaaatggaaaagaataatttacttctgaaatgggattttgaca

SEQ ID NO: 182583 - DNA, 95 bp, Homo sapiens
cgggacccagtgagcgcgggactacaattcccaaaggacggtagcactcagcgccccgccaacaggcctccggtgtggctgtctctgatggtgtc

SEQ ID NO: 182584 - DNA, 100 bp, Homo sapiens
tatctatccaccatgtgggaggaggaaaatcatcttatcagacgaaggcaaaatgtatggaaattcagttcatgaagataagaagtttcttgacaaatac

SEQ ID NO: 182585 - DNA, 51 bp, Homo sapiens
agcagacagagaagctgctgcagtttcaggaattgaatgatctggcacggg

SEQ ID NO: 182586 - DNA, 75 bp, Homo sapiens
agtgacagctcacccatagaccatctgaattttcacaaacctgtttgcatttatgtcggatcctcagtgaaaata

SEQ ID NO: 182587 - DNA, 96 bp, Homo sapiens
cttgtccagaactctgtcaaatgaagaacactttcaagaaccaggtgtgtctcttgtaaacagcatatagctggattttgtaatcttatccaatgt

SEQ ID NO: 182588 - DNA, 74 bp, Homo sapiens
aggcctccgcgctctacggccgcgcgctgcgggtgctgcaggcgcaaggtctacaaggaagtcttcacgaggag

SEQ ID NO: 182589 - DNA, 100 bp, Homo sapiens
tagatgaagacacacccccaatagtgtcacaatttcccgggttctatggcctggatgagtctgacctcgacaaggtcttccacttgcccaccaccacttt

SEQ ID NO: 182590 - DNA, 75 bp, Homo sapiens
ggagaagcacaagatcatgcacagagatatccttggaacagaagatcttattgtggaagtgacttccaatgatgc

SEQ ID NO: 182591 - DNA, 101 bp, Homo sapiens
accaccaagaaaaaggaaaagcgaattggaatttgagactctgaaaactcctgatatagatgagttttgctgctaatgggattcaagcgcatccagaaagt

SEQ ID NO: 182592 - DNA, 100 bp, Homo sapiens
gagcccctttagccatgtggatacctacggagcacgagaaatacggcgtggacagagctgtgaaccaaccccgctcacggctaacaagcccacccaccat

SEQ ID NO: 182593 - DNA, 90 bp, Homo sapiens
ggtccatagcctctgttcgttttcactgcaggaccaggcacgaaagttagtggatgacagatgtgtggtgcacccagaggccggggacct

SEQ ID NO: 182594 - DNA, 50 bp, Homo sapiens
gcctcagcaggcggggaagatgaaagggagcctcacagtctactcagaga

SEQ ID NO: 182595 - DNA, 95 bp, Homo sapiens
gggtaacatggcggatgcggaagcgtcctacagcaaaagaacttctgaaacacaaattcattgtaaaaaattcaaagaagacttcttatctgact

SEQ ID NO: 182596 - DNA, 51 bp, Homo sapiens
gatggtgaatgtgtgcggacacactctctgttcgggggtcttgtctggatt

SEQ ID NO: 182597 - DNA, 100 bp, Homo sapiens
tacctacctctgccatcctctaccagccgcaactgcgagggctggaggccgcaccagcttctatgaggagtacggtgtcattcgcgacgtcctccagaac

SEQ ID NO: 182598 - DNA, 100 bp, Homo sapiens
cttcttggaaagatatgccaaatttgttaaagagaggatagaaattgaacagaactatgcgaaacaattgaggatgttgcttcagagtgtgaagtcaaat

SEQ ID NO: 182599 - DNA, 100 bp, Homo sapiens
tcttccacagttgtcatttcagcagcgctccacaagtggtggcctatcctagagaatgttttctgagctcttgggaagagtgtgtctcctgctgtgttgt

SEQ ID NO: 182600 - DNA, 75 bp, Homo sapiens
attttaatcagttctgcgtttgaaaggaaacccggagtctccccaggacagtgctatcacccgggatattaaccg

SEQ ID NO: 182601 - DNA, 100 bp, Homo sapiens
tggggtactcaatcctagtactgtgccctacaacattcagagccatatattgaagaccatgtctgggagcttctactttgtaattgttggccaccatgat

SEQ ID NO: 182602 - DNA, 97 bp, Homo sapiens
ggagaaatcgatgatggggaaatagacggtgacgagaacaagtcagtgcgcgaccgtttcaacgcccgccagttcatctcctggctccaggacgtgg

SEQ ID NO: 182603 - DNA, 75 bp, Homo sapiens
ggcccgcgggcccatgaggaggcctggggaccatgggctccaggatcaatggacagcggactgcagcgaaccgct

SEQ ID NO: 182604 - DNA, 75 bp, Homo sapiens
cgtccacctcccgatcatcgagatccgcatcgtggagtgccgaggaatctatggatttcctgaaatatgttgttg

SEQ ID NO: 182605 - DNA, 98 bp, Homo sapiens
agatttttaggtctttcgtggtcagtaaattccgggaaattcaacaggagctttccaggtgcgatgcttcagtacctctgtggtcagaccatttgcca

SEQ ID NO: 182606 - DNA, 89 bp, Homo sapiens
aagagaatgagcctcagctctgttctgtgggctgcactgagtttctcggtgtgagctggaggcatctatcatttcccgtaaaaaagaag

SEQ ID NO: 182607 - DNA, 100 bp, Homo sapiens
cgcgccgcgccctggcggctctagggaccccccccgcgcctgcacttagccccgcgcccgagatgaagggcgccctaatggagatcatccagctcgccag

SEQ ID NO: 182608 - DNA, 75 bp, Homo sapiens
atctcacagctgcagtctaatagtaacacagagctgctaggggagctgatcctggaccgtcacaactttgccatc

SEQ ID NO: 182609 - DNA, 82 bp, Homo sapiens
agggcctcggcggccgctctgcctgcgcgctgctcctgctctgctacctggtgggaggaggagctcgccaagcgcatgaacc

SEQ ID NO: 182610 - DNA, 96 bp, Homo sapiens
aatgctgctcctcaagtggttgttaatcctggagccaatcaaaatttgcggatgaatgcacaaggtgaccgggttattgatgtgggatctgaatgg

SEQ ID NO: 182611 - DNA, 100 bp, Homo sapiens
cacagttcctaccttatgagctcggttttcttatgcttataagagtggaacagcgagtaaccagctcataaatcacatcgaacagtttttggatactaat

SEQ ID NO: 182612 - DNA, 100 bp, Homo sapiens
ccggtgtgcagaaactggtggcgaaggtcaaggccacaaagacaagtatgtgtagagaagtggaatctcctcaactcctcccgcctccacctgccgaggg

SEQ ID NO: 182613 - DNA, 101 bp, Homo sapiens
gaatctgcagcgggcagtaaagcccaacaagaacatgcctcaaaactactcttttgccactcgttaaccacttccgtttgtggggacctcctggtcatgag

SEQ ID NO: 182614 - DNA, 112 bp, Homo sapiens
atcagatcaaccaccaaagtgggaaacattgaaatcaaggccaaagaacagacaggagcaacggcttctgtcatttatgttcctccgccttttgctgctgctgccattaatg

SEQ ID NO: 182615 - DNA, 90 bp, Homo sapiens
cttgagtgtttgaatgccatccttatacatggagttgatattacaaccagtgacactgcagtttcagatacaccacctccaccgccacct

SEQ ID NO: 182616 - DNA, 75 bp, Homo sapiens
cagcagctaggcatcaagtacatcgggatgaggaatgagcaagcgggccgttgctccagggagaactgcaaatat

SEQ ID NO: 182617 - DNA, 98 bp, Homo sapiens
aggaattaagtcaaccacgttctcataccagcctgaagctcttcacagatggaatcacaaataaacttattggctgttacgtgggaaacaccatggag

SEQ ID NO: 182618 - DNA, 101 bp, Homo sapiens
aatatctcatggcctacagggactttctgcagtgcctctgagaacttacgcagatcagccgaaaatgcactcggtgatggaaagagagccactattctgaa

SEQ ID NO: 182619 - DNA, 75 bp, Homo sapiens
ctccctgctgctgctgctcttcgccatcttcatgggcctgcgggcctccaagatgccatggacaatattaccagg

SEQ ID NO: 182620 - DNA, 100 bp, Homo sapiens
tggaactttctcatcttttcagcatctcaaccctgtggaatcttttaactcccaagctcagagtcaagatctccactgaagttggcatcacaaatgttga

SEQ ID NO: 182621 - DNA, 100 bp, Homo sapiens
caaccaccgccctggccatctaccatgtggattttcaaaatggctgcagctcctcaagcaccggggcggggatctctccgtaagacgagacctctggttg

SEQ ID NO: 182622 - DNA, 100 bp, Homo sapiens
attcagtgtccaggaacacctgcaacaacaggattcacggatcagcctgagatgatcccagctgtgctctggacagggtggtaccatggccacatgtctg

SEQ ID NO: 182623 - DNA, 100 bp, Homo sapiens
acctgacataaactagcaagccaacaggtgaagtttcgacacacctcctttaataaagactgggctggcttagatgaagatgaagatgcacatgtctggg

SEQ ID NO: 182624 - DNA, 51 bp, Homo sapiens
cccacatcaatgcactgccaatggcaatttgaatcaacccatagaagtgac

SEQ ID NO: 182625 - DNA, 50 bp, Homo sapiens
aactacctggcattgccttttgttgaggacatagctcgccttttgcaaga

SEQ ID NO: 182626 - DNA, 97 bp, Homo sapiens
agtttatctggagtgaggtggccggttcttggtgggatctgagcagaccaagatcactccatggatgaaatgacagctgtggtgaaaattgaaaaag

SEQ ID NO: 182627 - DNA, 90 bp, Homo sapiens
cggggcctcgcgctggggacgttgcgtctgcagctgcggcgcggctctgaacaagaaggaacacagagggtgcgacagcccagaccctga

SEQ ID NO: 182628 - DNA, 76 bp, Homo sapiens
aataacgaagtatcagctccttttaaaaatatggatcagaaactttcgaagttggtagaagagctcacaacttcag

SEQ ID NO: 182629 - DNA, 100 bp, Homo sapiens
aaaacattgaacttgctgtcatgaggcgagatcaatccctcaaggagaatgaagtttctagattagaagacataatgcagcatttaaaatcaaagaagcg

SEQ ID NO: 182630 - DNA, 100 bp, Homo sapiens
tgcccagcaagagattaaagatgcagtacgccacggggccgctgctcaagttccagatttggtctacttccccagcaggacagcatcattctcctatatc

SEQ ID NO: 182631 - DNA, 82 bp, Homo sapiens
ggaggcgggggcggcttcgaccccccgcccgcctaccacgaggtggtggacgcggagaatccacattcatctcaatggaagg

SEQ ID NO: 182632 - DNA, 74 bp, Homo sapiens
ggggacattggaaaatggttaccatcataccctaatgatcccagcaagataatgtcctgtcttctaagatgtgc

SEQ ID NO: 182633 - DNA, 75 bp, Homo sapiens
cgccacagctgaaggctgcgagggactaagagcagaagagatggagtccctccaacttcaaagaaaaaacgccag

SEQ ID NO: 182634 - DNA, 75 bp, Homo sapiens
cgcttctccggcctccctgctcttaccgggaggtatcacatcggtatcctcgaattcaaagtatcaaagtacaat

SEQ ID NO: 182635 - DNA, 112 bp, Homo sapiens
tcgaactgggtgcggggacaggcatcgtggggatcttggcagcgctgcaggttacagaagcttattctggagtatacaaatactgctacagcacttttatatgagatacttc

SEQ ID NO: 182636 - DNA, 83 bp, Homo sapiens
taattataggattattctttctggaacaccaatccagggaaaatccaattgttgggaaagcatcttagagtttaacagattgg

SEQ ID NO: 182637 - DNA, 88 bp, Homo sapiens
cctcttttattaaggagcctcaaacaaagccttccagatgccggtggccgtgggtccctacggacagtcccagccaagctgcttcgac

SEQ ID NO: 182638 - DNA, 100 bp, Homo sapiens
accgagagcgtgaccgagagcgcgaatatcgtcatcgttagaagtttgccaaagaaactagagtgcataaaaacgtctatttgcaaccaccttcttcgtg

SEQ ID NO: 182639 - DNA, 100 bp, Homo sapiens
gccgggtggcgcttctgcacgttcctgcaggcacggtggtgtcaaggcagggagaccagggtggtgacttcacacgccataatggcactggtggcaagtc

SEQ ID NO: 182640 - DNA, 118 bp, Homo sapiens
gaatgctgaatcatatgtttccttcacaaccaaactggatattcctactgctgctaaatatgaggaaaattgcctaagaattatgacccaaaagttaccccagatccagaaagatggc

SEQ ID NO: 182641 - DNA, 50 bp, Homo sapiens
cacgagggcgcgctcgagacgctcctgagaccgcccaggtttgctgaatg

SEQ ID NO: 182642 - DNA, 101 bp, Homo sapiens
gtcaccgtggacttcctcgcagaggtggacaagctggtgcagctgattgagtgccccatcttcacatgtcctggctataagtcaccatggcacagcaagct

SEQ ID NO: 182643 - DNA, 75 bp, Homo sapiens
ctttctcaacccagagcaaattgagacgtccggggtttgtcgctggtgctttcggagggcagcctgcgggacggg

SEQ ID NO: 182644 - DNA, 83 bp, Homo sapiens
ccggggcagtttcagtctccaccccaaatgcagcccagagcacatgtgaggagaggcagaccatattttgcagcagcactgtg

SEQ ID NO: 182645 - DNA, 80 bp, Homo sapiens
gtgaatggcagcaaggtgggcccggacggcacaccctacgttaccgtgctcaagctgcatcttcctcccgtgaggctggc

SEQ ID NO: 182646 - DNA, 100 bp, Homo sapiens
ggagttcctgaagaagaacctgcgagccgacaacgccttcatgctgctcacgcaggtggattttcaagacacgaatgctcggagtctggcagaaaggaag

SEQ ID NO: 182647 - DNA, 96 bp, Homo sapiens
aagatcatcatgaaatggagatgtgggaactggccagaagcctgtggccgtgggttctacaagtcttcctctcaagatcttcagtgctctcgttgt

SEQ ID NO: 182648 - DNA, 83 bp, Homo sapiens
aagaaatgccaaatgattcagtccttgaaaacaagggtgtacaactatgagcctttgacacagctcaagaatgtcagagcaaa

SEQ ID NO: 182649 - DNA, 53 bp, Homo sapiens
aggccagcaagacgctgcccgccatcgagtaagcggcgggctcgccagcctcg

SEQ ID NO: 182650 - DNA, 139 bp, Homo sapiens
gtccgacggcgccgagtggctggaggaggccaccgaggacacctcggtggagaagctcaaggagcgctgcctcaagcacccatccgggtgacctgcataggttcctgcggggtctccaacaaggctaatgacacagcgt

SEQ ID NO: 182651 - DNA, 50 bp, Homo sapiens
gccaccgctccctcttcccacggttgaagcactggacaatgccacatact

SEQ ID NO: 182652 - DNA, 51 bp, Homo sapiens
atgagtcgcatcttcaacccccatctggctaagttctaaaaacatcagttc

SEQ ID NO: 182653 - DNA, 125 bp, Homo sapiens
cgataaatcagacagaacagttaatcctcaatttaagcctgatctaacccctagaaacagcacccagaggcctccattcaggctgttttttcagatgcccaaatgcatatttgggcattagaagg

SEQ ID NO: 182654 - DNA, 75 bp, Homo sapiens
gcagtcttctgaagaattgtggctcagttttcttggaaactacttaaagaagagattttatcgacatcgaaagta

SEQ ID NO: 182655 - DNA, 51 bp, Homo sapiens
gagttagagagagggatggtggatgggagcaaagtgtttacggcatcgtgt

SEQ ID NO: 182656 - DNA, 101 bp, Homo sapiens
atgagggtcatgtttcctgtgtgaaattgcttctgtcaaaggtgatggcttggacaacagtgtagcttcccccagcacaggtgacgatgatgaccctgata

SEQ ID NO: 182657 - DNA, 131 bp, Homo sapiens
ctggaggaggaacttcgaaccatggaccaggccctcaagtccctgatggcctcagaggaggagatggcagtggcagcaccatgatgcaaaccaagaccttctcctcttcctcctcatccaagaagatgggc

SEQ ID NO: 182658 - DNA, 75 bp, Homo sapiens
caaggtccggctgctggatggaggggattttgtcagcttgtcgtcaaggttaatttggagtggcccctggagtca

SEQ ID NO: 182659 - DNA, 83 bp, Homo sapiens
ggtgcctaggccatggcagcctcactgacatcagccagggggatatgagactttctactcggaatatcctgagtgttgcgtgg

SEQ ID NO: 182660 - DNA, 75 bp, Homo sapiens
cgccggggcattattcatttctccagctctggaacccagaatgggggcttcgggacacagccctcctggaggacc

SEQ ID NO: 182661 - DNA, 100 bp, Homo sapiens
tacgaaggatggaatcttcaatcaatcatatttcacaagtggatccaaccgaagagaaaggggtgctccaccactccctcccatcccgaggtgatctttg

SEQ ID NO: 182662 - DNA, 75 bp, Homo sapiens
taagcactttgatgatttaagaaatcttgagtcttgctatggagatacacttcaattcctacttcagtggaagag

SEQ ID NO: 182663 - DNA, 83 bp, Homo sapiens
cgccagatagaaaacggcgagagtgggcgagaacgtccactgcgggccggcgaaagctgcacctggaatggataaaagtggca

SEQ ID NO: 182664 - DNA, 101 bp, Homo sapiens
ggccctggtgttgctgctgtcctccttctccggtaagtaaggaggtctctgtaccatggctcgtacaaagcagactgcccgcaaatcgaccggtggtaaag

SEQ ID NO: 182665 - DNA, 100 bp, Homo sapiens
ccccatcacataggggtttctgttaaggaactcgatttatatttggcatactttgtgcatgcagcagggttgaaaggaggagcaggaggtactgatggac

SEQ ID NO: 182666 - DNA, 100 bp, Homo sapiens
ggaaaggaccgtccacccctccgcgctggcggtgtggacgcggaactcagcggagaaacgcgattgagatagtccactgtgtgcagaggcatgggagttg

SEQ ID NO: 182667 - DNA, 100 bp, Homo sapiens
cttgggacagggggatttggaaatgtcatccgatggcacaatcagtacaacaagatcctgttggatatggaaaccacctacagcgtggccactgtgtgcc

SEQ ID NO: 182668 - DNA, 100 bp, Homo sapiens
gctaaggccattggacacagaatccgagtgttatgtgtctcggtaccacgtgaaagactcctcacgccacgtcatcctaggcacccagcagttcaagcct

SEQ ID NO: 182669 - DNA, 80 bp, Homo sapiens
cgaggaacgagagcgcgaagctaagacccaacatgagtgaagtttcctgcaagaaacgggacgactatttggaatggcca

SEQ ID NO: 182670 - DNA, 102 bp, Homo sapiens
acacatggcagatgagaaattggagaaggacgagatcatcaagttgtatagctgtatcattggcaacatgatttcgatttccacaagacggcaccctatgtc

SEQ ID NO: 182671 - DNA, 110 bp, Homo sapiens
gccagtattttgaccaacaccatggaaggcagccaatcctttctttaagttgttgactatgctaatggagtttgctggtggacctccaggaatgcctccctttgcatctt

SEQ ID NO: 182672 - DNA, 104 bp, Homo sapiens
gccactttgcattgactggaaacaatggcatttacagaaagagtcaacagcagtggcaacaggagctcttgtccctggcaaagcgaaagcgcagtgactctgag

SEQ ID NO: 182673 - DNA, 142 bp, Homo sapiens
tgatgacagagtatgcaagagtcaccttctcaactgttgtcctcatgatgtcctttctggaactaactgagagaagatggtttccagcctcaaacttacctagtacagggagtgaaagcactgcatactgctttaaaattat

SEQ ID NO: 182674 - DNA, 75 bp, Homo sapiens
gaagagggaagacacgcggaaacagctatcatggtgaacttacttcagattgtgcgggaccactgggttcatgtt

SEQ ID NO: 182675 - DNA, 100 bp, Homo sapiens
tcagcccagaggagaaactcgctcgccttcagaagacaggactttgtgttttatgccccacgtctgagaatcaacaagcggatcctgcagctctgcatgg

SEQ ID NO: 182676 - DNA, 82 bp, Homo sapiens
atggaaccaaagcggatcagagagggctaccttgtgaagaagtccaaaattgaagacattagagcagaacaagagagagaag

SEQ ID NO: 182677 - DNA, 100 bp, Homo sapiens
tcctatacaagattaacattcagtggatgtgacgggcgcgtacgacaccatcccccaggacaggctcacggaggtcatcgccagcatcatcaaaccccag

SEQ ID NO: 182678 - DNA, 75 bp, Homo sapiens
ggcgaggttcagactcttggagccagaagctacatgacccctaaacgcaacaatggtgtggttggtgaatatggc

SEQ ID NO: 182679 - DNA, 98 bp, Homo sapiens
ggacatgaagaaggtggtgtgtgtggatcagcagacccccaccatccctaaccggctggctgcagacccggcagaagaggtaaaacggggccaaaggg

SEQ ID NO: 182680 - DNA, 82 bp, Homo sapiens
aaaatgcgctcgggctggaccagcaggagatacaactcgtcaacgaatcaaattcagtgatgacagagtatgcaagagtcac

SEQ ID NO: 182681 - DNA, 75 bp, Homo sapiens
atctgaagagctatggtgaaacaccactgaagcattgccaaggtaaaagtacacctgtaagccagcttggttccg

SEQ ID NO: 182682 - DNA, 83 bp, Homo sapiens
ctgggggacgcgggcgcgtcaggtgaagactgggggctgcaggcgcgctaggcccactgctcagtggagcgtggaggacgagg

SEQ ID NO: 182683 - DNA, 100 bp, Homo sapiens
aggaggtgcaggcgagggtgcagagcctggagagcatgccccggccccctgagcagattctggctacattggagattggttgctttctaaaactgaagga

SEQ ID NO: 182684 - DNA, 97 bp, Homo sapiens
tgagagagccaatcttggacctaccacttgaaaccattagtgagctggtttacatggaataccaggagagaagggggatccaggacctcctggactt

SEQ ID NO: 182685 - DNA, 97 bp, Homo sapiens
ttctggggtgcagcagtagccagagagcagcctctctggtcgggaagacgtctctgattacgaggttcatgtacgacagcttcgacaacacatacca

SEQ ID NO: 182686 - DNA, 90 bp, Homo sapiens
cccggagtttgcacaatctgtccactcccgaagtccctgcaagtgttcagacagtcactatagtttctgatgaagaattgaaaagaagag

SEQ ID NO: 182687 - DNA, 82 bp, Homo sapiens
ccagcgcagtgaagtggtgagcctttttgtcactgaaatggtggagtcaatgaagaaagtagcagggatggatgtggagctg

SEQ ID NO: 182688 - DNA, 75 bp, Homo sapiens
acttcctgccaaaatcctgttaccctagcaacaggttaacacagaaatctgcctcctgggccatgccgcttctaa

SEQ ID NO: 182689 - DNA, 74 bp, Homo sapiens
gcgacagggtctacaagaacgagtgcgccttctcctacgactctcccattgaagataaaactttccaagtcctt

SEQ ID NO: 182690 - DNA, 51 bp, Homo sapiens
aatcccagcactttaggaggccaagctgaggaggatgaggacaaggaagat

SEQ ID NO: 182691 - DNA, 83 bp, Homo sapiens
ccggcgtgttcatgcccccgggccgctgccatggcccagacactgcagatggagatcccgaacttcggcaacagcatcctgga

SEQ ID NO: 182692 - DNA, 100 bp, Homo sapiens
cactgtgtccagcccgatcccttacacaccttctccgagttcaagcaggcctatatcacctgttctcaaaagtctatggtcctgtgttcaccgtgtattt

SEQ ID NO: 182693 - DNA, 50 bp, Homo sapiens
gaggaagctgatggtcatcttttccaagtgtcctgtggccaggcggaaag

SEQ ID NO: 182694 - DNA, 82 bp, Homo sapiens
tcttctcatgcacagaggcaacaaatggcaactttctgaatcaatgtccgagttaccaccatggatgcagagctggagtttg

SEQ ID NO: 182695 - DNA, 75 bp, Homo sapiens
aaggagtcatatatccttcatatgatccatcttagtgaagaattaggatacaggatttgttaaggattccaagta

SEQ ID NO: 182696 - DNA, 75 bp, Homo sapiens
cgggcgagcggctgtgtggatgtcggcgaagccgcgggcgaggtgacagtggatagtggaaacaggagatcgtgg

SEQ ID NO: 182697 - DNA, 83 bp, Homo sapiens
ggaagtggcggcggcggcaggcggcagaggggagccggtggctgctggcagcggaatcccccagatcaagtgcttcctcaacg

SEQ ID NO: 182698 - DNA, 50 bp, Homo sapiens
ccaaagacccctggagacatggactttccttatcccagttgattgtgcag

SEQ ID NO: 182699 - DNA, 98 bp, Homo sapiens
gcagggaactacttccgggggagcggcgcggcggcgcgggaggtattatagctgcaaatgtccttgtattctgtttatggagagtaccttctctgcag

SEQ ID NO: 182700 - DNA, 100 bp, Homo sapiens
tacgaaaacagcaaaatccagtagttcttctaatccaaaatgggatgaacagctaactgtctgcccaaactccaaaatgatggtagagaattgaccaaga

SEQ ID NO: 182701 - DNA, 98 bp, Homo sapiens
caagccctactgagcgtgctcccctctgagactggagtgagagggtcttctggtccttatgtcgtcagaagatcgagaagctcaggaggatgaattgc

SEQ ID NO: 182702 - DNA, 105 bp, Homo sapiens
tttttggatgatgatggatccatttctcctattgaggagtcaacgagctggaatatcagaagtctcagcccccacagcccggagataagtttgtgtctgttgtca

SEQ ID NO: 182703 - DNA, 50 bp, Homo sapiens
tgatcctttgcagaaatgactacattaggctgaccccgcactacatctac

SEQ ID NO: 182704 - DNA, 100 bp, Homo sapiens
cgaaggccgggacccggttccccggcccacagtgggggtgtgcaaacccgagagaactggtcacgccgatgatggagctgaagcccaacgcaggtagcga

SEQ ID NO: 182705 - DNA, 50 bp, Homo sapiens
cgaaagcggtgcagacgggaggaagccctgtcagtctgctataaggccgg

SEQ ID NO: 182706 - DNA, 83 bp, Homo sapiens
ttggaattacagacatgggccactacacctggcgatctgtgtcttatacgagtgtgaacatggctacgcctcttcattcccgt

SEQ ID NO: 182707 - DNA, 82 bp, Homo sapiens
tgtaaagtcaccaacgagatcttccgccactacgaccattcaaactcctccccacgacactctgaagcagcgacggcacagc

SEQ ID NO: 182708 - DNA, 100 bp, Homo sapiens
gcatttctgctgtttcagttgtactactacaagcactatttatcaacaaaggggtctgaagactatgagactgctctatcaggaaaggaagccctttcgg

SEQ ID NO: 182709 - DNA, 100 bp, Homo sapiens
aaagtcgcagcgagctggagccgccggaggaaaatcctgccttgcttcgttgggcctatgcaagaacaataaatgtctatcctaatttcagacccactcc

SEQ ID NO: 182710 - DNA, 101 bp, Homo sapiens
cccaagccaaggtccggcgcccacggaggcaagtgtcgtggacttcgtactgctaggaagctccgtagtcaccgacgagaccagaagtggcatgataaaca

SEQ ID NO: 182711 - DNA, 100 bp, Homo sapiens
accgacctcgacgtcttgcctgtgtcccacttgttcgcggcctatagggagcaccccatcggagacaagagcttccagaactacatccggcagcagtccg

SEQ ID NO: 182712 - DNA, 75 bp, Homo sapiens
ctgaaaacaacatcatgcagtggaatgcagttatatttggggaatataaactaggacggagaattgagatctgct

SEQ ID NO: 182713 - DNA, 75 bp, Homo sapiens
gcggccccggggacaccagcagctctgctgcggagcgggaggaggaccgaaagtaacaaatgtggcaattatttt

SEQ ID NO: 182714 - DNA, 82 bp, Homo sapiens
ggccttgctgaagaggaatcaggacctggctcccaattctgctgaacagggtgataaaagaaaatgtggctgaagttacccg

SEQ ID NO: 182715 - DNA, 78 bp, Homo sapiens
ggccttcccagccacgtggaactatctaaccatgagctaccctggctatcccccgcccccaggtggctacccaccagc

SEQ ID NO: 182716 - DNA, 75 bp, Homo sapiens
cgagaggccgtgcgggacgcgggcgccaggaccggccgaacgcagaggcccacagctggcagccgggcatccaga

SEQ ID NO: 182717 - DNA, 82 bp, Homo sapiens
ttcccgggccgttgatcttcggccccacacgacctgcctagagctggaacgttacctccagagcgagccctgctatgtttca

SEQ ID NO: 182718 - DNA, 83 bp, Homo sapiens
ttcacgcacgggatccagagcgccgcgcacttcgtcatgttcttcgcgccctggaagcctgcaaccggccccacaaattctag

SEQ ID NO: 182719 - DNA, 97 bp, Homo sapiens
aagaagaaaacaaaggtagaacatggaggatcgtcaggctctaaacaaaattctgatggggcgcctacccttcttcagcaagatgggaacagctgag

SEQ ID NO: 182720 - DNA, 89 bp, Homo sapiens
ccgcccagtgggcctggagcagctgcggcggctcggggtgctctactggaagaggagaattctgcctaagccaactcgaaaaagccgta

SEQ ID NO: 182721 - DNA, 82 bp, Homo sapiens
gctaccggcgggagctgggtcaccggcttgaggggctgcgtgaggcgcggaggcaggttcgagaacttgtcttggacaattg

SEQ ID NO: 182722 - DNA, 50 bp, Homo sapiens
gttgatgggcacctcccgggacgtttccaacatggctagatccatcagaa

SEQ ID NO: 182723 - DNA, 75 bp, Homo sapiens
gccctcgatgtgctctgcgtgttgctgggttagcactctacgtatatgaatatctgctccatgtaggagctcaga

SEQ ID NO: 182724 - DNA, 98 bp, Homo sapiens
ccaccgtcgcccgcccagcctccgcccggtatttgcatgttgctgaccattcttgaggaacaagccatggattccctgttgttgggctcagacaaaca

SEQ ID NO: 182725 - DNA, 75 bp, Homo sapiens
tggttcagcggagaataacatatcttcaggaagatgatccctatgatcttgaagatgtttctgcacagaaatgag

SEQ ID NO: 182726 - DNA, 99 bp, Homo sapiens
gcctggagttggagacaattcctggttcagaatttaaacatctttctagttgagtggtgattttatgcaatggcttcaagccacagttcttcaccagtg

SEQ ID NO: 182727 - DNA, 83 bp, Homo sapiens
gttgagaagcttcgcttcacatacaggcctgcacagctgaccacagttgggaaacgttgctgtctttggattcaggatctttg

SEQ ID NO: 182728 - DNA, 100 bp, Homo sapiens
aaagaaccgcctgagggtggctttcgagaaggtctgaagaaaaccctgcgggatgagatcaatgccattctgcagaagaggattatggtgctggatggag

SEQ ID NO: 182729 - DNA, 100 bp, Homo sapiens
atcaagaggaagcggaaaccagtggccacagcatctttgtctagccccagtgcagaaaaaggtccacttaccatttctgcacaggaaaatgtaaaagtgg

SEQ ID NO: 182730 - DNA, 98 bp, Homo sapiens
agccccttaaacttatgcctcaagactgggtgttcctgaaaagccccatagtgattgagtcttcaaaaccaccgattctgagagcaaggaagattttg

SEQ ID NO: 182731 - DNA, 93 bp, Homo sapiens
ggccttccgacgtgggcggtgggccccagccccacagaccagcccagcattcaggtgagaagccctaccactgcaactgggacggctgcggct

SEQ ID NO: 182732 - DNA, 50 bp, Homo sapiens
agacaccggagactgggaaatgcatccaggatattgcagtcctcttcaac

SEQ ID NO: 182733 - DNA, 50 bp, Homo sapiens
aggctgacctagtgatatttcaggtctatcatctcatgaagaactgctgg

SEQ ID NO: 182734 - DNA, 96 bp, Homo sapiens
ggggagtctgtcaggaagtgccatggtaaactgttttaacaggcaggatgtagccaatcaaatgtgcaccaagaccaaggaggagtgtgagaagca

SEQ ID NO: 182735 - DNA, 82 bp, Homo sapiens
ctcgaagtgcgcaaacttgacactcaccctgaccggtgttacctcattttgaaagtcttgggaaacaggaaaaaattcctaa

SEQ ID NO: 182736 - DNA, 100 bp, Homo sapiens
cagccacgagctatgatggaggaaggggaagatttgatggtagagtggtggcaaagcttccttttacccctctttcttacatccaaggactgtctcatcg

SEQ ID NO: 182737 - DNA, 100 bp, Homo sapiens
cgccgccacaccgccgccacaccgccgctgcctcagtcatgccgcaaatcgccattgctcgcgagggtgacctcctgaccaaggagcggctgtgctgtgg

SEQ ID NO: 182738 - DNA, 90 bp, Homo sapiens
cctgatgtgtgtgctttgtggagggtacttcattgatgccacaaccataatagaatgtctacattcctgaggacgaatccatgaaccaac

SEQ ID NO: 182739 - DNA, 97 bp, Homo sapiens
atcttcagccaatccagtgcaggctctccaccgaaggctggctctagactggtgtatgaaaagacacagactgtactctcagaactgaagttgaagt

SEQ ID NO: 182740 - DNA, 88 bp, Homo sapiens
tggacccagccctgcgtgaggccgcggagcgccagctcaatgaagattgtgctcatggacgatgccatggactgcttgatgtcttttt

SEQ ID NO: 182741 - DNA, 100 bp, Homo sapiens
gcgggcgcggcccgggcgcccgagcctcctcggccttggagagcagcggcggcggcggcaccccgggcgcggcgcccagacaccatgtcacaaccctcca

SEQ ID NO: 182742 - DNA, 101 bp, Homo sapiens
ggatgccgtgggccgcagccactcaggactgtcaaagataacgaaggaggcccaacttcattcaataaggagcctgacggatttatcccagacggtagaac

SEQ ID NO: 182743 - DNA, 50 bp, Homo sapiens
tgtcgcggcgcgagacctctgttggctggggaacagaccagggaattggt

SEQ ID NO: 182744 - DNA, 75 bp, Homo sapiens
cgggtgatttctgcatttccatctgagctggcgcacgccatccgcctgctcctggagttcacggatacctcttat

SEQ ID NO: 182745 - DNA, 78 bp, Homo sapiens
gaaaatcgcttggttaaaacctgacacttttaacaggtaagatcctgaggaggcaggagagggacagggaaggagtat

SEQ ID NO: 182746 - DNA, 75 bp, Homo sapiens
ctcggcatggctctcctggtgctcgaatgaagctgataggaccttgatatatataactctctacatttctgaatg

SEQ ID NO: 182747 - DNA, 98 bp, Homo sapiens
gtcatcaagaagaatgacgatgtcatctcaactcgaactccacctccaccttcaccgttgccatttccaacacaagctatccttcctccagccccatc

SEQ ID NO: 182748 - DNA, 101 bp, Homo sapiens
gacatccgaggtgcctttctccaaaaggtgctgggtaggccaggtttcagcatcgcagacaagaagcgcaggacaggctgcattggggccaaacacagaat

SEQ ID NO: 182749 - DNA, 128 bp, Homo sapiens
ctcctgtttgacggtattaagaaacatcgagtcactttgcctggacaggaggaaccctgtatgtcttactgaaagaaagaaacatgcttctaaccctagagcaggaggccaagcggcagagattgcca

SEQ ID NO: 182750 - DNA, 82 bp, Homo sapiens
gcctcctgctctgtcctcatccccggcttagttcttctcaccactaaatccaatacgagttcatattgatattggagctgat

SEQ ID NO: 182751 - DNA, 101 bp, Homo sapiens
ttttctttctggaatcagaaggctttgctggcctgaaaaagcttccagtggtgtctgtagtgagagaaacagagtcccagttactgccagatgtgggagct

SEQ ID NO: 182752 - DNA, 100 bp, Homo sapiens
cggcgacctcaagaagcagctccacgaaaggcagccgcggatcgccgcgctcagcgacaaacaaccgtcaggttctgaacagctggtagatgggctggct

SEQ ID NO: 182753 - DNA, 88 bp, Homo sapiens
ctctatatgaacaatccgtctggatcacggatgtaggaagtgctattgacctgaaaagtggttctggaaaagtgtaccaaggccctgc

SEQ ID NO: 182754 - DNA, 74 bp, Homo sapiens
gcagatttcaggaaattaagacaacaggatcttgatggggagctaagatcgccatcaccatcgaggctgagcca

SEQ ID NO: 182755 - DNA, 83 bp, Homo sapiens
ctggtatacagctacatccaggagagaatgctgacagtcctgcagatttttggaagtaccagcacagtgacgcttcctgaaac

SEQ ID NO: 182756 - DNA, 100 bp, Homo sapiens
ctcagctctgggatcctgggggcaattgggtttggccggaagtcgcctttgtctaacaggtctttgatttgcgtcagtgtcatcgacagatgcagcagca

SEQ ID NO: 182757 - DNA, 98 bp, Homo sapiens
gtagcgtatggtgctgctgtccaggctggtgtgctctctggtgatcaagatacaggtgctggtactggagcttagtgatgtgccggtggagcaggcgg

SEQ ID NO: 182758 - DNA, 75 bp, Homo sapiens
ttatgtacacaacgggggaggaagtggagctttcaccaacaatcaccagtggtttacacaacattgcaaggagca

SEQ ID NO: 182759 - DNA, 100 bp, Homo sapiens
agcgaagaagataggtcagcctggaaacacgcgggagctctcaaaaagagtacagaacaggtggccgcattttgccgcagtttgcatgagatgaacccct

SEQ ID NO: 182760 - DNA, 74 bp, Homo sapiens
cctagatctgatgggggaagccaccaggattacatcatctgctgtttgcagaaaaaacttcagcatgtgccagg

SEQ ID NO: 182761 - DNA, 99 bp, Homo sapiens
cagtacaacagagtcaacctcaccttggatctggggcagttaatcagctgtgttcagcgaatacttatgaacagaaggctccagcagcagtacaatcag

SEQ ID NO: 182762 - DNA, 98 bp, Homo sapiens
agaagatgacgaagacatgacacttacaagatggacagggatgataattgggcctccaagaaacattcagaagattctcggccttgccccttcacgag

SEQ ID NO: 182763 - DNA, 90 bp, Homo sapiens
aagtggcctgggaggtggctaacaagggtgacttcatggtcatgacgattttcttcaatgtgagcaggcggtttggctatgttgcctttc

SEQ ID NO: 182764 - DNA, 100 bp, Homo sapiens
ggggagtttttatactcattcaccattgacaattcaacttactctctcttcccacagtcaatcctttcccatggtaccgtggcagactgtgctgttgttg

SEQ ID NO: 182765 - DNA, 100 bp, Homo sapiens
tggtggtctactctgatgtcaatcttgagggctagaggcggccttagcaacatgctgttccagtgctccctacctgacaccacagccacccttggtgatg

SEQ ID NO: 182766 - DNA, 100 bp, Homo sapiens
tcttcgtgaggctgctcttcgagcggttgtctaccttcataacaacaatatctctgtagttggatcaagtgacttctgcccacctggacacaacaccaaa

SEQ ID NO: 182767 - DNA, 82 bp, Homo sapiens
cttagaaccgcagcagggacgtcggtttgctatcgggactcggcgaggacggtgcagagcattgtagaccaaggagccatgg

SEQ ID NO: 182768 - DNA, 74 bp, Homo sapiens
gaagaattttccaaatgaatttgcaaaacttactgtagattcgtattttacatggagaagtgaacaaagtgaaa

SEQ ID NO: 182769 - DNA, 74 bp, Homo sapiens
tcgaggccaatgatgggagaccaccgggatgggcagattatacccaacaagcaacccaaaggtgagtgctattt

SEQ ID NO: 182770 - DNA, 102 bp, Homo sapiens
gcatatacccaacttttctctggatttaaacagatttctcaagcttacgaagttctctctgatgcaaagaaaagggaattatatgacaaaggaggagaacag

SEQ ID NO: 182771 - DNA, 100 bp, Homo sapiens
agcgactagggctcgggcgccggcgagatgcctttgttcaccgccaaccccttcgagcaagacgtggggatgacttgtcaagctcgaacatcatatactg

SEQ ID NO: 182772 - DNA, 75 bp, Homo sapiens
gttccaccaggccgggaagcccatcggtcttgctctgttgcccaggctggagtgcagtggtgccatcatgccaac

SEQ ID NO: 182773 - DNA, 90 bp, Homo sapiens
gcccgggccgtggctctagcaggctccactaactggggctacgactctgatgggcagagacgagttgtactgctgtcacaggaaatggac

SEQ ID NO: 182774 - DNA, 98 bp, Homo sapiens
agcgagtcatcgaggaccgcgactctcctgagaaattcacgaaagtctgtgaggccttggagcatggacatgtggaatggagcagccgaggtccccct

SEQ ID NO: 182775 - DNA, 95 bp, Homo sapiens
agattgccgtgaacctccggcccggcgtctacggtgacgtgcagcgcgtgaagatcctgttcaataagaaggagaacgccctagtgcagatggcg

SEQ ID NO: 182776 - DNA, 74 bp, Homo sapiens
catctattgtgaaaaacctaaaggataccttagaatcctcactatggatgggctcattgaggacattaagcatc

SEQ ID NO: 182777 - DNA, 100 bp, Homo sapiens
gaagaggtgttggagtgttgactttaatttgatggatcctaaactcttggcttcaggttctgatgatgcaaaagaggtggagaaaacccggtgccagcac

SEQ ID NO: 182778 - DNA, 110 bp, Homo sapiens
cagccatcgaggcgagccagagcctgcagtcccacacgccacataaagaagatccctaatagtcatttctcaacaattatatagtcaactgatgtaacaatggtactaat

SEQ ID NO: 182779 - DNA, 51 bp, Homo sapiens
ggaacctcaccatcatcattgaaaccatgtgaatcggagcccggttccagg

SEQ ID NO: 182780 - DNA, 82 bp, Homo sapiens
ctgtagctattaaaaaaccatctggtgatgatagatacaatcagtttcacataagaatgagtccctggaacgccagatgcgt

SEQ ID NO: 182781 - DNA, 100 bp, Homo sapiens
ccgggcggccggcgaggggggcgccgcggcgggtggatgagagttggccccgatatccgctcaggatcttctggtgaccccacttctcgctgctcatgcc

SEQ ID NO: 182782 - DNA, 100 bp, Homo sapiens
ataacaaaagctgctcagagtctcaatgaacttggattaagttgtcatcattctgggaagaaaaaaaaaacattaatgaagaggccaataatatgaaggg

SEQ ID NO: 182783 - DNA, 75 bp, Homo sapiens
ttaacccctagaccggtttttagtccattgactatgcagcctaatgagttgtctcccagagctccgtggaatttc

SEQ ID NO: 182784 - DNA, 120 bp, Homo sapiens
ggaagaccgcgcgcagggcctgcagcgggagctggacggcgagcgcgagcggcgcgagaaaattcctggtcgggtggcttccagtggtcttcagtctgtcgtgcaccgatgagaactctc

SEQ ID NO: 182785 - DNA, 73 bp, Homo sapiens
aaacctcagcgacctgatcgacctgcactagaaagtttgggatttggctcttacatcagtgaagtaaaagaag

SEQ ID NO: 182786 - DNA, 90 bp, Homo sapiens
tctggctgtcaggcggaagctgcattcatggaagaagagtgtgtggacactccaaaggcagcctgcttctgcaaagtggtacgatcgaag

SEQ ID NO: 182787 - DNA, 98 bp, Homo sapiens
gacgtatttgagttgaagcagttttctcagctgcctgctaacatagctgtttgcagttctaagatgtcatccatactgtagggccaatagccaggggc

SEQ ID NO: 182788 - DNA, 100 bp, Homo sapiens
ctttccttggcagccacatgttctcctgctggtcgacctggccgtctctgtttcccagatctccatcgaagagaaggtgaaggaattgagccccgaggaa

SEQ ID NO: 182789 - DNA, 96 bp, Homo sapiens
tttgtaggagcatggcttggagcacttcctattccactggattgggaaagaccatggcagatggacttattttgagtcacttgccaaatggcccaa

SEQ ID NO: 182790 - DNA, 96 bp, Homo sapiens
acattgccagctggaaggaaattgctacaagcaactcttcggctaacttcaaaggaacactgccacggaaatgcaagaaggagctcctggccgtga

SEQ ID NO: 182791 - DNA, 115 bp, Homo sapiens
agaacgtgtttctcgcctacttcctggtgtcgatcgccggcctcctctacgcgctggtacagctcgagcacaagcgggagatttacgaccgctatggccgggaagggctgacagg

SEQ ID NO: 182792 - DNA, 100 bp, Homo sapiens
cttattcactggccacagggattcaagaaaccagactgtgatgactgggagagcgggctgaatgcaatggagtgtgcattacatttggaaaaaaatgtga

SEQ ID NO: 182793 - DNA, 75 bp, Homo sapiens
ctgctcctgctcatggacgacgctgaagaactgaaactggccacccagctgaccggaccggtcatgcccgtccgg

SEQ ID NO: 182794 - DNA, 103 bp, Homo sapiens
aatgacagctgtgataaaaaaaaaattcatctgggcggtatctggaacttggctgtgggtgagcgtggaggatgctcagatgcacaccgtcaccatctggctc

SEQ ID NO: 182795 - DNA, 101 bp, Homo sapiens
tgtcaacaacctggaattcaattggctcttgccttatgcagaattttcagagctcaacctggtggcccatgcagatggcacctatgctgtggatatgcagg

SEQ ID NO: 182796 - DNA, 50 bp, Homo sapiens
cgaacatcttctggacctttgtccaggattcctccttggtcacttttcag

SEQ ID NO: 182797 - DNA, 89 bp, Homo sapiens
cccagcttactccagggatgatgtcagaaaatgagcaggaggatgcattagcacaacaggcctttgaagaggctcggagaaggacacgc

SEQ ID NO: 182798 - DNA, 90 bp, Homo sapiens
tatgaaccagtgtatcccaaggaaatttacctaaatattctcataactccctgatggttcaagcaataaagacaaacctaacagacccgg

SEQ ID NO: 182799 - DNA, 100 bp, Homo sapiens
ctcatctccaggacagtgggaagagtggctggaggaattcagtttcttgggggttgaactcccaccacctgatcttggaccaagttctgcactaaatcag

SEQ ID NO: 182800 - DNA, 74 bp, Homo sapiens
gagcagaaccccaggactgcgcccccgggagcgggcgcccagagtttgaaggatgacctctaggaagaaagtgt

SEQ ID NO: 182801 - DNA, 100 bp, Homo sapiens
catggactttctcctccagagaaaggaatgcaagatggtcatcctgtctgtctgttcacagagaccctgatgcttggtgtgacctgagtaaatttgacct

SEQ ID NO: 182802 - DNA, 90 bp, Homo sapiens
gtggtttcctgtaaaaactgcagcatccagcgtggacttaagaaggtccttgaatgggcaagagggcacatgaagtacggcgtcctccac

SEQ ID NO: 182803 - DNA, 90 bp, Homo sapiens
gatgtctccagaccggtaaatccagatgcagttgtaacaaatgtggcaattattttggatctatcacctgtcatcataactggcttctgc

SEQ ID NO: 182804 - DNA, 75 bp, Homo sapiens
tccatttctcctattgaggagtcaacgagggatttgttcgtgttgaccgagattatgtgctgaagtctgcagagc

SEQ ID NO: 182805 - DNA, 50 bp, Homo sapiens
ctatcttcccatcataaaaaagctgctctttggcgtaaattgcaatcgat

SEQ ID NO: 182806 - DNA, 82 bp, Homo sapiens
cccaggtcctctgggacagcccctgccttctaccagaggctgacccgcggctgattgagtccctctcccagatgctgtccat

SEQ ID NO: 182807 - DNA, 100 bp, Homo sapiens
aatttaaccccgatgtcttgaagaagactgcagttcagagagctttaaaggagtgggatcgcaaggctgaggatgccaggagggactatgaaaaagccat

SEQ ID NO: 182808 - DNA, 100 bp, Homo sapiens
aacgttaaggagctggaagtactgctggttctgcttggattctgctagacagacccgacaaagactgtctatcaactggtccaattttagcttgaaaaaa

SEQ ID NO: 182809 - DNA, 50 bp, Homo sapiens
tccctcagcttccgccccaaaaggcatatgttgaaacaattagactaaaa

SEQ ID NO: 182810 - DNA, 99 bp, Homo sapiens
gtttgtccactgagctgatctcctctctggagcaccggggccaccaggagggaggagatgcgctctgtgctgcggaaggcgggctccccgcgcaaggcc

SEQ ID NO: 182811 - DNA, 100 bp, Homo sapiens
tggcacctggacaggccatggcccttccatggaggattcctctgctgtcctcatggaaagcctaaaggtggacacactgaacgccgagctagcagccgag

SEQ ID NO: 182812 - DNA, 101 bp, Homo sapiens
ggcccgcccggatcgtggcctctcgagagcaagtcacccacaaaagctgtatataatgccagacattggaatcatccagattcagaagaactgcctgggcc

SEQ ID NO: 182813 - DNA, 100 bp, Homo sapiens
aagaactggattcgtggcgccacaagctcattcactgtgtaggccctgacccacgtgtcagaggactgtttccctttgctagatggctgcagaaagaaca

SEQ ID NO: 182814 - DNA, 51 bp, Homo sapiens
aaaaagccaaagtgggaccagggggtccccacggagtctggaccatggagg

SEQ ID NO: 182815 - DNA, 100 bp, Homo sapiens
tgagttgttgctcccgcctgagcccagcccccagaaaggattgtgacatatcgttggacccagaattgagtttcactgttacatgccttgaagtgatgag

SEQ ID NO: 182816 - DNA, 100 bp, Homo sapiens
agaacctgagcaccttttgcctgttgctgctatacctcatcggggcggtgattgccgggtcctcagaatggttggaatgaccctccagctttgaacagag

SEQ ID NO: 182817 - DNA, 74 bp, Homo sapiens
agaatgtcagcatggaggctgctgggcaggtcatgagtcaccatgattcatctgaaaactacattaagatgaag

SEQ ID NO: 182818 - DNA, 75 bp, Homo sapiens
gcggtgtctgaggaggcagtcggcgaccgacttttgaatcagctgtgcaagagaatatcagcattaatgggcaag

SEQ ID NO: 182819 - DNA, 89 bp, Homo sapiens
cccgccccacccgcatgctctttgtcactccccggcggcagcacgaaagtaccatggaggtgttgtagcaggaaatgtggctcatattc

SEQ ID NO: 182820 - DNA, 98 bp, Homo sapiens
aacctcaacaccgagtccccagcaggagggccctcctggacccgggagcggaccctggtggcggtgaagcccgatggcgtgcaacggcggctcgttgg

SEQ ID NO: 182821 - DNA, 87 bp, Homo sapiens
agtacatttctgcaattgagaaacaggcacacaagtgtgaggagttgctaaatgctcaggtgactctgacatcattagaagcatgcc

SEQ ID NO: 182822 - DNA, 100 bp, Homo sapiens
gtccgttgcttcccgtccgtgtcgcggccctgcggttggcggcctcctcgtggagcggagcaagggaatatatgcagaacatgtcctgcggcccaagaat

SEQ ID NO: 182823 - DNA, 83 bp, Homo sapiens
aagcaggtatatgactgcctcaggtacgcatagctgctaaattcatcactcatgcacccccaggggaatttaatgaagtattc

SEQ ID NO: 182824 - DNA, 101 bp, Homo sapiens
ggacccaggagatcccgctggtgaccctgccgctggcgagcgccaccgcatgggaacttgctactaccagcaccatgccctaccaatatccagcactgacc

SEQ ID NO: 182825 - DNA, 100 bp, Homo sapiens
caaccccttcctcccgtatatcagattttgaacacagcacgaaaacattttggagctggtggaaatcagcggattcgcttcacactgccacctttggtat

SEQ ID NO: 182826 - DNA, 82 bp, Homo sapiens
ttcctgtacagcctgcagaactgcgttggagagaagttttcaacttgggaaccaaccaaacgggagcttgaactgctgaagc

SEQ ID NO: 182827 - DNA, 90 bp, Homo sapiens
gacttgggaggctccgttgcctgctcccggagggagacgcgctgccgaggagaacccagcggaggcggggtttcaccatgttgcccagac

SEQ ID NO: 182828 - DNA, 80 bp, Homo sapiens
gggaccaaggtggaaatcaaacacctgcctagagctggaacgttacctccagagcgagccctgctatgtttcagcctcag

SEQ ID NO: 182829 - DNA, 74 bp, Homo sapiens
aggctcatgcgggatttcaagcggtcatgcgacatctacatccgcatcaagatgctccaaactgcccagcagca

SEQ ID NO: 182830 - DNA, 90 bp, Homo sapiens
caggcaacgtgttggaccttccggagcttctcagaagacagagggttttcttttgaggttgtttacattcagagctctatcaataagagg

SEQ ID NO: 182831 - DNA, 96 bp, Homo sapiens
ccgcggtgggcgcgcggcccggggccgagccggccggcctggcgcacctggactattaccacggcggcaaggtacaccaggggttggaaaaaccac

SEQ ID NO: 182832 - DNA, 82 bp, Homo sapiens
tgccggcttcgcgcgcgaacccggctttcgcatttgggaccctgcaggtcctcctgcatatgcccaagaggattgggagtgg

SEQ ID NO: 182833 - DNA, 83 bp, Homo sapiens
caacgacgttccatctgtggaaggacctaccaaccaggtctctaattaacagaagatggcaaagcccagccacagcagctatg

SEQ ID NO: 182834 - DNA, 99 bp, Homo sapiens
ccatacctgatccggagaatcgaggagctcaacaagaagactgacaaacaacccctgcagaagccctcacattgcaccatctatgtggcaaagaactat

SEQ ID NO: 182835 - DNA, 97 bp, Homo sapiens
ttaggaggattcgatggcaattttttgtggaacagaattggagcaggaccctcgagatgcccctcctccaactcgtgctgaaacccgagaggagcgc

SEQ ID NO: 182836 - DNA, 100 bp, Homo sapiens
gcatgattattgggccaccaagggtgacaaggcaactgtatgagccactagttatgcagctgattcactggttcactaacaacaagaaatttgaaagtca

SEQ ID NO: 182837 - DNA, 98 bp, Homo sapiens
gaagatcctggacatgaagaccgagggggcaggtgacaaacattaccaccccagctgtgcacgatgcagcagatgcaaccagatgttcacagaaggag

SEQ ID NO: 182838 - DNA, 76 bp, Homo sapiens
gcatcttgtttaccagaggggagcgatatcaatgatgtcaaacggctgaaacctggctacttagaagctactgtgg

SEQ ID NO: 182839 - DNA, 111 bp, Homo sapiens
ggctcacctggcggtgcccgaggagtagtcgctggagtccgcgcctccctgggcatacccagagtatcttatcacttaccagatcatgaagccagaagccccttcccagac

SEQ ID NO: 182840 - DNA, 98 bp, Homo sapiens
tactggtcttctcgtcggattgcccatgcacttgttgcagaaacagccaaggtgaaaggtgtagcagtcactcggcctacacccacagcatcgacctt

SEQ ID NO: 182841 - DNA, 75 bp, Homo sapiens
gcgagggcaaagagctggtggcctcaggtgaaaagtaccctcttagtggcatgggtttaccaacatttaaagaat

SEQ ID NO: 182842 - DNA, 110 bp, Homo sapiens
tcacggccgagcagattctacaacacatggtggaatgtatccgggaggtcaacgaggtcatccagcatgtttgtgtcattagtgaaactggaaaagcaaaatacaaagcc

SEQ ID NO: 182843 - DNA, 99 bp, Homo sapiens
tgcaagtcatcttacctctctggatctcagttgtctcatctgtaaaaaggagataaaaattatttacctgcctgaacatacactactgctgcagctcac

SEQ ID NO: 182844 - DNA, 75 bp, Homo sapiens
cgcaactccagccagctcactgtccacctgcgatcccacacgggctacgcccaggaggaacagctgaaagaagag

SEQ ID NO: 182845 - DNA, 100 bp, Homo sapiens
gagatgccgggggagcggggccttccacaccccctccgtgggtgtgtgatgttagtaggcaggaagaggcggagggagagctcagtgaaggagaacactg

SEQ ID NO: 182846 - DNA, 75 bp, Homo sapiens
tttgtcaccgttatgtgggaagcgaatccaggggggccctcagcctcttggccttgaacgggctgttcatcttga

SEQ ID NO: 182847 - DNA, 95 bp, Homo sapiens
ttccggaggcccggccacctctgagaagggagacgacgctgctgggtccgctgagcggggcgacccgaggcaagaaataatggcggcagctacgg

SEQ ID NO: 182848 - DNA, 90 bp, Homo sapiens
gctctcagatctggaatctgtggacccagagctgcataagagcttggtgtggatcctgaccgtataatagacgctggccccaaaggaaac

SEQ ID NO: 182849 - DNA, 75 bp, Homo sapiens
ttgggtgctgatgtcaatgctcaggagttggaattagttggtccctactgtcccccatgaggttgtgaacccctc

SEQ ID NO: 182850 - DNA, 73 bp, Homo sapiens
gcagccaaggctatggacaagcatcacaagtgttggatcccagaacaagaatgattttattcaagatgttgac

SEQ ID NO: 182851 - DNA, 75 bp, Homo sapiens
tgattcttctgcctcagcctcccaggtgctaagtgtggtggctcacacctgtaatctcagctacttgggaggctg

SEQ ID NO: 182852 - DNA, 90 bp, Homo sapiens
ccatgagtgtaaggttaccccagagtatagacaggtaattaataatgcttgtgctactcaagccatagtgagtgtgttactgaactgtac

SEQ ID NO: 182853 - DNA, 100 bp, Homo sapiens
gaaaaaatgaatggaatgctcctaaatgatcgcaaagtgaacatggagctgatccaggacacctcccgcccgccactggagtacgtgaagggggtcccgc

SEQ ID NO: 182854 - DNA, 50 bp, Homo sapiens
ccaaatggttgaaaacagatatacagtgagaaagatcagtctaaagaaaa

SEQ ID NO: 182855 - DNA, 74 bp, Homo sapiens
gcagagaatgatccctttgttagaccaaatttaccacaacttttgctaatccagactttacacaacctatctca

SEQ ID NO: 182856 - DNA, 75 bp, Homo sapiens
caacaggagctgatcaaccaagctcaacgggacccaggtggagtctgtacagctcaaagtcaacatagcccgaaa

SEQ ID NO: 182857 - DNA, 49 bp, Homo sapiens
accatggaaaaagtgacttgagcaggcagtatttggcagtcgtattcag

SEQ ID NO: 182858 - DNA, 100 bp, Homo sapiens
aggtacaggctcagtctgcggccaagactccgtcctgcaagaaatgttgcagtctcttgcacagcgcccagctccagcaaacaccaatcgtgagaggcgg

SEQ ID NO: 182859 - DNA, 75 bp, Homo sapiens
ggcccgggcgagcgggtgcgtctgccgcagagtcggcacctgaaggacatggagatatctcttccaaatgcttga

SEQ ID NO: 182860 - DNA, 75 bp, Homo sapiens
tctgcatatcatggggagatagacgctgctgcctggttcccttctggagaagagtcaccgggtttggttctgttt

SEQ ID NO: 182861 - DNA, 75 bp, Homo sapiens
cgagtccgcgggaagatggcggcgccgctcatccccctctcccagcaggggccaaaccagtgctcctgccacctc

SEQ ID NO: 182862 - DNA, 75 bp, Homo sapiens
tagactccatggcaccgggctgagcggggaacccgagcgtcatgttagggtgaagcagaggacctcagtgctgaa

SEQ ID NO: 182863 - DNA, 75 bp, Homo sapiens
tagaccagaaccttagtcccgggaaaggacggggaggtttactgcatcgacgcgcggttctacgggaacgtcagc

SEQ ID NO: 182864 - DNA, 100 bp, Homo sapiens
caatgaggcgggcagcactgcgtggaggccatagtggagtttgactaccaggcccagcacgatgatgagctgacgatcagcgtgggtgaaatcatcacca

SEQ ID NO: 182865 - DNA, 78 bp, Homo sapiens
tccagaagatcacacagtgttcatgaacaaggctcagttatgatgtttgagcaccttattaattctaatggaattaag

SEQ ID NO: 182866 - DNA, 90 bp, Homo sapiens
gatgaatcttttcttcttgaaattaggcagactcttcaaaacgcactcattcagtttgctactagatgtccagaaggcttcttgggggaa

SEQ ID NO: 182867 - DNA, 75 bp, Homo sapiens
agctggccgagcaggctgagcgatacgacggagtttttcttaaatgtgaaagatatccttcgcgctcctgttgac

SEQ ID NO: 182868 - DNA, 100 bp, Homo sapiens
ggattcgcagggaggatgtcgggacaccccggaagctgggaaatgggaacaacctatcttcagcactcgagctcatgtcttccaaattgacccaaacaca

SEQ ID NO: 182869 - DNA, 116 bp, Homo sapiens
cctgagccatggagaagggacagacatcaacttttggatccaagctggagtgcctggttctgcacttttaaaagaaaagcaaaggcatcgattacataagttcttgtgtctcagag

SEQ ID NO: 182870 - DNA, 50 bp, Homo sapiens
aaggccaagggcaagtgatttgacagaaaagaggcacagttagatgaaga

SEQ ID NO: 182871 - DNA, 83 bp, Homo sapiens
tatggctggttccccaacatgcctcaccctcatctatatcctttggcagctcacagagaatgtaactggtcactacatttccc

SEQ ID NO: 182872 - DNA, 90 bp, Homo sapiens
cacggcgccgggccccctagggattttcagtgtcccgagcaagagaagcagtcctggatgcccactttcttgttttggcttcagatttgg

SEQ ID NO: 182873 - DNA, 75 bp, Homo sapiens
actgtccgagaaattataggtgatgaactagtccagcttattctaccagattccatgaaagtattgccagtgtac

SEQ ID NO: 182874 - DNA, 100 bp, Homo sapiens
gcggcctcaccatacaggaacagggcagacgttagcgtgagtgatcactctcaatcccgggtctcctctgagcctccggcctccataagacccaaaacag

SEQ ID NO: 182875 - DNA, 100 bp, Homo sapiens
cattcctgcactaacggcaactctacggattggttgccgtggtctttactgcttttctccctgatgtgtgaaacaagcgccttctatgtgcctggggtcg

SEQ ID NO: 182876 - DNA, 99 bp, Homo sapiens
ttcagcgacggcggcagcggccggagccgggccgggcagctagcagggcgcttcgggaactcattatacaatgacaaatggaggcagcattaacagttc

SEQ ID NO: 182877 - DNA, 75 bp, Homo sapiens
ccaggcaggaagattgctggctcagaggctctatgcaggttccactgtcaaggctgaccggttccctgatgtgtt

SEQ ID NO: 182878 - DNA, 90 bp, Homo sapiens
ctatgacaatctcatcattttctccccttcggtagaagagtgatcagcagctggactgtgccttggacctaatgaggcgcctgcctcccc

SEQ ID NO: 182879 - DNA, 51 bp, Homo sapiens
tgaagatacaggaggaagcagaggtgctggagaatctggtaaaagcaccat

SEQ ID NO: 182880 - DNA, 82 bp, Homo sapiens
gcccgttgcgctgcagacccgcttggccaagagaggcatcctcaaacatctggagcctgtctcagaggagcagtgcctgtac

SEQ ID NO: 182881 - DNA, 76 bp, Homo sapiens
gcctcttcatcaagatttcagacaagctccttcggcattccctgcagtgcagtacctatctcagccacagccacag

SEQ ID NO: 182882 - DNA, 75 bp, Homo sapiens
agcttgtgccaagaggttctctccccctcctgctatggagaaggtatgagagaatcgaaatcccaatccatattg

SEQ ID NO: 182883 - DNA, 74 bp, Homo sapiens
cgtcaggcggggatacagcctggaagctatcatggtgaacttacttcagattgtgcgggaccactgggttcatg

SEQ ID NO: 182884 - DNA, 100 bp, Homo sapiens
gcaagtatgtcccggtctctgcagccgccatcttcctagtgggagctacgacactcttctttgcctttacaccagcatgttttggaaatttgatcttcac

SEQ ID NO: 182885 - DNA, 54 bp, Homo sapiens
catcgccacccgttttgacggaacacatgattcagtccctcaaggcgttgattg

SEQ ID NO: 182886 - DNA, 100 bp, Homo sapiens
tgggatcttcttcactgcctctggcatggatgagggatcatggcccaagttgcaatgtccaccctccccgttgaagatgaggagtcctcggagagcagga

SEQ ID NO: 182887 - DNA, 75 bp, Homo sapiens
ttttatggtacttgactatctttttaggcaaaatagcaggttcctgatgaaaagttatgatcaggtgcactcagg

SEQ ID NO: 182888 - DNA, 100 bp, Homo sapiens
cccactatggtggcatcaaccgagttcgggtggataattactgtaccttcctcatggaaaaagttttatttaaagtgttatttctcattgaatactatca

SEQ ID NO: 182889 - DNA, 100 bp, Homo sapiens
caccatatcacctgctgcagcaacgtgacagccaggatgccagtgctgagcaaagggtctctctgtggtggagcaagagaaactggacaacctgatgctg

SEQ ID NO: 182890 - DNA, 74 bp, Homo sapiens
actaaatggactgatctctttgacaataagatgtcctggagcttctcatcggagagttgccctggagagaagga

SEQ ID NO: 182891 - DNA, 73 bp, Homo sapiens
aaaggagtcagggatggctcttcctcaggtggagccgccaccaaaatgcagattttcgtgaaaacccttacgg

SEQ ID NO: 182892 - DNA, 100 bp, Homo sapiens
gtttggtctctaaaagtaaaggggttcaggataagtttgaggtgctgaattacacaagcattcctatctttctcccggaagtcaccattggagctcatca

SEQ ID NO: 182893 - DNA, 96 bp, Homo sapiens
aagctagggtcgccgccactgccgcaggaggcgtgagccagaagatcagctgccatgttacttgactcacaccaaccctagagtggatgagattgt

SEQ ID NO: 182894 - DNA, 98 bp, Homo sapiens
aaggtctggacactgaaaccaccgtggaagtcgcctggtgtgaactgcagtttggatgccgacatctggaaaaagtttttgtctcgcccagccttgcc

SEQ ID NO: 182895 - DNA, 73 bp, Homo sapiens
gcatcgccacagctgaaggctgcgagggactaagagcagagtacattttgaccaatttaaagaagcattaata

SEQ ID NO: 182896 - DNA, 101 bp, Homo sapiens
ctcttcaactgcggagacggcctcacctacaacgatcattcttcggaacatagctccgcacactgtggtggattccatcatgacagcactgtctccttacg

SEQ ID NO: 182897 - DNA, 98 bp, Homo sapiens
agtaacccgcgaaatgatgggatagcgttgcaaatccttaaaagagtcttaacggtgtgagttcttgatacgaatgaaaggccaagagtttgttgatg

SEQ ID NO: 182898 - DNA, 75 bp, Homo sapiens
ttcctttgaccacgttatcaaggaggcatctgggaacaaagtcagtcgccagtcagtgttgtgtggaagccagaa

SEQ ID NO: 182899 - DNA, 75 bp, Homo sapiens
cggcatcactggagtggtggcgcagctgtttcctccggatgtatgacaatcctgcccacaattctgttcttaatt

SEQ ID NO: 182900 - DNA, 88 bp, Homo sapiens
atgatgaaatccagtttgacgatattggagatgatgatgaagacattgatgatgaggaacatatgcagcagaaaaaagaggaggaaga

SEQ ID NO: 182901 - DNA, 75 bp, Homo sapiens
tgctggatgcacagggacgtggtcctggctctgggggacagttgctgtggttggctgataaatatttgtcgaaga

SEQ ID NO: 182902 - DNA, 100 bp, Homo sapiens
ttttaactaaattttctattttccttaaattctagaaagcgaaattattattgacgatggacaatttggaatccacagaacaggagtacagctgtgtagt

SEQ ID NO: 182903 - DNA, 82 bp, Homo sapiens
tcgctggtggtgcaggcgctgcgccgcaacgccgagcgcaccgacatctgcctgctcaaagatcctggctctgcagagagaa

SEQ ID NO: 182904 - DNA, 82 bp, Homo sapiens
tccgggcaggggcagcgggagccggccgggtctcctctgagcctccggcctccataagacccaaaacagatgacacctcttc

SEQ ID NO: 182905 - DNA, 75 bp, Homo sapiens
catggcaccatgcaaggggggcactacacagcgcgttccttcacctcgggcagaataactttgcagaagcccaca

SEQ ID NO: 182906 - DNA, 123 bp, Homo sapiens
gggcaggttgtcataatccacatgctaactcgatatgctcggacacagtttgtcagcccttggaaagagatttgaaaaatgtgtgagtgctaaggaagctttggagactgatctttataagcg

SEQ ID NO: 182907 - DNA, 75 bp, Homo sapiens
gttcgactgcgagggcctgagacggctgcttggcaaggactctgtctactagtgacgatgtcgaagacagggaaa

SEQ ID NO: 182908 - DNA, 89 bp, Homo sapiens
ggggaccccggtacggacctgtgcaggtgaggacaggccaggtgtcatggagaaactccagctgggcccagagattctgcagcgggaaa

SEQ ID NO: 182909 - DNA, 113 bp, Homo sapiens
gtgtgatttcagtggaataaatggcgtccaaagtcacagatgctatagtctggtatcaaaagaagcggttaagaagattgtctaccaaatatagaacagaaaagatatatccc

SEQ ID NO: 182910 - DNA, 75 bp, Homo sapiens
gccgggatctcaggtcctcgggggcggcggccacgccaaggacggaacatggtccaagacaattcctgggaaagt

SEQ ID NO: 182911 - DNA, 100 bp, Homo sapiens
tttggatggatgtcgaccatgtgactgtgaccttgggggagccttaaacaacagtatggaaatttcatcgataagctaagactcttcaccaggggaggat

SEQ ID NO: 182912 - DNA, 107 bp, Homo sapiens
cgagcgagcagacgcggccctggcgcccgccctgcgcactcaccatggcgacaatgcagatcttcgtgaagactctgactggtaagaccatcaccctcgaggttgag

SEQ ID NO: 182913 - DNA, 87 bp, Homo sapiens
cttctcccgagaaggggtttcggaggtcgcctggtcggcgctctggatgcagtgttggattccaatgcacgggtcgctccatttcga

SEQ ID NO: 182914 - DNA, 90 bp, Homo sapiens
cggaagctggttttcaggccacaaatgctttcacagggcggcgactggcggcgcgatggacctgaccgggctcctgctggacgaagaagg

SEQ ID NO: 182915 - DNA, 98 bp, Homo sapiens
gacatggaggacggcgtgctcaaggagggcttcctggtcaagaggattctgattcccagcatagccacgaagtgatgcctctcctctatcctctcttt

SEQ ID NO: 182916 - DNA, 111 bp, Homo sapiens
agcagctgaacgagtgcaagcagctgtccgagtcccaggtcaagagcctctgcgagaagcattttgaaagcgaagcagaagccgtagaatcagcggcgagcctgttgaaag

SEQ ID NO: 182917 - DNA, 100 bp, Homo sapiens
ggaggaaaatggctccgagcagggaccgcctgctgcactttgggttcaaggcgacaatggtacctgcggatgctgcaatgttaccggtgcaggcagtggt

SEQ ID NO: 182918 - DNA, 75 bp, Homo sapiens
ggaacatctcttcccagcggctcagtttgaagatggcatcctggacacttgcctgtatgtgatggacagagcaca

SEQ ID NO: 182919 - DNA, 75 bp, Homo sapiens
ctttccgtcctctgaggcgacggccgcggctgcacagaacctcaagaaggcatgaagccagcccctgcagtgccg

SEQ ID NO: 182920 - DNA, 99 bp, Homo sapiens
ccgtatcttcgtctatttcatcacaaaactgtcccgggtgggaagaggaacagcctatgtgggcttccacggaggttgcagtccatgagctgggaaagg

SEQ ID NO: 182921 - DNA, 100 bp, Homo sapiens
gcgtgtcataaaataccagtggaggccgacttcttgtatgcatactccacagcacctgtcatgttgtcataggaacaactggagaagaataaagtggaca

SEQ ID NO: 182922 - DNA, 98 bp, Homo sapiens
cgtcggtcagaaaatgaagagtttgttgaagtgggaagattggggccttctgattattttgctccatcaagtatgatggtgaaggatgaatatgtgca

SEQ ID NO: 182923 - DNA, 51 bp, Homo sapiens
ggggctgctgtttctcttcgccgacggtgccgtgagcgatgtggagatgca

SEQ ID NO: 182924 - DNA, 109 bp, Homo sapiens
gcttcatctgcgatggacagaataactgtcaagacaacagtgatgaggaaagctgtgaaagttctcaagagctagacccaatacagaattgatttgaaaaacagtgtgt

SEQ ID NO: 182925 - DNA, 82 bp, Homo sapiens
gagaccttacctgtcaccttggctctcccacccaatggagatggctctaatgaacaagttgaaatcatcgcagaaggataaa

SEQ ID NO: 182926 - DNA, 82 bp, Homo sapiens
atctcttctcttcattcccctcactgcaagcggcaaccaagtctgggcaccacaagcagtgctctggtctggggtctctctg

SEQ ID NO: 182927 - DNA, 82 bp, Homo sapiens
ctaacttcagcggtggcaccgggatcggttgccttgagcctggccggcgaccaccaggggcctgaggatgaagccaagtctg

SEQ ID NO: 182928 - DNA, 100 bp, Homo sapiens
ctcagaagcaccactggaaactcagaggatgccagcccccatcagattgcgggagctgatccggaccatccggacagcccgaacccaagctgaagaacga

SEQ ID NO: 182929 - DNA, 50 bp, Homo sapiens
tctccttttccctctccctttccctaagaattcagcggggtgccaagtcg

SEQ ID NO: 182930 - DNA, 97 bp, Homo sapiens
tacaagacaacaccctgatctggcatggacatgttactgaagctaaaggagatgtttaactccaagtttggatctattcccaagttttatgttcgag

SEQ ID NO: 182931 - DNA, 50 bp, Homo sapiens
gaaattgcaccacagatatatgggttggaccattgcaatttagagatgtg

SEQ ID NO: 182932 - DNA, 122 bp, Homo sapiens
ctggggtgatgataccaatgatcctgaaaacagaaggaaattgaaggaacttggagttaatggtctaatttatgatagttacgccccatggtgtccatcctgccagcagactgattcagaat

SEQ ID NO: 182933 - DNA, 100 bp, Homo sapiens
cccataagcaactgtgaaattacaataacagatcctgggaagttctacaattctaattcaggtgataacgtggtgctggaccagacctacctgtggcagg

SEQ ID NO: 182934 - DNA, 74 bp, Homo sapiens
ctaaaaacaagactggggctgctcccatcattgatgtggtgcgatcgagtgaagttcccagaccctacgccccg

SEQ ID NO: 182935 - DNA, 75 bp, Homo sapiens
gctccagtttatgcagatttgatggcaatacattaaaaactactcatgtggttatcaatactctggctgaccatc

SEQ ID NO: 182936 - DNA, 74 bp, Homo sapiens
ggcgaacatgcgcttttgacacattggagcttgataactatggacagcaagaacttgcggatctttttgtgaac

SEQ ID NO: 182937 - DNA, 82 bp, Homo sapiens
cagacctgagccactgcgcccagccttgatcttgaggagttcatgatcaagtgttgcccacaccaaatgcttcatccagagt

SEQ ID NO: 182938 - DNA, 88 bp, Homo sapiens
aacttgtaatatctttacatatgcttcacagggtgaaaggttgagccatgcagtaggctgtgcttttgcagcctgtttagagcgcaag

SEQ ID NO: 182939 - DNA, 100 bp, Homo sapiens
gtatactgtggtgaagaaagtgagcgaggagtcagaaactcagccactggttgccttggtaggcaataaaacactgtgctcacctggggtgctgcaaact

SEQ ID NO: 182940 - DNA, 100 bp, Homo sapiens
gggggttccatctcccaacttgtccatgttgaagatgaaatccactgaggagggaagtccagcaccctgtgtgccagtccagaactggcccatctgtaga

SEQ ID NO: 182941 - DNA, 75 bp, Homo sapiens
gagagcagcctgccggggcggagtttgcaatggattttggataaacaagatctgttgaaggagcgccaaaaggat

SEQ ID NO: 182942 - DNA, 117 bp, Homo sapiens
tgcgggggggagagccactgacgccgggaccgggaccgccgccgccgccgccaccatgaggctgggaggcggcagaatgcagccagaggagggcacaggctggctgctggagctgct

SEQ ID NO: 182943 - DNA, 100 bp, Homo sapiens
aagacgaacgcacttaaaactggagataaaatacttgagagtaagcaggaaattcacaggaggtctgctcggctcagaaacactaaatacaaatctgctc

SEQ ID NO: 182944 - DNA, 74 bp, Homo sapiens
cctggctggggaaaagggaagtgaaaagagatctgttttcagggaacctcgagtggttggataagagcaagtcc

SEQ ID NO: 182945 - DNA, 74 bp, Homo sapiens
tgtggatcgctgtgatcgtcacttggtaattgagggttttctgagcaaagaagtaagttacatcgtgtccagcc

SEQ ID NO: 182946 - DNA, 100 bp, Homo sapiens
gtgcattctctgaaggcatcaacaatctgacggcactacctcctaggacagagaaaatggctgttgaccaggactggcctagtgtttacccagttgcagc

SEQ ID NO: 182947 - DNA, 75 bp, Homo sapiens
accccttcaagttctagtcatgggcgacatggagtccaatgggaaatacatcaccaaatctggaacccgtgtgga

SEQ ID NO: 182948 - DNA, 82 bp, Homo sapiens
ctttccagacagaaaccaaacttcatctcattttagtgtcgacttcttccactacaaaatctccagcgtccagtgcctcagg

SEQ ID NO: 182949 - DNA, 100 bp, Homo sapiens
ttgtcctttccaacatccagagctgcatcattccttggggcaaaatgtggacaaggggaagacgagcacgccctcatccagcagtattgccaaacactcg

SEQ ID NO: 182950 - DNA, 50 bp, Homo sapiens
gttaaagttggatgtgctggaacagatttaatccagagactgacttcact

SEQ ID NO: 182951 - DNA, 82 bp, Homo sapiens
ccaggattagggaaagtcaatgaattttcctgcatggagtgctacatcctcttgttccagtctcagctggctgctccgtggg

SEQ ID NO: 182952 - DNA, 120 bp, Homo sapiens
gcgccaagacgtggacactgagccccagaaacgaaatacagaggagtcatcctcacctgttaggattcaagatttatggaaagttacctcttatttctttacgaatctcagataaaaaac

SEQ ID NO: 182953 - DNA, 50 bp, Homo sapiens
cacctgagggactggctcctgggcaccacacactggaagcagacgctgtt

SEQ ID NO: 182954 - DNA, 82 bp, Homo sapiens
ccagcgctcccggccggacgtcaccccccagtggtgctgggtgccaagtcctgccctgccaacttcttggcagctgccgacg

SEQ ID NO: 182955 - DNA, 83 bp, Homo sapiens
catggtatcaattttgtcagtcctgttcgaaaccaagtcgaggctgtctgtcaacagcgtgactgctggagactactcccgac

SEQ ID NO: 182956 - DNA, 75 bp, Homo sapiens
ttttggggcagaatacagagatatggaatcagatcaaattttctccggtggctaaaaagttgtttgtggtaactg

SEQ ID NO: 182957 - DNA, 73 bp, Homo sapiens
agtttgccatcccaaggccgaagggatctgaagggagccgagctccttctgcagaagggcgctgagaagggag

SEQ ID NO: 182958 - DNA, 87 bp, Homo sapiens
atctcaggtcctcgggggcggcggccacgccaaggacggggagtgcatccgccccaacccttttccccctcgtctcctgtgagaatt

SEQ ID NO: 182959 - DNA, 75 bp, Homo sapiens
tgaccctgtgcgggagaggctcaagcgggacctgttccagtttaacaaggaggccccgtgtgggccgcggcccgg

SEQ ID NO: 182960 - DNA, 100 bp, Homo sapiens
tagaaggaaaaacagaacgttgcaaactctggaaaaaaacttgggtgagcctgaatttaaatacattgggaatatgcatgggaatgaggctgttggacga

SEQ ID NO: 182961 - DNA, 100 bp, Homo sapiens
aactggaattgggcaaagttgctgccaaattatctgagactggataagatgaccttcagtgtgctgctcaaaaacagatgagtctggaagtgttagttgc

SEQ ID NO: 182962 - DNA, 100 bp, Homo sapiens
gggtgggattgcctccgggctgggcatgcaaaacttgaattcttctagacagtggaagaacgcagttttgttgaaaagcacagatggccgtcgaatatgt

SEQ ID NO: 182963 - DNA, 74 bp, Homo sapiens
cggccctgggagctggaggaaccgcggttttaaaatcaaagatgggaaaatcggagaaaattgcccttccccat

SEQ ID NO: 182964 - DNA, 88 bp, Homo sapiens
aacaaagtgggaaagggaagcttagcccgccgctgccgcctccgagcagcccgccagtggtcgtaacccacaaaatccttcggaaggc

SEQ ID NO: 182965 - DNA, 75 bp, Homo sapiens
gcggatctcatatcttcacttggcaaactcaacaagtgccaccgtgggccttaattgcaatagccatagtcgcag

SEQ ID NO: 182966 - DNA, 52 bp, Homo sapiens
aaaaggcctaagaattttggcattgatgttccatttaagcagacctcttcca

SEQ ID NO: 182967 - DNA, 100 bp, Homo sapiens
cgagcctgggaggccggccggtgccagcacctttcggcttctgagacggcggcagcagcggcattcagattcatgatgttgctatcaaaagttgagaaat

SEQ ID NO: 182968 - DNA, 100 bp, Homo sapiens
ttctccctcatgtaccccaggtatctgctagaaagagaagagaactagggacacctgccaccctcttcctagctataaagagaatgtcatgaaattatca

SEQ ID NO: 182969 - DNA, 96 bp, Homo sapiens
caggaaaggaatgaaggaacccacgaagcttttaaaaaaacattctacccaagtctacctgggaccgtagttatgcttgtcctagcttggaaattg

SEQ ID NO: 182970 - DNA, 90 bp, Homo sapiens
cccgtccccggcagcgacaatgagatgttcctcctgctgatcaagagaagctttttatccagaagttacgtcagtgttgcgtcctctttg

SEQ ID NO: 182971 - DNA, 100 bp, Homo sapiens
gccagccgaggctacaaaaactaaccctggatcctactctcttattaaaaagatttttgctgacactgacatcatgtacacaggcacgcttgactgctgg

SEQ ID NO: 182972 - DNA, 99 bp, Homo sapiens
aagacaaagacccagtgaacaaatccgggggcaaggccaaaaagaaggtgtcccgacccaggctaagcttgagcatggctgagcaggagcccacagccg

SEQ ID NO: 182973 - DNA, 97 bp, Homo sapiens
cgcaaccgtcggtgggtcggggatcggtcgcctgagaggttttaaaatcaaagatgggaaaatcggagaaaattgcccttccccatggccagcttgt

SEQ ID NO: 182974 - DNA, 98 bp, Homo sapiens
tcagctgagcacggaggggataggcacggacgcaacacttttggaacttagacgctagatgatgatgctgaagctatccttgctgcagacttcgaaat

SEQ ID NO: 182975 - DNA, 74 bp, Homo sapiens
ctttcacagctcagtacctaagagcatagcggcctgaccacaggggtggccttcgggcatcacgccaagttcat

SEQ ID NO: 182976 - DNA, 98 bp, Homo sapiens
gtgacctggccgatgaggaagtactgagcctgttggaggaactggcccggaaacaggaggacctctacgaactcgacggggaccccaagaggaaggaa

SEQ ID NO: 182977 - DNA, 75 bp, Homo sapiens
cgggtgccgaggagcgggaagagttgctggggacgcagtgatgactgcagtgagggcatgggagttctggaacct

SEQ ID NO: 182978 - DNA, 96 bp, Homo sapiens
tgtgaaacagagaaagataggcggccatggtccaaccttgaagacatcaactagtcaggcagtcttccgtctccagtctggcatctgccatctctt

SEQ ID NO: 182979 - DNA, 75 bp, Homo sapiens
ctccagctgtgaaagcaacataaatgagctggaagtcgagtgtgctactcaactcaggagatttggagacaaact

SEQ ID NO: 182980 - DNA, 75 bp, Homo sapiens
ggggaggcgtccctccctggaccccggcgacttcctctctcgggtctctggacaccagctcttccatcaccagcc

SEQ ID NO: 182981 - DNA, 74 bp, Homo sapiens
gaggaacaaaggcgacccaagacacccagagagggacaggtgtccctggccagtgtccttccacctgtccacaa

SEQ ID NO: 182982 - DNA, 95 bp, Homo sapiens
agagcaaagaatactattgttgccacagggagagaacattgaaagtattctctaagctatttgaagagagtgactaaatgcacctgggtcaggct

SEQ ID NO: 182983 - DNA, 76 bp, Homo sapiens
ccaaataaaatagccatctcacctttgaaatcgccaaataaggatacacacctgctaaaactgcttaaaacattag

SEQ ID NO: 182984 - DNA, 100 bp, Homo sapiens
atacagtgacagcacaggtcacagtaaggccaaaaatgtgcatactcacagagttagagagagggatggtgtgaaagagtttctagccaaagccaaagaa

SEQ ID NO: 182985 - DNA, 75 bp, Homo sapiens
cttcaaagagcagatcatcgagctggagctgaaggagaccttgaagaccttgcggcaggtggaggtgattaattt

SEQ ID NO: 182986 - DNA, 74 bp, Homo sapiens
cgcaggaaacatggcggcggcgggtgttgtgagcgggaaggagaggaaaattctcagaatttaaagctcataca

SEQ ID NO: 182987 - DNA, 74 bp, Homo sapiens
aaagagatccagggcttcctcgattgtgccgcgagggctcagaatcatccagaagtgctgaatattcgactaca

SEQ ID NO: 182988 - DNA, 95 bp, Homo sapiens
tcaagttccgggcccacgacgcctgctccggccgaggacatgtctcaggaaggctatggaactagatctcaacctcctctggcccccggaaaacc

SEQ ID NO: 182989 - DNA, 95 bp, Homo sapiens
caaagtaattttctgaagggaagctgcagaatatggaaaacatatattggagctacatggatggttatcaatgccgggaagagcacacacaatga

SEQ ID NO: 182990 - DNA, 100 bp, Homo sapiens
acaaaattctgaactcaggacttggcaaaggaagaaattgttgagcttccagatttggattacctgcgaaccatgactcatatagtctttgtagattttg

SEQ ID NO: 182991 - DNA, 90 bp, Homo sapiens
tgctcctggtagccgctggccggcgcgcagcagaaccctctgcaggtcctggtgaacgccatcatcaacagtggtccccgggaggactcc

SEQ ID NO: 182992 - DNA, 75 bp, Homo sapiens
cgcgtcacgggataagactcttcgcatctgggacctgaataaacacgtccagtcaacctgcaaccaaaacgagac

SEQ ID NO: 182993 - DNA, 90 bp, Homo sapiens
cctcggcgattatggacccggccgaggcggtgctgcaagagaaggcactcaagtttatgattgtggtggtgccatgcagcaagaatcaga

SEQ ID NO: 182994 - DNA, 96 bp, Homo sapiens
gaagacttctgaagaacaaatcagcctggtcaccagcttttcggaacagcagagacacagagggcagtcatgagtcaccttcaggccattcagagg

SEQ ID NO: 182995 - DNA, 78 bp, Homo sapiens
caaatttacatacgagaatggcttgtgaaatcatgcctctgcaaagatttgggatgatgaaattgttgcagactttta

SEQ ID NO: 182996 - DNA, 83 bp, Homo sapiens
gaccgcgacgcctgcgacacggtgcgcgtcaaggccctcttcgccatctcctgtccaaccgtgactgccagatcgaccagcac

SEQ ID NO: 182997 - DNA, 75 bp, Homo sapiens
agacgccaaggcccctccggccagggccgggagccgggccggcctagccagatctcttaagggcagtcccaagat

SEQ ID NO: 182998 - DNA, 80 bp, Homo sapiens
gccaaccaaaaggcgatccacatttgttcagtctcctgcagatgcctgcacacctcctgaatcatattctaagaactcag

SEQ ID NO: 182999 - DNA, 121 bp, Homo sapiens
gtttctctccctctgcccccccttccccacgcaaccccagatccatttacactttacagtgttggagagcacaatggctgaacaagtccttcctcaggctttgtatttgagcaatatgcgg

SEQ ID NO: 183000 - DNA, 101 bp, Homo sapiens
ccctaaaatctccgcagctctggttcctgttgcggccgatgaggaaactgaggcttggtgaagttacgaaacttgtccaaaatcacacaacttgtaaaggg

SEQ ID NO: 183001 - DNA, 96 bp, Homo sapiens
caacccatccagatcaccatgccggtgttcaatatgaatgccccagttcctcctgttaatgaaccagaaactttaaaacagcaaaatcagtaccag

SEQ ID NO: 183002 - DNA, 101 bp, Homo sapiens
ggggagaagaggattggaggtgtcagtgttaaaggaacctctacaacgaaggtgaagccacggaagataagtgaatccctgttgttactatccatgccagc

SEQ ID NO: 183003 - DNA, 76 bp, Homo sapiens
gcctaccatatgttccaaatactggtaaagttctttacaaagttcgctggaaaggctatacatcggatgatgatac

SEQ ID NO: 183004 - DNA, 82 bp, Homo sapiens
agcgggagctggacggcgagcgcgagcggcgcgagaaagtcatttcatgggcaacaacacagtgctggatgttttgcggcgt

SEQ ID NO: 183005 - DNA, 101 bp, Homo sapiens
ccggccacctccatcactggcgtcaccatgggggctgtgctgggtgtcttctccctcgccagctggcactattcctgatcagagaactccagttgcttcaa

SEQ ID NO: 183006 - DNA, 75 bp, Homo sapiens
ttttagtgctttttatttttccccaattcagcagagaatattttcaaggggggacactcatgaggaccatgatac

SEQ ID NO: 183007 - DNA, 100 bp, Homo sapiens
tagcagcagagaagccttcctggaaaaggtccggtttatcactaaaatatggcatcctaatattagttccgtcacaggggctatttgtttggatatcctg

SEQ ID NO: 183008 - DNA, 100 bp, Homo sapiens
taaaagatgccttgactgaatttaatgagggtgggagcctcaaacaatatgacccacatgagatgagttttgatcatcctgagaaaaatgggccttggcc

SEQ ID NO: 183009 - DNA, 82 bp, Homo sapiens
aaggagcgcctggctcttctccacaaagacacctgtgccacgaccgtggctatctggtgacccaggacgagcttgaccagac

SEQ ID NO: 183010 - DNA, 101 bp, Homo sapiens
gaaatgcctggaccctgcccagcagaatttgtatagagatgtgatgttggagaactacagaaacctggtctccctagccaggtgtgaagtctggcaacaag

SEQ ID NO: 183011 - DNA, 83 bp, Homo sapiens
ctgggacttcccgtccgcggcgtggaggtctctgctggatgaaccgaatcctaacagtccagccaatagccaggcagcacagc

SEQ ID NO: 183012 - DNA, 74 bp, Homo sapiens
attgaagatcagtacaaaaattcttcaagaaatctaagacacatcatctcagagttggagcacctgacgtttgt

SEQ ID NO: 183013 - DNA, 80 bp, Homo sapiens
cttgtccccacatttgaacagttggcagctttgcagatagaatatgaagattgcaggatacctatatggggtgagcccac

SEQ ID NO: 183014 - DNA, 90 bp, Homo sapiens
cagacggccatgtccgaaacctacggtattggcaagcttgccagtgtacctgctggtggggctgtagccgtctctgctgccccaggctct

SEQ ID NO: 183015 - DNA, 88 bp, Homo sapiens
ccccgcgtttcagccctagggaagcttcatattctccaattcagcctcattctctaataaaacatcagcagattcctcttcattcacc

SEQ ID NO: 183016 - DNA, 100 bp, Homo sapiens
ccacggtctgcccacccaacgcgaagacggtaacccgtgtgactttgactggactccagggattagagctcgatctgcaaggcttcagtggttttgtgac

SEQ ID NO: 183017 - DNA, 75 bp, Homo sapiens
cttctaccagcccatgcccctgaaggcctcgctggagatcgagtaccaaaaatggaatctagttcatcagactac

SEQ ID NO: 183018 - DNA, 51 bp, Homo sapiens
ctcttctcgccctggcggggaaggtactgacttgggcaacagcagtgacta

SEQ ID NO: 183019 - DNA, 98 bp, Homo sapiens
ctgatccctgaagaccaaatagaagtggaggagtgtcaacagtcagaaaatgcacctgcagccggatctggccatctcacagtgggacagcagcagca

SEQ ID NO: 183020 - DNA, 122 bp, Homo sapiens
agaagaccgagagtcaccacaaggccaagggcaagtgatttgacaggaatgaatctgaagtctgctgcagtaaaacacagaaggctttaaaatgttttcttgcataaaattcaaaactttta

SEQ ID NO: 183021 - DNA, 80 bp, Homo sapiens
cggtggcggcggcggcagctgcagtgacatgtccagcatgaatcccgaataccgagcctcttgaagccattcttacagat

SEQ ID NO: 183022 - DNA, 90 bp, Homo sapiens
cacagccatccagactgaggaagacccggaaacttaggggccacgtgagccacggccacggccgcatagttctgggaagtcatcagtgat

SEQ ID NO: 183023 - DNA, 83 bp, Homo sapiens
ccaggaacgaatctctcaggctgcatcaggatgaatgatgacccaagtatggaaaaaccaggaatggatctggcagacaccta

SEQ ID NO: 183024 - DNA, 78 bp, Homo sapiens
tggaattagcatcctctcggggacaaggaagagaccaagctcaaaggtgtcatctacttccaggccattgaggaagtc

SEQ ID NO: 183025 - DNA, 100 bp, Homo sapiens
ggccgccgggcccgggcatggtggtctggggcaacgcggaagcagaagatggctgtgccacccacgtatgccgatcttggcaaatctgccagggatgtct

SEQ ID NO: 183026 - DNA, 80 bp, Homo sapiens
ccggccctctggtacagaagatgtcgtccgagtatatgcagaagcagactcacaataacaaattccaaagcccttaaata

SEQ ID NO: 183027 - DNA, 142 bp, Homo sapiens
agagcttcatctgcgatggacagaataactgtcaagacaacagtgatgaggaaagctgtgaaagttctcaaggtacctcagccagcatggcagcctctttcccacccaccttgggactcagttctgccccagatgaaattca

SEQ ID NO: 183028 - DNA, 100 bp, Homo sapiens
ggcaactttgaaaatgctgtggactacttccacacattccctgtattgaacactgatatacaaggaatgaatagaagtcaagaaaaacagacctggtggg

SEQ ID NO: 183029 - DNA, 75 bp, Homo sapiens
agcaacatgctcctagcagaagcctatggatctggaggtgggattcaaagaagcacacaggctacgtcggcttaa

SEQ ID NO: 183030 - DNA, 75 bp, Homo sapiens
cttcgctgtggcatggcggacgaggggaagtcgtacagcggcatccgtgtcattctggaccttactcccaactac

SEQ ID NO: 183031 - DNA, 80 bp, Homo sapiens
gtcatgcagcaggacgtcactgttggaagaagctgtctgtccccagaccccagagcacgtccggcaccaccatgactggg

SEQ ID NO: 183032 - DNA, 100 bp, Homo sapiens
tggggccattggtgggggcggtggaccagggcaccagttcgacgcgctttttgaagaggtgcagtatattcaggctgagaaaaacaacaagggcccaatg

SEQ ID NO: 183033 - DNA, 100 bp, Homo sapiens
cttgagaactgtccttacgtgacctaaagctggagtattttgagattggagaattaaggtgccagcgagatttcagattcctgtaaacctctaaagaaaa

SEQ ID NO: 183034 - DNA, 75 bp, Homo sapiens
cccctggtgctggagatgctgaaggaatggttttagggaagactgttgccggatgacaaggctgtcactattgtt

SEQ ID NO: 183035 - DNA, 100 bp, Homo sapiens
cggcggcatgatccgacacgccggggcgcccgcgcgcggggaccccacgggttcctccaggagtgatccaaaatggagcgcgggtcctgagccgagggct

SEQ ID NO: 183036 - DNA, 75 bp, Homo sapiens
tgcaaatcccctgctcagggtcttcatccagaaacgagttccttcttggagggaccactcagtagagcctctaag

SEQ ID NO: 183037 - DNA, 80 bp, Homo sapiens
cgtgcagagcaccccaagaggagggccccctgccgctgattacctaaaacctcgggcagaagaggagaggaggatagcag

SEQ ID NO: 183038 - DNA, 100 bp, Homo sapiens
ggaaaacatgcatccaagttccagtttgtggcctcctaccaggagctcatggttgagtgtacgaagaaatggcaggatggggaagcagaatagcaaactg

SEQ ID NO: 183039 - DNA, 98 bp, Homo sapiens
gatgaacccaacctagtgggtgtaatacatcatgaactgcaggttcccacaatcgatggattgcgccatgtggtggtgcctgggcggctgtgcccaca

SEQ ID NO: 183040 - DNA, 83 bp, Homo sapiens
aaagaattcagaaggaacttgcagaaatcacattggaccctcctcccaactgtaggagacaaagcttttgttgatttcctgag

SEQ ID NO: 183041 - DNA, 90 bp, Homo sapiens
ccctcgagcttcgaagtgacatgtacattctcaatgagagcctcacagacccagccatcgttaagcatacttccacaggctgcactcgag

SEQ ID NO: 183042 - DNA, 80 bp, Homo sapiens
cgccgccgccgccgccgctgccgctgccgctgccgcacctccgtagctgactcggtgacttaagagattaaaattaattt

SEQ ID NO: 183043 - DNA, 51 bp, Homo sapiens
cttggctgggaggatcaatgatggtgctggagaatctggtaaaagcaccat

SEQ ID NO: 183044 - DNA, 75 bp, Homo sapiens
gaaagagagagcaggctgaagaggaacgatatttccggtaagaatgattgatgttggctgatattggagtgctca

SEQ ID NO: 183045 - DNA, 49 bp, Homo sapiens
caccatgtgtgcctttctttggaacaggaaatatagtggtcattatgat

SEQ ID NO: 183046 - DNA, 102 bp, Homo sapiens
gaaattttacctggattgttcttaggcccatattcatctgctatgaaaagcaaggttgaaactgatttctcaactccaacaccaagaaggaaaaccccattt

SEQ ID NO: 183047 - DNA, 98 bp, Homo sapiens
gtaaacgggcgtcccggagcctcgatggaggtcaaaatgcagatcttcgtgaaaacccttaccggcaagaccatcacccttgaggtggagcccagtga

SEQ ID NO: 183048 - DNA, 73 bp, Homo sapiens
tagcaccccgagaaccgtcagtttgagccagatggataggaaaaacttgttggagacccgattgcacatcact

SEQ ID NO: 183049 - DNA, 75 bp, Homo sapiens
ctgagctggactctctgccacatcgttcggttcccacaacagcctgacttcgattttcagaattcctcctgggaa

SEQ ID NO: 183050 - DNA, 87 bp, Homo sapiens
gaaagctgcccagccaccagcaaccccccaggctactgcagcactggggtgtcagttgttggtccgacccagaacgcttcagttctg

SEQ ID NO: 183051 - DNA, 115 bp, Homo sapiens
ccggaggccattgagctgtgcacgaccacaccgctgatgaagacaaggactcacagtggctgcaaggtatggcatttcaaatatagatacaaccattgaaggaacgtcagatgac

SEQ ID NO: 183052 - DNA, 109 bp, Homo sapiens
ggctgcggcagacggcgacagtggcggcggcgccatggcagggcttgcaggagcatcagatccatgctgctgctgactcggagccccacagcttggcacaggctctctc

SEQ ID NO: 183053 - DNA, 100 bp, Homo sapiens
ctcatatcttcacttggcaaactcaacaaggtagtatcttccccagcagatgttgctgaaaaagctgacagaattattacaatgctgcccaccagtatca

SEQ ID NO: 183054 - DNA, 100 bp, Homo sapiens
cgaccttaatgggaggccccgggaggccgaggttcgggcgggcgctaatattgacacctgctcagaagaccagaggaccccgttgatggaagcagccgaa

SEQ ID NO: 183055 - DNA, 51 bp, Homo sapiens
cctggacaacccccctaagaagttccgtgatggagtctcactctgtcgccc

SEQ ID NO: 183056 - DNA, 74 bp, Homo sapiens
gtcgtccgcggctccggtcacgtcaccgtggactttgaatccaaagcaaaccatcttggtgattctggtgggac

SEQ ID NO: 183057 - DNA, 100 bp, Homo sapiens
gctccaaagtcatcgtccggtttctcactgtgatgatgaagcatgccaggtctaaactgcagtaatccatttactcagctggagaggagacatcaagaac

SEQ ID NO: 183058 - DNA, 75 bp, Homo sapiens
ctcctttgttactcactgtgttcggagtcaggtctttgctgcagatggtgcctccactgagacttccgcatctgg

SEQ ID NO: 183059 - DNA, 75 bp, Homo sapiens
gaaagcctcctgcagaagtttgcagctcaggagttgattgagtccctcaacaccttacactaagtcaaagcgtgg

SEQ ID NO: 183060 - DNA, 75 bp, Homo sapiens
gcacgacctccgactactttctccttcaaggggatatcattttcaatgcccaatacccagaactgcctcccgatt

SEQ ID NO: 183061 - DNA, 82 bp, Homo sapiens
ggaaaatttcgatattgaagtgtcaaaatccatagatggaaaagatggtcttccccagggaggtcctgaactacacagctga

SEQ ID NO: 183062 - DNA, 98 bp, Homo sapiens
aatgcacaattctatctcttgggcaatcttcacggggctggctgctctgtgtctcttccaaggttgaaatcacaaagattagacacctttttagatag

SEQ ID NO: 183063 - DNA, 100 bp, Homo sapiens
agtgtgggagaggaagcggcggcggcggcgccgggcccgggggtggtgacagcaggtctgaggcttgcattgatgacaatgttgatatggtgaagtttct

SEQ ID NO: 183064 - DNA, 50 bp, Homo sapiens
gggcgccggcgcttacagcatgaggggaactgatcacagccgcacatgag

SEQ ID NO: 183065 - DNA, 75 bp, Homo sapiens
cccacttctgaaggatgacctcgttttgatggacaggttaaagctgaagctcaacaaagatatagtgatctctgt

SEQ ID NO: 183066 - DNA, 100 bp, Homo sapiens
actgcacggatctactcgcactgggaaacctcgacctgtctcccagttggttgcacagcaggttactcagcagtttgtgcctcctacacagtcaaagaaa

SEQ ID NO: 183067 - DNA, 75 bp, Homo sapiens
tgatcaaggatcaatttttaaagctggcctgctgctgtgggtctgcaggctgctctctctgctgtgattgctgcc

SEQ ID NO: 183068 - DNA, 100 bp, Homo sapiens
cgcggccaaacggtgcctgcggtgcctgagctgagtgaggccgaggccgggaggccgtgcccggagactgaggctgatgtgaatccaaaggcctatcccc

SEQ ID NO: 183069 - DNA, 75 bp, Homo sapiens
ccgctgctgctgaggagaggagcgtcaacagcagcaccatggattgtagttcatctcactgaggacctgctttcc

SEQ ID NO: 183070 - DNA, 100 bp, Homo sapiens
agggcaagaacggagcagtaataacttcaactacggggcttaccattccctggaagctgtgaagtatttgactatttggttgcacatggcaggatgaagg

SEQ ID NO: 183071 - DNA, 71 bp, Homo sapiens
gaaggtgctggcatccagtcccatcatggagcacttgctctgaaatttggggactgagtacaccaaatacg

SEQ ID NO: 183072 - DNA, 100 bp, Homo sapiens
acttcaggctcggaagtggctggaagagcagctcaaacagtacagggtgaagcgccagcaggagaggttgaggagctcaagcttgggaaaatggtgtgca

SEQ ID NO: 183073 - DNA, 100 bp, Homo sapiens
tggaagcataggtcaaagctgtttggagaaaatcagaagtacagttttatctagccacatcttggaggatcaactcactatcctgaaggtccattctccc

SEQ ID NO: 183074 - DNA, 75 bp, Homo sapiens
cttgaaagaacatgataattctgtcaaagaagaggtgaattttgtggtatgccagcttgttgctctgtttgctgc

SEQ ID NO: 183075 - DNA, 50 bp, Homo sapiens
tcctctggtatatggacaacccccaggtaaattcgaaccaccattatttc

SEQ ID NO: 183076 - DNA, 74 bp, Homo sapiens
tttcacgttttaatgccgagagtctgcagatctccaggggagcccaccagcctagtcaacatggcctcggaaga

SEQ ID NO: 183077 - DNA, 98 bp, Homo sapiens
caatggtctcaatctctggaaaaacttcttgccaaccaaagtggcgacatgtctaagaatgtgagccagtcacagatggcaaaattgaaccaacaaat

SEQ ID NO: 183078 - DNA, 100 bp, Homo sapiens
ggatcatccagtctcattacgagaaagtgtcttatgtctctggatcctccttgcttaccacacacccccaggtgccagtcacgaattgcccgaacattac

SEQ ID NO: 183079 - DNA, 98 bp, Homo sapiens
tgaagtattaattcttccactgatatctcaaaaggtgatctggacaaaggaacaggtatctcaggaaacacaatttatctttgggagtttttactggc

SEQ ID NO: 183080 - DNA, 75 bp, Homo sapiens
gccggttcttggtgggatctgagcagggtggtgaaggaggagatctttgatgacaatgccaagcttccctgcttc

SEQ ID NO: 183081 - DNA, 100 bp, Homo sapiens
atggagaagctctaagtacactcgtcttgaataggtttggcaaatacgtgtagacctacatttattaaatcatgatggaaatattattgatgctgccagc

SEQ ID NO: 183082 - DNA, 51 bp, Homo sapiens
tggatatagcacaccatccccagccactgatgccattaataatgctgcagg

SEQ ID NO: 183083 - DNA, 100 bp, Homo sapiens
gtggaggggaggattttgaggacacttgtggagagctcgaattccagaatgatgaaattgtgtctgcttagtggcctatcttggcttgtttatgctttgt

SEQ ID NO: 183084 - DNA, 80 bp, Homo sapiens
cctgctgggcttcgtccagatcgggaagggccctgggaggagcggggacactgaggacctctctccaaattggcctctca

SEQ ID NO: 183085 - DNA, 97 bp, Homo sapiens
cgatggtgatggcagcagttactcgcacaaccccagttaagctgcgctccgggagtgttgctgtggatgtatggtcgacgctggctgatttctgtaa

SEQ ID NO: 183086 - DNA, 74 bp, Homo sapiens
cgccaggaccggccgaacgcagagcaaaatgatgcttcaacacccaggccaggtctctgcctcggaagtgagtg

SEQ ID NO: 183087 - DNA, 75 bp, Homo sapiens
gttcatggctagctcttcaggggcaggcacctagagggttggatggcaagcatgtggtgtttggcaaagtgaaag

SEQ ID NO: 183088 - DNA, 50 bp, Homo sapiens
ccgcggccgcaccttcccgccttctcaggagcgatctctctttgagtcgg

SEQ ID NO: 183089 - DNA, 75 bp, Homo sapiens
ctgtttgagaaaaggcctaagaattttggcattgatcattgggcaggtgtatgcagatcctgactgccttccccg

SEQ ID NO: 183090 - DNA, 100 bp, Homo sapiens
cgcgggagcacactctgtgcggagactgggcggccggccgacccttcctgtcgctgacggcgactgcgggaggccagaactgaagcgctgcggcatggcg

SEQ ID NO: 183091 - DNA, 87 bp, Homo sapiens
tggtgatcttaatgggaaagaatactggcttgtgaaaaacagcttttgttaggagtgataaacccaaactgttcagaggactgcaaa

SEQ ID NO: 183092 - DNA, 88 bp, Homo sapiens
ttctcctacctctggctcaagttttcacttatcatctattccaccgtgttctggcatttggccatccagtgtcattggtctcagaggc

SEQ ID NO: 183093 - DNA, 76 bp, Homo sapiens
caatcccccactctttccgccctaatggaggtctccagtttcggatccggccccagctgtcgaaggagaagattga

SEQ ID NO: 183094 - DNA, 100 bp, Homo sapiens
aggttatattccttttgggacgccaattgacccagatgatgtggtaccagttggccaaagaagagcctggtgttggtgcatgtgctttggactagcattt

SEQ ID NO: 183095 - DNA, 80 bp, Homo sapiens
aattaacagttcaacatcaataaaggagcccatggatttcagaaaattatctacattcagagaaagttttaagaaaagag

SEQ ID NO: 183096 - DNA, 73 bp, Homo sapiens
ccaaatgaatttgcaaaacttactgtagcattctccagcagttgcagagggaccaagcccacactgtgacacc

SEQ ID NO: 183097 - DNA, 83 bp, Homo sapiens
ggagaagctgtctctgatccgcaagcatgctcagaccttcattgctctgtgtgccaccgatcttcgtgaagactctgactggt

SEQ ID NO: 183098 - DNA, 100 bp, Homo sapiens
aaattactcacaccaggtggggaattaccacatgggattcttggtcagtgaggatgaaagcaaactggatccaggtcgaatgagtgatttgagtgtaatt

SEQ ID NO: 183099 - DNA, 75 bp, Homo sapiens
cctgcacagccgcggcggcagcagcagtgagaggcgagaaccactgtctctgatcaacgtgcggaagaggaacgt

SEQ ID NO: 183100 - DNA, 83 bp, Homo sapiens
atgggtcgtgacactgggcctgagctttgtctacatgattcgagtttacctgctgcaggtgaccctggcaaagatgagagtgc

SEQ ID NO: 183101 - DNA, 75 bp, Homo sapiens
cccttccagagaagccaggagcacccggcgtcccagacaagccatcatgcagaagggggatacaaacataaagcc

SEQ ID NO: 183102 - DNA, 100 bp, Homo sapiens
tctttcctcccaagtaagggaataaaccgcgaagaaggagcgccccgggccaccgcgcaaccaagtgttgcctggtgagtgtgggcgaaatgctgaaaac

SEQ ID NO: 183103 - DNA, 100 bp, Homo sapiens
tgcgaaggccgggacccggttccccggcccacagtgggggtgtgcaaacccgagagaactggttttacagctcccagcacagtaggaaagagaaatttga

SEQ ID NO: 183104 - DNA, 82 bp, Homo sapiens
gtccagcgctgccggagccgcctgagagagaacgaggtgctcaaagtccaactgaagaaatatgtaggagctgtccagatgc

SEQ ID NO: 183105 - DNA, 74 bp, Homo sapiens
ttgtgcattcaaacatagcaactgaggcaatgaatcgctccctggctaatgtgattcttggaggctatggcacc

SEQ ID NO: 183106 - DNA, 100 bp, Homo sapiens
cgtggcgctacccgcctccggctggctgacgacgggcgcccccgagccgccgccgctgtccggagccccacagggccgttgctccagggagaactgcaaa

SEQ ID NO: 183107 - DNA, 100 bp, Homo sapiens
actcacttacacagtattgggaaatctgtgaaagattggcggcagtaagcacacaatgaatgatcacctgcatgtcggcagccacgctcacggacagatc

SEQ ID NO: 183108 - DNA, 74 bp, Homo sapiens
ctgctgacgcactgtgactccagccagagcccccccacgtttcatccaggatcgagcagggcgaatgggggggg

SEQ ID NO: 183109 - DNA, 83 bp, Homo sapiens
ttgaacaaggccacgaatgtcgcccactggacaacccccagtctcaaatgcattactcccatggctattgaagaacaagtggc

SEQ ID NO: 183110 - DNA, 100 bp, Homo sapiens
ggggttctccgggagagggggagtgcgcggcggccgcagctgccacaaaccagacaatgcagatcttcgtgaagactctgactggtaagaccatcaccct

SEQ ID NO: 183111 - DNA, 90 bp, Homo sapiens
agatgatacgtttgatccagaacttgcagcaacaatagatggtcatccagactcagagctctctctacagagaggaaattctccactgtg

SEQ ID NO: 183112 - DNA, 100 bp, Homo sapiens
tccagcagtatgacaaggcactggatgatgcaatcaaagctcgacttctcaatcccaagtggccaaagctgctgcacaggttctggaacctctggcggtc

SEQ ID NO: 183113 - DNA, 100 bp, Homo sapiens
ttgggccagtcttaaatatctacccatggaataaagagctgtatttgatcagcaagtctggaaaagtttgaaattccagtaaaaattcgtttgagtcctg

SEQ ID NO: 183114 - DNA, 73 bp, Homo sapiens
gcagaccttcccaggaagccagagccacacacaccatcatggtcctggagggttctgataatgatgatgatga

SEQ ID NO: 183115 - DNA, 75 bp, Homo sapiens
attgaggactgccagctggcgctgcagacatttcaacctacgaatgaagagggacacttcccttttcagtgatga

SEQ ID NO: 183116 - DNA, 97 bp, Homo sapiens
tctctgctgggcctgtgtgcctggaaaggaattgttttggcctaggatcatccaggagcccctcaatagtgaagatgatgtgagtgatgaggaagga

SEQ ID NO: 183117 - DNA, 100 bp, Homo sapiens
aggggacctgaagtggactctgagggatgagcggactgagaaattgcccatgggctccataaaaaatgtggtcagtgaacctatcgaaggacatgaagac

SEQ ID NO: 183118 - DNA, 75 bp, Homo sapiens
gctgaagatggatcgagtaaagcagaaggagctcaaaaagtgggatgagtttgaagatattttagaagagaggag

SEQ ID NO: 183119 - DNA, 100 bp, Homo sapiens
ggcgccggggcctagcgctatgcctgcggcggagactgcatcaggctctcgctatctcacgtgagagggcagtggaactccttaggaaatgtctggagga

SEQ ID NO: 183120 - DNA, 90 bp, Homo sapiens
ttgacaacgagttggccattctctatatgaacagcaagaagtcagagatctccgggctcagttgcagattctggccaacatggacagcca

SEQ ID NO: 183121 - DNA, 50 bp, Homo sapiens
cttgaggctccagtcaaaaaccattaaggaatcccttggcaccatgtcct

SEQ ID NO: 183122 - DNA, 100 bp, Homo sapiens
gaccaacctggggcccaaagggaccataaagattgtgtttcctgtaacaaatcgttcaagaaactctggtcccttcatgaacatatcaagatcgtccatg

SEQ ID NO: 183123 - DNA, 50 bp, Homo sapiens
cacaggctgctgggaggagagcataagctatccagtcagttcgctgctat

SEQ ID NO: 183124 - DNA, 100 bp, Homo sapiens
agatcaacgtcctccgggaccggagtcagaaccctccgcagagtaaaggggccagtgtcattcaaagatgtggctgtggatttcacccaggaggagtggc

SEQ ID NO: 183125 - DNA, 90 bp, Homo sapiens
agctcgtgcttcgggatggaaacctatggttatctgcagagggagtcatgctttcaaggacctcatgtttttcgttggaatatacgttgc

SEQ ID NO: 183126 - DNA, 98 bp, Homo sapiens
caagaccctgcccgtggccttcaaggttcatatttggtgcttagacaaattcaaaatgaggaaacatcggcacttgcccttagtggccgtcttttgcc

SEQ ID NO: 183127 - DNA, 74 bp, Homo sapiens
aaggagattgcccggcagatgaagaattctcttctggcctgtgagtttctcctccagaacggggcgaacgtgaa

SEQ ID NO: 183128 - DNA, 100 bp, Homo sapiens
taatcactgaccatcccaatatacaggagggaaaacccctgatcctaaaatgaatgctaggacttacatggatgtaatgcgagaacaacacttgactaaa

SEQ ID NO: 183129 - DNA, 75 bp, Homo sapiens
ggccgatactctttgaatgtcacatacaatatttgtcaggatacgaatcaggttctcttcaagtgctgccaggga

SEQ ID NO: 183130 - DNA, 152 bp, Homo sapiens
cgctgcgtgttgtccacccaagatggagttcctcctggggaacccgttcagcacaccagtggggcagtgcctcgggctgcgtccaaagaggactctgcggctggtgctctggactgcagaagaacaaggtggagttggtgccttccagtatt

SEQ ID NO: 183131 - DNA, 82 bp, Homo sapiens
ttactaccagggccggaggattaccatcaccggaaatgaaatcagacatcactgaaggagttgatattccaaagaaacctag

SEQ ID NO: 183132 - DNA, 100 bp, Homo sapiens
cggaaggtggagatccggagggcctcgggcaaagaagccctgcagaacatcaacgaccagatgaagatctgatcaagcatggctggcctgaagatatctg

SEQ ID NO: 183133 - DNA, 82 bp, Homo sapiens
gctgtctcctccccgctcagttctggaagatgtccgctccatctcatcgtcccgaaggttctttctacaacttcaacaggct

SEQ ID NO: 183134 - DNA, 100 bp, Homo sapiens
tatctgtagatggctacatgaacatgcagcttgtattggttggtgatggtggtactggaaaaacgaccttcgtgaaacgtcatttgactggtgaatttga

SEQ ID NO: 183135 - DNA, 50 bp, Homo sapiens
agagagctctggggtcgacacggtcacacagcggcagtgataaagagcac

SEQ ID NO: 183136 - DNA, 96 bp, Homo sapiens
ttttatggacgagttcttttctgagacggtgtgaagggagacctgctgattgacatcggctctggccccactatctatcagctcctctctgcttgt

SEQ ID NO: 183137 - DNA, 100 bp, Homo sapiens
ggagcatctgcatgagaatggagatcctgggctgcccactgccagggcaggaagatcccaacagtttgcgccataaatataactttatcgcggacgtggt

SEQ ID NO: 183138 - DNA, 96 bp, Homo sapiens
atgggcagatgggcagtgtcggaggatcgtgtcatctgtcccgtggcgctgggtaacaaacctgaatttggcaactggcatcataaacagaagcag

SEQ ID NO: 183139 - DNA, 90 bp, Homo sapiens
cagatgggtgtatggatcctgtacggcagcagtctgggaatgccaacacagaaaccttgccatcaggttggactcagagttaacagcccg

SEQ ID NO: 183140 - DNA, 98 bp, Homo sapiens
gggtgatgtggctgcggcatcgccggcctcgctatggtgttttattccaaacgtctatgctgctttgttcactgcagctcttgttcctttgacgtgcc

SEQ ID NO: 183141 - DNA, 82 bp, Homo sapiens
gggtgagcggcgcagcggcggcagcggagagcgagagaggggagcaggttttataggatcacattgacaaaagtaccatgga

SEQ ID NO: 183142 - DNA, 74 bp, Homo sapiens
cgagctgaccactggatgctctatgaatgcgagagcccctgggccggtggctttggtggcagccgtggtggtgg

SEQ ID NO: 183143 - DNA, 50 bp, Homo sapiens
cacccccggagcgcagtccccgaagatgcacttttgtcttcctggccagt

SEQ ID NO: 183144 - DNA, 100 bp, Homo sapiens
ccggaagaagatgatggaaatcatgacccgagaggtgggtcatgataactgggtacgtggagttctgttccattctggggggaagtttattttgagttgt

SEQ ID NO: 183145 - DNA, 82 bp, Homo sapiens
tcaggctggaacttgccctgtctcctcgcagatgaggtgtgagttcttgatacgaatgaaaggccaagagtttgttgatgag

SEQ ID NO: 183146 - DNA, 101 bp, Homo sapiens
gttgtgtcactgatagaagacttacagagagaacttgagataccagagcagcaggcatgtggtttggttaaaaacttggcccttatgacacacatcacaac

SEQ ID NO: 183147 - DNA, 71 bp, Homo sapiens
aaaacactgcctcagtatctgaacacaagctgtcgcctggttgggcccggaaatgggacgtcgcgctttct

SEQ ID NO: 183148 - DNA, 100 bp, Homo sapiens
gcctttcacttattcatctgtccagcatgactcatccccgggagtgttgatgccacgtcagcagtgtgcccgtcttcaacagcatgcagcagcctgaagt

SEQ ID NO: 183149 - DNA, 75 bp, Homo sapiens
tgctactgaaggaactctattggatgttattcgagctggcagacacaccaaaatctgaaagatatgagcatgttc

SEQ ID NO: 183150 - DNA, 100 bp, Homo sapiens
gagaactgctaacctagggctactgttgattttgactatcttcttagtggccggaggaaatgagtctcaaccagacagccaggaagacccccgagaagta

SEQ ID NO: 183151 - DNA, 97 bp, Homo sapiens
agaggaaagacacacctaccaagaagccagtcaagcggccaggccgccatggcatcagatgaaggcaaactttttgttggagggctgagttttgaca

SEQ ID NO: 183152 - DNA, 100 bp, Homo sapiens
tccttattcttctgatgtggatccaggtgtcatggagaaactccagctgggcccagagattctgcagcgggaaaatccaaggcttatttatgccaggctg

SEQ ID NO: 183153 - DNA, 90 bp, Homo sapiens
cgcctttgcccccgtgcgcacccccgccccgctcaccttagccccgcgcccgaggtgctggagaatctggtaaaagcaccattgtgaagc

SEQ ID NO: 183154 - DNA, 101 bp, Homo sapiens
gaatttatcctcaagagtcagctggcagattcaaccctatgaaaagataaaggccaggggcttgcctgataatatatcttccgtgttgaacaaactagtgg

SEQ ID NO: 183155 - DNA, 50 bp, Homo sapiens
cggcggagcccgcagcttccctgccgaaacacagtgctctgtgcctatac

SEQ ID NO: 183156 - DNA, 83 bp, Homo sapiens
gtgggttcttggtctcactgagttctagaatgaagctgcagaccctcgcagtgaatgagtggcaggatgactggccgaccttt

SEQ ID NO: 183157 - DNA, 59 bp, Homo sapiens
ttacagaccagccaacttcaaagaatgccttaatacagatattggcagctgctgcagct

SEQ ID NO: 183158 - DNA, 100 bp, Homo sapiens
aaggactggggccacgtggagctgctggaggacattgacaaggtcatgatcaacctcaagacggaggaatttgtgctggacatgaacacactgcaggcgc

SEQ ID NO: 183159 - DNA, 100 bp, Homo sapiens
tgcagtgacatgtccagcatgaatcccgaataggaagtttggttggcttagtggattatccagatgatgaagaggaagatgaagaagaagaatcgtcccc

SEQ ID NO: 183160 - DNA, 75 bp, Homo sapiens
ctgagccagccagctgggatctccaccaaccccttcatggttctgaagccagacacaagatgaaaaagctaactc

SEQ ID NO: 183161 - DNA, 98 bp, Homo sapiens
cggactccgcggccggcccggcgcggcccagcgccctcaggttaattccaccatccccatcacagcagaagttttcaagaagcatggagtgtacaacc

SEQ ID NO: 183162 - DNA, 100 bp, Homo sapiens
ggagtcatcctgtacaccctcgtcagcggctccctgcccttcgacgggcacaacctcaagtccagggaccttgacccagcccctctcagcagacgcttca

SEQ ID NO: 183163 - DNA, 82 bp, Homo sapiens
gtagaagcagatttcttttggatagtgatgggaaaaggcatggtggttttctggaaccttcccactaactcacccctgcagc

SEQ ID NO: 183164 - DNA, 90 bp, Homo sapiens
ttgatccagaacttgcagcaacaatagaaagatgttctcgtccgtggcgcacctggcgcgggcgaaccccttcaacacgccacatctgca

SEQ ID NO: 183165 - DNA, 100 bp, Homo sapiens
tttttcagtgttcttggaggtgtggggtgtgagaacttgatcagtttgtgtcagccaccttgttctctaaaggctttgaagacaagattcccaaaaggag

SEQ ID NO: 183166 - DNA, 98 bp, Homo sapiens
caggactgcgccgcgtcttcctcaagtctgggaaaggtctctgaaagaaaaatggaatgccaagtcagtgtatgtggttggaaatgctactgcttctc

SEQ ID NO: 183167 - DNA, 100 bp, Homo sapiens
ttgatagaatggatgtgcagctaacaaagcttacactttataggtacgttttgtcaattgagagtgctgaagagatacgagaatatgttactgatctcct

SEQ ID NO: 183168 - DNA, 75 bp, Homo sapiens
atgttggcaaaagtgaagcaagttcacaaagaagtattaaactgtgattgagaggatccagaatccagatctctg

SEQ ID NO: 183169 - DNA, 74 bp, Homo sapiens
tatgactactcctctgtgatgcactatgggaggcacccgagcagtgatagcgtggcccagactcctgaattgct

SEQ ID NO: 183170 - DNA, 78 bp, Homo sapiens
cgcgctgttggaaagcggctgcgtagacaacgtcctgcaagtcgccaccagctgaacaggccaaagccagactacagc

SEQ ID NO: 183171 - DNA, 75 bp, Homo sapiens
ggctacttcactgtcaaccacccagataaccagcttgcattcacaagagatgggctctgtggtctgtggaatgaa

SEQ ID NO: 183172 - DNA, 75 bp, Homo sapiens
catgcttcaagtccatcatgttcagtgtttgctttcacaaccaaagttctgggccattcagacatcagccttgat

SEQ ID NO: 183173 - DNA, 154 bp, Homo sapiens
gtgcgactgcagagcccgaggccggggaccaggacagtcgcgaggttcgagtgttgcagagcctgcggggcaagatctggccgttgctccagggagaactgcaaatatcttcatccacccccacatttaaaaacgcagttggagataaatggac

SEQ ID NO: 183174 - DNA, 100 bp, Homo sapiens
tagagtccaggttattcaatcccaacttccagtattcaccagacttggattctcacttgcatttatcttcagctgctcctatttaatcctctcgtcaaaa

SEQ ID NO: 183175 - DNA, 82 bp, Homo sapiens
cgccaggacaatggggacccgggacgacgagtacgactacctattcaaaggtgctgggcgtcctcttctttgccatagcctg

SEQ ID NO: 183176 - DNA, 122 bp, Homo sapiens
gagtctcaatatctgtcttcggtggactccttcggcagtccacccaccgccgccgcctcccaggggttgtgtccactgtggtccccgactctgcccacaagctgttcatcgggggcttaccc

SEQ ID NO: 183177 - DNA, 76 bp, Homo sapiens
gctcagcacacactcccgcaggatcccgccattgttcagaaagtttcctacactactgaggtttaggggcactgtg

SEQ ID NO: 183178 - DNA, 74 bp, Homo sapiens
gagcctgaacacactgggaaatgccgtgtcagtggggttgttttggcccaagacctgcaaaatttacagagcgc

SEQ ID NO: 183179 - DNA, 100 bp, Homo sapiens
aatatctgaaagtgaaactcgatcctccggatattacctgtggagaccctcctgagacgttctgtgcaatgctgccactgcagagccccgccatggaaga

SEQ ID NO: 183180 - DNA, 75 bp, Homo sapiens
cctcgcctgggttctggaggctgcggggccatcgctccaggaggaacgatgatgaatgtcgggcatttgtgaaga

SEQ ID NO: 183181 - DNA, 100 bp, Homo sapiens
aggccggccggtgccagcacctttcggcttctgagacggcggcagcagcggcattcaggcaagaagaagaccccatcatccccatctctgggcagcttgc

SEQ ID NO: 183182 - DNA, 51 bp, Homo sapiens
gaaaagcagtttttttgataaagcaggcacagaccccacaggctcctcgga

SEQ ID NO: 183183 - DNA, 83 bp, Homo sapiens
ccatgatcctgctggtgggccagtacagcaccggcaagaccaccttcatcaggcagcgacagtgcccagggctctgatgtgtc

SEQ ID NO: 183184 - DNA, 51 bp, Homo sapiens
cataccatatgctggagagacattaaagtttacagaggaaagccatgaaga

SEQ ID NO: 183185 - DNA, 98 bp, Homo sapiens
ggagtgcgcggcggccgcagctgccacaaaccagaatgtatgacaacatgtccacaatggtgtacataaaggaagacaagttggagaagcttacacag

SEQ ID NO: 183186 - DNA, 51 bp, Homo sapiens
ttcgcagtggtcgcttcttctccttggaagaaggaccatggaaatctcagt

SEQ ID NO: 183187 - DNA, 100 bp, Homo sapiens
actgctggcctttgacagtcccgaggagtcgcccttcggagacctcctccacaccatgcagaggcagaaggacttgatcatcttccctgacgactgtgag

SEQ ID NO: 183188 - DNA, 100 bp, Homo sapiens
gttcctggcttccctctggatgctgacagaaacaaggatattgatgatgttaagaagttcaaaccgggttacctggaagctactcttaattggtttagat

SEQ ID NO: 183189 - DNA, 100 bp, Homo sapiens
cctgtccatcgtgtgcctgatgatcacgcagctggctggcttcagtggaccaaacaatgtctcccttttgcagagctgtattgacttgttcaagaataac

SEQ ID NO: 183190 - DNA, 100 bp, Homo sapiens
gcatcgatggtggaatcactgggaacatgcggcaagaggccattgaccgcttcaatggctttcttctagtcaagatgagtgataaaccagacttgtcgga

SEQ ID NO: 183191 - DNA, 100 bp, Homo sapiens
ctagtgaggatccagcccaggctccagttgtccgcggttcctcctcctgtcgctgcccgtgtgattactgagactcaggcttctgaatgcttatgatgaa

SEQ ID NO: 183192 - DNA, 76 bp, Homo sapiens
tctgtcttcggtggactccttcggcagtccacccaccgccgccgcctcccagtggaatgcagtagccctctgggcc

SEQ ID NO: 183193 - DNA, 82 bp, Homo sapiens
caccctttttgtcagattatcaggatgaggcttggtgctaacagtggtttgcacatcatcatctttgatgaaattgatgcca

SEQ ID NO: 183194 - DNA, 100 bp, Homo sapiens
atctgggcttatgggatacagctggacaagaagattatgacagattacgccccctatcctatccgcaaacaagacgagttgtactgctgtcacaggaaat

SEQ ID NO: 183195 - DNA, 100 bp, Homo sapiens
gcctggctgagctggagctggagctgtcggaagtggacatttgggagcaataaaaataagaagaaaggaaaagccagaaaaatagagaagaaaggaacca

SEQ ID NO: 183196 - DNA, 50 bp, Homo sapiens
agaaattatgttgaattccaagaagaacccaggttccaaaatgaacagga

SEQ ID NO: 183197 - DNA, 100 bp, Homo sapiens
ctatatgaacaatccgtctggatcacggatgtaggaagtggagagattaaacagattctagaaaatgaacttcagatacctgtgtccaaaatgctgttaa

SEQ ID NO: 183198 - DNA, 99 bp, Homo sapiens
tggtgcatgctgatgacgaaaaacgaactttccgctgtactttttgccatacagaggtagaagaggatgaatcagcaatgcccaaaaaagatgcacgca

SEQ ID NO: 183199 - DNA, 90 bp, Homo sapiens
gtgcgagaggaccaacggagcgctgaggcgggcgttttcttggatgaattgcttgctttggaggatgtacagttacccagcacgtgtacc

SEQ ID NO: 183200 - DNA, 100 bp, Homo sapiens
tttccagaaaatccaagtccggctagtacgcgaattggagaaaaagttcagtgggaagcatgtcgtctttatcgctcagcatttcaccaaccagagggaa

SEQ ID NO: 183201 - DNA, 75 bp, Homo sapiens
ttaagacttcccagcattcctacagatataaataggcactggagatattattgctgtcatgataacagaattgag

SEQ ID NO: 183202 - DNA, 90 bp, Homo sapiens
ctagtgagtcccacgaattcagttcccacgccaaaccagaccccatggcctgctcagcctcagcgaaacatttctcaagtgtctacatgt

SEQ ID NO: 183203 - DNA, 83 bp, Homo sapiens
ctgtcttcggtggactccttcggcagtccacccaccgccgccgcctcccagggtgcttcaaggatgaccgcatcgtcttctgg

SEQ ID NO: 183204 - DNA, 83 bp, Homo sapiens
acagacaaaccctgaatgtggagcatttcacaggacaaaacctggctgatcccataatgcatcctcaagtggtcatcttaagc

SEQ ID NO: 183205 - DNA, 83 bp, Homo sapiens
gttcgcgcaagtggagctatggaaggcccatgctgtgctgttctaatcatgctcttgcagaccaatttgaagataaaactaca

SEQ ID NO: 183206 - DNA, 82 bp, Homo sapiens
tgagcgggaggcagggggacgacaaggagggcatgatcaacctcgtcatgtcctacgcgttttctttttaaaagcggaagga

SEQ ID NO: 183207 - DNA, 100 bp, Homo sapiens
agagagaagacttggcgatagttccctttctagaaaggcagactgccagattcacttacagccccagctaattccaccaaacatggaggagtacatgaac

SEQ ID NO: 183208 - DNA, 100 bp, Homo sapiens
tgcagtgcatagtgggcatcttgagggcagcaggatgggtgtggaagcagtgatggcacttttggaggggaccccagataccccagcctgtgtagtgagc

SEQ ID NO: 183209 - DNA, 99 bp, Homo sapiens
tttgagaccatcttactggaagttccttttaagactcaccaagggcaaatgccagaagtgggtggagaactgtaggagagcagacttagaagataaaac

SEQ ID NO: 183210 - DNA, 90 bp, Homo sapiens
cgggagcggagacctcgctgcgctcatggcgtcgcccgggaagatgagaatgtgcctactgctcctgatcctccaagtcaacatttacgt

SEQ ID NO: 183211 - DNA, 100 bp, Homo sapiens
tgacgcccccctcccgcccggaaagctgcccagccaccagcaaccccccagtgttttagagcactttgctgcaagggaccaccacctgcacgaccagaat

SEQ ID NO: 183212 - DNA, 80 bp, Homo sapiens
gatttttgaagatctatgccaggaaagaggatgaagtttttgctgctgcagcagaagtacctagaatacctggaggatgg

SEQ ID NO: 183213 - DNA, 100 bp, Homo sapiens
tatccgcctggctggattagagtatgttctgcacttcactgcactgaatgggaagatttactttcgaagctataatgaaaagaagagattggacctggaa

SEQ ID NO: 183214 - DNA, 100 bp, Homo sapiens
ggccgaaaaacactggcaactcctgcagttcgccgtctggcaatggaaaacaatgtcttcaagccaattgttgaaaaatttggtttcatatttaattgtg

SEQ ID NO: 183215 - DNA, 100 bp, Homo sapiens
ctccgggcccgcccccggcctatgcccccactaacggggacttcacctttgtctcctcagcagacgcggaaggagttttgagagcaaaatgacaacaccc

SEQ ID NO: 183216 - DNA, 76 bp, Homo sapiens
ccccgagggtctcctccagtagacggtacagcgaaggcagagagttcaggatttgcctctgaagcagggagtgtct

SEQ ID NO: 183217 - DNA, 75 bp, Homo sapiens
ctacccattttcttttttggaactcatgagacttcagatattttggatggcagtagtagcagcagtggcttatcc

SEQ ID NO: 183218 - DNA, 75 bp, Homo sapiens
tttacttttacctacgttggcggccccagaagtgttatccaagataaattctgtgggattataaacatttcagta

SEQ ID NO: 183219 - DNA, 101 bp, Homo sapiens
tgaaggcatcgtgcctgctccacagcacatttttattcaaggttcccatgatcagtggtgaaatatagtgattttcacctgtgcttccattctgaagttct

SEQ ID NO: 183220 - DNA, 100 bp, Homo sapiens
gtcgcccccaccattatttcggaccatggccaacctggagcgcaccttcatcgccatcaagccggacggcgtgcagcgcggcctggtgggcgagatcatc

SEQ ID NO: 183221 - DNA, 100 bp, Homo sapiens
tgaagattcaccaaataagctatatactttggttacctatgtacctgttaccactttcaaaagtactactgagcgagtgtgcttgatccagggaacggtt

SEQ ID NO: 183222 - DNA, 82 bp, Homo sapiens
ggacgtgtccgcgaagatggcgggccggttcaaacacactccaccaggtggcatcatacctctgcttgttgccaactcttcc

SEQ ID NO: 183223 - DNA, 75 bp, Homo sapiens
gcgactcatgagagcgcggccggaggacagtccacaggtcctggctaccctgggaagagacaagaagtaaatgaa

SEQ ID NO: 183224 - DNA, 89 bp, Homo sapiens
acgcagaacccgggagtaggagactcagaatcgaatctcttctccctccccttcttgttcgttcccacatgcagggcagcacaaggaga

SEQ ID NO: 183225 - DNA, 82 bp, Homo sapiens
acgcatgggggctgttttagcacagctgctaaaataggccaggcctgcaggacatacgggtggcagtagagaagagcatcac

SEQ ID NO: 183226 - DNA, 83 bp, Homo sapiens
ggaaagtcaggaccgcgacggcagcagagcatatggtttgaagtggtgaacatggatttttctcggcttcacatgtacagtcc

SEQ ID NO: 183227 - DNA, 100 bp, Homo sapiens
aaaggatctaaggaccaaagctgacagtttctttacttggcctctccttccgatgaaaagagaaaggaagaatggactacagccaccaaacgtccctagt

SEQ ID NO: 183228 - DNA, 80 bp, Homo sapiens
gaagacaaagagaggaaatggaacttaactgaagtgaaagagcttcatgagatctcaggaaacaggctcgacagctggaa

SEQ ID NO: 183229 - DNA, 90 bp, Homo sapiens
cataaagtaatgaatgagatcaagaaagagaatggagaagtaaagattttgctgaaaagtgtcttctgtttatgaagcaagatgtacagg

SEQ ID NO: 183230 - DNA, 83 bp, Homo sapiens
ctcggtcctgtttcgacagcgaacatgtcgcggcctgtcagatgaaggatttgggggcagagcacttggcaggtcatgaaggg

SEQ ID NO: 183231 - DNA, 75 bp, Homo sapiens
gcaaggagcatcccggctggagcagagccagctgtcaaagctcgaaaaacagcagcagaggaaagaaaagaccag

SEQ ID NO: 183232 - DNA, 100 bp, Homo sapiens
ggagtacctggaggctcaacggcagaagcttcaccacaaaagcgaaatgggcacaccacagatggagtgcctgaaactgatcgcctcctccagattcaca

SEQ ID NO: 183233 - DNA, 98 bp, Homo sapiens
cgggcctttcgtggaaggctctatcgtccgcatctcgatggagaacttcctgtacctggactatgccagagtccccaatagcaatccccctgaatatg

SEQ ID NO: 183234 - DNA, 80 bp, Homo sapiens
gctttcttcgccgtgctggccgcggcccgcctcagcatctggtacagccgagtttgatgaacttgtgaaaaaattcaaag

SEQ ID NO: 183235 - DNA, 100 bp, Homo sapiens
tagacaagttcatcaagcaaagggactaccaccagcagggaaagccctgagaaactaccagaacggggtccctggggccagtgttgggagcgtacggtga

SEQ ID NO: 183236 - DNA, 100 bp, Homo sapiens
gacacctcctcggaagtcggcatctctctccaacctgcattctctccttgctcggattgaacgtatggaaaggcggatgcagctggtaaagaaggataac

SEQ ID NO: 183237 - DNA, 90 bp, Homo sapiens
aacggctctagcagtgttaattggccaccagatcagtccaaagtgtttgtgaaggtgtttactgaaattgaccggatgccccagctcctg

SEQ ID NO: 183238 - DNA, 82 bp, Homo sapiens
gcaacctgtccggggatcccagggagacccaacatgagtgaagtttcctgcaagaaacgggacgactatttggaatggccag

SEQ ID NO: 183239 - DNA, 98 bp, Homo sapiens
ccgccgctgccccggctgcctcctccctgagatgagttttgatcatcctgagaaaaatgggccttggcctgcagacccaataaaccttccctcccatg

SEQ ID NO: 183240 - DNA, 74 bp, Homo sapiens
ggatcgtgatgtggtgcatacatcagagggtcctgaggacaccgtgagccagccaggcctggccgctgggcctg

SEQ ID NO: 183241 - DNA, 75 bp, Homo sapiens
agcagcccccgaaggccctatcaggacatggagtatgaaagacgatgggaaaactgacaaccatgcctgcaggtc

SEQ ID NO: 183242 - DNA, 75 bp, Homo sapiens
accagaggctgaagcccaagcacacgtctgtgcagacttttgcagacaaatcaaaacaagaagctctgaagaatg

SEQ ID NO: 183243 - DNA, 75 bp, Homo sapiens
tctgaactgactgccccgcatcaccggagcgtcccagctgcgaggagatccaggtgattgagaatgatagagcca

SEQ ID NO: 183244 - DNA, 101 bp, Homo sapiens
gcggaaaattaaccacagcttcctgcgggaccacagctatgtgactgaaggtgctggagatcagaatttatttacctctgtttatccaacgctctctcagc

SEQ ID NO: 183245 - DNA, 83 bp, Homo sapiens
ccagaccctggagcctcagttggaagcagccgatccagcctgcggagcctgtggggcaggagaatggggtactaagagaaaag

SEQ ID NO: 183246 - DNA, 75 bp, Homo sapiens
tggatctcatcaaaaaggacaccagcaagctgttcaatgaggagacttacagccagctggcccaccccatccagc

SEQ ID NO: 183247 - DNA, 75 bp, Homo sapiens
tcccaaagtactgggattacagcaacccagtgattccatggaaagcagaaagaaggacataaagaaacggatact

SEQ ID NO: 183248 - DNA, 100 bp, Homo sapiens
gaattttcttggcataatatcactgtccttgctatggaaatgagtttgttggcatccaaagctgttggggttgatggtgctgaaaaaaaggaagactaca

SEQ ID NO: 183249 - DNA, 98 bp, Homo sapiens
ccggcgtagtccagaccatcctatactgtgacttcttctacttgtacattacaaaagggctgagccggatcttgaagactcgtggggaaatggtgaag

SEQ ID NO: 183250 - DNA, 83 bp, Homo sapiens
cgaagattcgaaaagccacttgaagaaaagggtgaaggaggcgaattttcagttgataggtaccttgtggtctataatccttt

SEQ ID NO: 183251 - DNA, 83 bp, Homo sapiens
atgaagaaattgagggttcttgccatggtcagcccaaggccaaccccactgtcactctgttcccgccctcctctgaggagctc

SEQ ID NO: 183252 - DNA, 50 bp, Homo sapiens
gccagttttgtcaaagggaaggtaaaggcattaaacgtcgtctttgaaaa

SEQ ID NO: 183253 - DNA, 50 bp, Homo sapiens
ctttgctgcaaaaaattacggaacattctagtatgccagtagaaaaaaat

SEQ ID NO: 183254 - DNA, 75 bp, Homo sapiens
gtctcatgttcgagtctggggctgtcgctgtgctctgcttcctgtgtccagtaccggttagtggtccgggatgtg

SEQ ID NO: 183255 - DNA, 83 bp, Homo sapiens
caggggaccaagctggagatcaaacgtgtggaccttgtcaccgcctgtgacatccggtactgtgcccaggatgctttcttcca

SEQ ID NO: 183256 - DNA, 100 bp, Homo sapiens
gggagatcgcgcaggatttcaaaaccgacctgaggtttcagagcgcagccatcggtgcgctgcaggctcccacatcaggacgagaaggagccctcgagtt

SEQ ID NO: 183257 - DNA, 100 bp, Homo sapiens
aggaggcggctataataatagcaaacatcgatggcctactggggataacattcatgcagaacatcaggttgcaccccttaaggatcttcctgtaaatgat

SEQ ID NO: 183258 - DNA, 100 bp, Homo sapiens
agatccggagcgccaccggcaaagaggtgttgcagaacctcggccccaaggacaaggtcattcagtggtgcacccaccacaaggatgaccctcctcctcc

SEQ ID NO: 183259 - DNA, 101 bp, Homo sapiens
gcgcggccggagaccgtggggcccccggttgccgccccctcgggtgtgtgttcctgcccgacaacggcgccttcttcgtgaactacgtcattgcctcagcc

SEQ ID NO: 183260 - DNA, 90 bp, Homo sapiens
ctggagtgcaggctgggaggcgggatggagtgatagggaagaaacttctgcagcatccagaactgagtaatagtcaacttctggcagact

SEQ ID NO: 183261 - DNA, 50 bp, Homo sapiens
gtggccatctaccactttgaagtggagcagcgtgacttcattggagtgga

SEQ ID NO: 183262 - DNA, 81 bp, Homo sapiens
ctgcaacctgcagcacatcagcgaccgggagaacatagacgcaattctgtggtgttcttggtcacacatttatggagtttc

SEQ ID NO: 183263 - DNA, 100 bp, Homo sapiens
gaattgaatgattttgtttcaactgccaatcaccattactttaagtactgcaaaatctcagcattggctctgctgaagatggtgatgcatgccagatcgg

SEQ ID NO: 183264 - DNA, 90 bp, Homo sapiens
ctgggaatcctcatctccactcagcgggcccaggactgatcctttgaaatactccagccatgactaaaagagaagcagaggagctgatag

SEQ ID NO: 183265 - DNA, 100 bp, Homo sapiens
cagctaaaggatgtgaccattttggcagctactaaccgtccagataggatagacaagatcttggcatatacagaagggctgcatggaaaatggctgttca

SEQ ID NO: 183266 - DNA, 75 bp, Homo sapiens
catcatcatgaaggacgtgcccgactggaaggatgagaacaagttgagcagtgccaacggccatgaagaacgtag

SEQ ID NO: 183267 - DNA, 95 bp, Homo sapiens
ctcctaccagctgctgctggagcaccagcgtccgagctgcatccaggggctgcgctggttctgcctcctgggggcattgctggcccccatccgag

SEQ ID NO: 183268 - DNA, 75 bp, Homo sapiens
gtgcgctatgcacccagctgtgccaagtgcaagaagaagattacaggcgcgagcccacaccttaaccgtgctctt

SEQ ID NO: 183269 - DNA, 82 bp, Homo sapiens
cattcttggagctcaaggtgacaggccagagcccaggtccccaggacagtgcaggtcttgggcgtctttggtactggctttt

SEQ ID NO: 183270 - DNA, 75 bp, Homo sapiens
cctattgagttttttcatggctagagtattcatgagaatgaaactgccgctggagtgcagtggcgggatctcggc

SEQ ID NO: 183271 - DNA, 100 bp, Homo sapiens
cacccggtgtaccgcggcgagaagccccagctgcactacgcgaacttttcaatgacaagagtaatactcatgaatttgtaaacctagtgaaagaactagc

SEQ ID NO: 183272 - DNA, 98 bp, Homo sapiens
aggagttcgtctcttacgtctgcggaagtgcagctgcctcagttcttagcgcagttatctccagaagaagaagagaaaaggagaatccgaagggaaag

SEQ ID NO: 183273 - DNA, 83 bp, Homo sapiens
tgctgcgttcacaggtgtttctgcggcagtgtggacgaatgtggaacctcgctctgtggctgtgttcccttggcactccttag

SEQ ID NO: 183274 - DNA, 90 bp, Homo sapiens
cacagttattaaccagactcagaaagaaaacctcaggaaattctacaaggaatggaggatctttggttccataccaatgcaggcatgtca

SEQ ID NO: 183275 - DNA, 90 bp, Homo sapiens
atcgaggacgtcctccgggcactcccacgaccaggtgggccttcaccttgatcatcatctcctcctacacggccaacctggccgccttcc

SEQ ID NO: 183276 - DNA, 82 bp, Homo sapiens
cgccgccatccagccaccattccaaggtggcagatatgctgttggagctctgtgtcaccgagttggaggatgtggccacaga

SEQ ID NO: 183277 - DNA, 90 bp, Homo sapiens
cttagcagtagacttcattttttgtttagttttagttgaagttctaaagcagagtacccaagtggccttggaccatctggagtctgtgcc

SEQ ID NO: 183278 - DNA, 100 bp, Homo sapiens
aaaatctccctgctccgcagcgacatcaccaagctggaggtggacgccatcgtcaacgccgcgctcctttaccctcatcgtggaggcctgggactgggac

SEQ ID NO: 183279 - DNA, 75 bp, Homo sapiens
taacttgttatgggccagaaatgaagggtcagctgaaagaacactttgcacagttcggccatgtcagaaggtgca

SEQ ID NO: 183280 - DNA, 82 bp, Homo sapiens
cctgcccttacacctgtgctcctatacaagattaacattcaatgccgcatcctcgaaggtaccactcctcagagcgaggcag

SEQ ID NO: 183281 - DNA, 155 bp, Homo sapiens
gagggtatgggaagagaaatgaagaagactggtactcccagacccttccgtatcgaggaccccaatcaacaacccacctgaacattgacatcaccaatttcagcagcagctggagcgatggcctggccttctgtgctctgctccacacctacctg

SEQ ID NO: 183282 - DNA, 90 bp, Homo sapiens
gtgctctgagggagggtccgagccagccgctgttttgccggaggagcccctcaggccctcctcagagaaattttgaaattgccttcaaga

SEQ ID NO: 183283 - DNA, 74 bp, Homo sapiens
tacctacccctctggacacttggatatgatcaatggcttctttgaccaggcatgttatttgaaagcaattgaga

SEQ ID NO: 183284 - DNA, 97 bp, Homo sapiens
tcgaactcctgggctcaagcgatctacccaccttaccctcccaaagtggtgagattacagcccgtgaaaacagaaaccatgactgtcagcagtctgg

SEQ ID NO: 183285 - DNA, 90 bp, Homo sapiens
ggcagctgcagtagcggcagcagccccagcctcaaggccagggaagatgagtggctctcggcagcaattgactgtttagaataccttcca

SEQ ID NO: 183286 - DNA, 100 bp, Homo sapiens
aactgtttaggaaaaaaagaagaagcttatgagtttgttcgtaaaggacttcgtaatgatgtcaagagtcatgtcttggtcgtttttgatgctcgatgaa

SEQ ID NO: 183287 - DNA, 80 bp, Homo sapiens
ttatggtggaggggaccaagttccggagcctgctcctcaacatgctgcagatggcccactgcgtgaccttggttcagctg

SEQ ID NO: 183288 - DNA, 82 bp, Homo sapiens
gcctgcctccgggcacacccggctccccggacgcctcgaggagcaggatgcaaccgacaggctgtggccggacagctgctgc

SEQ ID NO: 183289 - DNA, 136 bp, Homo sapiens
tgtgactatcattgatgccccaggacacagagactttatcaaaaacatgattacagggacatctcagccaaaatgaagtttaatccctttgtgacttccgaccgaagcaagaatcgcaaaaggcatttcaatgcac

SEQ ID NO: 183290 - DNA, 75 bp, Homo sapiens
tcagccaccatggggaatgggatgaacaagactgtgccctgtccacggtgcctcctgcatgtcctgctgccctga

SEQ ID NO: 183291 - DNA, 82 bp, Homo sapiens
gggatccccagcaggagcaggagcgggagcggggagcatcgagtacagctgtccggcctccaacgagtgtgagatcaccaag

SEQ ID NO: 183292 - DNA, 100 bp, Homo sapiens
ttctgttttgcctgaatacatgatttaaacaagagatttccacagaaggacgagattgaggagctgcgggccgagatgctggagatgcgggacgtctata

SEQ ID NO: 183293 - DNA, 100 bp, Homo sapiens
atcctgacggcagcccttgagtttgtgcccgcccacgggtggacagcagaggcgattgcagaaggagcccaggatatgctgcaggctgctagtcattatc

SEQ ID NO: 183294 - DNA, 74 bp, Homo sapiens
tggacaagcacgagggcgcgctcgagacgctcctgaggtatcattaatgggattggaaattttaagtgcctttg

SEQ ID NO: 183295 - DNA, 98 bp, Homo sapiens
aggaagggtggctggaaggagaactaaatgggagaagaggaatgttccctgacaatttcgttaagtgttgacctaaccaatgaagaaacaactgattc

SEQ ID NO: 183296 - DNA, 86 bp, Homo sapiens
gagacacagtatggtagccacacccccagacctttccaggtgtcctgagatggttctccagttgagtttgtcatctgccacgcccc

SEQ ID NO: 183297 - DNA, 100 bp, Homo sapiens
ctcactggtaacctctgaccttcagtcacctaacctgcaggtatataatgtttacatggcagggaggcagctgtgttctaagcggtaccgggagtttgct

SEQ ID NO: 183298 - DNA, 83 bp, Homo sapiens
cttggacattcagacttcagaatggtggatgggaagagagtcccaagggatgcagggcatcctctgtacccctttaatgaccc

SEQ ID NO: 183299 - DNA, 100 bp, Homo sapiens
gaaaattaagcagatgctccagtttgagaaacctggatctgcgatctgtttgtgttgtgggatccaacgaagaataaaaagttgcaagaacttttcttgc

SEQ ID NO: 183300 - DNA, 100 bp, Homo sapiens
gtgatgtatcactggacccagcacctagatgacgtaactctcatcttttgcctggaccttgcatattttggaatgtgagccaatagaagcaatagccaag

SEQ ID NO: 183301 - DNA, 98 bp, Homo sapiens
gggttcttggtctcactgacttcaagaatgaagccacggacccttgcgtagtattattgattccacagaatacagccaacctccaggtttcagtggca

SEQ ID NO: 183302 - DNA, 82 bp, Homo sapiens
gagaagcataatgacattgtggacagtgacagcgatgctgaggatcgaggaacgttgtctgatgtggacgagtgctcactag

SEQ ID NO: 183303 - DNA, 90 bp, Homo sapiens
cctgagggagagtgtggaagaagcaaccaaggttgtggcagcactgcctgaaggtatgagaccagattctaatctttatggttttccatg

SEQ ID NO: 183304 - DNA, 75 bp, Homo sapiens
cctcctgacgagcagcggctgtacaagatgttacatcctgtccactgcagacaacgtattgactttgtcgctgcg

SEQ ID NO: 183305 - DNA, 51 bp, Homo sapiens
actattccaaccaagaagagccaggtccggtgtctaaaagactatggagaa

SEQ ID NO: 183306 - DNA, 83 bp, Homo sapiens
atctgcgaacacagtagtggaagatgtaaagcaatatttcgagcagtttggcaaggacatggatttgattgacatactttgga

SEQ ID NO: 183307 - DNA, 100 bp, Homo sapiens
cgggagtgtcccgcgaggagaaggagaaagccatgttcagttcgagcgccaagatcgtgaagcccaatggcgagaagccggacgagttcgagtccggcat

SEQ ID NO: 183308 - DNA, 98 bp, Homo sapiens
actacctggtgcctctagtgaaaagaacaagaagtcttaccctcaggtcaaagccatcaaaccttcttctggaccaaagcaatgtggatatcactacc

SEQ ID NO: 183309 - DNA, 101 bp, Homo sapiens
tgccaaaggagagcccggaccacgtggtgaacgcggtgctgctggtcaacctggtgctaaaggagaaagaggagccaaagggcctaagggtgaaaacggtg

SEQ ID NO: 183310 - DNA, 73 bp, Homo sapiens
ttgactggatgtatcttgtctacaccatcatgtttctggatgcggaaaacgccatgcggtacataaatgggac

SEQ ID NO: 183311 - DNA, 100 bp, Homo sapiens
tacagcgaagtccacccagcgtttccgagggatcaaggtggtcggacattgtgtggtgtaatgaggattggcctggttgcaaaaggcttgctgattaaag

SEQ ID NO: 183312 - DNA, 74 bp, Homo sapiens
cgaggagtcagaaactcagccactggttgccttggtaggcaataaaagtgctgcttacgctcatgcagaagaga

SEQ ID NO: 183313 - DNA, 89 bp, Homo sapiens
cctgagtcaaagaagatgcctcgaactaaacaaattcatcccagaaatctaagaggttgtttacattcagagctctatcaataagagga

SEQ ID NO: 183314 - DNA, 83 bp, Homo sapiens
cagcagtacgacctgcagggccagccctacggtcttgaggaccggcccagctcaggctcctggggcagcggcgaccagagcag

SEQ ID NO: 183315 - DNA, 82 bp, Homo sapiens
aggagttcgtctcttacgtctgcggaagtgcagctgcctcagttcttagcgcagtgccatctgggattgacagctcagcctg

SEQ ID NO: 183316 - DNA, 97 bp, Homo sapiens
catcaaggacgggaagtcactcataagcgcgctcaagaagccgctcccgaggccccggcgcggcgcgagggcgcggggcgcggcgtccacaggcgcc

SEQ ID NO: 183317 - DNA, 82 bp, Homo sapiens
tttgtttcagagaattggaagctaaagctaccaaagacgtagaaagaaatcttagcagagttgtctgctggttctcagcttg

SEQ ID NO: 183318 - DNA, 51 bp, Homo sapiens
agatctcttctgttctccactgctagcaacgcacctcttgctttttcctcc

SEQ ID NO: 183319 - DNA, 100 bp, Homo sapiens
cagtgtaatgattattgacaacagggtaactaaggaagtggatgctacatctaaagaggccaaatccttcttcaagcagaatgagaaagaaaaaccacag

SEQ ID NO: 183320 - DNA, 100 bp, Homo sapiens
ccaagcccctcttcaggagtaaggaacgtcaaggtcgtgggaaataaaaggcagttctacacagactgcagcaacggttgcatctgcatatcctaagagg

SEQ ID NO: 183321 - DNA, 132 bp, Homo sapiens
gcgaggaactatcttggtgaagcagtgagtcgaaatgcgtctctggaagtggcatgctcccgtcttcgtcaggaagattttccacctcgcattgttgaacacccttcagacctgattgtctcaaaaggagaa

SEQ ID NO: 183322 - DNA, 75 bp, Homo sapiens
gtagccaaagagcaactaactgatgctgacaccaaagcttcttggacacttaatgattgttggcaagaaatgtgc

SEQ ID NO: 183323 - DNA, 90 bp, Homo sapiens
cgggttgacctcatcctcgagaacacatccaaagtccctgcccccaaagacctacagcctggctcccgcgacgccggaggtgaaggtggc

SEQ ID NO: 183324 - DNA, 90 bp, Homo sapiens
attagaagaaaaggaaccctggcctgaggcaatgaatcgctccctggctaatgtgattcttggaggctatggcaccacttcaacagctgg

SEQ ID NO: 183325 - DNA, 75 bp, Homo sapiens
ccgtcaccctgcctcccctgcgtcccgccaccggccgcttctgtcctcgcccgcggcgccatggctcacgtcggc

SEQ ID NO: 183326 - DNA, 100 bp, Homo sapiens
ctggaaaccgagccagggctgagccggctgacaacagggtcgataaagacaggagtggagtgatatcagacaccgagcttcagcaagctctctccaacgg

SEQ ID NO: 183327 - DNA, 100 bp, Homo sapiens
cttctggaactgaaccagatgagagccttcaaaagcagtgcaactggctcagtattcacagggaaagctgtgaggtttactaaagcagtgaagcactttg

SEQ ID NO: 183328 - DNA, 100 bp, Homo sapiens
acgagggagaaatgttttgtttgactccagtgttaagagaagaaatgaggacatatcagtatcgatgtgactggagtgatttgcacccggatgcctagac

SEQ ID NO: 183329 - DNA, 99 bp, Homo sapiens
aatcccgcgcgctgcccacgattcgcttctgaggttctgcttggattctgctagacagacccgacaaagactgtctatcaactggtccaattttagctt

SEQ ID NO: 183330 - DNA, 104 bp, Homo sapiens
acctctacgccgacatcgacgccgcgtggcaggcgctgcgcacccgagaacagcccatcttcaccacccgagcgcatgtcttccagattgaccccaacaccaag

SEQ ID NO: 183331 - DNA, 90 bp, Homo sapiens
tcagcgccaagatgatgttcgtcaaagccggccagagccaagacttggctctttgtgacagatttccatggtgtcagtgattcatattcc

SEQ ID NO: 183332 - DNA, 100 bp, Homo sapiens
gaagtgatattattgtagatctagaagtcactttggaagaagtatatgcaggaaattttgtggaagaactgatgaggagtttcaacagagacaggcggat

SEQ ID NO: 183333 - DNA, 100 bp, Homo sapiens
cgccgccctcgcaacctggcagccgccgccgtggaagtccacaggtcctggctaccctgggaagagacaagaagtaaatgaagaaagaggaagattccag

SEQ ID NO: 183334 - DNA, 87 bp, Homo sapiens
caattgagccgcgcagggagctgctgacacagccctgcaggcaggctattgagggcacctacattgacaagaaatgccccttcactg

SEQ ID NO: 183335 - DNA, 100 bp, Homo sapiens
cagccatctcttagtccagcaagtcctcatagccagggtcatggcaaaaccccaaaagatgccgcgtcagttcgagccacgcatccaataccagcagcct

SEQ ID NO: 183336 - DNA, 74 bp, Homo sapiens
gaccggctacttctcggcgctgccgtctctggaggagtactggcaacagggacaatttctccctcccccagagc

SEQ ID NO: 183337 - DNA, 82 bp, Homo sapiens
cttggacagatgatgccagttaattactttgaatgtactgaacgacacctgggtctccttcccttcctggtctgaggactcc

SEQ ID NO: 183338 - DNA, 100 bp, Homo sapiens
agagctttctgaactgcttgagaagagttgcaggttccatgggatttaatgtggactaccccaaaatagccagacccagggccctccagattaccccagg

SEQ ID NO: 183339 - DNA, 85 bp, Homo sapiens
tgtttatcctaatcccaatgctgaagtaagattgtcttggaaatactaagttgggattattgcatcgagcttttagtgtcttctt

SEQ ID NO: 183340 - DNA, 96 bp, Homo sapiens
gtcatcacccaggaaggctgcacctgcaaaggatggaagagtgtagaaagtgtcccaaagttggtgtctgaatatatgtccaaaaagataaaagtt

SEQ ID NO: 183341 - DNA, 73 bp, Homo sapiens
tcagctcatctttggcaggaaggcgaggcttccgcccggcacagggggcgaggccttcttgggcagctttgtg

SEQ ID NO: 183342 - DNA, 90 bp, Homo sapiens
accgacctactgggccgacggactcccacacaggtatccagtcggaattctttattaacaccacccgagcaggtccagggacattatccg

SEQ ID NO: 183343 - DNA, 100 bp, Homo sapiens
ctcgaaggcgtttctatagacctgttgcggtcatgctttttgcagcaggaaacttgagatggaagcaaagagaaaacaagaagaagaagagagaaagaaa

SEQ ID NO: 183344 - DNA, 83 bp, Homo sapiens
gggggccacagccgcaccagctccccgacacccccttcctctgcagctgttgaaggctggattctctttgtaactggagtcca

SEQ ID NO: 183345 - DNA, 98 bp, Homo sapiens
ctggacttcgcctttcccgagccctggaggtggggagaaaaggcaggatacgtatgtgtccacacctagtgagattcactccctgagccctggagagc

SEQ ID NO: 183346 - DNA, 82 bp, Homo sapiens
cgcggggccgccccccgaagcccagggagagcaaggcgcgcggcgactccgggttacacatcattttggaatgactgtatat

SEQ ID NO: 183347 - DNA, 95 bp, Homo sapiens
ggaagtgaattcggattgtttgctgtttgtcagggagccactggtgatgtggatggggcacagattgtctttaaagaagttcagaaactcttcaa

SEQ ID NO: 183348 - DNA, 100 bp, Homo sapiens
atgagcagcagtaacccagacctcgcggggacacactccgcagcagacgaggaagtgaagaacatcatgtcttcaaaggatctgcaggcccaagaccgag

SEQ ID NO: 183349 - DNA, 75 bp, Homo sapiens
caacccactttctcggcgccgcggctcttttctaaaagtgtagatttcgggcagacaacttgaacaagctgaaga

SEQ ID NO: 183350 - DNA, 100 bp, Homo sapiens
gcccgaggccggggaccaggacagtcgcgaggttcgagtgttgcagagcctgcggggcaagatctagctccactggttcaacagcctctcctccagtttc

SEQ ID NO: 183351 - DNA, 51 bp, Homo sapiens
ggtgggtaggattgctgtcaatgtttgatatcgtgaggaactatactgcag

SEQ ID NO: 183352 - DNA, 100 bp, Homo sapiens
ggaccggcctctgcaggtcggggagcgctcggactacgcgggatttcgcgcgtgtgtgtgtcaggccaaagaggtgctgaaaaaatatttggagtccaag

SEQ ID NO: 183353 - DNA, 82 bp, Homo sapiens
gtccagttgcagatacaaacttggattttttccagtctgatccttttgttggcactgactttggtgtgtctgccaagaatct

SEQ ID NO: 183354 - DNA, 100 bp, Homo sapiens
cgcactacaacatcaaccagagcagattccagcctccacatgtacatatccatgctgtgacctacaagcaaactaaatagccaacatttctgaaccccta

SEQ ID NO: 183355 - DNA, 101 bp, Homo sapiens
gtttctctgagtcctgcccttctgtatcctgtgaaagacctgtcttgagaaaaggccagtgttgtccctactgcataggagttcatgatcaagtgttgccc

SEQ ID NO: 183356 - DNA, 80 bp, Homo sapiens
ggggttctgagactccctgtcccggaccgcagggggaggcccccgctgagatgggggcgctgctgctggagaaggaaacc

SEQ ID NO: 183357 - DNA, 100 bp, Homo sapiens
ggctgcgctctgcccggcgagtcgggctctggaggaaaagaaagaagctccaccatgaggcgaggtggatggaggaagcgagctgaaaatgatggctggg

SEQ ID NO: 183358 - DNA, 82 bp, Homo sapiens
caaccgggccgtgccccagatgcccaccgggatggagaaggaggaggaatcgaaagacgagaatccaggacttgaatcgtat

SEQ ID NO: 183359 - DNA, 76 bp, Homo sapiens
tgctttaggaactcaggattctacagatatatgcaagaaggatttgatgccctggatccctttattcccatcctgg

SEQ ID NO: 183360 - DNA, 50 bp, Homo sapiens
cgagaactcggagggcaccggaggattgacttggcctctacttcttgtta

SEQ ID NO: 183361 - DNA, 75 bp, Homo sapiens
aaagcaaaggctgctctgaagcgcacgacctccgactactttctccttcaagatgtagccatagctgtaacgtat

SEQ ID NO: 183362 - DNA, 83 bp, Homo sapiens
cctgcagtggagaacgcaggaccccgctgcccagaaggagcagccacgcaaaatgatgcttcaacacccaggccaggtctctg

SEQ ID NO: 183363 - DNA, 100 bp, Homo sapiens
cagaaggtctggaaggcaccaagtacagtaatgtgatgaaactccttcggatggccctcagtggacagcaggttcctggtagagttacacagttgtgccg

SEQ ID NO: 183364 - DNA, 75 bp, Homo sapiens
tctgcctggtcgggatcccgccccgcccggagccccggcccccacagtgacaaagcataaatcatggacaccaga

SEQ ID NO: 183365 - DNA, 97 bp, Homo sapiens
gatttacctgggtgagacagcttgagccccatcgtggattccaagacatccctgctgagagagccaagtttaacccagaactggtgctggtctcagc

SEQ ID NO: 183366 - DNA, 101 bp, Homo sapiens
gttaagcacaagttcacgaaagcctacaaaagtgtggagaggttccttcaggaggatcaggtccattcaactgcaattgaatattggagttgagcagattc

SEQ ID NO: 183367 - DNA, 83 bp, Homo sapiens
aaatgcgcagagcaaacatctttcaaagttacagaatgtctgaaggggacagtgtgggagaatccgtccatgggaaaccttcg

SEQ ID NO: 183368 - DNA, 100 bp, Homo sapiens
atgctgccccacaaaaccaagcgaggccaggccgctctggaccgtctcaaggtgtttgcagaaaaaatgggcctggagacaggctggaactgccacatct

SEQ ID NO: 183369 - DNA, 90 bp, Homo sapiens
aatttgaagatacatgagacagcagccaaacccccaggtgtgttctactccctcttctgggaatgaagcctccccagcaaagcctatacc

SEQ ID NO: 183370 - DNA, 80 bp, Homo sapiens
ctctgggcagagtggaccacggggagccccacgaggtagtgggcagcagtcagtgacaggtgtaacctctgtggatgaca

SEQ ID NO: 183371 - DNA, 74 bp, Homo sapiens
attcgcagtggtcgcttcttctccttggttttacagacatttcaccagaggaattgaggcttgaataccataac

SEQ ID NO: 183372 - DNA, 118 bp, Homo sapiens
ggggaacggcaaagtcatgggagcagagctcagacatgttctcaccacccttggatctggagtgggagagcaggatgggggactgatcggtgccgaagagaaagtgattaacagtaag

SEQ ID NO: 183373 - DNA, 100 bp, Homo sapiens
ccatcattgatgtggtgcgatcggaatgtatcctgtcaggtataatgtcagtgaatggcaagaaagttcttcatatggatcgaaacccttactacggagg

SEQ ID NO: 183374 - DNA, 102 bp, Homo sapiens
ctttgaacctgaacggttttgatgtagaggaagccaagatccttcggctcagtggaaaaccacaaaatgcgccagaggctgacagggagttcatcgaggcca

SEQ ID NO: 183375 - DNA, 100 bp, Homo sapiens
ggctgttgccatgaggcgaggctagggaggacctcacttccccggggtgtaataatgttaactgagcttacgaggaaatatttcagtaaaagcagttaaa

SEQ ID NO: 183376 - DNA, 125 bp, Homo sapiens
gttcccgttgggccatcagaggaagatcaaagatcaaccctcccccatgggctcctgcctgcctgccaggacatgctgggcctgcgccccccactgctcgccctggtggggctgctctccctcgg

SEQ ID NO: 183377 - DNA, 100 bp, Homo sapiens
gatccgcaaggccgcccgggaactgctgacgcttgatgagaaggacccacggcgtctgttcgaaggcctgtgatacttgggctgtgatcctctagagcca

SEQ ID NO: 183378 - DNA, 75 bp, Homo sapiens
cggtaacaccgttcacagagctagccggacgtcctccgactcaagatggtgcagaacttccaagatgaatcctgt

SEQ ID NO: 183379 - DNA, 101 bp, Homo sapiens
cagtatcgctacttcaaagggtactttttagaaccaaagttttgaaacaaagttatgtcagatattttcagacctcaatgccacctatcgtacaattcaag

SEQ ID NO: 183380 - DNA, 129 bp, Homo sapiens
gccatggtcgcgctggagaaccccgagtgcggcccggaggcggcggagggcaccccgggcgggcggcggctgctgttcgtgctggccgtgggcagcgccgtctttgatgccatgttcaacgggggaatg

SEQ ID NO: 183381 - DNA, 97 bp, Homo sapiens
agacttcgagagccctgtcatcttctaaacagagcagcagcagcagagatgataacatgtttcaggctaaagaattacctccaaagccattgtcaag

SEQ ID NO: 183382 - DNA, 100 bp, Homo sapiens
aggcctccccagccacttggaactggttgttaagaaatcagggagggctaactccacggatgacactgactggggatcctgcatgtgtgtagacatggat

SEQ ID NO: 183383 - DNA, 98 bp, Homo sapiens
ttttgagccagacttattagatgaccctaattcagaaaagaagaagaagagggatactcccatgctgccaaagcctgactgccggaatcagagccgcg

SEQ ID NO: 183384 - DNA, 90 bp, Homo sapiens
cagcagttcctgctgcctgagctagagaagcgcatggaggaatggaggatgaaggagaagatgactaaatagaacactgatggattccaa

SEQ ID NO: 183385 - DNA, 83 bp, Homo sapiens
ctggcctggaggctatccagcgtacaatgactcttcttgcttttcacctaagttgaataagcaccctgtgcactttaatctcc

SEQ ID NO: 183386 - DNA, 51 bp, Homo sapiens
aatagataattttgctttaaatccagatggagtccactttctcatccaggc

SEQ ID NO: 183387 - DNA, 75 bp, Homo sapiens
ggaagaaaatacaaatcacacgcataatggatgaaaggaaccgacagggctaccgacagaaggactatttcatcg

SEQ ID NO: 183388 - DNA, 82 bp, Homo sapiens
ctcgcctggctcggacccacggagccggcagcccagcactccggtactccaaagattcaggtttactcacgtcatccagcag

SEQ ID NO: 183389 - DNA, 100 bp, Homo sapiens
aatggctcagtgacctgttttggaccggccacagttgtaagggatcttgtggctgtcaggatggcagaggagcaggagttcacccagctctgcaagttgc

SEQ ID NO: 183390 - DNA, 83 bp, Homo sapiens
atttcccaagagcagcggaaaatgatccagtcacaggtttactcctggcttgggggcattaggaagcactggaggctcttcgg

SEQ ID NO: 183391 - DNA, 152 bp, Homo sapiens
cactgagaagtgtatatcaagccacaatttccatcaaaaagtgattaagcagagaatggagaagaaggttgattccagatccagacatttaatgtggatgcaccatgccagaccgtggaagatttaacgaatggggttgtgatggcccaggt

SEQ ID NO: 183392 - DNA, 100 bp, Homo sapiens
gccgcgaaccgcagtatcatgctggccaagaagatcatcattaaggacggaggcacgtttgtgaagaaatatgggaacctttttagcttggagcttggtg

SEQ ID NO: 183393 - DNA, 74 bp, Homo sapiens
tggatgggaagttaatgtttacggcgaagtctactcaacgtttccaagggcccagcactagaagatttcagtca

SEQ ID NO: 183394 - DNA, 51 bp, Homo sapiens
ttaacttcaaaactcacaaggaggatttacgcgcacgttggaaccgaagag

SEQ ID NO: 183395 - DNA, 95 bp, Homo sapiens
attacctaaatgcactctttcgaaagaaagttggtaatcagtggataaattacatatcattctgtggtcttagaacacatgcagagctcgaagga

SEQ ID NO: 183396 - DNA, 100 bp, Homo sapiens
tgcgtgccgtgttccggagccagcagcagacctcgaagtagggggaaaactgcagtggaagatgaggacagcatggatgggctggagacaacagaaacag

SEQ ID NO: 183397 - DNA, 73 bp, Homo sapiens
gaagattggcaatccagtgccctataatgaagggctgatcccttatccaacatggttctaaccttcagtacta

SEQ ID NO: 183398 - DNA, 98 bp, Homo sapiens
tgcctcctcctcctgtggtggaggagaaggaaagaccccaccaacaactgaacgctttggtcaggctgctacaatggaaggaattggggcaattggtg

SEQ ID NO: 183399 - DNA, 98 bp, Homo sapiens
ccgaagtgccgcggaaagtggagatggctacattgacttcaggtggagagaagccaaacaaagacttggagagctgcagtgatgacgacaaccagggg

SEQ ID NO: 183400 - DNA, 100 bp, Homo sapiens
gaaggttgtgaaaaaactactaggatcacgcggcatgtattgagaacacggtggccgggtcgtatgcagtgactgcaacaccgaagtggactgttactcc

SEQ ID NO: 183401 - DNA, 80 bp, Homo sapiens
taatggaacaatgattctgaaaagaacggagcttgaagcaaagctgcaggttttaaagggattcactcatgtttcgtgtg

SEQ ID NO: 183402 - DNA, 73 bp, Homo sapiens
tgagaggggcggcggcggggtcaggggccgattagaaatgatatttgccaaatttgatgaagtgcaaagttca

SEQ ID NO: 183403 - DNA, 74 bp, Homo sapiens
tggacttcaaatgctgtttgtattccagagactagagcacgaacttccaggagccggtgcagccgctgacacag

SEQ ID NO: 183404 - DNA, 100 bp, Homo sapiens
ttgaagctctgactgaaagtgaactttgtcgcttatggactgaaagtttattgcattccaacagctcattttatgttgatcgtaaaaaggaccttgtaaa

SEQ ID NO: 183405 - DNA, 100 bp, Homo sapiens
ggggtggcgctgggagcaacgggagtgtcctggacccagctgagcgggcggtcattcgcatcgcaggcctgccttgctctgccaggaaccatgagtgagg

SEQ ID NO: 183406 - DNA, 98 bp, Homo sapiens
tacagagttatcaggttccagaccctgccttctcttctgaaagccttcgttcagaaaaacctggtctatggcacaactaaaaaggtttgccgcagacc

SEQ ID NO: 183407 - DNA, 75 bp, Homo sapiens
ctgagggcggggtgtacgaaagagaaacccggagggcgccgggggagctgcctcagccgccccccttgctgtcgc

SEQ ID NO: 183408 - DNA, 88 bp, Homo sapiens
cctcctgactatgaccagcaggtgtttgaaagatatgagatcctgactccaaactccattcccaagggtttcatggacgggaagcagg

SEQ ID NO: 183409 - DNA, 100 bp, Homo sapiens
aggcagctcgcggtcatgggcggctcagcctccagccagctggacgagggcaagtgcgcttacatccgaggtggtgagccggctgggcctggactccctg

SEQ ID NO: 183410 - DNA, 78 bp, Homo sapiens
cacaactgtggtgggatacttgccaaatgggagggccagtgcctcagtttcaatccaggtaacctttaaatgaaactt

SEQ ID NO: 183411 - DNA, 75 bp, Homo sapiens
ccttccacgtcatccgcatcaacaagatgttgtcctgtgctggggctgacagggcagcctgtgagcagcaagctg

SEQ ID NO: 183412 - DNA, 90 bp, Homo sapiens
cgacagctgcccgcgggcccagcctgacgccatctcacgcctgctggaggtccttgaatgggcaagagggcacatgaagtacggcgtcct

SEQ ID NO: 183413 - DNA, 100 bp, Homo sapiens
ctctctcaatatgaaaatggtagctccacagtagacatatctgaagagatggattaagaatgctttggattaaggattgtggagcacatttcaatcattt

SEQ ID NO: 183414 - DNA, 71 bp, Homo sapiens
gggacctggccagcgctgctggcgggcgttaggtgggcatccccaccatcagatggtgcggggcagagggg

SEQ ID NO: 183415 - DNA, 100 bp, Homo sapiens
ggaatattggggggctcggctgcagacttggccaaatggacgggactattaaggtaactcgggaccaaatgaagatgtttatacagcaggaatttaagaa

SEQ ID NO: 183416 - DNA, 77 bp, Homo sapiens
caagcacataaggaaattagtggagttgtcactcagcccagtccatcagtttctcagcccagtacttctcagagtga

SEQ ID NO: 183417 - DNA, 83 bp, Homo sapiens
cgggaagcgggcggccccggccgcctccgcgagggcaccatggaggtgaatgcagatgtagtatctaccccttggactgcaga

SEQ ID NO: 183418 - DNA, 75 bp, Homo sapiens
tcaagtttctgcaggaacacggttcagattcgtgtggagatgtactttcctcagaatgactcttggattggtttg

SEQ ID NO: 183419 - DNA, 83 bp, Homo sapiens
gttcgtcatggggctgtttggaaagacccaggagaagccgcccaaagaactgctggtcagtgagaaggtcggaggggccgagg

SEQ ID NO: 183420 - DNA, 100 bp, Homo sapiens
catccttcgaaaagctgccaagttgaaaatggacgagtaatcgcctgctttgattcattgaaagattactacagcatcccatttcccacacccactactc

SEQ ID NO: 183421 - DNA, 90 bp, Homo sapiens
ccaatggacagcatgcctcaccaagtcacatgacaagcagctaatgtaatgcttgaatatgatattgatgaagctcaggcattgttggaa

SEQ ID NO: 183422 - DNA, 89 bp, Homo sapiens
tgcagagggaccttgatgggacatcctggagggtgacacttggacagaaacactggcctatgtgctcttctggggagttgcaagcattg

SEQ ID NO: 183423 - DNA, 83 bp, Homo sapiens
aaatataatgccaattttgttacttttatggaaggaaaagatatgatggacgtggtcacctgcatgacctttctgagtacgat

SEQ ID NO: 183424 - DNA, 100 bp, Homo sapiens
gctcttccaacaccagtggaagatgatcacatcccaggaaagaccacagcaagattctttcattcgtctcctcctagcctgggggaccaggctcgaactg

SEQ ID NO: 183425 - DNA, 95 bp, Homo sapiens
cgtgagcgagcagaggcttaaggtcttcagcggggcgctccaggaggcactcacaggtgtgatgaatgcagactctgctaccattttggctgttt

SEQ ID NO: 183426 - DNA, 88 bp, Homo sapiens
ggaagcaggactgcgccgcgtcttcctcaagtgtactaatggtcacttgatgtgcgctggctgttttatccacctactagcagatgcc

SEQ ID NO: 183427 - DNA, 101 bp, Homo sapiens
gttacctgtttcggaatgcttttgtgctgctcacagtcaccgctgtcattgtggctccacagttgactactggctttcagccctcactggcgtcatctggc

SEQ ID NO: 183428 - DNA, 48 bp, Homo sapiens
acgggaggggagaacgaaggaccaggccgagtgtactacttcaaccac

SEQ ID NO: 183429 - DNA, 59 bp, Homo sapiens
ccctgccaagtgccacaccaaaaagcacatgccagcgagtgacgaagaggagggagcgg

SEQ ID NO: 183430 - DNA, 88 bp, Homo sapiens
gatgaaggctctgatgtatttcagatggcagactgccagattcacttacagccccagctaattccaccaaacatggaggagtacatga

SEQ ID NO: 183431 - DNA, 90 bp, Homo sapiens
cgcccggaaggcgtcgtcttctcttaaaatgtttgccaagatggtggataagaatatttacatcattcaaggggagattaacattgtggt

SEQ ID NO: 183432 - DNA, 75 bp, Homo sapiens
ccacaccatccttctcgctgcagggtggaaaaggattattcatacctgaaggagatatgtgatcaccaagccgaa

SEQ ID NO: 183433 - DNA, 100 bp, Homo sapiens
gttttggcctgattctattgcatcaggagtcgcacagccaccgccgagcgagctcaccatgtcggaagcttattccactaagctcaacaaatttcctgta

SEQ ID NO: 183434 - DNA, 97 bp, Homo sapiens
gcccgctccctggcggtgcagagaccagcatccttggagaagggtgattctgggggtccacttgtctgtaatggtgtgcttcaaggtatcacatcat

SEQ ID NO: 183435 - DNA, 75 bp, Homo sapiens
aagaagctggtgtgcggagatgaagatacaaggacagagcggggccgagtggcccgccctcctgccctgatgctg

SEQ ID NO: 183436 - DNA, 100 bp, Homo sapiens
gccgccgattctacgccgcccggtcgccagggagagtgaatacagctagggacgtgaaagggcaacatgcaggttctggtgacttacggtggcgatccca

SEQ ID NO: 183437 - DNA, 100 bp, Homo sapiens
aggcggcagaagaagacgaagaagcagaagcgtctgctcaggttgcagcaggagagaggaattgaatgatctggcacgggaccctccagcacagtgttca

SEQ ID NO: 183438 - DNA, 100 bp, Homo sapiens
gggagcagcacgcctgagcaccccaggacctgcgctcaggtgaggctctgggctacacgccaggccatgctgggccaggtgcacgaggttcccgagggct

SEQ ID NO: 183439 - DNA, 74 bp, Homo sapiens
gcctcttgcgactcgtggccacgggagccactcgagctgcttcaaagaagcctcttcctcctactcctgaagac

SEQ ID NO: 183440 - DNA, 75 bp, Homo sapiens
gcggaaatctggaaccgggatggcgacgtctacactgagtcggaggcgaagacaagttggatggcttgaggactg

SEQ ID NO: 183441 - DNA, 90 bp, Homo sapiens
ctgctatcagtgcccgctttgttcagctgcagcatggagagatagataaacgggtggataagattgtggaccagctgcagcagttaatgc

SEQ ID NO: 183442 - DNA, 75 bp, Homo sapiens
gaggtctccccaacgcaggacatcagtgagaaggcaaccaaagtgcaggacatcaaaaacaacctgaaagaggcg

SEQ ID NO: 183443 - DNA, 75 bp, Homo sapiens
agacagtgacgacaaaacaccagatgatgaccctgagcaaggaaaatctgagggcatgttatttgaaagcaattg

SEQ ID NO: 183444 - DNA, 75 bp, Homo sapiens
taaagtccagagacagagcactaattagacatatctgaagagatggattaagaatgctttggattaaggattgtg

SEQ ID NO: 183445 - DNA, 80 bp, Homo sapiens
ctggcttagaagcagatctggaatgcaaacagatctggcaaaatttggggcactgcctccttacctgtgaggaatgcaaa

SEQ ID NO: 183446 - DNA, 100 bp, Homo sapiens
gcgtggcgatgggcgggggtagagccccgccggagaggctgggcggctgccggtgacagtactatactggcaattgctggagaagattttgcaattgttg

SEQ ID NO: 183447 - DNA, 96 bp, Homo sapiens
ctaccatggaccatcctgctggtcagcactgcggctgagtgttgcggagataggaacatgggagagaaacaatctgggtaacatgaaagtgatgct

SEQ ID NO: 183448 - DNA, 75 bp, Homo sapiens
cctgaaaaagtatcgtcgagaagcctatcatcggtatacataatcaatgtgacctggtctgactccacctcccag

SEQ ID NO: 183449 - DNA, 98 bp, Homo sapiens
caacattactgaagaagactatcagccactaatgaagttgggaactcagaccgtaccttgcaacaaggtttcagcacagccagtcccacaggagccca

SEQ ID NO: 183450 - DNA, 100 bp, Homo sapiens
cattctttcaccagagtttcatgaacatttcaataaattgatggccagacctgcagttgctctacactttcagagcttcttcgagacaccttcacttccc

SEQ ID NO: 183451 - DNA, 75 bp, Homo sapiens
attggaaccagttccgatacagcacaatggtctctctgaagaggctatcatggagctgaacctgccgactggtat

SEQ ID NO: 183452 - DNA, 95 bp, Homo sapiens
tgggagaactccattaattaaggtgttatatgaacttcccaccaacacacagtggtgcttcgatattcagtggtgtccccgaaatcctgctgtct

SEQ ID NO: 183453 - DNA, 71 bp, Homo sapiens
aaatgcaccaatcagcatgctgtgtctagctcaagtgctccagcttttctgcagctcacccaaggctgctc

SEQ ID NO: 183454 - DNA, 98 bp, Homo sapiens
acatcgcaacgctgaggattcagactaaggttcgttccaccagtcataaaccagatgaaatctatggcatgattgaaagactatctcctggcactcgc

SEQ ID NO: 183455 - DNA, 75 bp, Homo sapiens
aatggctcagcgggctctgaacacagcatcaatggcaggaggtttcctgttgagcacgttcacgtccatgttctt

SEQ ID NO: 183456 - DNA, 100 bp, Homo sapiens
cagccctccactcaacacaggaaggttccagcaacagatagaaatgctttaagttcactctggggaaagctggcctctgaaatcttaatgcagaattggg

SEQ ID NO: 183457 - DNA, 74 bp, Homo sapiens
gatgatgaagaggatgatgatgaagagtcagtgctgacagttgcttgtgaacaaactgaagttctgctttttga

SEQ ID NO: 183458 - DNA, 82 bp, Homo sapiens
cagattcgcagtggtcgcttcttctccttggtttaaggagttcatgagtaaacatgttcacttaatgtgttaccggatctgc

SEQ ID NO: 183459 - DNA, 75 bp, Homo sapiens
tggatgcagcaaggaaataggatttaaccgctctctgcctcccagatgttcccgctgcctgtcaccaacgggaag

SEQ ID NO: 183460 - DNA, 100 bp, Homo sapiens
ctccgcagcttcctcggcgcccccggccgctaccgctcaggtgctgcaggcacagcccgagaaaccgcagcactacaccccgtggaccgggagcccgtgg

SEQ ID NO: 183461 - DNA, 98 bp, Homo sapiens
ccctcggagccaaaggcgcgcggcggacacggcggggccctcgcgcgtttgtagttcagaaccagaaaatgttcaggctgacccagagaattatacca

SEQ ID NO: 183462 - DNA, 100 bp, Homo sapiens
cgactggattcctccatgactcaaggcacagactctccaggtgaaagaacttgtcctggacaacagtcggtcgaatgaaggcaaactcgaaggcctcaca

SEQ ID NO: 183463 - DNA, 100 bp, Homo sapiens
tagtccgccgcgttatcgactgctcatgagtgatggattgaacactctatcctagaatccattgttatcaatctagtgaagaattcaaggaagacacaag

SEQ ID NO: 183464 - DNA, 90 bp, Homo sapiens
gaatgggacaagatcccgtccatgaatcagggcaaggactctccctctaagcagagccctggggagtccacgaagaagcaggatggccta

SEQ ID NO: 183465 - DNA, 90 bp, Homo sapiens
ataattttgactttccacggaatattgaagaatacgtacaccgaatagggcgcacgggaagagcagggcccccattgccgtgcggctggg

SEQ ID NO: 183466 - DNA, 76 bp, Homo sapiens
ctgggcagcagctgctgtggaagggctccttcaagcccagcgagcatggggcaagattcttgccaagagaattaat

SEQ ID NO: 183467 - DNA, 74 bp, Homo sapiens
gacggcctgggtgctggcgaagcggaggccggaggttactataacaacagtaccaaggtggctgtgaaaaccct

SEQ ID NO: 183468 - DNA, 76 bp, Homo sapiens
ccttcgcctcctaatccctagccactatgaaattccgggtagatatgcctggctcaggcagtgcattcatccccac

SEQ ID NO: 183469 - DNA, 100 bp, Homo sapiens
cttctccactttcgccagcccgtgccgcgagcgcggcctgcaggagaagtcccgggcccagagcccggccagcaggagcagttggtcttcggcagcgggg

SEQ ID NO: 183470 - DNA, 74 bp, Homo sapiens
aaacatccttggagaggtcggagatgggtttaaggccaagcccttattccgatctacacagagccttcccactg

SEQ ID NO: 183471 - DNA, 101 bp, Homo sapiens
cattcaggaagtcctggaagagcagagtgaggacgaggacagagaagccaagaggaagaaggaggaggaagatccgaaaccccgccaagctcaagcgggca

SEQ ID NO: 183472 - DNA, 90 bp, Homo sapiens
agccagctcctgcgaccgccctgcgcttcgtgcaccggggcggtccgttgccaaagccagatggcaagattattttatcataaaccccag

SEQ ID NO: 183473 - DNA, 80 bp, Homo sapiens
aagacaaatatggaaacaaatactatgaagacaacaagcaattttttgaatttcgaggatgtcagatgtaaatgtatctg

SEQ ID NO: 183474 - DNA, 90 bp, Homo sapiens
tcggcctgaggcagaaggagaagagcggaacggaagccgccccttttcaacatgaatgcaatgagtgccttatatcacattgcccagaat

SEQ ID NO: 183475 - DNA, 82 bp, Homo sapiens
gcgcacgactagagggcgggaaagatttgagctacgcctgcgcagagatggagtctcgctgtgtcacccaggctggagtgca

SEQ ID NO: 183476 - DNA, 136 bp, Homo sapiens
cccaccacaagacccccctgtgttgaggacctgcaccgccaagccaagctcaacctcaaatcagtactgagggtgcctacaccaactaatgttacaattgaatcctataacatgaaccctatcgtatattgggagt

SEQ ID NO: 183477 - DNA, 50 bp, Homo sapiens
caaggattctgggggaggcctcaggcctcatgcattgtgcgtcagcagca

SEQ ID NO: 183478 - DNA, 75 bp, Homo sapiens
tggaaatcagcgcggagttaccccagacccctcagcgtctggcatctgtcctaatgccccgagccaagttccact

SEQ ID NO: 183479 - DNA, 74 bp, Homo sapiens
ctttggcaaagctggggattggccagctgactgctcaggaagtaaaatcgcctttgaagaagatggtggagaga

SEQ ID NO: 183480 - DNA, 88 bp, Homo sapiens
ccgccactgccgcaggaggcgtgagcttggattccttagcaccaccacagctcagccagaacagaaggcctcgaatctcattggcaca

SEQ ID NO: 183481 - DNA, 75 bp, Homo sapiens
gttccaacatggacatcctgaagccaatcctgagctccaaacgagaatggaagccgctggaggaccgtagctgca

SEQ ID NO: 183482 - DNA, 90 bp, Homo sapiens
aagagatcatagccgagtatgaaagtcaagtcaaagatgctgtctttgcaggtgccatgcctacaatggcaagcatcaagctgtctacac

SEQ ID NO: 183483 - DNA, 98 bp, Homo sapiens
atggggtcaagtcctggctgaagccacggctgggacaggaagccacagaagcacaagcctatgcagacgacaacagtttgctgttcatggagacatca

SEQ ID NO: 183484 - DNA, 124 bp, Homo sapiens
agcagtaaaggagaactttatcagtggaaatggagtgaatctgagccttacagaaatgcccaggtattagtgagtattttgaaacactgtgatgtctcaggcatgaaggaagacctgtggattc

SEQ ID NO: 183485 - DNA, 98 bp, Homo sapiens
acaagtacccgtttgagctggtcatggcggtcttagtggtgcaatggctagtataagcgtgcgttcgagtaccccaggctctcctacacatgtaagca

SEQ ID NO: 183486 - DNA, 90 bp, Homo sapiens
gtggaagtctgataccgcttgcagaagggaattgaatagatgtctccctattgattcagtacctctcgccagactctcacctggatccca

SEQ ID NO: 183487 - DNA, 74 bp, Homo sapiens
ctcgcgatgagtggtctcggcaggctcttcgggaaggaaattccaacagaatgggtttcctgaaacggatttgc

SEQ ID NO: 183488 - DNA, 82 bp, Homo sapiens
ttactagattttctctcaaactacgagatgatcaagcggtgctgattcacgagagtggaagcctccagagcttggggctttc

SEQ ID NO: 183489 - DNA, 100 bp, Homo sapiens
cgcctctcgatgggcagctcgcacttgctcaacaagggcctgccgcttgccgcttacaaacacgcagatggcaagaagattgatggcaggagggtccttg

SEQ ID NO: 183490 - DNA, 83 bp, Homo sapiens
gtactagtctcaacgagagacccaagagcacggggtcactctggtgcccattgaggagttcagcccggagttcgtggagcccc

SEQ ID NO: 183491 - DNA, 98 bp, Homo sapiens
ctgagtacctgaaccggcacctgcacacctggatccaggataacggaggctggggaacagaaagaacagcttcaaaagatgaaagacttcgggtctga

SEQ ID NO: 183492 - DNA, 75 bp, Homo sapiens
catcgtggcccactacgacgcctttggagtggcccccgtgccaagtcctgccctgccaacttcttggcagctgcc

SEQ ID NO: 183493 - DNA, 103 bp, Homo sapiens
cacctcgctgttcgcggtgacggtggcgccgcccggggcgaggcagggccagcagcaggcgggaggtgagaagccctaccactgcaactgggacggctgcggc

SEQ ID NO: 183494 - DNA, 98 bp, Homo sapiens
ctggaagctgttttttccttcccagaggagccttcatttataatacgcttacagatttcatacgaatggagttttgcccttgttgcccaggctggagt

SEQ ID NO: 183495 - DNA, 83 bp, Homo sapiens
attggatttaaaagacagtcctcgtcagcactgactttcagctatggaatcgatcttcagtttagatcttggaggcatatcaa

SEQ ID NO: 183496 - DNA, 100 bp, Homo sapiens
gcaaaagtatctcatatgaccagtgaactctactacgatcgcgggaaccaccatgagtttgtgtccctggtgaaggacctggcccggcctggagagatca

SEQ ID NO: 183497 - DNA, 74 bp, Homo sapiens
cctttcttctgtgggctgtgattttcagaggggaatgctaagagtatgtgccaagtgctctctgctgccccagc

SEQ ID NO: 183498 - DNA, 75 bp, Homo sapiens
tcaaaagtggggggcaggaaaggtggattctccacagttttcctcgtgcgtactcacggtggaatccgatgtgca

SEQ ID NO: 183499 - DNA, 76 bp, Homo sapiens
atgtcggcgaagagttcaaccaggaaccaaccggtgagccctctcctaagagacccaggggaagacccaaaggcag

SEQ ID NO: 183500 - DNA, 100 bp, Homo sapiens
gctccggcaccaggcattcatggccgagctggctcagaataaggagtggctggagaagatcgagcgggctccaggaggccagagctctactgaagcggcg

SEQ ID NO: 183501 - DNA, 82 bp, Homo sapiens
ctaatttgaaccatgtttggattgaagccgcctctgtattacttaccagggggagtcggtgaagtacttcctggacaacttg

SEQ ID NO: 183502 - DNA, 101 bp, Homo sapiens
ctcccggccggggtagctcttcactcctcagcgcgacgtcgtgtcgagttcccaaaaagctccgcaggggctgtagggagccagatgaattatactttgag

SEQ ID NO: 183503 - DNA, 98 bp, Homo sapiens
ctacggccagtctgtagaggatgattattgtatttcgccgtcaacaggtattataaaaaagttgctgttaaagagaaacaaaaacgggatgcagatga

SEQ ID NO: 183504 - DNA, 100 bp, Homo sapiens
cagccagtgagaaatttacaaacttcaatcttttctacatggattttgccttccatgaaaatctcaggaaattttctgatggaatttcaagtgaaaaatg

SEQ ID NO: 183505 - DNA, 105 bp, Homo sapiens
gaccctaattcagaaaagaagaagaagagggatactcccatgctgccaaagctaaacatgaattcagctccaactttcatcaactttcctgcaaaagggaaaccc

SEQ ID NO: 183506 - DNA, 100 bp, Homo sapiens
ttcagaaggagcaggattaccaaagggatattaatgcacacgcctgtgttactggtaaacccatcagccaagggggaatccatggacgcatctctgctac

SEQ ID NO: 183507 - DNA, 74 bp, Homo sapiens
ttgacatttaattttagggtcctttatatagaagggagagtagactttctaagaagatcactaataatattgtt

SEQ ID NO: 183508 - DNA, 82 bp, Homo sapiens
gggctcgggtcgccggagccgcgccccaccccgccagctccagagccacgtacggtgcagtgccatacttacactgggtact

SEQ ID NO: 183509 - DNA, 100 bp, Homo sapiens
ccagcctctgcctcctccattttgatgtctagaatcaggggatccaggatcatcaccaaggtcattttcccagtttttggctttcacccccaaccagtga

SEQ ID NO: 183510 - DNA, 100 bp, Homo sapiens
agcatctgacaaacactgtattcgttgacagagctttgatagtcgtaccatatgcagaaggatttccagatgtgacttgcactcagaagatcagtggtca

SEQ ID NO: 183511 - DNA, 100 bp, Homo sapiens
gcactgctgctcctgctagtcgggggtgtggaccagtctcctcgaggcatgaaaatccggggtccaccccaactctgtgcacatctgtgcggtggttgtg

SEQ ID NO: 183512 - DNA, 121 bp, Homo sapiens
taatactgggactgacttacctaggaatgagagggacaggagtatctgaggatggagaactcagcagaacaaatgtggtatctggggctggcggtctgagaagatggaaactgttagcggc

SEQ ID NO: 183513 - DNA, 88 bp, Homo sapiens
agaaccggagcatggaggcgcacaacatcctcagtataccaacagatgttttaaagattgtgtattctgtgggtgctcagacaacagc

SEQ ID NO: 183514 - DNA, 74 bp, Homo sapiens
aactcagggccggttgtggccatgaccttcggcatggctgaggagtaccatcgggagtcaatgttggttgagtg

SEQ ID NO: 183515 - DNA, 141 bp, Homo sapiens
ccgccgccgcggtttgtcgccagaaggaagatggcggatctggaggagcagttgtctgatgaagagaagggaaatcctcattgacgattcaatttgttgaaggccaatttgtggactcctacgatccaaccatagaaaaca

SEQ ID NO: 183516 - DNA, 74 bp, Homo sapiens
tccaccatagctttggactctcttgttcttgaaaacttaagtacccagcaagttgaagtcgattgccaacagtg

SEQ ID NO: 183517 - DNA, 82 bp, Homo sapiens
gccggtattggatgattcgtatctaagactctgggacactcctgaagtcgggaaatgggagatggctgcgatttagttttga

SEQ ID NO: 183518 - DNA, 75 bp, Homo sapiens
accttccggagcttctcagaagacagagggttttcttttgagggatgctgagaacttgctggagtcacagccact

SEQ ID NO: 183519 - DNA, 109 bp, Homo sapiens
tggactcatctgtcattcaaaggaaaaaagtagctgtcattggtggtggcttggtgacttaagagattaaaattaatttggttgctgttggttctgaacaaataatgag

SEQ ID NO: 183520 - DNA, 100 bp, Homo sapiens
agccatgggcctcaccctgctcttgctgctgctcctgggactagaaggtgctggagaatctggtaaaagcaccattgtgaagcagatgaggatcctgcat

SEQ ID NO: 183521 - DNA, 74 bp, Homo sapiens
aaatggctgcgagaccctagaggcctgcggcctgcgggggctagagagctgaaggagagccagtttccccaaaa

SEQ ID NO: 183522 - DNA, 100 bp, Homo sapiens
caaggtccggctgctggatggaggggattttgtcagcttgtcgtcaagtttcatgatcaacatgggagactcccacgtggacaccagctccaccgtgtcc

SEQ ID NO: 183523 - DNA, 75 bp, Homo sapiens
tcttgtttgtggatcgctgtgatcgtcacttgcttcatggcggctgaagagatgcattggcctgtccctatgaag

SEQ ID NO: 183524 - DNA, 87 bp, Homo sapiens
tcagaagagccaaggaataaacatgcaatgaacccaaaaggaggggtctggttgctgcttacagtggtgacagtgacaatgaggagg

SEQ ID NO: 183525 - DNA, 75 bp, Homo sapiens
cccagcactcccagctgcgcagggcctgccaggtggcgctcgaagagaagctgaatttggacgacagccagtggg

SEQ ID NO: 183526 - DNA, 100 bp, Homo sapiens
tggctcagagatgcccttcacctcccatgatcaatctgatctcggttgggggacaacatcaaggtagacaagggcgtggtccccctggcagggacaaatg

SEQ ID NO: 183527 - DNA, 74 bp, Homo sapiens
cgccgattcctcctccttggtcgccgcgtccttggctggcgtgtaccaggatcatctatgaccggaaattcctg

SEQ ID NO: 183528 - DNA, 100 bp, Homo sapiens
gcagtttccccagagctcctcaagaataacggaagggagtattgtgtatggatgcaaagatcaattttgactctaattcagcctatcgccaaaagaaaat

SEQ ID NO: 183529 - DNA, 51 bp, Homo sapiens
cttcatctacgatgtcttctgggatagcactggctttcacagggattagcc

SEQ ID NO: 183530 - DNA, 90 bp, Homo sapiens
gtttgctgaagcaaggagaaatatgtctgaatcaccatcttattctcctcagcctcagccatttccacagaactcttcccagtcagctgc

SEQ ID NO: 183531 - DNA, 74 bp, Homo sapiens
tttcgccagcccgtgccgcgagcgcggcctgcaggagcttggtttatggcagctccaggacctcgcaccccgag

SEQ ID NO: 183532 - DNA, 90 bp, Homo sapiens
cacccgttgtgccagtgccccaagtgtgccccagctcagaagagacggtctcgccacattgcccagactggtctgaaagtcttgggctca

SEQ ID NO: 183533 - DNA, 100 bp, Homo sapiens
gggcaccagcccccgtgccaacgggctgtccgtggagcggagtaacacacagctgggtgggggcacagggcgtctctggccgagcctctttttgtggaaa

SEQ ID NO: 183534 - DNA, 75 bp, Homo sapiens
agcagcagaaacgctactttccaggcatcagaacacaccatgatggctgtgacctaagaccctcaggaagccccg

SEQ ID NO: 183535 - DNA, 74 bp, Homo sapiens
aacatgacagaggaccatgtgatgcacctgctccagacctgcaatgcttcttttgccacccgagaccgtctgcg

SEQ ID NO: 183536 - DNA, 143 bp, Homo sapiens
gatcgacctgtgtatcctgatctgctggcaggctgtggaccccctgcgaaggacagtggagaagtacagcatggagacattgcctaagatactgagccatatcgccccagcattttgcatgagcagctgtagcttcgtagtgg

SEQ ID NO: 183537 - DNA, 98 bp, Homo sapiens
ctggaaaatgaccgtagcatggcttctttgggtggtggaggtggatacagcagtcggagaacatctggcagagacaaatacggaccacctgttcgtac

SEQ ID NO: 183538 - DNA, 100 bp, Homo sapiens
cccatacctttatccactctatggccttggagaactgccccaaggatttgcaagagaacagcccatcttcaccacccgagcgcatgtcttccagattgac

SEQ ID NO: 183539 - DNA, 100 bp, Homo sapiens
atttcatgagagaagaaatacaggatgcctctcagctgccacctgcctttgacctttttgaagcctttgcaaaatgccagggcaggggcccttggagtga

SEQ ID NO: 183540 - DNA, 89 bp, Homo sapiens
cggccggggcgctcacggccacggcgctggtcaccggggtctgcctggctcaccatggatgatgatatcgccgcgctcgtcgtcgacaa

SEQ ID NO: 183541 - DNA, 50 bp, Homo sapiens
cagtcaagacgatcatagtcactgccctggtacctgacagtgtaaagaag

SEQ ID NO: 183542 - DNA, 98 bp, Homo sapiens
gcttgaggctccttacaagaagagccggctacctgactctttacggaattgaggcgctgccacgcacccatgaaagccaggcccaggaccgcgtccac

SEQ ID NO: 183543 - DNA, 82 bp, Homo sapiens
ttctggaagaagaagaagagcatgatcggcatgtccaccaaggtccagcaccatgtgctaggtcactcccagcgcgaggcca

SEQ ID NO: 183544 - DNA, 82 bp, Homo sapiens
tatcaaacggcaagatgtccagtaatgtcccggcggatatgagatatagatcagctatcaggaagggacttctgccattcaa

SEQ ID NO: 183545 - DNA, 102 bp, Homo sapiens
cctggcagacagggagctggttcacatgatcaactgggcgaagagggtgccaggacaacaacaggctggagttgttgcccatcctcctgcagtgcctccaag

SEQ ID NO: 183546 - DNA, 76 bp, Homo sapiens
tgcggaacaggacgccctctgatgtgtctcgtgcctctgctggaccctgactctgggctcctggtcctggcaggaa

SEQ ID NO: 183547 - DNA, 100 bp, Homo sapiens
tctgcgcttccccatggggctggcctgcggcgcctgggcgctctgagctatgtggtggtaatgcctaaaaagagacaagcactggtggagtttgaagatg

SEQ ID NO: 183548 - DNA, 74 bp, Homo sapiens
tccagcagatctcccccgtggtgatgttgcacctgtaaccatctttttatgggtggagcagagagtcaatccct

SEQ ID NO: 183549 - DNA, 100 bp, Homo sapiens
gtcatggggggcggagacctgataaaataccatgaggagtttgagaagagccgcatgggccctagcgggggcgagggcatggagccagagcgtcgggatt

SEQ ID NO: 183550 - DNA, 75 bp, Homo sapiens
cagaaatctggtatgctggtaaaaaggctgctgctggacacccactcgctgaagatggtcctgctcgatctcccc

SEQ ID NO: 183551 - DNA, 83 bp, Homo sapiens
cgccctcaaggccatgatcaaaacaaaaagcttgtggtgaaggggggcaaaaaaaagaagcaagttctgaagttcactcttga

SEQ ID NO: 183552 - DNA, 100 bp, Homo sapiens
gaggaattctatgatgcccctgaagatgtgcacctagggggcggctaccccgtgggaataactgaagtgaagtgatggactccgatttggagagtagtaa

SEQ ID NO: 183553 - DNA, 100 bp, Homo sapiens
gggagccgggccagcaccggcttgggggccggaggcgttcactccagactgggaaagccgagaagtttccactgggctggttgtcttcttgcctgccctg

SEQ ID NO: 183554 - DNA, 75 bp, Homo sapiens
tgaagggcaagggccaaaatgatggtgtcacccacacatcatccggtgggcacaggagagcagagacagcatgcg

SEQ ID NO: 183555 - DNA, 51 bp, Homo sapiens
gacagtgagaccgaagagacccggaaaggctaggcagctggaagagaaaga

SEQ ID NO: 183556 - DNA, 98 bp, Homo sapiens
ggcgcagcagccaggagcgcccacggagctggacccccagagccgcgcggcgccgcagcagaggtgttatgaacataaacagtatagaaatggattga

SEQ ID NO: 183557 - DNA, 75 bp, Homo sapiens
agaatgcacttgactacatgaaaaagcacatccctagcgccaagaagagtccctgtgtctaatgtgaatctagag

SEQ ID NO: 183558 - DNA, 82 bp, Homo sapiens
gaaggttctggatgaagcaacattaaaggtgaaaggtgtagcagtcactcggcctacacccacagcatcgaccttgtgaacc

SEQ ID NO: 183559 - DNA, 90 bp, Homo sapiens
ctaactcttatttctccgttggcccaaccagtcccagcgctgtcgtgctcctctactcgacgcaggaggagggagacgcactgatgacat

SEQ ID NO: 183560 - DNA, 100 bp, Homo sapiens
agaggcgttttttggccaaggggcttgggcactgtttaaaggaaagttccgagaaggcatcgacaagccggaccctcccacctggaagacgcgcctgcgg

SEQ ID NO: 183561 - DNA, 83 bp, Homo sapiens
cctactcgcccgccaccctgcgctgccgccgctctgaggagttaaaggagccttcacgtaaatgggtccagtcatgcctccca

SEQ ID NO: 183562 - DNA, 82 bp, Homo sapiens
ccttcagttaaagaccaccaggagcacactttccaagccttatgcatttgatcgggtgttccagtcaagcacatctcaagag

SEQ ID NO: 183563 - DNA, 100 bp, Homo sapiens
ggaaagcaagggattgctggctacagcttcagaagaccgaagcgttcgtatctggaaggtgccatcgcctgcaggattctttattcagctctgacagtgg

SEQ ID NO: 183564 - DNA, 98 bp, Homo sapiens
ggacaaggagctggaggcgttccggtttccagcaatggctttactaccggtgttgtttctggttactgtgctgcttccatctttacctgcagaaggaa

SEQ ID NO: 183565 - DNA, 83 bp, Homo sapiens
ccggacactggcggccatggaactcaccggagtcagtggatcggtggggaaaatgctgcttaccctgggccctgggctgtaga

SEQ ID NO: 183566 - DNA, 112 bp, Homo sapiens
cggacagccgcgcgctgagggtctcggggcgggcgccgcgggacctctccgggccatggacccagcacaccctgcctgcatggcgctgcgctgcaccttcactctggtcacg

SEQ ID NO: 183567 - DNA, 59 bp, Homo sapiens
ttttatccatggatgacttgcttgggtgctggagaatctggtaaaagcaccattgtgaa

SEQ ID NO: 183568 - DNA, 98 bp, Homo sapiens
ttgcggccagtcgccactgctgatattccccgagtccctccggtggctaatggccacccagcagtttgagtctgcaaagaggctgatcctccacttca

SEQ ID NO: 183569 - DNA, 98 bp, Homo sapiens
tgcatacatcatacgattcaagaggggggatgatccagacggcagagcagtaccagttcctgcaccacactttggccctgtatgcaggccagctgcct

SEQ ID NO: 183570 - DNA, 75 bp, Homo sapiens
ggatgacaccggagtttgacgaagaggtggtttttgaggtgcccgagtggaggagttcctgtatgagaagctgga

SEQ ID NO: 183571 - DNA, 98 bp, Homo sapiens
gcgccccagggcaagccccgctccggccaacaatactatactggcaattgctggagaagattttgcaattgttgcttctgatactcgattgagtgaag

SEQ ID NO: 183572 - DNA, 107 bp, Homo sapiens
aacaagatggtccttaaaaccgaagaggaggacgtgatcagggccaaagcggtcagtgagaaggaagtggactctggaaacgacatttatggcaaccctatcaagag

SEQ ID NO: 183573 - DNA, 83 bp, Homo sapiens
cccccgccgccgccaacagctcgggggacggcggggcggcgggcgacggcaccggtgctgggtttgtgcggagccgcttaccg

SEQ ID NO: 183574 - DNA, 100 bp, Homo sapiens
ctactgctaccgggcggccatcgggagtgtccggttcccgtggcggccggacagcaaggacatttccaataatctatgccagcaattatgacaatgttag

SEQ ID NO: 183575 - DNA, 83 bp, Homo sapiens
cggactcttcttcgccttcgatacctggagtagaacagaaaaattattatgtctgtgttcccttgggactcattggaaattgt

SEQ ID NO: 183576 - DNA, 101 bp, Homo sapiens
cccggagcccccctcaacacggaccgcgcccgccgggcacacaagaatggtcactggtttccaggcctgaggtgcccgccctggccccaggagaatgaacc

SEQ ID NO: 183577 - DNA, 83 bp, Homo sapiens
ccgcggacgaagatggcgaccgccatgtacttggagcactatctggacaccactcatctctgcccagctgctgccctccccag

SEQ ID NO: 183578 - DNA, 90 bp, Homo sapiens
ctccggggacccttccgtatctgcctaggcattttgctgtctcctcctaatacgaacctgatgttgttgttaaacgacaagaagctttag

SEQ ID NO: 183579 - DNA, 50 bp, Homo sapiens
tttcacgagtcttcaagccttcagagttgcatgctgagaatttgaaaaat

SEQ ID NO: 183580 - DNA, 50 bp, Homo sapiens
tttcactgcactgggagcacatcagagttgcaagtggatggcaagcttcc

SEQ ID NO: 183581 - DNA, 83 bp, Homo sapiens
ctggcgtgcactccgcacctcggggacattattgcgcgtggaacggctgcttttggaaggttcccgtgtcagtggctatgatg

SEQ ID NO: 183582 - DNA, 100 bp, Homo sapiens
tcaaaactgccttcagaagcaaaagcactgctccgtgtggagatggcgccctctttgacaagtcctgcagcgaccgtgctatggaaagcacagaatcccg

SEQ ID NO: 183583 - DNA, 98 bp, Homo sapiens
aatactctactggacaaacatttcctccaagatttgaacatggaattcaatccttcagatcatcctcgggccagcacaatattcctcagtaaatctca

SEQ ID NO: 183584 - DNA, 100 bp, Homo sapiens
catgattttcactccttgcaaactttgccatctttgttgcagagaatcgggatcaccccttctgtgtcattctctgaggaaaacaagttcttctcaagga

SEQ ID NO: 183585 - DNA, 75 bp, Homo sapiens
ggacatgtcctccattttccaccagaaggccgaaaagggtgtgataggtatacagctggttgttaccatggtgat

SEQ ID NO: 183586 - DNA, 118 bp, Homo sapiens
gatgatgggagagattgttcctgtggagcaaagagctgcatcatgaattcaggagcatcactatctgtcaaaaaacacctaaggactctccgaagtatgaagtctgcaaaagagcctt

SEQ ID NO: 183587 - DNA, 101 bp, Homo sapiens
gggatgagagtcggagccgaataccaagctcggatccctgaatttgatccagatggtggatgcttccaaaagcatcgaagctgtccatgaggacatccgcg

SEQ ID NO: 183588 - DNA, 96 bp, Homo sapiens
cagagatgtgatgttggagaactatagcaatctggttttcttgggtacaccaggggttggaaaaaccacactaggcaaagaacttgcgtcaaaatc

SEQ ID NO: 183589 - DNA, 75 bp, Homo sapiens
gcacctggaggcggggcgttcacggaaagtccatcagcttgataatggaggagaacaatgactccacggagaacc

SEQ ID NO: 183590 - DNA, 90 bp, Homo sapiens
tggcgcttcctgcgcatcgtctgcaagaccgcgaggcgagacctcttgacctgaaggagaagaaggagaaggtggaggagaaggcaagcc

SEQ ID NO: 183591 - DNA, 46 bp, Homo sapiens
aactcagacatctgcaaatcatgataaacaggggtcacatgacgac

SEQ ID NO: 183592 - DNA, 90 bp, Homo sapiens
gagaggaaagtggaggtcacctactatcacaaaaatggtgctggagaatctggtaaaagcaccattgtgaagcagatgaggatcctgcat

SEQ ID NO: 183593 - DNA, 75 bp, Homo sapiens
cagcatgaagaggagagctggcctggggggcagcatgaggtggtgatgatgtccagcaactctgtgaagcaggag

SEQ ID NO: 183594 - DNA, 75 bp, Homo sapiens
agtcccaggatgactactgtgtcaaaattatatccagatcgagagacagaagattctgaaagggttcaatgaaat

SEQ ID NO: 183595 - DNA, 100 bp, Homo sapiens
cattggcagcacagaagaactgaagataggcaacaagatgatgagggcgcggcagtatccttggggcactgtgcaggacgaaggggaggaccaggctggc

SEQ ID NO: 183596 - DNA, 51 bp, Homo sapiens
cctggggcccgggggcgcgggccggggtgggtgattctgggggtccacttg

SEQ ID NO: 183597 - DNA, 97 bp, Homo sapiens
aagatagccaaagacaagacgcaggagaaaatcgagacctcaagtaatcattcccaagtgaagtggatcctaaagagaggatagcacgccaacgaaa

SEQ ID NO: 183598 - DNA, 100 bp, Homo sapiens
cccgcggcgagcgagctcctgagaacccttaggagaaatcttgagagtggacagcaattgtgaagatcgccagagagttctgtgtttcatcaccgccgaa

SEQ ID NO: 183599 - DNA, 90 bp, Homo sapiens
cccagatctacctgacgggcctgcgagggttgaagattgtgaagcaatagcctaagtcccatatagaaatcatccgtggccatgcagcct

SEQ ID NO: 183600 - DNA, 100 bp, Homo sapiens
agaagctgaggatgaagaagatggtgatgatccaatgccctttgacattaaagctgagatgacactgaagacaaatttttttgccactagaaacatgtgc

SEQ ID NO: 183601 - DNA, 85 bp, Homo sapiens
gtgctcgtgagtgcatggggtataagctccaccgggggacggctacgtgcaggcggacgcccggggccccccggaccacgaggag

SEQ ID NO: 183602 - DNA, 100 bp, Homo sapiens
tccctacgatgagaactggttctacacgcgagctgagtaatttcttaccaaacattaccaagaaatatgccaagtcacagagcccagattatggcccgct

SEQ ID NO: 183603 - DNA, 100 bp, Homo sapiens
atgccaccaactcctgcaagaacttctcagaactgcccctggtcatgtggcttcagaaactggcagacctttcacttcgtatccaacaaattgaaacaac

SEQ ID NO: 183604 - DNA, 78 bp, Homo sapiens
aacctcactgtctctgtcctggaagcagaaggagtctttgaaaaagatattcccagacacccgatgccatttgctgca

SEQ ID NO: 183605 - DNA, 83 bp, Homo sapiens
tacaattttttttcaagaactgccgtcttctttgcctgcactaatggctactgcagcactggggtgtcagttgttggtccgac

SEQ ID NO: 183606 - DNA, 82 bp, Homo sapiens
ggaacattatcacaaagctatcatcctgccaaactccaggctcagatgtcacaggtggtttcctagaaacatgattgtttat

SEQ ID NO: 183607 - DNA, 83 bp, Homo sapiens
tcatgagggaaatcgtgcacttgcaggccgggcagtgcggcaaccaaatcggcgccaagccgcggcccatggagcccgccggc

SEQ ID NO: 183608 - DNA, 100 bp, Homo sapiens
gagattgagaaatgcaagagtgacattaagaagatgagggaggagctggcggccagaagcagcagggttttggccaaattgggcgagggcacaaaataac

SEQ ID NO: 183609 - DNA, 97 bp, Homo sapiens
gccaccaaatccccgacagtttggtcccatgacagcatcagtttgaagtccaggctctcatcattgagctcatgctgctcaggtcacttgtgttgct

SEQ ID NO: 183610 - DNA, 75 bp, Homo sapiens
agcctcgattcattcaactctttcaggctctggttgtaagtaccactgcagctggatttgcattggctccgggcc

SEQ ID NO: 183611 - DNA, 80 bp, Homo sapiens
agcctcctgagtagctggtattacagggaaatgtttcaacgtgcgcaagcgttgcggcggcgggcagaggactactacag

SEQ ID NO: 183612 - DNA, 100 bp, Homo sapiens
cagagattcaggccagagttgtgggccgccgtcggcagcaagaacagagagagaggtggacagatctgagagatactgagacgctatgtccagcaaaggc

SEQ ID NO: 183613 - DNA, 100 bp, Homo sapiens
cagagggtaaacttcacaacatgatagttgatctggataatgtggtcaaaaaggttttggggccttgtcacagatgccagatgatttgcatcgaccagca

SEQ ID NO: 183614 - DNA, 100 bp, Homo sapiens
ctaaagatgacctctctggtgctgacatcaaggcaatcaggatgagtgaaaaattgatttgcagctgacctgcaaatggaatcatcaggaacatcccttt

SEQ ID NO: 183615 - DNA, 95 bp, Homo sapiens
gaggtcgccatggggcgaggcagcggcaccttcgagcgtctcctaggtctctgagcggcccctgatgttcctgttggacactcctggcgtgctgg

SEQ ID NO: 183616 - DNA, 76 bp, Homo sapiens
gtctgcctgtgtccctgaccatggctccctgcagtaccctttaacgggtgctggaaatgtaaacaagaatagactg

SEQ ID NO: 183617 - DNA, 82 bp, Homo sapiens
gccgccccgagcggagcctggagccctgctggtttaccgtgtcttcaggaacgaagctaaacgcaccaccaaggtcctgcac

SEQ ID NO: 183618 - DNA, 153 bp, Homo sapiens
acacagtattttgacatcagttatattccatctactgtctttttcttcaatgggcagcatatgaaagtggattatggaaggcagacggtaacaagtactccttgctggattgaacttcatctgaatggacctctacagtggttggacaaagta

SEQ ID NO: 183619 - DNA, 100 bp, Homo sapiens
tccctgtcgtgtgacattttctggcctggtctccaagtcctctcctaagaagcctcgtggacgtaacatcttcaaggcccttttctgctgttttcgcgcc

SEQ ID NO: 183620 - DNA, 100 bp, Homo sapiens
ctagcaccttctccagtcgacactctcgcgcccggagtttgaggtggtatcaacatcctacagaagaagaattaagaattcttgcagggaaacaacaaaa

SEQ ID NO: 183621 - DNA, 82 bp, Homo sapiens
gaaggaacgaggcaaggagctaaagcagcgtgcgttcagccctggggccactcttcacctccaccatgagcctggacatcca

SEQ ID NO: 183622 - DNA, 117 bp, Homo sapiens
cttctttgtcaccataggagacatggacgaagccttcaaatccatcaagctcatcaaaagggttgtgagtcccggcccagcccctccacccccctgcccccccgatgcgaccatggg

SEQ ID NO: 183623 - DNA, 50 bp, Homo sapiens
aggagagaaaagtctctaagtttgtgcactggtgaccccggcagccctga

SEQ ID NO: 183624 - DNA, 95 bp, Homo sapiens
aaggactcctggaatgccacaaatgcaaatacttgtgcactgggagagcctgctatgggatggatgaagaagagaaccactatgtctcgcagctc

SEQ ID NO: 183625 - DNA, 110 bp, Homo sapiens
gcgagcacagagcctcgcctttgccgatccgccgcccgtccacacccgccgccaggcttgggcactgtttaaaggaaagttccgagaaggcatcgacaagccggaccctc

SEQ ID NO: 183626 - DNA, 100 bp, Homo sapiens
ctgaatcctgccaatacccgcagcatttccaacatggtacatcaggaacgtctctatcaagaatacaatttcagcaaggctgagggccatctgaaacaga

SEQ ID NO: 183627 - DNA, 75 bp, Homo sapiens
ctgtattggacacttgctcccatctactttcttctctagaatccacggtattcagagcggaagactctaataccc

SEQ ID NO: 183628 - DNA, 126 bp, Homo sapiens
agacagcatatttgagtcatttccttcgtacccacagtgcttcatgagagtgacctgaccaacggtgcagatgggatgctggccacaagctccaatgggtctcagtacagcggctccagggtggag

SEQ ID NO: 183629 - DNA, 101 bp, Homo sapiens
acattcaatccttctggagagcctgtgtggttcgagaacttgtcttggacaattgcaaatcaaatgatggaaaaattgagggcttaacagctgaatttgtg

SEQ ID NO: 183630 - DNA, 90 bp, Homo sapiens
tcctgttaatacgccattcctagaagaaaagaacctggagctggttgaaaaaggcttcagtaacttgaagaaacaaattgaaaatgccag

SEQ ID NO: 183631 - DNA, 97 bp, Homo sapiens
gaatctaatcaggaggttgctaacccagaacactatattaaacatcccctacagaacagaatgtctacacaaggaagtacaggatttggcttttcta

SEQ ID NO: 183632 - DNA, 97 bp, Homo sapiens
taaaacatcgccccttctgcttcagtgtgaaaggccacgtgaagatgctgcggctgacttaattcagtgcacaaatgagatgaatgtgaacatccca

SEQ ID NO: 183633 - DNA, 87 bp, Homo sapiens
gagaaaggtcccactgcagccctccaagcagcccgcggcgccatggctcacgtcggctcccgcaagcgctcgaggagtcgcagccgg

SEQ ID NO: 183634 - DNA, 97 bp, Homo sapiens
aacaccgttcccccagccgggctggttatgaagacagtatggagtttccagaccatagtagacatttgctacagtgtctgagcgagcagagacacca

SEQ ID NO: 183635 - DNA, 74 bp, Homo sapiens
atccaagtatgaaatagcagttgaaactgaggtttccaaggtgctattgggagctcatgcactcttggccaacg

SEQ ID NO: 183636 - DNA, 83 bp, Homo sapiens
ctgtctaaatcgggttgatggacaaagagaggctgtttgagcctctgagccaggaggctactcacagtcgaactacaactccc

SEQ ID NO: 183637 - DNA, 98 bp, Homo sapiens
gcactgttattgggcctggcttgtaatcataacttgaaaggggtttctctggatctcagcaactgtgagattaaaactttggaacagactaaagccat

SEQ ID NO: 183638 - DNA, 75 bp, Homo sapiens
gttgttccgttgcgagctgcagctgcgatctctgtggtaggcccaggagctcatgggacacatgtagctagtata

SEQ ID NO: 183639 - DNA, 100 bp, Homo sapiens
ctctccctgaagcccaccggtccccaacgcatcatgccagggagccaagcgtcctgcccggcctgaagtacatgcgagaagccacgccctatgtgaagaa

SEQ ID NO: 183640 - DNA, 98 bp, Homo sapiens
tccgatggttctcgaaggcccgcggcgccccgtgctgcaggatttccatttaaacagggttaatttggaagaatcttcaggagtggaaaactctccag

SEQ ID NO: 183641 - DNA, 116 bp, Homo sapiens
aaccattgacgccatgtcgggttattcgagtgaccgagaccgcggccgggaccgagggaaataatgcaaaaggtgtcccaaggctcctgaccagtgaacaaagatttgagaaagac

SEQ ID NO: 183642 - DNA, 75 bp, Homo sapiens
ttttaaacaaagccgtctgtagaggatcctttccccattgtcatcgtattgaggaagttcctgaacttcctttgg

SEQ ID NO: 183643 - DNA, 98 bp, Homo sapiens
gcggggtggtgaacctcagcaccgagaacatctactctttcaactacaccagccagcccgaccagataaagctgtacaccaagcatgggactttgaaa

SEQ ID NO: 183644 - DNA, 85 bp, Homo sapiens
ctgctgggtccgctgagcggggcgacccgaggagttgatccctgaattttattatctccctgagatgtttgtcaacttcaataat

SEQ ID NO: 183645 - DNA, 83 bp, Homo sapiens
catcacataccttcagcacttctcacaatcactgccagtgaaagatgtagaagataaacctgaacaacaaaccagaacaagag

SEQ ID NO: 183646 - DNA, 71 bp, Homo sapiens
agtttagccacaccaggctggagaatatggtgcagaggccctccacggcagctgacacacaagagttcagg

SEQ ID NO: 183647 - DNA, 75 bp, Homo sapiens
acccatagaagttgagcactcggtcccaaaaaggcaaagattacggtctttggtcaaacaattagagagagggga

SEQ ID NO: 183648 - DNA, 101 bp, Homo sapiens
atggcaataatttgcttgatggcttagaactctccacagccatcactcatgtccataaggagatggttccaatccctatacattgaagctttgcttttcta

SEQ ID NO: 183649 - DNA, 100 bp, Homo sapiens
ggcggcggcgggtgttgtgagcgggaagtgcatacatagagacgtgaagccagaaaatatcctcatcacgaaacattccgtgattaagctttgtgacttt

SEQ ID NO: 183650 - DNA, 100 bp, Homo sapiens
gctgatctctgtggagacggacatagtcgtggatcactacaaggaggagaagtttgaggacaggtccccagccacccaggctactttgggaaagttggta

SEQ ID NO: 183651 - DNA, 100 bp, Homo sapiens
gttccgctggtgctgtttaatgaagtcctagaccacgtgctgaggattgacagatatgagaacggccgaggcagctcccaccagcaacaggtgacctgtt

SEQ ID NO: 183652 - DNA, 88 bp, Homo sapiens
cctggaggcggcgggagggccgccggaggaaacgctgtcactgtggaaacgttcacctttcttggatcacatgcaaaggatgtttagg

SEQ ID NO: 183653 - DNA, 100 bp, Homo sapiens
ccaccacctgctcctgctgcctctgctgtcctcagcttctgggagcatcttagcagccagctccggctaatcttccagtaccaacaattgcagcaataga

SEQ ID NO: 183654 - DNA, 51 bp, Homo sapiens
gccctggatccagaacaagatggaggagatcgggcgcatctccattgagat

SEQ ID NO: 183655 - DNA, 74 bp, Homo sapiens
ggagatctattaggattttatatcttactatgtttctcagcagtgtagcgggtccatatggaatatttgctggt

SEQ ID NO: 183656 - DNA, 100 bp, Homo sapiens
ctgagcaacgaggccttcccgttctccacccacaagctactgagagccgcagggcacctgtgtgctcatgggagcttagaagatcccaaaagtataaccc

SEQ ID NO: 183657 - DNA, 75 bp, Homo sapiens
cggcgaattatgcgaccaactgatgtaccagatcaaggaacatccgctatggactataccactcactcttagagt

SEQ ID NO: 183658 - DNA, 50 bp, Homo sapiens
gttttgtgcagattgccagtctaaaggtgaatcagctcccggccgacttt

SEQ ID NO: 183659 - DNA, 74 bp, Homo sapiens
acgcacgccactttttctctgctgatccagatcccaagcagtattgaagatatatttaatgatgatcgctgcat

SEQ ID NO: 183660 - DNA, 91 bp, Homo sapiens
ctcatcccctggatgggggaccacaagatcctcatcgacagactctaaaatagagctcaagcttgagaagagagaaccactaaagggcaga

SEQ ID NO: 183661 - DNA, 51 bp, Homo sapiens
aaggagcttcagctgcccctgaagaagctgctctgttaaaagcgaaaatga

SEQ ID NO: 183662 - DNA, 75 bp, Homo sapiens
cctgcacaacgttcaaccatgctcggtcatctgtggcagtatatcaagacccttctcaggtgcagccagagagac

SEQ ID NO: 183663 - DNA, 87 bp, Homo sapiens
gcctattttcagaggccggaaaatgccctcaaacgcgccaacggtgaaatgacaatggatgctctgttggctcgattgaaacttctg

SEQ ID NO: 183664 - DNA, 100 bp, Homo sapiens
tgctctcgtcttcaccaccaggtacctggacctgttcaccaacttcatctccatctacaacacagtaatgaagctttcaggcagatcccaaaaaacccat

SEQ ID NO: 183665 - DNA, 100 bp, Homo sapiens
tctgagcttgatgctgtggagaaccagctcaagtgggcatcctgggagctccattccctaaggcactgtggcatcaagcatgatggaaccatgtgtgata

SEQ ID NO: 183666 - DNA, 74 bp, Homo sapiens
aaagttgacagcagaggcagagccttagattgtaagcaaaagaaatcaaggtcaagatctggaagcaagaagaa

SEQ ID NO: 183667 - DNA, 82 bp, Homo sapiens
cgctgctcccggaccgggccgcgcacgccgcctcagtgtggacgaatgtggaacctcgctctgtggctgtgttcccttggca

SEQ ID NO: 183668 - DNA, 80 bp, Homo sapiens
ggcgaagggctggtgggcgatgggcccgtggacatgcgcacctcacacagatgcttcaggactgccccaaggcccgcagg

SEQ ID NO: 183669 - DNA, 82 bp, Homo sapiens
cgagcgggggtcatccgagccgtgtcacacagggacagccgcaatccggacctggcggatttgcagatttacagaatggctg

SEQ ID NO: 183670 - DNA, 101 bp, Homo sapiens
aatggtggcgggtcgccggagctctgatcgccgggaacccttgccgctgctgtcctgcgaccccaagcagctccagaaacatgacaaggaggactttcctg

SEQ ID NO: 183671 - DNA, 90 bp, Homo sapiens
cctggtatcgggaggtgccgaacactgtccttcagcctcaagtccaaagcctggtgacatcctcccaggtacagccggtcaccattcagc

SEQ ID NO: 183672 - DNA, 83 bp, Homo sapiens
ctctggttcagctcatacaacagcttcttaggtggtgtaaattggtccaatgtaacttgccaggcaactcagaaaaaaccttg

SEQ ID NO: 183673 - DNA, 100 bp, Homo sapiens
cgccccgggccaacacctggcctgcccgagcaagagcctggagctgcgcaagtgtgccgtgagcgatgtggagatgcaggaacactatgatgagtttttt

SEQ ID NO: 183674 - DNA, 100 bp, Homo sapiens
tgatattgagtcggaaacggggtccactggtgccctggagacccgcagcctcaaggatcacaaagacgtgaaacggagctatgcgagcattgggaagagc

SEQ ID NO: 183675 - DNA, 101 bp, Homo sapiens
gcagagactcagcacaagtttgaaatgtcagacctgggaaagaattctgaatataattcaagtaactgctccctaagcagttctgagaacccatatgccac

SEQ ID NO: 183676 - DNA, 83 bp, Homo sapiens
aagaaagaatgcaaagtccccagaatcttcatggccagcaagatgttactggctgaccaacaaagttcctatcaaaagaccca

SEQ ID NO: 183677 - DNA, 75 bp, Homo sapiens
aggagttcaaaacccacacatcatcaacaacagcaacttgtgattggcggtgaccggatattcagttgcacatcc

SEQ ID NO: 183678 - DNA, 99 bp, Homo sapiens
ttaaacagagaaagggctgcttggcattcttcttccgactggtactgaacatatacattgcccctcagactacatgaggaaataattgacttttataac

SEQ ID NO: 183679 - DNA, 96 bp, Homo sapiens
gacatcttgacgaggctgcggtgtctgctgctattctccgagcttcgcaatgggtcactccagcttcatcactcatcttgactggtccaaggatgg

SEQ ID NO: 183680 - DNA, 51 bp, Homo sapiens
gccatcattggacccaatggctctgggtatgttagagcccaccaaggaacc

SEQ ID NO: 183681 - DNA, 83 bp, Homo sapiens
cacaaggagcaggcggcccagctgcggaacctgatgatatcatcaagttgaatcgaaaggaagggaagaagcagaattttcca

SEQ ID NO: 183682 - DNA, 80 bp, Homo sapiens
cttctgcatccttaactgagaatgaggtaacctctttactaagaagagttttgcctgaagtaacccctagtcgtctggcc

SEQ ID NO: 183683 - DNA, 97 bp, Homo sapiens
aaaagagaaagatagatgccctctctcttcatcttcacttgaaataccggatgattttggagagcatagcggcctgaccacaggggtggccttcggg

SEQ ID NO: 183684 - DNA, 100 bp, Homo sapiens
aggacggggaaaaagcggccaaagaagtgaagctgctgctactcggcagttgagaattttgaaccagcaactcagagaacaacagaaaactcaaaaacca

SEQ ID NO: 183685 - DNA, 85 bp, Homo sapiens
cggtggactccttcggcagtccacccaccgccgccgcctcccaggaaattggagaattattacaaacaaggggtagagagtttgg

SEQ ID NO: 183686 - DNA, 98 bp, Homo sapiens
gacgacgtgctttcccattttgctcagcgactgtttgatgacgtcccgcagactcagaaccgtgctgcatactatcctcctagccaaattgctcaact

SEQ ID NO: 183687 - DNA, 51 bp, Homo sapiens
ttccaagttcaggagaactcgaccgatgctgtacccctcaaggatttaaac

SEQ ID NO: 183688 - DNA, 75 bp, Homo sapiens
ctatggcgctgaaacggattaataagatcaggatcctcatgaccagccaaagagaagaagaattaggaagcataa

SEQ ID NO: 183689 - DNA, 76 bp, Homo sapiens
atcgtcaccgtgtgggagcgggagctgcggaaagacttaattcagtgcacaaatgagatgaatgtgaacatcccac

SEQ ID NO: 183690 - DNA, 90 bp, Homo sapiens
ggacaccattgagaagtcaaatctgaatcgacagtttcttttccggccctgggatgtcacggagccgacacccgcactgccaggatccaa

SEQ ID NO: 183691 - DNA, 100 bp, Homo sapiens
gtgcgatccatgcccatccgaaaggatgatgaagttcagtgactcttcgacctctgaatcagaagtttcctcagtgagccctttgaaaaataaacatcca

SEQ ID NO: 183692 - DNA, 100 bp, Homo sapiens
agttaactgaattggtgacacttcgggtctctcacagaggaaggttttgacacaagggcgcatatcttcaaagcacctagtacctcctaccattgtcaac

SEQ ID NO: 183693 - DNA, 101 bp, Homo sapiens
ggtgctgaggcacctggagaccttcgagcaccccaacgtggtcagagacaaagcatggaggacacaagaatgggaggaaaggcggactctcaggaacttca

SEQ ID NO: 183694 - DNA, 75 bp, Homo sapiens
tttttagctatcaagtggcatccacgcttaaacaggtgaaacatgtaatagctcttcaagtctgcaataaaaaat

SEQ ID NO: 183695 - DNA, 83 bp, Homo sapiens
ctgagtggttgtgtggtcgcgtctcggaaaccggtagcgcttgcagcatgaacccagcgggtgccgcttctccacccgaggct

SEQ ID NO: 183696 - DNA, 88 bp, Homo sapiens
ttgcattggggagcctggttagaactctgtaacctgatcacagacaaagagatgggatggggaaagacaccatagtcataaaagaaga

SEQ ID NO: 183697 - DNA, 100 bp, Homo sapiens
ggggtcatctttaactgcttggccgtgcttgccctgtcatcccacctgagaaccatgctcaccgaccctgacatttcattaccatccagaagtgtctccc

SEQ ID NO: 183698 - DNA, 76 bp, Homo sapiens
attgcctcactaccacatatgatcttcagaagaaaacctggctctgcggctaccctcctttttatgatgaaaatga

SEQ ID NO: 183699 - DNA, 74 bp, Homo sapiens
tgaggggctctaacacctgtgagctaatctttgaagactgcaagattcctgccctcccaggcccaatacttcaa

SEQ ID NO: 183700 - DNA, 100 bp, Homo sapiens
acctcttgccactcagctgacatatgaaggactcattgatgaaatttatggcattcagaacagcctggttgcagtatgcttgaaatctgggatgtggaag

SEQ ID NO: 183701 - DNA, 99 bp, Homo sapiens
tctaggggccgttcctcgttttatcctgatggtggagatcaggaaactgcaaagactgggaagttcttaaaaaggcaaatcctgatcctaactgttgtc

SEQ ID NO: 183702 - DNA, 75 bp, Homo sapiens
catgaaaaagtactgcaagaaggactatggaatcccttggcaccatgtcctgtgtgcattataaattttcctcta

SEQ ID NO: 183703 - DNA, 100 bp, Homo sapiens
caagttttacagaaatgggagaagacatcccttcttgctccgtgccatgacagacttcaaaaatcttcagagagtcaagggtccagagaaggaggagaag

SEQ ID NO: 183704 - DNA, 75 bp, Homo sapiens
gaagcttaagtagctacaggggaaaatattctgagttttatcttcaagacactaaaagtagtaatggtactttta

SEQ ID NO: 183705 - DNA, 50 bp, Homo sapiens
ggctactctgcctcggggacgaaagcaggaacggaaaacagttcttcctt

SEQ ID NO: 183706 - DNA, 146 bp, Homo sapiens
attttctccaccacgtactcttcattcacctcccctgcaactccagcagcgctctgagaagcccccttggtcataactaatgatgccagagaagatgaaatggaagagaacctgactcaagtgggcagtatcctgggaaatctaaa

SEQ ID NO: 183707 - DNA, 98 bp, Homo sapiens
tgttatccagactcattgggactgctctagatcttcactatccaatacgaccattaaaaatctcaagtgacgactttgggaaactctggttatccttc

SEQ ID NO: 183708 - DNA, 117 bp, Homo sapiens
cccccatcattgggagaaatccccactcctccaagaaccaacccccaaattggctgggacaggtgtcattccacacatccacaaatctctgattgggaagaaaggacaacagaagac

SEQ ID NO: 183709 - DNA, 109 bp, Homo sapiens
gcggtttgtcgccagaaggaagatggcggatctggaggagcagttgtctgatgaagagaagggcccgcccttcatggagagcctgcccgagaacaagcccctggtgtgg

SEQ ID NO: 183710 - DNA, 75 bp, Homo sapiens
gtgacccgggtgccgaggagcgggaagagttgctgggacgttggacctctcgaacaaccagctgagcgagatccc

SEQ ID NO: 183711 - DNA, 98 bp, Homo sapiens
tggacattctggacacagatggggacaagtggttagatgaactggattctgggctccaagcccctgtccctgccttacccagcaagcttcccacgttt

SEQ ID NO: 183712 - DNA, 83 bp, Homo sapiens
gccagcgacccgctgctcagcgtcctcatgtggggggtaaaccactcggtgcagaccatgaattacgtggggcagttagccgg

SEQ ID NO: 183713 - DNA, 100 bp, Homo sapiens
gaaggactgaatcccagagcattgccttgttgctgacctttcagtatggggaggttggtcaaagaaaaagtgatgtatgaaaaagaggcaaaacaacaag

SEQ ID NO: 183714 - DNA, 99 bp, Homo sapiens
cagtttatggcttccagtggaggcattttggggcagaatacagagatatggaatcagagattgagaatttatcacaagttgatggtcctcaagtggaag

SEQ ID NO: 183715 - DNA, 109 bp, Homo sapiens
cctggagcctcagttggaagcagccgatccagcctgcggagcctgtggggcagcacaccgttccggaaggcaaaagccttgtatgcctgcaaagctgaacatgactcag

SEQ ID NO: 183716 - DNA, 101 bp, Homo sapiens
gcctaggcattttgctgtctcctcctaatacgatggtgaaaggcttttctaaccgtgctcggaaagcccgacttgctgagccccagctgcgggaagaaaat

SEQ ID NO: 183717 - DNA, 101 bp, Homo sapiens
aaaaacgtcaacaacagttttacggtggctgagcatcggagtggagttcgtggggaactgcgtggtgctctttgctgcactatttgccgtcatcgggagga

SEQ ID NO: 183718 - DNA, 100 bp, Homo sapiens
aaggcggcaaagctgaaggagaagtatgagaaggtgtgcagcaatgacaacaagaccttcgactcttcctgccacttctttgccacaaagtgcaccctgg

SEQ ID NO: 183719 - DNA, 98 bp, Homo sapiens
cgagccccgtcctccttcgccgccgcgcacaaccgcacgtgcaggttccccctaaaggactcaaaacgtctaatccaatggttaaaagctgttcagag

SEQ ID NO: 183720 - DNA, 100 bp, Homo sapiens
tgatcgtgactattcagatcatccaagtggaggttcctacagagattcatatgagagttatggaggaaccacctgttgctcctcatttgatggaacagct

SEQ ID NO: 183721 - DNA, 107 bp, Homo sapiens
agcccggctccccacagaagctcatccgcaaggtgtccacgtcgggtcagatccgacagaagcccagaatgtgaccgtggacgaggtcatcggcgcctacaagcagg

SEQ ID NO: 183722 - DNA, 74 bp, Homo sapiens
ccatgtcatcatgaattctctgatcacaacctcctgcccctgcggaacctgagtcagctgtagatgtctccaaa

SEQ ID NO: 183723 - DNA, 75 bp, Homo sapiens
attggacctacaaatgggagcaaatcaatgccttgggagctgacaatgagaaaaatatgtcgtaactgcaagtgt

SEQ ID NO: 183724 - DNA, 75 bp, Homo sapiens
ctgaaacggattgccagagaattggcagaaggcaacgccctgctgcggcggctggtccgcattggggtgctggat

SEQ ID NO: 183725 - DNA, 94 bp, Homo sapiens
gtgcgctgctcaaggacacggtctacaccgacttcgacggattttttatcaagcagaaatgcatcgaacaacgagaatcaagatcactgagcta

SEQ ID NO: 183726 - DNA, 98 bp, Homo sapiens
attgccctgctccggggcccctcctgctgcgtgactcacaggcacattgcagagagaagctgccgctcccagaactcaccttcgaggcttggaaacca

SEQ ID NO: 183727 - DNA, 75 bp, Homo sapiens
cgacatcctagaagattacctcatccagagaaggatgaccagtgtcccagtgaaggaacgagtgaaggtgtctca

SEQ ID NO: 183728 - DNA, 75 bp, Homo sapiens
agggccagctgacggagatggtgcagaagatggaggagggggatatgagactttctactcggaatatcctgagtg

SEQ ID NO: 183729 - DNA, 90 bp, Homo sapiens
cacacagaacggctgtaccagaacgcagaaagcaacaaccaggagctccgcacgcaggcaaaagaatggaccccagcaggaaaagcaaag

SEQ ID NO: 183730 - DNA, 83 bp, Homo sapiens
gtcccttcacccgggctccgctcttgccttctccacacttgtttgacgatgacccctggctatccccaggacctcgatattat

SEQ ID NO: 183731 - DNA, 100 bp, Homo sapiens
cctcacctcaagcacacccaatggacagcatgcctcaccaagtcacatgacaagcacactgccagtgaaagatgtagaagataaacctgaacaacaaacc

SEQ ID NO: 183732 - DNA, 100 bp, Homo sapiens
ctggaagacagctcgagatccagaagggaagatttattactaccatgtgatcacaagctatttgcatgcaaagaacatcatccatagagacatgaaatcc

SEQ ID NO: 183733 - DNA, 75 bp, Homo sapiens
tccgtaaccttgtggagaagaccccggcgctggtgaacgctcttccaccaaagccacctaagccaatgacttcag

SEQ ID NO: 183734 - DNA, 50 bp, Homo sapiens
caggaggcaggggccaccaaggaaataggaaggttgttgattactcacag

SEQ ID NO: 183735 - DNA, 90 bp, Homo sapiens
ctccttgcagccctggctgtggctacagggccagccttgaaaagatcttttgaggtcgaggaggtcgagacacccaactccaccccaccc

SEQ ID NO: 183736 - DNA, 50 bp, Homo sapiens
tcttccagggactcagcacctggcagattgctcgagactttaatcccaac

SEQ ID NO: 183737 - DNA, 101 bp, Homo sapiens
tttctatgctgcagagctgtgttgcggcttggaagatttacagagggaaagaattgtatacaggtggagttggcatgaacttaacagcagcagatactgtg

SEQ ID NO: 183738 - DNA, 74 bp, Homo sapiens
atggcggtatttagcacagccttggggataatgtgtggctgtctcctggttcggacatctatgtgacggtctca

SEQ ID NO: 183739 - DNA, 100 bp, Homo sapiens
gttaaggattccaagtaactcttatttgtcactgtgtgcccagtattctgcagacaaacgagaagatgagaagatgtgtgatcatttgataagagcagca

SEQ ID NO: 183740 - DNA, 90 bp, Homo sapiens
ccgcgccaccgagtccggaccggagactttggggcctaactaggtttgttggcatccaaagctgttggggttgatggtgctgaaaaaaag

SEQ ID NO: 183741 - DNA, 83 bp, Homo sapiens
agggcggacacctccacatcgccttttgccacctttccctttatttccggagtttggtgccctggttgtcagatgttggaaag

SEQ ID NO: 183742 - DNA, 50 bp, Homo sapiens
cgcgtgttgggggcccccggagagggggaaatttgcagtggtgagaaaat

SEQ ID NO: 183743 - DNA, 75 bp, Homo sapiens
tctcccagctggcagaagcctatgaggatgaaaactttcggaagagaaagttgcctgtggtaagttcagttgtta

SEQ ID NO: 183744 - DNA, 100 bp, Homo sapiens
ttaacattgatctctgaagatatcaagtcatattatacagtgcgacagctagaattggaaaaccttacagtggaacggccgccttctccattctccatgg

SEQ ID NO: 183745 - DNA, 75 bp, Homo sapiens
cacaaaagaccacactgtcagacagaaagaggaagtatctccagaagaggactgtcagaaggacgtagaaggcac

SEQ ID NO: 183746 - DNA, 100 bp, Homo sapiens
agttagattcctggtcctggatgaagctgaagtgcagagctgtactgttgacttaggtattacagcagacagctccaaccacccagacaacaagcacaag

SEQ ID NO: 183747 - DNA, 50 bp, Homo sapiens
cctgctgcgaggccgccgggctcccgcatttacagccgaacaataccagc

SEQ ID NO: 183748 - DNA, 90 bp, Homo sapiens
tgatgggccttcagtcaaaagaaggaactgaccgttctaaactagaacttcctcaagaggtgaccattgtgaggtagatattttgttcta

SEQ ID NO: 183749 - DNA, 86 bp, Homo sapiens
aatatacgacacatccaggagtttattggagcgcagactgatggcgcaaaggtacctggagtagaacagaaaaattattatgtctg

SEQ ID NO: 183750 - DNA, 75 bp, Homo sapiens
gggagagccggatcctttcccagaagaatgagaatgagaattctcagcgtcttgccgatcaatatcgcaggcaca

SEQ ID NO: 183751 - DNA, 83 bp, Homo sapiens
cccgtgattgcgttacaagctttgtctccttcgacttggagtctttgtccaggacggtttccaatacttatctacaggaatcg

SEQ ID NO: 183752 - DNA, 82 bp, Homo sapiens
tgagccgtcgcggagccgcgcagccctcggagcacggccaagactaaggggctgcagagcggggtggacattggcgtcaagt

SEQ ID NO: 183753 - DNA, 75 bp, Homo sapiens
ctggctccaatgacctgctgctggaggtcgggcccaggagcctcctcaacaagcccaagagtgagatgaccccag

SEQ ID NO: 183754 - DNA, 50 bp, Homo sapiens
caatcttcaatgagtaaacatattcctgttgggacagcgtcttcgctgct

SEQ ID NO: 183755 - DNA, 75 bp, Homo sapiens
ctggccgcgacctcagccgcccgccgcccgccggggatcggacagctggcttttaaaggaatgaagagactcaat

SEQ ID NO: 183756 - DNA, 90 bp, Homo sapiens
ggaggaccctggaacatcccggaagccgggaaatgtgtctgcacatcaccgaacgatgagagaggactacagcgacaaagtgaaagccag

SEQ ID NO: 183757 - DNA, 100 bp, Homo sapiens
agcagggcccttgcggagttccgcgtccgaggtgtgaagggctccttcagtggtagatgtcccctgtatggtgtggccaccctgaatggctcctccctgg

SEQ ID NO: 183758 - DNA, 118 bp, Homo sapiens
tgcctggagggtgaatggaagtctgtcggtttccagagctattgtcaggatttgcatgaagatgtcgaagaagctggtgcactgcagaaaaatcatgctcttgtgacatctgcaaact

SEQ ID NO: 183759 - DNA, 85 bp, Homo sapiens
cttccgacgtgggcggtgggccccagccccacagaccagcccagcattcaggtaacagcttgcctgattgctgtggccaaaacag

SEQ ID NO: 183760 - DNA, 100 bp, Homo sapiens
agggcgctatttgtacttctaaatactccagtccttttccatgcactggaggagagggcaccagtgtcttgtcacctggactccacataggactaattat

SEQ ID NO: 183761 - DNA, 100 bp, Homo sapiens
gcaaggctgacgataaggagacctgctttgccgaggaggtgtctcagctccggcatgagctgtccatgaaggatgagctgcttcagttctacaccagcgc

SEQ ID NO: 183762 - DNA, 75 bp, Homo sapiens
ctgaatccgcccgggctacgctcctccatcacgtgccttgaaaagatcttttgaggtcgaggaggtcgagacacc

SEQ ID NO: 183763 - DNA, 75 bp, Homo sapiens
caggcgaagctggccgagcaggctgagcgatacgacgaactctctttgctcacaagttaccaaaaaaaaaagagc

SEQ ID NO: 183764 - DNA, 75 bp, Homo sapiens
ggggccttccacaccccctccgtgggtgtgtgatggcatccacagcgtcacggccttctgcaccctgcgtgtcac

SEQ ID NO: 183765 - DNA, 95 bp, Homo sapiens
aagtttgtggatgaaaattgggaaggttccctcaagtccaaggccaagtcctgtatctgccatgtctgtggcgtccacctcaacaggctgcattc

SEQ ID NO: 183766 - DNA, 100 bp, Homo sapiens
cgccgccgccgggcccggccacagcctgcagcggagcccacgagaggcagcgccatggcggagcagacctactcgtggttgaggaggaagaggaggagtt

SEQ ID NO: 183767 - DNA, 75 bp, Homo sapiens
atcccggtggccgccgcgcaggagcctcccggagctgtgttatagttttgccgctggactcttccctcccttccc

SEQ ID NO: 183768 - DNA, 90 bp, Homo sapiens
atcacccaccaacaacaccacaataatccacagccaagcttgtattggttggtgatggtggtactggaaaaacgaccttcgtgaaacgtc

SEQ ID NO: 183769 - DNA, 75 bp, Homo sapiens
gttcgggctcagcggccgcgaggccgcagctcccggtactgctataaccagaatttggtagaaaaaggatttact

SEQ ID NO: 183770 - DNA, 100 bp, Homo sapiens
atcctgggcaccatcaactccatcgtgatggcctttttaggagttcagaaactaattctgaagcaagcccttatagttgtgctgcagtggtgtttcaatc

SEQ ID NO: 183771 - DNA, 100 bp, Homo sapiens
ggaatccaagaatgatggatagtcaggaaaattatggctcaagtatgggtgtaaattttgataccaccattgccgccttcccctcaaaaaaggtgagaac

SEQ ID NO: 183772 - DNA, 98 bp, Homo sapiens
tagaactcagttgtgcgttgcggccagtcgccactgctcccacatacttcttattggccaagatatgtctgctctttactgctggaattcggagcgta

SEQ ID NO: 183773 - DNA, 74 bp, Homo sapiens
ccagcccatcctctctaaccaaggtcacgggatggatagccggcctgccatggccatctttgaactcctggact

SEQ ID NO: 183774 - DNA, 117 bp, Homo sapiens
tccgtatctgcctaggcattttgctgtctcctcctaatacggtgaatctggattgggaaagtcgacattaatcaactcattattcctcacagatttgtattctccagagtatccagg

SEQ ID NO: 183775 - DNA, 95 bp, Homo sapiens
gacaacatcggctgttttagtgctttttatttttccccaattcagcagagaatattttcaagggggcagcccctgtcaaagggaacaggaagcag

SEQ ID NO: 183776 - DNA, 94 bp, Homo sapiens
cagacccttttacaaacgaatggacagaatcatggaatctcatttaagatgatgataattccgaagaaggcttccacactattcattcaggaag

SEQ ID NO: 183777 - DNA, 75 bp, Homo sapiens
gaaaagtcgaattcatggtcgtggaagctgagcccatattaagagatgtcagactcggtgaaatacctggagtgc

SEQ ID NO: 183778 - DNA, 100 bp, Homo sapiens
agatcctgagacccggacagtggcagtgaaacagagccgcagagcacacaacattgacctgaaggggacagtcgtgatctttgacgaagctcacaacgtg

SEQ ID NO: 183779 - DNA, 74 bp, Homo sapiens
tccagccggatccagcatctctccaccatcgactacgtggaggacgctggagaagcgactggaggagtggttgg

SEQ ID NO: 183780 - DNA, 50 bp, Homo sapiens
caagtatttcatacacctactgtgccggtctgtgtgatattagtgaaggg

SEQ ID NO: 183781 - DNA, 90 bp, Homo sapiens
ggagcagatgtgaataaaactgaccatagccagagaacagccctccatcttgcagcccagaagggcttacagagtcatttgaagaagtgt

SEQ ID NO: 183782 - DNA, 100 bp, Homo sapiens
tcccacagcttctgtcctactcgatgtgcagcccaagtcaagatcgggtggtctccgtttccgcaggaatggtcgttggagatcagagtggaagttcacc

SEQ ID NO: 183783 - DNA, 100 bp, Homo sapiens
ctcttgataaaaagagatgtggggggattctcgacctgctaacagaactggaccttttcggtgatctgtgaaaatggttcgctattcacttgacccggag

SEQ ID NO: 183784 - DNA, 100 bp, Homo sapiens
tgtggaagaacaggtgccatttgtgccatagattatacgtggaatttactaaaagctgggcaagttaaggtgaactgcacagctgaagtactttaccctt

SEQ ID NO: 183785 - DNA, 121 bp, Homo sapiens
gaggctggctgctgaaggatgaacggagaggaagaattctttgatgccgtcacaggttggtgttcgaggaagagacattgttgttcttggtgtggagaagaagtcagtggccaaactgcag

SEQ ID NO: 183786 - DNA, 74 bp, Homo sapiens
gaaacatagtgagcgattgttcagcttttgtgaaagcaacagaggtggcccacaaactctttaacaacttgaaa

SEQ ID NO: 183787 - DNA, 75 bp, Homo sapiens
gtactggcctgctgctggcccgcaggaacatggctctctatgctgacgtcggtggaaaacaattccctgtcactc

SEQ ID NO: 183788 - DNA, 100 bp, Homo sapiens
ccttccgcctggcggcccgctcgccgcagggcctgggcgccttcacccccgtggtgcggcagcgcacgctgcagtccagacctcggacagtgatccaccc

SEQ ID NO: 183789 - DNA, 83 bp, Homo sapiens
ggaagcagccgatccagcctgcggagcctgtggggcagaatgctatgaacctacctcctgacaaagccaggttactgcggcag

SEQ ID NO: 183790 - DNA, 100 bp, Homo sapiens
agcggatgtggcagccccgagccatggctctcgccgtccgagtcgtttattgacagtggagatgcaccctgcctacaccgaggaagagctgaggcgcttt

SEQ ID NO: 183791 - DNA, 75 bp, Homo sapiens
gccacagacttctcagcacagagtggggactgccttccattgtgaagtctacagtgctacaacaagtaattgaag

SEQ ID NO: 183792 - DNA, 110 bp, Homo sapiens
atgagatgaatgaagacttcagatctggttatgatcacagtcgtgttaaactgcaaaatgctgagaatgattatattaatgccagtttagttgacatagaagaggcacaa

SEQ ID NO: 183793 - DNA, 50 bp, Homo sapiens
cgggctgcggggccgaaccccggtactatactggcaattgctggagaaga

SEQ ID NO: 183794 - DNA, 48 bp, Homo sapiens
agggcagtctgtgtcaaacgcagaattcctagaggacctgtgcaacaa

SEQ ID NO: 183795 - DNA, 113 bp, Homo sapiens
ccgggtgtgagctgcctgaaaatgcactcggatgccgccgctgtcagtacagcagggaagaactggaaactcagagaaagaaactgcccttccatctacaaaagctgagttta

SEQ ID NO: 183796 - DNA, 74 bp, Homo sapiens
ggatttctcctgccaggagaatctcctgcaggatctcagtgatggtggcgggacaggcttcattgggacagccc

SEQ ID NO: 183797 - DNA, 73 bp, Homo sapiens
ttggcgcgaccccaacccagccccaatcaatgagctgagcaatgttcctgttcctgtcatgctaatgccagat

SEQ ID NO: 183798 - DNA, 91 bp, Homo sapiens
tgagaagcccggcgacggaggaacgcaggtctgctgccagttcctcagcactttgtttgcccccttaaactttgtcatggagaaagtggag

SEQ ID NO: 183799 - DNA, 100 bp, Homo sapiens
aaagctttaggagttcacagtgcagaacgcagagctggccaagcttcggcaggagctcagcaaggtcagcaaagagctggtggagaagtcagaggctgtg

SEQ ID NO: 183800 - DNA, 100 bp, Homo sapiens
ctctgccctcgcgccccgctagggccagtgcaatgcgtgttttactatctaaattaccaagaccatggattgtggatgagaagaaagatgatggttatac

SEQ ID NO: 183801 - DNA, 75 bp, Homo sapiens
aaatcagaagaatttcagctcggaactgtggctgcaccatctgtcttcatcttcccgccatctgatgagcagttg

SEQ ID NO: 183802 - DNA, 100 bp, Homo sapiens
taccgccaactctacctcaaccccaaaggggactctgccaggaatgggtaccacagaccatgtcatcgtcctggcgtccacgaaccgagctgacattttg

SEQ ID NO: 183803 - DNA, 98 bp, Homo sapiens
gcttgtggtgcggcctcaccatacaggaacagggcagacgttagcgtgagtgatcactctcaatcccggagatggagtttcactgtgtcagccaggat

SEQ ID NO: 183804 - DNA, 100 bp, Homo sapiens
cggagtcatattatcgacgtagttaaagcccactagcctaaagccgggcggactgcggaactgtggtgtatggcgagcccatcactgccagcttgggaac

SEQ ID NO: 183805 - DNA, 100 bp, Homo sapiens
ctgacccagtttccacttcccaagaaccttctggccaaggtgattcagattgcaacgtcatcctccacagctaaggctaccaagcagtttctcgaagaga

SEQ ID NO: 183806 - DNA, 90 bp, Homo sapiens
acttcttcgccaaattaaagttttacaagatttaacctgtcatcaagacctgggattttggtgatcgctccttcgatatcctaaaaaaat

SEQ ID NO: 183807 - DNA, 83 bp, Homo sapiens
aggagatcttcggcaccatcggcatgcggcccaacgccaagaacaaccaagagtgagccatggagctacgtgtggggaacaag

SEQ ID NO: 183808 - DNA, 82 bp, Homo sapiens
ttccgcccaccacctaggggaatcacaagcagcgaggaatatactttgtgtaaaaggtgcagttagagcggatccggcaagc

SEQ ID NO: 183809 - DNA, 100 bp, Homo sapiens
gcccactccagaagtagcatggaaatggagggcatcttcaaccacaaaggagtaccagtcttgcaacaccaacccgtgtcctgagctgaagaagaccacg

SEQ ID NO: 183810 - DNA, 100 bp, Homo sapiens
actatgccccttattgtatctggggcagatgatcgtcaagtgaagatctggcgcatgaatgattgagaggatccagaatccagatctctggaatagctac

SEQ ID NO: 183811 - DNA, 100 bp, Homo sapiens
ctttggagaagttgaggaccttgtcgctcatttggcagaaggtgaaagaaaagatgttgtcccggttaagagtagtttccaccacttgtactttggcatg

SEQ ID NO: 183812 - DNA, 100 bp, Homo sapiens
caagaacagagagagaggtggacagatctgagagatactgaggatctgcatgtgcacaaattcttccatcattgccagctgattcagtcaggctcgaaag

SEQ ID NO: 183813 - DNA, 97 bp, Homo sapiens
catctgcgatggacagaataactgtcaagacaacagtgatgaggaaagctgtgaaagttctcaaggaaattcagttcatgaagataagaagtttctt

SEQ ID NO: 183814 - DNA, 89 bp, Homo sapiens
tggaacgacccgcgcgtgccctctgagggccccaaggctgaagccgacgtagcttctctgaacagacgcatccagctggttgaggaaga

SEQ ID NO: 183815 - DNA, 75 bp, Homo sapiens
gcagaactctgagataattcgaaaaatgactgaagaattcgatgagacctgcctagagctggaacgttacctcca

SEQ ID NO: 183816 - DNA, 100 bp, Homo sapiens
acatggacagatatcaacaaaagaactagcagattttgtaagggaacgtgcccactgttgatgtctttcagatttccacaaaagagcgatttggattggg

SEQ ID NO: 183817 - DNA, 83 bp, Homo sapiens
ccacaaatgggaagcaagagaaaaagaacattactgtcttgatcacccggaagttcaggctgaattctgaaggcaaacttgag

SEQ ID NO: 183818 - DNA, 83 bp, Homo sapiens
ccgctgtgtggttgcaacggagataaattcccggaaccgcgattcggcgtgtcagagactctgacctgtttttgttggacacc

SEQ ID NO: 183819 - DNA, 75 bp, Homo sapiens
atgattgagccgcgcacgctacagtacaagtactacgacatttctgccaaaagtaactacaactttgaaaagccc

SEQ ID NO: 183820 - DNA, 100 bp, Homo sapiens
ttggcagctgagaacaatacttagtggataccatcgaatagtacaacagaatctacctgttactcgtattttggacaatcttatggagatgaagtcaaac

SEQ ID NO: 183821 - DNA, 82 bp, Homo sapiens
ctgagggcagcgccggttccttgcggtcaagatgctgcaaaacgtgactccccacaataattaccggtattgtaagaacaag

SEQ ID NO: 183822 - DNA, 98 bp, Homo sapiens
ctgaaatcattgaagtgcttggagtgcagaactgaaagaggtacccactgatggtaatgctggcctgctggctgaaccccagattgccatgttctgtg

SEQ ID NO: 183823 - DNA, 100 bp, Homo sapiens
ctgtactccctgcgctgtgctgcggaggagaagtgtctggccagcatctactgccgaggatgttccaagccgctgtgctgctcgtgcgcgctccttgaca

SEQ ID NO: 183824 - DNA, 87 bp, Homo sapiens
tcctccaggagaagttagcttcagagttctttgtggatggacttgattctgatgagagatggagtctcggtctttcacccaggctgg

SEQ ID NO: 183825 - DNA, 43 bp, Homo sapiens
tcttcacagctacgcacagtgatgtcttgtggcttcaagcact

SEQ ID NO: 183826 - DNA, 82 bp, Homo sapiens
ccgatccagcctgcggagcctgtggggcagagtttgaaacagctgagacacttctaaattcagaagttcatatgcttctgga

SEQ ID NO: 183827 - DNA, 98 bp, Homo sapiens
ggtgcaccaagagcagcctcacatggtgtgggccgacatcaagagctgcgagatccaacaggtggagtaactaatacggcacaatatcagaacaggct

SEQ ID NO: 183828 - DNA, 50 bp, Homo sapiens
ctgccctgtggcctcgctcctcggagggtgtggagatgcttgtatctggg

SEQ ID NO: 183829 - DNA, 75 bp, Homo sapiens
gtctactggaaatctgaatgctgttatcacgatgcttgaagcccacatgcagagctacaagggcaatgaccctct

SEQ ID NO: 183830 - DNA, 78 bp, Homo sapiens
tcttcttcactgcctctggcatggatgaggaagaagaagcactcctctctgaaatggatgtcacaggccaggcctttg

SEQ ID NO: 183831 - DNA, 83 bp, Homo sapiens
gaagctgggctgtcagctcttcagaggccccagccgcggccagggctcaggaactgtggctgcaccatctgtcttcatcttcc

SEQ ID NO: 183832 - DNA, 75 bp, Homo sapiens
tcttatccatcccatctcttggacagatgatgccagttaattactttgaatatgatggaaaggaggaaccaccaa

SEQ ID NO: 183833 - DNA, 101 bp, Homo sapiens
ccagggtctgcagggcctgggccgccgctgctacctgcagcgccgtgtggcacgacacaaaaatcaggtatcacctcttctgggctcaagatggacaacaa

SEQ ID NO: 183834 - DNA, 100 bp, Homo sapiens
cttcccttcatccttgccgtgtctttgaaagccattccacagattttgaagtacaccgaaactggcttgctatcactcacagtttgccaatatcacagtg

SEQ ID NO: 183835 - DNA, 98 bp, Homo sapiens
cggcattttgaggcggtcctcctagcggcctggaatactcccccagttgcaagaggcgcaggaccgtggaagacttcaacaaattctgcacctttgtc

SEQ ID NO: 183836 - DNA, 75 bp, Homo sapiens
gtgtagaaagtgaaatcagaggagatgtaactatcggaatgtgtccttgaaggagcagagtgttgtaagaaatgc

SEQ ID NO: 183837 - DNA, 100 bp, Homo sapiens
atgatcaactgggcgaagagggtgccagagtgaagtcaccctgctgagaaatgaagtggcacagctgaaacagcttcttctggctcataaagattgccct

SEQ ID NO: 183838 - DNA, 100 bp, Homo sapiens
ccgccgatcgcgggcaccggagccagccccgcagcgggtcaaaatgcagatcttcgtgaaaacccttaccggcaagaccatcacccttgaggtggagccc

SEQ ID NO: 183839 - DNA, 90 bp, Homo sapiens
ttgcgtgcctgcgagcaagggattgaggtggtgccttctgcctctgccctgatcatcaaagccctcaaggaaccaccaagagacagaaag

SEQ ID NO: 183840 - DNA, 90 bp, Homo sapiens
aacatggagtcgggcaagatggcgcctcccaagaacgctccgagagatgccttgagtttgaagcagcccgaaagcgagcaaagaaggcca

SEQ ID NO: 183841 - DNA, 75 bp, Homo sapiens
gctgctgtgatatggaggaagaagagctcagccccaaactggataccacccacatgtccatcatcagtagaatgg

SEQ ID NO: 183842 - DNA, 100 bp, Homo sapiens
gccggggcctccgtattgaatgaaagacccagtgcaaagacatcaccatgaacactagcagtgttgacagctcttctaccacaagcagtgcttctccaat

SEQ ID NO: 183843 - DNA, 95 bp, Homo sapiens
cgaacgaccaagagggtgttcgactgctagagccgagcgaagcttgatattcactgatggactccaaagaatcattaactcctggtagagaagaa

SEQ ID NO: 183844 - DNA, 89 bp, Homo sapiens
gccgagttcaacatcctcctggccaccgactcctacaagataacgaaggaggcccaacttcattcaataaggagcctgacggatttatc

SEQ ID NO: 183845 - DNA, 90 bp, Homo sapiens
gcgttgtaattaagcctcgcacaatatggcctccgaccagggagaccttccatcctcctccacctgttccacccagaggacgctgattcc

SEQ ID NO: 183846 - DNA, 102 bp, Homo sapiens
ctgggtcagtccgccgctcaccccgcggccgcaccttcccgccttctcagaggttgacggatatattcagacgttacgacacggatcaggacggctggattc

SEQ ID NO: 183847 - DNA, 98 bp, Homo sapiens
cggcgagcagatgagaccgctactcacccggacctgtggatgaagagccagagtcctctgaggtcgatgctgctggtcggtggcctggtgtctgtgtt

SEQ ID NO: 183848 - DNA, 74 bp, Homo sapiens
ggagacacaagaagcggatccaggtatgtcttactgaaagaaagaaacatgcttctaaccctagagcaggaggc

SEQ ID NO: 183849 - DNA, 99 bp, Homo sapiens
tgagacattctcacctcctcctccgcctccaaagtcgcgtattgctgacagacagaacgccttggaggctgagtggaggacggtgcaggcctctcgcag

SEQ ID NO: 183850 - DNA, 74 bp, Homo sapiens
actgcaaacgctctttgttccagagcatggagatcatcaagttcagcagctgtgtggggaccaaggggacacaa

SEQ ID NO: 183851 - DNA, 82 bp, Homo sapiens
ccagtgagagaggaaatgccagctcttctcagaaagaaaagaccacattgtgcaacacatcattggacaacccaacccagag

SEQ ID NO: 183852 - DNA, 75 bp, Homo sapiens
tgtggatcaacagtggctggctgttaggtgaaaagaacggaggggagcccgatgacgctgaactagtaaggctca

SEQ ID NO: 183853 - DNA, 75 bp, Homo sapiens
ggtccagacccaaggaaggagtgaattgaaagctaaggaggggctcaggtttttctatatgagtggagaagacag

SEQ ID NO: 183854 - DNA, 83 bp, Homo sapiens
cagaccttggggaccaagaaaagcagcatgacgagtagcacagcccctctatggtttagatggcagtgctgcaaaggaggcaa

SEQ ID NO: 183855 - DNA, 82 bp, Homo sapiens
ctgcggaacaggacgccctctgatgtcgcaatggaagaagagatcgccgcgctggtcattgacaatggctccggcatgtgca

SEQ ID NO: 183856 - DNA, 100 bp, Homo sapiens
gcctgggagcttgctgcagcttcaggcggaaggtgctctaccagcgtgcacccaggaatatccaccgccatgtgatcctctctgagatcaaggaagccgt

SEQ ID NO: 183857 - DNA, 83 bp, Homo sapiens
ctactacgccaaggaggtcacccgcgtgctaatggtggaaacccacaacgagatatgacggaagttgtacatattaaagatag

SEQ ID NO: 183858 - DNA, 82 bp, Homo sapiens
accgctgctgcccctgctgtcgctcctggtcggcgcgtggctcaagctagttctggacttcagtgaccccttcagcactgaa

SEQ ID NO: 183859 - DNA, 75 bp, Homo sapiens
caagctccccacagacaaccaatacagcatcatgcaggcctgctgggccttggagcccacccacagacccacctt

SEQ ID NO: 183860 - DNA, 74 bp, Homo sapiens
tgctccatgcttgaaaacatggggattggaattcgaaataacattccagctaattttaccaggagtggaaataa

SEQ ID NO: 183861 - DNA, 88 bp, Homo sapiens
ggggcggaggcactcgcgcggggggtaattcggggtctgggttctggtgccgcgcagctttccccgatacactgcctctaggactggg

SEQ ID NO: 183862 - DNA, 83 bp, Homo sapiens
ctctgctgcatcttccaatcttccagggtgtggtggacacaggcctattcatcaacatggctgagagagtctactttgggatg

SEQ ID NO: 183863 - DNA, 100 bp, Homo sapiens
ttgtggtccacaagaggtgccatgaatttgttactttttcttgtccgggtgcggataagggacccgacactgatccaaggccacctttgatgccatttct

SEQ ID NO: 183864 - DNA, 75 bp, Homo sapiens
ggacagcaggccccgcgccggcttcaaggttactgactttttatgatgtttggtggctatgagactatagaagca

SEQ ID NO: 183865 - DNA, 82 bp, Homo sapiens
cagagatggcacctttgatgctgataacgaaggaggcccaacttcattcaataaggagcctgacggatttatcccagacggt

SEQ ID NO: 183866 - DNA, 83 bp, Homo sapiens
ctggcctggaggctatccagcataattttcatggaggacattttgagatccattttaatcaagtgcgagttcctgccacaaat

SEQ ID NO: 183867 - DNA, 76 bp, Homo sapiens
ccatgtcattccacctggagatcactgctcggccagtccagcctagggtgaatgtttccccctccaagaaggggcc

SEQ ID NO: 183868 - DNA, 82 bp, Homo sapiens
tctgctcttcctcccttcgctcgcaccatggggctttgaccacgacctttgaagagcttcattttgagatcaagccccacga

SEQ ID NO: 183869 - DNA, 83 bp, Homo sapiens
gtgctgattaacgatgccgactgggagctactgataacgaaggaggcccaacttcattcaataaggagcctgacggatttatc

SEQ ID NO: 183870 - DNA, 87 bp, Homo sapiens
tcttccccagctctgcagccacatactatccgtttgttcaggaaccaccagtgacagaagaacagtacgactctgtgaacagctctc

SEQ ID NO: 183871 - DNA, 100 bp, Homo sapiens
cgacttagaagctaccgagttaccctaagaaagtgagtctgccaaaaaagaggtggttgctgaagtggtaaaagccccgcaggtagttgccgaagcagca

SEQ ID NO: 183872 - DNA, 100 bp, Homo sapiens
ggagactgttgttcccggagatgcggcgcgcagagaatgcagaatctattgatcttaaacagtttttcgaccaacatttttcacatatatactatgtgtt

SEQ ID NO: 183873 - DNA, 101 bp, Homo sapiens
ctgcgctggccgggggcgcgggcggcggcgccggcaggaagtattggatgaacgaatatacctcatccattggaattggagtttttcattcaggaattgaa

SEQ ID NO: 183874 - DNA, 97 bp, Homo sapiens
taccgcaaggaccccaaagagtgctgcaagttcatgtgtctggacccaggtgtgatgaatgcagactctgctaccattttggctgtttggatcctcc

SEQ ID NO: 183875 - DNA, 100 bp, Homo sapiens
cctaggcctccaccctggcaggaatcccaatttgcctccacttagtgagcggaagaatgggatgtgagctcatttcaactcctgatcaagaccacactga

SEQ ID NO: 183876 - DNA, 122 bp, Homo sapiens
ctgggaagcagaacctggccggagccactagacagagccgggcctagcccagagacatggagagttgctacaacccaagagtttgaggagacaatggatgcactccaggctgacatcgacca

SEQ ID NO: 183877 - DNA, 89 bp, Homo sapiens
gatacctttctaacagcccaagcagcctggcatcctcgctacaacctcattgttgtgggccgatacccagatcctaatttcaaaagttg

SEQ ID NO: 183878 - DNA, 90 bp, Homo sapiens
gagcagcagtttgtggctgaggccctggagaaggggacccttcctctgttgaaggaccaggccttatgatgggaaatggagtaaaacaat

SEQ ID NO: 183879 - DNA, 75 bp, Homo sapiens
cctaccgtgcgcgccttccttttgtattattttggcgacttcaatttgccacgggacaagtttctaaaggaacag

SEQ ID NO: 183880 - DNA, 100 bp, Homo sapiens
tcctcttgcagcagctgctggcctcggccacccagccgtctcctgtgaaggccatatttgataaacaggaacttgaggtgtatcctgagtttgaagacca

SEQ ID NO: 183881 - DNA, 75 bp, Homo sapiens
tggacccggccgaggcggtgctgcaagagaaggcactcaagtttatgtcatatttgatcagaaattggatgaacc

SEQ ID NO: 183882 - DNA, 100 bp, Homo sapiens
aaaatcatcgaaaagatgctgaacaggaaagcaatctcccgggcaggcctccagcatctggctcctgcacatcccctcagccttcctgtggcaaatggtc

SEQ ID NO: 183883 - DNA, 78 bp, Homo sapiens
tgcaggaccccagcaccccactcctgaacctgaatgagcccctggcccccccccagctgtcttcgcttcgtccagacc

SEQ ID NO: 183884 - DNA, 88 bp, Homo sapiens
accgtccagagccaaggtccagggggcaaggtcgtggtgcctttcctgaagactatcttctggtctcgaaatggacatgatagatcca

SEQ ID NO: 183885 - DNA, 75 bp, Homo sapiens
agctcaccgacagtgccctgagggccttcgagagctaccgcgccagacaggacactgcccatctctaagataaga

SEQ ID NO: 183886 - DNA, 97 bp, Homo sapiens
tggagcccatcagaatggcagatggcttatgaaccacagtgcacgacctgcgacagcagatgacagccttgcagagccagcttcagcaggtgcagct

SEQ ID NO: 183887 - DNA, 74 bp, Homo sapiens
gagcagctggtggaccagctcatccgcgacctgagtgatcagcagctggactgtgccttggacctaatgaggcg

SEQ ID NO: 183888 - DNA, 82 bp, Homo sapiens
tcgtggcgagagaaggaaaatgcgcgtcccgggcgcgggtaggtgggatgtgtgtgggctgaaattccgagctgcggttgtg

SEQ ID NO: 183889 - DNA, 83 bp, Homo sapiens
cctccgccgccaagagtgagcgagcggacccgcgatgggtttcatggggaagggtatcgggaaggctatgaagaaggcagtag

SEQ ID NO: 183890 - DNA, 100 bp, Homo sapiens
gtccgaaaggcgccagaccctcagccaccgcccaggaagcttcatggctgggcaccaggccctgactaccagggattaatgaaaatcaagttccatcctc

SEQ ID NO: 183891 - DNA, 90 bp, Homo sapiens
gaggctggcagccggcgccaagcccgcaggtagtgtatattttgagaacagcgtgaggtttattctactaatggaaatttacaaaaatac

SEQ ID NO: 183892 - DNA, 75 bp, Homo sapiens
agtcggaggaggacgaggacttggaaggttacgactatggctatgtctgcgtggagttttcactcttggaagatg

SEQ ID NO: 183893 - DNA, 75 bp, Homo sapiens
caattcagcagagaatattttcaaggggggttaacacagaaatctgcctcctgggccatgccgcttctaaggcct

SEQ ID NO: 183894 - DNA, 75 bp, Homo sapiens
ttcccgccagactacggcttccccgaacgcaaggagcgcgccctctgcctttgaagagaaggccattgagaaggt

SEQ ID NO: 183895 - DNA, 75 bp, Homo sapiens
cgcagagtgtaccaggggatgctggactgcatgattttggtgaccaatttggatttccatgatgagcagaagcgc

SEQ ID NO: 183896 - DNA, 100 bp, Homo sapiens
ctgcccagcagcaccaagtcgggctggccccgacagaacgaaaagaagccctccgagggggccgtggagcccatgcagatcgacgtggacccccaggaag

SEQ ID NO: 183897 - DNA, 100 bp, Homo sapiens
gtgctggtgtgcagggccatgtgtgctatggccctggccaacgtcaacattgggagcctcatctgcaatgtaggggccggtggacctgctccagcagctg

SEQ ID NO: 183898 - DNA, 51 bp, Homo sapiens
gtattgtacctttggaaaatggtgaggcaatgaatcgctccctggctaatg

SEQ ID NO: 183899 - DNA, 83 bp, Homo sapiens
cccagcatgaagaccccggcggacacagaacccagcgggtgccgcttctccacccgaggcttccacctccaacgagccatgtt

SEQ ID NO: 183900 - DNA, 74 bp, Homo sapiens
ccggcggcatcgagactatcgctaatgagtatagcgaccgctgcacgccggccagatttgagtgtgtgaatttt

SEQ ID NO: 183901 - DNA, 100 bp, Homo sapiens
gtggagtgtaggtcatatcgccgcggcagtgaaaaagcagtctggctcccgaggtccaccccttataccccaaggtccagatggcggccaacgtgggtga

SEQ ID NO: 183902 - DNA, 95 bp, Homo sapiens
gggaggaccttggagtccagcactctgcatgtgactccccgcagcctggacagattgttggaccttcagatggaagtagttacattatagattac

SEQ ID NO: 183903 - DNA, 131 bp, Homo sapiens
atggaactgcaggagatgcagctgaaggaggccaagcacatcgctgaggattcagaccgcaaatatgaagaggtggctcgtaagttggtgatcattgaaggagacttggaacgcacagaggaacgagctga

SEQ ID NO: 183904 - DNA, 126 bp, Homo sapiens
acgatctgcacttcgcattttggcattgacatttaattttagggtcctttatatagaagggagagtagccacctggtttccatcgggcctatagttccccactctacagcaaccagcagtacgctt

SEQ ID NO: 183905 - DNA, 100 bp, Homo sapiens
ggattctggaggcatcattgtggccattgagcacagcagccgtcctatcaatgtgattaacctcagggatttagagatactgttgttacttctgcatgtt

SEQ ID NO: 183906 - DNA, 82 bp, Homo sapiens
tttcggcgcgggcccgggccccgagcgcccgaacaggattctgtttcactgaggccatctatccgatttcaaggaagccaag

SEQ ID NO: 183907 - DNA, 78 bp, Homo sapiens
gaaatcgcctcccgagaagaagttgaggcgctattgagaaagatcagtctaaagaaaaggagaagaaagtgaaaaaaa

SEQ ID NO: 183908 - DNA, 90 bp, Homo sapiens
tgatcatcttggccagcgatggctattatgccatgtcacagtacaagagtcactttgttgcagccagtttaagtaatcagaaggctggaa

SEQ ID NO: 183909 - DNA, 100 bp, Homo sapiens
tggagggagacattgccgcccagagcgagcgggtggaggctctcaatgccgctgccctgcgcttctcccagctgcaggctttcctgctctgggaccctac

SEQ ID NO: 183910 - DNA, 100 bp, Homo sapiens
cggaccgtcccgcgcggggcacgatgttgaacatgtggaaggtgcgcgagctggtggacaaagcgtttgaattttgggaagattttgaagaagaccatgg

SEQ ID NO: 183911 - DNA, 100 bp, Homo sapiens
ggatatcctctgttgggggagaaggtctctgacattgacagagcctggacgttggaggaagccccaggacgttggaggggtaaagtaaaagtccacagtt

SEQ ID NO: 183912 - DNA, 83 bp, Homo sapiens
gaccaagtccagccccagcatggcagtgacctttaaaaagaccaagcggagggtgaagaaaatccgcaagaaggagaaggagg

SEQ ID NO: 183913 - DNA, 100 bp, Homo sapiens
ctcaagagccggggcctttttgacagcttccgccgggactgcctggccgacgtggacaccaagcagaagatggctgtgccacccacgtatgccgatcttg

SEQ ID NO: 183914 - DNA, 49 bp, Homo sapiens
agtattgcaggacaagagatttaagctggagaacacattcaaatcagtt

SEQ ID NO: 183915 - DNA, 99 bp, Homo sapiens
cccccattgctattgtgtcacctcagttccaggagatctctttgccaaccacttctacagtcattgatggcagtcgcaagcaccggaagcaccccggcg

SEQ ID NO: 183916 - DNA, 90 bp, Homo sapiens
ggagtcggaagaggtctcacgaggctgtcatcaccgccatgcccaagaataaagatgcctgaggaagtgcaccatggagaggaggaggtg

SEQ ID NO: 183917 - DNA, 82 bp, Homo sapiens
caacccaaattaccttaattgtgaaaggaaagcaagccaggatggatatttacgacactcaaaccttgggggttgtggtctt

SEQ ID NO: 183918 - DNA, 125 bp, Homo sapiens
ggagaagcgcttcaaggacccgggactagtggaccagctggtgaaggcagacagcgagtggcgacgatgtgaaatgacaatggatgctctgttggctcgattgaaacttctgaatccagatgacc

SEQ ID NO: 183919 - DNA, 75 bp, Homo sapiens
gggaaaaggaggataagcaagtcgaatttttgtcttacgatgcttcaggactgccccaaggcccgcagggaggtg

SEQ ID NO: 183920 - DNA, 87 bp, Homo sapiens
agccgtggccctgatccagacctgggcaggcctgccagtgagcttctaccatcatggacctattgttcgggcgccggaagacgccag

SEQ ID NO: 183921 - DNA, 50 bp, Homo sapiens
ggaggtcgccattgagcgggaccagcatggaggagcaggacttggagcga

SEQ ID NO: 183922 - DNA, 100 bp, Homo sapiens
acagcaagacatcgacgaagccaaactttctgtcttctcaaccgtagatgctcctgtcgctccttcagacaaagtgaaagagtttctagccaaagccaaa

SEQ ID NO: 183923 - DNA, 76 bp, Homo sapiens
cgaaatcctgtgcaagctcagcttggagggtgatgatctcaaagatttcatgagacaagctggggaagtaacgttt

SEQ ID NO: 183924 - DNA, 90 bp, Homo sapiens
gttttagacagcgtgtgccaagcagatgagaattcaggaatgtatcctgtcaggtataatgtcagtgaatggcaagaaagttcttcatat

SEQ ID NO: 183925 - DNA, 75 bp, Homo sapiens
tattttctgcttccaaaggtccagagcattcagctgtctcaaatgcaggttaatacaatctgttggaatgacact

SEQ ID NO: 183926 - DNA, 75 bp, Homo sapiens
ctgagcacatcagtgatgaatgcaagaggcgtttctataagaattggccaacgtgcagcggctgaaggagtaccg

SEQ ID NO: 183927 - DNA, 50 bp, Homo sapiens
ctcgtagtcctgggagcacagcagaagtatgaaggatttgggggcagagc

SEQ ID NO: 183928 - DNA, 83 bp, Homo sapiens
gaggctgcacacccctgcactatgcagctacatcagacacagatggcaagaccagtttggacaacatataaaatcagatgtac

SEQ ID NO: 183929 - DNA, 98 bp, Homo sapiens
gggaagtttacacatgtggtttgaacaccaaggggcaactgggccatgagagggaaggaaacaagccagatgcttggagagttcccttaaaagtgtct

SEQ ID NO: 183930 - DNA, 50 bp, Homo sapiens
aagactacagctttgtcactgaagatcccaccaaatattttggttgtgag

SEQ ID NO: 183931 - DNA, 99 bp, Homo sapiens
cgccagacttcgggaagcagtgtctatggaaacaaagatccccactgatcaggtcgaagaattccatccactgacgccaacctgccatctggcggtaag

SEQ ID NO: 183932 - DNA, 90 bp, Homo sapiens
tgggcttgaccatctcacaactgctcgcgtgacgaccgcattcgtggcagcaatcccacagagtattgatgaggaaactgaagtttggag

SEQ ID NO: 183933 - DNA, 75 bp, Homo sapiens
ccatcaaaaagtgattaagcagagaatggagaagaaggttgattccaggctcagctcttgccaggccaaattgag

SEQ ID NO: 183934 - DNA, 82 bp, Homo sapiens
tgctgctagagctggagcatttgccgggaccctttagatcctacaagatcagtgattgtgatccgctccctggtagcagatg

SEQ ID NO: 183935 - DNA, 49 bp, Homo sapiens
ctagctgcgatgcatgtgatcaagcgagaattatatccagatcgagaga

SEQ ID NO: 183936 - DNA, 83 bp, Homo sapiens
ctggatgaagccaccagcgctttggatgccgagagcgagtatctggcccgccaagctgccccctgtgtgctattctttgatga

SEQ ID NO: 183937 - DNA, 90 bp, Homo sapiens
aaggtctctggagacatcttcagcagacaatgccatccccatcaaatcctggttcagtgaccccagcgacacagcccttctcaacctgct

SEQ ID NO: 183938 - DNA, 100 bp, Homo sapiens
gaactactcctttttacctttggttcacaacatcatcaaatgcatccaccctcgagataaacagactgtggcttatcggctgcatttgggggcccgtgct

SEQ ID NO: 183939 - DNA, 88 bp, Homo sapiens
ggtgatgcctgaagctcaagggactgtgtccaccctcaggagcatcagatccatgctgctgctgactcggagccccacagcttggcac

SEQ ID NO: 183940 - DNA, 75 bp, Homo sapiens
aaatcatcgaattgaaagacctggtcatggggacagacgccaagtggatgtcacactgaattcagtcaacctaaa

SEQ ID NO: 183941 - DNA, 100 bp, Homo sapiens
tgtgttgactgtcgctatgggctcactgttgtccaggcagctcatgttgctgaatgctataaagccaggacttgttaaaaagatcaatagattgcctacc

SEQ ID NO: 183942 - DNA, 74 bp, Homo sapiens
tatgaggtggatcggagatttcataagcattcctgcgtaaatactgctgtaatactgtcatgcaaagtgtatcc

SEQ ID NO: 183943 - DNA, 100 bp, Homo sapiens
ctatccgcagcgagatggagcagctcaaggaggtgttccattgcctaaagaggagaacatttctgctcccttgatctccagctccccagtgaaggcagcc

SEQ ID NO: 183944 - DNA, 75 bp, Homo sapiens
gccaaagccagaccccacggtcatcaacaagcacataaggaaattagtggagtaccttggccatgtagaagttga

SEQ ID NO: 183945 - DNA, 98 bp, Homo sapiens
gaccgccatggcgttcctcaaactccgtgaccaggtgatgctgtggagtcttcaaaaagcccgaccactctggattacaaatttacaggaggatgaaa

SEQ ID NO: 183946 - DNA, 75 bp, Homo sapiens
caagacacttttcagaaagacaggctgcctttaatattggttgggaacaaatctgatctggtggaatatagtagt

SEQ ID NO: 183947 - DNA, 90 bp, Homo sapiens
agttttctccagaaaatagtgaattcattcttcaagaagatgaaaccttctaagcccctttgtagcgttcaaggaagaccagaaactggc

SEQ ID NO: 183948 - DNA, 100 bp, Homo sapiens
ctgcacacctggatccaggataacggaggctggcaaagccttctagacaagctcagtggaatctgaagggcccaccccatggaggaatgctgggtgacag

SEQ ID NO: 183949 - DNA, 75 bp, Homo sapiens
gaaatcaagatcccgccagaaccccctggcagatgttcaaatcacttgcaacaaaccgctgcaagaaggccccag

SEQ ID NO: 183950 - DNA, 50 bp, Homo sapiens
attttgaagacaatcgtcacttatacagtttgaggtggtatcaacatcct

SEQ ID NO: 183951 - DNA, 75 bp, Homo sapiens
tcagactccagcagccaagatggtgaagcagatcgagagcaagattattaagttcctgcaacttaactgggaact

SEQ ID NO: 183952 - DNA, 74 bp, Homo sapiens
gatcatgtctgcgagccaggattcccggtacactgaggaggggacggctccgtcttcacattgtgcacagatct

SEQ ID NO: 183953 - DNA, 100 bp, Homo sapiens
ggagcaggcagagcagccgagccagcatatgcaggaagcggcaggaataaggaaaagcagcctcctgactttcctcgcttggtggtttgagtggacctcc

SEQ ID NO: 183954 - DNA, 74 bp, Homo sapiens
tgaggattcagtcttgcagccactcgagacatcacttctgttcattgtgcctctcaggatgcatttcttagccg

SEQ ID NO: 183955 - DNA, 100 bp, Homo sapiens
cgcggcacagagagggcctgggagcttgctgcagcttcaggttaatttggagtggcccctggagtcagtttcctacaccatccgaggccccacccagcac

SEQ ID NO: 183956 - DNA, 60 bp, Homo sapiens
ggatgtgatgcctgctagccaaaaggacatatgtagagtgtgtcggtcagaaggaacacc

SEQ ID NO: 183957 - DNA, 98 bp, Homo sapiens
gtagagccccgccggagaggctgggcggctgccggtgacagaagccgggagcatcctgatctgccgctgtggtgccagccttggaaacagcactcagg

SEQ ID NO: 183958 - DNA, 145 bp, Homo sapiens
agcagcagcttacagcccaacatgaactccagtgacccagacctggctgtggtcaaacccacccggcccaactcactatgcctcaggagcagtacactcaccaccggagcaccatgcctggctctgtggggccacaggtatacaa

SEQ ID NO: 183959 - DNA, 95 bp, Homo sapiens
gacaagtgatgagaagctgtcggagcttcccaagacacttggcatttcacctgaagaaaaatttgttattacaacaacaagtaggaaagaaatta

SEQ ID NO: 183960 - DNA, 83 bp, Homo sapiens
gttaaagctcagactaaagcccctcccaaaccagaactttccatgactggatcacagggaaaaaccgaccgagctcaggaagc

SEQ ID NO: 183961 - DNA, 101 bp, Homo sapiens
cacagcatcaaaccaagttataccttctcaacaccaccaagcttagaaaacagacacatgaccctcattgagaactgcagcctgcagtacacgctgaagcc

SEQ ID NO: 183962 - DNA, 75 bp, Homo sapiens
tgcaatgctgtttgccctgaacatcatgaattcccaagaaggaggtgaagcaaaaaatttattgccatatcttgg

SEQ ID NO: 183963 - DNA, 95 bp, Homo sapiens
gggcactgctgctgcccctggggcctcctgacaaggtgatccgggcgggccccgcaggaattttatcccctcaccggcctcacactagtatcgca

SEQ ID NO: 183964 - DNA, 100 bp, Homo sapiens
ttaatcatctttattatctcattgaagcttggaattacatagctggaaaggatcttacaggttctgagtgcaaaagtagttacaaatgctcgaagtcctg

SEQ ID NO: 183965 - DNA, 98 bp, Homo sapiens
tgattttcaaattggagcaagaagaagaaccatgggtgatggaggaagaagtattaaggagacactggcaagaatgtgacagtgatgataacatgggt

SEQ ID NO: 183966 - DNA, 75 bp, Homo sapiens
agcaagactctcgagcccatgctgaccggttccctgatgtgttacctgcttctgctactgatccaaactgcagaa

SEQ ID NO: 183967 - DNA, 50 bp, Homo sapiens
caggcctgctcggccctcacaggccttttccccacgactctgaaagagga

SEQ ID NO: 183968 - DNA, 100 bp, Homo sapiens
ttctatttctctagctattgccttattttttctcatggatgttcttcttcgagtatttgtagaagggatggccaggccatgttatgggatctcaacgaag

SEQ ID NO: 183969 - DNA, 97 bp, Homo sapiens
tccacaggcagccacggcacctccaccaccgtcagctcggccagggcgtccgagctgggccacagcctgaacgagaacgtcctcaagcctgcgcagg

SEQ ID NO: 183970 - DNA, 75 bp, Homo sapiens
ggggaagcgagccagcgagagggcaagcgagaagggccctgccctaaaggtggtcacttctttcatcgaaactcc

SEQ ID NO: 183971 - DNA, 98 bp, Homo sapiens
ctctctcaatttctggatatgtgcatggatctgaaagttcatcctgaacaggaaaagggagagccaggctcaatagggctcccaggacaaccaggagt

SEQ ID NO: 183972 - DNA, 74 bp, Homo sapiens
taagaattgcctttgggactctgaaggctgaaggtattaatctctggagaagacacatccacagttagcacttt

SEQ ID NO: 183973 - DNA, 75 bp, Homo sapiens
ttcggaccctggcctcttgggatgcaaaggtcacccgtgtgaacagaaagtgagaggttgtagcacattgccacc

SEQ ID NO: 183974 - DNA, 83 bp, Homo sapiens
ccgggatttgggtcgcagttcttgtttgtggatcgctgtgatcgtcacttgtgtgccggtccaacaaaagcccttgggtctgt

SEQ ID NO: 183975 - DNA, 100 bp, Homo sapiens
cactgaggaggaggacaaggagggggccgtggtttctgcgccctctgtcaagggcctggcccagcacaagccagtgctgctgttcttaacccacggggag

SEQ ID NO: 183976 - DNA, 98 bp, Homo sapiens
ctctccttggcctctcctgggatcggcccaaggccagttctccgcagcatgacgacagagatgatggtgtggattattgggccaaaagaggaagaggt

SEQ ID NO: 183977 - DNA, 100 bp, Homo sapiens
ggaccttccacgtctgacgtgtgatctcgagagacctgcgtacattcggggtgccagaaggaaagcatagggagttgaccacatttggccatttcccaga

SEQ ID NO: 183978 - DNA, 96 bp, Homo sapiens
tatcaatggcaaatcgagggaaacataccaatggttcccagtttttcatttaagtatgagagagaagctagtaaatactgggacacattttacaag

SEQ ID NO: 183979 - DNA, 71 bp, Homo sapiens
gatttgaggaggatgcttcgcagtttacgaacgttgacagaaggctacgttggggccctgcacgagaatag

SEQ ID NO: 183980 - DNA, 101 bp, Homo sapiens
catccatataacaggattgacagccggatcattgaggtgcttgtgaatgacttcttcttggtggcttgtcttgaggatttcattgaaaatgcccgtctctt

SEQ ID NO: 183981 - DNA, 101 bp, Homo sapiens
cccaaacccctttccaaacctcgcacgcccaggaggagcaagtccgatggagaggctaagcgatcgcctgaaggacctgaacagccaggcagacagcctga

SEQ ID NO: 183982 - DNA, 100 bp, Homo sapiens
taccatggtatttgctaacgtttagagagtgcttccccttgccgagcactggggaatccgagcccgcattttagagactttggtcatgcttcttcttctt

SEQ ID NO: 183983 - DNA, 101 bp, Homo sapiens
cggacagctcggacagcgcccagggccggagcccgagcccttggaggggagccttctcggtggtgcgaaggtgtgtgaaggtgctggctggccaggagtat

SEQ ID NO: 183984 - DNA, 98 bp, Homo sapiens
atttccttactgaaaccctctacaaaggcattagtcctatcttgtaagcttctgaaagttctgctgaagacagtgagcaggaagatgagagaggtgct

SEQ ID NO: 183985 - DNA, 75 bp, Homo sapiens
gaaagacattacaccatctgaattgcctgcaaacccagatccaggaggctgcaagccagggcctgaaattcgttg

SEQ ID NO: 183986 - DNA, 74 bp, Homo sapiens
cggccgaaagcggagagatgctgggcgtggcggccgggatgacccacagggcggcgactggcggcgcgatggac

SEQ ID NO: 183987 - DNA, 75 bp, Homo sapiens
gaaagaagatgcagcacaatgttctagtagcggaggtatttgtaggcaaaataccaagggatttatatgaggatg

SEQ ID NO: 183988 - DNA, 50 bp, Homo sapiens
agtgtagtcctctgtatgaaaagcaacacagtcactcctggcggcaaacc

SEQ ID NO: 183989 - DNA, 89 bp, Homo sapiens
ttgtgtttagtgcctgtcgaatgccccccagccaccagctcgaccacagcaagctcctgggctcttccaggtggtgagggagtaaacca

SEQ ID NO: 183990 - DNA, 90 bp, Homo sapiens
agaacttacgcagatcagccgagtcccgtgggagtagggctgaatgaactgaaacgaaagctgctgatcagtgacacccagcactatggc

SEQ ID NO: 183991 - DNA, 90 bp, Homo sapiens
aaatttctttttgaaactaaaacagggtttatattttcatccagaaacctgcattagggaaagagggatgcgactgtcttcatctttgca

SEQ ID NO: 183992 - DNA, 100 bp, Homo sapiens
tgatgatgttgtaagccttagcagccttgatctgaagctccagaacctgggtatcaacccagcaaacattggcttcagtaccctgactatggagtctgac

SEQ ID NO: 183993 - DNA, 100 bp, Homo sapiens
ctgaaatgcacacgcttcagcatcagtctgccccccgaatccaagcccaacttcacccctctcgccatcttggcccatgttctcggcgccatccagccct

SEQ ID NO: 183994 - DNA, 100 bp, Homo sapiens
caatgatccaatccacgaactgctggacgacctcggcgaggtgcccaccatcgagtccctgataggactttgccaataccattcctggccatggaggcat

SEQ ID NO: 183995 - DNA, 75 bp, Homo sapiens
agcgcccaccctgcgccagagaccagataaagtacctagtcgatagtcgctggttcaaacagtggaaaaaatatg

SEQ ID NO: 183996 - DNA, 97 bp, Homo sapiens
ccaagtgatttcttccaaagcacaggaatctcactctgttaaagctggtctgttctaactgagttctaccaagatgtaaaggactggtggctcttcg

SEQ ID NO: 183997 - DNA, 100 bp, Homo sapiens
gtgaactatgcgttttctccttctacacactgggcgtcatgtctggagctgcagaggaggtggccactggagcagaggtgttcgaaatccgcaccactga

SEQ ID NO: 183998 - DNA, 50 bp, Homo sapiens
gaagtgcagaggtcaatctttatgtacagagtttcgctgttgttgcccag

SEQ ID NO: 183999 - DNA, 95 bp, Homo sapiens
gatgtggagcttctaaaactggaatgacaggaatggcctcctcccttagctccctgttcttgggtgctggagaatctggtaaaagcaccattgtg

SEQ ID NO: 184000 - DNA, 100 bp, Homo sapiens
gcgcctaaagtctgagagagggaagtcgcctctgtgctcgtatctctcctctttgtcacaacctctttgccctgtatgacgagaacaccaagctctggta

SEQ ID NO: 184001 - DNA, 100 bp, Homo sapiens
acgtctgagtggaacccggttcgtcaccgctgctctttccactcggctggcctctgcgcctttctctcatcccggaaccaggtgcagatgggtctcttcc

SEQ ID NO: 184002 - DNA, 98 bp, Homo sapiens
gtggaataagtgctagtatcggacatgatcctcatcttttatacactcttagtgctgtccaggtggctgaagacgaagtgagtgataacagtgccgag

SEQ ID NO: 184003 - DNA, 75 bp, Homo sapiens
ctactgtatcatgatcatcataggagtggagaacatgcacaagatcaaaatacttgctggatggtggactcagag

SEQ ID NO: 184004 - DNA, 100 bp, Homo sapiens
gtgaagtgctccactcgaacagatgtgagcgagaaagccgttgcctccagcaccacttctaatggtccagacatcatctggtctccctgaacctgaaatc

SEQ ID NO: 184005 - DNA, 90 bp, Homo sapiens
tgactcagacctgggcacagcaaatgctgaggactcagaccagtctctgcaagaccgccagctgagggccattcgcagcttctccaggcc

SEQ ID NO: 184006 - DNA, 100 bp, Homo sapiens
cttgtcttctccactgttcctggaggaatccgagaagagcagagcggagggagccccagacacggtcatcatcagatttgaaatatttaaagtggataca

SEQ ID NO: 184007 - DNA, 100 bp, Homo sapiens
actcgcctcacctgagcctgggatgctttcattggatttggaggaaatgtgatcaggcaacaagtcaaggataacgccaaatggtatatcactgattttg

SEQ ID NO: 184008 - DNA, 90 bp, Homo sapiens
ggtctgccgagaagccagtcacgccgggagctggtacacagcctcaggaggcaggtggaagtcatcataaagtttctgtttcacccgtcg

SEQ ID NO: 184009 - DNA, 80 bp, Homo sapiens
atattgacttggataatctcttcagaggttcttgggtgtctctggggagtccctgggccagaccttcctccagactccag

SEQ ID NO: 184010 - DNA, 75 bp, Homo sapiens
cttcatcaaaaatagtgatagctttgataactgacaagggaagctggtgtgagcagcagctgtgtgcctgtgaca

SEQ ID NO: 184011 - DNA, 100 bp, Homo sapiens
ctctcgtcggcagtgaagctcaagttgctactcgggacgctgcacctcccgcgccgcacggtggacgagaaaaatggctacaaacttcctagcacatgag

SEQ ID NO: 184012 - DNA, 96 bp, Homo sapiens
ctcaggggttagcatcttagcagtatattccaaagataattacaaacgggtcacaggtactaggaaacatgatgaaagtattgagggggcatcaga

SEQ ID NO: 184013 - DNA, 109 bp, Homo sapiens
tccagaagcggcagaagcttacctccgagggtgccgccaagctcctgctagacaccttggcaattgaaggaacagactaaaaatcgtgtcctggaaggaaactacaggt

SEQ ID NO: 184014 - DNA, 82 bp, Homo sapiens
ggactgtctatgatgtcatgtttgtcagcacagcaggattcctggttttcaagcctgagctgatctctcggctggagcaggg

SEQ ID NO: 184015 - DNA, 100 bp, Homo sapiens
ctttgccgctcctggagttcactgccccgtgacccccagcacaccagggagcccgccagtgagtcctgggcctttgtcaccaggggggacgccagggaag

SEQ ID NO: 184016 - DNA, 89 bp, Homo sapiens
gtcttccaagaacagaagaaaatgatccaggcccagagcccccctccatgcgcctgaaggcccgacccagcagccctggcttttccgtg

SEQ ID NO: 184017 - DNA, 75 bp, Homo sapiens
ttaatatgaacggaataaataattccagtgggatgaatggagatgaggcgcctggtgtttggatgatcccaactt

SEQ ID NO: 184018 - DNA, 96 bp, Homo sapiens
cgaagaagcagaagcgtctgctcaggttgcagcaggagagaggaagagctcgccaacaccattgcacagctagtccatgctgttaacaactcagcg

SEQ ID NO: 184019 - DNA, 100 bp, Homo sapiens
agagattatgggtgtgagccatcatgcccagctggctagatatttcatgagctggaaaatgcagaatttatccccatgcctgacagcccatctcctctca

SEQ ID NO: 184020 - DNA, 100 bp, Homo sapiens
tgggaacactggagacctgatttctaactgacgctaccgtcgcggccgccgaataactgaagtgaagtgatggactccgatttggagagtagtaagacgt

SEQ ID NO: 184021 - DNA, 71 bp, Homo sapiens
tgcagaggataactcggaggctgcagcaggaacggagatcgccacctgcaacagccggaacgggaacccgg

SEQ ID NO: 184022 - DNA, 90 bp, Homo sapiens
gactgttattgaaatagaattttctacagaagtcaaggcagtcaagctgcggcgagataggaattgaaatgcaccagcggttgtctaaca

SEQ ID NO: 184023 - DNA, 78 bp, Homo sapiens
tgctgcttcaatgtccgcatcgcaaccaccgccctggccatctaccatgtgctgccactgcagagccccgccatggaa

SEQ ID NO: 184024 - DNA, 101 bp, Homo sapiens
ccttcacctcatttgtctacaccatcaaggaggaaggcctggttcttcaagatttgctgaccatgaaagaatatcactgtttgctgcaattactgtgtcct

SEQ ID NO: 184025 - DNA, 122 bp, Homo sapiens
cccaactcccaccccatccagtggaatgcaccacagccatctcacatttccaagtacattctcaggtggagacctaataactgaagtgaagtgatggactccgatttggagagtagtaagac

SEQ ID NO: 184026 - DNA, 75 bp, Homo sapiens
gctgctctgaaccaggacctggacccggacccaaagtgccatgtctttaatgggttgtgtccactgtggtccccg

SEQ ID NO: 184027 - DNA, 82 bp, Homo sapiens
ccagaccctggagcctcagttggaagcagccgatccagcctgcggagcctgtggggcaggatcatggggttgacagcagcat

SEQ ID NO: 184028 - DNA, 100 bp, Homo sapiens
ggacattaaagtgaagtggttgcggtaacctggcctgggcctgaagtgagtgagaggcacatgaaggctattgagggcacctacattgacaagaaatgcc

SEQ ID NO: 184029 - DNA, 83 bp, Homo sapiens
cgccgcgcacttcgtcatgttcttcgcgccctggtacggacattgctgcaggagaagaggttgccatcaagcttgaatgtgtc

SEQ ID NO: 184030 - DNA, 75 bp, Homo sapiens
ctaggtggcatctcctctcacggatgcctcgatgttggggatcagccaggtgaggtaggttattcaggctctcct

SEQ ID NO: 184031 - DNA, 100 bp, Homo sapiens
gatcaaagagcaaacagattcagtggcctgcattggcgcagacggggaagcggagccaacatgccagtggcccggagctgggtttgtcgcaaaacttatg

SEQ ID NO: 184032 - DNA, 75 bp, Homo sapiens
cgaccccctcttgtaaacccggcgccaggcacagaaatgaggacctaatttgcttcaaagatatcaaaccagcag

SEQ ID NO: 184033 - DNA, 100 bp, Homo sapiens
acctatctctgcctcctgcgtagcatccggaaacatgtggccctacatcaggaatttcatggcaagggaacatctgctcagcaattggatgcaacattta

SEQ ID NO: 184034 - DNA, 96 bp, Homo sapiens
ctgatataaaagaccagtgtcttaagtaccaggaactgcaagcacatgttgaccagataactgaaatggcagcagtaatgaggaaagccattgaaa

SEQ ID NO: 184035 - DNA, 83 bp, Homo sapiens
tgaaatcatcgagaccatccggtgccaagtcctgccctgccaacttcttggcagctgccgacgacaaactcagtgggttccag

SEQ ID NO: 184036 - DNA, 87 bp, Homo sapiens
gaaatagtaaccctgccaaatacatcagcttgtaggagacagaggtggacgacatccttggagaaggcagcgacgacagcgacagcg

SEQ ID NO: 184037 - DNA, 100 bp, Homo sapiens
ccagctgccatgagcgagcgcctccgtcccagggaaacagaagtacctgtgcgccagcagaaatgattgcactattgataaattccgaaggaaaaattgt

SEQ ID NO: 184038 - DNA, 83 bp, Homo sapiens
gtcaaccctaaacagtggactcaacttcaaagacgttctcaaggagaaggcagacctggcctgtcctgggagctggagaggat

SEQ ID NO: 184039 - DNA, 50 bp, Homo sapiens
ccagtatgtcccagagccagtccctgacttaattcagtgcacaaatgaga

SEQ ID NO: 184040 - DNA, 100 bp, Homo sapiens
agctgcttgaatgtctgccgaaatgttcaagtttaccaaaagagaggcaccgctggaacactaatgaggatataattgatacagcatgtgaagtattggc

SEQ ID NO: 184041 - DNA, 82 bp, Homo sapiens
gaagctaaaaggagaacttgaaagttcggaccaggctggatgagaatgaggatatgcacagtctcctactgactgacagcag

SEQ ID NO: 184042 - DNA, 75 bp, Homo sapiens
cctgcttgtctcagaaggttctaggacaaggaaaatgggctcccacatcaggacgagaaggagccctcgagttac

SEQ ID NO: 184043 - DNA, 80 bp, Homo sapiens
gaggaattcctcaagacaccattccaggttctggcctataggaacaagacattttcagtaatggaagaaggagcttccag

SEQ ID NO: 184044 - DNA, 101 bp, Homo sapiens
tttgccgccctcgtcaggcccagctctcctgcgccgccgcctcccgccgcgccccgccatgccgctctactccggagcagcatttctttctattactacta

SEQ ID NO: 184045 - DNA, 90 bp, Homo sapiens
caccagtgtcacaaatggagcacatcctgaagccacttcagagcaaccacaggaagtacatttgaagaacgcaagtagagggagtgcagg

SEQ ID NO: 184046 - DNA, 50 bp, Homo sapiens
ctttcgcgctaccggggactctgggtggacgtacgccatcgactttcccg

SEQ ID NO: 184047 - DNA, 88 bp, Homo sapiens
gagatcccaggcggtgacagagtggagccatggctagagggaacccgagcgtcatgttagggtgaagcagaggacctcagtgctgaac

SEQ ID NO: 184048 - DNA, 82 bp, Homo sapiens
cagcccgtgccgcgagcgcggcctgcaggagggtaacaagatgctcaactatagtgctcccagtgcagggggttgcctgctg

SEQ ID NO: 184049 - DNA, 74 bp, Homo sapiens
ctaggggcagcgagcaagacagcaagcaggttgtgaccgagattcccgacgagagagactgaggggaagagagg

SEQ ID NO: 184050 - DNA, 83 bp, Homo sapiens
ccccaagcagcagcaggactcagaggcgagagtggccccagccgggccagaagcagttctccaaggagaagtacatcctggac

SEQ ID NO: 184051 - DNA, 87 bp, Homo sapiens
ggcaactctttgatgtactactataatgggaaagcggtattgttgcagcatctggcagtgagactgaggatgaggacagcatggaca

SEQ ID NO: 184052 - DNA, 100 bp, Homo sapiens
gacggtctgcatactcgctgcccgccggctccctcccccgcgtccctgcgaccgccgcggcgaagatggatttctctctgatcaaacggacagttcagga

SEQ ID NO: 184053 - DNA, 75 bp, Homo sapiens
gctttatatttctctcagaccattcccatcagtgagcattacagatgcttgctttaaatcgagtaacagcatcgc

SEQ ID NO: 184054 - DNA, 96 bp, Homo sapiens
atctgtgatagaattgctgcttaaaaaacttgaaggttataggttgagtcctcaaacattaactactattgttaaacgttatagcaagaatggcag

SEQ ID NO: 184055 - DNA, 75 bp, Homo sapiens
gcaacttgcccagctatgagagacagagccaggatttgaaaccaggaggctattacttgacaagcgcatatggag

SEQ ID NO: 184056 - DNA, 100 bp, Homo sapiens
cagacaccgcctacaggagtatgatgcaagtgctgttccctcgtcacaccaatgccagtgctcgagacaacaccatcaacctgatccacacgttccggga

SEQ ID NO: 184057 - DNA, 100 bp, Homo sapiens
caacagaagagcttgaacaatgctgcatttgcatcaggttcaaatgagcgagaggaacatttggctaaaatatttgttcatccatgagctcggatttccc

SEQ ID NO: 184058 - DNA, 101 bp, Homo sapiens
tgccaccatcctgggttgacaattctacacaaggaggatgctgaaaacgccattcaacagatgggtggccagtggcttggtggaagacaaatcagaactaa

SEQ ID NO: 184059 - DNA, 100 bp, Homo sapiens
aacagagccgggagttcaagaagaacactccagagggcctggagagaaccatccgggacaactttggaggtggaaacactgcctgggaggaagagaattt

SEQ ID NO: 184060 - DNA, 100 bp, Homo sapiens
gtgtatcaagtaatggtgcaaagcctgaaatcggcttcaccaccgaccctcggatggcccgctcctccccctaccccactgacgtggcccgagtggtgaa

SEQ ID NO: 184061 - DNA, 100 bp, Homo sapiens
ggaaggaggccgagccgggatctcaggtcctcgggggcggcggccacgccaaggacggaatttcgctaaggagtttgtgatcagtgatcggaaggagctg

SEQ ID NO: 184062 - DNA, 90 bp, Homo sapiens
gaaaaattacagcacatctcagtgaatttgcaagtggtggtggaggtggatacagcagtcggagaacatctggcagagacaaatacggac

SEQ ID NO: 184063 - DNA, 90 bp, Homo sapiens
tgacatccttctttttagagatcgttttgatggatatatcttccttgacagcaaaggctctatctaatgttcctcctctccggaactact

SEQ ID NO: 184064 - DNA, 90 bp, Homo sapiens
ggcggaggaggaagtaggggtgcacctcagcactatcccaagactgctggcaacagggttccaaaaggtcccaggtgtcctctccgtgca

SEQ ID NO: 184065 - DNA, 90 bp, Homo sapiens
ctatcagcaggctccgggctgaagattgcttctcttctctcctccaaggccgtgcataaggctgtgctgaccatcgacgagaaagggact

SEQ ID NO: 184066 - DNA, 92 bp, Homo sapiens
acctgcgctgtgatgcctgcagagctgtggcttaccaggctacgaggaacaccggcaagagtatcgccaataagaacatcgccaaccccacg

SEQ ID NO: 184067 - DNA, 100 bp, Homo sapiens
agaggtatggcagttattggcaggctgccatgacaaccaggcaatgctggatagataccgaattcttatcacaaagattgaagacccggaagaaccagac

SEQ ID NO: 184068 - DNA, 120 bp, Homo sapiens
cagcgcagcgccgagcggggcccgcgggcccatgaggaggcctggggaccatgggctccaggatcaacgctaagctgcaacgaaaacgacgcagagcacctggaccgtgaccagccatac

SEQ ID NO: 184069 - DNA, 100 bp, Homo sapiens
accctttgtgtcatcctccacagctccagggaaggcactcaaaagtggggggcaggaaaggaaaatggttctcctgaagaacatgcaatctatgtttggg

SEQ ID NO: 184070 - DNA, 107 bp, Homo sapiens
gggagtcatcatgagcgatgttaccattgtgaaagaaggttgggttcagaagaggggaaagatgaatgggagggctgattttcgagagccgaatgcagaggttccaa

SEQ ID NO: 184071 - DNA, 75 bp, Homo sapiens
tcccaccaaaaccaagcactgacatgccactcatggactcacagatgaatgcttctcacccggaaacaaacttgc

SEQ ID NO: 184072 - DNA, 101 bp, Homo sapiens
cagatacaatttggacctcatgtggaacataaacacaaacctggatttttagaggctctctaaatacgtacagattctgcgataatgtgtggacttttgta

SEQ ID NO: 184073 - DNA, 90 bp, Homo sapiens
ggggctccgcgaggaaaacgagggcgtgtataatggaagctggggaggccggggagaggcgtatgtgggctctgcagtcatgaccgatga

SEQ ID NO: 184074 - DNA, 100 bp, Homo sapiens
atcccagtcacaattatcaccgggtatttaggtggctgcaatattaaaggtgaagatgagagctgggactttggcactggtgctggattttatgttgatg

SEQ ID NO: 184075 - DNA, 83 bp, Homo sapiens
cggaaaactcccaacttcctgaaaaatggctacaaacttcctagcacatgagaagatctggttcgacaagttcaaatatgacg

SEQ ID NO: 184076 - DNA, 75 bp, Homo sapiens
acctggatgagacatttgctacagcatcccacattaagtcaacggccttgtctgatgccattaaaaaatggcagg

SEQ ID NO: 184077 - DNA, 100 bp, Homo sapiens
ggtgcctgagcccgtgcctgtcttcagatcttcacagcacagttcctgggaaggtggagccaccagcctctccttggtgtctgatgatttgtgagcctca

SEQ ID NO: 184078 - DNA, 50 bp, Homo sapiens
agcacaagagcaccatactttgaggccaaggataagcagttaccctgaag

SEQ ID NO: 184079 - DNA, 50 bp, Homo sapiens
gctgtcctaatcctcactgccgaaaggcaaggattactgcaaagtaatat

SEQ ID NO: 184080 - DNA, 75 bp, Homo sapiens
ggaatatttagcaaggattcaaggctttcagatcgctactgaagcaatagaaaacttccgaaccgttgtttcttt

SEQ ID NO: 184081 - DNA, 98 bp, Homo sapiens
aaacataccaattcttgaatgacatccgagcgaaagagaaagagatttgagttctgtgaacctgcatttgttgttggtaattgcctccagatagcttc

SEQ ID NO: 184082 - DNA, 80 bp, Homo sapiens
atcagccaggagcagatgcaggagttccgggcgtccttcaaccacttcgacaaggatctcaaagatttcatgagacaagc

SEQ ID NO: 184083 - DNA, 90 bp, Homo sapiens
agcaggagcagcccaagcgccttccctcacggaggtcacaatcacattgagccaaaacgcatccagtgttttctccagttacaaataaaa

SEQ ID NO: 184084 - DNA, 100 bp, Homo sapiens
caagaacttcctcgcactgtgacatgtctgatcccttgctcccatccctgcagcatgaacaaggaagtttactggatttcttaaaagatggagaaggaag

SEQ ID NO: 184085 - DNA, 75 bp, Homo sapiens
cttcgatgtgcgagactttggaaagggagtgcatccgccccaacccttttccccctcgtctcctgtgagaattcc

SEQ ID NO: 184086 - DNA, 100 bp, Homo sapiens
cacaaatgcagaagtaagaggatttatagatcagaatctcagtccaacaaaagtcggaagctttgaggttcctgaagacttccaggagcgcatggagcag

SEQ ID NO: 184087 - DNA, 100 bp, Homo sapiens
agctgcgtgagaacccgcccatgaagccagatttctcccagggtagaagagcagaggatggctctgtcattgattatgaactgattgaccaagatgctcg

SEQ ID NO: 184088 - DNA, 100 bp, Homo sapiens
ctacccaaagcgcacagatgtctggtcggtctatatcgacatgaccatcaagcacggcagccagaaggacgtccgaccctgtgtcaaggagagtggaaag

SEQ ID NO: 184089 - DNA, 87 bp, Homo sapiens
gagagggactacgtgggcaccttgcgcttcttgcagtcggatatccgacatgaagccagtgacttcccatgtagagtggccaagctt

SEQ ID NO: 184090 - DNA, 101 bp, Homo sapiens
catgttttataagtattgacattacacagtgttaacaatgcatccacagagccaccaattaccctagttatgggcccatcatctcacctggactatcatgg

SEQ ID NO: 184091 - DNA, 82 bp, Homo sapiens
ggaaaacaagctcagggcttccactgattctacattatgcatctgacagatacgtctcatggtgtaagaaataagtgcctgc

SEQ ID NO: 184092 - DNA, 100 bp, Homo sapiens
cagcctccggagtagctgggactacagacctgagatccaagctggaaagaggcagtgcctgcagcaaccgctccatcaagaaagaggacgactcttccca

SEQ ID NO: 184093 - DNA, 50 bp, Homo sapiens
actgctagacctcccagatactataggtgccagtcacgaattgcccgaac

SEQ ID NO: 184094 - DNA, 75 bp, Homo sapiens
caaatgccttctcatccccacataacttaattcagtgcacaaatgagatgaatgtgaacatcccacagttggcag

SEQ ID NO: 184095 - DNA, 83 bp, Homo sapiens
atttttagcgactaccaaagagacaaggtatgcaaccactcatgtattcggttcaggaagcattaaatgccagaccatggtgg

SEQ ID NO: 184096 - DNA, 50 bp, Homo sapiens
tggatcagacttttgtgttgcagttcggacaggtgatttggcttctgcac

SEQ ID NO: 184097 - DNA, 95 bp, Homo sapiens
agctggacgagctggagaaggccatcaccacgcagaacgtcaacaccaagtgcatcaccatccccagggccgttgccgtctgcacccagaccctg

SEQ ID NO: 184098 - DNA, 83 bp, Homo sapiens
tggcccttgttcccccaaatgtctgactctgactctcggactgagaaacgcaagcaagagtgagccatggagctacgtgtggg

SEQ ID NO: 184099 - DNA, 90 bp, Homo sapiens
ctggcttcctggtgaagatgagtggcgacctgctggagctggatcagagcggcaccgaacctattagtagtgaggaagatggcagcgtcg

SEQ ID NO: 184100 - DNA, 75 bp, Homo sapiens
gtaaaagcgaactacagtggatgggtgcagttcaggggccgttgctccagggagaactgcaaatatcttcatcca

SEQ ID NO: 184101 - DNA, 75 bp, Homo sapiens
caccagtgctgccagcacgttctcttggtctggaagccaggcccacaactcctctttctgtaggcaccattgtcc

SEQ ID NO: 184102 - DNA, 75 bp, Homo sapiens
cgaattgggtcgatctgtgacagatgtcactcctggaagcaaggcggctctagctaatttatgtattggagatgt

SEQ ID NO: 184103 - DNA, 74 bp, Homo sapiens
gaacaccctggaagccgagaaatgctcaggagcatctatcggctgcacgccaacatcaacacaggcgaagatgg

SEQ ID NO: 184104 - DNA, 101 bp, Homo sapiens
cactggcggatgaagcagctggtggggctctactgcgacaaggtatatgctcgtatgtcagaagtcttaggaataacagatgacaaccacgttctagagac

SEQ ID NO: 184105 - DNA, 90 bp, Homo sapiens
ctgtgcgcgctggcgctgagcctgcagccggccctgccggtagtaaacctattgatggcaattttgctgactgtggaagtgactcatcca

SEQ ID NO: 184106 - DNA, 51 bp, Homo sapiens
gtggtgaactctctgaggaaaaacgaaagctgtgtgaagagacaaagggag

SEQ ID NO: 184107 - DNA, 75 bp, Homo sapiens
cgtttggacccaagcttaacttttccaatgtggaatcctgggccttcattggggataaaaacattcagatggcag

SEQ ID NO: 184108 - DNA, 83 bp, Homo sapiens
tgggaccgggacggcaaggagagggtgacaggatcaagcgtgctttccttatcgaggagcagaaaatcgttgtgaaagtgttg

SEQ ID NO: 184109 - DNA, 80 bp, Homo sapiens
ccaagcagggcatgtccctggacattgtttcagagactcctccactctctgggaatgacacggactccctctcctgcgac

SEQ ID NO: 184110 - DNA, 96 bp, Homo sapiens
gaccgcccagccgagacggagccggacccgccgcctcccggtatatcaactccgggaacctggaacagttgctagacagtaacctgcatttgcctt

SEQ ID NO: 184111 - DNA, 98 bp, Homo sapiens
atatttgcagccagtactctatatgaacaatccgtctggatcacggatgtaggaagtggtgcagctcagtggaagatgatgacaaccagaagacatga

SEQ ID NO: 184112 - DNA, 90 bp, Homo sapiens
ggaaaagaatgtcagtgattgttcgcactccatctggaaagttacgactctactgcaaaggagctgaatactttcaagtcatcccaaata

SEQ ID NO: 184113 - DNA, 75 bp, Homo sapiens
ctttaattacttgagaatttataatggaattggagtcagcagaactgaaatagaatgcaagttctagccggtttt

SEQ ID NO: 184114 - DNA, 75 bp, Homo sapiens
ttggaaatgtcatccgatggcacaatcaggatcttttgccagaaatgagggcatactggcctgacgtaattcact

SEQ ID NO: 184115 - DNA, 141 bp, Homo sapiens
cgcctgggggacctcaacgaggcgggcatcttgcgcaacctgcttatccgctaccgggaccacctcatctacgttcatgtgtgcccagctgcccaaccccgtcctggacagcatcagcatcatcgacacccccgggatcct

SEQ ID NO: 184116 - DNA, 82 bp, Homo sapiens
cacttccagtggagacagggacagcgacttccttgcagcctcttctccggcttccgccctgcgctgccagtctcctacctgc

SEQ ID NO: 184117 - DNA, 80 bp, Homo sapiens
tccccgggcccctgagccatgcccatcgcagccgccccgaaggagccaggagttcatgatcaagtgttgcccacaccaaa

SEQ ID NO: 184118 - DNA, 100 bp, Homo sapiens
agacctgcctcctgttccgcttctcagaggacgccttcaacaccaccttcatctccaccatcgattttaacctttgagaccaagaacccgtcggaattag

SEQ ID NO: 184119 - DNA, 50 bp, Homo sapiens
gacacgggaagaacaaagacttagactcgactactcgaaatggcgtccgc

SEQ ID NO: 184120 - DNA, 100 bp, Homo sapiens
tgaaaacatcatcgttttgaagagttctgcgttttgccagtcacctctcaactgtgtgccaaagttgaccagatataccatctggcatctccagcctccc

SEQ ID NO: 184121 - DNA, 90 bp, Homo sapiens
tcaagtacataggtgcacactgccctgaactggtgactttgaacttgcagacttgcttggatcgtgtgggtggacgagttgccacatttc

SEQ ID NO: 184122 - DNA, 83 bp, Homo sapiens
tgatcgtgctgggcaccggcctgacggcaccatgagccaggacaccgaggtggatatgaaggaggtggagctgaatgagttag

SEQ ID NO: 184123 - DNA, 100 bp, Homo sapiens
aacttatcagagattgagaatgtccatggatttgtttctcattctcatatttcaccaataaagctttggagtttaacccttctgccaatccagaggcaag

SEQ ID NO: 184124 - DNA, 80 bp, Homo sapiens
taaagcttcggcacaagggcccaactggaattccacttacggcctcccgcgacgatgcccctcaacgttagcttcaccaa

SEQ ID NO: 184125 - DNA, 100 bp, Homo sapiens
tgccacatcaacgtgtatccacacaagcaggatctagtgaaaagccatttgatgtatgcggtcagagaagaagtggaggtcctcaaagagcaaatcaaag

SEQ ID NO: 184126 - DNA, 100 bp, Homo sapiens
gctctacgtgcctgtcaagaccacgagcagcccgacggccatggaggctgaagagacgatggaatgccttcaggagttccctgaacatcataaaatgatc

SEQ ID NO: 184127 - DNA, 90 bp, Homo sapiens
cctacctccgttgaaaggagagccagttactaacttgatcactactcttggaatcaaagataaatccaaatactgcatatcagaaacaac

SEQ ID NO: 184128 - DNA, 75 bp, Homo sapiens
cgggctccttgcggaaggggattccacggaccaagtctgtaggggctgcattgtattctcaggctcctatgcctg

SEQ ID NO: 184129 - DNA, 102 bp, Homo sapiens
gaatctttctgcacaagtaaaagcaactgtcttacaacagttagatttcgatggggtcctctatcatatttcaaatcctaatggagacaaaacaaaagtgat

SEQ ID NO: 184130 - DNA, 100 bp, Homo sapiens
ctccagtgaatggttattttggaggaagtctgtatgctagacaaggagaaggcaattctcaagttcaactactcagtgcaggaggagagcgacacttgtc

SEQ ID NO: 184131 - DNA, 80 bp, Homo sapiens
cgttgttgcttgggcgcttctccgctgcgtgtaggtgaagggggcttcctgaccgagaataccctctaccatctgctttg

SEQ ID NO: 184132 - DNA, 82 bp, Homo sapiens
caaagacctgcgactttgctcaggagcaggccgggctctcgccatgggtcactgtcgcctctgccacgggaagttttcctcg

SEQ ID NO: 184133 - DNA, 50 bp, Homo sapiens
gtccccgaccttgcctgaacaagcaaaagatacagatattgtggatgaag

SEQ ID NO: 184134 - DNA, 98 bp, Homo sapiens
gtctactgtccaattctgtttactctgaattaccatcagctgaagggaaaatgaaggctctgattgtactttctccacaagcttcagcatggcagtat

SEQ ID NO: 184135 - DNA, 101 bp, Homo sapiens
gagcacaaatggacctctctggaagagggaatcccatcaaagtcagccgtgtggggtctgcaatgggctgcccaggagctgcaggacaagcaccaggagcc

SEQ ID NO: 184136 - DNA, 83 bp, Homo sapiens
gtggaaacactgcctgggaggaagagaatttgtccaaatacaaagacagtactatactggcaattgctggagaagattttgca

SEQ ID NO: 184137 - DNA, 112 bp, Homo sapiens
ggatcaatcagccagtgagggtcaacgtcaagcgggagtatgaccacatgaatggatccagacaatgcagatcttcgtgaagactctgactggtaagaccatcaccctcgag

SEQ ID NO: 184138 - DNA, 83 bp, Homo sapiens
gagagctgtttgtgggccagctgccctctgaggagatggtcatgacagggggatatgagactttctactcggaatatcctgag

SEQ ID NO: 184139 - DNA, 100 bp, Homo sapiens
ggcagctggagcctcaggcggcagcgcttctaggatcccaaaatggctgggcgaaaacttgctctaaaaaccattgactgggtagcttttgcagagatca

SEQ ID NO: 184140 - DNA, 75 bp, Homo sapiens
ggatagcttatttgacaagctgttatctaagtagccggatcgagctgggagatgtgacaccacacaatattaaac

SEQ ID NO: 184141 - DNA, 125 bp, Homo sapiens
ggaagcctgtttctgatgaacctgctgacagccatcatctacagtcagttccggggctacctgatgtacgtcatgtccattgacagcctccagctgggctatgcggaggatgggcactgcaaagg

SEQ ID NO: 184142 - DNA, 101 bp, Homo sapiens
ccttttctttcttctaatttttaaaaagcagcctctggagccagccatgtttggcactgaatcttcataatgcaggctcaacagtaccagcagcagcgtcg

SEQ ID NO: 184143 - DNA, 100 bp, Homo sapiens
gtggacattgccatcccatgcaacaacaagcgcttggtgttcgatattcctgtctttcacccgctagttgatcccacctcaggtgagctggatgtgaaga

SEQ ID NO: 184144 - DNA, 87 bp, Homo sapiens
atgacaaaacttcaagccaaacatcaagcagaatgtgatttgcttgaagatatgaggcttaagcaggtaaagcagtcactgtgaaga

SEQ ID NO: 184145 - DNA, 90 bp, Homo sapiens
gcctaattaccttcaaacctggtctgtgggttctggcaccacctgagcccactgggcatctggtcatccctggcacctctcctttggagc

SEQ ID NO: 184146 - DNA, 82 bp, Homo sapiens
ctccatcagcttcctcacacccttgcgcaacttcctggagggggactggaagaccatctcgccgccaccggcacggccaggc

SEQ ID NO: 184147 - DNA, 83 bp, Homo sapiens
ggaagagttctatgcactctgtgaccagctggagctgtgcctggatatccgacatgaagccagtgacttcccatgtagagtgg

SEQ ID NO: 184148 - DNA, 102 bp, Homo sapiens
ggaacacctcgccaaagcagagaaatacgcaaatctgtccaaggctgcctggggagcattggagaagaatggcacccagctgatgatccgctcctacgagct

SEQ ID NO: 184149 - DNA, 75 bp, Homo sapiens
tgttaaggattccaagtaactcttatttggtaagaatgattgatgttggctgatattggagtgctcattcacatg

SEQ ID NO: 184150 - DNA, 95 bp, Homo sapiens
tttaggaaacacctctacctcctgcgaggcctcccgggctccgggaaaactacactggccaggcttgggcactgtttaaaggaaagttccgagaa

SEQ ID NO: 184151 - DNA, 75 bp, Homo sapiens
attggggttgatgaaacttacctctttgaatctgaaggtttagccgtgctatcaagactaatcaggaccttctcc

SEQ ID NO: 184152 - DNA, 50 bp, Homo sapiens
gtcatgcggctcctcggctggtggttcttccaggggacccagccccctaa

SEQ ID NO: 184153 - DNA, 98 bp, Homo sapiens
atcaaactgtatgatatggcagatgtatgggtgaagatccaagatgttctacagtttctgatgaagaattgaaaagaagagtagctgaggagctggca

SEQ ID NO: 184154 - DNA, 78 bp, Homo sapiens
gcagtaccagggagcgactgaagtgcccatgccgcttgctccggagaagtttggaaattttagcattcaggtgccagg

SEQ ID NO: 184155 - DNA, 89 bp, Homo sapiens
atcagcaggttgcaggtgaacatggccttgagatccatccttttacaatccctgctattattcgtccattcagcgtattgaactatgat

SEQ ID NO: 184156 - DNA, 97 bp, Homo sapiens
ccgtcctgctcttccagttcgggatgatggcctctccagaggagaagtgtcaacaagtcttggaacccccttatgatgaaatgtttgcagctcattt

SEQ ID NO: 184157 - DNA, 90 bp, Homo sapiens
agccagtactctatatgaacaatccgtctggatcacggatgtaggaagtgtgaaaggagatgaccttcaggccattaagaaggagctgac

SEQ ID NO: 184158 - DNA, 98 bp, Homo sapiens
gccaatgggtggaccgcgctggcggccgcgagctcgcggagctgatcactggggtgatcctgctggctgttggagtctggggcaaacttactctgggc

SEQ ID NO: 184159 - DNA, 101 bp, Homo sapiens
gtacaatgtttcctgtataatgattcttcctcaataccagcgtaagggctatggcaggtttctcatcgatttcaagccatttcctgcttttaagtcttggc

SEQ ID NO: 184160 - DNA, 83 bp, Homo sapiens
aacccactgaagacgtctgcgtgagaatagagaccaccgaggaattgaatgatctggcacgggaccctccagcacagtgttca

SEQ ID NO: 184161 - DNA, 74 bp, Homo sapiens
gtatcttgaggacttcttcgtgatgagtgattatagaggctacggaaacaggccgagaagaacgtggagaagaa

SEQ ID NO: 184162 - DNA, 83 bp, Homo sapiens
tggcctggaggctatccagcgtattccagcgtcttcaggaaacagtttagactctcttcaagatgacaatcctccacactggc

SEQ ID NO: 184163 - DNA, 83 bp, Homo sapiens
aaagcagagccaggtgtacggagagatgatgatgtgcctgcagatatggttgcagaagaatcaggtcctggtgcacaaaatag

SEQ ID NO: 184164 - DNA, 100 bp, Homo sapiens
gtcctcaagctgctgcaccgcggcgccgacatcaattacgccaatgtggacggactcactgccctgcaccagaaagcagaagccactggagaaaaacggc

SEQ ID NO: 184165 - DNA, 75 bp, Homo sapiens
cggaagaccaagatcatcgagatggttgttatggagttgatggagagagtgactctattatgagttcagcttctg

SEQ ID NO: 184166 - DNA, 100 bp, Homo sapiens
gtcctgtggggctcactttgcaaacacggccaggaagcaaattcaacatccaacagcttccttgatagcaaaagtagcaacagctcaggatgacgtcaca

SEQ ID NO: 184167 - DNA, 90 bp, Homo sapiens
acagatatgaaaagcgatttccaggcttgcttaaatgaaaagcataccataaagtctccaaaggatggcacagtaaagaaagtgttctac

SEQ ID NO: 184168 - DNA, 75 bp, Homo sapiens
aatggtatcaagaaaccccgatcacaaagatacgaatctcttaagggggtgaagcaactcgtgcccatccgcgat

SEQ ID NO: 184169 - DNA, 75 bp, Homo sapiens
tccaccagaatccagctcacgctggtactaggttttgacaagcttgcatcatgcgtgagtataagctagtcgttc

SEQ ID NO: 184170 - DNA, 75 bp, Homo sapiens
tcatcacgtctctatagtgtcttctggaacctggcttctgtatttaccatgtacctggagcattggtttggcagc

SEQ ID NO: 184171 - DNA, 100 bp, Homo sapiens
ccactgccctggggcagctgaactgagcgtatgtgccacgccgcccaggagacccctctgctgcaccacttcatgtcggtcctgaccgccagcctgtcgt

SEQ ID NO: 184172 - DNA, 75 bp, Homo sapiens
tcctaaaagcagtagaagaagaacaaaatggagctctctatgaaggaggagatgttaaagtaacccatcttgcag

SEQ ID NO: 184173 - DNA, 99 bp, Homo sapiens
ttatgggatggtgcaaggaaaacagtggcaactctgtgggatggacatgcagccgtttggcatggaagttggaaatctgtatgacatgttccacactcg

SEQ ID NO: 184174 - DNA, 100 bp, Homo sapiens
ggaggatgaggatgaaatcattgtccccaagaagaaggatgcggaagggagagctgtttgactatctcacagagaaggtggccctctctgaaaaggaaac

SEQ ID NO: 184175 - DNA, 74 bp, Homo sapiens
gacagccgcaatccggacctggcgaaggaagaatcctgctcaaaaatgaggtgaattaatacttgggcgctcag

SEQ ID NO: 184176 - DNA, 74 bp, Homo sapiens
agcgggacctgcgagcagcgcgggcggcagcccgggggaagcgccctggcctcccacgactacatcctgaagat

SEQ ID NO: 184177 - DNA, 83 bp, Homo sapiens
ctggtcaatttgtacctgcaggcctcctacacctacctctctctgggcggctgtgagtgtggaccccttctatgagatgctgg

SEQ ID NO: 184178 - DNA, 100 bp, Homo sapiens
actcacgctggtctgggagcctgaggacatggagcaggagccagcacagcagggcatcctgtacctgaaccaggaggtgcccaaggagttactggaattc

SEQ ID NO: 184179 - DNA, 98 bp, Homo sapiens
gggcttctcctggtggatgatgacctgctggggcctgtgattgtgactctcgtggaatagatacacctcagtgtcaccgcttcacaggtcactgcagc

SEQ ID NO: 184180 - DNA, 76 bp, Homo sapiens
tgaggagggcgcccctgaacctgcaccagatacagaattccttaaagatcactctcaaggaggcatctcagtggac

SEQ ID NO: 184181 - DNA, 75 bp, Homo sapiens
cgaataaagtttatcacgccggggtatcttggaacataatacaccaagaagtcaatactgagccatataatcctt

SEQ ID NO: 184182 - DNA, 74 bp, Homo sapiens
aacatcttttcgaccaggatgaggagacatgttggaactcagaccagacaaagatcattccactcagcctggga

SEQ ID NO: 184183 - DNA, 100 bp, Homo sapiens
caaatgggaagcaagagaaaaagaacattactgtcttggatacctgcccactatgtctatccgcaggcttttgtgcagccgggagtggtcattccacacg

SEQ ID NO: 184184 - DNA, 71 bp, Homo sapiens
ggcacctggccatgctctcagctctcccgccgcgtaagactttgaccccgacgcaggcttcagtgattgcc

SEQ ID NO: 184185 - DNA, 83 bp, Homo sapiens
cagcgcctgctgcctgagcccgccagcgacgtgcgcctcgggagtcggcctgtgaggacatggatttgattgacatactttgg

SEQ ID NO: 184186 - DNA, 97 bp, Homo sapiens
cagctttgccacaaagcccagtctgtgtctcaaatcaaccacaagctggagtttgtgaatagcacaatggaagaagctggactttgtgggttaagag

SEQ ID NO: 184187 - DNA, 75 bp, Homo sapiens
caagacttactgaatgtcctggcccggatgatgaggccagtgagtgatcaagtgaaggaggccccaaccctgagc

SEQ ID NO: 184188 - DNA, 146 bp, Homo sapiens
tctttcttctatttcttgtggatattatggctaataacacaacaagtttagggagtccatggccagaaaacttttggggtgctggagaatctggtaaaagcaccattgtgaagcagatgaggatcctgcatgttaatgggtttaat

SEQ ID NO: 184189 - DNA, 90 bp, Homo sapiens
ggacgggaccccggcgcccccaccccatccccgggagccacccggcccaagttgaagaagatgaagagccagacgggacaggtgggtgag

SEQ ID NO: 184190 - DNA, 90 bp, Homo sapiens
caccagctgatctgcagactccaaggaggtcccaggaagagggatcagctttatttcttggaggcaatgaagtgaagagccgagctgtgg

SEQ ID NO: 184191 - DNA, 100 bp, Homo sapiens
cgctgggggccggggcgcgtcgcagggttctcatgtatcagccatcttctgtaagggtgcccagtgtgacttcggttgatcctgctgctattccgccttc

SEQ ID NO: 184192 - DNA, 90 bp, Homo sapiens
gcggcttttcggaaggcggctaagtcccggcagcgggaacacagagagcgaagccaggcaagccgattttttcagttgatattcaccctg

SEQ ID NO: 184193 - DNA, 75 bp, Homo sapiens
tgaatgccaagcagaaaattacctaaatgcactctttcgaaagaaagagcatctgctgcacccaagcctgagccg

SEQ ID NO: 184194 - DNA, 75 bp, Homo sapiens
tgctggccaagaagatcatcattaaggacggaggcacggtcttgggcgtctttggtactggcttttttaggggtc

SEQ ID NO: 184195 - DNA, 50 bp, Homo sapiens
ctccagagtggctgggattacagaacccaccagcgaagccagaattggga

SEQ ID NO: 184196 - DNA, 97 bp, Homo sapiens
ctgctggaacccctggagcaggaggaagcggtgattctccaggccttggattctgatgatggtgggcctgcctgctgctggcaagaccacatgggcc

SEQ ID NO: 184197 - DNA, 100 bp, Homo sapiens
tgcagcacgtggacgctgactcggaagtgcagagagtaaaacttgtctcggcacagagtcaagtaaagaaagccaacatacagtggagcccctggggagc

SEQ ID NO: 184198 - DNA, 75 bp, Homo sapiens
acggtatgaatttctaagtaagattttaggtgatgggcaagtcagaaagtcagatggatataactgatatcaaca

SEQ ID NO: 184199 - DNA, 75 bp, Homo sapiens
cgactgcactcacacgacgtgcgctatgggtcaggatgaatctggttatagatggacaagagacgatcattctgc

SEQ ID NO: 184200 - DNA, 75 bp, Homo sapiens
gcatctattacctttgccttggaatacaggagatctaatgaggcgtcaagaagaactcagacgcttggaagaact

SEQ ID NO: 184201 - DNA, 100 bp, Homo sapiens
ctttccttggaatattgtgagaatatttgtggccatttaaggatttcctaatggaaacattcatcatgtttaagaacctcattggaaagaacgtttaccc

SEQ ID NO: 184202 - DNA, 74 bp, Homo sapiens
cgctgccgccgcccccagctcccccgcctcggggagggcaccagcatttaaatcaaacggtattgagatggatt

SEQ ID NO: 184203 - DNA, 50 bp, Homo sapiens
tcagctcgccaggcggcgcagggtgtgggccatgtttgaggattgcccca

SEQ ID NO: 184204 - DNA, 100 bp, Homo sapiens
agagagagcaccgagaggggcaggatgaaggaccacagacctgcgctgcttcctacacagcctcctgtcgtgacttccttgccgtccaggaagggatttc

SEQ ID NO: 184205 - DNA, 96 bp, Homo sapiens
gagaactttaggaacctggcctcagtagggaccttggtagctaatgtccgaagaaagtgactctctgagaaccagcccttctgtggcctcactctc

SEQ ID NO: 184206 - DNA, 102 bp, Homo sapiens
ccacgtcctggtctttgtttgaggcctgacgtgggcatcattttaacaggcctcctgaaccggcccaaccccttgctggcgttgccccccgcccgcccccac

SEQ ID NO: 184207 - DNA, 100 bp, Homo sapiens
gagtgaaacagacttcaaagttatggcaagagatgagttaattctaaggttagcatcttgcaaggaggtagtaacatatccagtcgtgaaactgggaaag

SEQ ID NO: 184208 - DNA, 89 bp, Homo sapiens
cacaaatgacaagaagcggagtggccaccccagccagcagaaaactgagcttccggtcacagagaacgtgcagacgattcccccgccat

SEQ ID NO: 184209 - DNA, 83 bp, Homo sapiens
atgggaaatgaggagacactgggagggtttcctgtcaagagtgttgttccagctttgacttcacagagaatgcagttgtcttg

SEQ ID NO: 184210 - DNA, 96 bp, Homo sapiens
ctccgagccccggccgcctgtccgtcgatgcaccgaaaagtgctgctcacggccgtgaactgctacagcgtgaaggccgccacccgggtccaggat

SEQ ID NO: 184211 - DNA, 50 bp, Homo sapiens
agcaacccgaagacagggaaatttaggcctgcttccttgtatatccacag

SEQ ID NO: 184212 - DNA, 100 bp, Homo sapiens
gaaaatgacggttataagaccatttatttctttggagacaaaactatgccagtttattgttggccaaaaccaggctttgattgaaccaggatgaatgcgg

SEQ ID NO: 184213 - DNA, 83 bp, Homo sapiens
caatattcacgcctcttcccaaacgcatctcagcacatggggatatgagactttctactcggaatatcctgagtgttgcgtgg

SEQ ID NO: 184214 - DNA, 74 bp, Homo sapiens
gaaatgagcccattgaaggcaaactctcactgtataggcaacagaatgtggaggctgtggacccacgaggtcga

SEQ ID NO: 184215 - DNA, 75 bp, Homo sapiens
aacaatcattagttcagtgcagtgtctgacttgtgacaggaaggaacccagccagccggcggaatgcaagcagca

SEQ ID NO: 184216 - DNA, 100 bp, Homo sapiens
ctgcagctcattaccagtctgaaggagcaaggtccagatggctgtggaggccaagtttgtccaggacaccctgaaaggagacggtgtgacagaaatccgg

SEQ ID NO: 184217 - DNA, 75 bp, Homo sapiens
gaggagcagcagactcggacgtggacgcctttttccggacagggccctcatctttgtgtcccatggagccggaga

SEQ ID NO: 184218 - DNA, 82 bp, Homo sapiens
ccggagctgctggtttcattcgaggtttcgggccggtactccaaagattcaggtttactcacgtcatccagcagagaatgga

SEQ ID NO: 184219 - DNA, 105 bp, Homo sapiens
ccctgcagtacctgcagaaggtctctggagacatcttcagcaggtggccggactgtgccatgctgctccagacccaaggtggcagctctcactgcggggaccctg

SEQ ID NO: 184220 - DNA, 76 bp, Homo sapiens
cctgcttcctgggaccagggaagaatggtcccgtaagtctcaccctaatgatgccttcaattaagttgcagagttc

SEQ ID NO: 184221 - DNA, 75 bp, Homo sapiens
cggttccagccgaacatgacgggtgaacgtgggctgcgggccagccgaggagcgggtgctgctgaccggcctcca

SEQ ID NO: 184222 - DNA, 74 bp, Homo sapiens
atcactcccgagtggaggaagcaatacatccagtatgaggaactgtggaaggtgcatcagtgaagaaatggacc

SEQ ID NO: 184223 - DNA, 75 bp, Homo sapiens
cttgatcaggtggaacagattcagaaggagcaggattaccaaaggatggcctactgccagcatattggggtggag

SEQ ID NO: 184224 - DNA, 75 bp, Homo sapiens
cccgccgccgctggagctagagagcccacccacctttgggttcctgttggacatcgatggagtgcttgtgcgggg

SEQ ID NO: 184225 - DNA, 75 bp, Homo sapiens
gcggttcctcctcctgtcgctgcccgtgtgattactgagactcagtgtctttctcgagaagcaggtggaaacatg

SEQ ID NO: 184226 - DNA, 100 bp, Homo sapiens
ttgaaggcgcggcgagcgggaacagctcttgaggagtgagactgcaggagatgtgggccgccaaagtcatacactggctatcagaaaattatgctggaag

SEQ ID NO: 184227 - DNA, 80 bp, Homo sapiens
tgtaaacagaacactggccaaccattgtgtcatctctaccctcttcccaaggaggtgcttgaactcgctttctccatctt

SEQ ID NO: 184228 - DNA, 100 bp, Homo sapiens
atgaacagcccctgctggcaagtcaagtggcaactccgtcagctcgttagaaaggtgattgaagatagtactggagtccgccgggtggtggtcacacccc

SEQ ID NO: 184229 - DNA, 75 bp, Homo sapiens
gcgcagtaaggcggtgagcctctccgtcactgctttgaaaagtccagccgcatttcatgagcagagaaggagctt

SEQ ID NO: 184230 - DNA, 83 bp, Homo sapiens
ccgtggttcgcggcctcctcctcagtcgggatcaaccgatggagtgcctccggagccagcgtggtggccatagacaacaagat

SEQ ID NO: 184231 - DNA, 50 bp, Homo sapiens
gcttctaaaggttgtgttacattttggagtccagaacatgtaaagttttt

SEQ ID NO: 184232 - DNA, 100 bp, Homo sapiens
agaagaacagaatgaagtaatgaaaaatggctgtgaatctaaagagctggtctacctcgtgcagattgcttgtcagacggagtttcactcttgttgccca

SEQ ID NO: 184233 - DNA, 100 bp, Homo sapiens
ggcctgtccttcttcaaaccacggcccggaaacttcgaaagaaaatttttgatgaaattgagtcatgaaactgtaaccattgaattgaagaacggaacac

SEQ ID NO: 184234 - DNA, 83 bp, Homo sapiens
tatgtttgtaaatgtgagtggaagccatgaggccaaaggcagttgtattggttctgtcagatagtgagaaacggaaacagtac

SEQ ID NO: 184235 - DNA, 82 bp, Homo sapiens
gacttggtggtggagtgtagagatatagttggcaacctcactgagttagaatcagagcgacttggactgggcggtgtttgag

SEQ ID NO: 184236 - DNA, 100 bp, Homo sapiens
ggaaagtgaggaattttgaagtacaccgtggtgacattgtatcattggtatgctgtgagagaagtaaggaaatattcctcagttcataccattgagaaga

SEQ ID NO: 184237 - DNA, 75 bp, Homo sapiens
ttcccatcaccatcacagagagcgatgcaaatcctgatcctaactgttgtcttggagtatttgggctgagcttgt

SEQ ID NO: 184238 - DNA, 51 bp, Homo sapiens
gcgggcgagggcagcgccctaagcaggagtgggaatagctttgcgaaaaat

SEQ ID NO: 184239 - DNA, 74 bp, Homo sapiens
gcaggtgacagtctgcatgtgcagttttcagcgccgcgcggtgaggttctctagtccacgctcgcagccatgcc

SEQ ID NO: 184240 - DNA, 83 bp, Homo sapiens
ggagtccttggggacggagcagcgcgtcgtggggcgagcggcagtgaagatagtgatccggggagacaggaacacgggcaaga

SEQ ID NO: 184241 - DNA, 89 bp, Homo sapiens
gggctgcagctggcggccggaatccgcgcgcagcccgggtacaaagaattttacgtgaaagattttgtcgtcagagtccacatagtaac

SEQ ID NO: 184242 - DNA, 82 bp, Homo sapiens
ccaggcccggaagctggtggaacagctacgcatagaagccgggattgagcgcatcaaggtctcggcgcggaagatggccggc

SEQ ID NO: 184243 - DNA, 131 bp, Homo sapiens
gggaggatgaagactctgatgcagatgaggaggtggaactgatcctgggggacaggaagcagagactttcaaggaacaaggaaatgcatactatgccaagaaagattacaatgaagcttataattattata

SEQ ID NO: 184244 - DNA, 75 bp, Homo sapiens
aggtgtgcaggggaaaccctgctgatgtcaccgaggccagaatgctgcttctaaattacttgggcaaaattgggt

SEQ ID NO: 184245 - DNA, 82 bp, Homo sapiens
gtctttccgtcctctgaggcgacggccgcggctgcacaggtccagcaccatgtgctaggtcactcccagcgcgaggccacac

SEQ ID NO: 184246 - DNA, 90 bp, Homo sapiens
gcgccatggcccccattggcctcaaagctgttgtcggagagaggcgtggactccctggtgctagaaagcgtgatgttcgccatacttgcg

SEQ ID NO: 184247 - DNA, 111 bp, Homo sapiens
cgcagccttgggcctcgcgccggctatggccgtgccctggggctgagccctcaggtattgttgcagcatctggcagtgagactgaggatgaggacagcatggacattccct

SEQ ID NO: 184248 - DNA, 82 bp, Homo sapiens
tcgaccttcaatccagttccaaggactccacggggtgctagtattgtctcaagactatggcaaacacttacttggtgtggaa

SEQ ID NO: 184249 - DNA, 90 bp, Homo sapiens
cgagatcccggatcagccctgctggagccagagtaagaagaaagcagcggcattgttcgacagccaggccccaatttgccccatctgcca

SEQ ID NO: 184250 - DNA, 98 bp, Homo sapiens
ttggacctgaaacagaaattctggaacacctatatgctattcaagcagagattacccaagttctcgtgatactagagattatgcaccaccaccacgag

SEQ ID NO: 184251 - DNA, 83 bp, Homo sapiens
gaggaatttgtggctggctggatctctggtgtggatgtggaagcagccaagcgggcagaagaggaattgctccttcatgacac

SEQ ID NO: 184252 - DNA, 82 bp, Homo sapiens
gaagaccattcagatgggatctttccggatcaatccagatggcagccagtcagtggtggagtgcagggagactgaccctaga

SEQ ID NO: 184253 - DNA, 82 bp, Homo sapiens
acaggagccgctcttaggcgacacacctggaagcaggtactccaaagattcaggtttactcacgtcatccagcagagaatgg

SEQ ID NO: 184254 - DNA, 51 bp, Homo sapiens
ctgggcgttcatctaccacgctttcgtatatttggagttcttacaacatgg

SEQ ID NO: 184255 - DNA, 75 bp, Homo sapiens
gccagacaatagagcatatgggaaccactcgttttgactattattttatcactctttgtgaaacttcacaatgtt

SEQ ID NO: 184256 - DNA, 50 bp, Homo sapiens
ccgcacctgttttccacagcaggactgagcagggggaggaacatttaagc

SEQ ID NO: 184257 - DNA, 75 bp, Homo sapiens
tggccaagtttgaggagagcactcggaacccctcactcatgaagcagctctgacacagagtctgactatggtggc

SEQ ID NO: 184258 - DNA, 74 bp, Homo sapiens
tggccctcgatgtgctctgcgtgttgctgggagctgccccgggagcagcctctgccccctggccccattggcac

SEQ ID NO: 184259 - DNA, 147 bp, Homo sapiens
cgcagagcaagctgagccgagccgagccgagctgggggcgcagagcgcgggaggcggcggcggcgcggagcccaggattggaggctgttgtcattggagaagttcatgagaatgttactctgcactgtggcaacatctcgggactga

SEQ ID NO: 184260 - DNA, 100 bp, Homo sapiens
gaaagttctcttcaccaaggagactgcaggctacctcaggggccgtccccaggacactgtccggatcttccctccctgaaagttggagtgactggtcccc

SEQ ID NO: 184261 - DNA, 82 bp, Homo sapiens
acacccctgaagccgagaaatgcttgaaatccatggcccaaaatgactctaccagtggagactctcttctgtgaagaagacg

SEQ ID NO: 184262 - DNA, 90 bp, Homo sapiens
gccaaagaccaagcatctcagagaagaggaggaagaaggcgagaagcacagtgatcgtaaacttgttgataaagaagatatcgacactag

SEQ ID NO: 184263 - DNA, 75 bp, Homo sapiens
gaaaccccgcggggaaaagtgacccaagacagtccagcccagaatcaaatgcaggttccatctggatatggattg

SEQ ID NO: 184264 - DNA, 100 bp, Homo sapiens
aacttctttttaatgcattaaagcacatgtactgtaagattgatgttaaaggcatggtgttcaccccacttcatcagcgtacataagttatctcttcttt

SEQ ID NO: 184265 - DNA, 120 bp, Homo sapiens
agccgcggcttccggagccctcggggcggcggactggctcgcggtgcaggagcccagtttcctccaattgcagcacaagaccttccttttgttctaaaggctggctaccttgaaaaacgc

SEQ ID NO: 184266 - DNA, 78 bp, Homo sapiens
attcgcagtggtcgcttcttctccttgactgaaactgttgaggagcccatggaggaagaagaagcagccaaagaagag

SEQ ID NO: 184267 - DNA, 87 bp, Homo sapiens
gaagcacgagcagatcctggtcctcgatccgcccacagacctcaaattcaaaggtgtgggcagaagaaaaagctagtgatcaacagt

SEQ ID NO: 184268 - DNA, 100 bp, Homo sapiens
tccaccgctcgggtttggctgggggtgagcccctccagactccgaataggagatcaagagtttgattcattgcctgctttactggaattctacaaaatac

SEQ ID NO: 184269 - DNA, 82 bp, Homo sapiens
cgtctcctgtgtggcgatggtcttcctgctggggctcatgtttgaggtgtccctggccagtgtccttccacctgtccacaag

SEQ ID NO: 184270 - DNA, 83 bp, Homo sapiens
gggagagacgctctgaactgactgccccgcatcaccggagcgtcccagctgcgaggaggcctatgaaaggaggttccctacat

SEQ ID NO: 184271 - DNA, 100 bp, Homo sapiens
ttccatgacccaccatctgtcttctacggacttcctcgttctgcccatcttcctaacaaggctatggctgataacagcagtgatgagtgtgaagaggaaa

SEQ ID NO: 184272 - DNA, 96 bp, Homo sapiens
cgacatcaccgtgctccgttggagccccagtggaaactgcctgctgtctggggacagggttctgcgttagacctgcatcttagcaatgtgaatatt

SEQ ID NO: 184273 - DNA, 98 bp, Homo sapiens
aggcctgacagctctgcggctcgggccctgagattatctttctcaaggaatagatctttctggaatagaagtgatagaaaatgatctactttttattg

SEQ ID NO: 184274 - DNA, 86 bp, Homo sapiens
ctgacggagatggtgcagaagatggaggaggctactgcagcactggggtgtcagttgttggtccgacccagaacgcttcagttctg

SEQ ID NO: 184275 - DNA, 100 bp, Homo sapiens
tttgcccccgcctgcctctcccatgagatcatcatccggagagcccacaggcggttttgtgagctgcttccccaggagcagcggagcgtggagtcgtcac

SEQ ID NO: 184276 - DNA, 75 bp, Homo sapiens
gcggatgctggtgtctggacaggggcccgtgatggaaaatgcccagggctacgacgaggacttcaaccatgagcc

SEQ ID NO: 184277 - DNA, 100 bp, Homo sapiens
gagagactccttgggggtcgagcacataacggggttcgggtgtctcgtgtgtgaacatcacagccagtaatgttaaagtagagactcagagtgatgaaga

SEQ ID NO: 184278 - DNA, 50 bp, Homo sapiens
ttagaccctccacctaattgcagaggctgtgtggttggcatataaacttg

SEQ ID NO: 184279 - DNA, 83 bp, Homo sapiens
ccgtcctggcgcgatgcgtcaagtacactgaaattcatcctgagatgagactacatgaggaaataattgacttttataacttc

SEQ ID NO: 184280 - DNA, 74 bp, Homo sapiens
aggcggaagtcaatcaagagactatccagcggggaaatcctcattgacgattcaatttgttgaaggccaatttg

SEQ ID NO: 184281 - DNA, 97 bp, Homo sapiens
gaaagaagaagtcaagaatgaccttctttgtgactcagctggccatcacaggtggagccgccaccaaaatgcagattttcgtgaaaacccttacggg

SEQ ID NO: 184282 - DNA, 100 bp, Homo sapiens
cttagataacagccatcctattgaagttaatgacccagagactgcagtaaaggaattagaagctctcttgggttttacattgagagtaggtgttccaaac

SEQ ID NO: 184283 - DNA, 134 bp, Homo sapiens
cgagataccggcgccatgtccagcgctcggacccccctacccacgctgaacgagagggacacggagcagagaaagcaattgagctgcgtctggcaaaaattgaccatactgcaattcacccacatttacttgac

SEQ ID NO: 184284 - DNA, 96 bp, Homo sapiens
ggtcgtggaagctgagcccatattaagagatgtcaggtgccctacgagacgctgaacaaacgctttcgcgccgctcagaagaacattgaccgggag

SEQ ID NO: 184285 - DNA, 75 bp, Homo sapiens
cctctccgccccccaggaggggcgagagggagccgcagctgatgtcaggttgaattctcttacccgcccctgatt

SEQ ID NO: 184286 - DNA, 51 bp, Homo sapiens
ataagcacttggaatcacgggttgaaggttgggccatgcaggctgctgcct

SEQ ID NO: 184287 - DNA, 98 bp, Homo sapiens
cggcggagccgggcacggagccgcccgcgcacttccaggtgcacagcgcgggagccgtcacggtgctcaagggattaaagcctgtggtttccacagaa

SEQ ID NO: 184288 - DNA, 100 bp, Homo sapiens
ctcttttgaaagcctgagttacgatgtattgagcgcgtcgtatgcggccagcactaagtttgatgaaggccggaacaactttgaaggggaggtcaccaag

SEQ ID NO: 184289 - DNA, 87 bp, Homo sapiens
atgggccccatctggtccagttactatggaaactgccgttctctcctggtgggagatgccatcccagcagtggaggtgtttgaaggg

SEQ ID NO: 184290 - DNA, 111 bp, Homo sapiens
ctactgtgcagctccagagagacgtgaaacatgtgaacactcaagtgaagcaaaagccttccatgattacagccagctctcccaggcgctgaacggactgtcagacagggc

SEQ ID NO: 184291 - DNA, 83 bp, Homo sapiens
gaataagcctggaagaaaaagatacaacgaactagcacaacgagggctgtggatgagatgaacggaaaggagctcaatggaaa

SEQ ID NO: 184292 - DNA, 75 bp, Homo sapiens
gccgctcatccccctctcccagcagtgcacgtgccggaaggacatggtcaagatctccatggacgtgttcgtgcg

SEQ ID NO: 184293 - DNA, 98 bp, Homo sapiens
cagtggtccaaggacactttcagtcctgatgagcatttctgggtgacactcaataggattccaggcctgtcatctttacttcagagtgttactgggaa

SEQ ID NO: 184294 - DNA, 100 bp, Homo sapiens
ccgacattgacatgtcatgcctgggtgcagcttctctagctggccttgctgttgggagagcacatctgcctgatccgcaaggtgaacgagaactggtacg

SEQ ID NO: 184295 - DNA, 100 bp, Homo sapiens
gccattctcccatgtctactcgcaggcgtcatgttgggaatcggcatattgccaagtatctacaggcagaggcggtaaagaaagaccgactggatttcca

SEQ ID NO: 184296 - DNA, 100 bp, Homo sapiens
ctaatatctccgtggaggagctcgatgagtgtgaacatggctacgcctcttcattcccgtccatgccgagcccccgactgcagcattcaaagcccccacg

SEQ ID NO: 184297 - DNA, 75 bp, Homo sapiens
tggagtccagacatctgaaacttgcccgcctgcacccaggtgaaataaacagccttgttgctcacacaaagcctg

SEQ ID NO: 184298 - DNA, 101 bp, Homo sapiens
ccgaggcgctcctcttgtcatcccactcagcgccatgtcctggatgttcaagaggaaagtgggaggtagaggaaatgaaggagtcaaagcttccaggtgat

SEQ ID NO: 184299 - DNA, 51 bp, Homo sapiens
attcgcagtggtcgcttcttctccttggaaagagcatctacggtgagcgct

SEQ ID NO: 184300 - DNA, 100 bp, Homo sapiens
ccagcttctttgtcttacttgtcatttgaaggtgcaactaaaagaaacagaccaaatgtgcagcttattttgggagaggccagccgccatgtcatgaaga

SEQ ID NO: 184301 - DNA, 90 bp, Homo sapiens
gatcaacagtcaattgtgtactagcattccaagcctcaaggaataggttctcctagtgtctatcatgcagttatcgtcatctttttggag

SEQ ID NO: 184302 - DNA, 100 bp, Homo sapiens
ttcttccacctcctccgactgtcagcactgctccacctctgattccaccaccggatatgcaatatgatgaggatgatgatgaaatcaccccggatttgtg

SEQ ID NO: 184303 - DNA, 100 bp, Homo sapiens
acgccatgatccccaccttcacggctctgctctgcctcgttcaaatctgaacatcaatgatgtactagggaactactcattgactcttgttgatgcattg

SEQ ID NO: 184304 - DNA, 83 bp, Homo sapiens
cacaaataaccctatcgcagccgggaggttgttaaaaacaacttgaatcctgtttggaggcctttcaagatctctcttaactc

SEQ ID NO: 184305 - DNA, 75 bp, Homo sapiens
gtctggtgtgggtttcccaagcaaggttccttggaagaagatgtctgcagagggcgccctgcgtccggcagagga

SEQ ID NO: 184306 - DNA, 100 bp, Homo sapiens
cttcaagagacgtctgatgaacctcatgcgggatgtggagcgggagggcctggactgggacctcatatccaagagctcctgtctccccaggagcccccca

SEQ ID NO: 184307 - DNA, 101 bp, Homo sapiens
gcacaaaagagtctccgcggtggaggtctgcgttgctcttgcttttcctcgctggggtgtacgggtatacagggagctaccctgtgtttctgagacccttt

SEQ ID NO: 184308 - DNA, 75 bp, Homo sapiens
ggaaacctaaggaaaaacgtctgacctgcggagggtgaggacgcttgagcggaagttagaagcaaaaatgatcaa

SEQ ID NO: 184309 - DNA, 83 bp, Homo sapiens
cctcgcctccggaggcggcgaggagcggcgggccagaagcggactcctagaagaggggagcagcaaggatggaatgacagccg

SEQ ID NO: 184310 - DNA, 95 bp, Homo sapiens
aagatgatgagaaataaggacaaaagccaagaggaggacagttcgctacacagcaatgcatcgagcgttggtcaaatcggaagcgattaagtgcc

SEQ ID NO: 184311 - DNA, 87 bp, Homo sapiens
cccgaacgacgcgggcgagcggggctttggacgccggtggagacgcaggcgaggtgaaaggtgtagcagtcactcggcctacaccca

SEQ ID NO: 184312 - DNA, 97 bp, Homo sapiens
gcgcctgatgggtcgaggcggacgcgcggctgcgtcagacctgaaggctgaaattgacaagttggccactgagtatatgagtagtgcccgcagcctg

SEQ ID NO: 184313 - DNA, 87 bp, Homo sapiens
cagaatctgggacaagttgcatgaagagcatatcaatgcaggacgtacagttcaggtgctgcaaagttggtggtagctgtggcagtg

SEQ ID NO: 184314 - DNA, 83 bp, Homo sapiens
catcacccagtacgagcgggagaaggcgctgcgcaagcacgctgaggagatgaaggatttgggggcagagcacttggcaggtc

SEQ ID NO: 184315 - DNA, 88 bp, Homo sapiens
caagatgcaggaatcaggagagcaaactataagatatcagttttagagaatgtggcgtggagaaattctcaaggaaagagtaaaatgc

SEQ ID NO: 184316 - DNA, 50 bp, Homo sapiens
ctgccacaatgggacatgtgcaaccacctcctaagctgcccaacggtgtg

SEQ ID NO: 184317 - DNA, 90 bp, Homo sapiens
aggcagagagcagaagatattcacagacatgcggaatttgagccactgtatgatgctgcttaccttacaatgtacaatatctgcttcaca

SEQ ID NO: 184318 - DNA, 83 bp, Homo sapiens
cggaggcagaggtggaggcgctttgaaagtgaagatagtgatccggggagacaggaacacgggcaagacagcgctgtggcacc

SEQ ID NO: 184319 - DNA, 100 bp, Homo sapiens
ccattcgctccaccactataaataccacaccttcctgcgctgccgggaccagcgagccatccagcaggctgtgggaagctccctgcagggggacctgccc

SEQ ID NO: 184320 - DNA, 90 bp, Homo sapiens
ggcagcctggagagtcgaagcagcagctctcgctccagaagcttcactttggccatttcataattctgaatcatgtctgataacggagaa

SEQ ID NO: 184321 - DNA, 83 bp, Homo sapiens
accctgcggtggattgactacggcaaagtggccactcagccaagaagtatgatgcgtttttggcctcagagtctctgatcaag

SEQ ID NO: 184322 - DNA, 90 bp, Homo sapiens
gtgtacatcacccccatggaggccctggcagagcagcacaagctccgggtggataaggcagctgctgcagcagcggcactacaagccaaa

SEQ ID NO: 184323 - DNA, 76 bp, Homo sapiens
agaacggcggtacccgggtggttaaacttcgcaaaatggttcaaaccttgtactactcagctgatcacaagctgct

SEQ ID NO: 184324 - DNA, 83 bp, Homo sapiens
ggtctcagccgccaaagaccccgtccggttcctgcacttggccatcatccatgaagaaaaggcactgaccatggaagtgatcc

SEQ ID NO: 184325 - DNA, 96 bp, Homo sapiens
taggcgacatggagccattgaagggaacaacacccttgatgctgcagttgaactacctgggcaactacatcccgcgcttctggaccttcgaaacag

SEQ ID NO: 184326 - DNA, 100 bp, Homo sapiens
gaaatggctgaagaatatgacgagaagacgagtgaactacttgtggatgaggatcgcagtacggaacctgaccgattgcaggtgtttcacaagagagcca

SEQ ID NO: 184327 - DNA, 100 bp, Homo sapiens
tgaaaagctgagatatgatgattttgaagtcatttcacatcgaagccatgatttaaatatcggcgttaagagcctccaaggcaggtcatcctgacactgc

SEQ ID NO: 184328 - DNA, 75 bp, Homo sapiens
gccacggagacgaatgtggacggccagaaggaatatgaaaacgggggccactgccttggctcaacagccctgaca

SEQ ID NO: 184329 - DNA, 98 bp, Homo sapiens
cccaacgccgatcccccacaacagctcatcacgatttgactgcaactctgtctctacggctctcatgggcctcctgagtgacccagaattaggtccag

SEQ ID NO: 184330 - DNA, 74 bp, Homo sapiens
taatccccacatgttgtggagggaccctgtggaagagtctcactgtcgcccaggctgcagtgcagtggtgccat

SEQ ID NO: 184331 - DNA, 100 bp, Homo sapiens
aaaaaaagagaaacctgggtgaactttcacggacaacctcagaggacaacgaagtgttcgatcaaatgatgccgtttggaaaaatttcccagcagttgtg

SEQ ID NO: 184332 - DNA, 100 bp, Homo sapiens
gaagctccaggatattatgaagttataaggttccccatgggagccctggaggtatcacctgccaaagaagcaatttttattttatattatgttcgagaat

SEQ ID NO: 184333 - DNA, 75 bp, Homo sapiens
actaagaatattattagcacaagagcaccatactttgaggcgatcaccagaatataccaattgtcggtatctatg

SEQ ID NO: 184334 - DNA, 75 bp, Homo sapiens
acttgcagaaatcacattggaccctcctcccaactgtaggaatagccaggccagaagaaggaaggcctgtggtga

SEQ ID NO: 184335 - DNA, 98 bp, Homo sapiens
atcaggacggcgagcctattcagacgtttcactttcaggaccccaatgaggatgagccaaacatccgagtgctccttgagcaccgcttttacaaggag

SEQ ID NO: 184336 - DNA, 90 bp, Homo sapiens
caggagaagatggcggtctccacaggcaatttatcatctcaagttccccttaagagacttctgaacacctggacaaacagatatccagat

SEQ ID NO: 184337 - DNA, 97 bp, Homo sapiens
agcagatggcggatgccctgcagtacctgcagaaggtctctggagacatcttcagcagcatgtcggtgcctcaggccatggagtggctaattgaaca

SEQ ID NO: 184338 - DNA, 83 bp, Homo sapiens
cattaccccactctttccgccctaatggaggtctccagtttaggtctattctggataagcaggttttgtgaagacatttattc

SEQ ID NO: 184339 - DNA, 50 bp, Homo sapiens
cgatgtgcggcgtccgctgtataaggtattgccatcagagagtcagcaaa

SEQ ID NO: 184340 - DNA, 90 bp, Homo sapiens
ctcgctgtgagacatgtctgagactcctgctcagtgtagcattaaggtgttacagttcgagtgcctcaaacaaccacatatgttgtaaac

SEQ ID NO: 184341 - DNA, 99 bp, Homo sapiens
gaccgcaggctgaccccgcagcggccgggctgtcgcggcccccacctcagatactaggggcaaacgagacagagaaaaggactcaagagaagaacgaga

SEQ ID NO: 184342 - DNA, 75 bp, Homo sapiens
atcagcatttgtttcccttagccagcccgagcaagtaaagattggaatgttacgttcataacttactaaggatta

SEQ ID NO: 184343 - DNA, 83 bp, Homo sapiens
caagtatgcgcccagcggattctacattgcctccggagaatcctaatgtacctggctagctggtggtgagtaggggctttggg

SEQ ID NO: 184344 - DNA, 100 bp, Homo sapiens
gcggttctgagagcttcagagagcgatggaaagcgattactacagcatcccatttcccacacccactactccgctgactgggagggatggtagcctggcc

SEQ ID NO: 184345 - DNA, 100 bp, Homo sapiens
ccgacttgccggcagaacttacgctgcgggaccccgggcactgttgctgctgcgggagattgaagctggacagtactgcacttttgtcatttctacggat

SEQ ID NO: 184346 - DNA, 74 bp, Homo sapiens
cgcgccccgcgcagctgagcgctgccgccgccgcagcaggagtttcaattactgaaaattacttggaaatagaa

SEQ ID NO: 184347 - DNA, 100 bp, Homo sapiens
aggtgcgcagcagaaagcatttaaccagcatggctacttcatattttggaaagcagtttttaagacaagaagaatccccagcacaagatagaatatagac

SEQ ID NO: 184348 - DNA, 50 bp, Homo sapiens
gggagttacaccgccaccgccaggtgcatggaggactgcaacagaggagt

SEQ ID NO: 184349 - DNA, 103 bp, Homo sapiens
gcaagctctccctgccgtggctgctcaacaaggagctgggctgcatcaactcgggggatatgagactttctactcggaatatcctgagtgttgcgtggatgta

SEQ ID NO: 184350 - DNA, 100 bp, Homo sapiens
gagaccttctcagagttcctcgatgtggccggtcgtgtacaacgtgggactctgcatttgtctgtttgatatcaccaaactggaggatgcctatgtattc

SEQ ID NO: 184351 - DNA, 80 bp, Homo sapiens
ggatggcacccgaggtcatcaaacagtcggcctatgactcgaaggttgaaaggattgttgacaaaaggaaaaataaaaaa

SEQ ID NO: 184352 - DNA, 75 bp, Homo sapiens
cagtcccacatcgaaggctgggaggatggtcatccagaggataagccaacgcacatcatcttcggttctgacagt

SEQ ID NO: 184353 - DNA, 83 bp, Homo sapiens
cttggctctgggagacctgctgcacatcgtcattgacatccctatcaatgtctacaaggactggaatgtcacgtggaatacca

SEQ ID NO: 184354 - DNA, 97 bp, Homo sapiens
gctgaggcaagtggatcccttgggcctaggacttcgcgagaccagttgggcaacatgacatatctgaagagatggattaagaatgctttggattaag

SEQ ID NO: 184355 - DNA, 90 bp, Homo sapiens
tcagtgtacaacgccaacattaacctgttctgtgtggtcagttttgtccatcatggaactgtcctggattgtgaggagaaagactgggac

SEQ ID NO: 184356 - DNA, 75 bp, Homo sapiens
ccatggccaactccttcgtgggcacgcgctcctacatggctgcctacctgggactcctggagctgtcagccgccc

SEQ ID NO: 184357 - DNA, 74 bp, Homo sapiens
ctatccatctctcgaagacttgaaggtagacaaagtaattcaggcatttatgtttgaatcatctttaagtctgg

SEQ ID NO: 184358 - DNA, 74 bp, Homo sapiens
ccggcccacagtgggggtgtgcaaacccgagagaactgggcatattgtattttagcaggatcattagtatctga

SEQ ID NO: 184359 - DNA, 100 bp, Homo sapiens
ctgaaaacagaaggaaattgaaggaacttggagttaatggtctaatttatgatagatatgaggccccaggattcctggcgaggtcctcctccccttttcc

SEQ ID NO: 184360 - DNA, 114 bp, Homo sapiens
ctcagatttgtgttgaaaccagcctcaagtttcacctatcctcactgatccgtggacttctgtatgatcagtaccttctccaggcaaattccgttcccctgcagcaccatctcc

SEQ ID NO: 184361 - DNA, 90 bp, Homo sapiens
ctcaaggacacggtctacaccgacttcgacgggactttgaacatgtcggggatcgccctcagcagactcgcccaggagaggaaagcatgg

SEQ ID NO: 184362 - DNA, 83 bp, Homo sapiens
cttggactgagtcctgcaggacacagggtcatcacactgaaacggtgttcaaccgggttttgccagggcctattgcaccagag

SEQ ID NO: 184363 - DNA, 107 bp, Homo sapiens
cgaaggctgtgcggtctgccaggagctgcggccccgtccggcccgggctggagaaccaggtgcatcagcgcattgcggagctgaggaaagcaggtctgtggtcccag

SEQ ID NO: 184364 - DNA, 75 bp, Homo sapiens
gaaagaattaccactaccaagaagggatctatcacctctgtacaggccatccactgcagagcaatccttccttgt

SEQ ID NO: 184365 - DNA, 98 bp, Homo sapiens
gtcagttccacaccagtgcctcagaggtccatggcagtatcccagccaaatctcgcttcaaaagcagtggactgtcttttggattcaaagtgggcaaa

SEQ ID NO: 184366 - DNA, 100 bp, Homo sapiens
ccttactggagcaagagaaagacccttgggtgataaaaggagggatgaacagaggcctgtgcccaggttccttcatgttgcagcgtgtgtcagagctgtc

SEQ ID NO: 184367 - DNA, 75 bp, Homo sapiens
gtcttttacttacaaagatgatatacaaactccgaagtttgtaccttcatcaagtggagacggggtttcactgtg

SEQ ID NO: 184368 - DNA, 97 bp, Homo sapiens
cccccggcttgtgagtggatgggtaaaacctatcatcataggtcgtcatgcttatggggatcaagtgtcgaagcaggccaaggagtttctggagtac

SEQ ID NO: 184369 - DNA, 75 bp, Homo sapiens
gggaaccctggtcaccgtctcctcaggaaccctcagtgctgcgtctagattctgcaggggaggtttgctgggacc

SEQ ID NO: 184370 - DNA, 74 bp, Homo sapiens
acaagattaccttcttaatggacctcctgatacaccagttgacgcaattaccagctctggctgggtcgccacaa

SEQ ID NO: 184371 - DNA, 74 bp, Homo sapiens
atccaggccgccggcattctcctccggctgccgcagctttccgcttggccctcatccagcttcagatttcttcc

SEQ ID NO: 184372 - DNA, 97 bp, Homo sapiens
ggacaggcgttacgagttcaaagggctccacaagatctccagatcacactaagtttgtgggaagcttcaaaaccaaacaagacttcatagatttgat

SEQ ID NO: 184373 - DNA, 95 bp, Homo sapiens
aaataagaaggaacccaaagaaccatctcccaaacaggatggttctagtaaataccgcttgctgtgttttgatgttggtggctaagctcatccag

SEQ ID NO: 184374 - DNA, 96 bp, Homo sapiens
ccacagcaggttggacagttcacaggaaagtgggaggtagaggaaatgaaggagtcaaagcttccaggtgataaaggacttgtgttgatgtctcgg

SEQ ID NO: 184375 - DNA, 75 bp, Homo sapiens
actggaaactgattggaaactctttgggaaagccactcgaaaaggtatggcatttcaaatatagatacaaccatt

SEQ ID NO: 184376 - DNA, 100 bp, Homo sapiens
gaacctgggacccccaagcggtgtctctcatcctgactggggatccagagtaggagggagcctttggtgggctcttcccctccccactgcagaccctctc

SEQ ID NO: 184377 - DNA, 100 bp, Homo sapiens
gggttctgacaagatggccgggctgccccgcaggatcatcaaggccgtcaccgatgggttgtatatactactgaaatgaatggcaaaaacacattctggg

SEQ ID NO: 184378 - DNA, 74 bp, Homo sapiens
ctacaatcttctctgacctgcaagaaaatgctgaagatggaactgaagcattttctgcattagcaaatatcgac

SEQ ID NO: 184379 - DNA, 134 bp, Homo sapiens
caaatactcagctccaatctgaggcaacccaacataaatctccagtgccccaagagtcacaagagagagaatggagatttacagacagtcatctgggtggaggacacccttttgggatcagcactgaaagtgac

SEQ ID NO: 184380 - DNA, 83 bp, Homo sapiens
gttggcgacggcagcccgagggcggcgcaaggcctgaggcccagcacagacaatgcagatcttcgtgaagactctgactggta

SEQ ID NO: 184381 - DNA, 75 bp, Homo sapiens
cactggctcacctttaggcttctgacacttttacctacgaacattaaccaggtggtatttgttggaaatttcttg

SEQ ID NO: 184382 - DNA, 74 bp, Homo sapiens
gggaaggcgcgagtgaggaaaggaggtactgtaggtgatttgtggagctatgatttcttcagtggtgaatttgt

SEQ ID NO: 184383 - DNA, 73 bp, Homo sapiens
ctgcgttcacggcaggattcggttagtctgcatgaagaaatcagtgatttttatgaatacatgtctccaagac

SEQ ID NO: 184384 - DNA, 111 bp, Homo sapiens
gacgtaggagaccgaggaaagtgtgtgggaggcgttgacctgccccttgtcctggccccggtgagaagccctaccactgcaactgggacggctgcggctggaagtttgcgc

SEQ ID NO: 184385 - DNA, 113 bp, Homo sapiens
aaagcagcatagagaatgagatagccgtcctgagaaaggaccagttactctccacaagaaaattcacacaaccacagtgctcttcatagttcaaattcacattcttctaatcc

SEQ ID NO: 184386 - DNA, 74 bp, Homo sapiens
ttggggcaaaatgtggacaagggttccttcaatggtgccttagctgctgttcctgtccaggacctgggctccac

SEQ ID NO: 184387 - DNA, 98 bp, Homo sapiens
cagaactgagcccaggccacagtaccctattcacgctctgtgcttgtgccaaggtgctggagaatctggtaaaagcaccattgtgaagcagatgagga

SEQ ID NO: 184388 - DNA, 100 bp, Homo sapiens
ctacttgcagcatattacctatcaggagaggagatgatctcaatgccacccaccaacactgtgttttggccggttcacaacctcggtttagttccaccca

SEQ ID NO: 184389 - DNA, 82 bp, Homo sapiens
ttcggcagtccacccaccgccgccgcctcccagaacaccaccgatagccacaccgaagagttctcccatttgctggttcccg

SEQ ID NO: 184390 - DNA, 88 bp, Homo sapiens
caacccgcgccgcgccgcgccgcgccgtaatctatgccagcaattatgacaatgttagcagaccatgcagctcgtcagctgcttgatt

SEQ ID NO: 184391 - DNA, 82 bp, Homo sapiens
accctccaactttgcgacggaaatgtgtcatcgaaagccagacgaagttatacggaagcgtctcctcattgatggagatggt

SEQ ID NO: 184392 - DNA, 83 bp, Homo sapiens
aaggaacgaggcaaggagctaaagcagcgtgcgttcagccctgggcctcctccagctggtgatctcgggtcccgtgcagcagt

SEQ ID NO: 184393 - DNA, 90 bp, Homo sapiens
gtggaaacagcagcagctggttagtgcaggaatcacagccatggcccccaccctccaggatttggtcgatatggcatctgtgcacatgaa

SEQ ID NO: 184394 - DNA, 90 bp, Homo sapiens
cgggctccgtctcaggggctgaagtttgtgagcattttccaagccaccacagtgattcagctgcttcctctcctgcatctcctatggaaa

SEQ ID NO: 184395 - DNA, 53 bp, Homo sapiens
cagatttttccaagaattaccaggctcagatccggtgtttaaagccgtcccag

SEQ ID NO: 184396 - DNA, 78 bp, Homo sapiens
tcgtcatgctctttgtagcgtggtgcttctgttgctcacagaaaacgttgtgtgacgtgatcctcatggtccaggaaa

SEQ ID NO: 184397 - DNA, 82 bp, Homo sapiens
accgctcgctgcagtccgagaacgccgcgctgcgcatctccaacagcgacctgagcggcctccaggcccaaggtcagcatcc

SEQ ID NO: 184398 - DNA, 100 bp, Homo sapiens
cagcagccgtccggagccagccaacgagcggccgaatccgggtgcatggtattggcgggggccacaagcaacgttatcgaatgattgactttctgcgttt

SEQ ID NO: 184399 - DNA, 87 bp, Homo sapiens
gagttcctcatggacctcgaagatgtgtggttccccaggccattgagggttacacatcattttggaatgactgtatatcatctggat

SEQ ID NO: 184400 - DNA, 75 bp, Homo sapiens
gtcattaggatgctgtcctacggaaggagagctgcatgatctgattgcagagaccccatatcatgtgaacctcct

SEQ ID NO: 184401 - DNA, 90 bp, Homo sapiens
ggcccaccctggagtaaccctcactggagaatccagaggatgctttcattggatttggaggaaatgtgatcaggcaacaagtcaaggata

SEQ ID NO: 184402 - DNA, 83 bp, Homo sapiens
cgacaagccgctggcagccgcggatctcaccgccgctcaggaaatgctttgtggtctacagccacaccaccccaaatgtgcct

SEQ ID NO: 184403 - DNA, 80 bp, Homo sapiens
agccctgggtcgcttggaagaagccaagattgaaaaggctgtggtgtctcagcgcctgacagaatctccgtgtgctttgg

SEQ ID NO: 184404 - DNA, 90 bp, Homo sapiens
gaatggaaagatcctttcatccagaaagtccaagatgattggatgaaaggtctgcaggcattttgcaatttacggaaaagtagtccaggg

SEQ ID NO: 184405 - DNA, 98 bp, Homo sapiens
ttccagaagctcttcagcaagaggaccgggctgggcgcgcccggccgcgacgcccgggacccagattgcgggttcagtaatggaggggaaagttccag

SEQ ID NO: 184406 - DNA, 90 bp, Homo sapiens
ctaatcccccaacgaggaaggaaggagcagttggttcaatctctggaatcctgctgcatcacagaagctggaagttctgatgttccactg

SEQ ID NO: 184407 - DNA, 100 bp, Homo sapiens
gggcgtggacggtgtggggcggtcccggccccgcagggtttccaggcctgaggtgcccgccctggccccaggagaatgaaccagccgcagaggatggcgc

SEQ ID NO: 184408 - DNA, 100 bp, Homo sapiens
cgcctggacactcgcggggcgccgacctggcagggtctgtccacgttctctgtgggttcattgccggacttgagtctgagttcatggagactctgtcgga

SEQ ID NO: 184409 - DNA, 98 bp, Homo sapiens
atcagactcgtgtgaaaggatccctcaaacgtctttttacaagggaaacggttccacgaagccttggaaagcatactttcaccccaggaaaccttaaa

SEQ ID NO: 184410 - DNA, 74 bp, Homo sapiens
atgggaaagtggcaggcccaccaggtgcagagggccaggaagagcagcaggtggcagctgccaacaagaagcat

SEQ ID NO: 184411 - DNA, 100 bp, Homo sapiens
agaacaacgagttcgtggaagtggaaactaatctggattcactccctctggttgatacccactcaaaaaggacacttctgattaagacggttgaaactag

SEQ ID NO: 184412 - DNA, 100 bp, Homo sapiens
caagaatccaaagaaaacaaaatggtggtatcatggaactcgctttgaacgcttgcttatgagaataggacatcaatcaaagaatgccccagtggagcta

SEQ ID NO: 184413 - DNA, 74 bp, Homo sapiens
gcaagccggtgcagcagccttcagcttttggcagcatgaaagttagcagtgttatccacgtgaccaaggaagtg

SEQ ID NO: 184414 - DNA, 83 bp, Homo sapiens
cgggggagcggccttacagctgctctgcctgcgtacttggaccatgagactgtttcagccactttcatcgacagcagtggaca

SEQ ID NO: 184415 - DNA, 100 bp, Homo sapiens
cgaacgtgttgtgcctgctgaggatggccggaggctcgccgacgaccttggttacgaagtgacagtgctggtgcgggactcctccaggctgccatcagag

SEQ ID NO: 184416 - DNA, 153 bp, Homo sapiens
agaccatgtactgcgcatacacaatcccgggcatgggcggcaactctttgatgtactactataatgggaaagcgtgtgaagcctcagtttaggtcatctggtggttcagaacactcaacagagggctctgtatccttgggggatggacagttg

SEQ ID NO: 184417 - DNA, 100 bp, Homo sapiens
ctcaagggcttcagcaccgcgcccatggcagagccagaccgtcatcatcagatttgaaatatttaaagtggatacaaaactatttcagcaatgcagacaa

SEQ ID NO: 184418 - DNA, 101 bp, Homo sapiens
actcgactttggagaaaccaccgtgctggaccgcttttacaatgcaggtgactgcttagaaaactgcacagcatctgatgaaattagcgaataagaacatc

SEQ ID NO: 184419 - DNA, 82 bp, Homo sapiens
gcattcggccccggacgaaggtactcgcagcacttggagcgcagaaccggccgcgcccgatataagagttcggaccgcccag

SEQ ID NO: 184420 - DNA, 100 bp, Homo sapiens
cccccaaaagttgtcaggttgaaaatggaagagtaattgcctgctttgattccctaaaggtacaatccttggatttaccctccgaccatacagaatgagc

SEQ ID NO: 184421 - DNA, 100 bp, Homo sapiens
aaaaaaaggagcttgccttctgagctttgtaccaaagacctgggaaaattgatgcggatgaaattaaaaggctaggaaagagatttaagaagcttgattt

SEQ ID NO: 184422 - DNA, 100 bp, Homo sapiens
cggtgagggaaagatgagcgaggagacggcgacttctgacaacgatttgctgaggctaaacactatcatgccaagttggtgaatataagaaaagagatgc

SEQ ID NO: 184423 - DNA, 83 bp, Homo sapiens
ctgccactgtcttgttccgaggcggccccagagcatcaacgacaactttctttgccacttacacaatctaagtcatctcccaa

SEQ ID NO: 184424 - DNA, 100 bp, Homo sapiens
gttacgccatggaaaccgctctggtcacaccaatactgttgcagattgtggactgctgggacgggcccgatgggaagccggtcatctaccatggctggac

SEQ ID NO: 184425 - DNA, 97 bp, Homo sapiens
gttggaccttccggagcttctcagaagacagagggttttcttttgaggatttgacgggatctgaactatacacccaggcggccagcctcctgcatcc

SEQ ID NO: 184426 - DNA, 90 bp, Homo sapiens
ggaggattgactgctgctggggctgggctcgccagtcttggggacagtgtcagcataccatgtttgtgtggaagtgccccgtgtttgcta

SEQ ID NO: 184427 - DNA, 123 bp, Homo sapiens
agcgaagggattcgaggcccatcaggcctgcctggctcccctgggccaccgggacctcctgggattcagattatgtttgagaccttcaacaccccggccatgtacgtggccatccaggccgtg

SEQ ID NO: 184428 - DNA, 75 bp, Homo sapiens
ctcggactcaaacgtccagtcctcgtgcgaccgcgctgggtcggaagtgagcagttttgcagagggcaagcaggt

SEQ ID NO: 184429 - DNA, 100 bp, Homo sapiens
ggacccaaagtgccatgtctttaatttgctctaggtcgtaaccagcctttgaaaaaggagaaaccaaaatggaaaagcgattatcctatgacagatggac

SEQ ID NO: 184430 - DNA, 97 bp, Homo sapiens
gagcgaggcggggccgccggggccgccatggagcccgactcggtgattgaggacaagaccatcgagctcatggtgatttgatgaaggctgctgcagg

SEQ ID NO: 184431 - DNA, 98 bp, Homo sapiens
ttagaggagtatttcctgaactgtgtgggtaggctactctttggagcccatctatggtttgtggtatgaccactcctccaacttctcctggaaatgtc

SEQ ID NO: 184432 - DNA, 88 bp, Homo sapiens
ggaggcagagcggctgccatgtaatctatgccagcaattatgacaatgttagcagaccatgcagctcgtcagctgcttgatttcagcc

SEQ ID NO: 184433 - DNA, 75 bp, Homo sapiens
gtggcacagtggagcagctctgaagatgcaaagaagtgggagagcgtgaaactcctgtttgtgaaaactgagaaa

SEQ ID NO: 184434 - DNA, 90 bp, Homo sapiens
ttctctgaggcggcgagagatggtcaggtctggagctcgaccgggccagcctctgtttctctaccttgctctccagtctgtgcatgagcc

SEQ ID NO: 184435 - DNA, 112 bp, Homo sapiens
ggtggcttggaataagctataagggaattggccaatatgatatacaagacaaggtgaagcctcggaaggtttctgagtcccttcaacatgatcctgggaggaatcgtggtgg

SEQ ID NO: 184436 - DNA, 100 bp, Homo sapiens
tggccgatgaatcacccaacatgctggtgtacagaaaggcaggtgacaaacattaccaccccagctgtgcacgatgcagcagatgcaaccagatgttcac

SEQ ID NO: 184437 - DNA, 75 bp, Homo sapiens
agctatatactttggttacctatgtacctgttaccactttcaaaatgaaaatgcctcgtgtaaaagcagctcaag

SEQ ID NO: 184438 - DNA, 75 bp, Homo sapiens
atcaactgtggccttaatgagcatgttgacagcatcgatgctagacagacaatggagtttcactcttgttgccca

SEQ ID NO: 184439 - DNA, 100 bp, Homo sapiens
gcccggaacccgaacaacatgcaggtcctctataccgcactgcagcacagctcagagctggcgcccaaggcggcccgtgcggcggagcagctgagagcct

SEQ ID NO: 184440 - DNA, 74 bp, Homo sapiens
tgagagcctcacgagtcgaggtcctgcaggtggagctccggcagccgccctgtctttaacacctctgtgtgaag

SEQ ID NO: 184441 - DNA, 100 bp, Homo sapiens
ctaacagggctgaccggcacccacgaccgacaagtgaagctcacctttcgaggggccggccaggacgtgggccgaagctgcatcctggtctccattgcgg

SEQ ID NO: 184442 - DNA, 82 bp, Homo sapiens
ctggtgggccacgcgctgctgatgaagccggacgggcgagggttccgagtctgaggaagacataaccttgtgcctgcctgcc

SEQ ID NO: 184443 - DNA, 97 bp, Homo sapiens
tgattttgaattttttggcagcagaagggcgactgagtactcaacatattgactgtatttgggctgcagcacagctggtggagctgtctaaggctca

SEQ ID NO: 184444 - DNA, 83 bp, Homo sapiens
cttggactgagtcctgcaggacacaggtcaaaatgcagatcttcgtgaaaacccttaccggcaagaccatcacccttgaggtg

SEQ ID NO: 184445 - DNA, 98 bp, Homo sapiens
gacgccgggacaccaagaagcagggaaatggtcaacgctgctcttctgagccgctgtcgagtgattgttcttgagaagcttccagtagaggcaatggt

SEQ ID NO: 184446 - DNA, 75 bp, Homo sapiens
aacacaagcaacagggggagctgtacatgtgggattccattgaccaggatccttactttagaatgacaagggacg

SEQ ID NO: 184447 - DNA, 88 bp, Homo sapiens
gatgttggagaactatagcaatctggttttcttggttgatattcactgatggactccaaagaatcattaactcctggtagagaagaaa

SEQ ID NO: 184448 - DNA, 100 bp, Homo sapiens
gtcaagatggaggggcctttgtccgtgttcggtgaccgcagcactggggaaacgatccgctcccaaaacgaaacatttctcaagtgtctacatgttctag

SEQ ID NO: 184449 - DNA, 90 bp, Homo sapiens
ggagtagcaagtggccatggggagcctcagcggtctgcgcctggcagcagctgtcccctttcctccaacccaacggcttactttcaagga

SEQ ID NO: 184450 - DNA, 98 bp, Homo sapiens
gtcgtgaagaagcaggaggctaagaaagtggtgaatcccctgtttgagaaaaggcctaagaattttggcattggtgctgctgatgtagagaaggtgga

SEQ ID NO: 184451 - DNA, 101 bp, Homo sapiens
atttcagcctgcacggatggtcttgaaacacaaatggtttttgtactatactggcaattgctggagaagattttgcaattgttgcttctgatactcgattg

SEQ ID NO: 184452 - DNA, 63 bp, Homo sapiens
tatgagtacctttgtcatttggaagaagcgaagagatacactctgtgcagttttagagagaga

SEQ ID NO: 184453 - DNA, 83 bp, Homo sapiens
cgatatgataaagacgatgaagccccctctgatgggagcccagattctacctctccttccagcagtcctactttctggaacta

SEQ ID NO: 184454 - DNA, 100 bp, Homo sapiens
caaccgtacatttttctttgatgtgcacccgcccctgggaaagatgcagctgtatccaagaaagccagcccagaggctgccagcactcccagggacccta

SEQ ID NO: 184455 - DNA, 100 bp, Homo sapiens
cgccggggaggcagcgcgggatcccagcctcaggcgtgcgcggacggtgtgcgggcagcggcggcggcggcagcggtggggaaaagcggattccgccccg

SEQ ID NO: 184456 - DNA, 100 bp, Homo sapiens
gcgaggcggggccgccggggccgccatggagcccgactcggtgattgaggacaagaccatcgagctcatggttgccaacttggcctgttccatctcaaat

SEQ ID NO: 184457 - DNA, 100 bp, Homo sapiens
tgtcgtcaattatttccgaaccgtgggatttgaggagcaagctagtgcttttcaggaacagtgatatcagtatcaagataaaagtttggaatgggagaaa

SEQ ID NO: 184458 - DNA, 90 bp, Homo sapiens
aaccatctcccaaacaggatgatgatgattattctccaccgtctaagagaccaaaggccaatgagctaccgcagccaccagtcccggaac

SEQ ID NO: 184459 - DNA, 100 bp, Homo sapiens
agctgagtggttgtgtggtcgcgtctcggaaaccggtagcgcttgcagcatggacctcagcagccatgtcgaagccccatagtgaagccgggactgcctt

SEQ ID NO: 184460 - DNA, 51 bp, Homo sapiens
cagctggccaacagtggcaactttggaaacatgatgagcaaggagaagcga

SEQ ID NO: 184461 - DNA, 100 bp, Homo sapiens
tcactgggggtacggcaaacacaacggtggtattaaagataatcaaacattatcaagaagaaggacaaggaactgaagttgttcaaggagtgcttttggg

SEQ ID NO: 184462 - DNA, 75 bp, Homo sapiens
actagccaatgccatgatgcctggtgccccattacaacccgtgtgcaagtggtgacccaggatgaaagagagcag

SEQ ID NO: 184463 - DNA, 100 bp, Homo sapiens
gtactgcgacgcctgcctcggcaaaggttcgtgagccacacatctccccacaccaagctcctccatacaagacctcggactgcatcacgtaaatgctttt

SEQ ID NO: 184464 - DNA, 100 bp, Homo sapiens
cgtggttgctgaccagttgaaagttcccagtgacctgacagcagaggagcgtcaagaactggagaacatccgacggagaaaacaggagctgctggctgac

SEQ ID NO: 184465 - DNA, 75 bp, Homo sapiens
ggtgaatttccatgtcaacatagtcctgatggagtgaaggtacctgagcgcaggaaccatggtcttcattgctgc

SEQ ID NO: 184466 - DNA, 82 bp, Homo sapiens
atggcgaccggagcgaacgccacgccgttggagctgcacagcaagttacagtcctccgaggcggaggtgcgcagcaaatgcg

SEQ ID NO: 184467 - DNA, 98 bp, Homo sapiens
ccagaagtcaaccagaccaccttataccagcgttatgagatcaagatgaccaagtttctcaactcattggatgctaaagaaatatatttggaagtaat

SEQ ID NO: 184468 - DNA, 72 bp, Homo sapiens
cctgaggagtccccgctgcttggagtagctcggagaggaggaaggagaagtcccgggatgctgcgcggtgcc

SEQ ID NO: 184469 - DNA, 100 bp, Homo sapiens
gacaaaccccacctggtgagcctgggcagtgggcgactcagcacagccatcaccctcctgccgctggaggaagaaaccccaatgatgggaatctgccctg

SEQ ID NO: 184470 - DNA, 135 bp, Homo sapiens
gaggccgtccagcagatggcggatgccctgcagtacctgcagaaggtctctggagacatcttcagcaggggagctggagaagcagcagggaacaaagacactctccttcaagccctgcggagcccagggggaccc

SEQ ID NO: 184471 - DNA, 100 bp, Homo sapiens
acccgcatcaagaaaatctccatcgaagggaacatcgtgttcctctgaacaacagggagaatatctctgatcccacctcaccattgagaaccagatttgt

SEQ ID NO: 184472 - DNA, 82 bp, Homo sapiens
agattcagaaggagcaggattaccaaagggaacgtcaaggtcgtgggaaataaaaggcagttctacacagactgcagcaacg

SEQ ID NO: 184473 - DNA, 83 bp, Homo sapiens
cagcttcggaacaagagaccctgggacttccttccccgcggttcaggaatcgtcacccggcggcctctcattctgcagctcat

SEQ ID NO: 184474 - DNA, 90 bp, Homo sapiens
cggaaaatcacacctcttatgtcagcatttcgcaaggtgctggagaatgccgaaggtgccagaaccaccccttcagttgtggcctttaca

SEQ ID NO: 184475 - DNA, 100 bp, Homo sapiens
gctgcgtggggatcagcttttctactacaaggacaaagatgagatcaagccccaggcatcagaacacaccatgatggctgtgacctaagaccctcaggaa

SEQ ID NO: 184476 - DNA, 80 bp, Homo sapiens
ctcaagcctggagactcgcaacaagatcccctatgagagtcccatcttcagcagaggagcgagcccagggcgtggtgctg

SEQ ID NO: 184477 - DNA, 90 bp, Homo sapiens
ctgagggactcctgcagacatggctgttggagatgaaccttgttcatgcaccccagccatccaacatattctttacaatggatgatgtgg

SEQ ID NO: 184478 - DNA, 76 bp, Homo sapiens
tgcgtctttgctcccggagcgcttgaaggagctgcgggtacagaggtgcagttccatggtacaccataaatcttga

SEQ ID NO: 184479 - DNA, 100 bp, Homo sapiens
ctggcctgttgcagccatggtgcattgcagttgcgtgttgttcagaaaggtgtggagccggagccttttgaagttggagaccacctgactgaggctagtg

SEQ ID NO: 184480 - DNA, 75 bp, Homo sapiens
tgaacttagctcgacggggctgaccgctctggcccagggtgttacagaatgtctgaaggggacagtgtgggagaa

SEQ ID NO: 184481 - DNA, 75 bp, Homo sapiens
gaagagctgcagtctttgtgggacaagcccgtggaccgggagcccgtggaccgggagccggtggtgtgccacccc

SEQ ID NO: 184482 - DNA, 75 bp, Homo sapiens
gccattgtgaaaaagctgcctattgttgaaactctgggagaggccccctttcatccctgaaggagtggtggctcg

SEQ ID NO: 184483 - DNA, 75 bp, Homo sapiens
agtcgtgtgtactgctccttggccaagaatcctggtaattgatgtccacccgagaaatccctgcagatgttccag

SEQ ID NO: 184484 - DNA, 50 bp, Homo sapiens
cgagccggggcgaagctggatcccctagaactacaggatctcatgcacat

SEQ ID NO: 184485 - DNA, 82 bp, Homo sapiens
ctgctataaattcaagatgattttgttgtccaagaaatggcgatgccagtccctccactccagaggagaacgaaaccacgac

SEQ ID NO: 184486 - DNA, 82 bp, Homo sapiens
cccaggtgtaagcgcagaaagcaggcgaacccgcggcgcaataacggagcgcagctcagctgggctggaactgccctcctgg

SEQ ID NO: 184487 - DNA, 100 bp, Homo sapiens
gccgaacgatgtgcgagaactgcgcagacctggtggaggtgttaaatgaaattcctccgtgtcacaaagcagtacctgccccacgtggcgcgcctctgtc

SEQ ID NO: 184488 - DNA, 75 bp, Homo sapiens
gtgagcctcccgcccaaggagaatgcgctcttcaagcggatcttggtgggtcatgataactgggtacgtggagtt

SEQ ID NO: 184489 - DNA, 90 bp, Homo sapiens
caaataaaacactgatctcaaacagcaacggaacctgtgtacttgaggatctcaaagatttcatgagacaagctggggaagtaacgtttg

SEQ ID NO: 184490 - DNA, 90 bp, Homo sapiens
cgggacagcgcggcggggagcgacgatattgactcggagacaaaaagaggccaagaccaagagtgacagtgggacagctgcccagacttc

SEQ ID NO: 184491 - DNA, 78 bp, Homo sapiens
atgcggctcaagtaccagcacaccggcgccgtcctggactgcgccttctaccctgagaaatggaataagattaaacta

SEQ ID NO: 184492 - DNA, 100 bp, Homo sapiens
tggccgagcaggctgagcgatacgacggttctgggccggagaaggggcgacgttcgggcaccccccgaatggacaatctttccttctgtcaacggcaggg

SEQ ID NO: 184493 - DNA, 99 bp, Homo sapiens
gcgcggcactacagcggccccggcccggcccccgcccggccccggcgcaggcagttcagagctccactggttcaacagcctctcctccagtttcgaccc

SEQ ID NO: 184494 - DNA, 99 bp, Homo sapiens
ccgatggctcctcagcggagggccgcaaccaaggcgcccgagggcaacggagcggccgagcgccggaaccggagcagagacggagtttcgtcatgttgg

SEQ ID NO: 184495 - DNA, 82 bp, Homo sapiens
gtctcttcgtgttctcgctcactcttacaggacaaattgcagaaaatcttggagaagaagagcagttggtccaaggcttatg

SEQ ID NO: 184496 - DNA, 50 bp, Homo sapiens
ccagcctgcggagcctgtggggcagcttggcttgtggagatgttgaagga

SEQ ID NO: 184497 - DNA, 75 bp, Homo sapiens
aaaaactcattgtttctgcgtggtataataaggaatattcaacgaagcagctgaccaatctggtgaatgtttgcc

SEQ ID NO: 184498 - DNA, 98 bp, Homo sapiens
gctcgcaacattatgctgttgaaaaagaaacaagcccgctgtcagggagtagtttgtgccatgaaggtgtttgatgcgatcatgaatttcaagaaaga

SEQ ID NO: 184499 - DNA, 83 bp, Homo sapiens
ctctcggctgccgaaggacaagccccgatatctgatgggggttgggtcagcccaaggccaaccccactgtcactctgttcccg

SEQ ID NO: 184500 - DNA, 100 bp, Homo sapiens
agtcccttcgagtttaaagtggccctgagttacatgagcatgcagcataccttgtggatagcatgtgggactgtgctactgagctgctgaaagactggga

SEQ ID NO: 184501 - DNA, 100 bp, Homo sapiens
caactggtacaatttcacaccgctggcccggcatcgcacgctcactgccgaggaggccgaggaggagtgggagagaatggctgttgatggtgggtgtggg

SEQ ID NO: 184502 - DNA, 90 bp, Homo sapiens
agatggcattacgaacctttggccacttggctctacacccagagcgcctacaagaatgagctcctgaccaccacagtgcccgagatccag

SEQ ID NO: 184503 - DNA, 75 bp, Homo sapiens
ctaaggccattggacacagaatccgagtgcttagagtatacttgcgaacatcaaatctggacaatgcctttgctc

SEQ ID NO: 184504 - DNA, 100 bp, Homo sapiens
cggaggcggcgatggagggagtcagcagccaccggaccctgtcttacagccgctggagctatgacaggcctctctgctgatggtggtgccaagcgccagg

SEQ ID NO: 184505 - DNA, 83 bp, Homo sapiens
cacggtctgggccgccgaatctccggccgaagagcggcggcggcagcggcggagctctttgttcaatgcctagccacctattc

SEQ ID NO: 184506 - DNA, 82 bp, Homo sapiens
tggagcctcagttggaagcagccgatccagcctgcggagcctgtggggcaggaggagaacatttgcctgcactgggcggcgt

SEQ ID NO: 184507 - DNA, 60 bp, Homo sapiens
gcctgccgccccattatgatgatgtcgagatttctaggatgtacaatattgatgcagttc

SEQ ID NO: 184508 - DNA, 75 bp, Homo sapiens
cgacaagcacacactatggcgctgaaacggattaataaggaagaaatctttcctgttttctgctctgtatgctgc

SEQ ID NO: 184509 - DNA, 74 bp, Homo sapiens
agcgggagaagatggacaagagaaagctcgggcgacggccatcttcatccggaatggaggatctttggttccat

SEQ ID NO: 184510 - DNA, 100 bp, Homo sapiens
agtagccaaggattctggaaaactggcatccgttctgatgtctgtcagctcactacacgtgctcagcttggtgcaaaatcagaacagttgctgaagaaag

SEQ ID NO: 184511 - DNA, 88 bp, Homo sapiens
gaatctgaaaaaaagagaaacctgggtgaactttcacggacaacctcagaggacaacgaagtgttcgttactgtaaaatggggaaagg

SEQ ID NO: 184512 - DNA, 82 bp, Homo sapiens
ggtggggattgacagccacgggaagcaaaatgatgcttcaacacccaggccaggtctctgcctcggaagtgagtgcttctgc

SEQ ID NO: 184513 - DNA, 88 bp, Homo sapiens
cttgcgctacgccctggatgagatgcttcccatcgacggtcagtgcgcacgttgtaatcagctgaggccatgtcaggagacggagcca

SEQ ID NO: 184514 - DNA, 100 bp, Homo sapiens
aacatgacagaggaccatgtgatgcacctgctccaggggaacactgtgaagaacatgttgcttttttcaaacagatttttggagaccaagctctaatgag

SEQ ID NO: 184515 - DNA, 75 bp, Homo sapiens
ctaaggatcaccagcttctacctataagacttcaactcaagatgcagctcttcatgtggatgtctgagctcatat

SEQ ID NO: 184516 - DNA, 100 bp, Homo sapiens
attggatttaaaagacagtcctcgtcagcactgactttcagctatggaatcggctgcttctgatgcttggaagatatcctctcagccacaaagatggtaa

SEQ ID NO: 184517 - DNA, 75 bp, Homo sapiens
ctccaagacttccctcagctttcagggtgatgcagaagatggggaagaatatgatgacccttttgctgggcctcc

SEQ ID NO: 184518 - DNA, 101 bp, Homo sapiens
cacttggccgaggctctgcaccaggcccggctgctggccctcctggtcatcccgcctgccatcacccccgggatgggcgggatccccgctgtgaacggccg

SEQ ID NO: 184519 - DNA, 100 bp, Homo sapiens
tcagagacttctgtgacaacagatcccatacagtggtccacagaccaagtcctgcattgggtggtttgggtaatgaaggaattcagcatgaccgatatag

SEQ ID NO: 184520 - DNA, 100 bp, Homo sapiens
ctgaaggaatgctggcagacaaaataggaatatttccaatttcatatgttgaggaccccaggagcaagcacaagttcaaaatccacacttacggaagccc

SEQ ID NO: 184521 - DNA, 82 bp, Homo sapiens
tgaactgcccacctgcagctgtcttgctgcactgggtgttcaacagccatcactccttggagcatctcctaccatttataca

SEQ ID NO: 184522 - DNA, 101 bp, Homo sapiens
attcatctcaaaaacaaaattctgaactcaggacttggcaaacttaattcagtgcacaaatgagatgaatgtgaacatcccacagttggcagacagtttat

SEQ ID NO: 184523 - DNA, 99 bp, Homo sapiens
gtcaggctggacgtgcacgcagcccggcgggaggataaagaccaccacgttaaacgagaagattcatcaccgctttgatggctgcctcacaaacttcac

SEQ ID NO: 184524 - DNA, 100 bp, Homo sapiens
gaggatgaacagaatctgccggatggtgctggccacttgcttgggatcctttatcctggtcatcttctatttccaaactaaagatcatcaccctggtaaa

SEQ ID NO: 184525 - DNA, 88 bp, Homo sapiens
agtactcccagagtgacctagaacagaccaagacacgacatctagccctgaatctgcaggttctgtacagagtaatgagatgtgtgac

SEQ ID NO: 184526 - DNA, 130 bp, Homo sapiens
gctgaagcaggccaaggagatcgaggacgccgagaagtactccttcatggccaccgtcaccaaggcgcccaagaagggcaagaatatcacggcatgggcatgagtagcttgaaactgctgaagtatgtcc

SEQ ID NO: 184527 - DNA, 74 bp, Homo sapiens
tcgaagccaagcgccgtatgggactttgggcgctgtgagcggcggcgagcagaacgacaccgtaactatccgca

SEQ ID NO: 184528 - DNA, 76 bp, Homo sapiens
atcgcacttaagcctcggaacaactttaccagaaaaacacaccttgactttagtcagatacatcactgtctgttaa

SEQ ID NO: 184529 - DNA, 100 bp, Homo sapiens
gtaccaggctgtcctggccaacctgctgctggaggaggataacaagttttgtgcagattgccagtctaaaggtaagaatgattgatgttggctgatattg

SEQ ID NO: 184530 - DNA, 90 bp, Homo sapiens
caccattggagctcatcagactgaccgtgtcttacatcagttcagagaggtgattctaagtatgacttgctatgtaaagaagaatttatt

SEQ ID NO: 184531 - DNA, 75 bp, Homo sapiens
cgtctcctgtgtggcgatggtcttcctgctggggctcatgtttgagggaagtctgttagaactgctgtgctgatc

SEQ ID NO: 184532 - DNA, 100 bp, Homo sapiens
tagtcaagttgctgaagaaaatcggttccatcccagcatgctctcaaattacctaaagagcctaaaggtaaagagaaatgtgtatgaccttacaagtatc

SEQ ID NO: 184533 - DNA, 75 bp, Homo sapiens
tctgtgaggaatctggattgtcacctttgctgcaaaaaattacggctgtaaaggtgcctcccactacggcctgac

SEQ ID NO: 184534 - DNA, 80 bp, Homo sapiens
acgtggattctagaggggtgacagcgaaacaatcaggaaacccaggcccaacggcaggtggatgcaagaagaaatgttcc

SEQ ID NO: 184535 - DNA, 75 bp, Homo sapiens
ttccgtaacctgcgggagaggtttggaattgatgatcaagatttccaggtaaaatctgtaaaaactgggtcagtt

SEQ ID NO: 184536 - DNA, 100 bp, Homo sapiens
gtcgtctctgggactgtgaaacagggatgaccaacccggaggtgattcagaacctggagcgaggctaccgcatggtgcgccctgacaactgtccagagga

SEQ ID NO: 184537 - DNA, 97 bp, Homo sapiens
gtgggaatatgtggatcctacagttactctagaattattagatggaattctcacactcaagaaagcaaatgaacttcttctgagcacaggcatgccc

SEQ ID NO: 184538 - DNA, 100 bp, Homo sapiens
cagcgccgcgtccgccgccgcggtggcagtcagcagccggcagcagcagcggatttatcagcaagactgttgaacgcataactgcccaagatgcctgtcc

SEQ ID NO: 184539 - DNA, 50 bp, Homo sapiens
gctccgtggtgctctatgaccccctggaaggcgcaatggcgaggaagtta

SEQ ID NO: 184540 - DNA, 73 bp, Homo sapiens
tattttgaagtaaaaattgtcagtaagggaagagatgggcatcaagcatgatggaaccatgtgtgatacctgc

SEQ ID NO: 184541 - DNA, 98 bp, Homo sapiens
atatcccacttaaatcattccaggccctccacgcccttcaggaggagcaggccagactcaagatgaggctgtgggacctgcagcagctgagaaaggag

SEQ ID NO: 184542 - DNA, 101 bp, Homo sapiens
ggtggaggacatcgacatccaggcgaactcggcctatcgctaccctccgaagtccgcaaagaagtttgtcatcctgatattggtggcaagatcataatgtg

SEQ ID NO: 184543 - DNA, 87 bp, Homo sapiens
agctccttttcctccacctaccttcccgagttactataacaacagtaccaaggtggctgtgaaaaccctgaagccaggaactatgtc

SEQ ID NO: 184544 - DNA, 75 bp, Homo sapiens
ggcagtccacccaccgccgccgcctcccagggagctgcttcctatgtctggtggatgtggtgcccgtgaagaacg

SEQ ID NO: 184545 - DNA, 100 bp, Homo sapiens
catgcctttgagaacctagaaatcatacgcggcaggaccaagcaacaaatcttgtggaagaagaatgaagttgctgattatgaagctacaacattttcca

SEQ ID NO: 184546 - DNA, 83 bp, Homo sapiens
gtgagggtgtacaaatacccctttgaattaattatggctatgcaccagcaaggaatactgaagaccgatgatctcataacaag

SEQ ID NO: 184547 - DNA, 100 bp, Homo sapiens
gcagtgacgagaacagcaatccagacctctctggagacgagaatcaactccgaagtcaagcccgcactctgattacctttgctggaatgataccataccg

SEQ ID NO: 184548 - DNA, 122 bp, Homo sapiens
acagtcccctggggactcagaggagtacttcgccacttactttaatgagaagatctccattcctgaggaggagggccaagaccagcttcaagtctccatggtaccagaaaacaacaacctca

SEQ ID NO: 184549 - DNA, 83 bp, Homo sapiens
ccgccgtgcaacgcggagtggagctcagccaggggcagccggctctggtgctcccagaagagacatttatgcagtgtgtgatt

SEQ ID NO: 184550 - DNA, 97 bp, Homo sapiens
tgaaatggaacaggggcagaaaatagcacacttttactctacgcaactgttgctttttcatgcacgttcacgtccatgttcttcccaggaaggctgg

SEQ ID NO: 184551 - DNA, 149 bp, Homo sapiens
tacaagcagactctgaagatgatcagacaaggcaaagcgaaattggtcattctcgctaacaactgcccagctttgaggtacaaacccgtagtgctgatgaaccaatgacaacatttgttgtctgtaatgaatgtggaaatcgatggaag

SEQ ID NO: 184552 - DNA, 75 bp, Homo sapiens
ctgaagagggaagacacgcggaaacagagctcacaatgtctctctgcaccaagctccatgactcaggatttgcct

SEQ ID NO: 184553 - DNA, 75 bp, Homo sapiens
cagcatcttcgactccttcccgacctactcgccgaccttcatccgcggaggtatatcgaattccaaagaaaagtc

SEQ ID NO: 184554 - DNA, 75 bp, Homo sapiens
catgcagatatcaagccagacaatatcctgatcatcatggcaaaaccagctggtgggcccaagcctccaagtggg

SEQ ID NO: 184555 - DNA, 100 bp, Homo sapiens
aaatacttcttacaggctacccatgttcagccaggagaggaaaattctcagaatttaaagctcatacagctccagttcgaagtgtagacttttcagctga

SEQ ID NO: 184556 - DNA, 90 bp, Homo sapiens
catgttcagagtactccagaattttggtttcagtaacctcttcactcctgggcagctgctgaagacctggtgtggcagccctccctatgc

SEQ ID NO: 184557 - DNA, 96 bp, Homo sapiens
gaaaattaataggaggaagtctcaagaaacaaagtgtacaaagagagcacttcctaagaagagtcaggtagatatagttgtaggtactccgggaag

SEQ ID NO: 184558 - DNA, 82 bp, Homo sapiens
gaggagctgtgcagccgcgaggaggcgcgggaggtgttcgagaacgaccccgagacggaggccccgtgtgggccgcggcccg

SEQ ID NO: 184559 - DNA, 98 bp, Homo sapiens
acggctgggagacgcgaggggaccgcaagggaaggtgctgagctactggtgcttcagtcccggccacagcatgcacgagctggtccgccagggcgtcc

SEQ ID NO: 184560 - DNA, 83 bp, Homo sapiens
ggaaaggggcgtggctgtggagaaggcgctccggggcgaagcaggtagctcgtaagctggtcatcctggagggtgagctggag

SEQ ID NO: 184561 - DNA, 75 bp, Homo sapiens
caatgccattcatcaaagagggaggcgtagaggctccggtgttttttgtgccaattgcctgaccacaaagacctc

SEQ ID NO: 184562 - DNA, 51 bp, Homo sapiens
atcgccaagaagaaacttgcagagatttggaacattgctaccaataaactg

SEQ ID NO: 184563 - DNA, 75 bp, Homo sapiens
ccgagaccgcggccgggaccgagggaccagaggagcgagagcagcaagaaccacacccagcagcaatgtcagcgg

SEQ ID NO: 184564 - DNA, 97 bp, Homo sapiens
ttcgagcgctgttctcgctccggagccgctgcacatttcgaatttaagaagaggattacctcaggttccttacttcagtctctatggagaccaagaa

SEQ ID NO: 184565 - DNA, 76 bp, Homo sapiens
ttggctgtgataggagtatttttaaaggacagagtgcacagtttcctctcctgtgggaaggagagttgactcttga

SEQ ID NO: 184566 - DNA, 75 bp, Homo sapiens
tttccagaatttatatcgttgccctggggatgacaagtggatctcttagagttgagtacaacaaatgaaattttc

SEQ ID NO: 184567 - DNA, 100 bp, Homo sapiens
tgctccagaagaagaaaatgaggaagatttccagatgaagattgatgatgaactgtcggaaaaggtaacagaagatggaactcgaaatcccaatgaaaaa

SEQ ID NO: 184568 - DNA, 100 bp, Homo sapiens
catgatgaacaaagtactgatgacaggtgggtgtgcctgctgctttggacatgatgctgactggtagaagcattcgtgcagacagggcaaagaaaatggg

SEQ ID NO: 184569 - DNA, 87 bp, Homo sapiens
cctaaggtccagggctcgatctggccctaaccacagagtcaccttgagatggcctgatatgaaggagtcacgcctcccgcctcccgg

SEQ ID NO: 184570 - DNA, 101 bp, Homo sapiens
ccagccctggtacaagtctactgtcatccacatgactgttggaggcttcctgcctttcaggcccaagtctgttttggtggtctgagaggaaaaaagatgag

SEQ ID NO: 184571 - DNA, 89 bp, Homo sapiens
caagtacccgtccatcatagtcaactgcgtggaagagaaggtccggggttacccagagccccaggtgacatggcacagaaacgggcaac

SEQ ID NO: 184572 - DNA, 100 bp, Homo sapiens
cctggtacacctgcttgaccttccctgtgtacctccacccccagggtactggctgtcacgctgacatgagcccccagcactcctccgtctaccatggcca

SEQ ID NO: 184573 - DNA, 90 bp, Homo sapiens
ttgggtggaagcagatggggtaaattggggtgatccattcatgttgcagcagtctacaaatccagcaccaggaattctgggacctccacc

SEQ ID NO: 184574 - DNA, 90 bp, Homo sapiens
cagaggaggagcgcagcccggcctcggttccagcaacagatagaaatgctttaagttcactctggggaaagctggcctctgaaatcttaa

SEQ ID NO: 184575 - DNA, 88 bp, Homo sapiens
gaccagcaccagccctgatccagctgacaaaaagtttgcccggaagccaccccgattttcctgtctcctgccagatccacgggaacta

SEQ ID NO: 184576 - DNA, 100 bp, Homo sapiens
tttcaagttgggaagaaactcaggacccgagaagctacaggattcagcccagtcacagagcttgggaggttcccctgaaggatgctaaggaatacgctga

SEQ ID NO: 184577 - DNA, 96 bp, Homo sapiens
gagaggtgaccgtaaaaggaattgatgcttctgattaccagacagtccagattggctctaccagtgcacctggacagggaggaatcctggctcagc

SEQ ID NO: 184578 - DNA, 74 bp, Homo sapiens
ccgggcccaggagcctcagccccgccggcagccctaagggcaagaaaattgtacaagctggagataaggacctt

SEQ ID NO: 184579 - DNA, 75 bp, Homo sapiens
aaaatatgggaaggatttcacggacattcagcaagattttgagaacgcctgctccaagccggacgacgacattct

SEQ ID NO: 184580 - DNA, 83 bp, Homo sapiens
cctctgtctgcctgtgtccctgaccatggctccctgcagtaccctttaacgtgaaagctggtggaatgcgaattgtgcagaaa

SEQ ID NO: 184581 - DNA, 75 bp, Homo sapiens
catgtagctctccaggcttgcaagcgattaccaggcaagatgatgatgaatgaagtcctggcagcttcctgtgtc

SEQ ID NO: 184582 - DNA, 100 bp, Homo sapiens
aaaccctttggagcatctgggaatgtgctgccccacatgtccagatccggcactccacccagagcctctttgagtacatgaagggcattcagagcgaccc

SEQ ID NO: 184583 - DNA, 100 bp, Homo sapiens
cgcggcgcgtaggtcgcggggagctccgaaccgccggcgcccggccatggcggtctccagggagttgaccacatttggccatttcccagaagggccccac

SEQ ID NO: 184584 - DNA, 50 bp, Homo sapiens
cctcccgggtagctgggactacagcacacggaccctgactactcggctgc

SEQ ID NO: 184585 - DNA, 100 bp, Homo sapiens
gctggacctgctggtgttcgcccacgaccatgccactgaggcggctcccagctgcgttggcgacatggccgacacccccagagatgccgggctcaagcag

SEQ ID NO: 184586 - DNA, 83 bp, Homo sapiens
ctccatgttttataagtattgacattacacagtgttaacaatgcatccacagagcacctcgtgttttgtataaagcacctcat

SEQ ID NO: 184587 - DNA, 75 bp, Homo sapiens
acgtgggggccaaggtgtacttcatctacgagcatcctgaggttagcattacacttctcccagtggagcccatga

SEQ ID NO: 184588 - DNA, 87 bp, Homo sapiens
tattactaaagacttggatttccaactccaggaccctttccttctctacagaaatgccagatgtggagataagtaattaacatttcg

SEQ ID NO: 184589 - DNA, 74 bp, Homo sapiens
acaccaagtatcttgaaatgatatacagtatgtgcaaaaagcttttggaaaagaagaagagagtccaactcaaa

SEQ ID NO: 184590 - DNA, 75 bp, Homo sapiens
ggaggaccacgcctgcatccccatcaaggagtcaaattgactttatcagctttaatcgatgggaagaacttcagt

SEQ ID NO: 184591 - DNA, 75 bp, Homo sapiens
gagagatgaagcaattgcacgagccaagcatatggaaatgtctctaaaagtaataactgaagtgaagtgatggac

SEQ ID NO: 184592 - DNA, 83 bp, Homo sapiens
ttttcccaggagaatcaattaaagccattgctcaagactgcagtgcagatgacgacaacttccttgtgcccatagcggtggga

SEQ ID NO: 184593 - DNA, 72 bp, Homo sapiens
tgaccccagctacctccccaataggtgcatcaggctcaggccacagggtcaccacatacatcgcccacccat

SEQ ID NO: 184594 - DNA, 76 bp, Homo sapiens
gcagcatcccagtttttggtcttctgtcaaaaacacagggatgaggaactcttaacattcagggatgtggccatag

SEQ ID NO: 184595 - DNA, 97 bp, Homo sapiens
cgatgctgctactgctgtttctggtgtcttgacaaatacctgctccatctcaaccagaaactccccaacttttaaatcatttgaagaaaaggtcgaa

SEQ ID NO: 184596 - DNA, 75 bp, Homo sapiens
caaagacctcctcctccacaggggagacagaggatgtggagagcatcttgtgcgcaccatactggctagagaatg

SEQ ID NO: 184597 - DNA, 100 bp, Homo sapiens
ctcagccgcccgctggccgggagcggagcccctgtggcagctggaatccaaaagatcttgaaaccagtcctgaaaggcttgctcctatgcaagaaatcct

SEQ ID NO: 184598 - DNA, 111 bp, Homo sapiens
cagaccctggagcctcagttggaagcagccgatccagcctgcggagcctgtggggcagacactgccctaaccatcatggaggtggccgaggtggaaagtcctctgaacccc

SEQ ID NO: 184599 - DNA, 83 bp, Homo sapiens
tcggctcctgtcgtccgttctctcaggctcccgttcaggccaccagcttgggctccccacggagggcagcaagtgggacttgg

SEQ ID NO: 184600 - DNA, 100 bp, Homo sapiens
cttggaagggcagccacctggagcttggaagggggaggactcggaggagagtgaaattgacatggaagatgatgatgacgaggatgacgatttggaagac

SEQ ID NO: 184601 - DNA, 100 bp, Homo sapiens
ggggacccagtgcgcccgcatcgtcgagatatgaagatcaatgatgcagactgatggttttgatgaagctgggcatttataactagattcattaaggaat

SEQ ID NO: 184602 - DNA, 100 bp, Homo sapiens
ctgctttgtttggatcctacagagatgcactgagatacaaacctgtactgtgagaatagagatgtttcgaaatatgcagaatgcagaaatcatcagaaaa

SEQ ID NO: 184603 - DNA, 90 bp, Homo sapiens
cagctttgatcgatttctgggataaggcagcgtctatcccagactaccggggccctaatggagtgtggacactgcttcagaaagggagaa

SEQ ID NO: 184604 - DNA, 80 bp, Homo sapiens
gggaggaccttggagtccagcactctgcatgtgactccccgcagcctggacagggcatcgcaggcacagatgtagcaaag

SEQ ID NO: 184605 - DNA, 80 bp, Homo sapiens
gccttctctgtcagctctttccccgtcagcatcccagccgtgctcacgagtaatcaagtcagaggattatatgactttta

SEQ ID NO: 184606 - DNA, 101 bp, Homo sapiens
catggccctgagtgaatacccagaaaatttcatgtaactgcgtcattgattggctggtatccaaccagtctgttaggaatcgccaggaaggcctcatgatt

SEQ ID NO: 184607 - DNA, 50 bp, Homo sapiens
ggtgtactccagcaacttccagattattcaggacagaatattcaagcaca

SEQ ID NO: 184608 - DNA, 98 bp, Homo sapiens
tcttccaaaaccacaaacttgcctacgtcagtaacagccaccaaggagctcgcccgtcagcgaggagtcctggagcgcacagagaagatggtggacaa

SEQ ID NO: 184609 - DNA, 100 bp, Homo sapiens
ggaggacatctgggggccacaaatgctccttctcctggagacgcaactcaagggtgtcaaattgagaaccaggtagatccccaccacctacagtaaaaag

SEQ ID NO: 184610 - DNA, 75 bp, Homo sapiens
aagttcctggacattgatccggaggaggattcgcagttcaacatcaaggctgaccaactgactgaagagcagatt

SEQ ID NO: 184611 - DNA, 100 bp, Homo sapiens
ctttcacaaaccttgtgtctcaatttggctacaaaaggaatccactgcgaagaagacgtcaatgaatgttcttcaaacccttgccaaaatggtggtactt

SEQ ID NO: 184612 - DNA, 73 bp, Homo sapiens
ctccgcagccccgggcacggcggaggcagcggagccctgggccatcgttggcctttaccagagtttgatccaa

SEQ ID NO: 184613 - DNA, 107 bp, Homo sapiens
tgaagaggccgtgtcctttctggaatgacatcagccagtgtggaagaagggactgtgctgtcaaaccatgtcaatctttcttggccaggctgactgagagatttgtg

SEQ ID NO: 184614 - DNA, 83 bp, Homo sapiens
gttcatatatggtggtcctcagttcaatgatcagttgatcagccccaagcactttgttcatctggctggcaagtccactctga

SEQ ID NO: 184615 - DNA, 100 bp, Homo sapiens
ctcgcacaagccacggcggactctcccgaggcggaacctccacgccgagcgaggaatcccagtcagaagttccagcctgccactgttctctgatgccatg

SEQ ID NO: 184616 - DNA, 100 bp, Homo sapiens
gctccatggcctctcctggactggctgcgtgaccccgacggctgcttctgggttcttgggtgtctctggggagtccctgggccagaccttcctccagact

SEQ ID NO: 184617 - DNA, 96 bp, Homo sapiens
ccacctgtgtcctggttgagggtctccagggttctttggggcccgaggtgttacacataatattgcattacttcgagaggtgataatcaactcacg

SEQ ID NO: 184618 - DNA, 89 bp, Homo sapiens
gaagctggtggtgttgatcactcctcaggtgtccagcctgctcaggccattgcaatcatggaagtagctcacggcaaagatcatccata

SEQ ID NO: 184619 - DNA, 97 bp, Homo sapiens
gacagattcgcagtggtcgcttcttctccttggctatagaaagcgcaattggtggtaacgcttatcaacacagcaaagtgaaccagtggaccacaaa

SEQ ID NO: 184620 - DNA, 82 bp, Homo sapiens
agaagctggctatggttaaagcgtacttggaccatgagactgtttcagccactttcatcgacagcagtggacagtttgtttc

SEQ ID NO: 184621 - DNA, 50 bp, Homo sapiens
cccatgcgagtacctgaggaaggtgcatccagatcaacaccgactccagc

SEQ ID NO: 184622 - DNA, 100 bp, Homo sapiens
aaggaccgtgaggatcaaagttgtcccactgaccaggctgtaaactttggaactgataagtgagagagataaggtagttgatgtcacttggcgatattcc

SEQ ID NO: 184623 - DNA, 100 bp, Homo sapiens
cgtccctcaaggcccccgcgtggttcagacagacgccgcagccaggatggttgaggacctgaaggagaagaaggagaaggtggaggagaaggcaagccgg

SEQ ID NO: 184624 - DNA, 100 bp, Homo sapiens
tacctagaagtctactaatggacagttagtcacccacctacatgttgagatctttctcctggcctgccctccatgtcggggagctatcgtcgtcttcaag

SEQ ID NO: 184625 - DNA, 82 bp, Homo sapiens
ttccactcggctcctgtcgtccgttctctcaggctcccgttcagtgctggcctacatgcagttgctggaggactactcggag

SEQ ID NO: 184626 - DNA, 75 bp, Homo sapiens
cggctggatgggaagttaatgtttacggcgaagtctactcaacgtttccaaggcgtcacaatgtagcagggaccc

SEQ ID NO: 184627 - DNA, 90 bp, Homo sapiens
gatttggagactggcaagattactgatttcatcaagttcgacactgggggagcagcctctgggagtgacagtgctgacaagaaggctcaa

SEQ ID NO: 184628 - DNA, 82 bp, Homo sapiens
taaactttatttcctcccagaagacactccccagggcagaaatagcgaccatggcgaggttttgggatttgagattgacgcg

SEQ ID NO: 184629 - DNA, 75 bp, Homo sapiens
aagtacttcagtaagagatggggctgcaaggtgtgactgttgtaaatctcaaggaactcttaaagagcgagttca

SEQ ID NO: 184630 - DNA, 75 bp, Homo sapiens
ctgggctctccagggtcgaaggcagggttattttaccaagaaaatggtttgcacgactttgaacatatactatcc

SEQ ID NO: 184631 - DNA, 74 bp, Homo sapiens
gagcctcagcggtctgcgcctggcagcaggttgaggaaacgtcccatgcagtcaactgttgctacttaaatgca

SEQ ID NO: 184632 - DNA, 82 bp, Homo sapiens
ttagcaatttaaagatcctctccaagattctttgtgggaaagagattcctcgctggatcaatcgacttgcctacttcagctc

SEQ ID NO: 184633 - DNA, 98 bp, Homo sapiens
agacattcaacatgattgcatttgaagtgtgagtgtggcaacgtgcatggccatcctccatgtgggtagtgcccagcaagtgcggacagggtccacga

SEQ ID NO: 184634 - DNA, 100 bp, Homo sapiens
cctcagcctcctaagtagctgggactacagcggaatggccaaagactatgacgggtcttcctagcacatcagggacaactgccagtgtggtcatcattcg

SEQ ID NO: 184635 - DNA, 100 bp, Homo sapiens
ctcccctacctggagccggaacacagcatcatcccagtaagctccaaccagctctccagggcacaccgtattcagctctgagcggtctttgctagtgagg

SEQ ID NO: 184636 - DNA, 96 bp, Homo sapiens
gcggggcagaggcggcggccgcagcggcgcagctgatagcaggaacagtccattcccagaagttgcagaatcagttcagcaagaactagaatctta

SEQ ID NO: 184637 - DNA, 75 bp, Homo sapiens
atcatgatgtcaacaaccgtggctcacaagatgaaagagcaccaggttcaggagaagtggcacctggtggaggac

SEQ ID NO: 184638 - DNA, 100 bp, Homo sapiens
gctcgatccgctgctcgcacgggagccagctgggtgataagccaatggacacgtcagtgttatctgaagaaggaggagagccttttcagaagaaacttca

SEQ ID NO: 184639 - DNA, 75 bp, Homo sapiens
gtgacttggaagaggaaggtcctggtggtgcccacccagggtggacccgaactccccggtgctcttggaggaccc

SEQ ID NO: 184640 - DNA, 100 bp, Homo sapiens
aagaccctctaccaatagaaagattatgacttgttgaaagactcagatggttattaatacgttttagcgcagtgactcttcgagaagacagtgccaagag

SEQ ID NO: 184641 - DNA, 150 bp, Homo sapiens
cgcacggattatactggaaagtatgcaccagctgtcatcgtttgtcagaagaaagcagctggctcagaaaacaggaattctagccacagatacacatcatccccaggattctgctctgtatcatctcagcaagcagctattacagaaata

SEQ ID NO: 184642 - DNA, 75 bp, Homo sapiens
ccactccagatagctgcatcatcagcatggttgtgggccagcttaagactggtattgctcgagttccacttgctg

SEQ ID NO: 184643 - DNA, 89 bp, Homo sapiens
gaggtgccacccgaggagttccgcccctttctggcaaagatgagggggattcttaaggtgcaacaacgagagtgagtggtcccagatcc

SEQ ID NO: 184644 - DNA, 75 bp, Homo sapiens
aggaggaggggagaggcctggaggacaccaacatggtgtccaaggcagctgcagatttgatggcctactgtgaag

SEQ ID NO: 184645 - DNA, 98 bp, Homo sapiens
cgcagctacctgcccctgctcactaagctgggcagcctccacccacagagcctcaactgccagtgtctcctgcgtgagggggcaagaatgagcccgaa

SEQ ID NO: 184646 - DNA, 49 bp, Homo sapiens
gcacggcacgcagaataagcgagagggctggttttcagttacacccgag

SEQ ID NO: 184647 - DNA, 100 bp, Homo sapiens
cgcaagatggacggtttcgccggcagtctcgttttgtcagcctggcgggtggcagctgtccagagagaggaagcagccaacgttctttgtggttgtcctg

SEQ ID NO: 184648 - DNA, 100 bp, Homo sapiens
cgggcggccgtgcgcgaggcgagttcctaaggacggtctgaagagccaagagctatttgatgaaattagaatgacctacatcaaagagctaggaaaagcc

SEQ ID NO: 184649 - DNA, 108 bp, Homo sapiens
gttggaagcagccgatccagcctgcggagcctgtggggcaggtggacgacatccttggagaaggcagcgacgacagcgacagcgagaagaggaggcctgaggagcagg

SEQ ID NO: 184650 - DNA, 100 bp, Homo sapiens
gcctgaagcaagacgccgatgacatgtgcatgatatgtttcaccgaagcgctctcggcagcaccagccattcaggacgactgggtttggattcagaagag

SEQ ID NO: 184651 - DNA, 139 bp, Homo sapiens
acttgtgaaaaaaattttggagacgaagaaagattatgagaaattgcagcagtcacccaaacctggggagaagacaggagaatatgccacagatgaagaagaagatgaggtaggacctgtccttcctggcagcgacatg

SEQ ID NO: 184652 - DNA, 82 bp, Homo sapiens
agtgcctgcagttcagacccttctctcccctccactttctcccggtggaggtgaagccggtgctgccaagagccatgcccag

SEQ ID NO: 184653 - DNA, 87 bp, Homo sapiens
tgaatccggaatgggtgacagcgtcatcacggcattttattgtttaagctatgaagaaggacatccctcacactctgaaacagatct

SEQ ID NO: 184654 - DNA, 101 bp, Homo sapiens
cctgcaggtattgggagatccacagctaagacaccgggacctcctggaagccaaaaatggtttttcgttggaatatacgttgcacatttatggcgattctg

SEQ ID NO: 184655 - DNA, 75 bp, Homo sapiens
gaaagagcgatttatggctttgttcttttcttaagctcccaatttggcttcagcaacatttcatttgttgcattt

SEQ ID NO: 184656 - DNA, 98 bp, Homo sapiens
ctctgatgaagaggatatttcgggtgaaaaagatgagtctgaagttatatcgcaaaatgaaacgtgctctccagcatcagaggctccttgaaatgcta

SEQ ID NO: 184657 - DNA, 96 bp, Homo sapiens
ttcgtcactcacctgttcttgcccctggtgttcctgacagagttttccgtctgatgaaggttggccatttgcaaagtatcttggagcttgtggaag

SEQ ID NO: 184658 - DNA, 100 bp, Homo sapiens
tattaccatatggcccatggaaaagattttgcatctagaggaattgaaaatctggagaagggactcctgaaagccctgaaggttttagacaattacttaa

SEQ ID NO: 184659 - DNA, 101 bp, Homo sapiens
ccctgaagaagtgcaagagcagaggccttctctagaccttgccaagatggcacagaaacgggtatgcaggagattagaagccagtgggcatgagcgtggct

SEQ ID NO: 184660 - DNA, 73 bp, Homo sapiens
ctggaggaaagctgaccaggcggcttgtgaacagtcaggttgaaaggattgttgacaaaaggaaaaataaaaa

SEQ ID NO: 184661 - DNA, 75 bp, Homo sapiens
gcttactgttgcgtggttcgttattaacaggctcctggagtccatgatccctatcaagatggtcaacttccccca

SEQ ID NO: 184662 - DNA, 83 bp, Homo sapiens
ccaccgctgccctcagctccgagtccagggcgagtcaccttcaggccattcagaggaggaaagagaggggaatatgaagtcag

SEQ ID NO: 184663 - DNA, 100 bp, Homo sapiens
agccttcaaagccttcactggcgagggtcagaaactgggcaggttcaagcactgtcttcctgttggccctgacaatcatagccagcacctgggctctgac

SEQ ID NO: 184664 - DNA, 87 bp, Homo sapiens
ccagtgcctccgacgcctcctgatgggggcaagcgcgatgaagagctggttctgcccatcaactcctccctgagcgtcactctgcac

SEQ ID NO: 184665 - DNA, 83 bp, Homo sapiens
ctctggacaagatgaccacactccaggaatgccagtgcatcttttgcacagctacaacagcagttctgtagagagtttaaata

SEQ ID NO: 184666 - DNA, 82 bp, Homo sapiens
gacactgcccctgcaagactgggaagaacaaggaacctctgatcaaaatacttgctggatggtggactcagagaccaataaa

SEQ ID NO: 184667 - DNA, 100 bp, Homo sapiens
agcagcaccagggcgccgggttagggcagacgctgtgctcgctggcaccccgaacgggttgcttcccccgctgcgaggccacagttgtaagggatcttgt

SEQ ID NO: 184668 - DNA, 75 bp, Homo sapiens
gtggtggtgaaaaatgaccctgaactggaccagcaggaaatgggtcctgatgaatatgaagagatggaagaagag

SEQ ID NO: 184669 - DNA, 75 bp, Homo sapiens
ccgaatggcagcagtagatgacttgcaatttgaagaatgtcatacccaggctatcccccaacaggctacccacct

SEQ ID NO: 184670 - DNA, 100 bp, Homo sapiens
ccactaaagaagtgctggaactactgctggacagatgccattctaaatatggtgaatattgctgctaatattctgggagcaaaaactgaagacctgacag

SEQ ID NO: 184671 - DNA, 74 bp, Homo sapiens
caaactctccgagggacagtcctgccgtctccctgagtgattttcttccagtaaaatgtgatgcatgtaaacaa

SEQ ID NO: 184672 - DNA, 89 bp, Homo sapiens
gtgaaagatgattacagtggccagaggactgccaaggctccttctcaagctgcttgagtcaatgaggagagtccggagggctgtgctac

SEQ ID NO: 184673 - DNA, 100 bp, Homo sapiens
gcagatcatttactgcacctaaagacaaaggtgcacaaatggagtccagaggaggctgtaagagccatcgccaagatccggtcatacatccacatcaggc

SEQ ID NO: 184674 - DNA, 83 bp, Homo sapiens
ggagcacgtcatcgccatcgaaggggtccctgtgaaggtgaccaacgtcaaggatggcaccacccaccagacctccttggagc

SEQ ID NO: 184675 - DNA, 50 bp, Homo sapiens
cagagcccgagtacatggaggagtgtcttgggacaaggtgcgcattcctg

SEQ ID NO: 184676 - DNA, 83 bp, Homo sapiens
ctcctgctggtggcagctcccagatggcgtctctggccgagcctctttttgtggaaaacgacagcagcagcagtggcctggaa

SEQ ID NO: 184677 - DNA, 134 bp, Homo sapiens
cagggatctcggggagaccccggtgatgcaggaccccgtggagactcaggacagccaggccccaagaatctggcagcagaaaagacctacaacaacctagatgtatctgtgactaaagccttgcaacatcgatc

SEQ ID NO: 184678 - DNA, 100 bp, Homo sapiens
gtcgggaaatggccgctgtgtggttgcaacggagataaattcccggaaccgcgattcggcgtgtcaggtggctgactgttcttgggatgaaacaataaag

SEQ ID NO: 184679 - DNA, 100 bp, Homo sapiens
cacctagtttggcaagaaatcctgccccaggtgtgcttacaaacaaaagaaaaacatatactgagagctacatagccagaccaaacggaccctgtgagca

SEQ ID NO: 184680 - DNA, 75 bp, Homo sapiens
cccgaaggccctatcaggacatggagtatgaaagacggctcttatcacgcgatggcatccactgtggaaggaggc

SEQ ID NO: 184681 - DNA, 100 bp, Homo sapiens
atgatcaactggaggctcagaagctggaatatcatcagctggatgaactgcagctttgcaagaattgcttttacttgtcaaatgctcgtcctgacaactg

SEQ ID NO: 184682 - DNA, 90 bp, Homo sapiens
aagagaccaagatgaatgcagaggtgaccatagccgatgactactcagatccctttgatgccaagaatgatctcaagagcaaagcaggaa

SEQ ID NO: 184683 - DNA, 83 bp, Homo sapiens
gggcggaggtggcgctgccccttcagaattaaacaaccaccatgtcgagcaaaaaggcaaagaccaagaccaccaagaagcgc

SEQ ID NO: 184684 - DNA, 75 bp, Homo sapiens
ggacatgaagattttctacaaggggaagaacactggaccaagccatatgtccttctatgttcgagcccacaaagg

SEQ ID NO: 184685 - DNA, 74 bp, Homo sapiens
gtgtgcgacaagccagccccctacgaccagctcatcatcgacgggtatcgagaaccttccctgcgaacttcaga

SEQ ID NO: 184686 - DNA, 60 bp, Homo sapiens
cgaacctcacctttccagggcgcaagaatgagagaagacagtgctagagtctatgaaaac

SEQ ID NO: 184687 - DNA, 98 bp, Homo sapiens
ctttcagctacttgaagatagccatcagccgctacgtgactcttttctccaggaggtggccaggtggaagtaaaatctgagaagcttgacttcaagga

SEQ ID NO: 184688 - DNA, 100 bp, Homo sapiens
ctcagcacatgatcagggatatacagaccttactatcccggatggagttcctgagactggcccagacgctgcggcactatggctacttgcgctttgatgc

SEQ ID NO: 184689 - DNA, 75 bp, Homo sapiens
ttttgctgcaaatgaagttgatggaattacactgtgatacgactgacttatctggagtccatctttcaccatctt

SEQ ID NO: 184690 - DNA, 74 bp, Homo sapiens
aaaggagccacttttccaaaccctcctctcaatggatcgccaaatggaggatcccttttcccccagaaattact

SEQ ID NO: 184691 - DNA, 100 bp, Homo sapiens
tgacctggtacatcgccgagttctgttcgatacaagaggctgttttcctagcgtggcttgctgcctttggtaagaacatgtcgtccatcttgccattcac

SEQ ID NO: 184692 - DNA, 90 bp, Homo sapiens
ccgggaccgccagctctgtccgctgcccacagcctagcagtcgggaccgtactgagcgcttctctgaagtagctttggaaagtagagaag

SEQ ID NO: 184693 - DNA, 98 bp, Homo sapiens
ttcaagataaagtgattttttgcctttgttgattaactggacaaattcaggcccctccagccagcgtcaggtgcagaatggcccctctcctgatgaga

SEQ ID NO: 184694 - DNA, 97 bp, Homo sapiens
ccaaacttgctggtcactgggaggcagacctcaacaccaacatcgaggatgaaggcagctccttctatggggtctccagccagtatgagagccccga

SEQ ID NO: 184695 - DNA, 100 bp, Homo sapiens
tctattacttgttttgtgagaaaatggaaggaaaaggtggcctggccgcggcttaccaaggaggatatcaagatgtgactccctgcatgtctcctctgcc

SEQ ID NO: 184696 - DNA, 89 bp, Homo sapiens
cagcgagccacgggagcgagccaggtgtttcagtcacctccagtaacacgggcgtgccagatatctcgggttctgtgtactccaaaacc

SEQ ID NO: 184697 - DNA, 100 bp, Homo sapiens
tgtcaactcgctccggagcgcggcgccgagcgcagggatacggcgcccagcggggagggtgtgaagacagagaatgaccacatcaacctgaaggtggccg

SEQ ID NO: 184698 - DNA, 100 bp, Homo sapiens
gtggaggagctgtgcagccgcgaggaggcgcgggaggtgttcgagaacgaccccgagacggctgaccccgcactacatctacccaccagccatcgtgcag

SEQ ID NO: 184699 - DNA, 100 bp, Homo sapiens
ggatttaagtgatctgcctacctcactttttgcttgcagcgtccatgaagcagtgtttgaggcacgagagcagaaggacccagatgatgtggtaccagtt

SEQ ID NO: 184700 - DNA, 100 bp, Homo sapiens
ggagatcatttgggagatccaagagattcagtatcactcgctcccttgatgatcttgagatcacccggaagttcaggctgaattctgaaggcaaacttga

SEQ ID NO: 184701 - DNA, 75 bp, Homo sapiens
cagaagcagaggctgcaaagaatgctttgaatgtgaaagaaaagatgttgtcccggttaagagtagtttccacca

SEQ ID NO: 184702 - DNA, 100 bp, Homo sapiens
tttactggtgttccagccctaagctgcgcaaaccatgcaggatgatttactgatggacaaaagcaaaacccagccccagccccagcagcagcagcggcag

SEQ ID NO: 184703 - DNA, 100 bp, Homo sapiens
caccgttataactttcccaatctcaatatggatgtgcataaagctcctgggcaacgtgctggtctgtgtgctggcccatcactttggcaaagaattcacc

SEQ ID NO: 184704 - DNA, 74 bp, Homo sapiens
cgagatggcaaaaaggagtgtgatattaatgccagaggattcaacatgagcatacctatgcctgggcatccagt

SEQ ID NO: 184705 - DNA, 100 bp, Homo sapiens
ttcactggggccacagcaatggctcagcgggctctgaacacagcatcaatggcaggaggtttcctgttgaggaattacatgaacgacagccttcgcaccg

SEQ ID NO: 184706 - DNA, 75 bp, Homo sapiens
ctttcagacaaatacttcaaggagagaaaaaagctgttatggaacagcttcggaaagaacagtcattgcattatg

SEQ ID NO: 184707 - DNA, 83 bp, Homo sapiens
cgcgacgccatgggccggccgggcccagagctcctgtctctcagggtgagcccatcactttctgtgaggagagttttgtaaag

SEQ ID NO: 184708 - DNA, 99 bp, Homo sapiens
ctgcgttgaattgctcaacagcatcttggaagtccttagctaccaggatgcgaaaacaaattccagtactcctggtaagaaaaacagaggccttttaac

SEQ ID NO: 184709 - DNA, 82 bp, Homo sapiens
acagctggagcggcgagctctgcaggggatttgggagcagcttgtcttacacaaggacgaaggaaaaggtcagggatcgagt

SEQ ID NO: 184710 - DNA, 101 bp, Homo sapiens
gcgaccgcatcaaagacgaatttcagctactgcaagctcagtaccacagccggcccaggcctttgtggtgaagcggggcgtccacgtgtcaggagcgtctc

SEQ ID NO: 184711 - DNA, 100 bp, Homo sapiens
tgcgcctgcaggactggcgctgcctctggtgcaaggccatggtcatccgcaagggctggctgactatcaataatattggcatcatgaaagggggctccaa

SEQ ID NO: 184712 - DNA, 99 bp, Homo sapiens
tattgggcttgacagctgcaaggagttactgaagcttttctgggagaagaggctacaaggacttagtgcatcagatgtaacagaacaaattataaaaac

SEQ ID NO: 184713 - DNA, 75 bp, Homo sapiens
aaacattatcactctaaaggatgcaaggcatctttacatatgtgattatcataaaaacttaattcagagtgttcg

SEQ ID NO: 184714 - DNA, 74 bp, Homo sapiens
ccgaagccccctgcaggaactctacaacccaatccaggtgggcaccatgtccttgaagcttcaggcaagcaatg

SEQ ID NO: 184715 - DNA, 87 bp, Homo sapiens
aacatttcctctagtttctggataatgagcaggcacacagaatgtgaaagatgttgcagaagtgttccagaagtggctgaagataga

SEQ ID NO: 184716 - DNA, 100 bp, Homo sapiens
gttggggctgctgtttctcttcgccgacgctgaaaatgtgtgtctgacatgcaagctcagtggggcagagacccgtggattgctgtgccctgccctccgg

SEQ ID NO: 184717 - DNA, 51 bp, Homo sapiens
aaccacattcatgggacacttctccaggtttatcttgcagattatggactt

SEQ ID NO: 184718 - DNA, 101 bp, Homo sapiens
cccttgctcccatccctgcagcatgaacaagtactaaggctcgtacgtctgcatcgattatcttacgtggggcaaatgatttcatgtgtgatgagatggag

SEQ ID NO: 184719 - DNA, 102 bp, Homo sapiens
ggtcagtcaacccagaggatccccagtatgcatctcaagatgtggccatcatctctcagcaaggtgacatatttgtttttgacctggagacctcagctgtcg

SEQ ID NO: 184720 - DNA, 75 bp, Homo sapiens
gtgaaaatggtaacaaatttgattttaggtgatgggcaagtcagaaagtcagatggatataactgatatcaacac

SEQ ID NO: 184721 - DNA, 100 bp, Homo sapiens
agcgaagtggagagcgccagagtaatgggactcaagcacagagggttcggaaaccgcgttgctgcacggggccccaggggctgcttccccgatattctga

SEQ ID NO: 184722 - DNA, 74 bp, Homo sapiens
ctcggccggcaaccgagggacccgcgtccaggaaagtggagaatgaggacatgaataaagaccagatcttgctg

SEQ ID NO: 184723 - DNA, 88 bp, Homo sapiens
ctgtttattaggcaaggtgattaaagtggtggcgaacatagaagaagaattctccagatgtggaggccatagtggagtttgactacca

SEQ ID NO: 184724 - DNA, 75 bp, Homo sapiens
atgaaatcctaattggatatttagaatatgtcaagaaattagggtgaactgtcacccctacaactcagcttgcaa

SEQ ID NO: 184725 - DNA, 97 bp, Homo sapiens
tcagttgtgcgttgcggccagtcgccactgctaaggaagaatcctgctcaaaaatgaggtgaattaatacttgggcgctcaggaaccctggacagct

SEQ ID NO: 184726 - DNA, 74 bp, Homo sapiens
taatttcaatttgaaaacaagtggaatagtgctgtcttccttggttctaaatggcttctaagaagttgggtgca

SEQ ID NO: 184727 - DNA, 75 bp, Homo sapiens
tttactgagaattttccacctcctgacacaacaccactcagcataaacttggaggaggcagtggagagagcatcc

SEQ ID NO: 184728 - DNA, 83 bp, Homo sapiens
taaagcatttgtgcattcagatgctgctaaacaagtggacccccaaaagtacaagggcatatttaacggattctcagttacac

SEQ ID NO: 184729 - DNA, 100 bp, Homo sapiens
ttcaggtttgagtatcttagctctagcacaattacttggactagtttatatgaaatttgtggatcctttctctgctactgtagatgctgttgatgatgcc

SEQ ID NO: 184730 - DNA, 51 bp, Homo sapiens
actgcagatcagcacctctctgcccagatacatcttagagaaggctttcca

SEQ ID NO: 184731 - DNA, 90 bp, Homo sapiens
attcaagactgtttttcctacctgttcagcacttctttcagcgatatgaagttaaatccagctgatggtgagaccattctaaaaggcctc

SEQ ID NO: 184732 - DNA, 80 bp, Homo sapiens
aagtgtgtgcatctggctgttagaagaattcatgctcatccgggttggtcaaagaaaaagtgatgtatgaaaaagaggca

SEQ ID NO: 184733 - DNA, 100 bp, Homo sapiens
gaatgtgtttgctctcatgaacatgcaatgagaagactgatcaatctgtgactgtgaagtgctgaccacactcaccccagacactggccgtatcctgtcc

SEQ ID NO: 184734 - DNA, 74 bp, Homo sapiens
tgaggaactttcttccaagataatgtccagtttggaagatgaaggcttttctgctgaagggtatgtgattggca

SEQ ID NO: 184735 - DNA, 75 bp, Homo sapiens
ttacgtctctgctcttcagtacaatcctacaaacctacctatcttcaagctaaaggagtcctgcgtacggcggcg

SEQ ID NO: 184736 - DNA, 50 bp, Homo sapiens
cgcaagatggcgagtaaagagaagctcctccaagttccccctgatgacgc

SEQ ID NO: 184737 - DNA, 102 bp, Homo sapiens
gaaagctttccagcagtcagttgaacaagacaacttatttgatgctccactatcctggccgagcggggtatcccatcactcccctgctcccctgcctccacg

SEQ ID NO: 184738 - DNA, 75 bp, Homo sapiens
gccgacaaggcgttcaagcgaaaacatgaccgctgagcccatgagggtaagcaggaagagaacgacgtggtggag

SEQ ID NO: 184739 - DNA, 96 bp, Homo sapiens
ttgtgctgccagcaagaaatgatcagtagcaccagtgtttatggttctctctttaggagcagatgtcctacctgaatacaaactgcagacaccacg

SEQ ID NO: 184740 - DNA, 80 bp, Homo sapiens
gtgatgagcatgacgcacacaggagagccaggattcatgctctacatccccatagagtttttggctttcacccccaacca

SEQ ID NO: 184741 - DNA, 74 bp, Homo sapiens
ggccgctatcatcccagcagtggagttcagcccactactctgaaccaggagtgtggccatctggggccgtgtgg

SEQ ID NO: 184742 - DNA, 100 bp, Homo sapiens
atgcctacgtgctcacggtcaacgagcggggcaaccactgcgagtactgcttcaccagattggccatctgcaagcttcccttctccgtggagagcaggaa

SEQ ID NO: 184743 - DNA, 96 bp, Homo sapiens
actgcggagttgctgggtccaccgacccttaccctcagcgagagaagtaacccagggaggagagagcgatggcttttttcacccagaaggccagcc

SEQ ID NO: 184744 - DNA, 75 bp, Homo sapiens
atacagaatgaatattgtaatggtgaggaagatcttctcagtcctccccaggacacaagcacagggttagaggag

SEQ ID NO: 184745 - DNA, 123 bp, Homo sapiens
gaagaagattgttgcaaacccagaggacaccagatccctggaggctcgaagtggttctgacaaccatttgatccttgtggatctccgttccaaaggcacagatggtggaagggctgagaaggt

SEQ ID NO: 184746 - DNA, 75 bp, Homo sapiens
tgctgcagatcaaccagtacctcaccgtgctggcctccttgggggtttcagcagcctgaggctccggcccattcg

SEQ ID NO: 184747 - DNA, 97 bp, Homo sapiens
ccgtgctgtttgtgtgtctggtgcaccgtccaggtgaggttagagctggggcatcgcgcccaactgcgcaagaagcccaccacggaggggttcactc

SEQ ID NO: 184748 - DNA, 100 bp, Homo sapiens
gtcctgcaggtattgggagatccacagctaagacaccgggacctcctggaagccaaaaatgggtgtcagatgcctgatacattcaattcatggtttctta

SEQ ID NO: 184749 - DNA, 98 bp, Homo sapiens
gcagcccagccaagcactgtcaggggcttcctactatgagatttcagttgatgatggtccatgggaaaaacagaagagttcagggctcaatttgtgta

SEQ ID NO: 184750 - DNA, 83 bp, Homo sapiens
tagacaggattgaggagagactgcctattctgaatcagccatcaactcaggtcagagatcagatctcgctgtcatggtctgcg

SEQ ID NO: 184751 - DNA, 83 bp, Homo sapiens
tgaaactgtgagtgactgctccccacacatagccaacatcgggcgcctggtagaggttttgggatttgagattgacgcggtga

SEQ ID NO: 184752 - DNA, 50 bp, Homo sapiens
ctctgatcttcctgcatggctcaggcggcaaagatctgcaacaacatgct

SEQ ID NO: 184753 - DNA, 82 bp, Homo sapiens
tatttctcttttgtctgcccctattgtaagtgcagatggaacacaacaggtcatcatcagatttgaaatatttaaagtggat

SEQ ID NO: 184754 - DNA, 98 bp, Homo sapiens
tgaaggattctgtgtgctgtcggacccagagggtgacggcgccgctaggatgaagctcgtgaggtctcctctgagcctccggcctccataagacccaa

SEQ ID NO: 184755 - DNA, 83 bp, Homo sapiens
atcatgcatccaacgtcaagtacaccatgcacaaggtcttccagtttctgaacctagcttcctgcctgacacagctcacttca

SEQ ID NO: 184756 - DNA, 100 bp, Homo sapiens
catttcctgcatgtccaaaatgggagacaggcgcctgagtaacccggggcaaggtgcagcggaactgctgcctgacgctctgcaacttcagcatccccga

SEQ ID NO: 184757 - DNA, 51 bp, Homo sapiens
ggaaactgaagaaccaagcttgttctcctgtgcctcctgttggctctcttt

SEQ ID NO: 184758 - DNA, 75 bp, Homo sapiens
cggattcacacaggatggcttgcagaagacgctatttagaggtggagaagagcgagtacttgagaaagaagagga

SEQ ID NO: 184759 - DNA, 100 bp, Homo sapiens
ctggttgaatacctccctctccactcccatcttcaggctcagaggctttccagaagggtggaaggaaaggagccaagaaggtgatgattgtcatcacaga

SEQ ID NO: 184760 - DNA, 75 bp, Homo sapiens
ctcagaaagatggatttttgcatgagacgcttctggacagttactccacaggatccgctgaacataggatgttgc

SEQ ID NO: 184761 - DNA, 82 bp, Homo sapiens
gggtattacagatgtagatgataaaatcatcaaaagagccaatgagagctcaaatgatacttttcccacagcaatgcacatt

SEQ ID NO: 184762 - DNA, 100 bp, Homo sapiens
gaggccccgagccccgtggatccgctggagcggagccggccgtacgcggtgctgcgagggcagaacctgggcggctgccgagtgatagagcagaaggagg

SEQ ID NO: 184763 - DNA, 100 bp, Homo sapiens
tccgcacacagccttcctcggagaacaagactgcccacctccacaagggcttcctggccctctaccaaaccgtggccctcgagcatgttccaaactcggt

SEQ ID NO: 184764 - DNA, 98 bp, Homo sapiens
actgatgaggatcagcccatggatctcctgtatcgaaggtctaggtcactagtggattatgaaaatgctaataaagcactggataaagcaagagcaaa

SEQ ID NO: 184765 - DNA, 119 bp, Homo sapiens
ccggagtcggggacccaggagtttcctgtgtccagcgctgccggagccgcctgaggacctttattgggcttgaggtcacttcagggcatgcccagttcctggacctggtttcagaggtg

SEQ ID NO: 184766 - DNA, 90 bp, Homo sapiens
gatgagacagagttgcgaccgcgcggcagccaagccaaagccatgtactcctgtaaagcagagcacagtcatgagctttccttcccacaa

SEQ ID NO: 184767 - DNA, 74 bp, Homo sapiens
ccgccgctgctgccgctgctgctgctgctccacacctgcgtcccagggtcgtgctgcggcagcctggcgcccga

SEQ ID NO: 184768 - DNA, 100 bp, Homo sapiens
gggaaaggaggagctggagacagattgtaggaccgagcgcgggcaggcgggaggcaacggagctaccagccggcagcctgcttctgcaaagtggtacgat

SEQ ID NO: 184769 - DNA, 75 bp, Homo sapiens
tggggaacgcggcgaccgccaagaaaggcagcgaggtggagagcgcttgtctccaatgttctcattttctcctgc

SEQ ID NO: 184770 - DNA, 76 bp, Homo sapiens
tgcggcgcgcctgccgcgcggggcaggaatagccaggccagaagaaggaaggcctgtggtgagtgggacaggaaat

SEQ ID NO: 184771 - DNA, 82 bp, Homo sapiens
gatttctcttggatttggctacacacttatagatcttctgcactgtttacaggcacaggttaaaaggactactgactcaaac

SEQ ID NO: 184772 - DNA, 50 bp, Homo sapiens
ggataagacagtcccacagtccaggagagagaagctcttcagaaacagct

SEQ ID NO: 184773 - DNA, 100 bp, Homo sapiens
cttttggacttcagccatgtccatgatgcctaccctgtgaagatctctcaccatccaaaaaagaacaagcacatcatgattgacttggggactggcaaca

SEQ ID NO: 184774 - DNA, 101 bp, Homo sapiens
gctgccgcgccttggagtccggagtaacttggccaggctggccccgagcggaactggagaaagctgagggctactttgacgcacacgctcttgccatggac

SEQ ID NO: 184775 - DNA, 75 bp, Homo sapiens
cttgggctcacttccacaaattaaattcctcatctatgcctgtctgctgctgttctctgtgctgctggcccttcg

SEQ ID NO: 184776 - DNA, 100 bp, Homo sapiens
cggcggtggaggagccggagcataatgtgttctagaacagatcagacattttgtaatgatgcctgaaataaacactaaccacctcgacaagcaacaggtt

SEQ ID NO: 184777 - DNA, 82 bp, Homo sapiens
cggcaggagagtccggccgcgacaggacgaacatccagtcatggataaaaatgagctggttcagaaggccaaactggccgag

SEQ ID NO: 184778 - DNA, 97 bp, Homo sapiens
aagatggcggacagtgcggaactaaaggtagcccagccatgacccataggaatctgacttcctccagtctgaatgacatttctgataaaccggagaa

SEQ ID NO: 184779 - DNA, 100 bp, Homo sapiens
atatcttagtgctgctgctagacctggcctgggccaatacctttgtaatcagaaagtggtggagagagagctggatgctcttttggaacagcaaaacacc

SEQ ID NO: 184780 - DNA, 101 bp, Homo sapiens
cagctcctggccagggcgcgctgccccgcgggtgtgcctgagcctccgcgccccgcaggccctgggcatccccacgctcatcatgctggacccgcagggcg

SEQ ID NO: 184781 - DNA, 75 bp, Homo sapiens
ctgcggggagatgctcttcggcctagtgcgccagggcctcaagtgcgatggaactgtggctgcaccatctgtctt

SEQ ID NO: 184782 - DNA, 100 bp, Homo sapiens
ttccggcggccgaagacactgcgactccggagacagcccaaatatcctcggaagagcgctcccaggagaaacaagttttgcactgattgcaaaaataaag

SEQ ID NO: 184783 - DNA, 100 bp, Homo sapiens
aggagtcagagacattacatcaggaagatactgcagagatattctactccatctcattcattgtacagaaatgttcccactgccaggaggcaggcgccac

SEQ ID NO: 184784 - DNA, 99 bp, Homo sapiens
aagagtttctatgttaggtcaactgatccaactatgatcaagacactgaagcttccattgaagattgacatcattaaacatccaaatgaaacagatggc

SEQ ID NO: 184785 - DNA, 100 bp, Homo sapiens
ttacacagatggaaccagaaaagatacgaggctctaggagaggatcacctgctgttaccagctaccacccataacaagaccacaagaccaaaaatgtcaa

SEQ ID NO: 184786 - DNA, 74 bp, Homo sapiens
atacaagatggttgccgggtcatgttaattgggaaaaaggttgttctggaattgatagagctccgtgaattggg

SEQ ID NO: 184787 - DNA, 51 bp, Homo sapiens
tttcctgtacagcctgcagaactgtctcaccaacggctttgggggtgcgag

SEQ ID NO: 184788 - DNA, 75 bp, Homo sapiens
gaatcccacagaccagcagaagtgaatatgaccatctcccagaacaggccttctatatggtgggacccattgaag

SEQ ID NO: 184789 - DNA, 75 bp, Homo sapiens
ctacggcgaatacagtgaagatgtgcacctgcacacgcccccggcacctgaatgtcaaaactggaccaatggggc

SEQ ID NO: 184790 - DNA, 98 bp, Homo sapiens
agaaacctgaagttagaaaggctcaacgagaacaagctatcagatggtatgttacttacggtcatgaactgatttggaagaacagggagccgctagtg

SEQ ID NO: 184791 - DNA, 101 bp, Homo sapiens
aattccagctggtgctaccaatattgatgtgcggcagcacagtttctcaggggaaacagacgatgacaactacttagtttttcccaaatggatatgccttc

SEQ ID NO: 184792 - DNA, 76 bp, Homo sapiens
tctgcgccgccggcaccatgagggggagctgatcaccttctattactattggaagaagacccccgaagcagccagc

SEQ ID NO: 184793 - DNA, 83 bp, Homo sapiens
ggtagtacatgtttgtaactacctggcattgccttttgttgaggtgagacgtggtcttgtaacacagtggttaagaatgtgac

SEQ ID NO: 184794 - DNA, 75 bp, Homo sapiens
ggaaaccaccccaagcactggcaaagcaggggtccttgtaccatgagatggtgtgttccatgggaaccggtacaa

SEQ ID NO: 184795 - DNA, 83 bp, Homo sapiens
caccgacctaaattaaatgaaggggtggcccggtggaaatcctgccctttctgtacctgggcagtgcgtatcacgcttcccgc

SEQ ID NO: 184796 - DNA, 89 bp, Homo sapiens
tcagactccagttatggctcaacccaaagaaggtgccattgagaaacagaaattggtgtatattttgaacagagatgctgcagcccgac

SEQ ID NO: 184797 - DNA, 51 bp, Homo sapiens
gggactaggcaccctgcacaccctgcacagactatgaaaatgatgttagac

SEQ ID NO: 184798 - DNA, 80 bp, Homo sapiens
aggacacagagctcagtgcaggcactggcaacttctatttgatcctgggtttgagcagtttaaaatgtcagaaagattgc

SEQ ID NO: 184799 - DNA, 100 bp, Homo sapiens
ggaagacgcgtgccgcggcgcctggttgcctgcagcggcccggacccgagagcatgttggcagataaattgaacatgactccagaagaagctgaaaggtg

SEQ ID NO: 184800 - DNA, 76 bp, Homo sapiens
acgccgccatccgggaggcccagggaaggagcttcagtttcagcgactcacccgagaactggaagtggaaaggcag

SEQ ID NO: 184801 - DNA, 51 bp, Homo sapiens
aacctggcacttatgtcctccctggatcttgctgacgtcttgactgtgaac

SEQ ID NO: 184802 - DNA, 80 bp, Homo sapiens
gaaacagatacagagatgtaagcccatgtgtacgtgtcttacgactatggaaaatcattcaagaaaatttcagacaagtt

SEQ ID NO: 184803 - DNA, 82 bp, Homo sapiens
ctagtttgactctgacagtcctcccactaagcccttcctggatctggagagagcagctgctgctgccccaccacctgccagg

SEQ ID NO: 184804 - DNA, 74 bp, Homo sapiens
tttgctggctgtgggggctacaaaaggactgagtggagtagctggagtgagttcccgctgtgaaaaagcctgca

SEQ ID NO: 184805 - DNA, 100 bp, Homo sapiens
cgctccaaggcttcaaggctttgcaagagcacgagcggctccgcaaataccactgaagaggacacactctgcacccccccaccccacgaccttggcccga

SEQ ID NO: 184806 - DNA, 75 bp, Homo sapiens
tcactgtcagcgcctggaaacttgctcactgacaaagcataaatcatggacaccagagaataaggtggacctcag

SEQ ID NO: 184807 - DNA, 97 bp, Homo sapiens
acaactccagtgctaactcaacaggtgaatctggattgggaaagtcgacattaatcaactcattattcctcacagatttgtattctccagagtatcc

SEQ ID NO: 184808 - DNA, 100 bp, Homo sapiens
ggaagatggcggacggcgtggaccacatagacatttacgcggatgtcggcgaagagttcaaccagggctggaaacaggattgttgaaatactccctgaac

SEQ ID NO: 184809 - DNA, 74 bp, Homo sapiens
gagacatggaccgcggcgagcaagaattcctagaggacctgtgcaacaacctcttgaggatcgaatcttcactc

SEQ ID NO: 184810 - DNA, 100 bp, Homo sapiens
caacaacagcaacagcaagaagaagagcccagctagcaccttcgccctctccagccagggaatgaggtgattgcagtggattggaagggcctgaaggatg

SEQ ID NO: 184811 - DNA, 98 bp, Homo sapiens
gagatctctctcatctcgctcggctgcgggaaatcgggctgaagcgactgagtccgcgatggaggtgcctgactgacagaagttcttgcccccgggga

SEQ ID NO: 184812 - DNA, 82 bp, Homo sapiens
gggaaccctggtcaccgtctcctcagatgaagtttcattcttgtcgcccaggctggagtgcagtggtgcgttctcggctcac

SEQ ID NO: 184813 - DNA, 101 bp, Homo sapiens
gcttaaagagctccacattcaggggaaccgcctcaccgttctgcccccagaactagatgagggttactaccagggtggaaaatttcagtttgaaactgaag

SEQ ID NO: 184814 - DNA, 100 bp, Homo sapiens
gctgggaacgccgcagcgacgccggcctctcgagaggcgcgcgccccgccgagatgtacggtgctggagaatctggtaaaagcaccattgtgaagcagat

SEQ ID NO: 184815 - DNA, 100 bp, Homo sapiens
acttctgccgctattgtagcgaactgcggtcgctggaatgtgtgtctcacgagggatatcccagagaaggaaggaaataccctttgccaccaccctcagg

SEQ ID NO: 184816 - DNA, 50 bp, Homo sapiens
gaggaactcagccctgattgcgtaaggaagagcccaacactgctggaagt

SEQ ID NO: 184817 - DNA, 100 bp, Homo sapiens
ctctctagagggccagcagctcttccagaccattcacaagacgagcttctacctggccctctacaagcagatgagcttcctggagaagcgaggctgcccg

SEQ ID NO: 184818 - DNA, 100 bp, Homo sapiens
cagacactgagagccgctttcatcaaggtttctgctttgggacaaccatacatctaattccttaaagtagttttatatgtaaaacttgcaaagaatcaga

SEQ ID NO: 184819 - DNA, 75 bp, Homo sapiens
gggcggctggcctcaccgcccactgggtcttaattacagagcacggtgacctgggtaatagcagatttttagatc

SEQ ID NO: 184820 - DNA, 90 bp, Homo sapiens
ggcatggccccgcaggtcttcacccaggccctggagtgcatgcgcaggatgcattcagtctactagcatattcagatccctggaacagcc

SEQ ID NO: 184821 - DNA, 98 bp, Homo sapiens
ttgctatggtgttgctgtcattcatggtggctgtatggacagtctgacagaacagagactgacatctcccaatctgccggccccccacctggaacact

SEQ ID NO: 184822 - DNA, 75 bp, Homo sapiens
gctgaagcctttaaatgcagcatctgcgatgtgaggaaaggcacctccaccagagtgatggtgatgattttaatt

SEQ ID NO: 184823 - DNA, 99 bp, Homo sapiens
cgcaaacaacttatcagtagtgacttacagtaagatcccatggactggagccccagcaatgtgcagaagtggctcctgtggacagagcaccaataccgg

SEQ ID NO: 184824 - DNA, 51 bp, Homo sapiens
ctggtggtgaatccttcacagtctgttgcattaaaatcctcccctactgaa

SEQ ID NO: 184825 - DNA, 87 bp, Homo sapiens
agaatattggtcaagttgctgaccttgaagtcatttggatccaggattcctagcaagtgacaaaacatctggcaatgcgccactcaa

SEQ ID NO: 184826 - DNA, 83 bp, Homo sapiens
cctggatcttcgaacttttgacacggctttggaaacgacgtcatgtgttaggccatactggagatgttactattcaaacacag

SEQ ID NO: 184827 - DNA, 89 bp, Homo sapiens
gaggacaaagagcccctcatcgagctcttcgtcaagagtgatcagcagctggactgtgccttggacctaatgaggcgcctgcctcccca

SEQ ID NO: 184828 - DNA, 98 bp, Homo sapiens
cgagcggcggtgatgctccgactccgggggtgccgaccggctcccccagcccagggtgaggtggctttgaccccgggttgcccggccagcacgaccga

SEQ ID NO: 184829 - DNA, 74 bp, Homo sapiens
ggacccctcaaacaaaaacagccaagcttttctgccaaaaagggaagagtgacccattttgcttgttggagtta

SEQ ID NO: 184830 - DNA, 80 bp, Homo sapiens
agcatttcatccctcgtcgaaaggattggattggcatctttagatatacactaccactggaactgataaaccaacagaac

SEQ ID NO: 184831 - DNA, 129 bp, Homo sapiens
aaagccccaacattacagaccggtggatcctgtccttcatgcagtctctcattggcttctttgagactgaaatggcagggtgtccgcaatgttgccagtgtctgtctgcagattggctacccaactgtt

SEQ ID NO: 184832 - DNA, 100 bp, Homo sapiens
gatcagtttccggaggtctacgtccctactgtctttgagaactatattgcggacattgaggtggacggcaagcaggattgacggcgtgagtttactggtg

SEQ ID NO: 184833 - DNA, 100 bp, Homo sapiens
ggcgtgtcggtgcgcggtgctccgtggctgcgctgctggaacccgctggaaggaattgaatgatctggcacgggaccctccagcacagtgttcagcaggt

SEQ ID NO: 184834 - DNA, 75 bp, Homo sapiens
cctggagttaaggaacagatccccggaggagcacatggattaattgatgtatgttgagtttatggagctgccttt

SEQ ID NO: 184835 - DNA, 98 bp, Homo sapiens
atctcttttttcagccacctccactgactcctacctccaaagtttatactatcagaccttattttcctaaggatgagtactatactggcaattgctgg

SEQ ID NO: 184836 - DNA, 89 bp, Homo sapiens
gggaaatcagggcatcggagagtgccacattaatggggatcgtgggactttaccagatcggtttgtaataacacctcgaagacgctatc

SEQ ID NO: 184837 - DNA, 90 bp, Homo sapiens
gagatcgacctggtcaaccgcgaccctaaacacctcaacgatgacgtggtcaagttctgggaggtgatcagtgatgaacatggcatcgac

SEQ ID NO: 184838 - DNA, 100 bp, Homo sapiens
aaatttgctctgctaaaaggctccttcagtgagcaaggcatcaacgagtttctcagttgtctatcaacgtctatgactacaactgccatgtggacttgat

SEQ ID NO: 184839 - DNA, 101 bp, Homo sapiens
aagatccagatcgggatttacgtggagatcaagcgcagcgatggggctgataacatccggaaatactggagccgctactaccaaggatctcaaggggtaat

SEQ ID NO: 184840 - DNA, 100 bp, Homo sapiens
tgaagatgctttgccacccccatatcatcaggctctaccaggttcgctgtgatcctgagattcaagaactgcgtcagtggcagaagaaacttcgcgaggc

SEQ ID NO: 184841 - DNA, 100 bp, Homo sapiens
gtcgcatcaaacagatgactacccagggagaggaattacgggaacagaaagaaaagtccgaaagagctggcatagaatgtcaagctaaccaggcgtccgc

SEQ ID NO: 184842 - DNA, 100 bp, Homo sapiens
caagaagaacttaagcgaggccctgggggacaacgtgaaacaagcgtcatgaacaggatgcacgtggtcagcgtcccctacgcgctgatgaaggcgaacc

SEQ ID NO: 184843 - DNA, 74 bp, Homo sapiens
gaattaagaggagaaatagcaggacctccagacacaccatatgaaggaggatgaaattttgaacagatcaccaa

SEQ ID NO: 184844 - DNA, 83 bp, Homo sapiens
gatgcccgtgagcctgttgtcggggccagcaaattgtggctactaatttgccccctgaagatcaagatggctctggggatgac

SEQ ID NO: 184845 - DNA, 96 bp, Homo sapiens
cgggagtcgggggcggtgggacagtgcggctactcttgatcctctccggctgcttggtctacggcacaggaacgactgaagctggtgactgttttg

SEQ ID NO: 184846 - DNA, 98 bp, Homo sapiens
cttttgttaattatcttaaatacttgctttactggaaagacccagaatatgccaagtatctaaagaaatgcttccagactgcacacttttacttagag

SEQ ID NO: 184847 - DNA, 50 bp, Homo sapiens
agagaaaatagactttcttcttgagcaatggcaccagcatgatatcattg

SEQ ID NO: 184848 - DNA, 90 bp, Homo sapiens
gtggacagttgcgtgtcagatgcagccgtgccagcccaagaccccagcaacagcgatccaggctgaccggttccctgatgtgttacctgc

SEQ ID NO: 184849 - DNA, 122 bp, Homo sapiens
cgtggaggagctgtgcagccgcgaggaggcgcgggaggtgttcgagaacgaccccgagacgcttccccgggcgctgcctggacaggcctgcctgcgtgctgggacatgtctggcctccaagg

SEQ ID NO: 184850 - DNA, 75 bp, Homo sapiens
atttctctctttgggaggaggaagggacaccgagggaccaaagggcgctcctactccaatgtggccagatgacct

SEQ ID NO: 184851 - DNA, 100 bp, Homo sapiens
aacatgacgctcatcggagagaacggccacagcacagacacgctcacgggctccggcttccgcgtgggcagtgcgctggacacgcagatgcgcttgggag

SEQ ID NO: 184852 - DNA, 100 bp, Homo sapiens
atttaacagacattgtgtggtgggctggcacaatcgcaagctctcccggctgtgatagaccttcagttacagagagagggagcagagtgggaccaggtct

SEQ ID NO: 184853 - DNA, 101 bp, Homo sapiens
cgacgcggcgcttgttggcggcgctgcgaggccagagcctagggctagcggccatggttttgcacactagggaccaagaagccctcggggacactgctgag

SEQ ID NO: 184854 - DNA, 100 bp, Homo sapiens
cccacagaggactttaggagaaagttgctgaaggcaggagggctgaataccaagagatatctcctgatatctgcacctctgtggataaaacacatctctg

SEQ ID NO: 184855 - DNA, 95 bp, Homo sapiens
tccatcacaagtggtgccttaacgggagccatactggcagcaagaaaatacagattctgttcatcttgctctgaaattaaataattctgaactca

SEQ ID NO: 184856 - DNA, 74 bp, Homo sapiens
cgctgcgggaccccgggcactgttgctgctgcgggagtttgaaggatgacctctaggaagaaagtgttgctgaa

SEQ ID NO: 184857 - DNA, 75 bp, Homo sapiens
acggcggcagcgctggactaggtggcaggtgaagaacgaggtggagaagctcccccgacagcagcggaaggaaag

SEQ ID NO: 184858 - DNA, 74 bp, Homo sapiens
tttaatggaaaatcgcttggttaaaacctgacacttttaacagtccagaacatacatgtgcagctggcaaggag

SEQ ID NO: 184859 - DNA, 101 bp, Homo sapiens
agaaataccagtccccagtgagggtgtacaaatacccctttgaattaattatggctgttcttctgagctatgaaggggcccagatttaagggctatttttg

SEQ ID NO: 184860 - DNA, 98 bp, Homo sapiens
tggtggcccacttttcctcctgccagctcccagatggacgtatcatcaaagttgggggagagagatttgaagcaccagaagctttatttcagcctcac

SEQ ID NO: 184861 - DNA, 100 bp, Homo sapiens
ctacgcatatgtaactgagcgccaaaaagtacactgcctcaacacacttttctccagggctgtgtacatgatgccaaccgagggggatgattcgtctaaa

SEQ ID NO: 184862 - DNA, 100 bp, Homo sapiens
ctgcctttgagcggactcccttttaaggccaacagagattttgagaaacacattgaaggatctgttaacacttgatatacccaataaaagcagtggttgt

SEQ ID NO: 184863 - DNA, 83 bp, Homo sapiens
ggaacgaggcaaggagctaaagcagcgtgcgttcagccctgggttccaaagaactactggttcagattttagctcttcccaag

SEQ ID NO: 184864 - DNA, 75 bp, Homo sapiens
gttgctgcgctctgctcggtgtcgtggcctcgcagatgagttgctacgatggaagttaaagggaaaaagcaattc

SEQ ID NO: 184865 - DNA, 76 bp, Homo sapiens
acttcaaaggggaaagcaaggccaaagacagggagaagatgctgcacttaaaaggatgcttgttttgatgtcctgc

SEQ ID NO: 184866 - DNA, 100 bp, Homo sapiens
cctgctgaatagctggggctacaggcgtgtgtcactgcgcccaggatccactagttcctggactatgggaactgatgactcgcccaatgtcacagatgat

SEQ ID NO: 184867 - DNA, 73 bp, Homo sapiens
tggccgtctgcagtatgccctcacctgcctgcggaaggtgacaggcctggtggaaattgcaacactaacaaga

SEQ ID NO: 184868 - DNA, 75 bp, Homo sapiens
tccacattgagagcaaaatctacaagatgatgcagggaggaggaaaatatgttgtgttcttcttttaccctcttg

SEQ ID NO: 184869 - DNA, 90 bp, Homo sapiens
cggctaactatggcgaccgccacggagcagtgggttctggtggagatggtacaggcgctttacgaggtggagtattgctcctggaaaatc

SEQ ID NO: 184870 - DNA, 82 bp, Homo sapiens
ggaaaacaagctcagggcttccactgattctacattatgttctttggggtgactttcaagatggactctactctaacagcaa

SEQ ID NO: 184871 - DNA, 74 bp, Homo sapiens
gcctgcccagacggctcacctgtgcgggatggaacaaaagaatttatccagttggcgaaggactttgaggattt

SEQ ID NO: 184872 - DNA, 100 bp, Homo sapiens
ctgaaagcactttatcattatgcttcctcaagatcgaggggcttcaggacagtgaacatacccctaagggagcctgtgcaacatcggtgaaggttgctat

SEQ ID NO: 184873 - DNA, 97 bp, Homo sapiens
gagtttgtaatgtgactagacggccagccagtcatcaaacgaaattgcccggcatttacgccctggaactctcagagcaatctttggtaaaactaag

SEQ ID NO: 184874 - DNA, 50 bp, Homo sapiens
tgtcttcatggacatttttgaacttgtggctcaggcagctgtccaaggac

SEQ ID NO: 184875 - DNA, 51 bp, Homo sapiens
gctccgacggcggtccatcctggcatccgtgtcattctggaccttactccc

SEQ ID NO: 184876 - DNA, 82 bp, Homo sapiens
ccagcctgcggagcctgtggggcagatcaatgaactgagccatgttcaaatccctgttatgttgatgccagatgacttcaaa

SEQ ID NO: 184877 - DNA, 95 bp, Homo sapiens
cgatgatgtccctgcagggaaggtcagagatgtcatcatcgctgcaagcgttgcaggaatgggcttggcagccatgagccttattggagtcatgt

SEQ ID NO: 184878 - DNA, 83 bp, Homo sapiens
aagtctgtgtcaaacatccatatcataagtggaattttggagatattcaaagagctggaagtcgagtgtgctactcaactcag

SEQ ID NO: 184879 - DNA, 60 bp, Homo sapiens
ggctcccactgattctacattatggacttcctgatccatttgctaaggtggtggttgatg

SEQ ID NO: 184880 - DNA, 50 bp, Homo sapiens
gtcactcataagcgcgctcaagagtaagaatgattgatgttggctgatat

SEQ ID NO: 184881 - DNA, 83 bp, Homo sapiens
taccactcacccgcagactccttctccagcatgggctcgcctgtcaacgcgcaggattgtcagtggcttcgccccgaggagag

SEQ ID NO: 184882 - DNA, 83 bp, Homo sapiens
agttggcgtcccttctccctctccgagtgctgctcctgtcattgtggccatggacgggtactactacgacctcgatgactctt

SEQ ID NO: 184883 - DNA, 100 bp, Homo sapiens
agacatcttctccctcccttgcctcagactgcttttggcttctggatgccctcctccagtacacatcgtatggggtgacaccgcctagcctcagtcactc

SEQ ID NO: 184884 - DNA, 83 bp, Homo sapiens
caatatgtacgacgcggatgagggtgtggatgaggtcaccattgtcaacattttgaccaaccgcagcaatgcacagagacagg

SEQ ID NO: 184885 - DNA, 100 bp, Homo sapiens
tgccgctgtcccgtggagcggatctgtaaaaaccacatcctcaacaacctcgtggaagcatacctcatccagcatccagctagacctggaaaaggggaag

SEQ ID NO: 184886 - DNA, 100 bp, Homo sapiens
caacaagaaatcacagtgctgagtcagtgtgacagtccatatgtaaccaaatattatggatcctatctgaaggttgaactcccaccacctgatcttggac

SEQ ID NO: 184887 - DNA, 100 bp, Homo sapiens
ggaaggatacagctatgcaaatatagaacactaaagtgttacatgacagatgtatgaggtttgcctgcaatgagatttcattctctacatttaaaggaca

SEQ ID NO: 184888 - DNA, 74 bp, Homo sapiens
gggaagccaacgaccacacgcagtgaaatgacaatggatgctctgttggctcgattgaaacttctgaatccaga

SEQ ID NO: 184889 - DNA, 50 bp, Homo sapiens
cagcctcccgaagtgctgggattataggtgtgagccactgcacccagctg

SEQ ID NO: 184890 - DNA, 101 bp, Homo sapiens
catcgtctgtttgtgcctcggcttctggcggtgattcgcaaggggtggctcaccatcagcaacattggcatcatgaaaggcggctcgaagggatactggtt

SEQ ID NO: 184891 - DNA, 82 bp, Homo sapiens
accagcaggagtgctgccagaaatttgaacaactttccgaatctgcaaaagaagaggaggaacccgttttcactagacaaga

SEQ ID NO: 184892 - DNA, 100 bp, Homo sapiens
cccgaaatacgtggaactcatcaaccaggctgcccggctcaatggtacaggtttgcagattccgccagcagcacagcaagctctacagatgagtggctct

SEQ ID NO: 184893 - DNA, 75 bp, Homo sapiens
gtacccaatgacggttgcttgaactttattgaggatggagatgaagatgaggaagctgagtcagctacgggcaag

SEQ ID NO: 184894 - DNA, 88 bp, Homo sapiens
atcttgaatcagaaattgagaagctgcgccagcagccctgtggtggcgacgacgatggaccaggagccagtgggcggtgtggaacgag

SEQ ID NO: 184895 - DNA, 74 bp, Homo sapiens
atgagtgtaaggttaccccagagtatagacaggtgcagtagacattgttgcaatcatgatcggcaatctgaaag

SEQ ID NO: 184896 - DNA, 100 bp, Homo sapiens
ccgcagcagcagcggcagtcacaggcacatcagcaaagagggagataacctaattactgagtgtcgctacaacacgaaagatagagctgagatgacttgg

SEQ ID NO: 184897 - DNA, 80 bp, Homo sapiens
ccggcgagatcgagctcgagctgcagcgggcgggggagagagacagagaagtgagcagcctgaacagcaagctgttaagc

SEQ ID NO: 184898 - DNA, 75 bp, Homo sapiens
aggcggcaggaatcctcctccggcgatagactgtgatcaaccactctatgattgtcctatgtgtgggctcatatg

SEQ ID NO: 184899 - DNA, 97 bp, Homo sapiens
ccgcgcgcagggcctgcagcgggagctggacggcgagcgcgagcggcgcgagaaagctttatcctgtggataaacgcagagtgaacgagtttgggga

SEQ ID NO: 184900 - DNA, 100 bp, Homo sapiens
ggacaccagtggagcactcaggccagagtcctgagcctcctacctctgctggaagcccagatcccattgtgtgccaacctagtaccggtgcccatcacca

SEQ ID NO: 184901 - DNA, 80 bp, Homo sapiens
gaggaacagaagcggaacagccacagcagcctcccaaggagtctgcaagttggccagcactccttgcccgaggacagaga

SEQ ID NO: 184902 - DNA, 90 bp, Homo sapiens
caccaacagcggcgcgggcaagaagcgctttgaagtgaaaaaggtggctattatcatggaaaactaatttttcccagagaatttcctttc

SEQ ID NO: 184903 - DNA, 83 bp, Homo sapiens
atcagctggacaacttgttgttaaaggagtccttgctggaggactttaaggtcatcatcagatttgaaatatttaaagtggat

SEQ ID NO: 184904 - DNA, 100 bp, Homo sapiens
gggagcggctgcgggcggacagtctggactcctcaggcctctcctctgagcgctcagactcagaccaaggccaaggccaaggatcaaaccaaggcccagg

SEQ ID NO: 184905 - DNA, 90 bp, Homo sapiens
ctctgaccgcaaacaaggagagcctactgagcagcctgagtgggtgtacaagggagaagaagccacattccaaatctcaggcctccagac

SEQ ID NO: 184906 - DNA, 100 bp, Homo sapiens
aaggatgttggcggtccctgtgacctgtggagacacggccagatctgccctccagaagtttatctcgacaatgctagttgcagtctgtgtgaccctgacc

SEQ ID NO: 184907 - DNA, 99 bp, Homo sapiens
acaacatggcagacattgacaaatgctattaactgagtacttggatatgaaaaatactcgtacggcctctgaaccatcagctcaactaagctatgccag

SEQ ID NO: 184908 - DNA, 80 bp, Homo sapiens
ccgcaaccggaggagggagctgactgatacactccaagcggacattggctccctggattatcaagagtttgtagttgaca

SEQ ID NO: 184909 - DNA, 100 bp, Homo sapiens
agcatgtggctcctggtcagtgtaattctaatctcacggatatcctctgttgggggagaagcattgcagtgtcgagatggctatgaaccctgtgtaaatg

SEQ ID NO: 184910 - DNA, 50 bp, Homo sapiens
aagagatggaaacttacttgaagaaggctcatatctggtgttagtcggcc

SEQ ID NO: 184911 - DNA, 75 bp, Homo sapiens
cgagtccggaccggagactttggggcctaactagggtgaaggttgccgaactgtccccctggctggacatgtggg

SEQ ID NO: 184912 - DNA, 89 bp, Homo sapiens
cgtccgccgattcctcctccttggtcgccgcgtccttggctggcgtaaattccgggtagatatgcctggctcaggcagtgcattcatcc

SEQ ID NO: 184913 - DNA, 100 bp, Homo sapiens
agaagtcggtcttttgattacaactatagaagatcgtatagtcctagaaaaaagatgtgcgggacatcctcaccccaattcagattgaagctgcttacca

SEQ ID NO: 184914 - DNA, 100 bp, Homo sapiens
agtcggcggagcttcgccaaggctggcgcagtcgggccgttgctccagggagaactgcaaatatcttcatccacccccacatttaaaaacgcagttggag

SEQ ID NO: 184915 - DNA, 88 bp, Homo sapiens
tgaggcctccccagccatgcagaactgtctgccatcatggatgttctcgcagaagcaaatggcacctttgccttaaaccttttgaaaa

SEQ ID NO: 184916 - DNA, 100 bp, Homo sapiens
cgcggctggcaagactgtttgtgttgcgggggccggacttcaaggccaaagaactgccaactctgaaagataatgatttcattaatgagggccaaaagat

SEQ ID NO: 184917 - DNA, 75 bp, Homo sapiens
gcgattcggctcatccgcttctgtggcaaatacgtctctgagaggcctcggggaggagctttatctttatatact

SEQ ID NO: 184918 - DNA, 82 bp, Homo sapiens
cgccgccgccttgctgctgctcaaagctgctgccgccccttgggctaaaagctgtttgcagacaaggtcccaaagacagcag

SEQ ID NO: 184919 - DNA, 90 bp, Homo sapiens
agacgggtgaagtacaggctcagtctgcggccaagactccatcctgcaagaggcattcgacttacagcagtgtgcggccagccagcagag

SEQ ID NO: 184920 - DNA, 83 bp, Homo sapiens
ctgcatctttgacaagtttgagtgttgctggaacggttcggataggagtgtggccatctggggccgtgtggtatttgccactc

SEQ ID NO: 184921 - DNA, 75 bp, Homo sapiens
tccctcatccggaccatcatcggcggctcaaactgtccaggttgctgaagttgaaccacagtcacagccacagcc

SEQ ID NO: 184922 - DNA, 112 bp, Homo sapiens
ggctcggtcggggcgcgggagcccgaggccgcggttacagaatgtctgaaggggacagtgtgggagaatccgtccatgggaaaccttcggtggtgtacagatttttcacaag

SEQ ID NO: 184923 - DNA, 82 bp, Homo sapiens
agcagcagcagagatgataacatgtttcaggcccttcataacacaaggcttttatctgcttattccgccattgatcccagag

SEQ ID NO: 184924 - DNA, 75 bp, Homo sapiens
cgagtatctggtgaagtggaaaggatggcccccaaagagttttgagagcaaaatgacaacacccagaaattcagt

SEQ ID NO: 184925 - DNA, 100 bp, Homo sapiens
ccagcacaccccaggagagaggactggggtcccaggagtaggaggagccgaggcctgcctggagccccagatcaccccttcctactacaccacttctgac

SEQ ID NO: 184926 - DNA, 75 bp, Homo sapiens
tgaagataagaaaggggtgcagctacaggataaaatggaccagttgctacagatgctgcaaagtacagaccccag

SEQ ID NO: 184927 - DNA, 75 bp, Homo sapiens
ggagcatgggttaccagcgacgcacccttagagacggggtttcaccatgttagccaggatggtctcaatctcctg

SEQ ID NO: 184928 - DNA, 83 bp, Homo sapiens
agctgttgctgctcacgatgttggagaatatgtgcggcattatccacgaggcaaacggaaagctccaaccatggccatggggc

SEQ ID NO: 184929 - DNA, 81 bp, Homo sapiens
gtccactgagctgatctcctctctggagcaccggggccaccaggagggagtaagcggcgggctcgccagcctcgagcgaaa

SEQ ID NO: 184930 - DNA, 82 bp, Homo sapiens
cctactccaccatcatcaacaaagtgtaaagaaagaatgaggcctgttaaagcagctttgaaacaacttgataggcctgaga

SEQ ID NO: 184931 - DNA, 83 bp, Homo sapiens
ctccgagccccttcctgagaagatcccagacaatgcagatcttcgtgaagactctgactggtaagaccatcaccctcgaggtt

SEQ ID NO: 184932 - DNA, 98 bp, Homo sapiens
agacattcacccagcatcaaggggctgtcaaggccgaaatagaactatttgtgaacagacttgattcagtggaatcagttcttccttatgaatacaca

SEQ ID NO: 184933 - DNA, 98 bp, Homo sapiens
gaaacagtagtggagaatcaagggcagcaaggagcgcttccactggcagagccacaacgtgaagcagagcggcgtggatgacatggtgcttcttcccc

SEQ ID NO: 184934 - DNA, 98 bp, Homo sapiens
cagaaaatggatcgtccaaatggtctttatccaaattatttgaaccccagaacagggcgctggggtcagtcatgcaaggatctcgtggctcctgtccg

SEQ ID NO: 184935 - DNA, 96 bp, Homo sapiens
ggcagccgcggatcgccgcgctcagcgacaaacaaacaaatcttcctattttcaagctgaaagaatctactgttagaagaagatacagtgactttg

SEQ ID NO: 184936 - DNA, 96 bp, Homo sapiens
tgggacttcatctacaatttttagtggagttgccatctatgttaatggatacacaggctctatctaatgttcctcctctccggaactactttctgg

SEQ ID NO: 184937 - DNA, 75 bp, Homo sapiens
gagacaagctgagcttgccgcacaaaaagctagagaggagtctctgagaacaagccagccagaggagaagaagga

SEQ ID NO: 184938 - DNA, 74 bp, Homo sapiens
gtggaaagaagacttggctacatttattgaagaattggaggcttattgcagtatattatatctaaagccaagaa

SEQ ID NO: 184939 - DNA, 90 bp, Homo sapiens
gagtccagccagcgctcggagctggaggcccacgtgggagcagtgagcggctgtcctttcccataacctgtgcacggtgctgaaggttcc

SEQ ID NO: 184940 - DNA, 100 bp, Homo sapiens
gcgccgccaccatgttcctgggcaccggggagccggccttggacacggactccagaagacctttccagattcgtggttgagctgcagcagagggagcttg

SEQ ID NO: 184941 - DNA, 75 bp, Homo sapiens
tactcacccgggtaacgagcagggtttgagcacaaaatgaacataattagggaaaataaggatctggcatgtttc

SEQ ID NO: 184942 - DNA, 75 bp, Homo sapiens
agataaagtttgatactgaaatacaaggccaaatttgagtccctctttaggacgtatgacaaggacatcaccttt

SEQ ID NO: 184943 - DNA, 100 bp, Homo sapiens
gtcatgacggggatgtatggggaccctgcagaaatgggtgccggaatctgtctcctgatcatcattcagctcctggtggacccatgtggaaatgggacct

SEQ ID NO: 184944 - DNA, 100 bp, Homo sapiens
ctgttcggaaccccagagcacgagtagtagtcttaagaattgctgctaaaattgattcaattcctcacttgaataattccacacctctagtggacccctc

SEQ ID NO: 184945 - DNA, 87 bp, Homo sapiens
gaaaggattcgttacagccagagattgagaatatgaaactggtgtcaaaatgacatccagatttgggaaaacatacagtaggaaagg

SEQ ID NO: 184946 - DNA, 82 bp, Homo sapiens
ccttggtgtcatccagccttagcaaaccagagaaatttggagacagacaacttgtcacgcatacagggaaaatgacatttga

SEQ ID NO: 184947 - DNA, 75 bp, Homo sapiens
tggctgcagaggatccatctgtcttagcaaggctgtcatcacagttgaccccctgtttacagtgccagcgccacc

SEQ ID NO: 184948 - DNA, 82 bp, Homo sapiens
cgagctgagtggttgtgtggtcgcgtctcggaaaccggtagcgcttgcagcatggtctcggcgcggaagatggccggcggcg

SEQ ID NO: 184949 - DNA, 83 bp, Homo sapiens
tgagcccgcggagtatacaccatgagcaaagctcaccctcccgagttgaaaaagcagtcatggatcaggtaatgcagtttgtt

SEQ ID NO: 184950 - DNA, 90 bp, Homo sapiens
gtcagtgtgacagtccatatgtaaccaaatattatggatcctatctgaagtatgttggtgagagtgaacgtgctgtgcgacaagtttttc

SEQ ID NO: 184951 - DNA, 90 bp, Homo sapiens
tgactgtctctccagatggatccctctgtgcttctggaggcaagagggtacaccacccggactacaacaatgagttgacccagtttctgc

SEQ ID NO: 184952 - DNA, 100 bp, Homo sapiens
agctaccctccactctaaagagacatcatcttacagattgggatcccagccttctcaccagctctttcaccatgcctggatcacttcctttgaatgcaga

SEQ ID NO: 184953 - DNA, 100 bp, Homo sapiens
ggatcaggcggccgcccctggggagttcctctgtgacgagggtgcaggtatctctggggactacatcgatcgcgtggacgagcccttgtcctgctcttat

SEQ ID NO: 184954 - DNA, 82 bp, Homo sapiens
tgaaaacgcaagccaggctaaacagttggcagtttctacagcagtataatcactacaaatccaatgtggagattttcaaatt

SEQ ID NO: 184955 - DNA, 98 bp, Homo sapiens
gctttgtagctcgctcaagatggcggcgcagccaccccgcgggatacgcctcagcgcggcgcaacgtgctgagcttgtcccctggaatcgaccaccca

SEQ ID NO: 184956 - DNA, 90 bp, Homo sapiens
gcagggcgctgggccgggtttcggcttcggccacaggttctggctccttggcagcaatggctgtatttgaagataagtttaggccagaca

SEQ ID NO: 184957 - DNA, 97 bp, Homo sapiens
ccggcgcccaggcctggggcaccgcgagtgccgaaccttcggctgggtccccagccccaccccagccccaaaggaggctgttcgagagggacgtcct

SEQ ID NO: 184958 - DNA, 75 bp, Homo sapiens
gtgatattgtagaaattgctgctctggcagaattcacagaggcagatgaagcaatggcagaactcgcaattgctg

SEQ ID NO: 184959 - DNA, 75 bp, Homo sapiens
ggcacagcccgagaaaccgcagcactacacgcctgacggaggacgaggacgtgcgcgccatgctgcggggctccc

SEQ ID NO: 184960 - DNA, 100 bp, Homo sapiens
gccgtgagcctcccgcccaaggagaatgcgctcttcaagcggatcttgatctcacattcttgaaggtggcattgaagagcactaagatcggaagatgagt

SEQ ID NO: 184961 - DNA, 100 bp, Homo sapiens
ttcacatgtatgctcatcggggagatctttgagctcatgattccaccagtactgttgctgctcttctcatagacttcaaaagctcattgcttcctcacct

SEQ ID NO: 184962 - DNA, 75 bp, Homo sapiens
cccatgaactaaataatctcctgtctaaactacttctgttgcgaggatacgccttcaaccactctgctgattttg

SEQ ID NO: 184963 - DNA, 83 bp, Homo sapiens
cgacgagaagccccaacagcacggcgtggcctctcagcctcggtaagaatgattgatgttggctgatattggagtgctcattc

SEQ ID NO: 184964 - DNA, 96 bp, Homo sapiens
ctgaagagcgacaagccgctggcagccgcggatctcaccgccgctcagggaccaagaatcgccttcagccctgtctggtgcatccttggcagaaag

SEQ ID NO: 184965 - DNA, 98 bp, Homo sapiens
tgaagatggagcagtgaacagcactgacccagcctgtcctcctgttgcctgcaggccagttgatggagaaccttgtgacctgtctttgaatataacct

SEQ ID NO: 184966 - DNA, 83 bp, Homo sapiens
gcaaaatcgagcgggccattggaggctactcacagtcgaactacaactccccggggtccggccagaactacagtggccctccc

SEQ ID NO: 184967 - DNA, 75 bp, Homo sapiens
gtcatgtggcagtggaaaatgcgctcgggctggaccagcagggaaccctactctggaaactgtcagtcccagggc

SEQ ID NO: 184968 - DNA, 100 bp, Homo sapiens
ttgagtctagcaagtgttattatttctgccctttgtacccttacaagctactgtgtgaagacattcacaggacacagagaatgggtacgtatggtacggc

SEQ ID NO: 184969 - DNA, 100 bp, Homo sapiens
tcggctttggcgctcggggtgactcttctcaaatgccttctcatccccacatagtcttatatccagatggccaggctcagatgattcaccccaagcctgc

SEQ ID NO: 184970 - DNA, 75 bp, Homo sapiens
aaggacccaggacacccggaagccggaaatggaagaaggtagataatgactataatgcccttcgagaaagactca

SEQ ID NO: 184971 - DNA, 74 bp, Homo sapiens
cgagcgcgagcggcgcgagaaaggacgactggagtgagcactggcctgggagtctgaagattgtgccttcagac

SEQ ID NO: 184972 - DNA, 83 bp, Homo sapiens
ggatgactgagtacctgaaccggcacctgcacacctggatccaggataacggaggctgggagaagatggtataaactggtcca

SEQ ID NO: 184973 - DNA, 50 bp, Homo sapiens
ttacgatacacactggataacaatcttctcaaaagtgaaataagaagatt

SEQ ID NO: 184974 - DNA, 75 bp, Homo sapiens
ccaagcgccgcggttaaccacgtctcgtccacgacctccctagggattaaagcctgtggtttccacagaagcacc

SEQ ID NO: 184975 - DNA, 75 bp, Homo sapiens
cttcggcgcgggactcaagtacaactcccggcacgagcagcccctgtcaaagggaacaggaagcagtccacggag

SEQ ID NO: 184976 - DNA, 74 bp, Homo sapiens
cgacttcgctcagtataacagctatggggatgtcagcgggggagtgcgagccaacttcacgttgccagatgttg

SEQ ID NO: 184977 - DNA, 75 bp, Homo sapiens
gccagcgcaccggtcccccagcggcagccgagcccgcccgcgcgccggaatcccaataaccctgtttaaagagga

SEQ ID NO: 184978 - DNA, 100 bp, Homo sapiens
tgtattcccttaaaaagacggacagcccatcgtgtgaactatagagtttgtggacagatttatattgaaatcccaagttgaccgtcaagtccaacgctcg

SEQ ID NO: 184979 - DNA, 100 bp, Homo sapiens
cagctgctggcccgcgtcaacaaggagcatgagcacaagctgaaggtgaattcacataaaagggcatcagaaaaatacaaagacaacccatcaatatcag

SEQ ID NO: 184980 - DNA, 50 bp, Homo sapiens
gagtgcggatttctgctatgatgacagatacaaggcagatccaaccatcc

SEQ ID NO: 184981 - DNA, 75 bp, Homo sapiens
catcccggccacgcgggtggaggtgtccgtgtcctgcaggtctccggcaagaatatgcagccaccacgtctcggc

SEQ ID NO: 184982 - DNA, 82 bp, Homo sapiens
gcagacggcgagacctcctgcacaggttaatttggagtggcccctggagtcagtttcctacaccatccgaggccccacccag

SEQ ID NO: 184983 - DNA, 51 bp, Homo sapiens
ccgagatcgccaagatgttgccagggaggtttccattaactttggaccatg

SEQ ID NO: 184984 - DNA, 88 bp, Homo sapiens
ttaaatgatacctatcactcaagagactcttcatttagattggattctgaatatcaggagttctttggaatttatcctcatgtgatgc

SEQ ID NO: 184985 - DNA, 75 bp, Homo sapiens
gccggagctgggcgcggattcgccgaggcaccgaggcactcagaggagatgcctgaggaaacccagacccaagac

SEQ ID NO: 184986 - DNA, 87 bp, Homo sapiens
gattcgcagtggtcgcttcttctccttgctatgaggtgtcaggtcgcattgaggccattgagggctcaagagaggacatcgtggttc

SEQ ID NO: 184987 - DNA, 75 bp, Homo sapiens
gcgcctgctgcctgagcccgccagcgacgtgcgcctcgggagtcggcctgtgagcccccaggctccgctcttgcc

SEQ ID NO: 184988 - DNA, 100 bp, Homo sapiens
aggcttccaaccccgtcgtctgcacgcagcccaaatccccatccgggacagtgtgcacctcaaggatttcccagatgacccaggcatgcagtgggacaca

SEQ ID NO: 184989 - DNA, 99 bp, Homo sapiens
cccgctgctgcccccgctgctgctgctgctgctgtgggcgccgcctccgagccgcgcagatttctccacccaggtgaactcctccctcacctccccgac

SEQ ID NO: 184990 - DNA, 100 bp, Homo sapiens
tgctatattctaagaaattaaaatgtccagaaatctgcctctataatacatatgtgtcaagttcagagaatgatgaagatgtgctagttactacagagcc

SEQ ID NO: 184991 - DNA, 100 bp, Homo sapiens
cgggactaaactggcgggctccgtggaagcgtggccggcagcgtcccggacgaggagaccagaagggaaagatttcagcattcatcgacttgtcctgggg

SEQ ID NO: 184992 - DNA, 122 bp, Homo sapiens
gtttatacttacaacaaggaagggactttaatcactgaccatcccaatatacaggttaatttggagtggcccctggagtcagtttcctacaccatccgaggccccacccagcacgagctaca

SEQ ID NO: 184993 - DNA, 101 bp, Homo sapiens
gggggctttcgcccgggtcctcctagaaattccccccgaagaagactcccccacatctgggtgagcgagtgctgtgctttcatgggcctcttctttatgaa

SEQ ID NO: 184994 - DNA, 99 bp, Homo sapiens
tgaacctgttcgccacctgggaggtggacggctccagccccagctgcgtgcccagacaagttggatggcttgaggactggtactaaaaggaaacgtgac

SEQ ID NO: 184995 - DNA, 98 bp, Homo sapiens
aaaagaggagaaggggagaaaccaggcagtggcaaacaggaaaactgtggtatgtctgtgtgtaatggtaaaatatatatcctgggcggaagacggga

SEQ ID NO: 184996 - DNA, 100 bp, Homo sapiens
cagtcctgcagcgccagcagctggactatggcatctatgttatcaaccaggaagactaccacaggctcctcaccaagtacgctgaggccgagaacaccat

SEQ ID NO: 184997 - DNA, 105 bp, Homo sapiens
ccactgccgtcaactcctgttctcctcagagcctggcgcatattaaatttcctattgactacccctattcaccacctaccttcagattcttgaccaaaatgtggc

SEQ ID NO: 184998 - DNA, 101 bp, Homo sapiens
ggcacacactggagagatatcaacaaatcttcctattttcaagctgaaagaatctactgttagaagaagatacagtgactttgaatggctgcgaagtgaat

SEQ ID NO: 184999 - DNA, 83 bp, Homo sapiens
ctcaccccagccttcttcaccgcacaggtctcctggtactgcattttgggttgcaaagcagaaggaagttatggaaaagtacg

SEQ ID NO: 185000 - DNA, 100 bp, Homo sapiens
ctggaaccctggggactacgacgtccctcaaaccttgcttctaggagataaaaaggctatggtgaactaaacggtaatgctggagaaagagaaatatctt

SEQ ID NO: 185001 - DNA, 87 bp, Homo sapiens
cacccagtcctgcagcgccagcagctggactatggcatctatgttatcaaccaggacgccaggaaagcatgtgcagatgcaactctc

SEQ ID NO: 185002 - DNA, 100 bp, Homo sapiens
gaagaaagtgatcataggagaaaaccatttcaggaaagaccacagcaagattctttcattcgtctcctcctagcctgggggaccaggctcgaactgaccc

SEQ ID NO: 185003 - DNA, 105 bp, Homo sapiens
gcctcgggtctcgggggccgctctgggatcccggccaccagcaattgtccggtcaaaatgcagatcttcgtgaaaacccttaccggcaagaccatcacccttgag

SEQ ID NO: 185004 - DNA, 82 bp, Homo sapiens
gccgaccagaatgatagccagtccctggagctggtgcacaggttccaggtcaaaatgcagatcttcgtgaaaacccttaccg

SEQ ID NO: 185005 - DNA, 75 bp, Homo sapiens
cgaagccgccacccaaaccagtcaaaccaggggcggagaggcctcggctctgtgtttgtttgggcatctggaaat

SEQ ID NO: 185006 - DNA, 82 bp, Homo sapiens
tctactgtaaagtcaccaacgagatcttccgccactacgagcgtccgagctgggccacagcctgaacgagaacgtcctcaag

SEQ ID NO: 185007 - DNA, 97 bp, Homo sapiens
ggggctcacagtgcttccaccctggacgaagccacccccaccctcaccaacagacggttgatgatgaagcgccggccgtgtaaatgaagatcgggtg

SEQ ID NO: 185008 - DNA, 74 bp, Homo sapiens
actcatcttcatggaaacgtctgctaagactgcttccaatgtagaagaggttggtgttcgaggaagagacattg

SEQ ID NO: 185009 - DNA, 99 bp, Homo sapiens
tgaatcttatttcaatgttggtggatcctccaactatactagtagtagtcaaccaaagcctttcagacgagtaagacttcagacaacattgagacaagg

SEQ ID NO: 185010 - DNA, 100 bp, Homo sapiens
ctgaaatgtttgacgacactgatggtttggtgaaaggtgtagcagtcactcggcctacacccacagcatcgaccttgtgaacccagcgacctgactgcct

SEQ ID NO: 185011 - DNA, 101 bp, Homo sapiens
cacacggcgagagacacacatccttcgccaggtcgccggccacccccacatcaatatttggtttccaggcaggactgacgtctttggattgcagtggatct

SEQ ID NO: 185012 - DNA, 75 bp, Homo sapiens
cacgagtctgtatctggatagtcgtaaacttcctatgatagctgccaggctcattcaagagagccccaccctgag

SEQ ID NO: 185013 - DNA, 82 bp, Homo sapiens
gttttgaaatcgacacacaaagaatagagttgagcctgtgggacacttcggataacgaaggaggcccaacttcattcaataa

SEQ ID NO: 185014 - DNA, 100 bp, Homo sapiens
tcaattactgaagctataaggagattttttaaaaattaaacttcaacacaatgagcttccattgaagattgacatcattaaacatccaaatgaaacagat

SEQ ID NO: 185015 - DNA, 75 bp, Homo sapiens
ggagggtggatggtggatgttagagaggctgtcattatttgtatcaaaaacaaagaatttgaaaaggcttcaaaa

SEQ ID NO: 185016 - DNA, 50 bp, Homo sapiens
ttagtgcaacgttagcctacacgacagaagtcggtcctaggccccccagg

SEQ ID NO: 185017 - DNA, 75 bp, Homo sapiens
gccaaggagccccacgtagagcaggacagtcattttgtttactcattcagccctgttgcaggtcccaataaactc

SEQ ID NO: 185018 - DNA, 96 bp, Homo sapiens
agaagaagatctggagctccctcctgagctggtcaccacctatttgcacaaggactacaacaacctgtggattatcaagaaacataacacaaactc

SEQ ID NO: 185019 - DNA, 76 bp, Homo sapiens
ggccggacccggtggcctggcaacaggaagccaaggctgcccccaaagattgtttcattgaagtgaattctaaagg

SEQ ID NO: 185020 - DNA, 100 bp, Homo sapiens
gaaaatcaacatcacggagatgtacaagagcaacaactatttgggaacagggtctgttccacaaaaaagacagtgccaatcaaggctgtgttcgaaaagt

SEQ ID NO: 185021 - DNA, 90 bp, Homo sapiens
aagattgtgaagcaatagcctaaggtcctgaatctgtgcctccttcccttcttaaagtagtgatgaaacccatagcaactgttggagaaa

SEQ ID NO: 185022 - DNA, 75 bp, Homo sapiens
atgtcagccttcccagtagctgggaccacaggttcagaagggttcttgaaaggccccctgtctgaagaaacagaa

SEQ ID NO: 185023 - DNA, 75 bp, Homo sapiens
ctgatgagcgctcaggaatcatgggctatcaaagtccaacctaaggtgactgtatatccttcaaagacccagccc

SEQ ID NO: 185024 - DNA, 100 bp, Homo sapiens
cggcgcccgtggtccggccatggacgacctcgggacagcatcgtggccgagctggaccgagagatgagcaggagcgtggacgtgaccaacaccaccttcc

SEQ ID NO: 185025 - DNA, 100 bp, Homo sapiens
tggaggccggctgaggagcgccgctgcctcgcctcggactggactcgggccatatccgtggtgccgtcaacatgcctttcatggacttcctgactgagga

SEQ ID NO: 185026 - DNA, 82 bp, Homo sapiens
ccactggcaaagagtcacctaaagttaggcggcactccagccccagctcgattgtagaaggcatgaaacaaaaaatgtggag

SEQ ID NO: 185027 - DNA, 78 bp, Homo sapiens
tgcagcctggagctacccccggccagcggtccggccaaggacgctgagatccggggatttctttcacggtttgataat

SEQ ID NO: 185028 - DNA, 50 bp, Homo sapiens
gggggtacatcaaagaggatgaggagatgtatggccctggaggaggcaag

SEQ ID NO: 185029 - DNA, 73 bp, Homo sapiens
gagaggcctctcccaaagcacctgcgcaggttgccaagagggtgatcctgttgtcgggcacaccagccatgtc

SEQ ID NO: 185030 - DNA, 100 bp, Homo sapiens
ctggggctcctgctctttctccttcctgggagcctgggcgcaggacttggtgaagtcccacctcatgtttgcggtccgggaggaggtggaggtgctgaag

SEQ ID NO: 185031 - DNA, 100 bp, Homo sapiens
gatgaagggaagttatcgataacacttgttggcagcagtgtgctggcgaggtacaccaggggttggaaaaaccacactaggcaaagaacttgcgtcaaaa

SEQ ID NO: 185032 - DNA, 83 bp, Homo sapiens
cggcccgattccaactctgaaaggctctccgtgtgaaatggtcccatctcagactgccctgggtagacctagactggctcata

SEQ ID NO: 185033 - DNA, 75 bp, Homo sapiens
ccagggtcagaaagtgcagaaggttatggtgcagcccatccacggatgataccatcggggaccttaagaagctga

SEQ ID NO: 185034 - DNA, 124 bp, Homo sapiens
cagtcggcaaggagagacgtcgctgaggggcttgcctgaagcgaggggatgtacagttacccagcacgtgtacctcctcctcctcctattgctcgggctgtagtgccctcgaaacgtcagcgtg

SEQ ID NO: 185035 - DNA, 100 bp, Homo sapiens
ggagaatgtgagaaaagggggaaaatgcccaggaggaagcaggagcagcccaagcgccttccctcacagctgcggtgcaaccctgggcagtttgcgtgtc

SEQ ID NO: 185036 - DNA, 90 bp, Homo sapiens
gtcttctgctggaggttccttcactgtgcgtgctgaccatgactttgagaatcactacaagaaaaactccttgtggtgaaggttctaaga

SEQ ID NO: 185037 - DNA, 100 bp, Homo sapiens
ttccccggggagtcagttcctccccgggcccctgagccatgcccatcgcagccgccccgaaggagccaggacatggatttgattgacatactttggaggc

SEQ ID NO: 185038 - DNA, 88 bp, Homo sapiens
ctgtctcaaacattcaagaaaacacacagactccaactgtacaagaggagagtgaagaggaagaggatgtcgtgactccaaaaccagg

SEQ ID NO: 185039 - DNA, 100 bp, Homo sapiens
ttctccttggatctgtggtctctggagctgtggttgctgctgtgatatggaggaagaagagctcaggcaggaggaagagcgcaggcgccgtgaagaagag

SEQ ID NO: 185040 - DNA, 90 bp, Homo sapiens
cggcgccaccgctcgccctccaggcaagaagttatgaaatggaatggatggggatataatgattctaaattcatcttcaataagaagggc

SEQ ID NO: 185041 - DNA, 75 bp, Homo sapiens
cgccgccgccaccatgcccaagagaaagattttgcaagaacgaggctcaaggatgtgagggacacagtattgaca

SEQ ID NO: 185042 - DNA, 100 bp, Homo sapiens
atacctcactgcggcctcaaactcctgggctcaagtgatcctcctgcctcagcctcccgagtacctgagattagcccagaatttacatagtacatgacga

SEQ ID NO: 185043 - DNA, 83 bp, Homo sapiens
cgtgcagatgaggacggagacacgaactgtggctgcaccatctgtcttcatcttcccgccatctgatgagcagttgaaatctg

SEQ ID NO: 185044 - DNA, 100 bp, Homo sapiens
cgcaggtcccggatgttgcggacagtatgaggcaagcgcagggggacggggaccagcagctgtcgccgccgctctcagaaaggcttttacatcaaatatt

SEQ ID NO: 185045 - DNA, 75 bp, Homo sapiens
cagctcagctcttactgcgggccgctccgacggcggtccatcctggccctcgggaccaaggatcacgtcatgact

SEQ ID NO: 185046 - DNA, 74 bp, Homo sapiens
aagatttaggccatcctccaaaagagctggctggagagatgtttttcagaagaagtgaagtcaagatgaagaac

SEQ ID NO: 185047 - DNA, 128 bp, Homo sapiens
cttaaggaggcaaaacgtgggaaaactagagctgaaacaatgggacccatgggttgaaaaacacaccttgactttagtcagatacatcactgtctgttaaaggaaaccaagcgtgaagtggaagtcta

SEQ ID NO: 185048 - DNA, 98 bp, Homo sapiens
tttgctgatggagagctggaatctatgggattttcagctcgatacaatttcacacctgattctggacaatcaggaagtccaagccacaatgatcctgc

SEQ ID NO: 185049 - DNA, 100 bp, Homo sapiens
tggggccaatgtgcatgcccgggcctgcggccgcttcttccagaagggccaagggacttgcttttatttcggtggttggaggcaaagtaaagaagcccgg

SEQ ID NO: 185050 - DNA, 97 bp, Homo sapiens
gggcggcgggcacgcacggcccgggccggcgctccaaggcccgcccgggagggccggggccgcgctcaggaaagaccacagcaagattctttcattc

SEQ ID NO: 185051 - DNA, 75 bp, Homo sapiens
caagctcctacttccagaaaaagtgctcctgggactccaggataccagctatcagttgagggatttgcagttgat

SEQ ID NO: 185052 - DNA, 76 bp, Homo sapiens
gtcctgtgtcatcaataaacatgcctatatatgcaaacagatttgcagtaccaacctatgcagccaagcaacctca

SEQ ID NO: 185053 - DNA, 74 bp, Homo sapiens
cgcctccaggccaagagggatccttcacccgtgtctggtgaagcaaatcatggaggaggctgtcaccaggaagt

SEQ ID NO: 185054 - DNA, 82 bp, Homo sapiens
gatgtcttaaaggcgatggtagcagataacagcctgtatgatcctgaaaggccacctggttcttagtcccccacctccgcac

SEQ ID NO: 185055 - DNA, 87 bp, Homo sapiens
agccagagacctacgtggcagctgtgaaaaaagccatttccgaaggaattgtcttagaagaaagaaggcaagccaccattttaccca

SEQ ID NO: 185056 - DNA, 74 bp, Homo sapiens
caagatggtgaagcagatcgagagcaaggatttttagactctgaggagcagttggagctaatccacattatgga

SEQ ID NO: 185057 - DNA, 100 bp, Homo sapiens
tgttggaggaactggcccggaaacaggaggacgtctcggcgcggaagatggccggcggcgtggacggccccatcgggatcccgttccccgaccacagcag

SEQ ID NO: 185058 - DNA, 82 bp, Homo sapiens
tgtggcttcaagagactgatcaaattgtgagaggaaaacagcctacccgagcagcccgacggccatggaggctgaagagacg

SEQ ID NO: 185059 - DNA, 100 bp, Homo sapiens
ggcgccatcaccgagcgcttgatgtgcgcggagagcaatcgccgggacagctgcaaggtctccagaaatgctttgggttcatctttcattgctgcaagga

SEQ ID NO: 185060 - DNA, 100 bp, Homo sapiens
cggcggccgaggacggggacagcgacgacgcggaggcagagaagggaacgcccggcccagccccggtgcgtcagggaaatcatgcagccatcaggacaca

SEQ ID NO: 185061 - DNA, 75 bp, Homo sapiens
cttggcttcaagtttctgctttggagaagcagattcaggaaatggctctgagagattcctctgcgaatctgtttt

SEQ ID NO: 185062 - DNA, 82 bp, Homo sapiens
tccagccggatccagcatctctccaccatcgactacgtggaggacgggcagtcagggcgacagcaagaatgccaagaagaag

SEQ ID NO: 185063 - DNA, 75 bp, Homo sapiens
tggcaattgtaaataggtttccaggatcaaaactaacctttcaggatctcctgtatcgaaggtctaggtcactag

SEQ ID NO: 185064 - DNA, 100 bp, Homo sapiens
gtcttaatactgcaaacaaatcatagtggaactaaggggaacttaatttactggtgctaagagatgccgtttgcaggcctcatctctgcttgagaatcgg

SEQ ID NO: 185065 - DNA, 100 bp, Homo sapiens
cgcgtcgccatggccgcggttcccgagttgctgcagcagcaggaggaggaccgcagcaagaactcctctttcctaaaatggagtcgagtaaaaagatgga

SEQ ID NO: 185066 - DNA, 50 bp, Homo sapiens
cagcctcccgagtagctaggattacaggattgacttctaaggactcttgg

SEQ ID NO: 185067 - DNA, 82 bp, Homo sapiens
cgaagattaaaaaactggagccagtccttttgccagccatggaccagctggccaagaccacccaggaaaccatcgacaagac

SEQ ID NO: 185068 - DNA, 75 bp, Homo sapiens
tgcagagcagcacctccatcaggtacaacctcgaggagctctaccaggccgaaatagaactatttgtgaacagac

SEQ ID NO: 185069 - DNA, 75 bp, Homo sapiens
agccggatcaggagccgccgccgccatatcaggctacagaagaagtttccaaaaatctggttgccatgaaagaaa

SEQ ID NO: 185070 - DNA, 100 bp, Homo sapiens
cacagacccgcgccgccgacgacccagcagccgccatggctctgctccgagggtaaaccagacttgaatacaacattgccaattagacaaacagcatcaa

SEQ ID NO: 185071 - DNA, 98 bp, Homo sapiens
atagtttgtggtgttttctatcccagttctttggcttttactaaaaatggacgcctggcaaccaagtgtgatgaatgcagactctgctaccattttgg

SEQ ID NO: 185072 - DNA, 122 bp, Homo sapiens
cggcgtctggctgctgcggaccccgccgagtcctagcgcctggcctgcgcgccgctgcccgcgccacaggtggttggttctagctattgccatggtacgtttttatatggaaaaaggaacac

SEQ ID NO: 185073 - DNA, 101 bp, Homo sapiens
aaaaccaacgcctggctcggagcagcagcctctgaggtaaggggcctggataccaagaagtgactgctcatctaatccataaagctatgttaacagattgg

SEQ ID NO: 185074 - DNA, 74 bp, Homo sapiens
gtccgcccgggggcgccgcccaccgcgcctcgctcgctaggacttctctcaaacttgtgtgctgaggagactca

SEQ ID NO: 185075 - DNA, 75 bp, Homo sapiens
acctcctggtgaagaaagcaaacaaagtgaccggggaggtgcgtcctcatcatgggaaggaggctgtggatccgc

SEQ ID NO: 185076 - DNA, 98 bp, Homo sapiens
tgtacgagcagtcagatgaggagcaggactcggtgaagctgctggagccagttctgcttctcggcaaggagcgatttgctggtgtagacatccgtgtc

SEQ ID NO: 185077 - DNA, 74 bp, Homo sapiens
agcaacagctcggcgggctggaagatctctgacatctacattagtggagaatcaggggatatgtcagccaagga

SEQ ID NO: 185078 - DNA, 100 bp, Homo sapiens
cataagcaaatgtaactcagcgaattgtaatggaaagcatatggacaggtctacgccacatcacttagctcttcaccaccaggagtgttccttgagaagg

SEQ ID NO: 185079 - DNA, 51 bp, Homo sapiens
ctgttgtcaggtcttcagggtctcgagacaaatttacatgtattggagacc

SEQ ID NO: 185080 - DNA, 75 bp, Homo sapiens
aaggattccaagtaactcttatttgcccgtgctttgaagaagaggagcacttcaaggtgctggtgaagatgaccg

SEQ ID NO: 185081 - DNA, 132 bp, Homo sapiens
gttcgaatgagaaaccagtcccttggacagtctgcaccttctcttactgctggcctgatactgaagtactctttcccagtgggactaagaaccagcagaacagatatactttctctcaagatgtctctccag

SEQ ID NO: 185082 - DNA, 75 bp, Homo sapiens
gaccacagctatgcgaccgaagagtgaccgtctccttatcaagggaggcagaatcgtcaatgatgatcagtcctt

SEQ ID NO: 185083 - DNA, 100 bp, Homo sapiens
gggctttacagatgtgggcccagaaaacaagccagtcagcatgtggagagggccaaatgtgaactgtgttgacagcactggctacacacccctgcaccat

SEQ ID NO: 185084 - DNA, 100 bp, Homo sapiens
ggacagcctcctggccgccgaagaggccgccgccaaggaatactcccccagttgcaagaggcgcaggaccgtggaagacttcaacaaattctgcaccttt

SEQ ID NO: 185085 - DNA, 100 bp, Homo sapiens
gccgccaggctttgatgagatgctgcctggtcaagtggatcctgtccagcacagccccacagggctcagagtgtgaacatggctacgcctcttcattccc

SEQ ID NO: 185086 - DNA, 100 bp, Homo sapiens
ggcacttcgggcgccgcaacagcagagccccccaagatgaacccagtggtggagccactgtcctggatgctgggcacctggctgtcggacccacctggag

SEQ ID NO: 185087 - DNA, 74 bp, Homo sapiens
acaggggctatttgtttggatatcctgaaagatcaatgatgaaactggagcgagcagagtggggcaatgacctg

SEQ ID NO: 185088 - DNA, 98 bp, Homo sapiens
gctccagccaccactacagccaccctggagggggtggggagcagctggctatcaatgaggttgaaaggattgtagacaagaggaagaacaagaaagga

SEQ ID NO: 185089 - DNA, 100 bp, Homo sapiens
actctctgtgggatggagggggaagtactatactggcaattgctggagaagattttgcaattgttgcttctgatactcgattgagtgaagggttttcaat

SEQ ID NO: 185090 - DNA, 83 bp, Homo sapiens
agacgcacagctaagatgccaggacatcctggaagctgggaaaaggatgagctttctgatgttagccaaggcggatctaaagc

SEQ ID NO: 185091 - DNA, 90 bp, Homo sapiens
cagagcctcagtttgtgcaggacaccgacatggaacagggactcactgggggccggagcctcaacagaaagctcctttagttcctcctcc

SEQ ID NO: 185092 - DNA, 75 bp, Homo sapiens
cgacagaccagaaactcatcccagagttcattaagaagattgaagataaaactttccaagtccttggtaatcttt

SEQ ID NO: 185093 - DNA, 97 bp, Homo sapiens
atttctgtgcaaaacaggactggctgatactacatattccagatggaatctctgaaggaagaagatgaatcagatgatgataatatgtaacatttac

SEQ ID NO: 185094 - DNA, 100 bp, Homo sapiens
cacaccggcacctaccgcacgagcacaggcttgcagatgggtcaagggttgtggagagtggtcagaaaccagcagctgcaacaagaaggctacagtgagc

SEQ ID NO: 185095 - DNA, 83 bp, Homo sapiens
tgcctgcggtgcctgagctgagtgaggccgaggccgggaggccgtgcccggaggttttaaaatcaaagatgggaaaatcggag

SEQ ID NO: 185096 - DNA, 100 bp, Homo sapiens
aatgaacattgtattgagaacaatatagatttgcaggggtgaagctaagtagtcttcttggtaaaaagggaaacttggaaaaactccagagctactggga

SEQ ID NO: 185097 - DNA, 96 bp, Homo sapiens
ggcggcgcctcctggacgtgctcgcgcccctggtcctgctgctcggggtccgcgcggcctccgcggagccagacaatgcagatcttcgtgaagact

SEQ ID NO: 185098 - DNA, 118 bp, Homo sapiens
ggcccagggggtgacgtgatggcggcagcggtgctgacggaccgggcccagaagcaaactgcacctattttaaattcttcaccacgggggagaatgcacgcatctttcagagaaccac

SEQ ID NO: 185099 - DNA, 88 bp, Homo sapiens
ctcaggaacagggacagcacctcatcccctggatgggggaccacaagatcctcatcgacagcaattctgtggtgttcttggtcacaca

SEQ ID NO: 185100 - DNA, 74 bp, Homo sapiens
agcggaggtgctgggagcgagttggctgaggctgggaggcggcagaatgcagccagaggagggcacaggctggc

SEQ ID NO: 185101 - DNA, 75 bp, Homo sapiens
ggaatttccaggaagaaatagagtttcttaatgcaattttcccaaggttaaagcacgaattgggagctctcagcg

SEQ ID NO: 185102 - DNA, 74 bp, Homo sapiens
tggtgtgttcttgactccgctgctcgccatggtgaacatcatccccatcattgccaaagcagatgccatttcga

SEQ ID NO: 185103 - DNA, 100 bp, Homo sapiens
ccggcggaggcggcccgggaatccgcaaggacgctttcgccgacgccgtgcagcgggcccgccagtggagacctttggcgacttggcctttggcgacatc

SEQ ID NO: 185104 - DNA, 74 bp, Homo sapiens
agagcagaggatggaacacttcagtgcattcaagtatgccgagattttgctgtcctggaggaccacaccctggc

SEQ ID NO: 185105 - DNA, 89 bp, Homo sapiens
cctgctgctcgtgctgatctcagctcccctcccacccggtcactccgtccagcaagcacgcagacagcaagcccgcgccgctgacgccc

SEQ ID NO: 185106 - DNA, 82 bp, Homo sapiens
cctcctgcggcacaaagagaatgacagagttgccctttacattgcaacctttctgagaaaagtctacagcattctttctctg

SEQ ID NO: 185107 - DNA, 102 bp, Homo sapiens
aaagctgagctgcgaggaaaatggcggcgggagagtcactgctagttggattgaagcacacctgccagatgattctaaagacacatggaagaagagggggaa

SEQ ID NO: 185108 - DNA, 100 bp, Homo sapiens
caacagcctggagaagctgcggctgcacacggtcaactccaggcacgaggccagcctgaagttgtacaaggaggccaggaccacctatcggaggatccta

SEQ ID NO: 185109 - DNA, 50 bp, Homo sapiens
agtgcctcctgtttccagcagctgagagagtcaagtaaagaacagtttgc

SEQ ID NO: 185110 - DNA, 100 bp, Homo sapiens
attttgcacgaacatgcagttattgaagattaggatcaaggatagacaaggtctgaaggggcgtctcgattacctgagctctctgaaggtgaagggcctt

SEQ ID NO: 185111 - DNA, 100 bp, Homo sapiens
caagcttccaggtgtcccagaaacccaggaaatcgagactcatgactcccagagaggatggcatctagaaggttcagcagactgtacaggatctttttgg

SEQ ID NO: 185112 - DNA, 82 bp, Homo sapiens
gcaaccaccgccctggccatctaccatgtggccttcctgggctatgtgctgtatggagagtgccaggaggtcttgtggtggg

SEQ ID NO: 185113 - DNA, 75 bp, Homo sapiens
ggaaatatgtcatgtatcccatagctgtgagtggcgatcacgagaacaataagggaaaactcttgtcggtccaga

SEQ ID NO: 185114 - DNA, 100 bp, Homo sapiens
ccttcgagcaccccaacgtggtcagtggaagaagttgttccgaatgtaattgaaccttccttcggcctgggtaggatcatgtatacggtatttgaacata

SEQ ID NO: 185115 - DNA, 90 bp, Homo sapiens
ctggaatcacccgggtcgctgttcctgaggattccttcctcaaggctcagcagtggctgaaggacctggaggaggagctgcacccaggag

SEQ ID NO: 185116 - DNA, 100 bp, Homo sapiens
atttttatcacgttcagtgtgctgggatgaggttacgagtagccatgtgccatatgatttatcggaaggttggaaaagagactgttcaaaccactgagga

SEQ ID NO: 185117 - DNA, 75 bp, Homo sapiens
ggagctcaagaaggcctatcggaagctggccctgaaatggcacccggttaccgtgcagacggtctacgtgcagca

SEQ ID NO: 185118 - DNA, 83 bp, Homo sapiens
cagagatattctactccatctcattcattgtacagtatctctcagaagatagaagtgtgcaagaagtactacagaagcatttc

SEQ ID NO: 185119 - DNA, 94 bp, Homo sapiens
ctgcgcttccccatggggctggcctgcggcgcctgggcgctctgaggaaataatgcaaaaggtgtcccaaggctcctgaccagtgaacaaagat

SEQ ID NO: 185120 - DNA, 95 bp, Homo sapiens
acaatcattagttcagtgcagtgtctgacttgtgacagggaatgttacgttcataacttactaaggattagtgtatattttccaaccttgaggca

SEQ ID NO: 185121 - DNA, 83 bp, Homo sapiens
gctaaagcagcgtgcgttcagccctggggctgccccgggagacgctggccttcagggaggagctggatgtcctcaagttcttg

SEQ ID NO: 185122 - DNA, 75 bp, Homo sapiens
ggaatctgttcttcttttgcatcctacgtaaccagaccaagctgtggggaggagatgttaaagtaacccatcttg

SEQ ID NO: 185123 - DNA, 75 bp, Homo sapiens
gctgggagccgcaccacctaacgctggccgacaacagcctggcgtccgccacggactggagactgatgcatgagg

SEQ ID NO: 185124 - DNA, 99 bp, Homo sapiens
cctgccgtccttctccactttcgccagcccgtgccgcgagcgcggcctgcaggagatgtgaagttcatttccaatccgccctccatggtggcagcgggg

SEQ ID NO: 185125 - DNA, 108 bp, Homo sapiens
cctgcccaacgtgaaccagatcgggagtggcaccatggacctgcccttccaggtgagaagccctaccactgcaactgggacggctgcggctggaagtttgcgcgctca

SEQ ID NO: 185126 - DNA, 99 bp, Homo sapiens
gaagctgctattaaagggaagatcgatgtgtgcattgaaatacactttcgggaaatggcctctaaatcctggctgaattttttaaccttcctctgtgga

SEQ ID NO: 185127 - DNA, 101 bp, Homo sapiens
tgggacatccgggactcagccaagtgcattcggactctcactttggcaatgaggagcagcagctggcgtgggccaagcgggagagcgagaaggcggaacag

SEQ ID NO: 185128 - DNA, 101 bp, Homo sapiens
ggctggaacactcacaaagaaacccagcctgtatatgaaagaggctttatcctgtggataaacgcagagtgaacgagtttggggagtcctacgaggagaag

SEQ ID NO: 185129 - DNA, 83 bp, Homo sapiens
cacagaacaacaaggtgttgatgccgccggacggagaccctgccctggttcaccaaaggccagcgccaccctccacagtaacg

SEQ ID NO: 185130 - DNA, 51 bp, Homo sapiens
gcagcatccttgatgataaaccagtaaatccttcaggctctacacacagat

SEQ ID NO: 185131 - DNA, 75 bp, Homo sapiens
ttcgttccctggatcgcactgaacctaagccacaacccgaggtggcagtagagaagagcatcacagaagttgctc

SEQ ID NO: 185132 - DNA, 101 bp, Homo sapiens
tggaggggcgaagaggacgagggggccaaggcttcctccggggccgccagatcccacccttggacccccatgaaaatggaaacaatggaacaatcaaagtt

SEQ ID NO: 185133 - DNA, 109 bp, Homo sapiens
gtgccacctacaggtgcaccctggacctgctgacacggtgccgggagcatgtggagaaggtgaagttgagtcctccctctttcttccttgcctttcgccggccacacgc

SEQ ID NO: 185134 - DNA, 96 bp, Homo sapiens
ggaaacaatggcatttacagaaagagtcaacagcagtggcaacagtttcagctcctggcatcagctctattcaaatctggttcagattttacagct

SEQ ID NO: 185135 - DNA, 100 bp, Homo sapiens
atctacattacatgaacaatgagtgcacgcgttactttggctaaaaggaggtgagcggcactctgcccttccagagcaagcatggagcaacaggatcaga

SEQ ID NO: 185136 - DNA, 100 bp, Homo sapiens
cgggaagaagcctggtctccggggccgctggattctgaggaccagcagatggccagtcacgagaacccagccggcacagtcttcactaccgtagaagacc

SEQ ID NO: 185137 - DNA, 99 bp, Homo sapiens
gttgtgacattccgacgccacttcctggaaatgaagtcagctactgacaggcccacgaaatctgctactccgtattatgtctcttctcgtacgtggctg

SEQ ID NO: 185138 - DNA, 50 bp, Homo sapiens
gaaagtgccaatcaggtctttctgggtatcggtacagcaatcggagagct

SEQ ID NO: 185139 - DNA, 100 bp, Homo sapiens
tccaatccctgccttttgagtccaggtgcccagttgcaaagtaacagcaatgaagtgctttctcttggagttacaagttatttcacttgagtccggagat

SEQ ID NO: 185140 - DNA, 96 bp, Homo sapiens
gttatgcctgcccagcttaaggtcctaaccatgccggagacctgtagataccagcctttcaaaccagtggacctgcgctttttaaccatgctcacg

SEQ ID NO: 185141 - DNA, 74 bp, Homo sapiens
cagggtccctgaagagggaagacacgcggaaacaggatgcagaaaatgcgattgtgcatatgggcggtcagtgg

SEQ ID NO: 185142 - DNA, 75 bp, Homo sapiens
ccgcctcgtgggcggcaaggacttcgagcagcctctcgccatttcccggagtctaacgtgaagacattttgctcc

SEQ ID NO: 185143 - DNA, 83 bp, Homo sapiens
ctttaagaggagattcagacatagacaagaatgattacccagattcgccttttacaagtccacctctcagagaagaaataatg

SEQ ID NO: 185144 - DNA, 82 bp, Homo sapiens
gacttctcctggcggcgctgcggatccagggggtcggctgccaggtacagtttttcagaagaagtgaagtcaagatgaagaa

SEQ ID NO: 185145 - DNA, 75 bp, Homo sapiens
tgggagctggctgagcagaaaggtatagtagttgaagattgtttgattttgctccaaaacttattaaaaaacaac

SEQ ID NO: 185146 - DNA, 50 bp, Homo sapiens
taccaggaggccaggggtgtcgccatggctgttcggctcttgaatcccag

SEQ ID NO: 185147 - DNA, 100 bp, Homo sapiens
gagatttgagctgtgctggccagcgcattgcctcacagtcacgccgcagcatggatgtgtcgcgccagatataaatcaaagccattctgtgaaaaactgc

SEQ ID NO: 185148 - DNA, 120 bp, Homo sapiens
gaaattgaaattacctccgagggaaacaagaaaacatcaaagaggtctagcaaagggctccgccatgtcacagatgaccagaagacatacaaaaatcccagcctgcgggctcaaggaggg

SEQ ID NO: 185149 - DNA, 101 bp, Homo sapiens
aagcggtgcctgagcccgtgcctgtcttcagatcttcacagcacagttcctgggaaggtggagccaccagcctctccctgagacggggttttgccatgttg

SEQ ID NO: 185150 - DNA, 90 bp, Homo sapiens
tatacactaggggttcatgttaaccaggccaaacaataaaatttgatgctgggactctccttcttagtacacaccgactgatttggagag

SEQ ID NO: 185151 - DNA, 75 bp, Homo sapiens
gcacccgcgacgacgagtacgactacctctttaaagaagaacatgtgatcatccaggccgagttctatctgaatc

SEQ ID NO: 185152 - DNA, 98 bp, Homo sapiens
ttctactaccggcccacgccctccgactgccacttcggaaccaaaaagaagcttcccagagccggggccaggagccccaagcgccctctagcagcaaa

SEQ ID NO: 185153 - DNA, 101 bp, Homo sapiens
gcttcacggaggcaatagctagccggagaagaatttggattggtttcctcggatgcgagccatgtccctcgttagcaatgaaggcgacagtgagcaaaatg

SEQ ID NO: 185154 - DNA, 74 bp, Homo sapiens
catggctgtgctggaggaaattcaacaggagctgatcaaccaaggagcagtgaggagaatgaataccttccaag

SEQ ID NO: 185155 - DNA, 105 bp, Homo sapiens
ccacatttccctgatgcttactgcaacctagccaatgctctcaaagagaagggcagtgtcagcagatccggaagctcatcaaagatgggctgatcatccgcaagc

SEQ ID NO: 185156 - DNA, 100 bp, Homo sapiens
gttgtgggccgccgtcggcagcaagaacagagagagaggtggacagatctgagagatactgagcctgtctctcttgctgatcgagaggtgatatcccggc

SEQ ID NO: 185157 - DNA, 98 bp, Homo sapiens
agctgtagaccggagctgttcctattcggccatctttgctcctccctgcaactaactccattcttaattgggattttgcttatgtagcaagagataaa

SEQ ID NO: 185158 - DNA, 98 bp, Homo sapiens
gatttggtggatttctctccagtttatcgatgtctacatatatattctgtcctgggaagtcgagataacatgagtattgtactagtttgcttttcaaa

SEQ ID NO: 185159 - DNA, 100 bp, Homo sapiens
tgaacgggcggcccctggagatgattgagccgcgcacgctacagtacaagctgctggacatctctgagctggatatggttggcgctggccgagaggcgaa

SEQ ID NO: 185160 - DNA, 90 bp, Homo sapiens
gtcactgcagctgaagccgctgcccctgctacagaaccgggagaagtacctgctgcccttcctgtccctgcaaatcatggactatctcct

SEQ ID NO: 185161 - DNA, 100 bp, Homo sapiens
cttttgacacggctttggaaacgacgtcatgtgttagtttggtgccctggttgtcagatgttggaaagcagtaggacggaacatactcttcgtggttgtg

SEQ ID NO: 185162 - DNA, 90 bp, Homo sapiens
cacacagtggcttctgctcaccaacagatgaagacagatgcaccaacgagacctgtgaccgcatcaagcagtcagcagctggcaccaagc

SEQ ID NO: 185163 - DNA, 100 bp, Homo sapiens
ctcccgagtagctgggactgcagaactgactttacagtgtacatttatcagaaatgtaaaacatgactgagctttaaggaattgtctacgttaaggcaag

SEQ ID NO: 185164 - DNA, 50 bp, Homo sapiens
cgaaagcggattccaaggaatccagttttatccaagtatgaagatcagat

SEQ ID NO: 185165 - DNA, 90 bp, Homo sapiens
tcaaataaggaaattgacacctggcgtggctcagagactcaggtcccaggactggacatatctgcactcctgccctctgacttcagccgc

SEQ ID NO: 185166 - DNA, 74 bp, Homo sapiens
gacaagtacttcgacgaacactacgagtaccgactgtgcagcagcgtggcgctgctgtcatcaaggctcgaaaa

SEQ ID NO: 185167 - DNA, 82 bp, Homo sapiens
taaaagtcggaaacaagatggtcaaagctcgccagtacccttggggtgttgtacaagggatcatagacggtatttctatgta

SEQ ID NO: 185168 - DNA, 100 bp, Homo sapiens
aacaacaccacaataatccacagccaagattggtattaccacgtcccagtgaagcgctctgagaaggccgtggatgccccaccagcgtcccagatcccag

SEQ ID NO: 185169 - DNA, 74 bp, Homo sapiens
aaggcactgctttttcatgacgggaaattcaactactgaggaggttacggcacaaaaatgtcatccagctggtg

SEQ ID NO: 185170 - DNA, 79 bp, Homo sapiens
cgccatggagtttgtgatgaagcaggctctaggagggcagctggtggaatttttgaagaaaatggaatctcgaggcccc

SEQ ID NO: 185171 - DNA, 75 bp, Homo sapiens
tggaatatgagtgatgacaaaccctttctatgtactgcgcctggatgtggccagaccactttacctgcattgtga

SEQ ID NO: 185172 - DNA, 100 bp, Homo sapiens
gagagcaattgttgataccaatggaatcacggtttttggaacaaggattttggatgaagaagtttttgagtggtatgtgtgcaacagagagaaattatgc

SEQ ID NO: 185173 - DNA, 122 bp, Homo sapiens
ctcagccagtgggcaggtctgagctcgggctccccgagcagtttgagtccccttgcccgctccttcagttcgatcctttggtacagaagacagaccgacagatcgtccaataccacctcgag

SEQ ID NO: 185174 - DNA, 83 bp, Homo sapiens
ctgatctccatgtcctgttgtggggcttttacagcctttgggagagactctgtggactccaagtcttctgcctcctcctctcc

SEQ ID NO: 185175 - DNA, 96 bp, Homo sapiens
aggcaggtgttgggtgcagagagcgcccctcccggacagagttgtctgctggttctcagcttgaagaagattctgcagtccttattgatccttttt

SEQ ID NO: 185176 - DNA, 82 bp, Homo sapiens
cgagcaggcggagcgctacgacgacatggcctccgctatgaaggcggaacccaagacagaccaggatgaggagcattgccgg

SEQ ID NO: 185177 - DNA, 96 bp, Homo sapiens
taggagcggggaaccaacgatggcacgaacattgatttgaggaggatgcttcgcagtttacgaagctcaaagatttggaaagagacagcttaacag

SEQ ID NO: 185178 - DNA, 100 bp, Homo sapiens
cagtccggatactcacgccagaagatgggttttataggcaagtgaatcaaatcagtggagctcacaatacctcagacaagcaaaccccttcaaaacccaa

SEQ ID NO: 185179 - DNA, 73 bp, Homo sapiens
gacttggatcctgccgatcccccgatctcggcagcctggcatcctcgctacaacctcattgttgtgggccgat

SEQ ID NO: 185180 - DNA, 76 bp, Homo sapiens
aagaaattgttcagttcttctcaggctttatttcaggctggagaacttaaatgggggacagatgaagaaaagttta

SEQ ID NO: 185181 - DNA, 82 bp, Homo sapiens
ccagaagctggtctctgaggtctggcataagaaacgtccccacagagaccacctatcacacgctggaggagggcgtggtgga

SEQ ID NO: 185182 - DNA, 74 bp, Homo sapiens
ttgtgaagatgaacgctttgaggagcatctttccttgaagaagtacattattgacattgtggttgaaagtacag

SEQ ID NO: 185183 - DNA, 100 bp, Homo sapiens
caaattcttcttggatggacacagttataagacagactcatgttcaacacggggattgggcagcacattttgaaaaatcctctcattattaacagcatta

SEQ ID NO: 185184 - DNA, 101 bp, Homo sapiens
acagaagcatggtcttggacagcagcaagacaggatgcccatgatgccactgagtacttccttctggccctggcagcagcggtcctgctgggtgatgagga

SEQ ID NO: 185185 - DNA, 75 bp, Homo sapiens
ctggctcggcccgacagcctcgcttggccgccagttcttctgcagccgaaggcgatgtagtatctaccccttgga

SEQ ID NO: 185186 - DNA, 100 bp, Homo sapiens
ccacgaaccacggcactgattttcagttctgggaaaatggtgtgcacaggagccaagaggatgatgatgctgaagctatccttgctgcagacttcgaaat

SEQ ID NO: 185187 - DNA, 101 bp, Homo sapiens
acgagagtccagcaggactgtggcccacctcaacagaagaggaactgtgtgctccgtgaggatggacccagatgatgtggtaccagttggccaaagaagag

SEQ ID NO: 185188 - DNA, 75 bp, Homo sapiens
ggtcctccctgcctgccgatgtgcatcggtacatgaagatgtggtctttgggaagaagcttcctgcctttgccac

SEQ ID NO: 185189 - DNA, 74 bp, Homo sapiens
aaaaacaaagttccagagctacaaaagtttttccaggatccaaggattctgtagctacaatgttgtcaagactt

SEQ ID NO: 185190 - DNA, 100 bp, Homo sapiens
gcataaattacaccgaaaaagaggggccacttctcagcgattcacatgtagctttcagggcatcgttggcttcacagtatgactgatgatcctccaacaa

SEQ ID NO: 185191 - DNA, 72 bp, Homo sapiens
gtcatccacctgctgcagatggggcaggtgtggagagcctgccttctggtacaagatgcctgtggaatgttc

SEQ ID NO: 185192 - DNA, 75 bp, Homo sapiens
gattttgaagctaaagttaagcaggaagatgagaatgtgcctactgctcctgatcctccaagtcaacatttacgt

SEQ ID NO: 185193 - DNA, 75 bp, Homo sapiens
gggcctgctgtggaagaccagccccaaagcttgaagctcaactagagaaaaaggaccaacaatttaaagaacaag

SEQ ID NO: 185194 - DNA, 90 bp, Homo sapiens
ccgaattcagaaggatatcgacgtcgtgatccagaagtccagagctgaggactgcctgtttgcaggtggaggaactgcaatgtctggtgg

SEQ ID NO: 185195 - DNA, 98 bp, Homo sapiens
atggaaacctggtctcactgggacacattcagctaacgtattttagcaggtggagtgaggttgaagattcctgtgacagcgatgccatagagagaatg

SEQ ID NO: 185196 - DNA, 100 bp, Homo sapiens
gccacccaggggtcccccacttcccgcttgggcgcccggacggcgaatggagcaggggcgcgcaggaggaggcaaaacagattcagaatctgcagaaagc

SEQ ID NO: 185197 - DNA, 82 bp, Homo sapiens
ggcgcggcagcggagggacggcagtctcgcgcggtgtggacactgccagcggctgcagccgacttggaatgacctgggagac

SEQ ID NO: 185198 - DNA, 100 bp, Homo sapiens
agatatccagattgtacaggttgcttgtggttactatcattcacttgcactttctaaaggtcctgttttgctgcgttcctactgtctctatgttctcctg

SEQ ID NO: 185199 - DNA, 50 bp, Homo sapiens
gacaactcgctgtccacttcttctgaggtaagcggaagggtacagccaat

SEQ ID NO: 185200 - DNA, 118 bp, Homo sapiens
aatcgagcaggagctgacggccgccaagaagcacggcaccaaaaacaagcgcggcaaggggagagccagttgcgcagagccctgcaaccagcagtccagggagaagtggtgaatgtca

SEQ ID NO: 185201 - DNA, 83 bp, Homo sapiens
gtgggagtcacctgcttttgccaaagggaacctgactttcacagctcagtacctaaggcagaagtcaattcatctggaaagac

SEQ ID NO: 185202 - DNA, 100 bp, Homo sapiens
caagttggagcaaggagaacccccagggatagcagaaggagcagcccacagtcaaatctgtccagacagaaccaagttgtattgttagacacactggaac

SEQ ID NO: 185203 - DNA, 97 bp, Homo sapiens
caagagcgacgccgccgtgtgcccaacggtcggtgtccccggctgaggcagcgcggccgcagcagccctgtaattcgtgcctttctgctctttccaa

SEQ ID NO: 185204 - DNA, 75 bp, Homo sapiens
ggcaagctgtgcgacgtgaccctcaaggacccagatgatgtggtaccagttggccaaagaagagcctggtgttgg

SEQ ID NO: 185205 - DNA, 50 bp, Homo sapiens
aagcaatgcttgaggctccttacaagaagacaatctgcagaagaaggacg

SEQ ID NO: 185206 - DNA, 82 bp, Homo sapiens
gcgagtgggagcaccaggatctcgggctcggaacgagactgcacggtgtgagttcttgatacgaatgaaaggccaagagttt

SEQ ID NO: 185207 - DNA, 122 bp, Homo sapiens
ggagggctctcctgtctgccaccatcctgggttgacaattctacacaaggagaaagcataaaggatgttattggcagaaagataaaaatttcagtgaagaagaaagtaaagttggaagttaa

SEQ ID NO: 185208 - DNA, 74 bp, Homo sapiens
ccaagaggaaggagaattcaaccttttttgataagaaatttggagcaagaggtggtggtggccttcccccgaag

SEQ ID NO: 185209 - DNA, 101 bp, Homo sapiens
cagcacctcacccactggacagagcccatacacctaccagatgcacgccgacatcggcctggctgcctggggacgcaaggccctggacattgctgagaacg

SEQ ID NO: 185210 - DNA, 87 bp, Homo sapiens
cgcgctgcggcctggcggcttccaggcgcactaccgcggcttgggcactgtttaaaggaaagttccgagaaggcatcgacaagccgg

SEQ ID NO: 185211 - DNA, 101 bp, Homo sapiens
ggccggtgccagcacctttcggcttctgagacggcggcagcagcggcattcagaatgattacggacctgaagccaaagaacaagatgcgctagtggacaga

SEQ ID NO: 185212 - DNA, 83 bp, Homo sapiens
ctgctacctcgcccgggggcatcaggtttttctcccgctccagaaaaagagtgtggccatctggggccgtgtggtatttgcca

SEQ ID NO: 185213 - DNA, 96 bp, Homo sapiens
ccggggccccggaacccgagctggagctgaagcgcaggctgcggggcgcggagtcgggaggaaaccgtggctgccaggctttctgtttcactcttg

SEQ ID NO: 185214 - DNA, 115 bp, Homo sapiens
tagaatgcatcagtgcccttgtggcgaatggggctcacgtcgaaggcggggtttcaccatgttgcccagactggtcttgaactcctgagcttaagcaatccacctgcctcggcct

SEQ ID NO: 185215 - DNA, 82 bp, Homo sapiens
gcaacatcctgtcacaggccatgctctggcaaaaacgatccaccttgatgttcagtgaagagtaccagaaaagtctgctaga

SEQ ID NO: 185216 - DNA, 98 bp, Homo sapiens
tttcccaagagcagcggaaaatgatccagtcacaggttatcaatactctggctgaccatcatcatcgtgggactgactttggtggaagtccttggtta

SEQ ID NO: 185217 - DNA, 98 bp, Homo sapiens
tgaaataaagagtgaagaagttccagcttttggggaccccagagagatgcccaggcagcccgagaattcattctgaagatgttcgtggacctgaaccc

SEQ ID NO: 185218 - DNA, 110 bp, Homo sapiens
agaaaattggcaagagtggagacaaagagatgagcagacgttggaacttgccaggaatccagcaatgatgcaggagatgatgaggaaccaggaccgagctttgagcaacc

SEQ ID NO: 185219 - DNA, 96 bp, Homo sapiens
ctggaatttagcgctcgcccagctagccgcaggtctctttaatgtggggaacaagctgctggtaagcctggacttgctttttgcaatcagaaatca

SEQ ID NO: 185220 - DNA, 100 bp, Homo sapiens
aatcaacgagcccacggacaagaccttgaggagaaggcagagcccccccaggctatgaatgccctgatgcggttgaaccagctgaagccagggctgcagt

SEQ ID NO: 185221 - DNA, 100 bp, Homo sapiens
aggccatctgaataactttactaaggaacatcatttacagcgagcaatttcagcacagcaagtgtttagagaaaaaaaagagagtatggtcattcctgtt

SEQ ID NO: 185222 - DNA, 75 bp, Homo sapiens
atcccgattcccctggcgcggactctggcaccaacaaaactatctctttgaggagagaagaattagatgtgaagc

SEQ ID NO: 185223 - DNA, 75 bp, Homo sapiens
ctacgaaatctttcgctccctacacaccctggttggacaggtcaagctttacaaaagcgaaaacctcgacaatcc

SEQ ID NO: 185224 - DNA, 75 bp, Homo sapiens
gccccgcgcctggacgccgctgacggccccgagcacggccgcccggccacggcattgaagttgatatcgatgtgg

SEQ ID NO: 185225 - DNA, 100 bp, Homo sapiens
cttgtcgcacggatgcagaaaacttaatggaggaggctgaggatgacgtagctttgccaaagacttagaagctaagcagaaaatgagcttaacatcctgg

SEQ ID NO: 185226 - DNA, 75 bp, Homo sapiens
cgccgctctagcggccgggactctgaactatggcgatctccaggctgctgcaggtggatcctgaggcacgcctga

SEQ ID NO: 185227 - DNA, 87 bp, Homo sapiens
agaaaatctccctgctccgcagcgacatcaccaagctggaggtggacgccatcgtcaacgccgcatatatagcagtgacgaggatga

SEQ ID NO: 185228 - DNA, 88 bp, Homo sapiens
cagccatcacgaggatgatttcggaacctggagaaaatagctcgtctgagtgagtggaaagctggcaaaggaagagtgctaaaaaggc

SEQ ID NO: 185229 - DNA, 90 bp, Homo sapiens
gacgaggaaagaggaggaaaacaaaagctgctacttatggaagatacaaaggatgatgtgatgccagccacttactgtgaaattgattta

SEQ ID NO: 185230 - DNA, 100 bp, Homo sapiens
cctcaggcccgtggccgctgtccaggagctctgctctcccctccaggtgtatgtttaagctcaggctggaaaaggatcactgaaagtcacttggatggtg

SEQ ID NO: 185231 - DNA, 75 bp, Homo sapiens
aggccatgggcatgctggccttcccgcccgacacgcacatctccccgtacaagcggaaatgagaaagcagaggga

SEQ ID NO: 185232 - DNA, 80 bp, Homo sapiens
acgcgcaggtgctagcggccccttcgccctgcaggtatgatctcgtgaaatcttgagagaaactgaatgacgaatgaaac

SEQ ID NO: 185233 - DNA, 100 bp, Homo sapiens
agtcagttcctgtggctgaagttcttgatacagagggaagcattcaggcgtctgtagaggcttctggtgaaatcgcattatgcaagactggatttcctga

SEQ ID NO: 185234 - DNA, 98 bp, Homo sapiens
gcacgagccaggaactgcgcagcctcttcgagcgccgcggacgcgtcatcgagtgtgacgtggtgaaagggcatttttggtcgaagagagctgaagta

SEQ ID NO: 185235 - DNA, 75 bp, Homo sapiens
tcaatctctggcttaaattacttatgtccctgatgccaaaaatgcacctactctttcctctaactctggtgaggt

SEQ ID NO: 185236 - DNA, 80 bp, Homo sapiens
gctggcgctgccggagctgtcgacccggcctggcgccggactaggaccaagaatcgccttcagccctgtctggtgcatcc

SEQ ID NO: 185237 - DNA, 75 bp, Homo sapiens
aaagctaaagaggcaccattcgtacccgttgcagccctagcaaaccaagagtgagccaccttggaagtagatcct

SEQ ID NO: 185238 - DNA, 82 bp, Homo sapiens
accccgggacacgcaggaacggctccagcatcaagatccgtctgacaggttactcactataaacaatatccacccaacacaa

SEQ ID NO: 185239 - DNA, 75 bp, Homo sapiens
cagacacccctgaaatctgccaaaatgaagtacctggctttcctccgcaagcggatgaacaccaacccttcccga

SEQ ID NO: 185240 - DNA, 82 bp, Homo sapiens
ttcttacagcattgcaaatcatgtatgccagttgttagaactgtggccagagtcagccccaggtcagaatgctggtcagcag

SEQ ID NO: 185241 - DNA, 51 bp, Homo sapiens
gtgattctgacagtgaggttgacaaaaagataatatcgtctactgcattat

SEQ ID NO: 185242 - DNA, 76 bp, Homo sapiens
ggtggagtgtaggtcatatcgccgcgttggagtcattcgttgcccagtttgcagccaagaatgtgcagagagacac

SEQ ID NO: 185243 - DNA, 100 bp, Homo sapiens
ttttggtttaatatctgattgggacaacattcagacccatttccagtcatgacatcctgaggttagcattacacttctcccagtggagcccatgacttct

SEQ ID NO: 185244 - DNA, 52 bp, Homo sapiens
gacgaaattagccagctccgcctgttaagtgggcagaccaacatccacctca

SEQ ID NO: 185245 - DNA, 83 bp, Homo sapiens
gcgcagggcctgcagcgggagctggacggcgagcgcgagcggcgcgagaaagagtttcggacgtggctgagggaggaatgggg

SEQ ID NO: 185246 - DNA, 74 bp, Homo sapiens
gggtcatcacttggacaacagaacccaaaagttctgatgttcggaagactgcaatgattcttatgaatgtgtat

SEQ ID NO: 185247 - DNA, 51 bp, Homo sapiens
gcaagagcgatgtctactacttcaggaatgtttacccttgcggaagttgca

SEQ ID NO: 185248 - DNA, 82 bp, Homo sapiens
cgactcttctgacctccgcgcgacgtacccgccgccgccgttggctggagggggatatgagactttctactcggaatatcct

SEQ ID NO: 185249 - DNA, 100 bp, Homo sapiens
tgggggcggagcccttcagattccaagaccccaggcaggggtggcgccaaaggggtgtgtggaatgtaccatacatctcccaggcctatgtgatccgggg

SEQ ID NO: 185250 - DNA, 83 bp, Homo sapiens
cctcgctactcgcttgcctacccgccggcccgcgggtctacttcctcaaaggaaatctggcattttttaaagtttgcgcccca

SEQ ID NO: 185251 - DNA, 48 bp, Homo sapiens
catcaagaaacccaagctgctgagttgcaagaatgtagtaactctgat

SEQ ID NO: 185252 - DNA, 100 bp, Homo sapiens
tctgtcatcagaagaaattcaacagagagctcaccagattactgatgagttcttcaggagagaataccatgggtaccacctgaatgcattgaaaatccta

SEQ ID NO: 185253 - DNA, 101 bp, Homo sapiens
aggctccgggcgcggggaagtcatgctcgcttcacggaggcaatagctagccggccgaatacatcaagcaatggtaacatctttaaatgaagataatgaaa

SEQ ID NO: 185254 - DNA, 75 bp, Homo sapiens
atatgtttgaagtattggaacgagcaagaaggatgaatcgctttctgccctggcatgaacttacatggtcagagc

SEQ ID NO: 185255 - DNA, 100 bp, Homo sapiens
cttggttaacttgggagaaagtttcatctgtggatggagtattgtgattcgcctttgccagtctcatctcgtgtctgctttgttaagttccatgatccag

SEQ ID NO: 185256 - DNA, 75 bp, Homo sapiens
atatagatccccgcacaggaaaatctgccctcaataggagtgaaacatccacatctgataacacagaaacttacc

SEQ ID NO: 185257 - DNA, 90 bp, Homo sapiens
caaaaggggtggattatatacattcaaaaaaattaattcatagagatcttaagattgttgatccatttcagatacttgtggcagcaaaca

SEQ ID NO: 185258 - DNA, 98 bp, Homo sapiens
actgttccaactcttgctccaaaaactctttcagtagcagcagcttttaatgaagatgaagataactctcttgatagagcccaagcagccaagaataa

SEQ ID NO: 185259 - DNA, 100 bp, Homo sapiens
aaacaagctcggagcgggagtagacagtggccggcagggcagccgggggacagctgtagtgaagatgtcatgtggcctgtgttttggaccgtggttcgta

SEQ ID NO: 185260 - DNA, 74 bp, Homo sapiens
cggcaggaggccgagcaacttaagaaccagattcgagagttttgagagcaaaatgacaacacccagaaattcag

SEQ ID NO: 185261 - DNA, 74 bp, Homo sapiens
gggattctcgacctgctaacagaactggaccttttcgggagaccagtgtaaatttgatcatgatgcagagatag

SEQ ID NO: 185262 - DNA, 144 bp, Homo sapiens
caccatttattcagcactcagaatgctccaggcagtgtaatctcattccatcttcattcatgactccagacagccctttggagtgaatcaacctggaccttatatcatgtatacaactgtagatgcaaatgggtatctgaaaaa

SEQ ID NO: 185263 - DNA, 100 bp, Homo sapiens
cgcaggcctcgtgccgttacggccatcacggcggccgcagtggcgtcctggagccctcctcaggtaagaatgattgatgttggctgatattggagtgctc

SEQ ID NO: 185264 - DNA, 100 bp, Homo sapiens
tgaaccgtgcacttcaaaatggttaagatgtgatccccccaggggtgcccgatgcccaccccagggaaggagacctgccagtgttccaggaccagatcca

SEQ ID NO: 185265 - DNA, 90 bp, Homo sapiens
gtccctgccaactttccaagtctggggatggccagaatggctcccgagcgagtggcgtccctgtcacgagtttgtgtcccacttattacc

SEQ ID NO: 185266 - DNA, 95 bp, Homo sapiens
caccctgccctcctcccttggcagatgtcttcctctcctttaaggcctggctcaggcaacagagaccggagaggccagagggcaggacggctctg

SEQ ID NO: 185267 - DNA, 95 bp, Homo sapiens
agcactcccagctgcgcagggcctgccaggtggcgctcgaggaaccagactagcatttctcagtgggttccagtatgcagccgattgatacctgt

SEQ ID NO: 185268 - DNA, 50 bp, Homo sapiens
gggaacaggaagaattcctagggcctcaaagccaatggacttaaaattat

SEQ ID NO: 185269 - DNA, 100 bp, Homo sapiens
aatgctgtttgtattccagagactagtctcttgaagcggtctccgaatgtggagctctccttcccacagcgatcagaaggctcaaatgtctttagtggta

SEQ ID NO: 185270 - DNA, 74 bp, Homo sapiens
ttaaggattccaagtaactcttatttggtctacatgttcaagtgcgtgtggcggtgctacagattgatcaagtg

SEQ ID NO: 185271 - DNA, 100 bp, Homo sapiens
cgaggcgcgttcctccttcagcgactcttcggaggaatcgtttgaccaaggaattacatgaacgacagccttcgcaccgacgtcttcgtgcggttccagc

SEQ ID NO: 185272 - DNA, 83 bp, Homo sapiens
atccttaccaaggaatctgcttttcaagtatgccaccaacagtgaagaggagtggagtcaacatatcaatggagcaagtcaca

SEQ ID NO: 185273 - DNA, 74 bp, Homo sapiens
actcttggaccccagtatttagcagcagcctggcatcctcgctacaacctcattgttgtgggccgatacccaga

SEQ ID NO: 185274 - DNA, 100 bp, Homo sapiens
cctcaagctcgaatgtgacaagttggccagtgagaagtcagagatgcagcgtcactatgtgatgggaacccagatgatcttcaatgcagccaaggagctg

SEQ ID NO: 185275 - DNA, 90 bp, Homo sapiens
caatcctaccatgtcagccttcccagtagctggaactacaggctgcaaggacccggcccagggacaactcctgaaagagctgatgcagac

SEQ ID NO: 185276 - DNA, 100 bp, Homo sapiens
gtttgtactatcctcggtgctgtggtgcagagctagttcctctccagctcagccgcgtagaatcctgctgcatcacagaagctggaagttctgatgttcc

SEQ ID NO: 185277 - DNA, 108 bp, Homo sapiens
caagattctgaatctggtgatgaacttagcagcagctccactgaacagataaggtatgctattgcggcagcacctcccgagatgtgttatgtggaaccgatgtaggaa

SEQ ID NO: 185278 - DNA, 99 bp, Homo sapiens
gtccccctctccgccccccaggaggggcgagagggagccgcagctgatgtcagccatgaaccagagaatcagtcagagtgctccagtgaaacagccacc

SEQ ID NO: 185279 - DNA, 90 bp, Homo sapiens
ctacagctcccagcgtgagcgacgcagaagacgggtgatttctgcatttccatctgaggatgcatcatctgcagacatcagaaaagcata

SEQ ID NO: 185280 - DNA, 80 bp, Homo sapiens
gtaatgtcaactttactgagaattttccacctcctgacacaacaccactcatcatcttggccaagtatggtctggacgga

SEQ ID NO: 185281 - DNA, 98 bp, Homo sapiens
gaggagccttaacaagcgcacggagccctcaagataaccagttcaggatgtccatcctggaacgactggagcagatggagaggaggatggccgagatg

SEQ ID NO: 185282 - DNA, 100 bp, Homo sapiens
agcttcattaagcagatcctggatggggtgaactaccttcacacaaagaaaattgctcactttgatctcaagatctacgcagaccccaccaagaggctgg

SEQ ID NO: 185283 - DNA, 100 bp, Homo sapiens
cgtggctaccccggatttgctccaagctatggctatcagttcccagccaggtgattggtgaaaacactaaacaaccctgagcccagggccaacccctacg

SEQ ID NO: 185284 - DNA, 100 bp, Homo sapiens
ctctgatgacgatttggatgaatatacccttagaaaaaatgtggcagtggctttttggtggtgctggagttggcaagactgtactgatcatggagttaat

SEQ ID NO: 185285 - DNA, 83 bp, Homo sapiens
cctggagctgaggaaccggaccccggcagctgcagcggaggaggagaaagagatggacctcccggactcggcctcgagggtct

SEQ ID NO: 185286 - DNA, 100 bp, Homo sapiens
agaggatccgatgatggggatggaggaagatgagaatgtgcctactgctcctgatcctccaagtcaacatttacgtgggcatgggacaggcttttgcttt

SEQ ID NO: 185287 - DNA, 51 bp, Homo sapiens
ctattttagaggaaggtgaagatgtgaggtgtccagtgatttggagaatat

SEQ ID NO: 185288 - DNA, 75 bp, Homo sapiens
tgcaagtttgtgccccatagctgcacagatcctacagagcaggtgacaatacaagtgctgccaccaaaaaatgcc

SEQ ID NO: 185289 - DNA, 90 bp, Homo sapiens
tagtgatccacgcgcagttcctcaaagaagacttcccaagtaagaagcggaagaggagccgctggaaccaagacacaatggaacagaaga

SEQ ID NO: 185290 - DNA, 75 bp, Homo sapiens
ccatttccttgatgcgcaagttcattgcctaccagttcacagacacgaatcctcactatggatgggctcattgag

SEQ ID NO: 185291 - DNA, 75 bp, Homo sapiens
cagacgacaagcacacactatggcgctgaaacggattaataaggtcaaaatgcagatcttcgtgaaaacccttac

SEQ ID NO: 185292 - DNA, 100 bp, Homo sapiens
tataagaagaagattctgggactatggccgcattgccctggtgtcagaagcagacagctttcagcttatgtggagaagtcgctgtgaagccacctataaa

SEQ ID NO: 185293 - DNA, 139 bp, Homo sapiens
cacgcggcatcacgggatcgaaccccgctcccagcggccgcgattcggggaggtaggcgctgggccgaggaggtgacagattgactgggatcccctcgcacatcctcaacagctccccatcagaccggcagattaacca

SEQ ID NO: 185294 - DNA, 100 bp, Homo sapiens
atgatagatgtggttattgacatctcttgtatttatgggcagaagtcaattcatctggaaagactatctctgagtcagacttaaaccactctttttcact

SEQ ID NO: 185295 - DNA, 82 bp, Homo sapiens
gcgcattcggccccggacgaaggtactcgcagcacttggagcgcagaaccggccgcgcccgcttcctgcctgacacagctca

SEQ ID NO: 185296 - DNA, 75 bp, Homo sapiens
cgccgcggcgaggagcgagcgctgcgaggtggcggcctgaggcgtctgtagaggcttctggtgaaatcgcattat

SEQ ID NO: 185297 - DNA, 101 bp, Homo sapiens
cggcgggactgtgatggccagagagatgacgatcttaggcaattaagttggaatatgcaaggttggttaagttggcccaagaagacaccccaccagaaacc

SEQ ID NO: 185298 - DNA, 50 bp, Homo sapiens
ttaagggatccatcctacagaaattgatgaagatccctgcctcattcctg

SEQ ID NO: 185299 - DNA, 50 bp, Homo sapiens
cccaagtgcgacaagaccgtgtacttcggccagtacacaacaggccgggg

SEQ ID NO: 185300 - DNA, 100 bp, Homo sapiens
tttcaatctgctgggctgatcatctttcagacaactatactctggatcatgacagagctattcacatccaagctaaagaggctacaaccatcgatttgag

SEQ ID NO: 185301 - DNA, 97 bp, Homo sapiens
gcctaggccgggccctgccagggagcaagtctgcatcgcagaggccaggcttcggaaccaaaaagaagcttcccagagccggggccaggagccccaa

SEQ ID NO: 185302 - DNA, 96 bp, Homo sapiens
gagaagatcaataaaaactgctggaggatcaagaagggcttcgtgcccaacatgcaggttggtgacatcgtgaaagtcacaaggatgaatataaat

SEQ ID NO: 185303 - DNA, 82 bp, Homo sapiens
cgagccgggaagacgcggggaagaggaggcggaaaaggacgcaaagttctccggcgaggcttgggcactgtttaaaggaaag

SEQ ID NO: 185304 - DNA, 82 bp, Homo sapiens
agacgggggaagcagcacgggatcccagcctcaggcctgcacggacggtgttggttggggagtgcctgtgaagaaaacgggg

SEQ ID NO: 185305 - DNA, 134 bp, Homo sapiens
ctgagctatgacaagagaggaaacaaaaagttaaacaagcaagcctgccataagtgagaagtaactctcaggagccttctccgcagttggcttcctcggtagcttccacacggagcatgcccgagagcctggac

SEQ ID NO: 185306 - DNA, 88 bp, Homo sapiens
ggaggtggtagagggcatggatatctctactcgctccaaaggtatggatcctggcgggagccagtcaacccctattatgtcaatgccg

SEQ ID NO: 185307 - DNA, 75 bp, Homo sapiens
ggaggacgaggagagacagaagaagctggaggccggcaaagccaagaacatctgctcaaattaatgaccatgggg

SEQ ID NO: 185308 - DNA, 75 bp, Homo sapiens
ccactgcctgtttcatctgatgatattgggattggtcagtctcaagatgacagcatagtaggattaaggcagaca

SEQ ID NO: 185309 - DNA, 50 bp, Homo sapiens
cggcggcgcccggatgggcagctgaggttgatgataattagaagcatgct

SEQ ID NO: 185310 - DNA, 49 bp, Homo sapiens
gaaaccggtagcgcttgcagcatgatggcccctgagttctgcagcctcg

SEQ ID NO: 185311 - DNA, 51 bp, Homo sapiens
ctcccaaagtgctgggattgcaggcgtcagccaccgtgaccagcctgaaac

SEQ ID NO: 185312 - DNA, 101 bp, Homo sapiens
cgaggagtggactggcagtgggaagatcaagatggaggaaatggacgtaggggaaaggttgacgagattagagagatggttgacaatgatttaggttttca

SEQ ID NO: 185313 - DNA, 51 bp, Homo sapiens
gcggaacatctggaggctgggaaatggctctgaacaagaaggaacacagag

SEQ ID NO: 185314 - DNA, 101 bp, Homo sapiens
gtgttggaccttccggagcttctcagaagacagagggttttcttttgaggccataggaaaaggatacagagtagagtttcatgaacctgaaacttggtgga

SEQ ID NO: 185315 - DNA, 75 bp, Homo sapiens
gcctcggggttctgaagttcataccacctccgcagacgcccccaaacaaccaatcctgaggcaaaagaaacattt

SEQ ID NO: 185316 - DNA, 90 bp, Homo sapiens
aatggaccaacttctttggcaagtggacattttactggctcaaacagaaccaagttgtattgttagacacactggaacaagagatttcaa

SEQ ID NO: 185317 - DNA, 100 bp, Homo sapiens
ggtcgcaaagttcctcacagtttaggtctcaaggcaagcctattgagttaacacctctgccgctgctaaaaggtgctgggtaggccaggtttcagcatcg

SEQ ID NO: 185318 - DNA, 100 bp, Homo sapiens
cgggacaagcgcgacgcccggcgcgagctcaagctgctgctgctcgagtccggcagcgtcttctcttgagggagcaatttggagaagagctggaacccag

SEQ ID NO: 185319 - DNA, 83 bp, Homo sapiens
agagaccgtgggaaagagcccagcctatcgaaggtgctcaatgaacaggagccgcgcggtggagacacagagcaccagctcag

SEQ ID NO: 185320 - DNA, 100 bp, Homo sapiens
ctgtccatcattatcggggcatccacggccgccaagatcatggggggccggcgtgatgtccgtgtacctgttcaccaagcgctacgcggaggaggagatg

SEQ ID NO: 185321 - DNA, 51 bp, Homo sapiens
tataaaccctatgaagaagcactggctgcacatggtccgtctaatgctgtt

SEQ ID NO: 185322 - DNA, 100 bp, Homo sapiens
gctgctgagtttcttcatctacaacccgcgcttctggccgcgggaaggagaggtggacccaagtggagagattgtggaactggcgaaaggtgcatgtccc

SEQ ID NO: 185323 - DNA, 80 bp, Homo sapiens
caagccccagccccctgtggctgaggctacaccccggagccaggagggttatgaagacagtatggagtttccagaccata

SEQ ID NO: 185324 - DNA, 50 bp, Homo sapiens
gtggtctgtggcgacaaagcctccgtcatctcagcaaaacttaaggaaaa

SEQ ID NO: 185325 - DNA, 100 bp, Homo sapiens
ggacaaagtgcttctcaagtacacggagtacaacgagccgcatgagagccggacaaactcagacatcgtggagcatctgcctgcccttctgccatccgag

SEQ ID NO: 185326 - DNA, 100 bp, Homo sapiens
aatgctaagaactgctgggaggatgacagcccagaataaagagaccagtgttttagctgctgcaaaagtgattgacactaaatctgaagaagaacttgaa

SEQ ID NO: 185327 - DNA, 100 bp, Homo sapiens
gcgatgctgcccggtttggcactgctcctgctggccgcctggacggctcgggcgctggagattgctgctaaaattgattcaattcctcacttgaataatt

SEQ ID NO: 185328 - DNA, 75 bp, Homo sapiens
tcttctctgcttggaggggatgtggtttccgttaagctggacaacagtgtgggctgccctccagggtgccaggac

SEQ ID NO: 185329 - DNA, 98 bp, Homo sapiens
agacgtcagcgtctaccggattccgccccgggcctccaaccgcggttacaggtgctccagctgctgctcctgcccctgcctcagtcccacagatatcc

SEQ ID NO: 185330 - DNA, 75 bp, Homo sapiens
atttacagaaagagtcaacagcagtggcaacagatcctgataacttaagtgactctctcttttccggtgatgaag

SEQ ID NO: 185331 - DNA, 97 bp, Homo sapiens
cttcttcctcaacaccagcaccgcagatgttgtcaaggtggcctaccaggaggccaggggtgtcgccatggcgaagctgctctcaggggagaaccca

SEQ ID NO: 185332 - DNA, 82 bp, Homo sapiens
ccgtctcagcctgggcgtcgctgaagctgtgtctgcggggaggcagcggaaggcggcagggggatatgagactttctactcg

SEQ ID NO: 185333 - DNA, 122 bp, Homo sapiens
ctgggccgcaatggacaagctgaagaaggtgctgagcgggcaggacacggaggaccggagcggcctgtccgaggttgtacctacaacagatcatatagatacagaaaaattgaaagccagag

SEQ ID NO: 185334 - DNA, 100 bp, Homo sapiens
gttattcaggaaatagaaaactccgaagatgaagaaggaaaaagcggaagaaaacatgaagatggcggtggagataagatctggctcttgctgattgaat

SEQ ID NO: 185335 - DNA, 74 bp, Homo sapiens
aagaagccacgacgaatgcaccattcagattgaataagaagcagctgaagatactcacggacattatgtggcca

SEQ ID NO: 185336 - DNA, 83 bp, Homo sapiens
cttcatttgcttccacaagaaccgcgaggacagagatcaggatcctcatgaccagccaaagagaagaagaattaggaagcata

SEQ ID NO: 185337 - DNA, 98 bp, Homo sapiens
aacagaggcgctcatccacagagccacatctgttaggtcgttgaggacttccacatggagattggcacaggaccagactcaagacacacaactcataa

SEQ ID NO: 185338 - DNA, 75 bp, Homo sapiens
aataatcaggagtgaagtcccagggatattctgtgctgctatccaacttgataaagtcaatcttcaagtatattg

SEQ ID NO: 185339 - DNA, 74 bp, Homo sapiens
cgataattaaagagtaaagttgtgctcaacgatggtgatgcccagtcacttaaggaacaccttattgatgaatt

SEQ ID NO: 185340 - DNA, 100 bp, Homo sapiens
ttaccaactgtgtaaaggatgaaaatgtcaagcaggaatgtatcctgtcaggtataatgtcagtgaatggcaagaaagttcttcatatggatcgaaaccc

SEQ ID NO: 185341 - DNA, 90 bp, Homo sapiens
gtgatttctgcatttccatctgagaagtgtggtaaactggaccccactttcgccagtgcaactttactgtttcagaaagaccccccagcc

SEQ ID NO: 185342 - DNA, 97 bp, Homo sapiens
tgggcggcgaaaccgacggcgccgggaggacgagggacggcgcagacggaggcggcggagccgggagcgcaggggagacaggtgtggacatgagtgg

SEQ ID NO: 185343 - DNA, 75 bp, Homo sapiens
ggccagggctgctttggcgaggtgtggatggctgttgtcacaagcagtgtttcctctggatatggcagtggcagt

SEQ ID NO: 185344 - DNA, 85 bp, Homo sapiens
gaaaggctctccttgcagctgcttagacgctggatttttttcgggtagtggaaaaccaggaagggaaaaggccgaggcatcagcg

SEQ ID NO: 185345 - DNA, 100 bp, Homo sapiens
caagaccatcatcactttcattgtctcggacgtgcggggcctgggcctcccggtccgcaagcaggatcatagaactcaatggtggacaaccgcctctaac

SEQ ID NO: 185346 - DNA, 90 bp, Homo sapiens
cgacatcagcgatgcctactgctccgcggtgtttgcagccagtgccaatatctgcaatgtggtcctgatgcggtacggggagctggagga

SEQ ID NO: 185347 - DNA, 82 bp, Homo sapiens
ctcgcttgcagttcagcgaccacgacatgggaaagcggaaccaccaaaaggagtgatgatcaacgatctcatgataaatctg

SEQ ID NO: 185348 - DNA, 100 bp, Homo sapiens
acagacattgagctcctccctgtgaactcagcattgctgcagctcgtgggtgctcaggagaagaacgcccagctcctgggtgcggctcagcagctcctca

SEQ ID NO: 185349 - DNA, 100 bp, Homo sapiens
ctagctccaggttaggccgagctttgcgggaaagcagcgaaatggtggagtcaatgaagaaagtagcagggatggatgtggagctgacagttgaagaaag

SEQ ID NO: 185350 - DNA, 75 bp, Homo sapiens
catgattccaggtggctcaatgatcctgaaattcctgttcaggtcactcaggatattgagcctcatttgggagcc

SEQ ID NO: 185351 - DNA, 80 bp, Homo sapiens
ggacaagctggacgttaaagggaagcgggtcgttatgagttggagctgatcacaacccaggccacaaaggcaggcttctc

SEQ ID NO: 185352 - DNA, 100 bp, Homo sapiens
cccgtctgtcgcccgaggcggccgccgctgcaccttcaccgcgtacccgggacccgcccgcccgcgggaggagcctcacagtctactcagagaaaaataa

SEQ ID NO: 185353 - DNA, 90 bp, Homo sapiens
ggtctctgtttatttagaagacacagactaacaattttagatggccaagattgacagacacctaatattcatgacttgagaatattctgc

SEQ ID NO: 185354 - DNA, 52 bp, Homo sapiens
ccccgggctcccagctgcccacctcatagtgtactaatggtcacttgatgtg

SEQ ID NO: 185355 - DNA, 101 bp, Homo sapiens
aataccagtccccagtgagggtgtacaaatacccctttgaattaattatggctggccatgctatgatagtggaagcttatccaaaataatagatccagaag

SEQ ID NO: 185356 - DNA, 75 bp, Homo sapiens
tagcttcgcagtctggaaagctttaggagttcacagtgtgggcagatggaaaaggacccctggcagctgcgttct

SEQ ID NO: 185357 - DNA, 75 bp, Homo sapiens
aagaccaaggacaaccctggcagcatcgggaaggggggcaacaacgccggccacacggtggtggtggatgggaaa

SEQ ID NO: 185358 - DNA, 87 bp, Homo sapiens
tgagcctcaggctttaggaactgaagagggtggtgattccactgaagcaactgccaaaccaaagagaagtttttatgctgccaggga

SEQ ID NO: 185359 - DNA, 100 bp, Homo sapiens
tttgatgggaagtatgaagccaaacagttgagaactttttaccaaatgtatgataagggcaaggggacgcgagataaggtcctgatcagaatcatggtct

SEQ ID NO: 185360 - DNA, 137 bp, Homo sapiens
taattacagaactcagctttggaacatttcaggcctggcacggaatgcagtttttacataagttcaacatccatttttcaccctacatgaatccaaaggaacagatgtggcatcttttgtaaaactgattcttggag

SEQ ID NO: 185361 - DNA, 102 bp, Homo sapiens
agcaaatggatcattttgttggactcaatttcaactctaactttaactttgcattggttggacaccttttaaaagaggccatgtggaagtgttacatcacct

SEQ ID NO: 185362 - DNA, 100 bp, Homo sapiens
ataagatggaaaatgccaacattccttctgtgtccctgtccaagcgagaggaaaagctgttactagaaccaatgtttgaagtccctaattctgatatcgt

SEQ ID NO: 185363 - DNA, 100 bp, Homo sapiens
gacagaaatcacctatgtttacagcgacaggtactaggttttgacaagcttgcatcatgcgtgagtataagctagtcgttcttggctcaggaggcgttgg

SEQ ID NO: 185364 - DNA, 98 bp, Homo sapiens
tgacctgaactcaactagggtgttatttgagaagttaatgaactctcagcactccatgattctagaacaggtcgtagttcccccgctccctgggaaag

SEQ ID NO: 185365 - DNA, 87 bp, Homo sapiens
aatttacactgacagaagcagtggtcgaatccagtagaaaactggtcaaggaagctgttccagcaacagatagaaatgctttaagtt

SEQ ID NO: 185366 - DNA, 103 bp, Homo sapiens
gagcgcaagtgcgtggaggaggcctacagcctcctcaacgaatacggcgacgacatgtatgggccagaaaagtgtttgaaagatgtatggtgatcttgaaacc

SEQ ID NO: 185367 - DNA, 75 bp, Homo sapiens
gggcggtgccggcgccggagacgatgccgttggagatgcagttaaagacttgatgcttcgctttctgggtgaaaa

SEQ ID NO: 185368 - DNA, 100 bp, Homo sapiens
ggcctcggctacctggtgcaggtgaagcccatggcaggaaggtgctcgggtcttcggggcactgggtcccatcggtccctcctcacctgggctcaccctc

SEQ ID NO: 185369 - DNA, 100 bp, Homo sapiens
ttggttccccctccctcagcttccgccccaaaaggcttgcattgatgacaatgttgatatggtgaagtttctggtagaaaatggagcaaatattaatcaa

SEQ ID NO: 185370 - DNA, 100 bp, Homo sapiens
cgaggctttcagttctttggaattccattcttttccttattcttctgatgtggatccagatatgaggccccaggattcctggcgaggtcctcctcccctt

SEQ ID NO: 185371 - DNA, 88 bp, Homo sapiens
gaaatctaatgaaccgaaactttggaccttttctgagcggctactgggaaatttctcattagcagttccgatctttgttgccctctcc

SEQ ID NO: 185372 - DNA, 90 bp, Homo sapiens
cccaggcctccgggccgcgaagtcgcagcgccagacccaaggcccccgagtgagcgcgggcgccgagtttctcttcagcaacgggtagca

SEQ ID NO: 185373 - DNA, 100 bp, Homo sapiens
ccgcgcccatggcagagccagaccgtaacatctgccggcacctgctgccccgggtccagtgccccgccttgattgtgcacggtgagaaggatcctctggt

SEQ ID NO: 185374 - DNA, 83 bp, Homo sapiens
cgcgggactacaattcccaaaggacggtagcactcagcgccccgccaacaggtgagaagccctaccactgcaactgggacggc

SEQ ID NO: 185375 - DNA, 100 bp, Homo sapiens
ggacggagcccttgatgacgagggccacagtgggattaaaaagaccactgaggagcaggtgcaggtttggtgcacctcgatttggaggaagtagggcagg

SEQ ID NO: 185376 - DNA, 100 bp, Homo sapiens
agagtgaacagaaaaagaggatacctctgcgatcccgggtcatctccagatgctagggttatgggtctgaatttcctgctgctgttcacaaagatgcttt

SEQ ID NO: 185377 - DNA, 82 bp, Homo sapiens
gctcctggccctggccctgatcatcctgctgggcttcgtccagatcgggaagggtttattcagtcaccatgaagctgctgct

SEQ ID NO: 185378 - DNA, 101 bp, Homo sapiens
tacaggaggagtgcgcaggacggcccagccccagcagatagagccacgaaccccctgaacaaggagctcgactgggccagcatcaacggcttctgcgagca

SEQ ID NO: 185379 - DNA, 82 bp, Homo sapiens
tgggctggcggaggccttgctgatgaacctgactgagggggatatgagactttctactcggaatatcctgagtgttgcgtgg

SEQ ID NO: 185380 - DNA, 85 bp, Homo sapiens
tggaagatgacgacgaggacgccagttactccacggaaagcagcttcagcagcactccaggctcatgacttgcagagtgaacttg

SEQ ID NO: 185381 - DNA, 90 bp, Homo sapiens
ctgagattgcatcaggatattaatgattataaccggagattctcagggcaacccagatctgtgatgctactaggaggtggagcctttggg

SEQ ID NO: 185382 - DNA, 75 bp, Homo sapiens
atgacagagctattcacatccaaggtcgaatgagtgatttgagtgtaattggtcatccaatagattcagaatcta

SEQ ID NO: 185383 - DNA, 100 bp, Homo sapiens
aggcattgactccatcagttcctataaataaaggtcccaaacctaagagggagaagaaggagcctggtttaagagcaggactggctgcctcaattgctgg

SEQ ID NO: 185384 - DNA, 75 bp, Homo sapiens
cgagatgcggttttcctcgcagaacgcctttatgcagaaggtgcaggtgatggtcctaccagtgtgtctgttgag

SEQ ID NO: 185385 - DNA, 88 bp, Homo sapiens
ggctgtgttgacatcaaggatctaccaggttgcccccaagtttcctggcagtgtgtgatactgaggaggtgagcttgtttctggagct

SEQ ID NO: 185386 - DNA, 114 bp, Homo sapiens
tcttcctgagcagagctctccgggttccccggctcgcggggcccggcgaagggcaggtgagaagccctaccactgcaactgggacggctgcggctggaagtttgcgcgctcaga

SEQ ID NO: 185387 - DNA, 74 bp, Homo sapiens
cacggcgcgacgacgagctgcagttgtgggcaccttgtatgcgctccgggaagcagtttgttcgctatataaac

SEQ ID NO: 185388 - DNA, 74 bp, Homo sapiens
cgtctcttacgtctgcggaagtgcagctgcctcagttcttagcgcagataagaccatcatcatgtggaaactga

SEQ ID NO: 185389 - DNA, 98 bp, Homo sapiens
tggatcaacccagacaagctttctccccgagatggggagcctgtggtgacacagctgcatcccggccccatcgttgtgagggacggttacttctcacg

SEQ ID NO: 185390 - DNA, 75 bp, Homo sapiens
tcttattttgttgagtcgaaagtgaaattttcctttggccaacgtgacagcattaggtggtctcttcagtcagcc

SEQ ID NO: 185391 - DNA, 90 bp, Homo sapiens
ataagggggaactctagtctgtatcctgtagcatcaccatctcttcagcaactggtagtagaggtacaaacacaagtgcgccttgcaaaa

SEQ ID NO: 185392 - DNA, 138 bp, Homo sapiens
agcgagcggcgcggagctggacgccgcgatcgtggggcccgcgaggcgggcagccggggcgtccagtgtctttgctcagttcaaaagccacagaagaagttctggacgatgtgggccttcaatcttctaagatgggaa

SEQ ID NO: 185393 - DNA, 75 bp, Homo sapiens
tttactagttgatgccaatgatgtaattctggagagagtgctctggatgagggggatattgccttgttgaaaact

SEQ ID NO: 185394 - DNA, 100 bp, Homo sapiens
gtcaaccggtgaagaatacatcgctgttggagattttactgctcagcaagttggagatcttacatttaagctgtaagaaaagcctggagtgcacgaagtt

SEQ ID NO: 185395 - DNA, 88 bp, Homo sapiens
ggaggcggcggccgacggtggcggcgggatgcaggatactgctggtcaagagaggtttagaacattaactcccagctattatagaggt

SEQ ID NO: 185396 - DNA, 88 bp, Homo sapiens
aggaaatcgagactcatgactcccagagaggatggcatctagaagggcgaagtctaaaaatggaggaagatctttaagagaaaaactg

SEQ ID NO: 185397 - DNA, 82 bp, Homo sapiens
cagaagtccagagctgaggactgcctgtttgcaggtttggttttcctaaacaaatcctttcacagggaccgacggcacttga

SEQ ID NO: 185398 - DNA, 83 bp, Homo sapiens
gagaaatggagcccttctccaagatctctggaaacatggctacagaacatgttaatggaaatggtactgaagagcccatggat

SEQ ID NO: 185399 - DNA, 75 bp, Homo sapiens
ccagttacactctgaggatattaagaacttgtaatagctggcatcgttgagaatgaatggaaaagaacgtgctcc

SEQ ID NO: 185400 - DNA, 100 bp, Homo sapiens
ttttgctttagctggactaacagatttgatttgcttgtaaatgcatcacgaagaggcagcccagaatgaagaaagcaagcaggagtgttggctcagtgcc

SEQ ID NO: 185401 - DNA, 90 bp, Homo sapiens
ctccagagggcccaggcctgggaaaaagaacagagtctcactcccatcgcccagacttgagtgtagtgatgtgatcactgctcactgcag

SEQ ID NO: 185402 - DNA, 75 bp, Homo sapiens
agcgaaaatgctactatgactcttcctggaatacacccacctaccttgaaccagctttgaaatatcagtgatgta

SEQ ID NO: 185403 - DNA, 83 bp, Homo sapiens
cttctcgtagtcctgggagcacagcagaagtgattttttatcaagcagaaatgcatcgaacaacgagaatcaagatcactgag

SEQ ID NO: 185404 - DNA, 96 bp, Homo sapiens
gaatacctgaagttcgataaagggccgtggctcaagcaggacaatcgcactttataccacctgcgattactgtcagtcattggcaccatgaactgg

SEQ ID NO: 185405 - DNA, 75 bp, Homo sapiens
ttcgcttcgcctgcaaacgcggtgggggctgctcggcggtcaggagcagacttcaaatcatcccaacaccagaga

SEQ ID NO: 185406 - DNA, 85 bp, Homo sapiens
ggtgtagacatccgtgtccgtgtaaagggtggtggtcacgtggcccagatttatgctcggcttattccaggggtgtgtttcgtcg

SEQ ID NO: 185407 - DNA, 75 bp, Homo sapiens
ggaaaagggccactcgcccgaagacatctaccagatggctctcaaccagggtgactatgaccagagcaggaccaa

SEQ ID NO: 185408 - DNA, 82 bp, Homo sapiens
agcgactgagtccgcgatggaggcaaagcagagagcagaggttcttcagtccacgcaacggttcttctctgaacagcaacag

SEQ ID NO: 185409 - DNA, 50 bp, Homo sapiens
cgacaggcggcgcgggcggcgtggctcacacattgaaaactggcactcca

SEQ ID NO: 185410 - DNA, 82 bp, Homo sapiens
aaacccactgaagacgtctgcgtgagaatagagaccaccgagaaggaagaatcctgctcaaaaatgaggtgaattaatactt

SEQ ID NO: 185411 - DNA, 82 bp, Homo sapiens
tgcagagaacagccccaatcaccgtccttacacggcctctgatttcatagaagctctacgtctcctccgagagccgcttcaa

SEQ ID NO: 185412 - DNA, 95 bp, Homo sapiens
ccagggctcgtacttctgctcgcaggtccagcccagaatcaaatgcaggttccatctggatatggattgcatcatcaaaactatattgctccctc

SEQ ID NO: 185413 - DNA, 75 bp, Homo sapiens
ggctcgttaagtcgccccccgagaggaagctacagcgctacggcgtctctggccgagcctctttttgtggaaaac

SEQ ID NO: 185414 - DNA, 75 bp, Homo sapiens
cccagcatttcatccctcgtcgaaaggattggattggcatctttagacctttgaagaagatggtggagagaattc

SEQ ID NO: 185415 - DNA, 50 bp, Homo sapiens
gttcgactgctagagccgagcgaagcagctcccagctcctccagcagccg

SEQ ID NO: 185416 - DNA, 74 bp, Homo sapiens
agtgacatgttgataaaaaatgatgattatcttgacaatggtaataataaaatggcaattcagcaagcagataa

SEQ ID NO: 185417 - DNA, 83 bp, Homo sapiens
gcgcgggcaggtccacgggaagcctacacgcccaaggcttcaacggaccacaccaaaatgccatctcaaatggaacacgccat

SEQ ID NO: 185418 - DNA, 75 bp, Homo sapiens
ctcggagtgtactccgcctgcaaggaaagaaaccttgactggttccccaggatgagagccatgtcattggtcagc

SEQ ID NO: 185419 - DNA, 98 bp, Homo sapiens
ctgataacgaggctgtggagcagcacagacggtgtgaagggagacctgctgattgacatcggctctggccccactatctatcagctcctctctgcttg

SEQ ID NO: 185420 - DNA, 82 bp, Homo sapiens
accggggcatctccaacatgctggatgtcaacggcctctagaaaaaatgatccctatgctcttgcatccctggtgtcctttg

SEQ ID NO: 185421 - DNA, 101 bp, Homo sapiens
ctgccgacaccctgacggccacgaacttccgagtggatctgaacataaagtctggtctcctctggtgacggaggaagggaagcgtcatccatacaagatga

SEQ ID NO: 185422 - DNA, 60 bp, Homo sapiens
acctttgtcatttggaagaagcgaagaggtcgccactgggacactgtgaaccaggagtga

SEQ ID NO: 185423 - DNA, 89 bp, Homo sapiens
tgaagagcaaaaagtctcagatgagctcatgagtgaaaggttcaaaccttgtactactcagctgatcacaagctgcttgatgggaacct

SEQ ID NO: 185424 - DNA, 100 bp, Homo sapiens
cataatagaaagaatggagaattattgattgaccgtctttattctgtgggctctgattctccaatgggaataccaagggcctgataggcagacactgatg

SEQ ID NO: 185425 - DNA, 100 bp, Homo sapiens
ctaaagcagcgtgcgttcagccctggggttgcttctagaactgctggagttactgtttgacaagtttaatgctgtagccgctgcacactctgtggtcctg

SEQ ID NO: 185426 - DNA, 48 bp, Homo sapiens
cccttgatcctcctcctaattgcagtgattctgccccacattggcagt

SEQ ID NO: 185427 - DNA, 74 bp, Homo sapiens
cggagcttctcagaagacagagggttttcttttgagaactgataaatttcaaacggaagagagtggcagcattt

SEQ ID NO: 185428 - DNA, 78 bp, Homo sapiens
gtctgaaagagcagcagaaacgctactttccagatgaggctgccagccttgagagcaccaccgttacctggttgaaga

SEQ ID NO: 185429 - DNA, 88 bp, Homo sapiens
tttatcggccgcatccggcctttggcggagaaaaccggcatctgcaaaattcggccgcccaaggttgtttacattcagagctctatca

SEQ ID NO: 185430 - DNA, 100 bp, Homo sapiens
gaagccctttctcctcggcactgtattctttacctgcttcccaatcccactgatgaggatcagcccatggtggacgtctgatttatgaagctccccatcc

SEQ ID NO: 185431 - DNA, 100 bp, Homo sapiens
agggtgacgctcgctccgctcgtcccgctcgtcatggcctacccgggatacggaggaggggttagcgtccccaaaatgaaacataagccaaccaggcaac

SEQ ID NO: 185432 - DNA, 75 bp, Homo sapiens
ctcctcccagtgacgggtctggagtgcgtgggggaccggctgttggcgggtgagcacctgcggatctgtccccag

SEQ ID NO: 185433 - DNA, 82 bp, Homo sapiens
ggcgtgaggagtgtgagctcatgctacagcttccccgggcgctgcctggacaggcctgcctgcgtgctgggacatgtctggc

SEQ ID NO: 185434 - DNA, 88 bp, Homo sapiens
tcagccccatccagaaaccgcaaggcctggaccccgtggaaattctgcaagagcgggaatacagtattctgacaagtccctgtacacc

SEQ ID NO: 185435 - DNA, 100 bp, Homo sapiens
ctaagacgcgcgcaggcggtttcgcgagcgcgttggagcggcactcggagcttctacagaaggatggacactccacagctgaccttgactgaactccggg

SEQ ID NO: 185436 - DNA, 76 bp, Homo sapiens
agaaattgaggaaactgaggaaagaggctgcagcgaggaaagactgctgagaaggaagaatttgaacatcaacaga

SEQ ID NO: 185437 - DNA, 100 bp, Homo sapiens
ggacattcccaacatgctcactcccttaatctgtccgtctagaggtttggcttctacaaaccaaggtaagaatgattgatgttggctgatattggagtgc

SEQ ID NO: 185438 - DNA, 98 bp, Homo sapiens
gtcatggggctgtttggaaagacccaggagaagccgcccaaagaactggcttcaatgttagctgcagaaaatgacccttatggacctttgccaccagg

SEQ ID NO: 185439 - DNA, 90 bp, Homo sapiens
gcggtagcacgagtgcgggcagcagcagccccggggcccggagagatgtcacctgtgagaatcccagatgtcctttctcccagctcccag

SEQ ID NO: 185440 - DNA, 83 bp, Homo sapiens
cccagacagaggggagcacagagaaagagaatgatgaagagaaaggcccggagacttttaaagctgatggaacaggatacttg

SEQ ID NO: 185441 - DNA, 100 bp, Homo sapiens
aaaacaacagacagccctatgctgtcagtgaattagcagacaaggcgcctctgtcgaagagccttctgctggtccccagtgccctctccctcctgctcgc

SEQ ID NO: 185442 - DNA, 90 bp, Homo sapiens
aggggaagcaggagtgcatggactccaagctcctggccatgaagcacacgtatctcccatgcgccaagtggagcccccagccaagaagcc

SEQ ID NO: 185443 - DNA, 76 bp, Homo sapiens
acattctgaagggaggcaaggaggcggactgagcgctcccaattgggcttgccttgcgccatggactggcagccag

SEQ ID NO: 185444 - DNA, 98 bp, Homo sapiens
cagacgccgagactcccgcagcatgacccgccacgccgatcgggtatcaggacctcccctgtcagatgattcaggggctgatttgcctcaaatggaac

SEQ ID NO: 185445 - DNA, 100 bp, Homo sapiens
ccctcgctctgagctgcgcctggacctggttctgccttctggacaatctttccggtgaagtcagcactgtgcttaagctggataacacagtggtggggca

SEQ ID NO: 185446 - DNA, 73 bp, Homo sapiens
gccagagcaagagctggatctcgtctttcttatgatgctgtccgaataaaccaactctatgagcaagccaggt

SEQ ID NO: 185447 - DNA, 100 bp, Homo sapiens
tgggcgacccagaagccctgagaggtaatgtgaggctacaggagatgatggcaacaatgtgccaggaacgtggagcccggctttttgctacagatgagag

SEQ ID NO: 185448 - DNA, 75 bp, Homo sapiens
cacttaaaagggattatggtgtccagctggttgaggaggtggagcgatttagccaagaagttcagattacagaag

SEQ ID NO: 185449 - DNA, 101 bp, Homo sapiens
accacctttggtgctttcagaatcatgactctcaatgttgaagaatgggctactgcatggaaggggcactatgaacgaagaggagcagtttgtaaacattg

SEQ ID NO: 185450 - DNA, 75 bp, Homo sapiens
cagcggcctcggggaatggaagcggagaacgcgggcagggccgcccagtatgcttgctctcttcttggccatgcg

SEQ ID NO: 185451 - DNA, 90 bp, Homo sapiens
cgcggaatcggggagcgtccggagctagctggatcctctaggcagcctacaacacagcagtcccctcaggatgagcaggaaaagctcttg

SEQ ID NO: 185452 - DNA, 74 bp, Homo sapiens
cgaattgccaatgtctccatcctgaagcccttcttcgattcaaccaagccatcctggtatcccggcatgacccg

SEQ ID NO: 185453 - DNA, 98 bp, Homo sapiens
gagagtgagaaagaagggactggccagagttactcagctagacagtgacagacaacagtggaacttctgaaccacgaccatgcctgcatcgcctgtcg

SEQ ID NO: 185454 - DNA, 75 bp, Homo sapiens
ccagccctgcctctccctgggctctgcccacaaaggtcctgggcatttataccttcacgaagcgggtagccttgg

SEQ ID NO: 185455 - DNA, 50 bp, Homo sapiens
ctgcagtcagatatgatgcagaggaaattgacaatggcccttcagctatg

SEQ ID NO: 185456 - DNA, 100 bp, Homo sapiens
cttcatccagcaatcagctccctcctgcaggtcagaaaaagagtgcacgccagtatcacgtacagttctttggtgacgccccagaaagagcttggatatt

SEQ ID NO: 185457 - DNA, 74 bp, Homo sapiens
gattttgaagctaaagttaagcagagtaaagctgctgctaaagctggatcttctaaataccagtggggcattat

SEQ ID NO: 185458 - DNA, 83 bp, Homo sapiens
caaggaggtcacccgcgtgctaatggtggaaacccacaacgcttccccgggcgctgcctggacaggcctgcctgcgtgctggg

SEQ ID NO: 185459 - DNA, 136 bp, Homo sapiens
ggtcccttggcattacttctatagaaatggctgaaggaaaacctccttatgctgatatacatccaatgaggtaataaaagactagtggccttagtgcccatgcccagtgaccctccattcaatacccgaagagcct

SEQ ID NO: 185460 - DNA, 75 bp, Homo sapiens
ggacagtggagatgaagcctaagaatatgatcaggtgtcccgacccaggctaagcttgagcatggctgagcagga

SEQ ID NO: 185461 - DNA, 88 bp, Homo sapiens
gacggccctgtgtccagccagggatacatgccctacctcaacaagtacatcctggacaagctcgggttcatgacgctctcgatattcc

SEQ ID NO: 185462 - DNA, 100 bp, Homo sapiens
cgtaaggagggctacgacttccactcatcctctgagtttgagattgtcaaggccataaaagaactgcattaatactacattgtcaaagacaaagacgaac

SEQ ID NO: 185463 - DNA, 100 bp, Homo sapiens
cccctcctccaccagaggactgggaggagcatgtcaacagggatgggcgtgttttgggcgtgctagaggtgtcacgctccattggggacgggcagtacaa

SEQ ID NO: 185464 - DNA, 100 bp, Homo sapiens
cagaacaggaggtggtagagggcatggatatctctactcgctccaaagacatgatgtgtttcaacaccactggcacccaagtgcaaaacattacggtgac

SEQ ID NO: 185465 - DNA, 75 bp, Homo sapiens
aaaggaattagcagaagacattatgtcaggtgttaaaatcatcacacaacaggttcaaccaagtaaaatcttacc

SEQ ID NO: 185466 - DNA, 83 bp, Homo sapiens
gccgccgcctctcgcaatattgcaatataggggaaaagcagttgatattcactgatggactccaaagaatcattaactcctgg

SEQ ID NO: 185467 - DNA, 100 bp, Homo sapiens
tgctcacctggagaagggatggaaatacttcaacaaggcatccgtgtcattctggaccttactcccaactaccggggtgagaactcgtggttctccactc

SEQ ID NO: 185468 - DNA, 102 bp, Homo sapiens
gaagaccgcgcgcagggcctgcagcgggagctggacggcgagcgcgagcggcgcgagaaaacttcccaagtaagaagcggaagaggagccgctggaaccaag

SEQ ID NO: 185469 - DNA, 100 bp, Homo sapiens
ggcctccaaggtgcagacagctgtgactatgaagggggaatgatgagaagacagcagctgattacaagattttaggtggttcagtccttcacctggtgtt

SEQ ID NO: 185470 - DNA, 96 bp, Homo sapiens
ctgcgggtgcctttgaaaatcaacgacaacttgagcacagaacaccttccaccatgaccacctcagcaagttcccacttaaataaaggcatcaagc

SEQ ID NO: 185471 - DNA, 74 bp, Homo sapiens
gtcctcattgctccaaactgtgttgtttcagctgtattagggtaattttaaccaatcagatgacaacaaagatt

SEQ ID NO: 185472 - DNA, 115 bp, Homo sapiens
tgctttcccaagcctggaagaactcgtcatgctctttgtagcgtggtgcttctgttgctcacagagaatggaggtgttgtccaagttggagaattgttaccttgcaagatttgtg

SEQ ID NO: 185473 - DNA, 100 bp, Homo sapiens
cacaataagagcagaggatggaacacttcagtgcattcaagaaaaaagttgtctcaggtatagcaagtaaaccaaaacaggatgatgctggaagaattgc

SEQ ID NO: 185474 - DNA, 100 bp, Homo sapiens
ccagacttcctgtgttaactccttcctctgccactttttaccttggggacctcagtttcagctgtgagttcaacatggaggcaaatcagtgccccctggt

SEQ ID NO: 185475 - DNA, 90 bp, Homo sapiens
ggccaaggtgattcagattgcaacgtcatcctccacagctaaggtggaaccgtcccaaaatgtcccttgctcagaagaaggatcgggtag

SEQ ID NO: 185476 - DNA, 100 bp, Homo sapiens
gctgagggcgcgtctcccctccgccatggtccaggtgcaggtacagcagtctccgcaacaggtctcggctcagctctccccacaactcaccgttcaccag

SEQ ID NO: 185477 - DNA, 101 bp, Homo sapiens
gctaggaaaagaatgtcagtgattgttcgcactccatctggaaagttacgactctactgcaaaggagctatccctgcatgtcactgagtccaccatgcttt

SEQ ID NO: 185478 - DNA, 90 bp, Homo sapiens
gcgtggggaagcaccgttctctaccctccaacctggagatgcccaaagatgagctgcccaaccataactgcattaagcacctgcgctcag

SEQ ID NO: 185479 - DNA, 96 bp, Homo sapiens
atcgtgagcctcttgacgtgggtcttaaacacctacacaagggtgttgaaagcagcaggggcctagaagacattaaaccgataccacagaaataca

SEQ ID NO: 185480 - DNA, 130 bp, Homo sapiens
tcacggctcagctgcctctctggtctccaactagtattatgagaggagtcaatcagagggctgggcttcaacatcgtcggtgggacagatcagcagtatgtctccaacgacagtggcatctacgtcagcc

SEQ ID NO: 185481 - DNA, 100 bp, Homo sapiens
gccaagggaccaaggtggaaatcaaacgtttccactgtatccaaaaggaggggagaagttgcagtttgattatggtgtctatcttctgaacaaaaatata

SEQ ID NO: 185482 - DNA, 75 bp, Homo sapiens
tatataactcaagttgtttggctaaattcttcaggggttgatagttcttggggaggtacctcccccagagcatac

SEQ ID NO: 185483 - DNA, 100 bp, Homo sapiens
gtgctgggggtggctcaccgggcagcgtgggtgagcggcgcagcggcggcagcggagagcgagagaggggagcagtgtatgggtttcgacagaccatgat

SEQ ID NO: 185484 - DNA, 87 bp, Homo sapiens
ctctagaggaggaagcctgcagccttaaggccacagttgtaagggatcttgtggctgtcaggatggcagaggagcaggagttcaccc

SEQ ID NO: 185485 - DNA, 119 bp, Homo sapiens
cacgatattatctttacaagcatgcctacttttatcctcatttaaaacgatttccagttcagagattctcaaagatgcgagttttctgtgtgggactactccttttcagtgtgacctgg

SEQ ID NO: 185486 - DNA, 83 bp, Homo sapiens
gtgtgctcatctcgggcctggtgctgctcgcctacttcctgccggcgcagggtgagaagccctaccactgcaactgggacggc

SEQ ID NO: 185487 - DNA, 83 bp, Homo sapiens
tgattggcagagacccactgtctgggggatatgagactttctactcggaatatcctgagtgttgcgtggatgtaaaacccatt

SEQ ID NO: 185488 - DNA, 95 bp, Homo sapiens
ccgcgtgtcctcggagcgcggtccctgtattggtctcctgctcctagaggatatggaatattatcttgtaaaatggaaaggatggccagattcta

SEQ ID NO: 185489 - DNA, 76 bp, Homo sapiens
gcatcagcgactctgtgttgtttctgcaggtgaacctgagcaaggtgggcgagtattggtggaacgccatcctgga

SEQ ID NO: 185490 - DNA, 74 bp, Homo sapiens
cactctccagcatagaatgcttccttctgggcttagctggcatgagcagcaaaagcggcgccaggaaattgaac

SEQ ID NO: 185491 - DNA, 100 bp, Homo sapiens
ctcgctcctcgatcgaggacgacttcaactatggcagcagcgtggcctccgccaccgtgcacatccgaatggagttatgaaaaaattcacctggacttcc

SEQ ID NO: 185492 - DNA, 71 bp, Homo sapiens
cagctgttccttctcccgagggcgagcccccccacagcagcaggactctggactgtcttcacactaggtgg

SEQ ID NO: 185493 - DNA, 100 bp, Homo sapiens
acagtcttctagaagagagaaggaggaaaagaagcagttcctgatgttacaaatgaacaaggatctcccaggaatgggtaccacagaccatgtcatcgtc

SEQ ID NO: 185494 - DNA, 82 bp, Homo sapiens
ggtcactttcgaagagccgccctatgctatcaagaatagcctaacatggcagaccagagacagcgctcactgtctacctctg

SEQ ID NO: 185495 - DNA, 100 bp, Homo sapiens
ccgcgaccactggcacattcttgctgacaggccgacaaggcatctacccgcctgaagcagctcaagcggcagctggaggaggccgaagaggaggcccagc

SEQ ID NO: 185496 - DNA, 100 bp, Homo sapiens
cgaggatgatgcggaaattaaccccaagttgcatcaggcctgaacccgtccattcagaaagcttcaaattatagaaacaatactgttctatacgagtgac

SEQ ID NO: 185497 - DNA, 75 bp, Homo sapiens
aagcaggcgatgacgagccagagtacgaggctatgtccaaactgggtcttcggcaggttacaggagttactagag

SEQ ID NO: 185498 - DNA, 74 bp, Homo sapiens
cccaggtgtaagcgcagaaagcaggcgaacccgcggcgcaataacgagtacatccaagccattatgatgatgga

SEQ ID NO: 185499 - DNA, 90 bp, Homo sapiens
gccgatcatggcggatggcccccggtgcaagaggcgcaaacaagccaatcccaggaggaaaaacgttttctgagtttaaccagtaatgcc

SEQ ID NO: 185500 - DNA, 83 bp, Homo sapiens
aagaactgccctccacttccaaatggggatatgagactttctactcggaatatcctgagtgttgcgtggatgtaaaacccatt

SEQ ID NO: 185501 - DNA, 100 bp, Homo sapiens
caaagatagctgtggatcgagtgaacgctgctgatgggagataccatgtcctgtttctcggaacagattgtgagatccatgagagcccagaaaatatctt

SEQ ID NO: 185502 - DNA, 97 bp, Homo sapiens
gggaccgagcctgggaggccggccggtgccagcacctttcggcttctgagacggcggcagcagcggcattcaggcagcttcgaaccagtgcaatgac

SEQ ID NO: 185503 - DNA, 73 bp, Homo sapiens
ctgagatttgaacaacaaagagaaaggcaagataatcccaaacttgacaggttcctgctggagtggagtgtct

SEQ ID NO: 185504 - DNA, 75 bp, Homo sapiens
ctgatagtctccagcgggcctggactgtgggctggtgtgtggaactgggcacaagagactatagtccccggcaga

SEQ ID NO: 185505 - DNA, 106 bp, Homo sapiens
cccgctcgctgggagagaggtacctctccttttccctctccctttccctaagatgatatcatcaagttgaatcgaaaggaagggaagaagcagaattttccaagac

SEQ ID NO: 185506 - DNA, 100 bp, Homo sapiens
gacgccgtagccgagaggttgggcggatgttgtgaaccgggtcgcggcggccgaggctcgggggcacagtcttttgctgagcgcctgcgcctgggaattg

SEQ ID NO: 185507 - DNA, 100 bp, Homo sapiens
ccccattcttgtatcacttgccccacagataccctcgtgattagaggtcttttgctggaggttgactgtgctgtctgcttccatgaggcaggctgaacct

SEQ ID NO: 185508 - DNA, 100 bp, Homo sapiens
gagaaagtttcatctgtggatggagtattgggaattgacataggggatagcttaactattccagatgaattcacggaagacgaaaaaaaatccggacaat

SEQ ID NO: 185509 - DNA, 75 bp, Homo sapiens
gatgattggtagctaagactcccgaatacttcagaagtggggaaatgttaattggccttggtcctcacagctcca

SEQ ID NO: 185510 - DNA, 100 bp, Homo sapiens
ggagacgtcatttgctactatgggaaccgaggggagcctgatcctatcgttttgacgccagatctttaatctcatgaagtacgacagctacagccgcttc

SEQ ID NO: 185511 - DNA, 75 bp, Homo sapiens
atgatgattttgagccatacttaagtagccagacaaatcaggttccagcaacagatagaaatgctttaagttcac

SEQ ID NO: 185512 - DNA, 83 bp, Homo sapiens
agaaaaagcatccccgaggaggaagacgaatcgttaaacatcttaggtcaggatatcctaaacctgaggaaggaatacttgac

SEQ ID NO: 185513 - DNA, 100 bp, Homo sapiens
gccctcattctgcacgacgatgaggtgacagtcacgattcgggcaagtccaccactactggccatctgatctataaatgcggtggcatcgacaaaagaac

SEQ ID NO: 185514 - DNA, 100 bp, Homo sapiens
aatcatggagccgctggggtcccttttgcctcagatactattttgaagaacattaaccaggtggtatttgttggaaatttcttgagaattaatacgatcg

SEQ ID NO: 185515 - DNA, 100 bp, Homo sapiens
gggcccagtgtggacggggccaccggctggagcggatcccacacctccggaccgagggacgcgggcctcggagctgctcctgccggcggctgcctctctt

SEQ ID NO: 185516 - DNA, 83 bp, Homo sapiens
cctcccaagatggcggtgtgcatcgcggtgattgccaaggagagggaagtgatgagctttcctttgatccggacgacgtaatc

SEQ ID NO: 185517 - DNA, 75 bp, Homo sapiens
acaaccgtacatgattgggtcaatacgtattttcatctcagcctagtgacgatgaatcaagtagtgatgaaacca

SEQ ID NO: 185518 - DNA, 74 bp, Homo sapiens
agggaccacggtcaccgtctcctcagggcatttgcacgccaaaggcaaagaagaaaaaatgtccaaatcattaa

SEQ ID NO: 185519 - DNA, 75 bp, Homo sapiens
ccggggacccttccgtatctgcctaggcattttgctgtctcctcctaatacgctttcactttcagaagaacagaa

SEQ ID NO: 185520 - DNA, 100 bp, Homo sapiens
cttccccagctctgcagccacatactatccgtttgttcaggaaccaccagtgacagagtggcacaagaatggctcaactctccaaatagagagaatttct

SEQ ID NO: 185521 - DNA, 50 bp, Homo sapiens
gggagcttgatgaacctagacagcagctattcctctacacagccgactag

SEQ ID NO: 185522 - DNA, 88 bp, Homo sapiens
gccgagcacctctccgcgcacatcactcccgagtggaggaagcaatacatccagtatgagagaggtacagaaagcagtcaacactgcc

SEQ ID NO: 185523 - DNA, 95 bp, Homo sapiens
tcattatggagggaggtttggcagatggagaacctgatcgaacttcggctaggcagctggaagagaaagaccgagtgctaaagaagcaggatgca

SEQ ID NO: 185524 - DNA, 73 bp, Homo sapiens
atttgcagcaccatcaacagatgcccctgataaaggatacgttgaatcaaatggctatagcatgtggatctcg

SEQ ID NO: 185525 - DNA, 75 bp, Homo sapiens
ttagggtcctttatatagaagggagagtaggctttggaactgcgacataactagcgatggctgctgcgatctcac

SEQ ID NO: 185526 - DNA, 76 bp, Homo sapiens
gttcgcctgcccagcaaatgcgaaggatattgactgggtacagacagagaagcacgtgtttgagcaggcatccagc

SEQ ID NO: 185527 - DNA, 80 bp, Homo sapiens
caggaggtggtagagggcatggatatctctactcgctccaaagccaaaagaatgcaatggtgtaaagattccagttgatg

SEQ ID NO: 185528 - DNA, 75 bp, Homo sapiens
tcctgaggagctgggattacagccatgtacatcttcatgtgatcagccaggattttgattctccttgccttaaaa

SEQ ID NO: 185529 - DNA, 90 bp, Homo sapiens
caagattgtccccattgccatccaggaatgtatcctgtcaggtataatgtcagtgaatggcaagaaagttcttcatatggatcgaaaccc

SEQ ID NO: 185530 - DNA, 80 bp, Homo sapiens
tcgcacttcctgcagtgggcattagccacgtccaggtggtgaagcagtattttccaatttgaagattcatttgaaggtgg

SEQ ID NO: 185531 - DNA, 82 bp, Homo sapiens
tgtagttcctggatatatctcccgatctgtggctggctcctatgataatgaagtatggtttgaagtggtgaacatggatttt

SEQ ID NO: 185532 - DNA, 100 bp, Homo sapiens
taagtgctcttactgaactgaatactaaagtaaaagagaaatttcaacagttgcgtcacagaatacagggtgtgtccgcagccggccaggtggtatccct

SEQ ID NO: 185533 - DNA, 100 bp, Homo sapiens
ataccctggggctgagaggaatcttctggagtactcttattttgaaaagcatctgtgggtcttgcagatatgatgtctcctggtgaatccaaactgcccc

SEQ ID NO: 185534 - DNA, 75 bp, Homo sapiens
tgtggaagatggcgcctgttgtgacagggtgacttaagagattaaaattaatttggttgctgttggttctgaaca

SEQ ID NO: 185535 - DNA, 50 bp, Homo sapiens
gggagatgcatccagggaaactgcgtaggttctgtccggaagcagattct

SEQ ID NO: 185536 - DNA, 90 bp, Homo sapiens
tggatgtagaaaatgagcagatactgaatgtaaaccctgcagaattctgcttggtcagaatcgtgatggcattgtgttcagcactgatga

SEQ ID NO: 185537 - DNA, 100 bp, Homo sapiens
tttttcaatgagaagaatgaacagacctagtgggcgttgcctttagacccagagagtgataatgaactctcaagtggaacaggtgatgtgtctaaggatt

SEQ ID NO: 185538 - DNA, 100 bp, Homo sapiens
aagaaggctcccgtgcggctgcaggagtgcattgagctcttcaccactgtggagaccctggagaaggaaaacccctggctgcagagagactaagggcact

SEQ ID NO: 185539 - DNA, 95 bp, Homo sapiens
agccagcctgtcatgagacctccaaacccctttggccctgtatcaggagcacaggagggatttgttcgtgttgaccgagattatgtgctgaagtc

SEQ ID NO: 185540 - DNA, 100 bp, Homo sapiens
ggaggggccgtgaggtgagagagtccgggagcccgagcttgaggccacccagaggagaaggccaccccgcctggaggcacaggccatgaggggctctcag

SEQ ID NO: 185541 - DNA, 97 bp, Homo sapiens
caagtaaggaagaaattgagaaagaatgtgaagataccagtttgcgtcaggagacacagattccaaaagatgagcatattcttcggttcctccgtgc

SEQ ID NO: 185542 - DNA, 90 bp, Homo sapiens
ggaaggcgaggcttccgcccggcacaggggcgtccgtctccaagagagtatgaagagagtgcgtctgtagggcagggaagatggcggaca

SEQ ID NO: 185543 - DNA, 75 bp, Homo sapiens
gggaacgcccggcccagcccctggtgaactatgacaatgtagtggacacaggttctgaaacagatgaggaagaca

SEQ ID NO: 185544 - DNA, 88 bp, Homo sapiens
aagctcatgaactcaaggagcacaacggacacatcacagattcgggaactggagcctctcctctgtcacagtgacaatccatctcagc

SEQ ID NO: 185545 - DNA, 90 bp, Homo sapiens
agaagaatttcgtaaagaatttaccaagctagaggaggattatacttactcagctgttaagagtaggcaatttcttcagttcttccacaa

SEQ ID NO: 185546 - DNA, 88 bp, Homo sapiens
ttgctgacctgggccagagctcttcccttacgcaagttggcaacattgtacaagtcacccagccagaaggaatgcacagtactgtttc

SEQ ID NO: 185547 - DNA, 88 bp, Homo sapiens
gacgaggggctccgggtcttccagagcgtgaagatcaagatcgtttggtgccctggttgtcagatgttggaaagcagtaggacggaac

SEQ ID NO: 185548 - DNA, 100 bp, Homo sapiens
gggagcccggccggagctgggtctggagacgccgtggcagcctgaacggagtgtgcgacggattgggaggtgtcttggctgggcatgacaaccgcgtcag

SEQ ID NO: 185549 - DNA, 75 bp, Homo sapiens
gaagtccaagtcaaacgcagaaggactgcctcactgagcaaccaagacttggatttacactgggcaacgtggttg

SEQ ID NO: 185550 - DNA, 75 bp, Homo sapiens
tttttatcaaaaactatgtacttggaggatcgaacaatatgggtttagagtgtccagtatgcaaagaagattaca

SEQ ID NO: 185551 - DNA, 75 bp, Homo sapiens
taccggctgctgcaggcctccatcctggcgtacctggtcgtgacacgagcagaagatatgaaaacaaggctggca

SEQ ID NO: 185552 - DNA, 100 bp, Homo sapiens
acctctccagcaatgattacttcagaattaccagtgttacagaattacatgaacgacagccttcgcaccgacgtcttcgtgcggttccagccagagagca

SEQ ID NO: 185553 - DNA, 100 bp, Homo sapiens
ggcgctccacaatgggacactgagctttgtggaagcatttggcggcataccaccctgcactgtgaggtacctggaaggaaaccacctaacagccgtgccc

SEQ ID NO: 185554 - DNA, 50 bp, Homo sapiens
gcaaggtggagtgcggatttgcaacagtcacagaattttccacactcctt

SEQ ID NO: 185555 - DNA, 96 bp, Homo sapiens
ggagcagcttctggatgaaatacatcgtgagaagagagacagcaaatcacccaccttgaggtcataaaggagctggaagctgctgggtgcttgtgc

SEQ ID NO: 185556 - DNA, 76 bp, Homo sapiens
tgcggagagaccatatatgtcattgggcagggatcaggtaacagagattcaaaggtaccttcagaaggaaagaaat

SEQ ID NO: 185557 - DNA, 59 bp, Homo sapiens
catcttcctgcacatctctgattatagggatggcccaggtaatcctcttagacataatt

SEQ ID NO: 185558 - DNA, 100 bp, Homo sapiens
taagagtgttttgaacaacagacatatagtgaagatgctggaaaaatacctcaagtgctgtgatttgggcttccatgccagcctggcccgcaccttccgg

SEQ ID NO: 185559 - DNA, 75 bp, Homo sapiens
gagagttaacttctgtttacatggaactcagacatctgcaaatcatgcattcctctgaatattgatttgctgaat

SEQ ID NO: 185560 - DNA, 75 bp, Homo sapiens
cggccgatgaagtgcagaggtttttttctggtggacactctaactttggagcagaagctatttagtggtccctac

SEQ ID NO: 185561 - DNA, 83 bp, Homo sapiens
aagaagcagaaagttgagcgcattgcatcacatgattttgaccccacagtgctgggattacaagcgtgagctaccacacccag

SEQ ID NO: 185562 - DNA, 88 bp, Homo sapiens
actattgcgagccatacacaacctggtgtcaggtgaaaagccatacaagtgtacctgggaaggctgcgactggaggttcgcgcgatcg

SEQ ID NO: 185563 - DNA, 90 bp, Homo sapiens
catcgctcgcatcgctgccgccaacggggaagaacaaagtatgctagctatggaagatgagggcacagtacaactcccattggaagggca

SEQ ID NO: 185564 - DNA, 87 bp, Homo sapiens
aactggtcctgctccggccacggcggcttatgaacgccaacgggcgcagcgtggcccgggctggtcagaagagatcaattctacaga

SEQ ID NO: 185565 - DNA, 75 bp, Homo sapiens
agcacgggcgaccccccggcgcagcagcatcatcaaggacccctttgcactatgcagctgcgaattgtcatttcc

SEQ ID NO: 185566 - DNA, 83 bp, Homo sapiens
tcgtgtctgccaccatcttcgacttgagcgaagttttatgcaaggttcctgcacttggccatcatccatgaagaaaaggcact

SEQ ID NO: 185567 - DNA, 85 bp, Homo sapiens
ctttggcacgtcctgctccgtggtgctctatgaccccctgaccctcaggcagtttgattgcatctacacaagataaacccaacca

SEQ ID NO: 185568 - DNA, 75 bp, Homo sapiens
gatggaaatcctaatgacagtctccaaattcgcctccatctgtaccatgccaacaagtcccaaatttggaaaagc

SEQ ID NO: 185569 - DNA, 75 bp, Homo sapiens
acgaaagtgccgaggcccccagccacactggccagctccatggggaatctggtggtttcaacaagtttcaaacag

SEQ ID NO: 185570 - DNA, 50 bp, Homo sapiens
tgtggaccggtgggagaggaaggaagatccacctccgacccttaagccag

SEQ ID NO: 185571 - DNA, 83 bp, Homo sapiens
caaagctcaagagaaataagctgaagctgtaacctccatttcaaacttgtggttctgcgctgaccggttccctgatgtgttac

SEQ ID NO: 185572 - DNA, 75 bp, Homo sapiens
aagatcagatagcagagctgaatcatgaggaaaggagtgttcccaggatgaaagcacagctgctgccatcttcac

SEQ ID NO: 185573 - DNA, 97 bp, Homo sapiens
ttgcaacgcgccaaatctaaactgaataacctgggtatcttgtggtctgaaagagaagaaattgaaactgcacaggcttacctagagtcatcagaag

SEQ ID NO: 185574 - DNA, 87 bp, Homo sapiens
aagagacaggaggcagtagccaaacacccagatcagtcgcatcgaatacattcattcaaagaacttcatccaccgggatgtgaagcc

SEQ ID NO: 185575 - DNA, 73 bp, Homo sapiens
gtgcggggtgcgccggcagaggatccagtgttcaccatcctggccccggaagctttaccactcctgaaggccc

SEQ ID NO: 185576 - DNA, 83 bp, Homo sapiens
gaaagggtgtggccgttttacattggctgttttcctcacattcctcaagcagatctttataaacaacgagtggcagaactcag

SEQ ID NO: 185577 - DNA, 98 bp, Homo sapiens
aagcatgtcagggaacttgctgagcaactattcaaaaataccagcatgttttggaaatttgatcttcactcatcatcccacatagacacacttctaga

SEQ ID NO: 185578 - DNA, 74 bp, Homo sapiens
gtaactctgtccttattatcggaccccgaggatcaggaaaaactatggtactctttgagcacatcaaattcttc

SEQ ID NO: 185579 - DNA, 82 bp, Homo sapiens
ctgggaacagtgaatggtgggccgcagcattggcatgatgggccaggggtcccacaggatgatcggctgaatgtaacagagg

SEQ ID NO: 185580 - DNA, 87 bp, Homo sapiens
tctttggcaagtggacattttactggctcaagttgcttatcaagtgtcccacaaatgaaaaaaatttctacatcttacgaggaaaga

SEQ ID NO: 185581 - DNA, 100 bp, Homo sapiens
cgagcccaaggcaattgatcccaagttgtcgacgaccgacagggtggtgaaagaatgatatggaacctagcaaagctgttccactgaatgcatctaagca

SEQ ID NO: 185582 - DNA, 90 bp, Homo sapiens
ccggcggcggcggcggcggcgcgcgggggcgacgcgcgggaacaacgcgagtcggcgcgcgggacgaagaaatgtctttcctccaggacc

SEQ ID NO: 185583 - DNA, 80 bp, Homo sapiens
tgatgacatttatgatgggattgaagaggaagatgctgatgatgggctggacggcagtctggaaacgaccaatgagatct

SEQ ID NO: 185584 - DNA, 82 bp, Homo sapiens
ccccgtcgccgccgccgccgccgccgcccggaccccggcgcgctgaatgcagaggctgggaggcggcagaatgcagccagag

SEQ ID NO: 185585 - DNA, 83 bp, Homo sapiens
gagacctgctcaagctctcttaagagattatggttgaatctccagtgatctgtaaaatcttagatacagcagatgaaaatgga

SEQ ID NO: 185586 - DNA, 121 bp, Homo sapiens
tgggcagacgggcaaggaggggaccgagaatcaaggcgttgagcctcaagacatgcacatgatggtgtccaagccagaacagtgggtaaagccaatggctgtagcaggagccaatcagtac

SEQ ID NO: 185587 - DNA, 101 bp, Homo sapiens
aggaaaatggggagcaggaggctgacaatgaggcagaagcttcatgaggcagatctggagttgcagaggaagcgggagtacattgaggagctggagccacc

SEQ ID NO: 185588 - DNA, 90 bp, Homo sapiens
gaaattcttcttcgttatggacagcatccaaacattatcactctaaaggatgatgatgatgctgaagctatccttgctgcagacttcgaa

SEQ ID NO: 185589 - DNA, 87 bp, Homo sapiens
aatagaaacaagaccggagagataacagcctcctccaacaaatccctcaacttgctaaaaatcaagagttttgagagcaaaatgaca

SEQ ID NO: 185590 - DNA, 74 bp, Homo sapiens
tctgaagtcctccgggacttcccagaggtgcttgaggaatccaaagccctcgtgcgctgcaacatgaagatgga

SEQ ID NO: 185591 - DNA, 98 bp, Homo sapiens
cttggaacccattggaaatgtccatccagttgggagctatgagtcctctgaaatgaacagcatagaatgtatcctgtcaggtataatgtcagtgaatg

SEQ ID NO: 185592 - DNA, 83 bp, Homo sapiens
aagcgctgaaatgagccccgcggcaggagcaggccgggctctcgccatgggtcactgtcgcctctgccacgggaagttttcct

SEQ ID NO: 185593 - DNA, 74 bp, Homo sapiens
gagcacacgccaaaagaccacgggctcctgtgctagtaccagctggcacagtgatgtttgagtatggaatgcgg

SEQ ID NO: 185594 - DNA, 82 bp, Homo sapiens
agacatcaactttactctcaatacaaatgaaagttgctgggattacaagcgtgagctaccacacccagcgaggaagccaagt

SEQ ID NO: 185595 - DNA, 83 bp, Homo sapiens
cgcggcgagaaagcacggggtgaaactgaccacagtgctcaccacccaccaccactggctaagctggcggtgctgctggtgac

SEQ ID NO: 185596 - DNA, 98 bp, Homo sapiens
ggagctggacatcgagcctgagggaggggaaaggcgcaggcctcagagtttgaagaccccttagttggtgaagatacagaacgtgccaactctatggg

SEQ ID NO: 185597 - DNA, 100 bp, Homo sapiens
gccttctggacaggaaggtgcaggccctgaagttgattggctgtgtgatcgggcgccagggcagcaagatcagcgagatccggcagatgtcaggggcaca

SEQ ID NO: 185598 - DNA, 96 bp, Homo sapiens
atcaagtcgtaaaaacaggtcaagtggtgatgaaggtggagaatcagaacttcttggagaggatcttccacttgaaccttctgtcaccaaagcaga

SEQ ID NO: 185599 - DNA, 100 bp, Homo sapiens
cagatattggcacatatcagtgcaaagtgaaaaaagctcctggtgttgcaaataagaagattcatctggtagttcttgctccggtgtcggcgggtggcgc

SEQ ID NO: 185600 - DNA, 98 bp, Homo sapiens
cggcaggcggcagcagcaactacggcggcggcggcagagctcgtccgcatggtgctgaatggctgaggaccttcccagtctccccagagtccgtgcct

SEQ ID NO: 185601 - DNA, 100 bp, Homo sapiens
tgaattggcaccaagccttcccagttatcataaccttgaatggcgactagatgtacagaaatgggacgtcggtcatcagatactgaagaagaaagcagaa

SEQ ID NO: 185602 - DNA, 50 bp, Homo sapiens
tcgtggcctgaccaaggacctccaaggagaccagtatgatgtctgtgcca

SEQ ID NO: 185603 - DNA, 99 bp, Homo sapiens
attggtgtccactgtacccatggtttaaacaggactggctacctcatttgcagttccaagttcttcgatttgatttgtctaatggaacaaattgatgtt

SEQ ID NO: 185604 - DNA, 75 bp, Homo sapiens
gccgccgcgcgcccgcgccctccgcgcgacgccagcggagctggagtttgttcagatcatcatcatcgtggtggt

SEQ ID NO: 185605 - DNA, 75 bp, Homo sapiens
agctccaacaccgccgacattagtagcagatgaaactattgctgagctgaaaagaggtgctgaaattattgtttg

SEQ ID NO: 185606 - DNA, 83 bp, Homo sapiens
gttaaaagtggagcagcacgtggagctgtaccaggttattctggtacaagttaacccaggagaagcatttacaataagaagag

SEQ ID NO: 185607 - DNA, 121 bp, Homo sapiens
tggagtttcggaatccttctctgggaaatctactcctttgggcgagtgccttatccaagaattgtttgagtacaagctcagcttcaaaggcccaaggctggcattgcctggggctggaata

SEQ ID NO: 185608 - DNA, 83 bp, Homo sapiens
gccaaaatcatttttgaggatgaccgggtttggtgcacctcgatttggaggaagtagggcagggcccttatctggaaagaagt

SEQ ID NO: 185609 - DNA, 100 bp, Homo sapiens
caggaattaaatcaattgtaaagtcatcgttggtaggtggcaagtgggagaaaccatcagaaattttggaaatcaaaggacagaactgggaagaacaagt

SEQ ID NO: 185610 - DNA, 98 bp, Homo sapiens
agcctccgtgcggagaccactgttcaaggccacaggtgtcatggagaaactccagctgggcccagagattctgcagcgggaaaatccaaggcttattt

SEQ ID NO: 185611 - DNA, 83 bp, Homo sapiens
aggaggaaacagctggctaagctcatcattgttactggatcaaaatacttgctggatggtggactcagagaccaataaaaata

SEQ ID NO: 185612 - DNA, 109 bp, Homo sapiens
gaccctggagcctcagttggaagcagccgatccagcctgcggagcctgtggggcagctctagaggacaaaatcccagtccttggcacaaactcaggaaatggaagccgg

SEQ ID NO: 185613 - DNA, 82 bp, Homo sapiens
gggcggtgggccccagccccacagaccagcccagcattcagaacatccagtcatggataaaaatgagctggttcagaaggcc

SEQ ID NO: 185614 - DNA, 78 bp, Homo sapiens
ggagaggtgccaagaagcagcggtacacttttggaaagacatcgttgatgataatgaagttcgtgacctcatttctga

SEQ ID NO: 185615 - DNA, 105 bp, Homo sapiens
aagttactgccgcgccaccgagtccggaccggagactttggggcctaactagaccatcatcaaagaggggatgctgaccaaacagaacaattcattccagcgatc

SEQ ID NO: 185616 - DNA, 74 bp, Homo sapiens
tgacattttgccttctgattctaactgcaaagactggattatggacagaacttggaaatattgagaataatttc

SEQ ID NO: 185617 - DNA, 50 bp, Homo sapiens
tggcagtatcccagccaaatctcggtgactctgacatcattagaagcatg

SEQ ID NO: 185618 - DNA, 50 bp, Homo sapiens
gcccgtcaccctgagatggaggccgcgatgggcctcttggaacattggtg

SEQ ID NO: 185619 - DNA, 100 bp, Homo sapiens
catcaacaagctgaaccccaaacccaaattcttcgttctgtgcggcgacctcatccacgccatgccaggatgccaagtttgtggaggaacggagaaagca

SEQ ID NO: 185620 - DNA, 75 bp, Homo sapiens
gaagacacaaaagatggcatctggctggttcaggtgagaagccttataagtgctcatgggagggatgtgagtggc

SEQ ID NO: 185621 - DNA, 75 bp, Homo sapiens
cggagctgggcgcggattcgccgaggcaccgaggcactcagaggaggccttgcgtggctccccagcgccagtatc

SEQ ID NO: 185622 - DNA, 75 bp, Homo sapiens
tagaactacaagatgacggctctgacagttcctgccatctccctggcttatgagcaggctgagagtgacatcatg

SEQ ID NO: 185623 - DNA, 50 bp, Homo sapiens
gcgaggctggccgagaaatcccgtgtttttcttcccccagtccctcagct

SEQ ID NO: 185624 - DNA, 90 bp, Homo sapiens
gaaacaccatggctgcggcggcccagctctctctgacacagggcttttttccagacttcaagctcccattccaacagtaagagcttcttc

SEQ ID NO: 185625 - DNA, 50 bp, Homo sapiens
gcgccaagccgcggagcctccagacggggatgtgtttggccaaatgggag

SEQ ID NO: 185626 - DNA, 110 bp, Homo sapiens
ggagcctctccgcccggcagccaccccatctgggaagtacctcatggcagggccaggttccagcagtgaggaggatgaggcctctcacagcggtggcagcggagatgaag

SEQ ID NO: 185627 - DNA, 90 bp, Homo sapiens
ccccgcaccacctcctgctgccttcccgtcgccgctcccgaagcttttccaggacctcagcagccatgtcgaagccccatagtgaagccg

SEQ ID NO: 185628 - DNA, 98 bp, Homo sapiens
tgcggcagcgcatcgcggagaccagatggattaattgcctctgaaggagccataagtcccgatttcttcaatgattaccaccttcaaaatggagatgt

SEQ ID NO: 185629 - DNA, 83 bp, Homo sapiens
gacgagctgagcttcaaaaggggggacatcctcaagtgcactggtgattgctgcggtgtttgaccgagacataaactgcagaa

SEQ ID NO: 185630 - DNA, 75 bp, Homo sapiens
gtgtgtgctgccctcaacagcgccattttaggtgcagatgaaggattttcggttttcttacaagtttaaaatggc

SEQ ID NO: 185631 - DNA, 75 bp, Homo sapiens
acctcttattcgtaacattactgtggataatagagttaaataaccacgaagctgccctgagacgctcactcacgc

SEQ ID NO: 185632 - DNA, 82 bp, Homo sapiens
aacttgaccaggtttccagtgaaataaataccatggagtagtttgaaacaggaacaaaatcttctgaaagctcggagcagaa

SEQ ID NO: 185633 - DNA, 75 bp, Homo sapiens
ccgccaccagcgcgggcgcgggccaagattacatgaagcagatgacatttgaagcccaagcctttttagaagctg

SEQ ID NO: 185634 - DNA, 101 bp, Homo sapiens
gccgtcgccgccgccaccatgcccaagagaaagacgaagttatacggaagcgtctcctcattgatggagatggtgctggagatgatcggagaattaatctg

SEQ ID NO: 185635 - DNA, 98 bp, Homo sapiens
tgaattgtgctgccttggccaaaagaggccaccatggcggagctgcaggaggtgcagatcacagaggagaagccactgttgccaggacagacgcctga

SEQ ID NO: 185636 - DNA, 90 bp, Homo sapiens
acaagattagacaacagagtcattgatcttagggctgaagggtatgtgattggcagctgtattaaacacattccaatcgcaggacgagat

SEQ ID NO: 185637 - DNA, 50 bp, Homo sapiens
gatctctcaccatccaaaaaagtgtggagggcgcagctttccagagccga

SEQ ID NO: 185638 - DNA, 82 bp, Homo sapiens
ctgaaggcctcgctggagatcgagtaccaagccgtctatacccaggattgccccctggcagcagcgaaagccatccagggcc

SEQ ID NO: 185639 - DNA, 100 bp, Homo sapiens
gagtccctgatggaattatgcagtttattaagatagttcatttaaagcccccatccctgcaaggtggtgctttctaccaatatgaatcttttcaacctgg

SEQ ID NO: 185640 - DNA, 100 bp, Homo sapiens
gctctttccccgtcagcatcccagccgtgctcacgccgagagggtgacctctctgggcaaggactggcatcggccctgcctgaagtgcgagaaatgtggg

SEQ ID NO: 185641 - DNA, 100 bp, Homo sapiens
gagcactcgaatactactagcaactcagaatgtgggaccgctggaaggaaaaacacccctggatggggcgaagcctttctgagaaaagtctacagcattc

SEQ ID NO: 185642 - DNA, 73 bp, Homo sapiens
gaagctctaccccggctactacaccagggtggctatggcggttccagcagcagcagtagctatggcagtggca

SEQ ID NO: 185643 - DNA, 101 bp, Homo sapiens
gaaagaggttcacaagcaggtggttgagaggttgactatagtcaatggggccaatggagccaagtgtatggaaacccacaacagtatggacagtatatggc

SEQ ID NO: 185644 - DNA, 83 bp, Homo sapiens
cgtcctcatgtggggggtaaaccactcgaattaaacaaccaccatgtcgagcaaaaaggcaaagaccaagaccaccaagaagc

SEQ ID NO: 185645 - DNA, 125 bp, Homo sapiens
ctctcaaactttactttgcctcatttgaggagtgggaacaggcttcggcgaacacaaaggccgaatacatcaagcaatggtaacatctttaaatgaagataatgaaagtgtaactgttgaatgga

SEQ ID NO: 185646 - DNA, 100 bp, Homo sapiens
gcccaacctgattcatgagcctcttgaccaaggcaactgtgcaggctcctgggccttctccacagcagtctgctcctctgacaaacgaattgcctgtgag

SEQ ID NO: 185647 - DNA, 100 bp, Homo sapiens
gggcgagccgcggaacccggccgggagccgcgcgaggcggttcaccgcacctcaggcagaactctatgaagccgttctagagatccaaagagattgtttg

SEQ ID NO: 185648 - DNA, 100 bp, Homo sapiens
ctatggggacgtgtttggaaccaatgctgctgaatttcagttatttatcgagaaagctgatgctgaggaaaaatggttcaagagattaattgctctccga

SEQ ID NO: 185649 - DNA, 75 bp, Homo sapiens
gattcgctgtcggaggagaatgagaccctggtggagtttgctattggaaaggatttgaagatgatcgaattgagg

SEQ ID NO: 185650 - DNA, 100 bp, Homo sapiens
tgtggactacaatggaaaccttccagtccctagagcgtccaagatttttggtttcaaaccaatttcctgctgaccagaatgaaatggagccacattccag

SEQ ID NO: 185651 - DNA, 50 bp, Homo sapiens
acaacaagggccggattctcacccaggcccaaggcattgctcatgagaac

SEQ ID NO: 185652 - DNA, 90 bp, Homo sapiens
ctttgtctttgaggactttgtctctgatgagctgagaaacaaagccacccagccaatgaagactggcacagcctccaggttggcgggctc

SEQ ID NO: 185653 - DNA, 100 bp, Homo sapiens
aggttttggctctgcgtgagtgtggtctacgagctgtttctcatctttatactcttccagctggacccacaaaccgtggagaccaagaactggcacacgg

SEQ ID NO: 185654 - DNA, 50 bp, Homo sapiens
gtgaaaaataccacgacaaaaccaccctactgggcttcgctgacttgaac

SEQ ID NO: 185655 - DNA, 100 bp, Homo sapiens
acaacatgcgatgtttggaaatgatacaattacctgcacgacacatggaaattggactaaattaccagaatgcaggggcatggatgagttgatggaggtg

SEQ ID NO: 185656 - DNA, 96 bp, Homo sapiens
aaaacactttcgagtgccagaacccaaggaggtgcaaatggacagagccatactgcgttatagcggccgtgaatacatcagcccacagcaaggcgg

SEQ ID NO: 185657 - DNA, 100 bp, Homo sapiens
ttcattggaggtatcaactgtaagaagaggaaagacttgtctcagggagccggcactgatgagggctgcctaattgagatcctggcctcccggacccctg

SEQ ID NO: 185658 - DNA, 97 bp, Homo sapiens
cctacttcaaggataagggcgacagcaacagctctgccggctggaaggtttattttcttgaaaaggctccaggcttcggcttggaaaatcccaccgc

SEQ ID NO: 185659 - DNA, 100 bp, Homo sapiens
ctatcctccctccctggcacccctgggaaaataggtctgcagccagaaaactgaaggtcagagaggcatcttcatgatacagttaagaggaatcttgaca

SEQ ID NO: 185660 - DNA, 75 bp, Homo sapiens
tcatctacttccggaagccttgctcaggtaaaacatggctaaaagcttacggagtaagtggaaaagaaagatgcg

SEQ ID NO: 185661 - DNA, 100 bp, Homo sapiens
tctgagatctcttacctttcaaagtggtgggatattatagatattcagaagaaggatgctgttaaaagggagactgcattgcttattgatccaaaaaatt

SEQ ID NO: 185662 - DNA, 51 bp, Homo sapiens
aacctactgttgcactgtctgctgttggtttcaagtgccccatttgctcca

SEQ ID NO: 185663 - DNA, 101 bp, Homo sapiens
gtgagttcctggacatcaagggctgaaatatggctacacacacctttctgcaggagagctgcttcgtgatgaaaggaagaacccagattcacagtatggtg

SEQ ID NO: 185664 - DNA, 90 bp, Homo sapiens
gggaaccctgcgtttctactgtgtgattctgccaccttcctggcccgacgccatgggagtgacttgatctcttccgttccctgctggcag

SEQ ID NO: 185665 - DNA, 50 bp, Homo sapiens
ccaccaagatgcctacatccggtttggaaattttagcattcaggtgccag

SEQ ID NO: 185666 - DNA, 82 bp, Homo sapiens
aatgccacccacattcagagacacaagtgcagcagtttggtgctgatattcgtggcttcagtgctcctaggacatttggcct

SEQ ID NO: 185667 - DNA, 87 bp, Homo sapiens
gtacatgttcagcatgaagcgctgcccaccaggcatctggccatcccacaaaaggtcctgaacgaggctgtgggggccctgatgtac

SEQ ID NO: 185668 - DNA, 83 bp, Homo sapiens
ggaagatcgcaccgcggacgcccgctgagcttggcgcacgggccgaccaggggaacgcccttttgcttgtgactggcagggct

SEQ ID NO: 185669 - DNA, 50 bp, Homo sapiens
ctgggtttgcccctctgcaaccacagaattatatccagatcgagagacag

SEQ ID NO: 185670 - DNA, 51 bp, Homo sapiens
catcgcagttggaagcccatggggcagagttgatctctctaatgtattaga

SEQ ID NO: 185671 - DNA, 120 bp, Homo sapiens
ttagtgaaatgggctaataatgctggcaaagtggaaaaatgtgcgatcactggggtgatcctgctggctgttggagtctggggcaaacttactctgggcacctatatctcccttattgcc

SEQ ID NO: 185672 - DNA, 75 bp, Homo sapiens
gattttttgcctttgttgattaactggacaaattcagatacctgcactcaaataacatagttgtggttccggaag

SEQ ID NO: 185673 - DNA, 100 bp, Homo sapiens
gttggaaagagaacgatagaggaaaatatatgaatgttgccatctttaggcggtgctgatgcagtcacgggaacaggtttcagaagagctggtgaggtta

SEQ ID NO: 185674 - DNA, 100 bp, Homo sapiens
caaaaaacaggataaaatcttatgattatgaggcatgggcaaaacttgatgtgaacattaaccaggtggtatttgttggaaatttcttgagaattaatac

SEQ ID NO: 185675 - DNA, 100 bp, Homo sapiens
gttacatagagagtttcatgatgatgcatcattgcctactcacttgatcaccttcagcattttggaagaggacataagcagctctatgaccaatagcaca

SEQ ID NO: 185676 - DNA, 87 bp, Homo sapiens
ttacttcagaattaccagtgttacagatttgcagatttacagaatggctgcacattaatggaaagagaagcataaacctatcttctt

SEQ ID NO: 185677 - DNA, 49 bp, Homo sapiens
tggaaacgcttgtagggtttcaccaggtggagtctcgctctgtcaccca

SEQ ID NO: 185678 - DNA, 75 bp, Homo sapiens
cattttcctcggtgggggcttagcgcactggaggagcggcgggcttcagacagtgagatgaacctggtacctcag

SEQ ID NO: 185679 - DNA, 100 bp, Homo sapiens
cccactccatgttggccatcagtggtcacctagacagcgacgatgatagcttcgcgagagcctagagccagatgcctatgcgttgttccataagaagctg

SEQ ID NO: 185680 - DNA, 100 bp, Homo sapiens
tgagagatgatgttcctcccttagaccgagaagtaggagggaaatcctcattgacgattcaatttgttgaaggccaatttgtggactcctacgatccaac

SEQ ID NO: 185681 - DNA, 83 bp, Homo sapiens
cctcggcctcgcggcgacggcggcggtggcggcttggacgactcggagagccggggacggcaaaacagaacagaaaggcggag

SEQ ID NO: 185682 - DNA, 98 bp, Homo sapiens
tggaaacgtctccagatgtggtgatggctctactaccgggctacagaactggctacccttatcgataccctgctctgagagagaagtctaaaaaatac

SEQ ID NO: 185683 - DNA, 74 bp, Homo sapiens
ctcgaactaaacaaattcatcccagaaatctaagaggtctctaattaacagaagatggcaaagcccagccacag

SEQ ID NO: 185684 - DNA, 100 bp, Homo sapiens
cagtggttgaaggcctttcactgttggacttgggagtatctccgtattctggagcagtatttcatgaacagtgagcccaaagagatagttgaaaagtcca

SEQ ID NO: 185685 - DNA, 100 bp, Homo sapiens
agtagaagccaaggagctgtcctttgttttggattacataaaccagtcacccaagtgcattgcctttggaaacgagaaaccaccaagttttatatgacag

SEQ ID NO: 185686 - DNA, 100 bp, Homo sapiens
attcgtttgtgaacgacattttcgagcgcatcgcagaggactactgagcccagccaggctgtatgccattgctgccaaagaaaaagatattcaagaggag

SEQ ID NO: 185687 - DNA, 99 bp, Homo sapiens
tgcattgtcttggctgttgagtgaagaaaaagagcaggaagtcattacatggtttttctattgggaaagctactgatcggatggatgctttcaggaaag

SEQ ID NO: 185688 - DNA, 75 bp, Homo sapiens
cacatgtgtgtggccgcctcggacaagagacccaggtttcatttccagggaccctgtggaacgactcttcctgaa

SEQ ID NO: 185689 - DNA, 100 bp, Homo sapiens
cttgtatcttcattgccagggagaaataaacagagggccaagatgggtcgccgagctcaacaggagtcagcgcaggccgagaatcacctcaatggcaaga

SEQ ID NO: 185690 - DNA, 100 bp, Homo sapiens
ccaagtcgccggacccggtgtggagagcggtgctgaggctacgcgggctggagactcaggagcctcattggagacattgacaatgccatgaggaccttcc

SEQ ID NO: 185691 - DNA, 100 bp, Homo sapiens
gcagccccggctctgggctacggactatgggcgaatagctctgaccacccggcgaaggtttgacatctacaggaaggtgcccaaggaccttacgcagcca

SEQ ID NO: 185692 - DNA, 100 bp, Homo sapiens
gttgataactgtgccatctgcaggaaccacattatggatcttttgcaccaattccagctggacatcactgtgaaaatgggacgggataaagtccgagaaa

SEQ ID NO: 185693 - DNA, 100 bp, Homo sapiens
cgggtggcatggcggagaaggatgacaccggagtttgacgaagaggtggtttttgaggccggagcctcaacagaaagctcctttagttcctcctcctcca

SEQ ID NO: 185694 - DNA, 90 bp, Homo sapiens
tgggtccagagcatctgccagatctgtggcttcaatcaggctgaggagagcacagaaaactctctgcagaggaattagagcgaaaacggc

SEQ ID NO: 185695 - DNA, 103 bp, Homo sapiens
agcaggcagccagccaggaagggaggcagaagcatgctaagaacaacagtcaggccaagccttctgcctgtgatgttaagtgggcagaccaacatccacctca

SEQ ID NO: 185696 - DNA, 82 bp, Homo sapiens
ctgtcttcggtggactccttcggcagtccacccaccgccgccgcctcccaggaccaaagacacacccaagctcggtctcctc

SEQ ID NO: 185697 - DNA, 90 bp, Homo sapiens
attctccggggacccttccgtatctgcctaggcattttgctgtctcctcctaatacgaagcatcagatggtgaaggagaaggagacacag

SEQ ID NO: 185698 - DNA, 101 bp, Homo sapiens
aagctgctgcaccgcggcgccgacatcaattacgccaatgtggacggactcactgccctgcaccaggttgcatcataaatacaaaggactgaagttataaa

SEQ ID NO: 185699 - DNA, 88 bp, Homo sapiens
ggcataaggaagaatgtctcatgttcgagtctggggctgtcgctgtgctctagtccgcttagtggaaagaggatcccctcatagtctg

SEQ ID NO: 185700 - DNA, 51 bp, Homo sapiens
tctgatgtcaatcttgagggctaggtttttagaacttcagccataaaaatg

SEQ ID NO: 185701 - DNA, 96 bp, Homo sapiens
gcagaacttacgctgcgggaccccgggcactgttgctgctgcgggagctgaagccacacatcaatgggcccttcacccctgacctggctcaccctg

SEQ ID NO: 185702 - DNA, 83 bp, Homo sapiens
agctgtttgtgggccagctgccctctgaggagatggtcatgacaggctttatcctgtggataaacgcagagtgaacgagtttg

SEQ ID NO: 185703 - DNA, 83 bp, Homo sapiens
cgagcacataacggggttcgggtgtctcgtgtgtgaacatcacagatcttcgtgaagactctgactggtaagaccatcaccct

SEQ ID NO: 185704 - DNA, 82 bp, Homo sapiens
aaagcattccggaaagcagctggtaaagagcttacagtggctttccttaaagtttcccatgtctcaatggactcctgaatat

SEQ ID NO: 185705 - DNA, 83 bp, Homo sapiens
gcgcccaagtggcggggactactggtgcctgcgctgaaaaagatgactttgggaaattgctgctggctgaggccctcctggag

SEQ ID NO: 185706 - DNA, 50 bp, Homo sapiens
ggggacggagagaacacgagcccatcaggagcctcctcaacaagcccaag

SEQ ID NO: 185707 - DNA, 100 bp, Homo sapiens
ccttcatgtcatgaaggccatgcaggcacctgtttcccccacctactccaatatttgctggaggagcaaatgaccggtgggtacgatctgtatcttttag

SEQ ID NO: 185708 - DNA, 99 bp, Homo sapiens
cgtggatagaggcttgctgttctttgcagaaaacgggaaatgagccgtcagactgctacagcattacctaccggtacctcgaagtgtccaccatcccag

SEQ ID NO: 185709 - DNA, 90 bp, Homo sapiens
cttttgacatggaggatttgggagataaagctgtgtactgccgttgttggaggtccaaaaaggcagagtttccctgcagaagctttctct

SEQ ID NO: 185710 - DNA, 100 bp, Homo sapiens
tgggaagtgtacaacttccccgcaggcggcgtgggcatgggcatgtacaacaccgacgagtgtacactgccatgggggacgctatctagtctaaaattac

SEQ ID NO: 185711 - DNA, 97 bp, Homo sapiens
taatgtatttgaagagccagagagcaatatgaagtctatgccaccaaggtaactatggtggtggtgggaactataatgattttggaaattatagtgg

SEQ ID NO: 185712 - DNA, 100 bp, Homo sapiens
ggagggctggaggcggcggcgatgcactaggcctcgctcagggcggctgccccgggacccgcaggacttctccagacaggttatgttacctgcagaggct

SEQ ID NO: 185713 - DNA, 75 bp, Homo sapiens
cggaggaatagtacaacaattatgagccgtcacagcctgattgagaggatccagaatccagatctctggaatagc

SEQ ID NO: 185714 - DNA, 100 bp, Homo sapiens
gatttaaagctgagctgcgaggaaaatggcggcgggagattgatgttctgccagaaattgtggaggctgtggaagggaaggtggaagtcttcctggacgg

SEQ ID NO: 185715 - DNA, 80 bp, Homo sapiens
gaatattaagaaaattaaagctccatggcaattgaagtcatacccatctaattacatggaatccatgaagcctaacaagt

SEQ ID NO: 185716 - DNA, 96 bp, Homo sapiens
agctttcccccgagggtcaacgagaaagagatcgatgctattaacattctgaaggagatgaaagagaaggatgttcttatcaaagatacaacagcc

SEQ ID NO: 185717 - DNA, 75 bp, Homo sapiens
caaaaacccaccaattctggacacattgggattaaagcgcggagacccacatcaagggcttcacactgaacgatg

SEQ ID NO: 185718 - DNA, 75 bp, Homo sapiens
ctgtatacgtttgaacccagaactatgattgctgtactagtggataagatgattcgtacacaaatagttgattgt

SEQ ID NO: 185719 - DNA, 89 bp, Homo sapiens
atccggaatggaattggaatccacgagcatgccagcattgacttaccaggcatcaaaggtggacccaagtggagagattgtggaactgg

SEQ ID NO: 185720 - DNA, 102 bp, Homo sapiens
cttcatgggccatgcccggtgaccacttttggaccaaaggcctgtgtgctgcagaacccccagaccatcatctatacacagaatgggattttacatatgctg

SEQ ID NO: 185721 - DNA, 88 bp, Homo sapiens
ttaactactatggaatgcaaagatttggaaccacagctgtccctacgtatcaggttggaagacatgctggtgtctacacagcagaaga

SEQ ID NO: 185722 - DNA, 100 bp, Homo sapiens
ctcgaccacctggcagagaagttccggcagaaggcctccatccacgaggcctggactgacgagtggaatgttggctgtccgtgaaaaccgctacattgtc

SEQ ID NO: 185723 - DNA, 100 bp, Homo sapiens
gcaaaaagaggttgattacagcggcctcagggttcaggcaatgcaaataaggctgaccccgcactacatctacccaccagccatcgtgcagcccagcgtg

SEQ ID NO: 185724 - DNA, 99 bp, Homo sapiens
ataataaatccaaagaggagccagttaccatgactcatccagataagaccatcatcatgtggaaactgaccagggatgagaccaactatggaattccac

SEQ ID NO: 185725 - DNA, 96 bp, Homo sapiens
acacattgtctggcctcacaggtggctaattcacctaaataagattgatcctcatgctccaaatgaaatgctctatgggcgaataggctacatcta

SEQ ID NO: 185726 - DNA, 74 bp, Homo sapiens
gtccacggatgatatcaacagacgggagactgaacttgagtggatgaggatcgcagtacggaacctgaccgatt

SEQ ID NO: 185727 - DNA, 82 bp, Homo sapiens
tgaaggaggggaagggacgtgggggcggccacggcaggtatatcctgatcagcaaacccacaatatggacagaaagattaag

SEQ ID NO: 185728 - DNA, 75 bp, Homo sapiens
tccaacatggtcattatgcttattggaaataaaagagttcgcagtatgtgcagtgcgtggccgggtgtttgcagc

SEQ ID NO: 185729 - DNA, 75 bp, Homo sapiens
ggtcgccgccactgccgcaggaggcgtgaggtgctccatacttgcttgcagtgcctacgtggctctggctttggg

SEQ ID NO: 185730 - DNA, 100 bp, Homo sapiens
cggtaccaagaaggggagtgcccgcggcagatggcccactgcgtgaccttggttcagctgtccatttcctgtgaccatctcattgacaaggacatcggct

SEQ ID NO: 185731 - DNA, 100 bp, Homo sapiens
ctccaaagtgaaggatatggctggagactggcactgggctctgagggatcccttggttccagtaccccattatctatgacattcgggccagacctcgaaa

SEQ ID NO: 185732 - DNA, 50 bp, Homo sapiens
caagtcgacaggggatgggaccctagacaagttggatggcttgaggactg

SEQ ID NO: 185733 - DNA, 99 bp, Homo sapiens
tgaatacctacattggcttctcagaaattttggatatggagccttatgtggaacataaagggtctcactctgtcactcaggctgaagtgcagtggcgtg

SEQ ID NO: 185734 - DNA, 82 bp, Homo sapiens
ccgggaccgccaggccaccaccggccgcctcagccatggacgcgtccctggagaaggtgaaatgacaatggatgctctgttg

SEQ ID NO: 185735 - DNA, 100 bp, Homo sapiens
ggtctaaaatttctgacattcagtctcaggttcagaaaagagaccctcgtgactggactgcacagttcatggaggctgcagatgaggccttggatgctct

SEQ ID NO: 185736 - DNA, 74 bp, Homo sapiens
cagcttcagcttctctgatgttgaagaccttctagcagaagctaaagacctggatgaaaactttcggaagagaa

SEQ ID NO: 185737 - DNA, 96 bp, Homo sapiens
ccttgctggacatgtcctccattttccaccagaaggccgaaaagggctgggctgaggatgtggcaggcatggcatatgccctacgttcactgccag

SEQ ID NO: 185738 - DNA, 96 bp, Homo sapiens
gcgccgccgcgacagcagcagccatggaggacgagatgcccaagactctggagtaactattcccagtcagaggcgctatgtgtattattatagcta

SEQ ID NO: 185739 - DNA, 100 bp, Homo sapiens
ggtgccactcccaaaaaactatcaagttgggatcaggcagaggaaacgtaaatattttcaccacgatcgattagactgggatgaacacagttctgccggc

SEQ ID NO: 185740 - DNA, 80 bp, Homo sapiens
agatgccagtggatccatacaactgctccgcctggtggaatctgagggatcggacccatccacctcaacgagatccagtg

SEQ ID NO: 185741 - DNA, 75 bp, Homo sapiens
ttactgtcagaaagtctcagtcagaacctagcgaacaagagatcctgaaggagctagacgagtgctacgagcgct

SEQ ID NO: 185742 - DNA, 75 bp, Homo sapiens
cgccgccgccgccgccatgaacaactcgggcgccgacgagatcggaaatgcgtgtactgccggaagcggatgaag

SEQ ID NO: 185743 - DNA, 100 bp, Homo sapiens
ctgccgtctgcaccagccatggactgctacacggcgaactggaacccactcggggactctgccttttaccggcctataccattcaaggacagtatgccat

SEQ ID NO: 185744 - DNA, 98 bp, Homo sapiens
ggccgtgctgcttatggcggcgctggagagggggcgctgagctgttgggctccagaacctgggtatcaacccagcaaacattggcttcagtaccctga

SEQ ID NO: 185745 - DNA, 128 bp, Homo sapiens
caaaacaagtggctgcggccgtcgcccaggagtcatcggacgccagaatctggaatactcccccagttgcaagaggcgcaggaccgtggaagacttcaacaaattctgcacctttgtcttggcctatg

SEQ ID NO: 185746 - DNA, 50 bp, Homo sapiens
aatggagttgccggagagacagcccagacaacagcttcatcagccctcag

SEQ ID NO: 185747 - DNA, 75 bp, Homo sapiens
ccgggcccggcgccgccgcccgcagctatttccttcgtgctaccatcagccgccgcctcaatgatgttgtcaaag

SEQ ID NO: 185748 - DNA, 100 bp, Homo sapiens
gaagaggctggactcggattcgttgcctgaggtttggtgcacctcgatttggaggaagtagggcagggcccttatctggaaagaagtttggaaaccctgg

SEQ ID NO: 185749 - DNA, 100 bp, Homo sapiens
ggaattctgcccactctgcggagttagcagtcacgacctccagcacagctttcagagattgttcgtgagttcaagtcgactaaccgcttgctcctaactg

SEQ ID NO: 185750 - DNA, 88 bp, Homo sapiens
ggagcggcggcagcggcggcgcggaggcggctgaggtgcgagccgggaggttatattcaaaagaaaaaggaactgtggggaatctgta

SEQ ID NO: 185751 - DNA, 83 bp, Homo sapiens
ctctacggccgcgcgctgcgggtgctgcaggcgcaagaagcaatatccaaggcagtgtcatctgcaacaatgctgtgatcgag

SEQ ID NO: 185752 - DNA, 89 bp, Homo sapiens
cgaggatttgcttttgtgtattttgagagaatagatgactcaaaggaggctattgagggcacctacattgacaagaaatgccccttcac

SEQ ID NO: 185753 - DNA, 83 bp, Homo sapiens
tgtaaccatggactgcaggaccaaacaatgcagatcttcgtgaagactctgactggtaagaccatcaccctcgaggttgagcc

SEQ ID NO: 185754 - DNA, 90 bp, Homo sapiens
tcccccactctttccgccctaatggaggtctccagtttcgcaaagaatggccgagtggattctgaggaccggaggagccgccactgcccg

SEQ ID NO: 185755 - DNA, 83 bp, Homo sapiens
ctggccgagttcatttccgagcgggtggaggtggtgtccccactgagctcttggaagagagccggcctcagaaagtgtgtttg

SEQ ID NO: 185756 - DNA, 100 bp, Homo sapiens
tcttcacccggttcagtgacaacaaccaagcattatcagcagataagcagagagccctagaagaaaccaaagcctacaccacccaatccttagcaagtgt

SEQ ID NO: 185757 - DNA, 103 bp, Homo sapiens
tttgactgagagaaacccactgaagacgtctgcgtgagaatagagaccaccgaggaatgtatcctgtcaggtataatgtcagtgaatggcaagaaagttcttc

SEQ ID NO: 185758 - DNA, 97 bp, Homo sapiens
agcacagatgtggaaagtgaatgtgcggaaaatgccttcaaatcagacaaaactgtgtggagttttatcctatattcataattacattgtggatggc

SEQ ID NO: 185759 - DNA, 100 bp, Homo sapiens
cagctgtcgtgaagaagcaggaggctaagaaagtggtgaatcccctgtttgagaaaaggcctaagaattttggcattggagagtgcgtagaagggctgcg

SEQ ID NO: 185760 - DNA, 100 bp, Homo sapiens
cttagctcagcaattcttaccttaggcagaaaaagtggcccaggtggctgagatcacctacgggcagaaggtgatggagaaggagactgagaagaagatt

SEQ ID NO: 185761 - DNA, 75 bp, Homo sapiens
aataaactcaagcagcgagtcatccaggttataaacaacttgtgaaatgagtgatttggaagatgatgagacacc

SEQ ID NO: 185762 - DNA, 120 bp, Homo sapiens
acatgatagataaagacgttgaactctcagtggtcctacctggggatattatcaaatctactactgttcatggcagattcatgcccaagcacaaaacaacccatttaaagaagatgctcg

SEQ ID NO: 185763 - DNA, 146 bp, Homo sapiens
ccctttcctgaagaagtggacgtcttcaccgccccacactggcggatgaagcagctggtggggctctactgcgacaagggcagctgcaatgactctccgcacggtattattgtcattgcaagcactattggcagctgcagagccag

SEQ ID NO: 185764 - DNA, 97 bp, Homo sapiens
actacttctactccaccaggaaggcctcatgcattgtgcgtcagcagcaatgtttatggtgaaaaatggcaacgggaccgcgtgcataatggccaac

SEQ ID NO: 185765 - DNA, 100 bp, Homo sapiens
accgggaagccacatgcagccactgcaagagtcaggttccgatgatcgcgctgcaggtaaaagagaacctgctttcatgcaagatgctgctgcactgcaa

SEQ ID NO: 185766 - DNA, 100 bp, Homo sapiens
ggtccggcatgtagacgcccccgcaggcgcccgcggcagcgaacgttgtcgagatgtccacagaaggaggatttggtggtactagcagcagtgatgccca

SEQ ID NO: 185767 - DNA, 100 bp, Homo sapiens
cgccgagatcgagaagcagctgcggcgggacaagcgcgacgcccggcgcgagctcaagctgctgctgctcggtgaaaggaaagcaagccaggatggatat

SEQ ID NO: 185768 - DNA, 76 bp, Homo sapiens
agtcaaaatcgtcttttcctgctggtaaataacactgaaatgtaaaacttccttttcctgtagatcaaatcacaga

SEQ ID NO: 185769 - DNA, 98 bp, Homo sapiens
gccctggtgtcacctatcagtaaaaggttctaagctggtctatgtccatcaccttcttggagaaggagcctttgcccaggtgtacgaagctacccagg

SEQ ID NO: 185770 - DNA, 75 bp, Homo sapiens
cttcttcctttgcaaaactgcagttttgacagcctgtggaataatggcaacagaaagactggctaactacaccgg

SEQ ID NO: 185771 - DNA, 101 bp, Homo sapiens
cagcgctgagcgaaagagaggcctcccggctcgacaagttcaagcagctgcttgccggccccaacacggaccttgctgtacaggaagaggcacatacaaag

SEQ ID NO: 185772 - DNA, 50 bp, Homo sapiens
atataatcaactcctctgcctgaaacctctgtagaggagcaggatgcaac

SEQ ID NO: 185773 - DNA, 82 bp, Homo sapiens
ttgtgagaagaccttccgcatcgagagcgcgctggagttccacaactgcaggacagacaatgcagatcttcgtgaagactct

SEQ ID NO: 185774 - DNA, 74 bp, Homo sapiens
ttactgtggaatcaataagccatggcatctaagaaatttgctgttaaagtgtgatcccctgggcccgtttgttg

SEQ ID NO: 185775 - DNA, 82 bp, Homo sapiens
ggcgctcgagacttaccagagccacaagctctcgccttcaaaaagaaaatgatcccatttagtcatcatagtcctgttttcc

SEQ ID NO: 185776 - DNA, 78 bp, Homo sapiens
gaaactggatgcagcaaggaaataggatttaaccgctctctgcctcccagctacgagttccagggagctctgtcctgg

SEQ ID NO: 185777 - DNA, 50 bp, Homo sapiens
gcggacagattgaccttcagagcgagtgaattcgatgactcttggtgagg

SEQ ID NO: 185778 - DNA, 98 bp, Homo sapiens
ttttctataagaactccttgttccgacatcccaaacagaaatttggagagcttgtaatgaccaaagaatcaaaggccttgatgggactctaccatggt

SEQ ID NO: 185779 - DNA, 75 bp, Homo sapiens
aaacctacacagcttacgtggacctggaaaaggactttgctgctgagaccaccatcatggcagtggagtttgacg

SEQ ID NO: 185780 - DNA, 100 bp, Homo sapiens
ctgccttctggagagctgaccaaacactaaggatttgtggtggtgacaaaccatttctggccccaaatgacttgcagaccaaacacctgcaacttaagga

SEQ ID NO: 185781 - DNA, 98 bp, Homo sapiens
tggatcacacgcgccggctgctgctactactaccactttgggctgatggcaactgaatcatattctaagaactcagccactcaggtatccaccatggt

SEQ ID NO: 185782 - DNA, 100 bp, Homo sapiens
gctttatgtcctacgacgaaattagccagctccgcctggtgtaatggataggtaacagagaagacctcgtcccttcctagtcagggcatcagcatgactg

SEQ ID NO: 185783 - DNA, 83 bp, Homo sapiens
gaccgaaatagactctgaagtaatatctggactttgaaattatctccagtctatgtgctgaagaagcagcagcccaagagcag

SEQ ID NO: 185784 - DNA, 50 bp, Homo sapiens
catcttctccctcccttgcctcagacaaatcttcctattttcaagctgaa

SEQ ID NO: 185785 - DNA, 75 bp, Homo sapiens
agtccgagctgagatccatctgcaccacggtgctgctttgggacatccggaagaaagcagccatccagacatttc

SEQ ID NO: 185786 - DNA, 83 bp, Homo sapiens
tactgcaagctggtagggggccccgtggccggcggcgaccccaaccagaccatccgggccctgtttgtgctcttcgtcctggc

SEQ ID NO: 185787 - DNA, 100 bp, Homo sapiens
aggcttttgcttcaagagtagataaatccacacagactgaactactatgctatgataccattcccggagtaataaatccagttggagcagcagtgatgag

SEQ ID NO: 185788 - DNA, 75 bp, Homo sapiens
ctaaaatctccgcagctctggttcctgttgcggccgatacatccagaaagtgcccagaagaaacttcctgctgga

SEQ ID NO: 185789 - DNA, 96 bp, Homo sapiens
ctcttcaagctcatctacaacgagtactgtgggcctggagccaagcccctcttcaggagtaagatagaagaagtcagagatgccatggaaaatgaa

SEQ ID NO: 185790 - DNA, 100 bp, Homo sapiens
atttgttaaggattccaagtaactcttatttgaaatctctttccttgtggagactcaatggtttgcattattgatgatcgagaagatgtctggaagtttg

SEQ ID NO: 185791 - DNA, 74 bp, Homo sapiens
aagaatcagaaatctttactgattccaatgtactccaaagattcaggtttactcacgtcatccagcagagaatg

SEQ ID NO: 185792 - DNA, 75 bp, Homo sapiens
ccaaggacagcttttttcctgcaaggcctcatgcattgtgcgtcagcagcaatgtttatggtgaaaaatggcaac

SEQ ID NO: 185793 - DNA, 101 bp, Homo sapiens
cggagctgggcgcggattcgccgaggcaccgaggcactcagaggaggtgaaatgacaatggatgctctgttggctcgattgaaacttctgaatccagatga

SEQ ID NO: 185794 - DNA, 100 bp, Homo sapiens
ctgctcccgcggggtctgtgctgagaataatggcccggttggcccgggacgagtggaatgactctttttgatcagaacaatgctgcaaaaaaagaagagt

SEQ ID NO: 185795 - DNA, 48 bp, Homo sapiens
gggaccagatcatccgcgtgaagcgacaaggcgcctctgtcgaagagc

SEQ ID NO: 185796 - DNA, 50 bp, Homo sapiens
cagcctcccaaagtgctggtattacaggcatgagccaccgtgcccggcct

SEQ ID NO: 185797 - DNA, 50 bp, Homo sapiens
cagcactccaatttgtatgccatatcagattcgcttcaagctcagcttat

SEQ ID NO: 185798 - DNA, 100 bp, Homo sapiens
aactcagaagaattggatatccaagagtcacggtctagatcacattctcgatccagaggaaggcgatactctcgctcacgcagcaggagcaggggacgaa

SEQ ID NO: 185799 - DNA, 90 bp, Homo sapiens
ggctggactgctggagcgtgtgaaggagctacaggccgagcaggaggaccggttatcaggaactgttgccgttattacatcagatgggag

SEQ ID NO: 185800 - DNA, 75 bp, Homo sapiens
agaggaactggagcaattgaagctgactactaaggagaataaggatgcttatagaattttatgagtcaccagatc

SEQ ID NO: 185801 - DNA, 80 bp, Homo sapiens
aaagaaccctggtgtgggcaacggagacgacgaggcagctgagttgatgcagcagagaagcagggccctgagcggaagag

SEQ ID NO: 185802 - DNA, 98 bp, Homo sapiens
cgggagttacaccgccaccgccaggactcagcccaggagagtgttattactcgagatattcatcgtacatttcccgcacatgattactttaaagatac

SEQ ID NO: 185803 - DNA, 100 bp, Homo sapiens
ttgatgagctgtcttgatctcaaaggtggtcttttggtgccttaatgaagagtcggattttgaagcagccttcagcgtgggagccactggcgtcataacg

SEQ ID NO: 185804 - DNA, 100 bp, Homo sapiens
cttggaggaggtatgcctggactgggccaggtctctgaatgtggacatggagtggctttacggggccagtgaaagcagcaacatggaggtggacatcggc

SEQ ID NO: 185805 - DNA, 73 bp, Homo sapiens
tgaagatgatttacttggagaagatttgctatctggcaaaaagaggtcctgggcctatgtcaagaagtgcaaa

SEQ ID NO: 185806 - DNA, 101 bp, Homo sapiens
gaggtgatggcaacggccaacttcggcaagatccagatcgggatttacgtggagatcaagcgcagcgatggaaatccttttgtactattgctcattcatac

SEQ ID NO: 185807 - DNA, 100 bp, Homo sapiens
ggtctcatctttgaactactgccggagcttctgccagggcttcgtgctggccgtcactgtcatccgtgaggcggtggaggagatccgatgctacgtgcgg

SEQ ID NO: 185808 - DNA, 100 bp, Homo sapiens
agttgggggctcagaggggagtcatcatgagcgatgttaccattgtgaaagaaggttgggttcagaagaggggtgatctttagacagtgactgagtatgg

SEQ ID NO: 185809 - DNA, 75 bp, Homo sapiens
gtgcgtctgcccaccaaggactttgaggtggacctgctagaaagcaggcccgcaagccgtgtgagccgtcgcagc

SEQ ID NO: 185810 - DNA, 100 bp, Homo sapiens
cctcagagcctgtcctgcctccgctccctggtcctcaaagtggcgagctttcctgcccggcctgaagttcgaggtcatcagctctgctcacatctccctg

SEQ ID NO: 185811 - DNA, 148 bp, Homo sapiens
taaattattaggagaactgataatgggctaccaagaaaaaatacatacatgcaatatccaatttccaaactggctttgcattttcttcctctcgcaaatctggaatgttcaccaaacattgaaactttcctctgcaaagcatttgtac

SEQ ID NO: 185812 - DNA, 100 bp, Homo sapiens
ggaacatggctgcgtccggtctgagttaccttcctaatgacactgtagaatctggcatccatccagtatatttttgcagcacccattatattgaaatgct

SEQ ID NO: 185813 - DNA, 100 bp, Homo sapiens
agaaactggaggagtcccgctcgaagctaggttgcagattttaaagatgcccttgccagagtatatggagtgatacccaaaatccagtgccttccaccaa

SEQ ID NO: 185814 - DNA, 75 bp, Homo sapiens
caagacctcatcaacaattaaggagatgcatttagaagatactaccagattctgtcccaaagaagaaagagaaag

SEQ ID NO: 185815 - DNA, 90 bp, Homo sapiens
tcccttcgcccagttccctgcatcctaagactcgaaggcagcacaggacctggaaaaattacatgatgcctttgtggaactgtacggccc

SEQ ID NO: 185816 - DNA, 82 bp, Homo sapiens
ggtgtcggaggtctcatctttgaactactgccggagcttctgccagcgtgagtgcatctccatccacgttggccaggctggt

SEQ ID NO: 185817 - DNA, 100 bp, Homo sapiens
aaaaacctcagcctggaggccattcagctgtgcgaccgggacggaatgcttctagtcacaacagacacccttggccatgactttcatgtcttccaaattc

SEQ ID NO: 185818 - DNA, 98 bp, Homo sapiens
ggccttccccaagcagtaccccctgttccgcccccctgcgcagtggtcttcgctgctgggaacctgcatcaataatacatcggtgatgatgttcaaaa

SEQ ID NO: 185819 - DNA, 100 bp, Homo sapiens
cacctttcggcttctgagacggcggcagcagcggcattcagattatacactaagcctaacttctggttcctaggtaagtcagtaatgttgtatgcagcag

SEQ ID NO: 185820 - DNA, 100 bp, Homo sapiens
attacattactagagcaagagaaagagccctggattgttgtaagtaaagaaacaagcagatggtatccagtactatactggcaattgctggagaagattt

SEQ ID NO: 185821 - DNA, 100 bp, Homo sapiens
aacacggctccatcatcacccaggcgcggagggaagacgccctggtgctcaccaagcaaggctgggtctcttctgcgtcagtcgccccagccaaggcaca

SEQ ID NO: 185822 - DNA, 95 bp, Homo sapiens
gagaagacgatctgcacttcgcattttggcattgacatttaattttagggtcctttatatagaagggagagtagttatggctgattgtcctcaca

SEQ ID NO: 185823 - DNA, 82 bp, Homo sapiens
cccaggagaaattcgccctcaaagtcagcccaaggccaaccccactgtcactctgttcccgccctcctctgaggagctccaa

SEQ ID NO: 185824 - DNA, 100 bp, Homo sapiens
atggaaatgaaaagagaatactgtgtggctgacttcaaaagagtagtggattttctgaaagagaagttttcaaatggaacattttgatgcatcacttagt

SEQ ID NO: 185825 - DNA, 100 bp, Homo sapiens
gttacctatgtacctgttaccactttcaaaaatctgaattctacaaacacattgtgctttctggagggtctactatgtatcctggcctgccatcacggtt

SEQ ID NO: 185826 - DNA, 74 bp, Homo sapiens
tcggatcatgtctggtggctccgcggattataacaggaagctcttcgtgggcggtcttgactggagcacgaccc

SEQ ID NO: 185827 - DNA, 75 bp, Homo sapiens
gatcttcttcctaaatctttctgggaaaacaattgcaagatcagacactcctctaatttacaaagcagtgcccag

SEQ ID NO: 185828 - DNA, 119 bp, Homo sapiens
tggaatatgccaaggaaaaactggagagcttcatcaaaaatagtgatagctttgataaatatgagatcctgactccaaactccattcccaagggtttcatggacgggaagcaggcgtgc

SEQ ID NO: 185829 - DNA, 82 bp, Homo sapiens
ttcggagctcgaggatgctgacataaagaaggagctgcagagtctgcgggagaagccttctggcggccgcccctggtttctc

SEQ ID NO: 185830 - DNA, 100 bp, Homo sapiens
tgccaatgggatccctgtggaccagcaggatgatgacaaaggcaactgtgaggactaccttatgatttcctcgccacccaagactgtcaaaccccctgag

SEQ ID NO: 185831 - DNA, 100 bp, Homo sapiens
tacgacatggctgagatcaccaatatccgacctagctttgttccctgacatcgtggagttctgcgaggccatggccaacgccgggaagaccgtaattgtg

SEQ ID NO: 185832 - DNA, 90 bp, Homo sapiens
aggatgcaccttcccctgccttggaaaggattttgcctaccattttacagtatttgtcttctattttggagcctttttattggaagcagc

SEQ ID NO: 185833 - DNA, 100 bp, Homo sapiens
cgccccctccggcgtgttcatgcccccgggggccatgaagcccccaggaggagaatcgagcaatctttttggaagtccagaagaagctactccttccagc

SEQ ID NO: 185834 - DNA, 100 bp, Homo sapiens
tgtcattgcctgagcgcgtcgagccagacagactgctgagcgactatattgagaaggaggtaaaggcccagctgtgagatacagtaagttcaagatgtca

SEQ ID NO: 185835 - DNA, 80 bp, Homo sapiens
ctccagcaacatcttgtccataaggctgaaccggcaaggcttattcccagaaagagatttcaaagtgcgccatggaggat

SEQ ID NO: 185836 - DNA, 98 bp, Homo sapiens
acaccgctatcacagctgctgcaatcgcttgggagagctcctgggccacccctcctttcaggtcaagggcagcatctcatcacggcagttgctgacca

SEQ ID NO: 185837 - DNA, 100 bp, Homo sapiens
ccagcatggccagcgtcttggagcagctgaacgtcattaacggcatcctcttcattcctctcagggggtccactggacggggcctgagctacaacttcac

SEQ ID NO: 185838 - DNA, 50 bp, Homo sapiens
ctatctcaagctgtgatacagggtgacaccgggtctaggagtggtggccg

SEQ ID NO: 185839 - DNA, 75 bp, Homo sapiens
cgtggccctgctggaggcctcgctgaggaacgacgccgaggaagttaatgaaattatcaggaaggagttttcagg

SEQ ID NO: 185840 - DNA, 101 bp, Homo sapiens
cctcctctgcctcgctccaacacagactggggcagcacctactccgtgtcagtggtggagaccgactacgaccagtacgcgctgctgtacagccagggcag

SEQ ID NO: 185841 - DNA, 82 bp, Homo sapiens
tcctcatcccggaagcatgacagcattaaagacgactcggaggagcggtggtgccccccccgggcacggggccatgtacaac

SEQ ID NO: 185842 - DNA, 80 bp, Homo sapiens
gcaaaggcaagaaggcaacgacgttccatctgtggaaggacctaccaaccagttgtatcacggactgattcaccgagccc

SEQ ID NO: 185843 - DNA, 100 bp, Homo sapiens
gcagcggcagcagagcgggaaagtggtggaggatgatcttgcggccaaaggggacctcggcgcagtaatgtcaacatatgcccagcctacagagtctgag

SEQ ID NO: 185844 - DNA, 100 bp, Homo sapiens
atgaacgaggaagatgccttctgggccctggtcaaactcttctcaggccctaaacatgccatgcatggatacttatccgctttttccccttggagtcctg

SEQ ID NO: 185845 - DNA, 75 bp, Homo sapiens
gaaaagccttcattacaagtactcggcaagttgtcaggacattacaagaagcggtgccaaggccgcatgcggaag

SEQ ID NO: 185846 - DNA, 98 bp, Homo sapiens
agatgaggacactgaaattcagagaggggaagtgatttgcctcagcttgtactagagtcccacgaactggctgggtatacagaaatgtccagaggccg

SEQ ID NO: 185847 - DNA, 83 bp, Homo sapiens
gataacccaagtcaaatctaagcatttaaaagacaggtaagaaacgttttcactatgactgcgaaagagggaagaaagaaatc

SEQ ID NO: 185848 - DNA, 57 bp, Homo sapiens
gccgagttccccacctgcgattgcgtcgaaaacagaatcttggcattgtcttcctca

SEQ ID NO: 185849 - DNA, 83 bp, Homo sapiens
caagaaggagaccctcatccagctgatgcccttcttcgtgcgatcagtgggtgaccgcggctgcgagggactttgtcatccgt

SEQ ID NO: 185850 - DNA, 50 bp, Homo sapiens
cctggggccctgcccaccacaaaattcccaagatacgccccctctgagtc

SEQ ID NO: 185851 - DNA, 85 bp, Homo sapiens
cagaagtagctgaatgtgttactccattgctgaggagtgcttcttggacacttaatgattgttggcaagaaatgtgctgctgatc

SEQ ID NO: 185852 - DNA, 75 bp, Homo sapiens
ttcacttgtgtgcggaactcctcggaaccatggtggcctctgtcagcctcttgcagctgggccaggagactgaca

SEQ ID NO: 185853 - DNA, 100 bp, Homo sapiens
ggagacatggaccgcggcgagcaaggtgctgaccttaaggaaagagccaaaatgagttccagtgaagttggtccttttgtctccaaaataagagcagtga

SEQ ID NO: 185854 - DNA, 50 bp, Homo sapiens
cctacccgggatacggaggaggggggctttgaccacgacctttgaagagc

SEQ ID NO: 185855 - DNA, 100 bp, Homo sapiens
caggagttccgatcgacccggtaccaagaaggggagtgcccgcggcagcacccctggctacatatttgggaaacgcatcatactcttcctgttcctcatg

SEQ ID NO: 185856 - DNA, 90 bp, Homo sapiens
cgccgccgccgcccagagactgctgagcccgtccgtccgccgccaccacccactccggacacagggaccagtccaacgtcaggcggatgc

SEQ ID NO: 185857 - DNA, 100 bp, Homo sapiens
gttggtgtgattagcttcgcagtctggaaagctttaggagttcacagtgtctctaattaacagaagatggcaaagcccagccacagcagctatgtccttc

SEQ ID NO: 185858 - DNA, 96 bp, Homo sapiens
agcaagagaaggaagcaggatgcagccccgcttgaggccgccagcgtgccttctgcagactgtgagcagattatgtttgagaccttcaacaccccg

SEQ ID NO: 185859 - DNA, 100 bp, Homo sapiens
agatattggccgacaaggaagtgaagaaggcgcatcactcccagctgcgcaaagcttgcgaggtggcgttagcaggaggatgcattagcacaacaggcct

SEQ ID NO: 185860 - DNA, 80 bp, Homo sapiens
agctggtcgcagatcctgagacccggacagtggcagtgaaacagatgtgttcagagcaacattgttttgttgacacaagc

SEQ ID NO: 185861 - DNA, 74 bp, Homo sapiens
tggagaagatggctcagtacagattgcaggcaatgaatcgctccctggctaatgtgattcttggaggctatggc

SEQ ID NO: 185862 - DNA, 75 bp, Homo sapiens
tattgatgaagaagtgggctttgctctgccaaatccacagaagttcaccatgtctattctcaagatccatgccag

SEQ ID NO: 185863 - DNA, 74 bp, Homo sapiens
atggctcaaagaaagatgattatgatgtacagttacccagcacgtgtacctcctcctcctcctattgctcgggc

SEQ ID NO: 185864 - DNA, 75 bp, Homo sapiens
ggcaaaggatgtggtggagaatgtgaactatcgtggctccacgggctttggccaggacagcatcctctccctccc

SEQ ID NO: 185865 - DNA, 51 bp, Homo sapiens
gttaaggattccaagtaactcttatttgaccagagtgaactccgagcagga

SEQ ID NO: 185866 - DNA, 82 bp, Homo sapiens
ctcaggcctgcacggacggtgttggttgggcaaattgtggctactaatttgccccctgaagatcaagatggctctggggatg

SEQ ID NO: 185867 - DNA, 75 bp, Homo sapiens
gacacccgcaggaactcggcagaggagaaattcagacggctcccgagggaaaggatttgaagatgatcgaattga

SEQ ID NO: 185868 - DNA, 99 bp, Homo sapiens
gccagccagaccaggaacccaccagaaggaaccaattccggacacataacaagcagcagtgaggacaccaaagaaaatgttttcagactgctcatttct

SEQ ID NO: 185869 - DNA, 75 bp, Homo sapiens
tttccttggagagtcataacatatcactgactggactacaggaatatgtggaagctgtctcttttcaacacttca

SEQ ID NO: 185870 - DNA, 81 bp, Homo sapiens
cctgcctcagcctccctggtagctgggattacaggtggctcaatcccttgtttaaaattggccataaacggagattagagg

SEQ ID NO: 185871 - DNA, 100 bp, Homo sapiens
ctctggggctcgatgtgaatatatattatgtctgcctgttctcccctcgtcggtggctaagagccccccaagatgaacccagtggtggagccactgtcct

SEQ ID NO: 185872 - DNA, 98 bp, Homo sapiens
gaagatgaacagggttcctggggcatcgacgatctccatatttcattgcaagatatatttttgccatcatggatcagtttggagatatattagaaggt

SEQ ID NO: 185873 - DNA, 100 bp, Homo sapiens
aatgagtatcctaaaaaaagaaaaaggaagactctacacccttctcgttattcaggtatgtcttactgaaagaaagaaacatgcttctaaccctagagca

SEQ ID NO: 185874 - DNA, 82 bp, Homo sapiens
ttcagatcttcacagcacagttcctgggaaggtggagccaccagcctctccttgatcttcagtttagatcttggaggcatat

SEQ ID NO: 185875 - DNA, 83 bp, Homo sapiens
gtccccacttcatatgtcgaagtctgtttggacaaaaatgccaaagttaattggccttggtcctcacagctccaaaaagaaac

SEQ ID NO: 185876 - DNA, 50 bp, Homo sapiens
gttaggcggcactccagccccagctcggccataaagaatgctgatgggag

SEQ ID NO: 185877 - DNA, 73 bp, Homo sapiens
gaaaaatcgagcagaaagaatgtctttcagagcagcccgacggccatggaggctgaagagacgatggaatgcc

SEQ ID NO: 185878 - DNA, 90 bp, Homo sapiens
gaactaaggccccctgcccccttttcctggtgcatgtgaagttatcaaaaacagcagtctctggtcccagcccaccccatggcccctccc

SEQ ID NO: 185879 - DNA, 90 bp, Homo sapiens
caatattccagcttttttttatacctcagacaggatttccagcaaagtgttactgtggtcctctttcaagacgagaataccttagtctca

SEQ ID NO: 185880 - DNA, 75 bp, Homo sapiens
ctgtgatgcgggaggacctgttcatcgtcagcaagaaaaatggctacaaacttcctagcacatgagaagatctgg

SEQ ID NO: 185881 - DNA, 75 bp, Homo sapiens
cgaaaataccgagtttgtaatgtgactagacggccagccagtcatcaaacgttacaaaagcaggttggtcactgg

SEQ ID NO: 185882 - DNA, 100 bp, Homo sapiens
aaaggaaggcgtccgttggccttcgtacccgtcttgattgagccacttccggctcctgcgtcgctccggaagcctgcgagttccggaagccttggtaatc

SEQ ID NO: 185883 - DNA, 49 bp, Homo sapiens
gtggaaacgcttgtagggtttcaccaggaatgggtaccacagaccatgt

SEQ ID NO: 185884 - DNA, 101 bp, Homo sapiens
gacttccctttggatgtagcaaggaagaaattgttcagttcttctcagccgaaggagtaaaggtgctgcaatgatgttagctgtggccactgtggattttt

SEQ ID NO: 185885 - DNA, 83 bp, Homo sapiens
accgctgaggcttatttgggaaagaagacatttctcttgggaagttgtgcatctgacaggaatatagtactgtacgatatgag

SEQ ID NO: 185886 - DNA, 51 bp, Homo sapiens
agttggaggttctggaatctcagatctgggacataggaggacaaccccgat

SEQ ID NO: 185887 - DNA, 100 bp, Homo sapiens
aggcgtggcatgggggatgtctggcgctggcagagctgggcaggagaggcctgttgctgccgtctcgactcgtggatgccactgaggcggctcccagctg

SEQ ID NO: 185888 - DNA, 104 bp, Homo sapiens
atgatgtcttggcagatgttgttgaagataaagacaaggaggtctcagcatgaaacagcagcagtggtgtgggatgactgccaaaatgggcaccgtgttgtcag

SEQ ID NO: 185889 - DNA, 158 bp, Homo sapiens
gggggagaagctggagctgagactgaagtcgcccgtgggggctgagcccgccgtctacccgtggccgctgccggtctacaagcccttcactccggtcaagtacttctccatcgaccgcgtattccggaatgagaccctggacgccacgcacctggctg

SEQ ID NO: 185890 - DNA, 82 bp, Homo sapiens
gcttccgaaggctgaccgagtgcttcctgagccccactggagaagaagcaggcgctccctccattccagccacagatcacag

SEQ ID NO: 185891 - DNA, 100 bp, Homo sapiens
accgaaacgctctgaaaatcgagccggtcatggaaaatggaagatttgcaaaatacaaatattttacccatgtcatgatcaataagacagatatgctaat

SEQ ID NO: 185892 - DNA, 75 bp, Homo sapiens
ggtgattctgaagagggtctggaggagccttctcaagaacagagatatatcattgtggtggaacatgatctaagt

SEQ ID NO: 185893 - DNA, 74 bp, Homo sapiens
cagccaggagtcatgagcgacagcggcgagcagaactacggcgagcggatgtcatttgtcagagtgaaccgctg

SEQ ID NO: 185894 - DNA, 75 bp, Homo sapiens
gctgtagagaggaccccggtacatctgaaagccgggaaatgctcaccatggatgatgatatcgccgcgctcgtcg

SEQ ID NO: 185895 - DNA, 90 bp, Homo sapiens
ctgccctggcccccaagatcggccccctgggtctgaagtaaccaagatccttctgtttgctgcacaagcatctcatcacctagtaccccc

SEQ ID NO: 185896 - DNA, 75 bp, Homo sapiens
taacgttgtggcctttacccggaggtttaaccaggatgttcacggaagaccagggtgtagatgacaggctgctct

SEQ ID NO: 185897 - DNA, 100 bp, Homo sapiens
aggagttcgtctcttacgtctgcggaagtgcagctgcctcagttcttagcgcagttggtagctggcagtgttgtgatggcttttgaagaagtatgcccgg

SEQ ID NO: 185898 - DNA, 75 bp, Homo sapiens
caggatgatagttcgtgtgacaaacagagatatcatttgtcagatggagtcgggtggtacagttttgagtaccaa

SEQ ID NO: 185899 - DNA, 100 bp, Homo sapiens
ccctccccactgatcgaagacctcaagattggccgcgtaatccaggttgctgctgggagcagcaacctcaagagagtgaccttggagctgggggggaaga

SEQ ID NO: 185900 - DNA, 75 bp, Homo sapiens
ctggagtaaccctcactggagaatccagagacaatgtggagctcatactgaaaaccatcaataaccagcacagcg

SEQ ID NO: 185901 - DNA, 75 bp, Homo sapiens
ggggtcttgtgcaggacctgaaagtgtctgctgagaacagacccagtccctgaggaaggagaagatgttgctgcc

SEQ ID NO: 185902 - DNA, 100 bp, Homo sapiens
tccagggagtgctctgttcacggctccatcgctgttagtttggttttcctaaacaaatcctttcacagggaccgacggcacttgataatgtgacaaaaac

SEQ ID NO: 185903 - DNA, 96 bp, Homo sapiens
cgcatcttgataaggcctctgtgatgaggcttaccatcagctatttgcgtgtgaggaaacttctggatgctggtggatctcgagccagaggggaaa

SEQ ID NO: 185904 - DNA, 97 bp, Homo sapiens
gccagatggaagaaccattgttagtgaacgtggacaaagctgttgtctcagggagcacagaagcccttatgttagctatgggatatcatgagaaggg

SEQ ID NO: 185905 - DNA, 94 bp, Homo sapiens
gtgaagtcctacagagttatcaggttccagaccctgccttctcttctgaaagcggagctggagtttgttcagatcatcatcatcgtggtggtga

SEQ ID NO: 185906 - DNA, 98 bp, Homo sapiens
gagtgctttggacgatcttcagctggccaacagcaccatcattgcatttacctcggatcatgggctgaggcacatgtctgggtctgagctgaccgagc

SEQ ID NO: 185907 - DNA, 97 bp, Homo sapiens
atttcttcgtgctgggaatcctggccctgtcccacaccatcaggtgacaccggaaactggtactcaagtgatgaggatgagggtggaagcagtgtca

SEQ ID NO: 185908 - DNA, 98 bp, Homo sapiens
ctccacactgccaaccggccagaggacgagtgtgttttaagaagaggagaggtcactcaattgggggagcccctgagcagcgataccagatcatccct

SEQ ID NO: 185909 - DNA, 75 bp, Homo sapiens
cagagacgcaagagaaaaatccactgccttccaaagaaatgtgcaggagaagagaattgggtggacagcaggacc

SEQ ID NO: 185910 - DNA, 75 bp, Homo sapiens
caagcacgcgggacccatcgtctccgtgtggcaccgcgagctccgcaaaggtcaccgaggaggagcccagctcca

SEQ ID NO: 185911 - DNA, 85 bp, Homo sapiens
ccgggtgtgagctgcctgaaaatgcactcggatgccgccgctgtcataagactttgaccccgacgcaggcttcagtgattgccgc

SEQ ID NO: 185912 - DNA, 83 bp, Homo sapiens
cttcattgatgccacaaccataatagaatgtctacattcctgtgtctgtctctcagtgctggtcagacaacgctgtcaagaga

SEQ ID NO: 185913 - DNA, 75 bp, Homo sapiens
ccgacaacagcctggcgtccgccacgacaacagtgagctgggacggagacaagctccagtgtgtgcagaagggtg

SEQ ID NO: 185914 - DNA, 101 bp, Homo sapiens
tggatttcgaggagtgtctgaaggactcgccccgcttcagtactatactggcaattgctggagaagattttgcaattgttgcttctgatactcgattgagt

SEQ ID NO: 185915 - DNA, 100 bp, Homo sapiens
agttccacagtgtctcagttctgaagaaactaagaacaaagttgtatcctttctggagaagatcctcctggccaacttcttggcccagacagaggccctg

SEQ ID NO: 185916 - DNA, 58 bp, Homo sapiens
aagaaaattccttcttggaacaatttatgatagagatgctgctgctaggggtggtggg

SEQ ID NO: 185917 - DNA, 83 bp, Homo sapiens
cgcttcccttcgggggctttcgcgaatcccgaggcaatctcggaggcggagccttcacgtaaatgggtccagtcatgcctccc

SEQ ID NO: 185918 - DNA, 82 bp, Homo sapiens
gacaagccgctggcagccgcggatctcaccgccgctcagggtcctagaccagaaggagcacaggctggatggccgtgtcatt

SEQ ID NO: 185919 - DNA, 95 bp, Homo sapiens
caccatcgacaccgaaaactccaccgtagcccttgccaaagcatcacaggacatggccccctcagccacctagctggggcccatctaggagtggc

SEQ ID NO: 185920 - DNA, 95 bp, Homo sapiens
agggcagcccctatacaaggacagttggctcctaagggagggactaaatggtgtacaactatgagcctttgacacagctcaagaatgtcagagca

SEQ ID NO: 185921 - DNA, 90 bp, Homo sapiens
acgggtgaatgctgctaaaaacaagactggggctgctcccatcattgatgtggtgcgatcgattagaggatttcctacaatcaagatatt

SEQ ID NO: 185922 - DNA, 75 bp, Homo sapiens
ccggcagctgtgacctctgcccaggtcattcccaaaagcaagttcgtcttggtgaagttcgacacccagtacccc

SEQ ID NO: 185923 - DNA, 50 bp, Homo sapiens
cgtggacttctacaaggcccgcatggaggatgctccagaccttgtatgat

SEQ ID NO: 185924 - DNA, 100 bp, Homo sapiens
cagaatgtttcatcattactaacaggatattcctcatgacattgctgtctggtattctttaggtgatgctagaaggcctcttcatgaaacagcagttttg

SEQ ID NO: 185925 - DNA, 75 bp, Homo sapiens
cacaacaaaacattcatggagggggaagtattctccactggttgaatgcaaatggaagccagaggaaaagggaac

SEQ ID NO: 185926 - DNA, 100 bp, Homo sapiens
aagcgggcccacatcttccggccaacttccattgaacttcccagcactcgaaagggaccgaaatggagagcaaagtctccaaacgtccacaactatcccg

SEQ ID NO: 185927 - DNA, 83 bp, Homo sapiens
gatttcccaagagcagcggaaaatgatccagtcacaggcagctgaaaaagttggatgaagatagtttaaccaaacaaccagaa

SEQ ID NO: 185928 - DNA, 83 bp, Homo sapiens
ccaacattcccaacagccaccaccaccaccagatggtgtccctggccagtgtccttccacctgtccacaagcatggggaacat

SEQ ID NO: 185929 - DNA, 83 bp, Homo sapiens
ctcatctgataaagcttacgggagaaaaggtttggtgcacctcgatttggaggaagtagggcagggcccttatctggaaagaa

SEQ ID NO: 185930 - DNA, 96 bp, Homo sapiens
ttgtgttgcgggggccggacttcaagctcaaagttatgaagtttcaggatgaattggaatctgggaaaagacctaaaaaaccaggccagagttttc

SEQ ID NO: 185931 - DNA, 88 bp, Homo sapiens
gtcctgggtcatgaaacttaatccacagcaagctcccttatatgagttcttggtttcgactcagaaaacatatggtgctgacctggcc

SEQ ID NO: 185932 - DNA, 75 bp, Homo sapiens
aagtccacaaaaacagcacccgctcctagatggcgtagatggtgaggcaagtgaacaagatatccttaaatatct

SEQ ID NO: 185933 - DNA, 98 bp, Homo sapiens
gtagaaccaaattcgttgtggtccttgatccagtatgcttatacagagtcagatgtaatgggaagaggccatgcacgcctggtgcatgttgaagagcc

SEQ ID NO: 185934 - DNA, 78 bp, Homo sapiens
gatgttccagtatttaaagctattcaaccagatgaatatgatgaagaatgggctaagaaaattcagagtgaaaagttt

SEQ ID NO: 185935 - DNA, 90 bp, Homo sapiens
tggcgtgcactccgcacctcggggacattattgcgcgtggaacggctgcttttggaaggtagacgttacatccaagaggaaataatccag

SEQ ID NO: 185936 - DNA, 98 bp, Homo sapiens
gcagatgtggtgatgagtatgactactgatgactttgtaaaaatgttttcagccgattacacctcaacaagaaggcaactgacaaacagccttatagc

SEQ ID NO: 185937 - DNA, 82 bp, Homo sapiens
cgatcctctagagcactgtgtgtctccccggacgcgagcccgctcccctgagcacaaatcctgaagagcccgtgggcgtgga

SEQ ID NO: 185938 - DNA, 113 bp, Homo sapiens
atgcaaatagcgggaagaacaaaggaaggggagcccgggacccccgggggcgcagaaatgagccgtcagactgctacagcattacctaccggtacctcgaagtgtccaccatc

SEQ ID NO: 185939 - DNA, 83 bp, Homo sapiens
tccctacagagagatgctgtcccgtggttatttctcaaactctgaggctgcggagttcacacattgaaatctgtcatcttttt

SEQ ID NO: 185940 - DNA, 100 bp, Homo sapiens
cctaactgccttccactgggagctgttccgatgtgtgcatgagctctcacctgtgcacagttccaccctgacggactcatctttggaacaggaaccatgg

SEQ ID NO: 185941 - DNA, 101 bp, Homo sapiens
cttgtacagagatgtgatgttggagaactatagcaatctggttttcttgggaagccagttgagggaagttctccatgaatgtacgtcacaatgatgatgac

SEQ ID NO: 185942 - DNA, 99 bp, Homo sapiens
cgcgcaagatgttgacgttgcagacttggctagtgcaagccttgtttattttcctcaccactgaatctacaggcaaaggcagctcgagcatctcatctg

SEQ ID NO: 185943 - DNA, 100 bp, Homo sapiens
tgttacgacagctgcccgcgggcccagcctgacgccatctcacgcctgctggaggtacatgtcccagagcaagcacacggaggcccgggagctcatgtac

SEQ ID NO: 185944 - DNA, 100 bp, Homo sapiens
ctttggtcaacttgggcattccgattttccaacaacagttcctcgtcttgcaaagctcccctcccacccggtcactccgtccagcaagcacgcagacagc

SEQ ID NO: 185945 - DNA, 83 bp, Homo sapiens
tcttcggtggactccttcggcagtccacccaccgccgccgcctcccagtcccaccagcagtaccccccatcgcatgccacgcc

SEQ ID NO: 185946 - DNA, 83 bp, Homo sapiens
cggtgcccgaggaggcagccaagctcgtggcctgcctctgcgtgcccgagaggccccagcaacatgcagctacaattccagag

SEQ ID NO: 185947 - DNA, 107 bp, Homo sapiens
tttacctgtgagatgtttcatcccaacacaaaccagtccagctacgggggcccagccagccagcagctgagtgggggttacggaggcggctacggtggccagagcag

SEQ ID NO: 185948 - DNA, 83 bp, Homo sapiens
tgaggaggcagctgcggtggcagctgctgagttctcggtgaaggtcaacaacggttccagcctcagggatgagtgcatcacaa

SEQ ID NO: 185949 - DNA, 102 bp, Homo sapiens
cgcgtctccgcgttcccagcccgggtccccgcgttcacagccccagcgcaggtgaaatgacaatggatgctctgttggctcgattgaaacttctgaatccag

SEQ ID NO: 185950 - DNA, 50 bp, Homo sapiens
gtggctgtgcttgccaggcctggctccacctctgaagagccaatccattc

SEQ ID NO: 185951 - DNA, 97 bp, Homo sapiens
agcaacctgcacttgaaccggcactgtgagaagactccaccgggggacggctacgtgcaggcggacgcccggggccccccggaccacgaggagcacc

SEQ ID NO: 185952 - DNA, 88 bp, Homo sapiens
gaatcggctgcggtttgctgggaacggagggctgcagcgcccaccctgcgccagagaccagataaatcccatgagcgtgtaagcaagc

SEQ ID NO: 185953 - DNA, 82 bp, Homo sapiens
tgttcctggaggaatccgagaagagcagagcggagggagccccagacacgaacaagttgaaatcatcgcagaaggataaagt

SEQ ID NO: 185954 - DNA, 75 bp, Homo sapiens
gtggtttgcgagcaggttctcggagggaccgggatagagacctacagagttgaaacagtgaaacctggaaagatt

SEQ ID NO: 185955 - DNA, 110 bp, Homo sapiens
ccggcgtctccttctatgtgctgtgtccggacaacggctgcggcgacaattttacaatgcagatcttcgtgaagactctgactggtaagaccatcaccctcgaggttgag

SEQ ID NO: 185956 - DNA, 82 bp, Homo sapiens
ggggttcggggggccaccgaatcgctgtcacgccggcaggacttgggaccctggaggactgacgctgctggcctgggcgtcc

SEQ ID NO: 185957 - DNA, 75 bp, Homo sapiens
ctgtagaggaacttcagtctataataaagagatgtgcaggtaaagtgaggaaacatgcaactgaacaggaaaaaa

SEQ ID NO: 185958 - DNA, 76 bp, Homo sapiens
aacagaattaaccagagaaggtgaaacgatcatcgagctaaaatatcgtgttgaaagccttgagccgggccatgct

SEQ ID NO: 185959 - DNA, 99 bp, Homo sapiens
gccaatgttggtgctggcaaaaagctttgaagattatgaaacagatgaacctgcctctccctctgaatttggaaacaaaagcaataaaatattaagtgc

SEQ ID NO: 185960 - DNA, 96 bp, Homo sapiens
tcctgaattaaatgaaaaggaagaagcatacaattccctcatgaaaagctatggcagtcgatgatgtgaagaaaggttacatcaaagcagaagaaa

SEQ ID NO: 185961 - DNA, 83 bp, Homo sapiens
tggggccgtaccatggcggagaagactcaaaagaggctgctctttggcgtaaattgcaatcgattagggatcgtttctcagaa

SEQ ID NO: 185962 - DNA, 75 bp, Homo sapiens
tgctttgcgtgctggtcagcatccggaacaacagctgcatccagatctcattatgcatcagaaaaatgaaaaaac

SEQ ID NO: 185963 - DNA, 74 bp, Homo sapiens
tcatgtggctcctggacaagagaggctgaagggtatgtgattggcagctgtattaaacacattccaatcgcagg

SEQ ID NO: 185964 - DNA, 89 bp, Homo sapiens
ctctgatccccccctgccggggagggcccagcgcatccgacaggagaactacgatgacccgcacaaaacccctgcctccccagttgtcc

SEQ ID NO: 185965 - DNA, 100 bp, Homo sapiens
gagttcacgttcatgggcgagggaacagatgagaaacccggcaatgaaagtccaggttcacactagaaggccaaaacttccgcaaacatctgatgatgaa

SEQ ID NO: 185966 - DNA, 74 bp, Homo sapiens
ctcatggaagagatgaacgccatgctggcccggaggctgggctgggcgagtatctcttcgaaaggctcactctc

SEQ ID NO: 185967 - DNA, 96 bp, Homo sapiens
ctttgacagttatgtggaacctctgaaattataccttcagaaattcagagaggaaacaattgaagatgttgaagaaatgctcaacaaccttcctgg

SEQ ID NO: 185968 - DNA, 83 bp, Homo sapiens
ataccaggactgcctgagacaagccacaagctgggcctggagtccctcggctgcatccggaagcgctggctgagaaagccaag

SEQ ID NO: 185969 - DNA, 75 bp, Homo sapiens
tctttaggaagaaacaacataaagaacttaaatggactggcatagaatgtcaagctaaccaggcgtccgctactt

SEQ ID NO: 185970 - DNA, 100 bp, Homo sapiens
gccccatccaggttcccatggttgccggctcccctctcaggacaacccagatgtgcaacaaagtgcgatggtactccaaagattcaggtttactcacgtc

SEQ ID NO: 185971 - DNA, 75 bp, Homo sapiens
cgctgacaagatcgagggcttctgttgcactgctgtgatccatcctcatctcctaaagatgcatcctgacttatc

SEQ ID NO: 185972 - DNA, 83 bp, Homo sapiens
aggtgaccaagcccaaagaggagaaagatgcttctaaggtgcctccggagccagcgtggtggccatagacaacaagatcgaac

SEQ ID NO: 185973 - DNA, 99 bp, Homo sapiens
gccaaagcctgcccagacggctcacctgtgcgggatggaacaaaagattcgtggtgctctcaatgccgtcagaagcttggttcctgatgctttagaaag

SEQ ID NO: 185974 - DNA, 100 bp, Homo sapiens
tcgaatctcttctccctccccttcttgggcatgagccagaaggagagctctaagtctgccatgatgtatattcaggagttgaggtcaggcttgcgggata

SEQ ID NO: 185975 - DNA, 50 bp, Homo sapiens
gaagaaggatgtgatttgcaagaaatgaagatgagaatgtgcctactgct

SEQ ID NO: 185976 - DNA, 90 bp, Homo sapiens
gtggcattcaaatcctagcactctgggagagatcagaatcaagctttgcgactctgtctgggtagcactagtgttggaggtcagtatggc

SEQ ID NO: 185977 - DNA, 75 bp, Homo sapiens
tccaatcttcgtgttcactttaaggtggattctgaccaggaattacaaggctcttgccaaaggaacaagaggcag

SEQ ID NO: 185978 - DNA, 98 bp, Homo sapiens
aggagcagtggtgctgtcagcgcggccgtcggagacatgggagacccggggtcggagatgatcatgacgcagtcctgaggtttaatggggcacccaca

SEQ ID NO: 185979 - DNA, 100 bp, Homo sapiens
gtttgtgcgcacagtgctggtctgcctgacatattttcagctgaactctcatctctcaacactggcaaatattcataagatctaccacacccttaataag

SEQ ID NO: 185980 - DNA, 75 bp, Homo sapiens
gaagcgggctggcggcgctgccgctcccgggcggccgcgggcggggggggccctcagcctcttggccttgaacgg

SEQ ID NO: 185981 - DNA, 98 bp, Homo sapiens
ctcctccagctaccggcccaaggccatctacctggacatcgatggacgcattcagaaggctctaacaagagaagagatcacagaaacgtgaggatcaa

SEQ ID NO: 185982 - DNA, 73 bp, Homo sapiens
ttcttcctggagcggagcgcaggcgccgagactgacaacgcggtcccacagtctgatgatttgaagaagagaa

SEQ ID NO: 185983 - DNA, 75 bp, Homo sapiens
tttataataagaacatatctcagaaagattgggaattcacaattgaaactgaagggaaaacatttcagttaacaa

SEQ ID NO: 185984 - DNA, 100 bp, Homo sapiens
ccattgtggtatctcccattttaattccagagaatcagagacagcctttcccaagagatgttggcaaggagtctcgctctcagtcaaaatctccaacggg

SEQ ID NO: 185985 - DNA, 119 bp, Homo sapiens
cgagcgggcggcttcctggcctgggcgctccggtggcggcggaggctactgcagcactggggtgtcagttgttggtccgacccagaacgcttcagttctgctctgcaaggatatataat

SEQ ID NO: 185986 - DNA, 100 bp, Homo sapiens
gatcggaactccaacaagaccctgccctctaccacctggaaatgagtggcttatactctcctgtcagtgaggatagcacagtgcctcaatttgaagctcc

SEQ ID NO: 185987 - DNA, 75 bp, Homo sapiens
atttaagcctgatctaacccctagaaacagggacaaactggcagagctccacgggaacatgtttgtggaagaatg

SEQ ID NO: 185988 - DNA, 83 bp, Homo sapiens
aatctaaacatttgtgggaagttgtattcatcaataatgaaatgctgactaaggaacaagcattttgaaagcgaagcagaagc

SEQ ID NO: 185989 - DNA, 75 bp, Homo sapiens
aagatgctgttagcctttgcagtctcgacataagtgttttcaaatggaacattttgatgcatcacttagtaccta

SEQ ID NO: 185990 - DNA, 50 bp, Homo sapiens
ctgcctcttgatctacctctttgtccagattgagaggatccagaatccag

SEQ ID NO: 185991 - DNA, 87 bp, Homo sapiens
aaaactggcactgattcaaattcaacagaatcctctgaaacttccacagtttggtaactctcattcgacatccatctgaactaatga

SEQ ID NO: 185992 - DNA, 101 bp, Homo sapiens
tgaacagaactatgcgaaacaattgagaggcatttgacaatgaatatggaattgcatacaatagtctgtcttcagagattcttgaaaggttgcagaaaatt

SEQ ID NO: 185993 - DNA, 101 bp, Homo sapiens
cagggagatgctggcgagacgacagcgagatcctctccaggccctgcggcgccgcaatcaggagctgaagcaacaggtagatgacaaggtgaatttccatt

SEQ ID NO: 185994 - DNA, 100 bp, Homo sapiens
atgccctgcagtacctgcagaaggtctctggagacatcttcagcagggctcagtgctgtcagagagggactacgagagcctcgtcatgatgcgcatgcgc

SEQ ID NO: 185995 - DNA, 101 bp, Homo sapiens
cggccaacgagaggaacgtgtccacgcgccagggcaacagagatgcttatttttggaaagaagttaacagcgggagaggcatgtgctcaaggacttgttac

SEQ ID NO: 185996 - DNA, 82 bp, Homo sapiens
cgccgaggcaccgaggcactcagaggagatgaggacggggacttggttgccttttccagtgacgaggaattgacaatggcca

SEQ ID NO: 185997 - DNA, 100 bp, Homo sapiens
tctgatccgcaagcatgctcagaccttcattgctctgtgtgccaccgaaactaatctggattcactccctctggttgatacccactcaaaaaggacactt

SEQ ID NO: 185998 - DNA, 74 bp, Homo sapiens
attggaaggaagtgcataagatggtggttgaaagtgctcttaaagttccgtacagataaaggaagagatcccag

SEQ ID NO: 185999 - DNA, 100 bp, Homo sapiens
acaggtggttcctgtccagccccctcacctcatatctcagccatacaaagcccttcagcggccagtagcatctgactttgagcctcagggtctgagtgaa

SEQ ID NO: 186000 - DNA, 75 bp, Homo sapiens
ccgtctgaactaggatgtcccgacatgaagccttatgccagcctggaccatcttggaggcagtgtaggatcatgg

SEQ ID NO: 186001 - DNA, 50 bp, Homo sapiens
aggaaaatggctctgtcggtgtaaaaaacatgttggcagataaattgaac

SEQ ID NO: 186002 - DNA, 75 bp, Homo sapiens
ggagagtgttgccaaaagtcagagaatatgatgaagaatgggctaagaaaattcagagtgaaaagtttcgctggc

SEQ ID NO: 186003 - DNA, 75 bp, Homo sapiens
ctttccccgtcagcatcccagccgtgctcacggtattagaaaactactcggatgctccaatgacaccaaaacaga

SEQ ID NO: 186004 - DNA, 75 bp, Homo sapiens
accttgaggaaatgcctagtgaatgacagctgctctttggcgtaaattgcaatcgattagggatcgtttctcaga

SEQ ID NO: 186005 - DNA, 88 bp, Homo sapiens
gattggcccagttagcgtgtctctacaaaaaggtgcatataccactggctgtgggtgagcgtggaggatgctcagatgcacaccgtca

SEQ ID NO: 186006 - DNA, 100 bp, Homo sapiens
ttcaggctacggtgagccgaaggtgtggaaccactttgacagcggttcgtgcccaggccaggccatcggtgtcaaaacacggctagacaatggtgtcacc

SEQ ID NO: 186007 - DNA, 100 bp, Homo sapiens
ttggaatggcctacctctatgggagaggagttcaagttgatgcaaagccggaataagagcaatgaccaccatgcctgacagacctgttgctgcgcacacc

SEQ ID NO: 186008 - DNA, 75 bp, Homo sapiens
tctgaaggatcagattgcccagaatgaagaagaggtctttgcatggaataatgaagtaaaacagggactttcaag

SEQ ID NO: 186009 - DNA, 100 bp, Homo sapiens
agccctcagggccgccagcaaggaagaaatttgtgatacccctcgacgaggatgaggtccctcctggagtggaaacccctcctggagtttccccaaagcc

SEQ ID NO: 186010 - DNA, 74 bp, Homo sapiens
ggaaatcgggctgaagcgactgagtccgcgatggagcccgtctggtaaacttgtccagattgaatatgctttgg

SEQ ID NO: 186011 - DNA, 75 bp, Homo sapiens
caccaacatccgcatccgatgccatttaggtcatagacatgacaggccgggagcagaaggtctactacagctaca

SEQ ID NO: 186012 - DNA, 100 bp, Homo sapiens
ttcggttatggagcctctctcctctgcaacctgataggatttggctacccagcctacatctctactatactggcaattgctggagaagattttgcaattg

SEQ ID NO: 186013 - DNA, 50 bp, Homo sapiens
tggagatggacctgtgatctgggtacgtcagcctgtcatatgcatcaaca

SEQ ID NO: 186014 - DNA, 100 bp, Homo sapiens
gtggcaactcctcccaaccaaaaccagaagcagggccgcttccgcagcctggaggaagcactgaaagctagaagggataaaccgccaggttgaacctctg

SEQ ID NO: 186015 - DNA, 100 bp, Homo sapiens
tgggagaatgggacctttcctggatggccgatcgaacggttggaagtaagcagccttgcccaaacatccagtgcagtggcctccagtaccgatggcagca

SEQ ID NO: 186016 - DNA, 83 bp, Homo sapiens
cgccggacgtcggcaacggagaagcatttaaatcaaacggtattgagatggattgggttatgaaacataatggtccaaatgac

SEQ ID NO: 186017 - DNA, 101 bp, Homo sapiens
acaaacgaggatagaagacaaggtgcggtggtcctccatgtgctctgtgttgaactcccaccacctgatcttggaccaagttctgcactaaatcagacact

SEQ ID NO: 186018 - DNA, 100 bp, Homo sapiens
ctcgggagctggcctttcagatctcagagcagtttgaagccctggggtcctctattggagtgcagagtggacattttagatgaaatgagaaaagaattaa

SEQ ID NO: 186019 - DNA, 83 bp, Homo sapiens
caagatcccgccagaaccccctggcagatgttcaaatcacttgcaagatcaatatggaaattatgtaatccaacatgtactgg

SEQ ID NO: 186020 - DNA, 90 bp, Homo sapiens
aacaaccacgggaagccgcggctctccaagttctaccagccctacggctgatcccttatccaacatggttctaaccttcagtactaaaga

SEQ ID NO: 186021 - DNA, 100 bp, Homo sapiens
tgctggtggtctgcatcaccaccggatcaacttcgacaaatagaaacccggggatggcgtggagttctttgcccacatgcgcctcatgctgaagaagggg

SEQ ID NO: 186022 - DNA, 83 bp, Homo sapiens
ggaagccaaccgcgacttcattgatgcacccattccagtggtgtaacgacaaatttacatgtattggagaccagaccagaagc

SEQ ID NO: 186023 - DNA, 75 bp, Homo sapiens
tttcccgactgctccatcgaggcagccatggtgaagggaccttggtagctaatgtccgaagaaagtgactctctg

SEQ ID NO: 186024 - DNA, 74 bp, Homo sapiens
cgaagtccatctggaagacggtcctttccctgctgcccccaggtgctggagaatctggtaaaagcaccattgtg

SEQ ID NO: 186025 - DNA, 101 bp, Homo sapiens
cggccccggacggagcgccggccgcaccaccgccctctggccgttgcctcaccggctggtcagtgagaaggtcggaggggccgaggggaccaagctggatg

SEQ ID NO: 186026 - DNA, 83 bp, Homo sapiens
cgacaaaatgcaaaaaaggaggccaaagactttgtatgtcctggatgatgaatacacaagctcagtaggctccaaatttccag

SEQ ID NO: 186027 - DNA, 73 bp, Homo sapiens
tgacatttccataaatggggtcgagaatcaagatcagcaagaacccgaaccgagcatataggattggacaatg

SEQ ID NO: 186028 - DNA, 87 bp, Homo sapiens
ggtttctggcctacagagtgccccaattttcaggttgactaaaacatgggcgggccgttgttcgagagagaactgcaagtatcttca

SEQ ID NO: 186029 - DNA, 73 bp, Homo sapiens
tgtaatcaattgtgctgacaacacagtgttctaagaacggaagcatctgggctggatggaatttagcatcaag

SEQ ID NO: 186030 - DNA, 50 bp, Homo sapiens
gctctcttcgctggtggcaaactgtccactgtcatggattgaagaaaaag

SEQ ID NO: 186031 - DNA, 98 bp, Homo sapiens
agcttggcgtgctgcaggattacctgctggccctaaccacggacgaccaccttctccgctgtgcggcacagctggaggagctgatagacatggctgtg

SEQ ID NO: 186032 - DNA, 100 bp, Homo sapiens
ggttgagcggcggcgaacatgcgcttttgacacattggaggtggtccgagacattctgctgattggacatagacaggcttttgcatgggttgatgagtgg

SEQ ID NO: 186033 - DNA, 82 bp, Homo sapiens
attgagcaagcagcaagtcggctttcagatcaggaggagacatcacagctttcccagatcgggaggaaaaatatggaatgtg

SEQ ID NO: 186034 - DNA, 95 bp, Homo sapiens
cttcccccagcgcttgccgccctgggcgcggccctgctcctgtcttccattgaggcagaaggtatccaaagcccccagcactcctgtgccaccca

SEQ ID NO: 186035 - DNA, 100 bp, Homo sapiens
tttctccctcgcagcgccccgcccgcccgcggctccccagccccaggccgggaggtggaagttaaacgagctgagcctcgggacagcaagagccaagcgc

SEQ ID NO: 186036 - DNA, 82 bp, Homo sapiens
cgcaagcatgctcagaccttcattgctctgtgtgccaccgaccactctcatctccaggaaccagctctctgtgggccacaca

SEQ ID NO: 186037 - DNA, 82 bp, Homo sapiens
ctacgtagataacagcttccgccaggcggtgatgaagaatccccccgaaaggaccccccagatatgttgatgatgtgatcag

SEQ ID NO: 186038 - DNA, 75 bp, Homo sapiens
ggtgtgacctccgcagccgcagaggaggagcgcagcccggcctcgggtgtcaaattgagaaccaggtagatcccc

SEQ ID NO: 186039 - DNA, 100 bp, Homo sapiens
ccagataatctctctattcaagagtttcaaagaaatgaaaatattgatgtcgaggagttttgtcaagcgcttcagcagcctgatgctaaagtttttaaaa

SEQ ID NO: 186040 - DNA, 82 bp, Homo sapiens
ccgattctcatctgcccataatcatggacacagccccaggatgtgcaggggaaagcaggcaggatgggagagtcgccgatag

SEQ ID NO: 186041 - DNA, 83 bp, Homo sapiens
ccctaatggaggtctccagtttcggagtgtacctcacagccttctaggatctccagagtggacaggaatctcacttggaggga

SEQ ID NO: 186042 - DNA, 75 bp, Homo sapiens
ctcaaatgcaagtccaagaggaggaggaggcggaggtccaagcggaaagacaaggcgcctctgtcgaagagcctt

SEQ ID NO: 186043 - DNA, 87 bp, Homo sapiens
ggatctgggcccccctggaatgttccagagctcaagcacggacatcagtgaggactgggagaaagactttgacttggacatgactga

SEQ ID NO: 186044 - DNA, 74 bp, Homo sapiens
gattctgaaagctggtcatatggcccaagaaacagatattttcaagaaaaagaagaggaaaggacaggaggaca

SEQ ID NO: 186045 - DNA, 75 bp, Homo sapiens
gtttgattttgatagcgatgaggacttcaatgctttcttcaactcaggttcaggagaagtggcacctggtggagg

SEQ ID NO: 186046 - DNA, 90 bp, Homo sapiens
gtgagagctcagcccattggcctatttttaagctgcagctcggatccgagagggcatggccgccctgcagtctgacccctggcagcaaga

SEQ ID NO: 186047 - DNA, 101 bp, Homo sapiens
gagctcaggacagggctgaggaaccatgtctccatccccgaccgccctcttctgtcttggctgaaggtgatgtggccgccctcaaccgacgcatccagctc

SEQ ID NO: 186048 - DNA, 76 bp, Homo sapiens
ctttggttcacaacatcatcaaatgctatatgttctcctttcagccaagacctttcaccagtgcaggggatagaag

SEQ ID NO: 186049 - DNA, 100 bp, Homo sapiens
agaagtactctcatggagacaaggtactgtttgcctgtgctgaggccctgcatgcgcatggctatagcagtgaggcctcccgtctcactgtggagcttgc

SEQ ID NO: 186050 - DNA, 88 bp, Homo sapiens
ggctacggactatgggcgaatagctctgaccacccggcgaaggagccaaaaacctgtatatcatctccgtgaaggggatcaagggacg

SEQ ID NO: 186051 - DNA, 75 bp, Homo sapiens
gcactttattatgcaggtggtctgtgaagccacacagtgtccagatacgaggaaatacatgctacaggatttaac

SEQ ID NO: 186052 - DNA, 51 bp, Homo sapiens
aaatgagtcgcatcttcaacccccatctctatgcagttatcacatgggaag

SEQ ID NO: 186053 - DNA, 101 bp, Homo sapiens
agggactccacggccagagccctggatgtcatttggaaaaacactagagacagacggctggcagctcctctggtgcaagtgtggtagctattgacaacaaa

SEQ ID NO: 186054 - DNA, 90 bp, Homo sapiens
aataaaagagccctgcaatttgaagatacatgagacagcagccaaacccccagtgattcgcctttgccagtctcatctcgtgtctgcttt

SEQ ID NO: 186055 - DNA, 98 bp, Homo sapiens
agaatgtgaaatttgttctcaagcacaaataagccaatggacacgtcagtgttatctgaagaaggaggagagccttttcagaagaaacttcaaagtgg

SEQ ID NO: 186056 - DNA, 74 bp, Homo sapiens
gccaggtcctcctggaagcctagaaatggtcaagctgaactagcagaaattccagaaggctatgtcccagaaca

SEQ ID NO: 186057 - DNA, 50 bp, Homo sapiens
atctccgattcctccattgcatatgtcattcccaaaagcaagttcgtctt

SEQ ID NO: 186058 - DNA, 100 bp, Homo sapiens
gggcgcgcgacgccatgggccggccgggcccagagctcctgtctctcagacgccagcatgtctccggacgccaccaagccgagccactggtgcagcgtgg

SEQ ID NO: 186059 - DNA, 100 bp, Homo sapiens
gaagaattttccaaatgaatttgcaaaacttactgtagagtgaagatgaagctggatgtagctcagttgatgaagaaagttacaagactctgaagcagca

SEQ ID NO: 186060 - DNA, 145 bp, Homo sapiens
agagaactcggcgccgccaaacagcccagctcgcgcttcagcgtcccggcgccgtcgcgccactcctccgaacttggcagtgtcataacaaaacagccaatgattttgtcttcgttagttcctcctctctgatagctacagctgg

SEQ ID NO: 186061 - DNA, 105 bp, Homo sapiens
catcgcatacagcatccggggacagctgagctggcatcagaagacctacgccttcagatttgcttgtaaatgcatcacgaagaggcagcccagaatgaagaaagc

SEQ ID NO: 186062 - DNA, 98 bp, Homo sapiens
gaggtagacgaagaagaggaagaaggtggggaggaagaggaggaggaagaagaaggtgatggtgcagatcccaagtctgtagtatgtgcattcttcaa

SEQ ID NO: 186063 - DNA, 80 bp, Homo sapiens
ctcgacctcgtgaagatccgcttcgccgttagagatgtttatgattacttccgagctgtcctgcagcgtgatgaaagaag

SEQ ID NO: 186064 - DNA, 78 bp, Homo sapiens
aaactgtgagtgactgctccccacacatagccaacatcgggcgcctggtagaggagctggagttcctacgcgtggcca

SEQ ID NO: 186065 - DNA, 113 bp, Homo sapiens
tcattgagctgctgagcagaagctgaaacacagaattctaagggcaggccggctatgtagtgtataagtccattccctatggctccttggaggaggtaatcccctacctgatc

SEQ ID NO: 186066 - DNA, 73 bp, Homo sapiens
tgaagatggctactctggagttgagcctccagaggtgaagtccccagtggagcctatggctactcttacatgc

SEQ ID NO: 186067 - DNA, 87 bp, Homo sapiens
cagctccctccaccttctcaagatcagtctcagaataactgaagtgaagtgatggactccgatttggagagtagtaagacgtgaaag

SEQ ID NO: 186068 - DNA, 100 bp, Homo sapiens
gaagaggatggcaaaggtggctaaggacctcaacccaggagttaaaaaggtgttggagcgggccggagagaagtagagtgggctgcgaggagaaggaaac

SEQ ID NO: 186069 - DNA, 100 bp, Homo sapiens
agctgggagtaacaacacccgttttggcattgctgctaagtacatgctggattgtagaacttctctctctatctccgcaaatgacttcattgccaagaag

SEQ ID NO: 186070 - DNA, 96 bp, Homo sapiens
gcatcggaaatcagctctacagttcaggtcgctttgctgttcgtgatatgagacagacagttgcggtgggtgtcatcaaagcagtggacaagaagg

SEQ ID NO: 186071 - DNA, 100 bp, Homo sapiens
atgacctagatggaacacatgctctgatgcacaggagaaaacgacgctccacacctttaacttcttccacacttccttcacaagcaacagagaaaagctc

SEQ ID NO: 186072 - DNA, 89 bp, Homo sapiens
acccggtcccaggggaggcccccacctccccttctattgttctgtggcccagccgctatgtgaaacagcctttacctgatgagtttggc

SEQ ID NO: 186073 - DNA, 50 bp, Homo sapiens
ggggcctcttccaggacttcaacccgagatgccagaccagtttgaccagg

SEQ ID NO: 186074 - DNA, 94 bp, Homo sapiens
ctgctccgtggagatcgtcccgcgcctgccgtaagcccagaggtctccaccccacgggaggaaggctgaggccaagaccccggaagagatggac

SEQ ID NO: 186075 - DNA, 75 bp, Homo sapiens
gaaggcatggaagtctacgggggcgagaatgtggagcttgggatcaggtgccctgaaactctaatctcattgcct

SEQ ID NO: 186076 - DNA, 90 bp, Homo sapiens
ccaggatgtgagcaacacgggaccggtaccttaacatggggaatcttcttaaagttttgacatgcacagaccttgagcaggggccaaatt

SEQ ID NO: 186077 - DNA, 100 bp, Homo sapiens
ttcccatcctactgcagacgttatcggatgaatcggatgaggtcaaaatgcagatcttcgtgaaaacccttaccggcaagaccatcacccttgaggtgga

SEQ ID NO: 186078 - DNA, 100 bp, Homo sapiens
gtggccccgtgtcctgcaggtattgggagatccacagctaagacaccgggacctcctggaagccaaaaatggaaaatgtttataggaggccttagctggg

SEQ ID NO: 186079 - DNA, 101 bp, Homo sapiens
tcggatgatgccttcaatactacctttatttccaccataggtcgaggcttgaagagtggagagaactttaagttgttatatgacttggcagatcaactaca

SEQ ID NO: 186080 - DNA, 115 bp, Homo sapiens
tggcgggcagcgggcccacggactcactgcagggcatcatcctgaccggctggcagagaaatgtgatacctcaaagcacaaagtgctggtagtgtctgtgtgtcctcaatctttg

SEQ ID NO: 186081 - DNA, 75 bp, Homo sapiens
tagaggatgacttctctaatcagttacggcaatgattcgtgtgaataccttctctcaagtggcagatttcttgga

SEQ ID NO: 186082 - DNA, 74 bp, Homo sapiens
cgctatcttccctggatttttcttcaccttttccttactcatgagccagctggagaatgctggaggagacctta

SEQ ID NO: 186083 - DNA, 100 bp, Homo sapiens
ctcagggggaacaaaagcatctccatgagtgtggctgggtcacgacaagggtgtgggctcccgcctggatggtcttcgaaaccggggcccaggttgcacc

SEQ ID NO: 186084 - DNA, 75 bp, Homo sapiens
tttttcacccgagggtcggctctaccaagtaggtcaaagttaatcgaagtgagtgctgttcagcccaacattgcc

SEQ ID NO: 186085 - DNA, 80 bp, Homo sapiens
acaccaggccggcaggctgagaaaagcgagaccgcgtgcgaggaccgcgtccgtctccaagagagtatgaagagagtgcg

SEQ ID NO: 186086 - DNA, 75 bp, Homo sapiens
gcaaaaaccatcagtgtttgggaatgattctgatgatgatgatgagagagaccaggagcactacagagaatttcc

SEQ ID NO: 186087 - DNA, 75 bp, Homo sapiens
cgacatgttccaggtcccggatagcgagggcggccgcgccggctccaggaaaaccaattctgtgtcctcggagga

SEQ ID NO: 186088 - DNA, 100 bp, Homo sapiens
ctgacccgtcctggttcctcttacttcaatttgaacccatttgagggttccgagtctgaggaagacataaccttgtgcctgcctgcccacctctctctct

SEQ ID NO: 186089 - DNA, 90 bp, Homo sapiens
ctacagaaccgtcccaaaatatggcaaagaaacctattctgaggtgaggatacaactagaagccagcagtctacaggctggaagaaggcc

SEQ ID NO: 186090 - DNA, 90 bp, Homo sapiens
aaggaacttggagttaatggtctaatttatgatagatgaggaaaatgaggcccaaagaagtgatgccacttggttaaggtcccagagcag

SEQ ID NO: 186091 - DNA, 82 bp, Homo sapiens
gtccggccctctggtacagaagatgtcgtccgagtatatgcagaagcagactcacaagacccatggatgaaggaccagatct

SEQ ID NO: 186092 - DNA, 75 bp, Homo sapiens
gatggtgcaatgttcaaagtactcaagatgaatttgaggccctggccaacgtcaacattgggagcctcatctgca

SEQ ID NO: 186093 - DNA, 75 bp, Homo sapiens
tggagacagccatggagttctacttagagactctgatgccagtatggactggagatgatgggagccagttggata

SEQ ID NO: 186094 - DNA, 83 bp, Homo sapiens
tgaaaattctgtataatacttcgcaagtggacccccaaaagtacaagggcatatttaacggattctcagttacacttaaagag

SEQ ID NO: 186095 - DNA, 90 bp, Homo sapiens
tgcccgttcctatgtcctgcgggcacggaggtcttccccctccttggctccatcctgcatgaccccaacatcttcaagcacccagaagag

SEQ ID NO: 186096 - DNA, 75 bp, Homo sapiens
tacagaaacctcgtctccctgggtcggattgtttgtgctgaacgaactgtcctcttgcttcagaagccccttttg

SEQ ID NO: 186097 - DNA, 74 bp, Homo sapiens
ctggattcgtggcgccacaagctcattcactgtgtagggagtgcatccgccccaacccttttccccctcgtctc

SEQ ID NO: 186098 - DNA, 100 bp, Homo sapiens
gtatcgtcgagaagcctatcatcgatatgaaaaacagtagctccgtatcgaatacattgacaaatggatgtgtcatcaatggacatttggacttcccctc

SEQ ID NO: 186099 - DNA, 100 bp, Homo sapiens
gtctggtccattgctatcagcccattactcagatctgagtgggacatacttttgaaggatgtgcaatgttcaatcataagtgtgacaaaaactgacaagc

SEQ ID NO: 186100 - DNA, 100 bp, Homo sapiens
ggctctggtcttcgatgcacaggagtggccgttatggaacgcagatatcggatttggagagacactgccaactggctggagattaatccggacactggtg

SEQ ID NO: 186101 - DNA, 100 bp, Homo sapiens
gtgatcttgttcgtcaccccgctcctgctgctgccactcgtcattctgatgcccgccaagctcctgcccctcctaaagctgaagccaaagcgaaggcttt

SEQ ID NO: 186102 - DNA, 97 bp, Homo sapiens
tggaataggtgtatcaagtaatggtgcaaagcctgaagggcaagattcttgccaagagaattaatgtgcgtattgagcacattaagcactctaagag

SEQ ID NO: 186103 - DNA, 87 bp, Homo sapiens
ggaaaaagaacgggcccttggaagtagctggaggaggttctgggggaagagaagctgaaggagatactgaaggagcgggaacttaaa

SEQ ID NO: 186104 - DNA, 96 bp, Homo sapiens
aagtcaccattggagctcatcagactgaccgtgtcttacatcagttcagagagacgagtttggcgcacagacttgtggcacgagaaggctcggccg

SEQ ID NO: 186105 - DNA, 100 bp, Homo sapiens
ctcaacttcgaagtgtgtgccactgtttataccagttttcagataactattatcgtgcagaaatgattgatgccctggccaactctgttacacctgcagt

SEQ ID NO: 186106 - DNA, 100 bp, Homo sapiens
gcaagcctaaacgtcagaaatccagtactaaactttctgagcttcatgacaatcaggacggtcttgtggacatccaggcctgctcggccgcctggaaggc

SEQ ID NO: 186107 - DNA, 100 bp, Homo sapiens
gacaacaccatcttctttacaacctatgcaaatggctcctgcatggtggacttgctttgtgaagagacagttcatgaacaagagtctttcaggacctgga

SEQ ID NO: 186108 - DNA, 75 bp, Homo sapiens
acgggaggtgaatttccatgtcaacatagtcctggaagatgagaatgtgcctactgctcctgatcctccaagtca

SEQ ID NO: 186109 - DNA, 100 bp, Homo sapiens
agttcgggccggctgtcctggcgcgctcctgagaaccatgtctatgcccaaaggtagagttctggataaaaacctggatgaggaagggtttgaaagtgga

SEQ ID NO: 186110 - DNA, 82 bp, Homo sapiens
cgggaacctggagggcctcaatgatggcggcgacttccctagggagctgctcaaggtgagaagccctaccactgcaactggg

SEQ ID NO: 186111 - DNA, 100 bp, Homo sapiens
agacgttcctgtaaaagaggacaccaacagtgtggtggagaaagcaatggatgaaatcaaatcccaagatatgagatcctgactccaaactccattccca

SEQ ID NO: 186112 - DNA, 50 bp, Homo sapiens
agtggctaaatggctccctgattcatgggttctcggaccagcagtgacct

SEQ ID NO: 186113 - DNA, 100 bp, Homo sapiens
tgatagtgaagtctctgactatgactgtgatgatggaattggtgtagtatcagatccaggatgagaagactgataaaagaagaagctagctgaacagctg

SEQ ID NO: 186114 - DNA, 100 bp, Homo sapiens
tggagatgatgatgaagatattgatgacgccgaagaacagttgagaattgttgaagaacaaagaaagattcatgaggaaaggatgaaactagaacaagaa

SEQ ID NO: 186115 - DNA, 100 bp, Homo sapiens
ggactgtgctgaggagaccaacagtgcagtctgcagagacttcaacatccctggcttcccgactgtgaggggtagggctctacttcactgggcctgtgat

SEQ ID NO: 186116 - DNA, 75 bp, Homo sapiens
cgcatcactcccagctgcgcaaagcttgcgaggtggcgttagatatgaggccccaggattcctggcgaggtcctc

SEQ ID NO: 186117 - DNA, 51 bp, Homo sapiens
catgactttcatgaaggcgttagagctgagtgcccatcatcattctcctct

SEQ ID NO: 186118 - DNA, 100 bp, Homo sapiens
gggcgcccggcgcaccgtggggactacatatcccagcatgccgcggcgccggcggagcgaggcgaggcgcgcttcggaaccaaaaagaagcttcccagag

SEQ ID NO: 186119 - DNA, 100 bp, Homo sapiens
tgcaaaactgcctccagatggaaggatatctcacgaatttgctttggctcctagaacattgccggaaacacaaatacctctccagctctggggaggtctt

SEQ ID NO: 186120 - DNA, 100 bp, Homo sapiens
ggcatctctaggtaccatccctgacctggtcctcatgctgccgaggctgttgctgttgatctgtgtcggagtctagccagtcagaggcgtctgtccggag

SEQ ID NO: 186121 - DNA, 73 bp, Homo sapiens
agctgtttttgaggatcctgctccacagagaatgctctgcacccgttgattttctcaagcaagacctccccca

SEQ ID NO: 186122 - DNA, 75 bp, Homo sapiens
agcagcccaagcgccttccctcacaaataaactatcaatcttgcccagactggagaaaggactgcagcaacaacc

SEQ ID NO: 186123 - DNA, 74 bp, Homo sapiens
acctctatgccgacatcgacgccgcctggcaggccctgcgcaccagtctacccatggtgttggaatgaatggaa

SEQ ID NO: 186124 - DNA, 90 bp, Homo sapiens
ggatgttgtgagccgggtcgctgcggccgaggctccggccttatgtttgatcatcggccaaggtcctggcgagaactgcctctgcggcta

SEQ ID NO: 186125 - DNA, 100 bp, Homo sapiens
gctgtcatgtacgtgtgcaaagtggcggccgagtggaggagcaccttccacaaggacgtggttgtcgatttggtgttggagcgggccggagagaagtaga

SEQ ID NO: 186126 - DNA, 100 bp, Homo sapiens
tcgcgtcgcgcccgggaggaaggaacgaggcaaggagctaaagcagcgtgcgttcagccctggggcacgtgtggttctcaaatataggcattctgatggg

SEQ ID NO: 186127 - DNA, 100 bp, Homo sapiens
gcaaccccagggacctggaaagacagacaggatggggaggaggttcttcagtgtatgcctgctgtaagaaaagcctggagtgcacgaagttgtgcctacc

SEQ ID NO: 186128 - DNA, 101 bp, Homo sapiens
ggtgctcttgctccagaaagactcactgctcacagctgcccagctgaaagccaagccgccgagacctgaactttgagcgtggaggtgatatcaccctcagg

SEQ ID NO: 186129 - DNA, 98 bp, Homo sapiens
ggcccttgtggataagcacaaagtcaagagacagcgattggacagaatttgtgaaggtttacccaaggtccagcctagcccctaggcaccatgtcgga

SEQ ID NO: 186130 - DNA, 107 bp, Homo sapiens
acaaatcaaccgccttgaggatctttctgcccgcctgagtgatcttgaaatgaatagggagtgcatccgccccaacccttttccccctcgtctcctgtgagaattcc

SEQ ID NO: 186131 - DNA, 101 bp, Homo sapiens
ccaggctgtcatataactcctgagaatagtggttcttaactctgttcaaaacattatttgtggctggagaacgatgtgatgtagagaccctggaatggtcc

SEQ ID NO: 186132 - DNA, 75 bp, Homo sapiens
gagcatcccaggacctaccagaatctgagtgttgaatttcatgaaagaggaaagaatcataaggaaaatgtggca

SEQ ID NO: 186133 - DNA, 82 bp, Homo sapiens
tggagtcctgtaggcaaggtcttacctgaatcagggcgccctgcgtccggcagaggaggcgagcatcccgctcaggtgatga

SEQ ID NO: 186134 - DNA, 75 bp, Homo sapiens
attctctgaagcctggaaacgaggcactcagttggaagagtccagcaagggtgtacagcaagctgtgattcctgg

SEQ ID NO: 186135 - DNA, 75 bp, Homo sapiens
ccacacaggagatccaggtcaccagcatccactggagctacaagaataccaaacttgccagtagggagaagggaa

SEQ ID NO: 186136 - DNA, 100 bp, Homo sapiens
caccactcaacagtcaaagtgaagcaggaacgtcaaggtcgtgggaaataaaaggcagttctacacagactgcagcaacggttgcatctgcatatcctaa

SEQ ID NO: 186137 - DNA, 100 bp, Homo sapiens
gaggaagagaactactcctttttacctttggttcacaacatcatcaaatgtgtttgaaagatgtatggtgatcttgaaacctccagacacaagaaaactt

SEQ ID NO: 186138 - DNA, 100 bp, Homo sapiens
agaaaaatagggatcgtccaacccgagatggagtctggctctgtcgcccaggctgcaatgcagtggtatgatctaggctcactgcaacctccacctcctg

SEQ ID NO: 186139 - DNA, 100 bp, Homo sapiens
ttcccggctccgtggggccgtcttcccggcgagtccgcgacggtcgccgcccacggcgagcctaaattaacaatggcgaaatgcaggcgaaatgtggaaa

SEQ ID NO: 186140 - DNA, 75 bp, Homo sapiens
cagaagaaatcaacctgctcaccggggagtctgatacacagattgctttggattgcccatctgagctctgccgat

SEQ ID NO: 186141 - DNA, 83 bp, Homo sapiens
cttcgagcgccgcggacgcgtcatcgagtgtgacgtggtgaaaggctatgactttgcagccgtcctggagtggttcgcggagc

SEQ ID NO: 186142 - DNA, 100 bp, Homo sapiens
agcctcccgagtagctgagactacagtgattctaccagaaaggaatgaagaacagaaccttcaggaattgagtcacaatgcagacaaatatcaaatggga

SEQ ID NO: 186143 - DNA, 75 bp, Homo sapiens
gaagacggttccaaggagagtaatgatctggctaccactggaagtctggcaagttgatgagcagatagatcacta

SEQ ID NO: 186144 - DNA, 110 bp, Homo sapiens
tttgtcgcgccgtgacctgcaggtactgacagatccgtagggaggacaccgtgacttcccggacgctgggaaatgcgccgcgcggtgaggttctctagtccacgctcgca

SEQ ID NO: 186145 - DNA, 95 bp, Homo sapiens
ctggcccgcctcctggcacaccccagccccggccacatgaagacctacagatggtgaatatctccctgcgagtgttgtctcgacccaatgctcag

SEQ ID NO: 186146 - DNA, 100 bp, Homo sapiens
ggtggttgttcagcctccccaggtgaactcgaagtggagcaaaaggtgacagtcacagcttagtagggccaattcctgtccccccagcagcatggcatcg

SEQ ID NO: 186147 - DNA, 50 bp, Homo sapiens
gccagccggagctcttgtatatgagtgtgaaatatgagttggcgaggaag

SEQ ID NO: 186148 - DNA, 100 bp, Homo sapiens
ccgagatgtctcgctccgtggccttagctgtgctcgcgctactctctctttctggcctggaggctatccagcaacctgcaaccatggtcgtgccactagc

SEQ ID NO: 186149 - DNA, 80 bp, Homo sapiens
gatctcatatcttcacttggcaaactcaacaagtttggaaattttagcattcaggtgccaggaatgcagatgggacagcc

SEQ ID NO: 186150 - DNA, 82 bp, Homo sapiens
ctcggcggtgcgtccctgggactctgctccgtgaggctcttgtcaggatggtgaagctgttcatcggaaacctgccccggga

SEQ ID NO: 186151 - DNA, 75 bp, Homo sapiens
cattgacctctacgagctggaggaggagtattactcgtccagccgccaggcccccagcactgagctcagtaccag

SEQ ID NO: 186152 - DNA, 80 bp, Homo sapiens
actctgcaatagatacatggagcccatcagaatggcagatggcttatgaaccacagaccaggatggagcagagcccagcg

SEQ ID NO: 186153 - DNA, 75 bp, Homo sapiens
ttgccctgtctcctcgcagatgagaccaaactgcagctggaatacccagtacagttctgcttactacacttcaag

SEQ ID NO: 186154 - DNA, 96 bp, Homo sapiens
gctcaacaacatccgggttctcctgacagagtgcacagtggacgccgaagcctttaatctcagagcactgcagtttcctcctgaaggctggctccg

SEQ ID NO: 186155 - DNA, 100 bp, Homo sapiens
gaaaggaaacaaaattcgatttgcaaatcattcagtgaatcccaactgttatgccaaagcctattactagttctccacccaaatggatggctgagataga

SEQ ID NO: 186156 - DNA, 83 bp, Homo sapiens
tctgggccgccgtccccgggaaaacgttcgtcaacatcacgccatccagtccaatggatcagatgggcaagatgagacctcag

SEQ ID NO: 186157 - DNA, 75 bp, Homo sapiens
tttgtgctgactgctgagaatctgtcctggtacaaggatgatgagaacaagctgtttgaaagcatccaggaaggc

SEQ ID NO: 186158 - DNA, 75 bp, Homo sapiens
aaagaacctcttctgacctttcgccttaacagagcctttatggaagcagcagactgcttttggcttctggatgcc

SEQ ID NO: 186159 - DNA, 75 bp, Homo sapiens
gggaagcctcctgccgagataaagccaccacgtctggactacgcccaagcaaggtttgatgcctatttccaccag

SEQ ID NO: 186160 - DNA, 100 bp, Homo sapiens
agacagaagccaaacaggaggaggaagtggagggttctttcagagcacggcttcggccccatcactaccgacatccgggagggacagactttctactatg

SEQ ID NO: 186161 - DNA, 100 bp, Homo sapiens
ccaaggcctggttgcagttcccctggaggactttgacccatactatttgacgcagaaagagatcatgaatcagacagataaaaatcaacaagaaatccca

SEQ ID NO: 186162 - DNA, 97 bp, Homo sapiens
ctggttggcgagaatcctgcaagtcactcctatgtcctcaacaaaaccagggcagctgcagttgtggcaggtctttcccgcggtgacttcccttggg

SEQ ID NO: 186163 - DNA, 73 bp, Homo sapiens
tctccctcaggatcagaccgtagcccttccggaaacctccatgatgccatggacaatattaccaggcagaacc

SEQ ID NO: 186164 - DNA, 83 bp, Homo sapiens
gtgcagggaagcaactgcagagcccgttttacggagaagacttttactgtgaaattcctcggagctttcgtcacctgtccttc

SEQ ID NO: 186165 - DNA, 100 bp, Homo sapiens
aatctgcctggtgagttcaactctgggaatcaaccaagcaacagagaaaaaaacagataccgagatattcttccatgcaggatggggaagcagaatagca

SEQ ID NO: 186166 - DNA, 100 bp, Homo sapiens
cccaaagatcattctgcctgggaaagaaatgaaagtctttccaatgcagtatctggagtccatctttcaccatcttctcctgagattgtactggaccgtg

SEQ ID NO: 186167 - DNA, 100 bp, Homo sapiens
aggaggaaacagctggctaagctcatcattgttactggtctgccatcatggatgttctcgcagaagcaaatggcacctttgccttaaaccttttgaaaac

SEQ ID NO: 186168 - DNA, 98 bp, Homo sapiens
ataccttttctggaggaatcaccttgtggaagccaaatattgatgagtgtgaaaagaaaaagagggaagactatgaaagtcaaagcaatcctgttttt

SEQ ID NO: 186169 - DNA, 110 bp, Homo sapiens
ttctttgcagccctggccctgcggcacgccttcacctacaaggtctatgctgacaagaggctggacgcacaagggtgtccgcaatgttgccagtgtctgtctgcagattg

SEQ ID NO: 186170 - DNA, 78 bp, Homo sapiens
ggcaggcgagcgcggcggcggcggcgagcgtgcacctggctgagcacgcagacactgtgcagctggtgtccggcttcg

SEQ ID NO: 186171 - DNA, 83 bp, Homo sapiens
gcggtcggtgacagcctcaagggcttcagcaccgcgcccatggcagagccagaccgttctccccatgacaccacctgaacgtc

SEQ ID NO: 186172 - DNA, 75 bp, Homo sapiens
aagacccaggagaagccgcccaaagaactgaatatatacagccctgctctgggacacacctccattggatttaaa

SEQ ID NO: 186173 - DNA, 96 bp, Homo sapiens
gagacaactatttttgaggtatctgaggctaccccacagcactctctggcattggtgctgctggagagagagctggccgagctgagcgccgagctg

SEQ ID NO: 186174 - DNA, 100 bp, Homo sapiens
gattgttcctaaaccagaagaggaggttgcccagaagaaaaagccgttcctgagcatgctgcccgcctgcagcgcttggcccagatccacattcagcagc

SEQ ID NO: 186175 - DNA, 49 bp, Homo sapiens
cgcccaagtccctctactcgcgaggttatgatgtgattgctcaagccca

SEQ ID NO: 186176 - DNA, 98 bp, Homo sapiens
agcaaaacaaagtagaataagaaatatttcaaatacagtaatgaaagtaaagcagatcctgggcagaaggccttgaacagtttgatgtctttgatgaa

SEQ ID NO: 186177 - DNA, 90 bp, Homo sapiens
ttcatcacagtcaacctggactcacagaatttcaaggtttcaaagacaacctccacgctgtgttctgcttggctgagaactcggtggggc

SEQ ID NO: 186178 - DNA, 75 bp, Homo sapiens
caaaaaactgttagagctgtcggacctcgcagtggcaatgagaagtgaactactgagttcttcattatgtctgat

SEQ ID NO: 186179 - DNA, 96 bp, Homo sapiens
ccagctctgcgccgatctatgcacgcagatgctggagaagtccccttatgaccagaaaccgaaacttcattgccccttcaatgtgggaatccagcc

SEQ ID NO: 186180 - DNA, 100 bp, Homo sapiens
tcggatggtgaactcattagaagagatacaactcgtcaacgaatcaaattcagtgatgacagagtatgcaagagtcaccttctcaactgttgtcctcatg

SEQ ID NO: 186181 - DNA, 82 bp, Homo sapiens
cctggccggctgctggggccggggaggagagccagcttcctgcctgacacagctcacttcaagaagtgcacaatgtcagaac

SEQ ID NO: 186182 - DNA, 82 bp, Homo sapiens
aagcgaagaaccttttccctaatacgtacctcattgtgggagctgctcagataaagaatttgatgagccagctaggaactaa

SEQ ID NO: 186183 - DNA, 75 bp, Homo sapiens
gagaaaaggcctaagaattttggcattgggtgtcaaattgagaaccaggtagatccccaccacctacagtaaaaa

SEQ ID NO: 186184 - DNA, 102 bp, Homo sapiens
caacagggtccgggacagggatgtctacctggtaatagaggacttgaagcagaaagcaagtgaatacgagtcagaaggtatatgccctcattttgcttaaga

SEQ ID NO: 186185 - DNA, 75 bp, Homo sapiens
ccagaagtagctgaatgtgttactccattgctgaggagtgacacttccctctgtgaccatgaaactctgggtgtc

SEQ ID NO: 186186 - DNA, 98 bp, Homo sapiens
gggcgaggctggccggagcctgctggagtcgccgggactcaccagcggcagcgacaccccgcagcaggacagtggaaatggatattgttgaaaaactg

SEQ ID NO: 186187 - DNA, 75 bp, Homo sapiens
cctcagcctcctgattagctgggattacaggccctctactggtctatccgcagcgagaagctcgagtgggccgtg

SEQ ID NO: 186188 - DNA, 52 bp, Homo sapiens
tggtggagaccaaattttgaacctcctcagatcattgagcgcttgaagctgg

SEQ ID NO: 186189 - DNA, 100 bp, Homo sapiens
tagaagtctgccagatgtaagattagaaggatcagaaaagcaatgttgacttcaaagttatccaaagaacaaacactaataaaacaacacaagcaagtgt

SEQ ID NO: 186190 - DNA, 80 bp, Homo sapiens
cagctcacctgagagacggagccccggctcgcccgtgtgcagaggtggagctggccctgctacagcgctcctaccaggac

SEQ ID NO: 186191 - DNA, 50 bp, Homo sapiens
accatgtgatgcacctgctccaggcctccaagcctttgggagtagcttct

SEQ ID NO: 186192 - DNA, 98 bp, Homo sapiens
gagcatgggtgccaaggagtcacggatcggattcctcagctacgaggaggcgctgaggagaggttaccattaagaatatcgaaagggagctcatttgc

SEQ ID NO: 186193 - DNA, 90 bp, Homo sapiens
atcagaagatatcttctctttgcaagacagtttaaacccaaggccagaagcggactcctagaagaggggagcagcaaggatggaatgaca

SEQ ID NO: 186194 - DNA, 101 bp, Homo sapiens
aaattatgccacaaatttgaaagacaagagttctttagtttcatctctctataaagttatccaggagccacaaagtgagcggagtttaagagagctgtgaa

SEQ ID NO: 186195 - DNA, 88 bp, Homo sapiens
ggaaatgaaaggagaaattcaacagtcgcttggagcctgggttttgcttatatcaccttttgccatgatagcatttctttcattggac

SEQ ID NO: 186196 - DNA, 83 bp, Homo sapiens
cgtcatgagaggcctggacaagatggagtcagacctggaggtggcggacaggcagatcgggagcggtgccgagaaaaatttcc

SEQ ID NO: 186197 - DNA, 100 bp, Homo sapiens
ccccggcactgcctggctgcgagcacatgatggcgatacgggagctcaaagtgtgccttctcgggggaacctcagaacctgttctggatccacagcaaat

SEQ ID NO: 186198 - DNA, 114 bp, Homo sapiens
gacgaccaccaccaccgcggtgactgccgccgcggcctcggacgactcgccttcagaaggggtacctgtctttccttattccctcatccttagtggatcatttgtatctcctgc

SEQ ID NO: 186199 - DNA, 73 bp, Homo sapiens
cgccagctgctccggagatacgatttgttcagctggggcagagtcaacataaacaagacaagaatagccagca

SEQ ID NO: 186200 - DNA, 100 bp, Homo sapiens
gcagcgcagtgcagatccgcaggcgcaaggcttcaggcgacccgtactgggcctactctgggtatttgaagtataccatacaactgttttgaaaatccag

SEQ ID NO: 186201 - DNA, 83 bp, Homo sapiens
gggatttggaagagtttttctctacagtaggaaaggtgggaagaagagcgctatcctgaaggcatcaagtggaaattcctaga

SEQ ID NO: 186202 - DNA, 75 bp, Homo sapiens
gccaccaccacggagcctcttccagaaaagacacaggagagccttcttcccaagggattgttgaagaaacttctg

SEQ ID NO: 186203 - DNA, 73 bp, Homo sapiens
cctggtgtcggtggttagtttctgcgacttgtgttgggactgtctctagtgatccctgaaaagttccagcata

SEQ ID NO: 186204 - DNA, 95 bp, Homo sapiens
cgggagatcccaggcggtgacagagtggagccatggctagagcaattctgtggtgttcttggtcacacatttatggagtttctgaagggcagtgg

SEQ ID NO: 186205 - DNA, 100 bp, Homo sapiens
gctgaagttcaggcagcgggagcgaggaggatcagtgtgcgtgtgaccaccatggatgcagagctggagtttgccatccagcccaacaccaccgggaagc

SEQ ID NO: 186206 - DNA, 101 bp, Homo sapiens
ggagcccctacgtggtggagtccacaggcgtgtacctctccatacaggcagcttcgggttttcagagaaagatgctgatgaggtgaaaggaatttttgtag

SEQ ID NO: 186207 - DNA, 101 bp, Homo sapiens
gctgatggtgatggagattttgatgtggatgatgccaaagttttattagaattttccagttcatatgaagaggtgatctctcaaataaatacgtcattacc

SEQ ID NO: 186208 - DNA, 98 bp, Homo sapiens
aggaaccctcgcaagggcagaaggttgaagaacaggaggcgtgacgcctgcttcacatctctaatgaacaccctcatgacgtcgctaccagcactagt

SEQ ID NO: 186209 - DNA, 75 bp, Homo sapiens
gatttcactggagctattaccctgttggagagaatggatcttggagaatgtctgaaagtccatgacctggcttta

SEQ ID NO: 186210 - DNA, 101 bp, Homo sapiens
ggatttgagagcccgtctgacaatagcagtgctatgttactgcaatggcatgaaaaggttcaaaccttgtactactcagctgatcacaagctgcttgatgg

SEQ ID NO: 186211 - DNA, 50 bp, Homo sapiens
tgttgatgaagatgaaagagactgcaggtccctacagtgttcaaggtcac

SEQ ID NO: 186212 - DNA, 83 bp, Homo sapiens
gtgggaagcatgtcgtctttatcgctcagaaagacgagaatccaggacttgaatcgtatcttcccactttctgaggactactc

SEQ ID NO: 186213 - DNA, 100 bp, Homo sapiens
gagtttgtagcctattggaggaaaacacaccaaggacttcctcgttctgcccatcttcctaacaaggctatggctgataacagcagtgatgagtgtgaag

SEQ ID NO: 186214 - DNA, 74 bp, Homo sapiens
tggatttagtggacggcatctttttgaaccaaattatgctgcaaatcacatcaggtccacccatctggccgggc

SEQ ID NO: 186215 - DNA, 50 bp, Homo sapiens
cggcgccttgcggagggaccccaacttgtgcaccatggacaattttgctg

SEQ ID NO: 186216 - DNA, 130 bp, Homo sapiens
gttaaactacagaacaacatatcgtatcagatggcagacatacatcatttaaagggccataggaaaaggatacagagtagagtttcatgaacctgaaacttggtggaaatttgatcctgaagaattagaa

SEQ ID NO: 186217 - DNA, 82 bp, Homo sapiens
gagagaagaacaaatggaacgcttggaagcccttgcaaactgaaaccgtgtcagttcagtcttcggtattggggaagggtgt

SEQ ID NO: 186218 - DNA, 102 bp, Homo sapiens
aaaatcaagtgtgtggaaatagtgaagaatgatgatggtgtcattccctgtcaaaataagtatccatttcagatccttgccagctcctaaaacctatggtag

SEQ ID NO: 186219 - DNA, 100 bp, Homo sapiens
ggctggggctggaggggaggaagaactgtcaagtaatccacctctggctaccatccttattcctcctcatgctcggattcaagcagctgcttcaaccccc

SEQ ID NO: 186220 - DNA, 90 bp, Homo sapiens
tgccttgctcattttgcgcccagaagaattgggttttcttcgctacttgaaacaatccaagctccataatgggagaagtaaagaacaaag

SEQ ID NO: 186221 - DNA, 49 bp, Homo sapiens
agtcttctagctaaattagaaggtttgtaagtggcagtcgtgatgggac

SEQ ID NO: 186222 - DNA, 101 bp, Homo sapiens
cctcaggcctgcccagacggtgttcaggtaagattggggaagatgccaggtgatagaatccaccctgcctctgacagcatccaatctggagcaaaggctta

SEQ ID NO: 186223 - DNA, 75 bp, Homo sapiens
tcggtggagttctgctcggcgtgcgcccggaaggcgtcgtcttctcttaaaatcactgccagtgaaagatgtaga

SEQ ID NO: 186224 - DNA, 100 bp, Homo sapiens
gccgcgaacttggtggccagcgccgcgcccggggccgtgcgctctcgggccactcggccgcaggcttactcaattccagatatggccgaggatgggttga

SEQ ID NO: 186225 - DNA, 98 bp, Homo sapiens
gttgattgcaagtggtacatccgagcacctccacggtccaaggataacaaagccattgacctttgccgattgtgttggggacgaacttcctttaggat

SEQ ID NO: 186226 - DNA, 100 bp, Homo sapiens
ggggaaaggaggagctggagacagattgtaggaccgagcgcgggcaggcgggaggcaacggagctaccagccgaaatgacatcagatgtaccatcactgg

SEQ ID NO: 186227 - DNA, 75 bp, Homo sapiens
aaaagtttcttaaacttgtggcctcagaacagttggtttctaagcatgaattgaggaacagaagaagcagagcag

SEQ ID NO: 186228 - DNA, 74 bp, Homo sapiens
cgcccaccgcgccgcatccatgttcgactcatgatggagcagtccaagaagtcctccctcatggtggcccgcag

SEQ ID NO: 186229 - DNA, 82 bp, Homo sapiens
tgtgatatcacagtccccgatgcctatctgatcacaactggtcagcccaaggccaaccccactgtcactctgttcccgccct

SEQ ID NO: 186230 - DNA, 82 bp, Homo sapiens
ctctttgatgtactactataatgggaaagcgcatgttggcagataaattgaacatgactccagaagaagctgaaaggtggat

SEQ ID NO: 186231 - DNA, 83 bp, Homo sapiens
ggccaagggacaatggtcaccgtctcttcaggaaagatgaatgggagggctgattttcgagagccgaatgcagaggttccaag

SEQ ID NO: 186232 - DNA, 75 bp, Homo sapiens
ctcaatgcaagaagttaagaagctctttcgaatcaagttgtccccaacagtggttcacttagcagccatggaagg

SEQ ID NO: 186233 - DNA, 73 bp, Homo sapiens
gggatctcaggtcctcgggggcggcggccacgccaaggacggtagtattattgattccacagaatacagccaa

SEQ ID NO: 186234 - DNA, 75 bp, Homo sapiens
ggggcgactcaggcctgtccagccggggcaagaaggagtcagtggatcggtggggaaaatgctgcttaccctggg

SEQ ID NO: 186235 - DNA, 139 bp, Homo sapiens
atctcggtcagtagctggatcctttgataatgaaggcattgctatttttgcacttcagttcacatactatttatggtaccttctccaggcaaattccgttcccctgcagcaccatctcctttggctcttcggcaaccag

SEQ ID NO: 186236 - DNA, 74 bp, Homo sapiens
aacaaatgctgctgctatgaatatgggtcgaccattccaaaaaaatcgatgttgaaagtgtgatgaacagtgtg

SEQ ID NO: 186237 - DNA, 100 bp, Homo sapiens
ccatctcagaacagaagggtgggaagccagagccgcctgccatgccccagccagtccccacagcataacagggccgtaggcagccatggcgcccagccgg

SEQ ID NO: 186238 - DNA, 78 bp, Homo sapiens
ccccaaggacctgacagccctgtccaacatgcttcccaaagctccgggattgtggagggctgcgggaggtggaggtga

SEQ ID NO: 186239 - DNA, 100 bp, Homo sapiens
ttggcaaaccagatatatgacttgatggcgttcaggaagtggcttatattcactcaaaccagaatgtaattggatcgagcaaagctgaaaatcacatgag

SEQ ID NO: 186240 - DNA, 51 bp, Homo sapiens
gtcgggagtgatcacctaccctacagagacagaagagatgggtgatgaaga

SEQ ID NO: 186241 - DNA, 75 bp, Homo sapiens
cttcaggctatggccagagcagctattcttcttatggccagagccagaacactttgtgtccctggtgatgttgga

SEQ ID NO: 186242 - DNA, 96 bp, Homo sapiens
gcggcagcggttggaggcttcgcccggctttgcagcggggacttcggcggcggcgcctcaggcacctcggcccggaccctctttcccagctgcccg

SEQ ID NO: 186243 - DNA, 75 bp, Homo sapiens
atcctccgggaggtggcagccagggagagccagcacaacaggcagctgctgcgtgatgtgaactccatgtatctg

SEQ ID NO: 186244 - DNA, 82 bp, Homo sapiens
gtcaacacagacagcatctttttgatctcaactgcaaaatctgcatagcaattctgtggtgttcttggtcacacatttatgg

SEQ ID NO: 186245 - DNA, 83 bp, Homo sapiens
aaaaaacagatatcccaacatccttcccaggggatatgagactttctactcggaatatcctgagtgttgcgtggatgtaaaac

SEQ ID NO: 186246 - DNA, 78 bp, Homo sapiens
ggacccctcagtatatggatacggagtacaaaaacggcccttggatgatggagggtgtgagatggcagacaggtttgc

SEQ ID NO: 186247 - DNA, 50 bp, Homo sapiens
agcgccctgggagccctcacgagtcccggatgctggcacgtgtgtcctgg

SEQ ID NO: 186248 - DNA, 50 bp, Homo sapiens
accaaaatgaacacagtcactggggtggcaagtgcaggcagctgtcccgg

SEQ ID NO: 186249 - DNA, 85 bp, Homo sapiens
cagtggcttctgctcaccaacagatgaagacagatgcaccaacgagtgctgcttttgacacaaaaacggggttacgtgtggcagt

SEQ ID NO: 186250 - DNA, 100 bp, Homo sapiens
gatattttaaacatggaaaagacactgaaaggcctcaacagggtgaagttgaacaaattgctatgatgaaaccaaaaggccagactgaacacgatgaggg

SEQ ID NO: 186251 - DNA, 90 bp, Homo sapiens
caggcaaatgataaaaaagtggctgctattgaagccctaaatgatgaggtgacgttaaaggtgcacatcagcgacgccagcacccaccag

SEQ ID NO: 186252 - DNA, 75 bp, Homo sapiens
ggaaggaggaggaataatatttatggagcatatattatggaacacagtacttgaagaagcagaagctcaacattt

SEQ ID NO: 186253 - DNA, 82 bp, Homo sapiens
tcgccagcccgtgccgcgagcgcggcctgcaggagatcatagcctttgatgagctgcggaccgacttcaagaaccccatcga

SEQ ID NO: 186254 - DNA, 90 bp, Homo sapiens
aggtggtgatgcagggatgcctggaatagaagagaatgacctagcaaaagttgatgatcttccccctggagatgaccaggatagtgaaaa

SEQ ID NO: 186255 - DNA, 75 bp, Homo sapiens
gaccatgtgatgcacctgctccaggtcagtttaggggctggtgcaaaggatgagttgcacattgttgaagcagag

SEQ ID NO: 186256 - DNA, 88 bp, Homo sapiens
ccgaggaggctttcctgctggtggcaaccgcctacgagacactcaaggatccttcatctgtacctaatgcagacaatgccttcacatt

SEQ ID NO: 186257 - DNA, 83 bp, Homo sapiens
acgatgccctggcctctaagggagctctgtttctcaaggcagaagattttcgcaagctctggaaaactccacctcgagagaaa

SEQ ID NO: 186258 - DNA, 75 bp, Homo sapiens
cgacggcggcggtggcggcttggacgactcggagagccggtttggtgcacctcgatttggaggaagtagggcagg

SEQ ID NO: 186259 - DNA, 138 bp, Homo sapiens
cccgacgcccgcccggccaccccgcacctcctccaccaccgcctcccgctccctgacgacaggccacagatgccatggcccacgtggccggcttcactgtggctcatgacgtgagtgctcgtgactggctaacaagac

SEQ ID NO: 186260 - DNA, 101 bp, Homo sapiens
agggaggacctcacttccccggggtgtaataatgttaactgagggaatagcatttcaaggttcagtggaggagaaccccaagagcaccaaaatggaaagat

SEQ ID NO: 186261 - DNA, 100 bp, Homo sapiens
acctggagccagaaacattaccgtcatattccacccattactaaggccagtctatccatatggggatggggaagccttggcattgtcctttttctgataa

SEQ ID NO: 186262 - DNA, 100 bp, Homo sapiens
cggccggatccctccttctcccggcgcctcaagcggaagagacagggcagggcattgttcatgcactgaccgacctcagcagccccggcatgacctcagg

SEQ ID NO: 186263 - DNA, 75 bp, Homo sapiens
gctgccctagggcccggccgacccgcggcccggactcagtggcctttgaggatgtggctgtgaacttcacccagg

SEQ ID NO: 186264 - DNA, 75 bp, Homo sapiens
aacagttcctggaaactgccattaacctccagctttttaagcaggcctactactactgtgccataatagaggatg

SEQ ID NO: 186265 - DNA, 90 bp, Homo sapiens
cggcgggacagagcgcctgcgaccccagtcggtgctccggggaggtcacctgacgaggaggagccctctggcacaaatggaagaagaaag

SEQ ID NO: 186266 - DNA, 100 bp, Homo sapiens
ggaggagaagtcagtagcaagcagctaagacaacatggtacatgtggaattacatgaatgacagtcttcgaaccaatgtgtttgttcgatttcaaccaga

SEQ ID NO: 186267 - DNA, 100 bp, Homo sapiens
cgcccgggtgtccccgcggcgcaggaggcggtggagcgcagagcgggcgagcgcggtgtggccgacgacgatgccctcgctgaggagcgcatgcggagag

SEQ ID NO: 186268 - DNA, 98 bp, Homo sapiens
tgaaatggaagcctcccagtctgaattctgtggattttcgtctaaaaataacaagaatgggaggagaaggaataactgaagtgaagtgatggactccg

SEQ ID NO: 186269 - DNA, 101 bp, Homo sapiens
cggccaacttcggcaagatccagatcgggatttacgtggagatcaagcgcagcgatgtccctgaagaggaaggagaaggaatatgagcatgaaatggagcg

SEQ ID NO: 186270 - DNA, 83 bp, Homo sapiens
tgcaccccagcagtacatcgtggtcactgtctctgtcttcgtgtgcccagggaccctgcagaaggtgctggagcccacctcga

SEQ ID NO: 186271 - DNA, 50 bp, Homo sapiens
caagatcccgtccatgaatcaggctagcttgtcactttctgcaaaggttt

SEQ ID NO: 186272 - DNA, 83 bp, Homo sapiens
ctgcccggtgcccgaggaggcagccaagctcgtagcctgccactccgtgccagaaaaatatggctcaggagactaaccagacc

SEQ ID NO: 186273 - DNA, 90 bp, Homo sapiens
ttgaccatcttcaagcgcctccgctcggtgcccactaacaagatatggtccggaaaaagaacccccctctgagaaacgttgcaagtgaag

SEQ ID NO: 186274 - DNA, 100 bp, Homo sapiens
gtatctgggtcaagagcataaggatttgcacacctatgggcaaactgggagacagctgccatccactgactcgtaaaggaactctaatgatccaggacaa

SEQ ID NO: 186275 - DNA, 100 bp, Homo sapiens
ggtgtataccagtggctgtccctagtaattttgatgacaggagttgcttttgtacagataatgaaattttcaccagaaagtgttgcagcgtttatagcag

SEQ ID NO: 186276 - DNA, 98 bp, Homo sapiens
agttaattaaccaaaaagttccccagtcagtgaccaactcagtgccaaaaccagtcaggacaatcatctactgtgattgagaacattcatactattat

SEQ ID NO: 186277 - DNA, 49 bp, Homo sapiens
ctcatgtggggggtaaaccactcggtccaaattaactgtgctacagatg

SEQ ID NO: 186278 - DNA, 50 bp, Homo sapiens
tcaaggacacattagaactcacacgggatggcaagcttaccaaggaggag

SEQ ID NO: 186279 - DNA, 96 bp, Homo sapiens
actcacgcccgccggccgccgtcaggtcaattcagtgaagatatgatacccacagtgggcttcaacatgaggaaggtaactaaaggtaacgtcaca

SEQ ID NO: 186280 - DNA, 100 bp, Homo sapiens
ttccttggtttggctcctcctccagactcaaaggatgctttgttcttcctgaaggatttcttcacaagtctttctgcagaagtagagcttcaaatgactc

SEQ ID NO: 186281 - DNA, 75 bp, Homo sapiens
agacaagttctggaggagatgaaagctttgtatgaacaaaaccagtctgatgtgcgtcgaccagaagattatgat

SEQ ID NO: 186282 - DNA, 74 bp, Homo sapiens
attacctggaacttcatcatcatctacttcacaggaattgccatttagtcttctgaagaggagtctgatgatga

SEQ ID NO: 186283 - DNA, 96 bp, Homo sapiens
cggaagagcgctcccaggagaaacaataacagatcaactcctagcaatcatgatcggatacagcgtctgaggcaagaatttcagcaagcaaagcaa

SEQ ID NO: 186284 - DNA, 100 bp, Homo sapiens
aggacacggactttgtcggctgggcgctggatgtgctgtctccaaacctcatctctaccagcatgcttgggccaagttactggaggagatggaccaagag

SEQ ID NO: 186285 - DNA, 100 bp, Homo sapiens
ctcagcgtcctcatgtggggggtaaaccactcgagcaaattggtcaggagatgttggaaaaccttagtcatgacagagaaaagatacagcgagcacgtga

SEQ ID NO: 186286 - DNA, 75 bp, Homo sapiens
gacctgctaacagaactggaccttttcggcattgaagttgatatcgatgtggagcacggagggaaaagaagccgc

SEQ ID NO: 186287 - DNA, 82 bp, Homo sapiens
caccatgccgctcctaagcctgcacagccgcggcggcagcagcagtgagaggttcctgcacttggccatcatccatgaagaa

SEQ ID NO: 186288 - DNA, 100 bp, Homo sapiens
gtggtccctcacctgactgagtggcgcagtcagagataaatggaacaggtgaatctggattgggaaagtcgacattaatcaactcattattcctcacaga

SEQ ID NO: 186289 - DNA, 95 bp, Homo sapiens
gggggcgcagggaaggagggcgtccgagtcaacaaccgcttcgagctgagttgcatgctgagaatttgaaaaatgaagatgatgtagacactgga

SEQ ID NO: 186290 - DNA, 83 bp, Homo sapiens
agccattggagggcgcggggactgcaaccctaatcagggggatatgagactttctactcggaatatcctgagtgttgcgtgga

SEQ ID NO: 186291 - DNA, 98 bp, Homo sapiens
gcagctggagccccacaggagaaaggctgtgaatcagctgcacttcatccccgtggacctgggcgcccccatcgtgcagtgcgccgtggccgacccct

SEQ ID NO: 186292 - DNA, 100 bp, Homo sapiens
tttgttaaggattccaagtaactcttatttggtcaccatgtacttgacaagatttcatttacttaagtgccatgttgatgataataaaacaattcgtact

SEQ ID NO: 186293 - DNA, 75 bp, Homo sapiens
aagaaaaccccgaggagccctgttccaaagcctcctggaccgtccaagaagaacaatggcgctgtcttcagtggc

SEQ ID NO: 186294 - DNA, 90 bp, Homo sapiens
ccttgtatgaggtcaaatccgagaacctgggccaaggcgacaagggaacctcaggacctgacccaaccactgtctacgtggacatgagag

SEQ ID NO: 186295 - DNA, 100 bp, Homo sapiens
tgagtggttgtgtggtcgcgtctcggaaaccggtagcgcttgcagcatgagtgagaaggctgagctctggaacaacgtatttgtgtcctctgtcaacagt

SEQ ID NO: 186296 - DNA, 100 bp, Homo sapiens
acccggacgacccccattgctgagccagcggagctgcttgggctgtagctataaaagcttgaaaaccattactctgagaatctctctgttgggaaaatga

SEQ ID NO: 186297 - DNA, 100 bp, Homo sapiens
atggaaatcctaatgacagtctccaaattcgcctccatctgtaccatggaggaagaaggcacctacgatcaaactctggagttccgtaggggaggtgatg

SEQ ID NO: 186298 - DNA, 100 bp, Homo sapiens
tggtgactggaatccagcttaaccccaacaaccatctacagttctacatgtcctatcacctgttcattgtggcctgtgcaggagctggtgccaccgtcat

SEQ ID NO: 186299 - DNA, 74 bp, Homo sapiens
gggaaggcgattggcatcgatctctccatcccttccgaggcccgacttcgtttcagtctgatggaagcaaacaa

SEQ ID NO: 186300 - DNA, 75 bp, Homo sapiens
cagaaaagctgaggaagcaggcggagaagagacaaggaattgaatgatctggcacgggaccctccagcacagtgt

SEQ ID NO: 186301 - DNA, 82 bp, Homo sapiens
tgcagccagcatcaacccagccacagaggctcaaggaactgaaacaaagggaatttgctcgaaatgtagcatctaaatccag

SEQ ID NO: 186302 - DNA, 121 bp, Homo sapiens
gcccctgaactacttcttggagcaaggcattataccaaagctattggccccctcttctctcctggaggtcagccggccccttgtggctctcaggccagctggaccaagtctcagaacccgg

SEQ ID NO: 186303 - DNA, 100 bp, Homo sapiens
agtccccccaagtctcctgaagaggaaggagcggtgtcctcttaagaaaatgtgtgcaacttgctttggtgtttgctgttttattgccacagatgacatt

SEQ ID NO: 186304 - DNA, 140 bp, Homo sapiens
tcagatgcatctggttcttctaaaggagcaattctccaatacttacagtaatctcatattaacagatcctctgtcgatgggtcctcagaaagctctggaaaccatcggtgcaaatttacagaagcagtacgagaactggc

SEQ ID NO: 186305 - DNA, 90 bp, Homo sapiens
cagccactgagccttcagggacccagcagccagccccgtctacagagagcagtggcctggcacgccttgcccactaggtaaccatgtgcg

SEQ ID NO: 186306 - DNA, 100 bp, Homo sapiens
gaggaagaagaagtgttatatgtcctaaagtaaggtttcagtgtactaatggtcacttgatgtgcgctggctgttttatccacctactagcagatgcccg

SEQ ID NO: 186307 - DNA, 100 bp, Homo sapiens
ttaaccaagttccaacaaaagaatgctgccgcaggggtggcaaaatatgcctgacggatcatttcaaacctttgtgggccaggaatgtgcccaaatttgg

SEQ ID NO: 186308 - DNA, 75 bp, Homo sapiens
gtggtggcaggggccatcgctgccgtctttcacacactgatagaatctgggcccttccgtcctggctggagtggc

SEQ ID NO: 186309 - DNA, 100 bp, Homo sapiens
gtgatggatgaggtggtgctgacaatcgagcaaggaaacctggataaagagaggcctgtccagtctttgaaaacatcaagagatacttcaccctcaagtg

SEQ ID NO: 186310 - DNA, 99 bp, Homo sapiens
gatgactacacagttgagttgcctctgattggaaaagcaggtgtcacaacataatgaaagttgctcaagccaaactggaaatgataaaacctgaagaag

SEQ ID NO: 186311 - DNA, 83 bp, Homo sapiens
atggatctctgcaaaacttgcttcctagtggcaaaaatagaatgtttgaagtcattggagagaccctggagcacgatttccca

SEQ ID NO: 186312 - DNA, 75 bp, Homo sapiens
acttcttgcgggagaacatcaaggccagcaccgggaagaggaagaacgtctgagaaataaaattcgagctgatca

SEQ ID NO: 186313 - DNA, 75 bp, Homo sapiens
ttcgtgaagctctggagatctcccccttcttcaagacccacgagtctattatcctcccagtccacaacgctgaac

SEQ ID NO: 186314 - DNA, 83 bp, Homo sapiens
gcagggcaagcacgggaagaagcagctggacccgctcaccatctacggcatccggtctcaccatggatgatgatatcgccgcg

SEQ ID NO: 186315 - DNA, 100 bp, Homo sapiens
cagcagtcctcatgctggcctctttcctaaagataactcgacactggctgtggacatctacaaagggagagaaatagcccggaaacttgcaaatcctaag

SEQ ID NO: 186316 - DNA, 50 bp, Homo sapiens
gcccaactgataatccttgaacatgtgaaacaaagagtcctcttcgtgga

SEQ ID NO: 186317 - DNA, 50 bp, Homo sapiens
cggcgagggcgcctacggcatggtgtgccagagactgctgctactttgaa

SEQ ID NO: 186318 - DNA, 98 bp, Homo sapiens
ccgcctgcgaaacccaagccgccgcgtaggagcgtgcgttcgggccctcttctcccacctgttcgttcctctgtgacgagggtgcaggtatctctggg

SEQ ID NO: 186319 - DNA, 74 bp, Homo sapiens
ggcacgcacgcggtgcagggtaacatggcggatgcggaagatccccgtcgaggtcaagatcaagatccaggtct

SEQ ID NO: 186320 - DNA, 74 bp, Homo sapiens
cgccctcatggggaaaatctccccggtgactttcagctcatgccagttactatgggagaatgaatgtgagagag

SEQ ID NO: 186321 - DNA, 98 bp, Homo sapiens
cgtgcaggaagtactcatcgactgatgtggcagactttgctccctggcaaaaaatggcttcctttgggtggaagaggaaaattggtgagaaggtctca

SEQ ID NO: 186322 - DNA, 100 bp, Homo sapiens
caaatggctgctctctggcgttcctcacactccccctgaagttcatctaagatcttcattcttcaaaggttgtcacatccattggtgagctggttgaagt

SEQ ID NO: 186323 - DNA, 98 bp, Homo sapiens
tgcagcgctcccacccccggcggcggcacgatgccctttgacttcaggagcatcttcatgatacagttaagaggaatcttgacagcgccacttcccct

SEQ ID NO: 186324 - DNA, 100 bp, Homo sapiens
gggagccccgcctgaggtgccctaaacacactatgaccggtttttcgttggaatatacgttgcacatttatggcgattctgagtgtgagggcagacttct

SEQ ID NO: 186325 - DNA, 75 bp, Homo sapiens
tttccgccctaatggaggtctccagtttcggagaagcgaatttatgatctgaaaaagaaaaatcaagaactaggg

SEQ ID NO: 186326 - DNA, 100 bp, Homo sapiens
gctgcatgacagctatgactacgacctgcaggaacaggacagtcattttgtttactcattcagccctgttgcaggtcccaataaactcttcataaggttg

SEQ ID NO: 186327 - DNA, 75 bp, Homo sapiens
ctctgatccgcaagcatgctcagaccttcattgctctgtgtgccaccgaggccctgcctgagctgccccctgggg

SEQ ID NO: 186328 - DNA, 100 bp, Homo sapiens
ggtgagactttcacaataagagcagaggatggaacacttcagtgcattcaaggaattcgatgtcttctttccgtcctgggagaggacataatgatagtcg

SEQ ID NO: 186329 - DNA, 108 bp, Homo sapiens
gttttctcctgatcaagaaaatcatccatctaaagcaccagtaaaatatggtgaactcattgtcttaggcatgtgcaatgaattctcacagatatttcaactgtgtca

SEQ ID NO: 186330 - DNA, 75 bp, Homo sapiens
gtcacattctggagcgtatgagatgaggcttgcattgatgacaatgttgatatggtgaagtttctggtagaaaat

SEQ ID NO: 186331 - DNA, 100 bp, Homo sapiens
tggcagggcagataagggccacccagcagcagcatgacttcacactgacacagactgcagatatggctcgtggacagcagaaaattcagtctcagcagaa

SEQ ID NO: 186332 - DNA, 75 bp, Homo sapiens
cgtggacgctgactcggaagtgcaggtgctgaatgtggagtaaatgcagatgttgagaaacatcttgaattgggc

SEQ ID NO: 186333 - DNA, 74 bp, Homo sapiens
agccttcctacctgtaaagggttcttcaatatttatcatccgtatgttcatgcggatgctcctaccaataaaac

SEQ ID NO: 186334 - DNA, 100 bp, Homo sapiens
gcttatccaagttcaccatttcaggtcaccactggatatcagttgcctgtatataattatcagtttggatttaggtggcgagtagaaaaagaagtaattt

SEQ ID NO: 186335 - DNA, 74 bp, Homo sapiens
aacttgggagaaagtttcatctgtggatggagtattggaaggaatcgtgtctcctagtgacctggaccttgtca

SEQ ID NO: 186336 - DNA, 50 bp, Homo sapiens
gcaccattttgaacgtgaattttcgggacctgttgcaatgagagtggcaa

SEQ ID NO: 186337 - DNA, 73 bp, Homo sapiens
caggccgattatgtccattgttctcttggagcagctggtcatcatggctggtagagcagatcacccccaaagc

SEQ ID NO: 186338 - DNA, 80 bp, Homo sapiens
gaggggctccgggtcttccagagcgtgaagatcaagatcgcgccgtgccgtccctgcagtgacaccgaggtgctcctagc

SEQ ID NO: 186339 - DNA, 100 bp, Homo sapiens
caataatttgcttgatggcttagaactctccacagccatcactcatgtccataaggagggactggcacatcttcacattcatcatgtgattcaccgggat

SEQ ID NO: 186340 - DNA, 80 bp, Homo sapiens
ccatctgtggaaggacctaccaaccaggactctccttcagcaactccagaagcttcagactttggtgatgggcaaggttt

SEQ ID NO: 186341 - DNA, 95 bp, Homo sapiens
aagaaactctacttgtgcatgagaagaaagaagcagttgacctcactcaatatattctgcagctatttgtcgtagatgtccagacaagccagatc

SEQ ID NO: 186342 - DNA, 100 bp, Homo sapiens
gggaggtcggcggccccaaaaaactctctttgctcacaagttaccaaaaaaaaaagagccaacatgttggtattgctggctggtatctttgtggtccaca

SEQ ID NO: 186343 - DNA, 82 bp, Homo sapiens
gcagggctttggggaggagtccagggagcccagcacagatcagcaaccgctggaagctggcccaggtacaagtacaaaaaga

SEQ ID NO: 186344 - DNA, 75 bp, Homo sapiens
cagaggcagaaaacggacggaagaaaaggtctggccgatatttgatcctgatgacctttattcaggggtcaattt

SEQ ID NO: 186345 - DNA, 100 bp, Homo sapiens
agagcattgagatcgagaacctgcagaccaggtcacggtctagatcacattctcgatccagaggaaggcgatactctcgctcacgcagcaggagcagggg

SEQ ID NO: 186346 - DNA, 119 bp, Homo sapiens
caacggcaaagttttgcagatcttcaacaagaggacccaggagaaattcgccctcaaacaaaatgatgcttcaacacccaggccaggtctctgcctcggaagtgagtgcttctgccatc

SEQ ID NO: 186347 - DNA, 100 bp, Homo sapiens
ggtgcagcagggcatgacaccctccgccaagcagccaagacttccgccctcgatcaagatggtggttggacggccttcctaacctttacggggcctggcg

SEQ ID NO: 186348 - DNA, 100 bp, Homo sapiens
caggagccctggaatgtgaagagacatgagaccatagccaaacccccagacttaattcagtgcacaaatgagatgaatgtgaacatcccacagttggcag

SEQ ID NO: 186349 - DNA, 98 bp, Homo sapiens
gaggcaccgggatcgtgaccgagaccgtgaccgagagcgtgaccgagagcgcgaatatcgtcatcgttagaagttgtgtccccaaggaaggatgagaa

SEQ ID NO: 186350 - DNA, 95 bp, Homo sapiens
tcagcctcttccagaaccagccagctaggcatccaaacagtttgaaaatctgaacacagttgctgagtgtctgttttctctggtcaacggtgatg

SEQ ID NO: 186351 - DNA, 75 bp, Homo sapiens
atctggctgttagaagaattcatgctcatccggatcagtgtgcgtgtgaccaccatggatgcagagctggagttt

SEQ ID NO: 186352 - DNA, 73 bp, Homo sapiens
gggagcgcggggcgacgctggctgcagggacccggtgacagcgtgagagtgccgcagaatggaattcggcatt

SEQ ID NO: 186353 - DNA, 75 bp, Homo sapiens
cacccaaccttgaggcacagtgaagacatcggtggccactccaataacagcagcacatcaaagctgcccaatgat

SEQ ID NO: 186354 - DNA, 100 bp, Homo sapiens
ttcctcaagcccagcctcgccaggactaccttaagggactgagtatcattgggggaacacaaatatatgctgcaaaaagaggctcctttgttgaccttgg

SEQ ID NO: 186355 - DNA, 75 bp, Homo sapiens
gattatgaccttaacatcagtgacaaagatcattccactcagcctgggacgatggggaggaaaaaaatccagatc

SEQ ID NO: 186356 - DNA, 76 bp, Homo sapiens
gcaggcagcccgggacacccagagcaaggcgctgacggagaggtggataatattaatgcagctgtgatggatttga

SEQ ID NO: 186357 - DNA, 98 bp, Homo sapiens
caatttgtactgatcctctggtgtccaaaatttcctttactggttcaacaactacaggaaagctggaggaaagcaggaatgttcagaggcaaatgaag

SEQ ID NO: 186358 - DNA, 100 bp, Homo sapiens
ctctcagtggtcctacctggggatattatcaaatctactactgttcatggcaggttaccttgaggatagttttgtaaaatctggagtcttcaatgtatca

SEQ ID NO: 186359 - DNA, 100 bp, Homo sapiens
cccagattcgagtgtccggagagtaaccggaagtgctgtccccaggcctaggggcggcgccggcggctgccaggagagcagtcatgatggcctgcactcc

SEQ ID NO: 186360 - DNA, 98 bp, Homo sapiens
ccgcatgctctttgtcactccccggcggcagcacgaaagtaccatgatgttggtctcacattggagatccccaagagtgtcactatgaagaatgtgta

SEQ ID NO: 186361 - DNA, 96 bp, Homo sapiens
gggacccatcacttacgaaaaaccagatgaagacttccggggcaggcgtcaggaggcacccaaggtggaggaaggcctgcgagaaggacagtaaga

SEQ ID NO: 186362 - DNA, 100 bp, Homo sapiens
ttccatctaattatgacctccttcgccacttacagtatgcaacacattttcctatacctctgacagctctggctctggctattgctcaggagctgggtag

SEQ ID NO: 186363 - DNA, 50 bp, Homo sapiens
ctcctggccaccgactcctacaagtcactcaagactgcttgcaactgatt

SEQ ID NO: 186364 - DNA, 75 bp, Homo sapiens
gctcagggctctggtgaacaagctgtaggctcatggatttgagatcttatgctccaaatgtagcccacatttttc

SEQ ID NO: 186365 - DNA, 82 bp, Homo sapiens
caaagactgtggaacttttaagtggagtggtggatcagaccaaagatggacacagaatgttcagcttaacaaagaaatgaca

SEQ ID NO: 186366 - DNA, 50 bp, Homo sapiens
gactaatctgatcgggtcttccttcattggccacagatgtctttaattcc

SEQ ID NO: 186367 - DNA, 75 bp, Homo sapiens
gctcacaggactgtgactgagacgagcctgatctgtgacttcctccgcggagccacagtccatagaatcctcggc

SEQ ID NO: 186368 - DNA, 76 bp, Homo sapiens
agtccctggatcaccgacagcacagacagaatccctgctaccaattctctgcaatgactgtaatggacgatccact

SEQ ID NO: 186369 - DNA, 74 bp, Homo sapiens
tcgccctggggatcttggccacagcctggatctccttcgctgactacaacctgctggacttgctgctgatccat

SEQ ID NO: 186370 - DNA, 48 bp, Homo sapiens
cggagaagcaggagccctactcggcagcccccgaggcccctgggagag

SEQ ID NO: 186371 - DNA, 100 bp, Homo sapiens
gatgagcagggcccttgcggagttccgcgtccgaggtgtgaagaggactacgggcactacgaagagctgccaggggagcctggggagcacctcttccctg

SEQ ID NO: 186372 - DNA, 120 bp, Homo sapiens
cagtagccgcgggccttgggcccgtaatctcacgacctccgcctgcggcctcctcgcaaaacaaggactttctgcagggcgactgcaccaaagcgaaacagaagctgaactggaagcccc

SEQ ID NO: 186373 - DNA, 100 bp, Homo sapiens
caggaggaaaggctttctgtgccgggggtgatatcagagtcttttatcacgagtcatgaatacaggatcacagtttgtgatggaaggagtgaagaacctg

SEQ ID NO: 186374 - DNA, 98 bp, Homo sapiens
tcatggatctggaagctgagggcacgtgtttgcggttcagccctttgatgaccgcagcagatggagcagcatattgtatgggacgtatgaattctgac

SEQ ID NO: 186375 - DNA, 75 bp, Homo sapiens
caaagattcagactggcccttctgctctgatgaagactggctctatcgtccgagctttgtgcacccaggggctgc

SEQ ID NO: 186376 - DNA, 100 bp, Homo sapiens
acaagctccaggacgtcttcaacacggtgggcgccgacatcatccagctgcctcaaatcgtcgtagtgggaacgcaggttctccagcatttggctcaagg

SEQ ID NO: 186377 - DNA, 75 bp, Homo sapiens
gaggcgcttccacctctccaccaccgaccgcgtcatcaaaggatttagacaagagtcaagaggagatcaaaaaac

SEQ ID NO: 186378 - DNA, 82 bp, Homo sapiens
gtacgacagcacctccaagcagaggacgccctcatacacgagctcaggccccggggcctccagcggcaccagcggagaccac

SEQ ID NO: 186379 - DNA, 100 bp, Homo sapiens
aggagccatcagcttcagctccagctccgctctcttcggctgccccaatccccggcagctctctcagggcccactggaaaatgacttggtagttcatgtg

SEQ ID NO: 186380 - DNA, 97 bp, Homo sapiens
cgggggctgcagagctggacctgatcttccttcgaggcattatggaaagtcccatagtaagatccctggccaagggtaatcactttgatcagtatga

SEQ ID NO: 186381 - DNA, 90 bp, Homo sapiens
cctggtagcggcgctgttgctgggctcggcgtgctgcggttctccagcatttggctcaaggccccaagggcacatgtgacaagaaggcgc

SEQ ID NO: 186382 - DNA, 75 bp, Homo sapiens
cagtacctcattgctctttggcgactcttattgcaaggacacccaggcccattattttcctccagcctccatgga

SEQ ID NO: 186383 - DNA, 75 bp, Homo sapiens
ttgcgatggcgcagaaaccccgttgacaaggcactgctttttcatgacgtgctgagcttgcaagacctctgctgc

SEQ ID NO: 186384 - DNA, 100 bp, Homo sapiens
agcgccaggcatcagctgggaagctggcgtgggcaggccagctgtacctggcctggagctccagaccatagtcttgagtttacttatgaggtcaattgga

SEQ ID NO: 186385 - DNA, 98 bp, Homo sapiens
aggagaacctgaaggctgcgcaggaggagtatgtcaagcgagccctgaaggacagaataacgggctcccagattcacaagccccaccaagaggatcac

SEQ ID NO: 186386 - DNA, 100 bp, Homo sapiens
caggagaaggccaacctgcagctggaaagtgaagaactgaatatcctcatcaggcttgaccactatgctatcatcaagtttccgctgaccactgagtctg

SEQ ID NO: 186387 - DNA, 100 bp, Homo sapiens
cttctatgtacctgcagaacccaaattggcgtttgtcatcagaatcagaggggctacaaacctcctgatgaaggaccttctgagtaccagactattccac

SEQ ID NO: 186388 - DNA, 100 bp, Homo sapiens
aagctgaggtccagatgaaagagaagtttctggtcactccccaggattatgcgcgggcaagttaaagtcttcagagccctgtatacgtttgaacccagaa

SEQ ID NO: 186389 - DNA, 75 bp, Homo sapiens
gccagttgttcttctcaggacgttctttgaagggttctgtttttggagggtcccgggattcttgagctgtgccca

SEQ ID NO: 186390 - DNA, 106 bp, Homo sapiens
ggccggacaagaacctgaccgagagggagcatatttccttcacaaacagaaaatgaatgaaaataaagatactgattcaaagaaaagtgaagaatacgaagatgac

SEQ ID NO: 186391 - DNA, 75 bp, Homo sapiens
tgactctcagtatcctcgaccgatactacacaccgagtcctactgctctgttggctcatgaaataggttttggaa

SEQ ID NO: 186392 - DNA, 100 bp, Homo sapiens
tctcaatgcaagaagttaagaagctctttcgaatcaagttgtccccaacagtggacagatgtgctggtgctgagctgtgatctgataacagacgttgcct

SEQ ID NO: 186393 - DNA, 90 bp, Homo sapiens
tcagcgcggagaacggtatcgcgcccgccgtccccagcatcccggcggaggccaacatagccgaggtagaggtctccatccctgccaagc

SEQ ID NO: 186394 - DNA, 74 bp, Homo sapiens
ctccaagccgagcactccctgccagcgctcatccagatcaggtgtggatgaggtcaccattgtcaacattttga

SEQ ID NO: 186395 - DNA, 100 bp, Homo sapiens
aaggcggtgcaggctatgtgggcccggctctatgccaactgcgaggacgtgggggtggccatcctggtgaggtatgctccagaatcactgacagagagca

SEQ ID NO: 186396 - DNA, 95 bp, Homo sapiens
aatgctcagaattaagtgaatttgtgtctagcatttctggattaaaagtggtgggggagtccctttctccagcctttcacctacaactggaagag

SEQ ID NO: 186397 - DNA, 75 bp, Homo sapiens
gatgtgtcctatgaataccgcttcctggagttcacgactctgagtgctgaccttgccaccatggaagaaagagta

SEQ ID NO: 186398 - DNA, 100 bp, Homo sapiens
cctcaccgcaacattccttatccaatcccttaccggaagacaactgttagttttgtggcttactgctgctccacccagtgtctgcagacttttgacctgc

SEQ ID NO: 186399 - DNA, 75 bp, Homo sapiens
aggaactcataaatgccacctcaacaattcagaggatgtgtttcacatggtagttgaagtaccacgctggtctaa

SEQ ID NO: 186400 - DNA, 82 bp, Homo sapiens
gagcagagacatcccgatctggggaagccctgggaggagcggggacactgaggacctctctccaaattggcctctcaactca

SEQ ID NO: 186401 - DNA, 80 bp, Homo sapiens
ggtaaaaatgtctccatcgtatcatcagtccaaaggggatcccactgctaaaaaggtgattttacaacgagatgctgctc

SEQ ID NO: 186402 - DNA, 75 bp, Homo sapiens
ccgggagttacaccgccaccgccaggttgtgtcaacgctgctcataaatataatcccagaggaccacatcccact

SEQ ID NO: 186403 - DNA, 100 bp, Homo sapiens
caggaccttctgtgggactccagattatatcgccccagaggttggcaagttgatcaaagaagctgccgggaaaagcaatctgaagagggtgaccctggag

SEQ ID NO: 186404 - DNA, 72 bp, Homo sapiens
ggcggccacggcatcctgtgctgtgggggctacgaggaaagaaaaatatgtcgtaactgcaagtgtggccaa

SEQ ID NO: 186405 - DNA, 99 bp, Homo sapiens
aagcagtgatgaggtcaacttcttggtatatagatacttgcaagagtcagatttgacaagatcaaagctgcaggaaaatggacagtgaggttcagagag

SEQ ID NO: 186406 - DNA, 100 bp, Homo sapiens
aagctttacctcgctgaccctatgaagtctctccagttcttgttagatacatgtaaagttctagtcattggagctggcggcttaggatgtgagctcctga

SEQ ID NO: 186407 - DNA, 100 bp, Homo sapiens
gaccgagcctgggaggccggccggtgccagcacctttcggcttctgagacggcggcagcagcggcattcagattcctgggaacaccaccatggagggcct

SEQ ID NO: 186408 - DNA, 90 bp, Homo sapiens
gctttaccctgtacagctctaaaaaccttagacaagcatggaataaaacaaaatccagtctcatagcagaggagaatataatgtttacag

SEQ ID NO: 186409 - DNA, 100 bp, Homo sapiens
acctgaggcacccgaagaagagaccatccatatttccagtccaatatcagatggaaatgatgcggagccttcgccatgtaaacattgatcatcttcacgt

SEQ ID NO: 186410 - DNA, 89 bp, Homo sapiens
tccctcgcctcccggccgagctgacgttctggacatggcaagacatgtgccactctatcgggcactgctggaattgcttcgggccattg

SEQ ID NO: 186411 - DNA, 82 bp, Homo sapiens
ggcggcgggagcttccgggagggcggctcgcaggtgacttaagagattaaaattaatttggttgctgttggttctgaacaaa

SEQ ID NO: 186412 - DNA, 98 bp, Homo sapiens
atagaaggggaggggttacagactgtggtgcctacccccatcactgcttccctcagccataacagaatggtagataacgcagatcatctctggaaagg

SEQ ID NO: 186413 - DNA, 106 bp, Homo sapiens
gtgggctttgctgccgagcaggcggcgccgtcttggggcctagcggcgaggcgacccgcacagatatcagacaccccgaagaactttctctcttaaagaaacccag

SEQ ID NO: 186414 - DNA, 75 bp, Homo sapiens
cagaaaaggaagactattcagacagaacaatcagtgatgaagatgaatcgaccctgtgttgggctatttgatgaa

SEQ ID NO: 186415 - DNA, 90 bp, Homo sapiens
gagaacccccagcttggagcgcaagtaaaatgattaacctttcagttcctgataccattgatgaaagagcaatcaacaagaagaaactta

SEQ ID NO: 186416 - DNA, 78 bp, Homo sapiens
aatcgcctgctttgattcattgaaagtccaggtcaagacctcgtctccgttctcatagtcgtagcagtgaaaggtcca

SEQ ID NO: 186417 - DNA, 82 bp, Homo sapiens
cgaggattccagggtcgaacactcgcccccaaatacatcaagatgtttgtactggatgaagctgacgaaatgttaagccgtg

SEQ ID NO: 186418 - DNA, 75 bp, Homo sapiens
ggtgctgtaaccacctcacagattccagcttcggaacaagagaccctggaagtacatttgaagaacgcaagtaga

SEQ ID NO: 186419 - DNA, 100 bp, Homo sapiens
agtcatatgcggtggaatctgttcttcttttgcatcctacgtaaccagaccaagctgtgggccagaagatcagctgccatgttacttgactcacaccaac

SEQ ID NO: 186420 - DNA, 75 bp, Homo sapiens
gggaagaacaaagacttagactcgggtgtgctgatctgcaaaccctggacacaatgcagccaattgagaggaaaa

SEQ ID NO: 186421 - DNA, 100 bp, Homo sapiens
aaccacgcaggcaaacgagaattaaatgccgagaaggccagtacggaaaatatatgcagatgatgaacattcttaagccaattgcctttgatgttattca

SEQ ID NO: 186422 - DNA, 75 bp, Homo sapiens
taatgtctgcttccactacacttttgccctcaaccggatgagaacaagttgagcagtgccaacggccatgaagaa

SEQ ID NO: 186423 - DNA, 75 bp, Homo sapiens
cactgcatttccccactctgcccacctctctcatgctgaatcacatccatggtttttgtctgatgaaaatagtct

SEQ ID NO: 186424 - DNA, 90 bp, Homo sapiens
ttgaccgtctactggaaatctgaatgctgttatcacgatgcacctgctgccactcgacagcagttctacactgacatgtactgtcccatc

SEQ ID NO: 186425 - DNA, 100 bp, Homo sapiens
gctgtgtgtcgaatcccggtgttggagtgtgctgcctcctggcttcaggttatctaccttgcctgctcctatgccacagtgtacctgatctacctgaaat

SEQ ID NO: 186426 - DNA, 75 bp, Homo sapiens
tttactccatgtgtgggacattcattgcggaataacatcggaggagaagggcccagtgttcaccatcataccagg

SEQ ID NO: 186427 - DNA, 74 bp, Homo sapiens
cgagaagaaaattggcaagagtggagacaaagagatgagcaggagtctactcttcatcttgtgttgagacttcg

SEQ ID NO: 186428 - DNA, 83 bp, Homo sapiens
gttccttgtggagccggagctgggcgcggattcgccgaggcaccgaggcactcagaggaggcggcggcggcggcgcccgggag

SEQ ID NO: 186429 - DNA, 82 bp, Homo sapiens
ctcgtggacaagtttgcagatcgggagcgcaaggtcgccctcaaggccatgatcaaaacgacagagcgggatgccaccagct

SEQ ID NO: 186430 - DNA, 75 bp, Homo sapiens
actccagaacacccagaagtaacttcacttaaatttgtgtttaaggagaaactaacaatgaaaacggcctcgttg

SEQ ID NO: 186431 - DNA, 51 bp, Homo sapiens
ctttggcgtcctgtacgtgaagctcggaggtggggctggtgtccgagcact

SEQ ID NO: 186432 - DNA, 74 bp, Homo sapiens
cgcggcggagacgatgcctgagatcagagtcacgcccttggaaattccgggtagatatgcctggctcaggcagt

SEQ ID NO: 186433 - DNA, 98 bp, Homo sapiens
atcctattgatgacgatgactacgcttctgcgtctggctcgggagccagtctacttgatgacttatacaagtatttcttcttccatcactcccacgga

SEQ ID NO: 186434 - DNA, 75 bp, Homo sapiens
cggagctcacggagagccgcctgaggagcggcacagaaccttctgataacttaagagagattctccaaaatgtgg

SEQ ID NO: 186435 - DNA, 80 bp, Homo sapiens
ggttggggcgggaagagccggggccgtggctgacatggagcagaaatcttcccaaggctgcagacaccgacggatttgct

SEQ ID NO: 186436 - DNA, 75 bp, Homo sapiens
aggcgctcctccttcccaccgtgcctgtatggagtggaatgaatgttgctggtgtctctctgaagactctgcacc

SEQ ID NO: 186437 - DNA, 96 bp, Homo sapiens
gtgctggccgtgatcaaacactgcaaggaccccctccggctcaagtgtgtcaagcaagttaacaagcacaagccctggctggagcccacctaccac

SEQ ID NO: 186438 - DNA, 100 bp, Homo sapiens
gcggggccaggaagtcggagtttgagccccggaggcagagcggctgccatgagcgcatcagcgaggaggtggggctgctgcagctccttggggacccccc

SEQ ID NO: 186439 - DNA, 75 bp, Homo sapiens
tcaacaccaccttcatctccaccatcggtggtcttcaagctgacagagaagctgacggaacagaaggagtggatg

SEQ ID NO: 186440 - DNA, 82 bp, Homo sapiens
cgaggatatcagggcagccctggaggcttactgcaagaagtatgagcagctcaagcttcctgggtctgcaggtccagccggc

SEQ ID NO: 186441 - DNA, 82 bp, Homo sapiens
cttcaagattgacttctcggaatggaaggatgacgaggtgatgtgtccaatctagatcccaacttctcatttgaaggcacca

SEQ ID NO: 186442 - DNA, 82 bp, Homo sapiens
gcagtggtcgcttcttctccttgtgaagacctaggaaaggacgttgaatttgaagttgttggtgatgccccggaaaaagtgg

SEQ ID NO: 186443 - DNA, 75 bp, Homo sapiens
cggggaccggcggcgctggaggagcgaggcagctgtactaggactgggaacggtaaaatgtttattggaggcttg

SEQ ID NO: 186444 - DNA, 100 bp, Homo sapiens
ccgggtgtgcgtgggacagaaccgcgaggaaaggtctcggtgattcagaatacacctacttttgcaatggggggaagataattgataaacgacttcaaga

SEQ ID NO: 186445 - DNA, 82 bp, Homo sapiens
ccagtaccaagacccgacacaaggcagcttcccacagcaggttggacagttcacagttatcatttaacatggaagaagatga

SEQ ID NO: 186446 - DNA, 100 bp, Homo sapiens
gtgatctccagcgccggcctcctcagtgcgaagaagctgcagccgcacctggccaaggacgaggagaagaccttttcatgtgtatggacatacagctcgt

SEQ ID NO: 186447 - DNA, 100 bp, Homo sapiens
agcagcatgcgattcttattgaccttgaatgtgtctttaccatatggaacaattttgaacttctaagatcaagcctttttgttgctgagggtaagaaagg

SEQ ID NO: 186448 - DNA, 75 bp, Homo sapiens
gcaaaagacgaagtgaccccaacttcaagaacaggcttcgagaaccaactggaacagatccagaaggagctaagt

SEQ ID NO: 186449 - DNA, 100 bp, Homo sapiens
aaatgttgatgtggtacttgaagacacctgtactgttggacagaactgtaccgctctctttttggccagctccaccctcccgacgaaggccacggggatt

SEQ ID NO: 186450 - DNA, 90 bp, Homo sapiens
ggccgcgctgtgccaccagctgggggagctcctggccggccatgttacaaatactttccaagactggaccttaagctttttgacagaccg

SEQ ID NO: 186451 - DNA, 74 bp, Homo sapiens
tgggggattcgcagggaggatgtcgggacaccccggaagctgggaaatggcagctgttgtgctgtgtatggacg

SEQ ID NO: 186452 - DNA, 98 bp, Homo sapiens
cgcggccgtagcagccgggctggtcctgctgcgagccggcggcccggagtggggcggcggaacaggtgggattgttcctccagcagctcaacagcttc

SEQ ID NO: 186453 - DNA, 50 bp, Homo sapiens
ccgcactctggagcataatgtattcccaagccatgaagatgggagataat

SEQ ID NO: 186454 - DNA, 90 bp, Homo sapiens
cgcgggccgaaggagtcgccagggctgcgtaggcttgtggcgcgcccgcggagaggccggggagacgttctcttccagatggctgaagtc

SEQ ID NO: 186455 - DNA, 100 bp, Homo sapiens
gggccatggtggcttctggctcagagctaggaaaaaagctgaaggcaactatggatgctgggaaactggtgagcctgaatttaaatacattgggaatatg

SEQ ID NO: 186456 - DNA, 75 bp, Homo sapiens
ccgattcaccaacgagccctagtgaccaagaatatggcccaggtgaccaaagccctggacaaggccctgagcacc

SEQ ID NO: 186457 - DNA, 100 bp, Homo sapiens
cggccacgcgcggcgccgctcgaagcagctgacacaggatgatgatactgatgcggttgagattgctatcgacaacacggcttttatggacgagttcttt

SEQ ID NO: 186458 - DNA, 98 bp, Homo sapiens
agataacaaccctacggagccagagacttcaattgatgaattcctaggacttccggtaactatggtggtggtgggaactataatgattttggaaatta

SEQ ID NO: 186459 - DNA, 100 bp, Homo sapiens
gggaaagcctcgcgaagatgataggggggaaacctcaagatataatcttcacttccgggggcactgaggagctacagggagctggccgactgcacctggc

SEQ ID NO: 186460 - DNA, 51 bp, Homo sapiens
atgatgacccaagtatggaaataccgaaactggcaacacccagagacattt

SEQ ID NO: 186461 - DNA, 100 bp, Homo sapiens
agtaaatggattttcctggcgtaaaacaagcaaatatatgcctaggtctctggtgctgcacctcctagaccaggaagtagctttgctcattttgggtttg

SEQ ID NO: 186462 - DNA, 74 bp, Homo sapiens
tgattggaaaaggaggcaagaatattaaggctctccgtacagacggctacaggggaagaattgaaagtgaaggc

SEQ ID NO: 186463 - DNA, 50 bp, Homo sapiens
acgatgagctcaatcggcactgggacaagttggatggcttgaggactggt

SEQ ID NO: 186464 - DNA, 114 bp, Homo sapiens
caaagactaaactgacaagccttcaaggagcccaggggcaaatctgagtagcctccaagaggcacacaagcagaggatgggctgtgttgccctgactgccagccccaggcacag

SEQ ID NO: 186465 - DNA, 82 bp, Homo sapiens
agcggctcacgcagcgcgtactgtgccacttcagtgtgcgggtgacagtggagttcacagggcccccacagaagcccccgag

SEQ ID NO: 186466 - DNA, 100 bp, Homo sapiens
gaaaaacatttgggaggtgtctagcccagtggaccttctgaaggtatggcacagtcacaagggtgggtgaaaagatacatcaaggccttttgtaaaggct

SEQ ID NO: 186467 - DNA, 83 bp, Homo sapiens
gccaattctggaaccaaacccaagactacggaatgtatcctgtcaggtataatgtcagtgaatggcaagaaagttcttcatat

SEQ ID NO: 186468 - DNA, 83 bp, Homo sapiens
gcaagtgtctctactgtcagaccacacacagactgactttggtttctgtgcccagatcacccctgagcagagcaaacgcagta

SEQ ID NO: 186469 - DNA, 74 bp, Homo sapiens
taggattagatgatccaagtcaccaagaaattactgtctcaagtgatacgggcagctcagttctggcaccaaac

SEQ ID NO: 186470 - DNA, 75 bp, Homo sapiens
ccgcgctgctggcgcgccacgagcaggtggccctcatgacactgacgctcttcccggtccggctcctggttgccg

SEQ ID NO: 186471 - DNA, 101 bp, Homo sapiens
ccccctggccacggctccaggtcacggcccccagcgcagcctgcatgttccaggctgcatagagcctggacctgggcactggggtgagctgagccggacac

SEQ ID NO: 186472 - DNA, 100 bp, Homo sapiens
cagatgtgctgtaaacatcaaaagaagacggtgggatcaggagatgaaggatgccctgcagtggtctcgccatccagctacagtggagggagaggagcca

SEQ ID NO: 186473 - DNA, 50 bp, Homo sapiens
gtggattatggatcagatccaaatcacaactagaagccatttgtgtcaag

SEQ ID NO: 186474 - DNA, 82 bp, Homo sapiens
gtggccgtagcggcttgttggataagacaatgcagatcttcgtgaagactctgactggtaagaccatcaccctcgaggttga

SEQ ID NO: 186475 - DNA, 147 bp, Homo sapiens
ggcaaatgctctctggaggatctgaaacttgcgaaatccctggtgccaaaggctttagaaggttatatcacaggaagaaaacttggatacaccttcaacaatcagaactttcacaacgtgtctttggggcaaggacaggaagtggtg

SEQ ID NO: 186476 - DNA, 100 bp, Homo sapiens
ttgccctgtctcctcgcagatgaggatcttagaaatgaagttgaaaaattacgcaatgaagtgaatgaaagagagaaagcaatggaaaatcgttacaaga

SEQ ID NO: 186477 - DNA, 95 bp, Homo sapiens
ttgtcttctccactgttcctggaggaatccgagaagagcagagcggagggagccccagacacgccaaactggcaagacgcagtcaagaacgggac

SEQ ID NO: 186478 - DNA, 100 bp, Homo sapiens
gaagtgcttggggatggagtgcctccaaaggttgctgagtattcatgtgattgaacggcgtgctcttcctgagttcttcaatggaaaaaacaaatccaag

SEQ ID NO: 186479 - DNA, 75 bp, Homo sapiens
cttcagaaagtgaacttggcattttagatctaattcaagagtggcgggtgaggaggagctgcaggtgattcagcc

SEQ ID NO: 186480 - DNA, 100 bp, Homo sapiens
caagaacagagggattctttgactcagaaactacagaaatttaaaagcctgttgattcaagaactttctaaagtatttccggaagacatggctaagtatc

SEQ ID NO: 186481 - DNA, 75 bp, Homo sapiens
ttgtttctgctgaccgcgggccctgccctgggctggaacgaccctgaacactactgagcctgtggcggccaccga

SEQ ID NO: 186482 - DNA, 74 bp, Homo sapiens
atcgtatcgtatgtccgctatccagaacctccactctttcggtcatgcaagacaagataatctgccttccgaaa

SEQ ID NO: 186483 - DNA, 100 bp, Homo sapiens
ggacctccgtgaaggcgtccgtcctgcgcatcgcaatagttcatttaaagcccccatccctgcaaggtggtgctttctaccaatatgaatcttttcaacc

SEQ ID NO: 186484 - DNA, 51 bp, Homo sapiens
gggcacgagtcgggtcctgagaccaggtacaccaggggttggaaaaaccac

SEQ ID NO: 186485 - DNA, 99 bp, Homo sapiens
agcagaacgcccgccctggagcagttaggaccgaaggtctccggagagtcgccggcggtgccagaggcgtgcaaagactccagaattggaggcatgatg

SEQ ID NO: 186486 - DNA, 100 bp, Homo sapiens
atgattattgagcataagattgtcatagctgatgtcaagttggttgctgatttccaaagtgccggtggtggtgtgcacattgagccccggtatagacagt

SEQ ID NO: 186487 - DNA, 82 bp, Homo sapiens
cttcatcaaaaatagtgatagctttgataaagactaaggtgtcagtatgttcttcaagctgctctgctcctgggcccaagct

SEQ ID NO: 186488 - DNA, 80 bp, Homo sapiens
tcacctgaggtgaaccttcgaccttggacttctcagcctccagaatgggtctggaacagaatctgacagtgatgaatcag

SEQ ID NO: 186489 - DNA, 98 bp, Homo sapiens
ttcttcaaagaagaaagaagcctctctacagtttgttgtagaaccaagtgaagccacaaacagatcagtcgacagaggtacgttcttggagacacagc

SEQ ID NO: 186490 - DNA, 100 bp, Homo sapiens
ctcgagatgttgctgctagatattctcagactgagtgtgttgaattcctggactgggcagcatttttgaaacgttggggttgttggagtggttggatttt

SEQ ID NO: 186491 - DNA, 98 bp, Homo sapiens
taaggatgcagccagagacatgaatggaaagcatgtttgtgtcattagtgaaactggaaaagcaaaatacaaagcctaagatgagagttcaagttgag

SEQ ID NO: 186492 - DNA, 98 bp, Homo sapiens
aagggactggctgtgttattctgcatattgcagttcttgtcaatgacctgtcaatgatacacttgatgacatctttgacggttctgatgacgaagaag

SEQ ID NO: 186493 - DNA, 82 bp, Homo sapiens
tcccagtgacgggtctggagtgcgtgggggaccggctgttggcgggacagagcgggatgccaccagcttgtccaaagggaag

SEQ ID NO: 186494 - DNA, 90 bp, Homo sapiens
ctgctgctgctgctccggccgccggcgacgcgggtgttctccgtggcccgatgcccccacagcctatgtgaataacagcccttccccagc

SEQ ID NO: 186495 - DNA, 90 bp, Homo sapiens
gggggcagcgcagctgagcagcgtgagaagatcaagcaggtcagtttaggggctggtgcaaaggatgagttgcacattgttgaagcagag

SEQ ID NO: 186496 - DNA, 75 bp, Homo sapiens
tggtcagaacccagtgacctcctggagattccggtctcagtggtcccaggctgcacccatggcagaaggaggagg

SEQ ID NO: 186497 - DNA, 101 bp, Homo sapiens
tgaagcagccgatcatggcggatggcccccggtgcaagaggcgcaaacaagccaatcccaggaggaaaaacgatggcaccgaaagcgaaggaagctcctgc

SEQ ID NO: 186498 - DNA, 100 bp, Homo sapiens
agagctgatttacgagataattattctccaggttggaaattcaatcactgggagctcaaggtggaagttaaacgagctgagcctcgggacagcaagagcc

SEQ ID NO: 186499 - DNA, 98 bp, Homo sapiens
acccagcacagcaaggcagtcacaccaagccaaaatgaagtttaatccctttgtgacttccgaccgaagcaagaatcgcaaaaggcatttcaatgcac

SEQ ID NO: 186500 - DNA, 102 bp, Homo sapiens
ggcggcagtatgaccgggtttctttgatgcgacctcaggaaggagatgaggtgaccaagaatatggcccaggtgaccaaagccctggacaaggccctgagca

SEQ ID NO: 186501 - DNA, 73 bp, Homo sapiens
acctggatgagacatttgctacagcatcccacattaagtcaacggatgtacagttacccagcacgtgtacctc

SEQ ID NO: 186502 - DNA, 100 bp, Homo sapiens
agagagcgagctgagtggttgtgtggtcgcgtctcggaaaccggtagcgcttgcagcatggccccagcacccgcagagcagacactgcgatgacaacgga

SEQ ID NO: 186503 - DNA, 99 bp, Homo sapiens
cgtcgctggtgctgcgctactgcgagaacaagtttaacgacaagcacatcaccactctgcagacttcaggcccgcatagctcataggatacaagaactg

SEQ ID NO: 186504 - DNA, 90 bp, Homo sapiens
agcctcacatctccactttaagccgaattaagaaagtggtttccatctacggaagcagcattgatgtggaactccagcagagggcagtag

SEQ ID NO: 186505 - DNA, 100 bp, Homo sapiens
caggcccagtcccgggcccagctcctagtgcaaggcttcagcaaccaggagggattgactgagatcttaacaacagcagcaacgatacatcagcaaatcc

SEQ ID NO: 186506 - DNA, 96 bp, Homo sapiens
gcgggtgaccctgttcctgaacggcagccccaagaacggaaagcgaccgtggcagccatgtattacagctactacatgctaccggacggcacttac

SEQ ID NO: 186507 - DNA, 75 bp, Homo sapiens
atgacgctgaccaggacatgatgatggcagggatggtacatcaggaacgtctctatcaagaatacaatttcagca

SEQ ID NO: 186508 - DNA, 50 bp, Homo sapiens
cttgcaggagtttggacccatcaggctggagtgcaatggcgtgatctcag

SEQ ID NO: 186509 - DNA, 74 bp, Homo sapiens
tttccatggagttggccagtaaagggcctcataaatcccaggtccagcttcggcagcgtgcaatgttgccccac

SEQ ID NO: 186510 - DNA, 86 bp, Homo sapiens
atttccacttgatgtcatcacgcagaaggggtgaaagagactcggtgacagatacagctctattaccaggttttaaacttcgccat

SEQ ID NO: 186511 - DNA, 98 bp, Homo sapiens
accccctggtgccagagatagcacacacctacaaggccgacagagagaactgggatgaaagcagctccatcagtagtggactcagcgatgcctcagac

SEQ ID NO: 186512 - DNA, 96 bp, Homo sapiens
aagccatcaacatcacaaataatgaaaaagttgttgttaaaattctcaagggcaattcatgatgttaaagccacagatctgggattaggtaaagta

SEQ ID NO: 186513 - DNA, 100 bp, Homo sapiens
ggagtttctgtagatggaaaagaagtctggtcagaagggttttgtctccacaattatccgtttacttgacagcccctcaacatgcattagagcaaaagcc

SEQ ID NO: 186514 - DNA, 100 bp, Homo sapiens
tacctgactcccagtgagaaacatatgctcctcaagagaagtatatcagagaattccctggtagcaatggacttctcaggccagaaaagcagagttatag

SEQ ID NO: 186515 - DNA, 80 bp, Homo sapiens
cgaccccgtcccgaccctggccgccccgagcggagcctggaggtctcctctgagcctccggcctccataagacccaaaac

SEQ ID NO: 186516 - DNA, 83 bp, Homo sapiens
cgcctacgtatcagctccatccaggccaccactgcggcgggctctggcccgcggcgccatggctcacgtcggctcccgcaagc

SEQ ID NO: 186517 - DNA, 50 bp, Homo sapiens
attctgtataatacttcgcaagcatgagtacagtaccagaagttatcgtt

SEQ ID NO: 186518 - DNA, 85 bp, Homo sapiens
cgcccccactgatattgtttttaatgcagcgtgggaggggaggatatgacacgcgatatcgcagtagagatggggtttcactgtg

SEQ ID NO: 186519 - DNA, 100 bp, Homo sapiens
caggagccctggaatgtgaagagacatgagaccatagccaaacccccaggtttgggaagtagctgctccatacattgaaaaatacagaatggagcatatt

SEQ ID NO: 186520 - DNA, 75 bp, Homo sapiens
cccgcgcctgtcgggctgaactgagctccggtgtcggcgggtggcgcggcgcccccggagggggccatatctaac

SEQ ID NO: 186521 - DNA, 101 bp, Homo sapiens
gcggcgcccaccttcgggaggatcagagggtattgtgcctggccccccgacagacctctctgtcactgaggccacccggagctatgtggtgctcagctgga

SEQ ID NO: 186522 - DNA, 75 bp, Homo sapiens
tcagaagctaaggacaatggcagtagagatgaggtatcgaaggatgatcgcagtgatgtggagagcagctcagag

SEQ ID NO: 186523 - DNA, 74 bp, Homo sapiens
gctccctgtccggcagcctacccggctcactcagggccagtacacaacaggccggggctcctcaggagtggggc

SEQ ID NO: 186524 - DNA, 82 bp, Homo sapiens
cgacgaacatttctgggtgacactcaacaggattcccgccatggaattccatgaacacttgcacagcataggcaccaaggaa

SEQ ID NO: 186525 - DNA, 97 bp, Homo sapiens
ctgaccatggggaaaagaaacttatttctgttgacacatattgatgatgttaagaagttcaaaccgggttacctggaagctactcttaattggttta

SEQ ID NO: 186526 - DNA, 100 bp, Homo sapiens
ctcagccaggtgctcagcccccagtgggctgaaactctgacccttcctggcaccctgctctcctgcactgtgctgtgggtcatgctgctgatgtgtttga

SEQ ID NO: 186527 - DNA, 95 bp, Homo sapiens
gatgtcagaggaggaattacaacttcattttacttatgaagaaaaatctcctggcaattacatcccagcaacctctagaggatcttgatgctcaa

SEQ ID NO: 186528 - DNA, 100 bp, Homo sapiens
agaggaggccgtccagcagatggcggatgccctgcagtacctgcagaaggtctctggagacatcttcagcagtgccagaacagataaagcccagtgtaag

SEQ ID NO: 186529 - DNA, 75 bp, Homo sapiens
tgcccagagctcctggaccaatgcatcttcccaccaccttaaaccactgggcacctggacgatgacggattaccg

SEQ ID NO: 186530 - DNA, 100 bp, Homo sapiens
ccatgtttctggacgcggatttttggcctcatactctgttatagataaacaagtgtgtcaggaagctgtctgggaagccttcaggactttttgggatcga

SEQ ID NO: 186531 - DNA, 100 bp, Homo sapiens
attctccttatctcatctgcacaggaagcaggtctaagaagttttcatgggctgagctgctgagttcagcctgggaactgaggccaacaagggagtctcc

SEQ ID NO: 186532 - DNA, 90 bp, Homo sapiens
cccaatgcttgcttggatcagctgcagaactgcaggaggagcaatctcagaactgttatgaagaccttcgaagttcttcattctttctca

SEQ ID NO: 186533 - DNA, 98 bp, Homo sapiens
attacaaagtggcttctcctgccctgagagccgtgggtaacatcgtcactggggatgacatccagacccaggaggataagatcaatgccctcattaaa

SEQ ID NO: 186534 - DNA, 78 bp, Homo sapiens
gaaaaaggaagagagcactgcagccagtgaaaccactgaggttgacatcatggacatatgtgagtccatcctggagag

SEQ ID NO: 186535 - DNA, 87 bp, Homo sapiens
gccgtgggcgctcggtgcccgggccgggcagtgtaaggcaaacattggtgggcaccgatcttcctgttcattctgcaagaacccaag

SEQ ID NO: 186536 - DNA, 75 bp, Homo sapiens
caccagcctatctggtttcaaagacctcttcagcatgaagccccctgacgaagagtcctcccaaaagttcattcc

SEQ ID NO: 186537 - DNA, 101 bp, Homo sapiens
agataactgaggacaatggacctgcctgggcatagacttccttaagggcagctgcaatgactctccgcacggtattattgtcattgcaagcactattggca

SEQ ID NO: 186538 - DNA, 75 bp, Homo sapiens
cggagtcgcggacgccgcggggtctccgggacaggtggctattatcatggaaaactaatttttcccagagaattt

SEQ ID NO: 186539 - DNA, 82 bp, Homo sapiens
caccctcgctccctctgctcttcctcccttcgctcgcaccatggacatggatttgattgacatactttggaggcaagatata

SEQ ID NO: 186540 - DNA, 74 bp, Homo sapiens
agggaccatgtggctgccttgggctctgttgcttctctgggtcccaggcgcgggcggtgatgaactttgtggtt

SEQ ID NO: 186541 - DNA, 75 bp, Homo sapiens
gaattatccaacaagaaaaagacctgtggctattaagataggttgtggcagcactgcctgaaggtatgagaccag

SEQ ID NO: 186542 - DNA, 74 bp, Homo sapiens
agtgagagattttcagcttcgggacaagtacatgtttgctacaaaggtggtggcctcaggagtgcaagtagctg

SEQ ID NO: 186543 - DNA, 100 bp, Homo sapiens
ggaaaagatccctggaatatgaagagacacagtatggtagccacacccccagaatgtgacagtgatgataacatgggtgccaaaaatacttcaataggag

SEQ ID NO: 186544 - DNA, 82 bp, Homo sapiens
tcagctccacattgagagcaaaatctacaagatgatgcagggaggaggaagcgccgcggagccatcaacagcaagcagctca

SEQ ID NO: 186545 - DNA, 83 bp, Homo sapiens
tacctcgcccatgttctggccgagtatggtttgaagtggtgaacatggatttttctcggcttcacatgtacagtcctccccag

SEQ ID NO: 186546 - DNA, 101 bp, Homo sapiens
tggagcctcagttggaagcagccgatccagcctgcggagcctgtggggcagagctcagagttctacagagtcaccactgaacaatatcagaaagctgctga

SEQ ID NO: 186547 - DNA, 51 bp, Homo sapiens
ggccaggatgctatagcattgtcagtccggttgctgaaccaatccccatct

SEQ ID NO: 186548 - DNA, 100 bp, Homo sapiens
gtgctcaaaatgtgaagcaatttgggacgatgaactctttgccagcagagaggatccaggaaatacagaaggccattgagctgttctcagtgggtcaggg

SEQ ID NO: 186549 - DNA, 100 bp, Homo sapiens
taaaaaccccggagtcttcctgatccatggacccgatgaacatagacacagggcgccaatgcttcggcattagagaaagagattggtccagaacagtttc

SEQ ID NO: 186550 - DNA, 90 bp, Homo sapiens
cgagcctgggagttcgaggctgcggtgagctgtgattgcaccactgcactccagcctggattctggtacaggtcaaagaggtcctctcca

SEQ ID NO: 186551 - DNA, 75 bp, Homo sapiens
aacaagcagagagctcacctaccacaaacagccaggtagagagaaaatacaggctcaggaattgagtcatccaag

SEQ ID NO: 186552 - DNA, 100 bp, Homo sapiens
tgtgaatccaggaagagagactgactgggcaacatgttattcagtcactcagcctctgaagaagcttcgggttcagactcaggcagtcagtcggaaagtg

SEQ ID NO: 186553 - DNA, 90 bp, Homo sapiens
ctctaaaacaatgatagcaaaggctttggccaatgagagtggactgaattttctagctataaagagtcttgttctgtcgcccaggctgga

SEQ ID NO: 186554 - DNA, 75 bp, Homo sapiens
gttcggccaggtggctccaaggagaggaagcagtgatgcattgagtgaagatagtgatccggggagacaggaaca

SEQ ID NO: 186555 - DNA, 100 bp, Homo sapiens
caagtcccctgccaagatggctgagaaggcaaagcaaatttatgaagaattcattcaaacggaggctcctaaagaggaagatattttcgattcagataaa

SEQ ID NO: 186556 - DNA, 83 bp, Homo sapiens
atgaagcttctgaaccatccacacatcataaagctttaccaggctatgtttgactggctagataacactgtgattaaactctg

SEQ ID NO: 186557 - DNA, 100 bp, Homo sapiens
atccgcctgaacaacgccatctggagggcctggtatatccagtcactgctcagcacgcaggcatgtgaggaagctgggcttaaaggagactccagcaaat

SEQ ID NO: 186558 - DNA, 90 bp, Homo sapiens
gagggctacgggttcagcgaggagacctggcccagcctcgagttccgaaagcaggaagccagcagacctgcagaacttggctcccgggac

SEQ ID NO: 186559 - DNA, 75 bp, Homo sapiens
cctcccggctgtagccaagaactattcggttctctacttccaacagaagacgtgcagttcctggcctcggtgctg

SEQ ID NO: 186560 - DNA, 83 bp, Homo sapiens
ctggtggtgcttccaactgcgggacaggaagtggccgtagcggcttgttggataagatgccagaagtgggtggagaactgtag

SEQ ID NO: 186561 - DNA, 98 bp, Homo sapiens
ttcgacttggagtctttgtccaggacggactgtagaagcggccaggaagaaaaccaccccctcttaaggttgtttttgtgaccgttctttggagcatt

SEQ ID NO: 186562 - DNA, 76 bp, Homo sapiens
tgtgagaacagaagctttatctgtgatagaattgctgcttaaaaaacttgaagattctggaagttacggtcagtct

SEQ ID NO: 186563 - DNA, 145 bp, Homo sapiens
cctcggtggccccgacatgattccttacttctccgccaacgcggtcatctcgcagaacgccatcaaccagctgtagtgggcagcagtcagtgacaggtgtaacctctgtggatgacagcaacagttactggaggatacgggggaa

SEQ ID NO: 186564 - DNA, 75 bp, Homo sapiens
caggtgtaccccaagctgtacttgtcacctcgaattgagcagtgatggcatcagctgagaagggaaggaagccca

SEQ ID NO: 186565 - DNA, 75 bp, Homo sapiens
gtggttcaagaaccttgacaagctcatccggctggtaaatgcgcaggaattgaatgatctggcacgggaccctcc

SEQ ID NO: 186566 - DNA, 90 bp, Homo sapiens
tatctgaaaatttttatgttcgaggagatggtaccagagcatatttctttacaaaagtactcaacagtagaggaagctgttgccacccgc

SEQ ID NO: 186567 - DNA, 100 bp, Homo sapiens
gccttttatgtcacctcggtaccctggaggtccaaggcccccattgaggatacctaatcagggaaccattggaggataaactgagaaatggcccagttcc

SEQ ID NO: 186568 - DNA, 75 bp, Homo sapiens
ggaggagttgagaaaaaccaatgcatcaattcctgaagattgccaagcccctctccagcctcactccactgattg

SEQ ID NO: 186569 - DNA, 100 bp, Homo sapiens
aggatagaccaggctgtggaggagtggaatattgagaaggctgaggaactcagcaaccagctagctactcgagaggttaaatgggccagggaaaactatc

SEQ ID NO: 186570 - DNA, 100 bp, Homo sapiens
ccgccgccgccgcgcacgccatgggagccgtgactgacggctggcagtgatggggccaagattgggaactgcccattctcccagagactgttcatggtac

SEQ ID NO: 186571 - DNA, 100 bp, Homo sapiens
tttctcattctcatatttcaccaataaagtctcaaatatctatcagtgtagaagagtgggaagacaccaaagactccaaagaacaagggcaccaccgcag

SEQ ID NO: 186572 - DNA, 75 bp, Homo sapiens
ctcctggtgaccagcattcaaggatcaagcagaacaattctttagaagtggccatacaaacaactgggctgttct

SEQ ID NO: 186573 - DNA, 75 bp, Homo sapiens
atatagtcactctcatcaataagaatggacagcaaattatggatgaacctatgggagaggaggagattaacccac

SEQ ID NO: 186574 - DNA, 100 bp, Homo sapiens
agatgacgaagacatgacacttacaagatggacagggatgataattgggcctccaagaattaaatctcttgatgaacagtgtgtggttggcaaaatttcc

SEQ ID NO: 186575 - DNA, 97 bp, Homo sapiens
catgctcaaacattaaaaattagagcagaagttttgagccactatattaaaactgctaagggctgacaggacaactggatcagtttcattaaaaagg

SEQ ID NO: 186576 - DNA, 105 bp, Homo sapiens
gccccccaagcaacagacggcctggctggagccctggacgcccggcagcagagcactggcgcgggttgaaaaataccggccacagaccctgaatgatctcatttc

SEQ ID NO: 186577 - DNA, 100 bp, Homo sapiens
ggcgaccttccttgctttcagaatttcacccaggttctgacagggctacagaactggctacccttatcgataccctgctctgagagagaagtctaaaaaa

SEQ ID NO: 186578 - DNA, 50 bp, Homo sapiens
ttcgtcttggtaaacttggtgctgatcagctgaccgaagaacagattgct

SEQ ID NO: 186579 - DNA, 75 bp, Homo sapiens
tttgaaggaggatgctccagcagatatgtacgaccaagtgctgaagtttggtgcttacattgtggatggcttgag

SEQ ID NO: 186580 - DNA, 100 bp, Homo sapiens
ctggacgacagcgagtacacctgcaccatccagctcaaatctaatccaagtgaaaatgaagaaaaggaagcacagtctcaacttataaaatctgatgaaa

SEQ ID NO: 186581 - DNA, 75 bp, Homo sapiens
tttgcggttcagccctttgatgaccgcagcagatgggaagatccggctggcgacgctggagctgagctgcctgct

SEQ ID NO: 186582 - DNA, 82 bp, Homo sapiens
tctactaccgcacctggcacaagatcaccaagtacatcgactttgatcatgacaatgcagatcttcgtgaagactctgactg

SEQ ID NO: 186583 - DNA, 75 bp, Homo sapiens
agccctgcagacagaggtgtgctgacgacctgctacaacagaaagattcctgaaattccagaaagcatttcattc

SEQ ID NO: 186584 - DNA, 76 bp, Homo sapiens
ggcgaggcttccgcccggcacagggggtactccaaagattcaggtttactcacgtcatccagcagagaatggaaag

SEQ ID NO: 186585 - DNA, 100 bp, Homo sapiens
ccgaaattatttgcgcatttcaagaagaacaacctaactccagatatctacctaattgattggacggctgtcctcagcgaggggccgtgcacccgctcct

SEQ ID NO: 186586 - DNA, 82 bp, Homo sapiens
aaagaagctcgcaaaagcagcaaacaggcagtaatcgagcctccgggaggagttcctgggacacagccattgctgcccaatt

SEQ ID NO: 186587 - DNA, 75 bp, Homo sapiens
cgccctagacatcttctccctcccttgcctcagctgccttcctatttcaaggaaagacgccaaggtaattttgac

SEQ ID NO: 186588 - DNA, 98 bp, Homo sapiens
cgagaggaccttccacgtggattctccagacgagaggaactcagcgagatgctgtacacagaccggcccgactggcagagtgtgatgcagtacgtggc

SEQ ID NO: 186589 - DNA, 87 bp, Homo sapiens
gcatgtggatgcaggacaagccactcctccagtgtctttggtgcaacactaacaaggcttgtctggactacccagttacaagcgtct

SEQ ID NO: 186590 - DNA, 96 bp, Homo sapiens
gggtgccagaaggaaagcatagggtaatgccctgtacttcaagtctgccagaaatgttacagtgaacattctcaatgaccagactaaagtgctaac

SEQ ID NO: 186591 - DNA, 100 bp, Homo sapiens
agctgtcaaagccatcatatatcagtatatggaagaggttcctagaagccaaaccaaactgacaataatgcttgaaaaattaggaatggattatgatggg

SEQ ID NO: 186592 - DNA, 50 bp, Homo sapiens
gtgcccttcaagcgcctgtctgagttcaagctgaagaagatgtggaaaag

SEQ ID NO: 186593 - DNA, 100 bp, Homo sapiens
gaacggtgcagcagtgatggatgcagctcttctgttgatagcctgctcaacctgctgatgaacctgcagaaaaggctgatgaaccaatggaacattaagt

SEQ ID NO: 186594 - DNA, 100 bp, Homo sapiens
ggccaaagatctgacagaactggttcagcggagaataacatatcttcagtgaatgatttgggaggggacttcaaaggagttggtaaaggctccttagctg

SEQ ID NO: 186595 - DNA, 100 bp, Homo sapiens
ggcgtctccgccgccgccgccctcccttcctcttccccatcttcttctctcggtcccgggagcccccgcccggactggagatggagctgaagatgctgaa

SEQ ID NO: 186596 - DNA, 71 bp, Homo sapiens
agcagatggataccgtatcgacgtggggcctccggatgatgatgagagggatgtggatgccagcccgacgg

SEQ ID NO: 186597 - DNA, 50 bp, Homo sapiens
gaggggagccaggcggccgcctcaggtgctggagaatctggtaaaagcac

SEQ ID NO: 186598 - DNA, 75 bp, Homo sapiens
cggagagcggctgatcgcagtccggaggtgaggcggaactctgaggagttttgagagcaaaatgacaacacccag

SEQ ID NO: 186599 - DNA, 99 bp, Homo sapiens
ctcagctttctgaaatggtgtcccaccgcaaggactggagaagggatagtggccaaagcctccaagaacctcatgtccacgcaaagcttggggattgta

SEQ ID NO: 186600 - DNA, 90 bp, Homo sapiens
cttgacgaggctgcggtgtctgctgctattctccgagcttcgcaatggtatcctgtggtctgaggccatcttcctcgaggcaaggcccca

SEQ ID NO: 186601 - DNA, 75 bp, Homo sapiens
gaacttcgttgcttgcttgcctgtgcgcgcgtgcgcggacatggcctcaaacggagaactacgatgacccgcaca

SEQ ID NO: 186602 - DNA, 99 bp, Homo sapiens
cgaggaggcagccaagctcatggcctgccactgcgtgcaaaaatggctacaaacttcctagcacatgagaagatctggttcgacaagttcaaatatgac

SEQ ID NO: 186603 - DNA, 82 bp, Homo sapiens
ctacaaattttgctactgtcagatggattgactatggaaaagttgccaaattggggttctgaaggaacattaaatgactgca

SEQ ID NO: 186604 - DNA, 100 bp, Homo sapiens
aaatggcgccgaagcaggacccgaagcctaaattccaggagggacattggctccctggattatcaagagtttgtagttgacattgaatccaggctgagga

SEQ ID NO: 186605 - DNA, 145 bp, Homo sapiens
aaaacatggtggattactatgaagttctaggcgtgcagagacatgcctcacccgaggatattaaaaaggcgagcaatttacagcaatgagggatttatacatgaaaaatggacaaggatttgcattagtttattccatcacagca

SEQ ID NO: 186606 - DNA, 100 bp, Homo sapiens
ctctctgagcagctgttcgaatcatctgatatttatactgaatgagttactggctcacgccccctcagaatggaggctgctgaccccgggtcccctgccc

SEQ ID NO: 186607 - DNA, 50 bp, Homo sapiens
cacaaatgcacgcgacaggaaccagggtataactccaccagggaatgctc

SEQ ID NO: 186608 - DNA, 100 bp, Homo sapiens
tgaagagacaggaggcagtagccaaacacccagatgaccactcccgggtcctgctgaaggcggagaacagccacagccactcagactacatcaacgctag

SEQ ID NO: 186609 - DNA, 119 bp, Homo sapiens
ggactccaggaaaagccgttgagaggaccatcacaacctgagcagcacaggtggagttggcatgaacttaacagcagcagatactgtgatttttgttgacagtgactttaatcctcaga

SEQ ID NO: 186610 - DNA, 100 bp, Homo sapiens
ctctgacagctgcatggaagcccagacaccaggaaaccctcagattggaggctggtgtcccggagcagtgcaagtatgctgggagcggtgaagatggaag

SEQ ID NO: 186611 - DNA, 80 bp, Homo sapiens
gtcgctgggtgcgtggggctgcctcgccgcgtctcgccacggatgtacagttacccagcacgtgtacctcctcctcctcc

SEQ ID NO: 186612 - DNA, 106 bp, Homo sapiens
gccgtcttccccaggcctgcgtccgagtctccgccgctgcgggcccgctccgacgcggaagggtaaactggtccatgctaattttggtactaaaaaagattttgag

SEQ ID NO: 186613 - DNA, 100 bp, Homo sapiens
agacactatggaaactgagaagcccaaaacaatcacagagctggagcaacttatgactctcatctctgctgcacgagaatatgagatagagttcatctat

SEQ ID NO: 186614 - DNA, 50 bp, Homo sapiens
gacgagaggacctcagctccaagggatcgcttacacctgagacgaactac

SEQ ID NO: 186615 - DNA, 51 bp, Homo sapiens
ttcttttgctcctccacacttcccgaatacggggtgctttgcattcaggaa

SEQ ID NO: 186616 - DNA, 78 bp, Homo sapiens
agcatctttgtctagccccagtgcagccgagaccgacccgcccgcccgcggccccgcagcagctccaagaaggaacca

SEQ ID NO: 186617 - DNA, 100 bp, Homo sapiens
ggctgaaggccctacgggagaaaaccgggcgcaaggagcctgtgtgaaatgcagcaaaggggtgtttggggctggccaggcctgtcaggccatggggaac

SEQ ID NO: 186618 - DNA, 100 bp, Homo sapiens
ttgtcatgtgccacctgttcaccggggagtccctcgccacctgcaagagcctgcagcagtcgcttctccgcaggaaggaagcagccaccctcgccatggc

SEQ ID NO: 186619 - DNA, 100 bp, Homo sapiens
gaggccggccggtgccagcacctttcggcttctgagacggcggcagcagcggcattcagcatctctggaagttgatggtagaagaatccgatttactggg

SEQ ID NO: 186620 - DNA, 90 bp, Homo sapiens
gtatcagagtcgggagagctttctggatgatgtaaaccttattctggccaacagtgttaagtataatggctggttggaaggaaaatcatg

SEQ ID NO: 186621 - DNA, 83 bp, Homo sapiens
actgaaagaaaaagcgaagaaacggaagggtcgcggctttggctccgacctgcctagagctggaacgttacctccagagcgag

SEQ ID NO: 186622 - DNA, 101 bp, Homo sapiens
ggggatgaagcagctggcttagaagcagatctggaatgcaaacagatctggcaaaatttggggttatcaatagtctggctgtctatcgtcatcgtgagact

SEQ ID NO: 186623 - DNA, 49 bp, Homo sapiens
tatcaagtaatggtgcaaagcctgaaggcccttatattctcaagaccga

SEQ ID NO: 186624 - DNA, 75 bp, Homo sapiens
atcttttgcctggaccttgcatattttgggacttgagaccaggagacgtatccagcaagcggaacctctgggaaa

SEQ ID NO: 186625 - DNA, 100 bp, Homo sapiens
atagaggcagcagaagccagggcagctgaaagacagagaccttcaggcagcacacttctgcttttgttccttcatcaggacgaatttactcttttgggct

SEQ ID NO: 186626 - DNA, 74 bp, Homo sapiens
cagcctgaacggagtgtgcgacggattgggagctgaacatccatgtgggaaacatttccctggtggaccagttt

SEQ ID NO: 186627 - DNA, 100 bp, Homo sapiens
ccctgcctctccctgggctctgcttagcagtgtctgcaaaaacgaatcttttcctacaacctgttaactgactggactgttggtaacaaagtaattgtga

SEQ ID NO: 186628 - DNA, 100 bp, Homo sapiens
ccgcgaaatcggcatgtggtacgcgaaaaaacaggggcagaagaacaaggaagcggagaggcaagaggaatccaaatgagactcagaacaatagcacaag

SEQ ID NO: 186629 - DNA, 100 bp, Homo sapiens
cgggccgagatgtctcgctccgtggccttagctgtgctcgcgctactctctctttctggcctggaggctatccagcgttgttcctcaaagtcattcaagc

SEQ ID NO: 186630 - DNA, 134 bp, Homo sapiens
cctggaaccttcttttgtttgtcagcagccaaggtgtttccaggaagttcagagagaacaggtactccaaagattcaggtttactcacgtcatccagcagagaatggaaagtcaaatttcctgaattgctatgt

SEQ ID NO: 186631 - DNA, 75 bp, Homo sapiens
cgacgacagaacccgagagcgttcattccgggggcacaccctctcagcgggtggactccattatgctggtggaag

SEQ ID NO: 186632 - DNA, 75 bp, Homo sapiens
ccgggagagtgagagctccccaggggagttctctgtgtctgtgaagcctcccgaccctctgtgtttgtgtcgcga

SEQ ID NO: 186633 - DNA, 90 bp, Homo sapiens
ttaacgtctctgttagttcagagatccgatctgtgatcaggaggagctgggagtctggccacgcacaccccatgtcccgggagccctccc

SEQ ID NO: 186634 - DNA, 50 bp, Homo sapiens
cgtggatccaagatggcgacggcgatgatgttcatgagagcgcagtttga

SEQ ID NO: 186635 - DNA, 75 bp, Homo sapiens
cgtggccggaggagtctcagagctgtcagaaaggtcaactgcaacttggcctcttgatccaccaaaggatgagaa

SEQ ID NO: 186636 - DNA, 82 bp, Homo sapiens
cgggctgctgctccagagggcggagtgcaccaattccagctggacatcactgtgaaaatgggacgggataaagtccgagaaa

SEQ ID NO: 186637 - DNA, 101 bp, Homo sapiens
ggtgcacggaccgggggacttgcgcctgaacaagcccctgagctggaaaacctcaccgtgactgaggttggctgggatggcctcagactcaactggaccgc

SEQ ID NO: 186638 - DNA, 95 bp, Homo sapiens
ggggctatggaggtgatggacgtgttctccactgatgacctcaccggatttttacagccaatggagatcttcgtggatgatgagacgaagttgac

SEQ ID NO: 186639 - DNA, 75 bp, Homo sapiens
tgctaaaagatgacagacttggacaacatgtcccaacattacatcccagatatacacatgacaccatccactgac

SEQ ID NO: 186640 - DNA, 74 bp, Homo sapiens
tgctgaaaactcggcttccagcgatgatctcttggtggcagagcttttcctccgcaaccatgtctgacaaaccc

SEQ ID NO: 186641 - DNA, 96 bp, Homo sapiens
aggcggtggcggcggctgcccggggccaacatgaccaggtgttcccttcccaaagaacttccttcagatctgcaagaagatcctgtgccgcctttt

SEQ ID NO: 186642 - DNA, 73 bp, Homo sapiens
taccagccactgaacctgaccattggggtcacggtgtttgccgtggggaaccaatggagatcttcgtggatga

SEQ ID NO: 186643 - DNA, 100 bp, Homo sapiens
gaccgagagcgcgaatatcgtcatcgttagaagaaatgatgtgctcacgggtgccctctgaacagtcttctggtacctctctcttgcctaaagacggtgc

SEQ ID NO: 186644 - DNA, 99 bp, Homo sapiens
cgcctgttctcgggctgtttggcggggtctccctcttttgtccaaggctggagtgtggtagtgctatcacagctgactgcagcctcaaccttccaggct

SEQ ID NO: 186645 - DNA, 75 bp, Homo sapiens
gcgtcttggcccgggcagcagtggcggcagcgcccgagagagatgcgagccacccctctggctgctcctgcgggt

SEQ ID NO: 186646 - DNA, 90 bp, Homo sapiens
cgcagtcgcccgcaaccggggcgaatcatggcggccgccaaggtggatcatccatgccatggagtatgaacttcagatccgtggcggaga

SEQ ID NO: 186647 - DNA, 96 bp, Homo sapiens
aggagaaaatacggcattgctagggtgtccgcaatgttgccagtgtctgtctgcagattggctacccaactgttgcatcagtaccccattctatca

SEQ ID NO: 186648 - DNA, 85 bp, Homo sapiens
agcaagccgaggtacttctatagaagggtgcacccttacagatggagcaatgtctgcagatgcctccaaggagtccgaaaccaag

SEQ ID NO: 186649 - DNA, 83 bp, Homo sapiens
attttggaatacattgtgaaatatagaagtctttagccacagtagaagacttccagattcgtccacatactctctatgtacat

SEQ ID NO: 186650 - DNA, 75 bp, Homo sapiens
gaagcatattcacgagcatgcgaaggcgaagcggcacaacctggaatcatctcccctgccccacaaacatgaaag

SEQ ID NO: 186651 - DNA, 98 bp, Homo sapiens
ccggctgccatcttagtctagggactgaggagtcgccgccgccccgagtcccggacttggactaaagtctgatgaacttcccaatcagatgagcatgg

SEQ ID NO: 186652 - DNA, 100 bp, Homo sapiens
ccccggcctttgccccaatcttgtgtgggcactgaagggggactacaggttcgagacactattcctgatcagagaactccagttgcttcaacacacagta

SEQ ID NO: 186653 - DNA, 100 bp, Homo sapiens
ctggccaaagcctgcccagacggctcacctgtgcgggatggaacaaaaggctccgagctctgtccagtggtgggagtattacatcccctcctctttctcc

SEQ ID NO: 186654 - DNA, 83 bp, Homo sapiens
gggagaaagtttcatctgtggatggagtattggtgcaatggatgagcttcatagtctggatccaagaaggcaagagttattgg

SEQ ID NO: 186655 - DNA, 100 bp, Homo sapiens
gctcatcagactgaccgtgtcttacatcagttcagagaggaaagatgaatgggagggctgattttcgagagccgaatgcagaggttccaagaccaattcc

SEQ ID NO: 186656 - DNA, 51 bp, Homo sapiens
tccacacaactccagtgctaactcaacagctgaacatactgacttgtggag

SEQ ID NO: 186657 - DNA, 96 bp, Homo sapiens
ctcgagcgacagagacaagctgagcttgccgcacaaaaagctagagaggaaaactggaagagcttacataagaaaggtattgcaacatacgactcc

SEQ ID NO: 186658 - DNA, 75 bp, Homo sapiens
gctccctctcgggcgactggtaccgcaggaaccagttgtggaagatatcaataagcgcagagagccgctccccag

SEQ ID NO: 186659 - DNA, 76 bp, Homo sapiens
caacagcgacttctcaggcaagcccagactcggcctttccaacagggccgttgctccagggagaactgcaaatatc

SEQ ID NO: 186660 - DNA, 75 bp, Homo sapiens
tgactttcagctatggaatcggtagcaaattatggagttggaggacagtatgaaccccattttgactttgcacgg

SEQ ID NO: 186661 - DNA, 76 bp, Homo sapiens
caggtgacagtctgcatgtgcagttttcagggtaagaaggtggatggctctgtaaatgcctatgccataaatgtct

SEQ ID NO: 186662 - DNA, 83 bp, Homo sapiens
ggtaacagggccttgcctagtgggccttccttcccaggtatgatctcgtgaaatcttgagagaaactgaatgacgaatgaaac

SEQ ID NO: 186663 - DNA, 100 bp, Homo sapiens
gacagctgcctccaggtgtttgaatcgctgagcgatatcacagaacacaagattaatcaatgtcaactgacaggtaaatgagctggatggtatcccgttg

SEQ ID NO: 186664 - DNA, 51 bp, Homo sapiens
agaaaatgactttctgccggtagaaaagataaacaggggtcacatgacgac

SEQ ID NO: 186665 - DNA, 100 bp, Homo sapiens
cgcgcgcgaagcgagcgagaaggcacggagtcgccgcggagcgcaggtgaattttgtggtatgccagcttgttgctctgtttgctgctttctggtttcgc

SEQ ID NO: 186666 - DNA, 75 bp, Homo sapiens
tggcatcggtcaaggtggccgtgagggtccggcccatgaatcgcaggcgaaagggcgtgtggttgcgcctgagga

SEQ ID NO: 186667 - DNA, 74 bp, Homo sapiens
gaggacccgggctgggctttcctcacccggccaatggtaatgatagtaaaaaatttaaaggagaagataaaatg

SEQ ID NO: 186668 - DNA, 100 bp, Homo sapiens
cggagtggcagactgacaactgtgagacatgcacttgctacgaaacagaaatttcatgttgcaccctgtctgcacctgttcagcatttggcaggatggca

SEQ ID NO: 186669 - DNA, 51 bp, Homo sapiens
ctcccaagtagctggtactacagctggcacacccataccgagcagcggtcc

SEQ ID NO: 186670 - DNA, 127 bp, Homo sapiens
ggaaagaagccaggtgagaagacaatctctagcatcaaagcatggatcagacatcacacgatttttgatagaggaaagggtcgccagagacaagccattttgggagaacacccttcttcgtttagac

SEQ ID NO: 186671 - DNA, 114 bp, Homo sapiens
caggacctggcctgaagacatttcctctcctcccctctggatttctcagagagaaccatggagtctggcagtaccgccgccagtgaggaggcacgcagccttcgagaatgtgag

SEQ ID NO: 186672 - DNA, 100 bp, Homo sapiens
cgacaagtcagaccggggccacgacaagtctgacagggatcgagagcgtggctatgacaaggcctgatcttcgtggtggacagcaatgacagagagcgtg

SEQ ID NO: 186673 - DNA, 83 bp, Homo sapiens
gaagaaaccagccgaacttcagggtttccaccgttcgttcaaggactcctcctattttgaggacttctccaacatctccatct

SEQ ID NO: 186674 - DNA, 97 bp, Homo sapiens
tttgaaggtcccttgtggggactggaaagaggacggaggaaacaccaattggaagcctccgctcaactgtaagatttataactacctgaacaggatt

SEQ ID NO: 186675 - DNA, 73 bp, Homo sapiens
cctcatcatcattgccttcagccagggggtgtgatccctcacatccacaaatctctgattggaaagaagggac

SEQ ID NO: 186676 - DNA, 71 bp, Homo sapiens
cggacggcgcctctcgaacgagtgtgggcgcgaggtaccagcagatcctgcaccggaacctggtatacctg

SEQ ID NO: 186677 - DNA, 83 bp, Homo sapiens
ctgagatctatgatcccacatctggaatctggaatgaaatcttccaagtccaaggatgtatgatatcatcaagttgaatcgaa

SEQ ID NO: 186678 - DNA, 100 bp, Homo sapiens
gtacagcacttgattattttgctgcattgtgaaaggacctctccagcaatgattacttcagaattaccagtgttacaaattgatgaattgcaagtttgtg

SEQ ID NO: 186679 - DNA, 100 bp, Homo sapiens
tggaagcaatctgcattcataactttgattggagaataaatggtatacatggtgctgtctttggaaaaggaaatgactataccctggtgcttaaggagag

SEQ ID NO: 186680 - DNA, 83 bp, Homo sapiens
gcatagaagccgggattgagcgcatcaaggttggtgttcgaggaagagacattgttgttcttggtgtggagaagaagtcagtg

SEQ ID NO: 186681 - DNA, 75 bp, Homo sapiens
gatggagcagaggacattctagagaaaggtggctttggtggcagccgtggtggtggtggatatggtggcagtggg

SEQ ID NO: 186682 - DNA, 90 bp, Homo sapiens
aaaccgatctgcccgttgtgtttgtgaaacagagaaagataggcggccatggtccaaccttgaaggttactcactataaacaatatccac

SEQ ID NO: 186683 - DNA, 100 bp, Homo sapiens
cgcagatgttgtcaaggtggcctaccaggaggccaggggtgtcgccatggagtcaaattgactttatcagctttaatcgatgggaagaacttcagtgcag

SEQ ID NO: 186684 - DNA, 98 bp, Homo sapiens
ggtggtggccttcgcggtggcgatgctcttcttggaaaaccagatccagaaactggaggagtcccgctcgaagctagtgaaagagtttctagccaaag

SEQ ID NO: 186685 - DNA, 51 bp, Homo sapiens
ctcgtccgagcccacccgcctttggagattttatttggagagaagcaagca

SEQ ID NO: 186686 - DNA, 50 bp, Homo sapiens
gtccgggagaagagcgaccctcacacctgtggccgtgggttctacaagtc

SEQ ID NO: 186687 - DNA, 50 bp, Homo sapiens
cttgacagagctgggcttgcacttccggagaactacgatgacccgcacaa

SEQ ID NO: 186688 - DNA, 100 bp, Homo sapiens
atggtgctactggagaatgtcagaactttctggaccctggtatggctgatggcaagcattgtacttttccacatctgcctggcaaaacctttgtctataa

SEQ ID NO: 186689 - DNA, 122 bp, Homo sapiens
ggtcgaggacggtcggactcccgcggcgggaggagcctgttcccctgagggaactctaatgatccaggacaaagaagttaccctggagtatgtatcaagcctggatttttggtactgcaaac

SEQ ID NO: 186690 - DNA, 90 bp, Homo sapiens
gtttcagaagacgaggcagacgtggctcctgctgcacatgtatgacagtgacaagagctcaggccccggggcctccagcggcaccagcgg

SEQ ID NO: 186691 - DNA, 86 bp, Homo sapiens
ctgcggccgccctgggccgggccccaccggacgggtgagaactctgtctcagtcgacgggaagtgcagtgactccacgctactgag

SEQ ID NO: 186692 - DNA, 90 bp, Homo sapiens
gggccgtgccgcagatgcccaccggaatggagaaggaagaggagtcggatcttagtaagagccctaagaccatgaaaaagctgctgccca

SEQ ID NO: 186693 - DNA, 100 bp, Homo sapiens
gcggcgagcgctcgcgagcggctgcgggacgcgaggtttccggttcttcctgctgctgctgctggtgttcctgctggaggccaccatcgccatcctcttc

SEQ ID NO: 186694 - DNA, 96 bp, Homo sapiens
gtcggtgaccgcgcgactcggcgcccgcccgcgggttatggtggctatattgcatcaatgatcttaaaatcagatgaaaagctttttaaatgtgga

SEQ ID NO: 186695 - DNA, 75 bp, Homo sapiens
cgacgcgcggcgtttacccagcgcagcgttccaccgctcgggtttggctggaacctaaaggcagacccagaagag

SEQ ID NO: 186696 - DNA, 96 bp, Homo sapiens
ccgagaggctcggtgggcgcgggcggcgaggtgcaagttctctcctgttgccctgagtgcccactcccaggccctctgtatgagtgacacttcagt

SEQ ID NO: 186697 - DNA, 100 bp, Homo sapiens
aacactctaatgcaggatctaaagccttttcgcattttaatcagtttactggacaaacctgagctagatctcccacctcctgcaacccgagaaagaccac

SEQ ID NO: 186698 - DNA, 100 bp, Homo sapiens
gcaagatgaagagacagtgcggaagcttcaggccagcacctggctgcagtggaagaaagaaagatcaagtccctggtagctctcttggttgagacacaaa

SEQ ID NO: 186699 - DNA, 100 bp, Homo sapiens
gggaaacaaggcttccagtgccaaggagctgacatggacccaaatcctcgggccgccctggagcgccagcagctccgccttcgggagcggcaaaaattct

SEQ ID NO: 186700 - DNA, 90 bp, Homo sapiens
ggaatatccatgtcggcttgtagagagattgcagttggaagtgtatcctcccttcttattttttctagctgttggaggtgtttaccaccc

SEQ ID NO: 186701 - DNA, 76 bp, Homo sapiens
agtctacgtcaggctcaagcaagcttccgggatgattcttctgatgtagagcgactggaaagattcttcgactcag

SEQ ID NO: 186702 - DNA, 87 bp, Homo sapiens
tacttcagaagtggggaaatgtggttcagcactgagtcatgcttgcttctgctacgcactgatttgttctattccagttttcacgta

SEQ ID NO: 186703 - DNA, 90 bp, Homo sapiens
ggagtccaactcagaggacgaggcctccttcaagtccgaggttaatttggagtggcccctggagtcagtttcctacaccatccgaggccc

SEQ ID NO: 186704 - DNA, 98 bp, Homo sapiens
tcagaaacagtgctgaagcctttaaatgcagcatctgcgatgtgaggaaaggcacctccaccagatctgaacagaattaagacgaacgagctttcaca

SEQ ID NO: 186705 - DNA, 83 bp, Homo sapiens
ggaagatgcaatgctgatgtttgataaaactaccaacaggcacagaggcgactgataacgttcaatgaagcggacgaaagtgt

SEQ ID NO: 186706 - DNA, 93 bp, Homo sapiens
gagagatggagatgggcagacggattcatttagagctgcggaacaggacgccctctgatggcgtgatggtgggcatgggtcagaaggattcct

SEQ ID NO: 186707 - DNA, 100 bp, Homo sapiens
aaaggatgggaattccacagtaatgacccattgccaggacgcatcaaagttgactttgtgatccctaaagaacttccctttggagacaaagatacgaaat

SEQ ID NO: 186708 - DNA, 75 bp, Homo sapiens
caagaatacctgcccgcccaaggatgacccccaggttatggaaggaaattcggcgccttcatcagtatgtgaaat

SEQ ID NO: 186709 - DNA, 82 bp, Homo sapiens
cacgagctgtgaggggattcacttgtgtgcggaactcctcggaaccatgccttatgccagcctggaccatcttggaggcagt

SEQ ID NO: 186710 - DNA, 78 bp, Homo sapiens
tgccctgcagtacctgcagaaggtctctggagacatcttcagcagggagttgaccacatttggccatttcccagaagg

SEQ ID NO: 186711 - DNA, 75 bp, Homo sapiens
tgatgggcagtcaacagctaaaaccttcctcaccgtgtactattcctcatggtgcaaaatggccattccagctcc

SEQ ID NO: 186712 - DNA, 90 bp, Homo sapiens
ctttcatcacatggatcctcatccagtttgcatttaggtgccagcgagatttcagattcctgtaaacctctaaagaaaaggagtcgcgcc

SEQ ID NO: 186713 - DNA, 104 bp, Homo sapiens
tgctcagggtacatggagctgatggtgaagttgaagcaaaatgaggccttccctggccccaaggagtttgggctttgcaaaactgagaacaaagccaagtcggg

SEQ ID NO: 186714 - DNA, 100 bp, Homo sapiens
tctctgcccgcaacacatatcagtgatatggagaatgcagaaaacattctcacagtgatgagagatgccggaattgagcctggtccagacacatacctcg

SEQ ID NO: 186715 - DNA, 75 bp, Homo sapiens
ctggtgcatccttggcagaaagtgaggaggaaaacacccccatttttccacagtgcctacacaacctgataatcc

SEQ ID NO: 186716 - DNA, 99 bp, Homo sapiens
ccggacatctgctttatatttctctcagaccattcccatcagtgagcattacagaacgccaatctgaattgccaacgcaaagcaaagcgagcttcccca

SEQ ID NO: 186717 - DNA, 50 bp, Homo sapiens
tatcgtcgagaagcctatcatcggattctccaaaagcccagctacgccgg

SEQ ID NO: 186718 - DNA, 100 bp, Homo sapiens
ggagcaggcgctgggcgagccgtgcgatctggacgcggcgctgctgaccgacatcgaaggcccgatgagagaaagggaaagttaaggatgctggagcaga

SEQ ID NO: 186719 - DNA, 100 bp, Homo sapiens
acatggagcccgaggccggcgccggcgccggcgccgcggcctcttcggctgcggaccctgccattccggaggagggatcatggcccaagttgcaatgtcc

SEQ ID NO: 186720 - DNA, 90 bp, Homo sapiens
tgagaaccctacttgcctaaatgaggaatgtctttcctaccatctaaaatacgaaggtttctggctggtgagaaagatcagtctaaagaa

SEQ ID NO: 186721 - DNA, 74 bp, Homo sapiens
aagctgaaaggccagttcacgacggacaatgcagatcttcgtgaagactctgactggtaagaccatcaccctcg

SEQ ID NO: 186722 - DNA, 82 bp, Homo sapiens
cgccgccgaagaagcatcgttaaagtctctcttcaccctgccgtcatgtctaagtcagagttgatcatggccttgccaggtt

SEQ ID NO: 186723 - DNA, 50 bp, Homo sapiens
gccagagctggacctcaccagcaagcgtgccaagttggaggccgccattg

SEQ ID NO: 186724 - DNA, 83 bp, Homo sapiens
atttgtggaagtgattaaagactccactcctgtggacaaaaccaagttggatcctaacaagcctcctgacaaggtgatccggg

SEQ ID NO: 186725 - DNA, 83 bp, Homo sapiens
ttttctgtacaccaatggaaagtgcgtcatcctaaggaacatcgacgtggaagttaaacgagctgagcctcgggacagcaaga

SEQ ID NO: 186726 - DNA, 100 bp, Homo sapiens
aaaccagctgaggtgtccgtaaagattccagagaagcctgtgaacaaagatttgacgaaacgttcgagtcaaacgcagaataaagccagcaggaagaggc

SEQ ID NO: 186727 - DNA, 95 bp, Homo sapiens
acagggattgagtgggccccaaacggctgtgtgctggcagtgtgggacacctgcttggagcgtgagtgcatctccatccacgttggccaggctgg

SEQ ID NO: 186728 - DNA, 89 bp, Homo sapiens
ggccgaggtaactaccgagtcttcggcgggctcgcgagcccggccgcggcctgctggtttcagaaccgtgggtaccgatggatgtggcc

SEQ ID NO: 186729 - DNA, 96 bp, Homo sapiens
gagatgggcatctaccagatgtacttgtgcttcctgctggccgtgctgctgcagggtgatgaccagttaaatgtatttggagaggacactatggga

SEQ ID NO: 186730 - DNA, 88 bp, Homo sapiens
acaaggcaacagttctgggtgaatatgctttacccaaaggagtaccattaggcttctcagctccaccagatggcctcccccaagtccc

SEQ ID NO: 186731 - DNA, 90 bp, Homo sapiens
tgatcgagaggatctggtgtaccaggcgaagctggccgagcaggctgagcgatacgacgtaatctatgccagcaattatgacaatgttag

SEQ ID NO: 186732 - DNA, 90 bp, Homo sapiens
ttggaagcaatgtttgaacaaactcgaagaacagctgtggaaagaagttgcaaaacactggcaattcaattaaaccccagctatatcagg

SEQ ID NO: 186733 - DNA, 100 bp, Homo sapiens
gcccggacccgcggccggccagcagactccccagccacctggggctcccattatggcagcaaatcaatgaggacacgggaacagcacgtgccattcagag

SEQ ID NO: 186734 - DNA, 82 bp, Homo sapiens
gagagcggccacaccatgcgaggactggagactgatgcatgagggggctacggaggcgcaggagcggtggtgatggtctggg

SEQ ID NO: 186735 - DNA, 74 bp, Homo sapiens
gtctctctcatcgaggcccaaaccgccaaggagctggaggatcttcagaagaagcctcccccatacctgcggaa

SEQ ID NO: 186736 - DNA, 110 bp, Homo sapiens
atgctaagaaagaatcttgtcactttagccactgctactacagaatactctggagcagtgcaatgtgtgttccaagcccatcatggagcggattctccgagccaccggga

SEQ ID NO: 186737 - DNA, 82 bp, Homo sapiens
cgaggcaaggagctaaagcagcgtgcgttcagccctggggaggccgccgagcggctgaattccgtggagccggtcaggttca

SEQ ID NO: 186738 - DNA, 90 bp, Homo sapiens
accagcagcaaggcagaaccaccccagtgcacctccctggcctggtctgctgatggccagagcagccagacacagtctccaacgccacca

SEQ ID NO: 186739 - DNA, 100 bp, Homo sapiens
acagaagaggaaggtctgggtgatgtcattggaaaagaaagcagaagaactcacccagacaaacatgcagcttcaggctggagtaaaagggacattggga

SEQ ID NO: 186740 - DNA, 51 bp, Homo sapiens
ggacttatttcagcttaataaggttatcaatactctggctgaccatcatca

SEQ ID NO: 186741 - DNA, 75 bp, Homo sapiens
tgggccagctgcgggctgagctggccagcgcagacaattgtggcaattaataaagacccagaagctccaattttc

SEQ ID NO: 186742 - DNA, 100 bp, Homo sapiens
ctagtatttgaatttgctagtaacgtcatggaggatgaacgacaggcttcccagcagcggcttatggaccagtggcagcagcggcggtggcggcagcaag

SEQ ID NO: 186743 - DNA, 51 bp, Homo sapiens
ccgccgagacccagcacatcgccgaccagctctggacatcctgagcccaag

SEQ ID NO: 186744 - DNA, 89 bp, Homo sapiens
cgaggctcttcccaaattccttcaatgataaattttgtgatcagatgatgtggctccggaagcctggttggcattgacaacaaaatcga

SEQ ID NO: 186745 - DNA, 95 bp, Homo sapiens
agattttttagtctaaatgatgggcagtcatggtcccagaaacgtcactatcaagaagataaagagttctatctgtcttctacgcgggaaaatct

SEQ ID NO: 186746 - DNA, 75 bp, Homo sapiens
cagccaacagagctgtggttggtatcccacctgaccagcagcgtctgatatttgccggcaaacagctggaggatg

SEQ ID NO: 186747 - DNA, 82 bp, Homo sapiens
tagatgagccccgaaaggccgggcagggggatatgagactttctactcggaatatcctgagtgttgcgtggatgtaaaaccc

SEQ ID NO: 186748 - DNA, 97 bp, Homo sapiens
aggggagcgaaggctgaggtggcagcggcaggagagtccggccgcgacaggacggcgagaaccactgtctctgatcaacgtgcggaagaggaacgtg

SEQ ID NO: 186749 - DNA, 82 bp, Homo sapiens
tccgagctggggttggacgctgccagtttgcacagcagcaggtcgcctgcgaggccgctggccaggcctgagcctctgccac

SEQ ID NO: 186750 - DNA, 141 bp, Homo sapiens
gctggagaatctggtaaaagcaccattgtgaagcagatgaggatcctgcatgttaatgggtttaatggagaatgggcctttgggtccccgaggattagctgaagctacagagatgtgcactcaagagtgcttggttttggg

SEQ ID NO: 186751 - DNA, 82 bp, Homo sapiens
gagcagacccttgctgccaatgaacaagcagacagccctcagcgcctttttccaggagaccaacatcccctacagccaccat

SEQ ID NO: 186752 - DNA, 98 bp, Homo sapiens
gctactcagtttacagccactgcagtatcacagccagatttctcgaatgctggcagccaaaaccgttttggctatccgttatgatgcttttggtgagg

SEQ ID NO: 186753 - DNA, 75 bp, Homo sapiens
ggctgcgcagtgaagaaaatgattattctgtcattatcgagctagttgatgaccattttgaaggctctctccgca

SEQ ID NO: 186754 - DNA, 82 bp, Homo sapiens
ggagcccaaacccggggcaggcgggcagctgtgcccgggcggcacggccaggaacaagcacatcatgattgacttggggact

SEQ ID NO: 186755 - DNA, 75 bp, Homo sapiens
cctgcacacagccaaagtctgcaaagggaacaagctaccctctgagtcagcactggacttgaagataaatcctac

SEQ ID NO: 186756 - DNA, 100 bp, Homo sapiens
gactgacacccataccttttgggcttcagaatgcagtgttttcgaaaatgtgccagaggaacttcaagaaccattttacacagatcagtatgaccaggaa

SEQ ID NO: 186757 - DNA, 101 bp, Homo sapiens
cgcaggtctgcaggtccgcgcccactgcccgcggcgccactgaccatgtcggatctcccttgagtttagaaatctggctgagaaataccaaacagtgattg

SEQ ID NO: 186758 - DNA, 100 bp, Homo sapiens
gggctcaggcccagcagggccatcggccatacttcctgaaaaaatggctcatgtacatgctgctgaagcacctggtagacaggtacaatctctactacgc

SEQ ID NO: 186759 - DNA, 100 bp, Homo sapiens
gttagacagagccgagaacctacttcacgaccactatggagggaaagaatactgggatgggctgggtgaccgatggcttcagttccctgaaagactactg

SEQ ID NO: 186760 - DNA, 83 bp, Homo sapiens
ggactgcaagcgaggcacttgctaactcttggggtcctcactgagcagcgagtcgtcccccgtgtcctctccggccaccaacc

SEQ ID NO: 186761 - DNA, 100 bp, Homo sapiens
gagactataaccacggtgtgctgaagataaccatctgtcgcgttccttcacctcgggcagaataactttgcagaagcccacaggttcttcacagagatct

SEQ ID NO: 186762 - DNA, 100 bp, Homo sapiens
ccagaagttccacgctctgttaaaggaagagttcagccctgaagacatccagatcattgcctgtccatctatggaacagtggtggtgaccgcggtggctt

SEQ ID NO: 186763 - DNA, 100 bp, Homo sapiens
gcggtccctgtgacctgtggagacacggccagatctgccctccagcgaggattaaatccaccacacagggtgaaatctatctccatgacaacattcacac

SEQ ID NO: 186764 - DNA, 82 bp, Homo sapiens
aagggccgaagccccgccagcccagctaaagcagacggctcgcactgcgacccgaaggtgtctgtgacctttgaggatgtgg

SEQ ID NO: 186765 - DNA, 74 bp, Homo sapiens
acccagatgtgcaacaaagtgcgatgacctactattgtacacagattcttaattaaagcaacaatagaagaaag

SEQ ID NO: 186766 - DNA, 100 bp, Homo sapiens
ggaaaactaggaatctatgatgctgatggtgatggagattttgatgtggatgatgccaaagttttattagaatatgatgctgtggctgagaaagctggta

SEQ ID NO: 186767 - DNA, 55 bp, Homo sapiens
tgggggaccacaagatcctcatcgacaggcctcgggccagcggccaggagctgcc

SEQ ID NO: 186768 - DNA, 80 bp, Homo sapiens
acctgcgagtcatcacttcccaggcaggaaaggggttaatgcatcacttggacatggatttgattgacatactttggagg

SEQ ID NO: 186769 - DNA, 100 bp, Homo sapiens
cgacagcctcaatcctcctaccactgccagcttcacacagacctaggcgagttggagccaaatttacaggtactaatatagctccagatgaacatgtcca

SEQ ID NO: 186770 - DNA, 83 bp, Homo sapiens
gctgcagcaagccgcacctggagaagctgaccctgggcatcacgcgcatcctagggtcagcagcctctggacccgtgaaagag

SEQ ID NO: 186771 - DNA, 75 bp, Homo sapiens
ggcggccagagcgccggcaagagctcggtgctcgagaatttcgtaggcaggtctcaatgccaggaagcctcccgc

SEQ ID NO: 186772 - DNA, 90 bp, Homo sapiens
gaggcggcttgtgcccagaatttcaggtacaagtcactgtgcccagagacgtggcccacgtgggcaggacggccgcaggatggggtggct

SEQ ID NO: 186773 - DNA, 83 bp, Homo sapiens
agctgcttctgatttttataggaagggagttgatttactcctagaaggtgttcaagcaaaatgatgcttcaacacccaggcca

SEQ ID NO: 186774 - DNA, 100 bp, Homo sapiens
aaagtttctaatatctcgaaatgcggctgcttttcaaggaaagaccacagcaagattctttcattcgtctcctcctagcctgggggaccaggctcgaact

SEQ ID NO: 186775 - DNA, 90 bp, Homo sapiens
gcggcctgggaatttctacgtttcctcagagagcatcaggaaagggaaatccctaagtcagccaacccctcctcccatgccaatcctttc

SEQ ID NO: 186776 - DNA, 100 bp, Homo sapiens
ttagagactgaaatcactgcaccttaaaaacaaaagattgagctgcactgtattccttgggatgccatcactgaaatggatgaacataataggcccattc

SEQ ID NO: 186777 - DNA, 100 bp, Homo sapiens
caaaccttatgcttcagggacttttggccagatgagcagcaccagcagtaagagggctccgaccacggcaacccagaggctgaagcaggactaccttcgc

SEQ ID NO: 186778 - DNA, 100 bp, Homo sapiens
gacagcccaaatatcctcggaagagcgctcccaggagaaacaagtcaaaagaaatagactggcaaccttattttactacacgcattgtagatgactttgg

SEQ ID NO: 186779 - DNA, 100 bp, Homo sapiens
gtatactatgccaaagcattctctaaagacttgccaagaggattcttacagaagcagagattgatgctcaccttgttgctctagcagagagagactaaac

SEQ ID NO: 186780 - DNA, 75 bp, Homo sapiens
caactgtacttcgtcttggggcagagtttggagagccacttccagccaagaaacacagtgctctgtgcctataca

SEQ ID NO: 186781 - DNA, 100 bp, Homo sapiens
tcggcagaggagaaattcagacggctcccgaggagtaacagttacccctcaatgagcgacccctacctgtccagctattacccgccgtccattggatttc

SEQ ID NO: 186782 - DNA, 49 bp, Homo sapiens
gcagtggtcgcttcttctccttgtagccggatcgagctgggagatgtga

SEQ ID NO: 186783 - DNA, 88 bp, Homo sapiens
atggcttccgcttcttcactaacttcgagagtcgaaaaggaaaagagctggactatggtgcagccctgcggggcctgtgcgaagacgc

SEQ ID NO: 186784 - DNA, 74 bp, Homo sapiens
gggcaagccccgctccggccaacaaacttaattcagtgcacaaatgagatgaatgtgaacatcccacagttggc

SEQ ID NO: 186785 - DNA, 50 bp, Homo sapiens
ggggaggcagcggaaggcggcagaggtggggctggtgtccgagcacttct

SEQ ID NO: 186786 - DNA, 74 bp, Homo sapiens
ccaagacccagctcaagcagaggcctacacgatttactgctatgacatggtgcattacggccactccaaccagc

SEQ ID NO: 186787 - DNA, 50 bp, Homo sapiens
ctgacacagagcctaacagaagtttcctttacctagtcatcctgctgcac

SEQ ID NO: 186788 - DNA, 75 bp, Homo sapiens
tttgagcaatggggaacgctcacggactgtgtggagtatgtctacgaagatgtcgatgggcagacagaagtcatg

SEQ ID NO: 186789 - DNA, 83 bp, Homo sapiens
gcctcgcggcatggcgtcggaggggccgcgggagcccgaaagcgaggtgctgaccttaaggaaagagccaaaatgagttccag

SEQ ID NO: 186790 - DNA, 75 bp, Homo sapiens
tgaataaacggttgtacaaagagttcttttagatcagcctgagatatggggttcaggccaaccaattaatccaag

SEQ ID NO: 186791 - DNA, 85 bp, Homo sapiens
cggcgggggacaagtcggcgccccagagcggacgaggtgtgtgatcctgtaaaattaaatcttccaagatgatctggtatatatt

SEQ ID NO: 186792 - DNA, 90 bp, Homo sapiens
attcatttttgatcaggagaaagaagacagccatcatttgaaagatgccttcaattaagttgcagagttctgatggagagatatttgaag

SEQ ID NO: 186793 - DNA, 141 bp, Homo sapiens
atcagaaaactatgggaagattttggtagagaagaatgaacattgtattgagaacaatatagatttgcaggatcatcatgcctagggttcataacataaaaaagtctcttacacctcacatttcttgtgtgacaaatgaat

SEQ ID NO: 186794 - DNA, 75 bp, Homo sapiens
gacggagctatcggcgccgcggcaagagccaggtggccgtctgcccggcccagcaccatgcacacgcttgtgttc

SEQ ID NO: 186795 - DNA, 98 bp, Homo sapiens
gctgacgtctccttgcgatggagcatatccggacgaccaaggttgggataattcttcactattccacccttgccacagtactatgggtaggagtgaca

SEQ ID NO: 186796 - DNA, 75 bp, Homo sapiens
tatcatttttacgggccttctggagatgcttccgaactgtgggcaaaaatggcgttgtcacaggtagtactgatg

SEQ ID NO: 186797 - DNA, 76 bp, Homo sapiens
catgcgcagtcatgagtcgcttcaagtttatcgggaagcagtttaagtgcacggtgtgtgactacacagcggccca

SEQ ID NO: 186798 - DNA, 49 bp, Homo sapiens
ttcagaagctggtcgccgccggcagggcttatttcaaaacctttgtccc

SEQ ID NO: 186799 - DNA, 82 bp, Homo sapiens
ggaggctttggcagctcgggactgagtgcaaggtctaccctgaactgcagatcaccaatgtggtagaagccaaccaaccagt

SEQ ID NO: 186800 - DNA, 83 bp, Homo sapiens
gccaccgcgtggtgcttgccgcagccagcaactatttcaggacgcgtgaccaaaaccaaagacggccatgaagtgagatcgtg

SEQ ID NO: 186801 - DNA, 100 bp, Homo sapiens
cagagcgtcacggcgtacgccctcatggggaaaatctccccggtgactttcagcattttgcagctttctcctgtcttgaagaagtagaacggtgcccgag

SEQ ID NO: 186802 - DNA, 80 bp, Homo sapiens
gagatcggcggagaccctcgaagtgcgcaaacttgacactcaccctgaccggacacattcagctaacgtattttagcagg

SEQ ID NO: 186803 - DNA, 74 bp, Homo sapiens
caaaagagcttctctccagagtagaaaggggttatggttttgtgaaattcacagatgaactggaacagaagcga

SEQ ID NO: 186804 - DNA, 73 bp, Homo sapiens
acctccttcgtgaggcccaggatgtcaaaggaaacccagcgtttgctggcagaaccagttcctggcatcaaag

SEQ ID NO: 186805 - DNA, 99 bp, Homo sapiens
gacctggcgactctggatggtcagaactggctgaatgaccaggtatattgaagcaagtcaaagattacattaaacagtgtagcaaatgccaggagaaac

SEQ ID NO: 186806 - DNA, 75 bp, Homo sapiens
aagccgtgcggagcgagttacgagaattcccggccgctgcaaggggtcgtttggactgggagactcttgtgcacg

SEQ ID NO: 186807 - DNA, 100 bp, Homo sapiens
gatgtgcgatgtgcggaagggcacctccacccggcactgcctccttacctgtgaggaatgcaaaataaagcatggattaagtgagaagggagactctcag

SEQ ID NO: 186808 - DNA, 100 bp, Homo sapiens
aacggctgaaggccctacgggagaaaaccgggcgcaagaggacgtcggtgatgaaggagaagaagaaaaagaattcatttcctataacatcaacatagac

SEQ ID NO: 186809 - DNA, 100 bp, Homo sapiens
atcgacatgatcaattctgtacccctaagacagatttatgacatcatccagacccactaccagccctggggcttcctgagtgcagctcataccgtgtgtc

SEQ ID NO: 186810 - DNA, 100 bp, Homo sapiens
cgcgacgggacgcgctgggaccggcgtcgggggtcgcggggaccatgcagcggaggcctcctcttccagcagcctctatctttattctacaggatccaga

SEQ ID NO: 186811 - DNA, 50 bp, Homo sapiens
tatttatcagttgggcctgggatacaagagaacggagaccaacctgggct

SEQ ID NO: 186812 - DNA, 82 bp, Homo sapiens
ggaagcgtctccgttgggtccggccgctctgcgggactctgaggaaaagctcgcaccagcggaaggagagttttacatggaa

SEQ ID NO: 186813 - DNA, 80 bp, Homo sapiens
ctggcagtcaggacatattcgatgccatcgtgatggcggatgagagcaacacagtcactcctggcggcaaaccaaacaaa

SEQ ID NO: 186814 - DNA, 100 bp, Homo sapiens
ggtggccgagtgtgtcgccgcggccatcagggtaatgaggagtacctgatcaatctgatagactctccaggacacgtggacttttcctcagaagtatcaa

SEQ ID NO: 186815 - DNA, 74 bp, Homo sapiens
ggaagaacggattcacacaggatggcttgcagaagacgctatttgcgaagctgctctcaggggagaacccagaa

SEQ ID NO: 186816 - DNA, 88 bp, Homo sapiens
tcatatccggagatattccaggcccactccagggcagggtcctaaaaaggtggggacgctgtggcgagaagccgggcttagctggaag

SEQ ID NO: 186817 - DNA, 50 bp, Homo sapiens
tgacatccgaggtgcctttctccaaaaggacctagatgtgaaggctggtg

SEQ ID NO: 186818 - DNA, 75 bp, Homo sapiens
ggcccgcgctgcagccggagacccggagaaagggaactggcccaaataaggaaggaggaaaaagagaagaaaaga

SEQ ID NO: 186819 - DNA, 90 bp, Homo sapiens
ggagaacgaattctactatcgctacccaaaggatgccttgttttgcaagagcttgatgaacttgctcttcagcctgcatgtttcgtataa

SEQ ID NO: 186820 - DNA, 89 bp, Homo sapiens
caactgagagagatgcttaaaaatcaccagttactttaatgagtcagcccttcataaacccagatgggagtccagttgtgtataatcct

SEQ ID NO: 186821 - DNA, 99 bp, Homo sapiens
ccctggctcaggaacagggacagcacctcatcccctggatgggggaccacaagatcctcatcgacaggcagcaattccatttccgtgagggcgtttcta

SEQ ID NO: 186822 - DNA, 83 bp, Homo sapiens
agttactgcacggaaagcagcgtcaggagccatagtacctacagcagcactccaggatgtcatgaccgggccgtcctgctcta

SEQ ID NO: 186823 - DNA, 90 bp, Homo sapiens
gagaactatggcaacatcaggtgactgtcccagaagtgaatcgcagatttcctttgacctcgctgagtacactgcggacgttgacggagt

SEQ ID NO: 186824 - DNA, 75 bp, Homo sapiens
cagctaggactcatgactactgaggattctgtggcagtgcccagggagactgcattgcttattgatccaaaaaat

SEQ ID NO: 186825 - DNA, 74 bp, Homo sapiens
ggcaaggtctccaagtcccagctcaagcaattaccagctctggctgggtcgccacaacttgtttgacgacgaaa

SEQ ID NO: 186826 - DNA, 80 bp, Homo sapiens
caaccgagtagtgtctcccggacctcttcattgcctaaagatgaggaagatggagagaatgcccacccatatagaaacag

SEQ ID NO: 186827 - DNA, 90 bp, Homo sapiens
acgtgaactcattttatctgccacgacccagaagtgaccaaagacttgaccactcaaagtccagctccccagaacactgctcgacatgga

SEQ ID NO: 186828 - DNA, 100 bp, Homo sapiens
ttgacttgcagcacaatgaactgctagacctcccagatactatagttgtcatggatgcactggtagaagatgatatctgtattctgaatcatgaaaaagc

SEQ ID NO: 186829 - DNA, 101 bp, Homo sapiens
gaatggagaattattgattgaccgtctttattctgtgggctctgattctccaatgggaataccaaggggatgtaatccctgttcattactacttaatacct

SEQ ID NO: 186830 - DNA, 90 bp, Homo sapiens
gtagacctcattgcctttcttcgtagcacctttgctgtattcacacaccttcctgtgtcccgacccaggctaagcttgagcatggctgag

SEQ ID NO: 186831 - DNA, 74 bp, Homo sapiens
cctaaaagcacctggccccgctacagcaaaccaggaagcggggagaggtggtgagagatgacccctgttgagga

SEQ ID NO: 186832 - DNA, 74 bp, Homo sapiens
aagaaacctgtcaggaatacgagcttctgggttatccggtgttggctcctgctgcttactatgaccaaactggt

SEQ ID NO: 186833 - DNA, 113 bp, Homo sapiens
cggctggctgggcacacagacactgtcactggagtggccttcaacccatcagcgccccagcctgattacatcaaccccagagccgtgcagctgggctcccttctcgtccgcgg

SEQ ID NO: 186834 - DNA, 100 bp, Homo sapiens
aagctctacctgagcagggccaagctgaaggcctccagcaggacctccgccctcctctccggctttgccatggaaaatgtttcaacgtgcgcaagagttg

SEQ ID NO: 186835 - DNA, 75 bp, Homo sapiens
cctgcgtaactttctcccttgatccgggagtctttccactgggtagtatcttccccagcagatgttgctgaaaaa

SEQ ID NO: 186836 - DNA, 75 bp, Homo sapiens
caccagtcggtgagtgagcagatcaagaagaactttgccaagagcaagtggaagttccaggcgaaccctgactat

SEQ ID NO: 186837 - DNA, 75 bp, Homo sapiens
gccggttcgcgtctctctgctgcggcgcggggaccgctgtgctctcggatgctggaggtcagcagattggcttct

SEQ ID NO: 186838 - DNA, 96 bp, Homo sapiens
gcctcccgattagctgggattacaggaagtcctggctgagcaaggttggaagccctagttctcgcattgaccgcacaaacttttctaatgaaaaaa

SEQ ID NO: 186839 - DNA, 98 bp, Homo sapiens
aaaacatgatgttgtttgaagttgttaaaatgggcaagagtgctatgcaggttaatttggagtggcccctggagtcagtttcctacaccatccgaggc

SEQ ID NO: 186840 - DNA, 129 bp, Homo sapiens
ctgggctcatgtatgatctgaaggatcaaggtggagagctgttgtccctccgctatgaccttactggcttggcaactcttgtgaaatttcatagatctcgtcgcttactgggagtctgctatattgttg

SEQ ID NO: 186841 - DNA, 100 bp, Homo sapiens
cggcggtctgcggccggcggtgtagacgccccttcgccgggacctggcacccgaatccggcctgccggatgatggtggtgctaccccagtacaggatgaa

SEQ ID NO: 186842 - DNA, 75 bp, Homo sapiens
cctctgctcttcctcccttcgctcgcaccatgcaaaagactgttgaagtagagagcattttgcccagctcactcg

SEQ ID NO: 186843 - DNA, 51 bp, Homo sapiens
taaggaacaggaggaaaccattcagaggcttctgggaacttggcagacgca

SEQ ID NO: 186844 - DNA, 50 bp, Homo sapiens
ccttggccccctcgtcgtctgccccagggtcccctcctcggccgcccccc

SEQ ID NO: 186845 - DNA, 96 bp, Homo sapiens
gaagaaactggagcaagagtttcaggcacaccttgggcccaccccacctccacatagccttaattacaaatcagaggacaggcttagtgagcaaga

SEQ ID NO: 186846 - DNA, 100 bp, Homo sapiens
tgactttccccgacctgttcatcacaggatacccaactttaaggtacaatgactcttcttgcttttcacctaagttgaataagcaccctgtgcactttaa

SEQ ID NO: 186847 - DNA, 75 bp, Homo sapiens
acaacttggaaaccttgttacagtccagttgtgattttgcttgaactcagtgaaaatagaatctttggaggtctg

SEQ ID NO: 186848 - DNA, 82 bp, Homo sapiens
gttgccgggagccgggcgcggctctgtgtggactcggagaaacgcggatcatgagcgtcttgttgttcatcgagcactcagt

SEQ ID NO: 186849 - DNA, 75 bp, Homo sapiens
ggaaattctcgcctgtcttcccttcacccagagcaaattgagacgtcccggcatacgaggagcggcagcggcact

SEQ ID NO: 186850 - DNA, 88 bp, Homo sapiens
aattttgcactttttgatcagcatttgtggggtgaatagcgaaccaagcctcttgccttacggcttccgttacaagatgaggtctgtg

SEQ ID NO: 186851 - DNA, 100 bp, Homo sapiens
cgccctgccggaccgcgcctcaggctcccccaggagcctccatcattgaagctgggacctcagaaagttataaaaataataaagcaaaattgtactggca

SEQ ID NO: 186852 - DNA, 100 bp, Homo sapiens
tgtactgcaaggaacaaaatgtttgtaaattctccttttaccaagattggaataattggtggaacaggcctggatgatccagaaattttagaaggaagaa

SEQ ID NO: 186853 - DNA, 75 bp, Homo sapiens
ctaggaaatcctaatcatgatgctcgcagacctctgaagagagtgccattgagacgggttccagcagttccacct

SEQ ID NO: 186854 - DNA, 100 bp, Homo sapiens
agatgaatcatctgtatttgttcttggcgcagtcctatacaaaaacttagatctaattttgcccactttgagtctccagagaatacagagggcaaagatg

SEQ ID NO: 186855 - DNA, 75 bp, Homo sapiens
gagaagctgagcctttctggacagaccaacctgtcagtgctgcaaggcagctgtgaagtcctgcggctgttggac

SEQ ID NO: 186856 - DNA, 82 bp, Homo sapiens
gacatgtgggctgttggctgtatattagcagagttacttctaagggcagtagaagttgctggaaattatgatggagaaagta

SEQ ID NO: 186857 - DNA, 100 bp, Homo sapiens
ggccgccttccgctttgagctgcgcgaggacgggcgccccgagctgcccccgcaggcccacggtctcggcgtagacgatgttccatttaagcagacctct

SEQ ID NO: 186858 - DNA, 101 bp, Homo sapiens
aggcgacccaagacacccagagagggacagtacaaaattggacagctgtacatgatcagcaaacacagccatgaacagagtgaccggggagaaggggtgga

SEQ ID NO: 186859 - DNA, 100 bp, Homo sapiens
tttgacaatcacattaattcatatgaccatgctcacaagcagcaatcccacagagtattgatgaggaaactgaagtttggagcgatcacatcattttccc

SEQ ID NO: 186860 - DNA, 100 bp, Homo sapiens
ttctgggcttccacacaactccagtgctaactcaacaggacagaatgacttggaagataacggagcttcgaagcttctagcagaatatgaagtctttcgt

SEQ ID NO: 186861 - DNA, 90 bp, Homo sapiens
attgctaatggctagcaaaaaagatgatccgggtataataatgaagttaaaagagcagcactccaagttaccgagctgatacccagacat

SEQ ID NO: 186862 - DNA, 100 bp, Homo sapiens
aaaaaccttcaggcggcccatgggactttgccaataccattcctggccatggaggcatcatggatcgctttgactgccagtatctgatggccacctttgt

SEQ ID NO: 186863 - DNA, 90 bp, Homo sapiens
atttctgttgcccatcttgagtcagatttattcagatggtccaggcgaggctttgagggccatgaaggaatggttttagggaagactgtt

SEQ ID NO: 186864 - DNA, 106 bp, Homo sapiens
aggagccatagtacctacagcagcactccaggtctcctctgagcctccggcctccataagacccaaaacagatgacacctcttcccagtcccccgcgccttccgaa

SEQ ID NO: 186865 - DNA, 101 bp, Homo sapiens
accagccggcagctccggagctgcccgcgccatgtccgcgcacaatcggggcaccgagctcgacactggcttcatgtcctattgaccgtaaaccttttcag

SEQ ID NO: 186866 - DNA, 90 bp, Homo sapiens
ggagcgctgcagggggctgcgcctgcctgctccgccccagacctgtcggcgaaagggtatccgttacagcactgatgtgagtgtagatga

SEQ ID NO: 186867 - DNA, 83 bp, Homo sapiens
gggacacagggcagcccgcagaggacagcgaccacggagcacgtttgccgtggacgggaaagattgcaaggtgaataaagaag

SEQ ID NO: 186868 - DNA, 125 bp, Homo sapiens
tgggagcctagaatgcatcagtgcccttgtggcgaatggggctcacgtcgagaatccctttgcccacgtccagctgaagccgacagtgaccaacgacaggtctgcccccctcctcagctgatggc

SEQ ID NO: 186869 - DNA, 97 bp, Homo sapiens
cggaatctatctctgagaatgacccgttctggaatcagcttctctcattttctttccctgcaccaactagcagagatgctgcaatttgtcagtaatc

SEQ ID NO: 186870 - DNA, 75 bp, Homo sapiens
tggctctcgccgtccgagtcgtttattgcttctcaaaagtgaaataagaagattggaaaggaatcaagagcgaga

SEQ ID NO: 186871 - DNA, 98 bp, Homo sapiens
aatgcaccaatcagcatgctgtgtctagctcaagtaacagtgtatcatgtatgccactgattccaggggacactcccctgctttcctccaacctcaga

SEQ ID NO: 186872 - DNA, 100 bp, Homo sapiens
tggtcaggtactattcggggaaagaattgaaccttcaccatataagttataggtgggcatttattccagaagtggacacagagggccctgccttcctgtc

SEQ ID NO: 186873 - DNA, 75 bp, Homo sapiens
ttgaggctgcgtgttttgctacaattaaggacggaaaggtctctctgaagaggctatcatggagctgaacctgcc

SEQ ID NO: 186874 - DNA, 71 bp, Homo sapiens
taacagactccatgtttgcagtggccagcaaagatgctggcaaaccagtccagctacgggggcccagccag

SEQ ID NO: 186875 - DNA, 100 bp, Homo sapiens
cttatctgccttatgggcttgcagaaggaatctcactctcagatacgtggttgcagtaggattggagtgtggaaagatttgcttatatacctggaaaaag

SEQ ID NO: 186876 - DNA, 100 bp, Homo sapiens
atcttctctagtttcatcatgtatagatggagattccgatgcagttgcctttccccatcttcctggttctgctccttcgtggcctagtcttgtggacacc

SEQ ID NO: 186877 - DNA, 83 bp, Homo sapiens
ggattggggatgagtatgcggaggacagctctgatgaggagaagtccattggaatattaagcccaggagttgctttggggatg

SEQ ID NO: 186878 - DNA, 83 bp, Homo sapiens
gaaggggaacggatctgtgtgcccacagctcctggagccccacagatccagcacacggaagacatggagaacgagatcgacga

SEQ ID NO: 186879 - DNA, 75 bp, Homo sapiens
gattctacatctcaagctcatattttgaagtgtttacggcaaaaagatggcacctttgcagcagggggctacatg

SEQ ID NO: 186880 - DNA, 74 bp, Homo sapiens
ctactcacagttgaagcctgattgcaggtactgtctgatgagcgtgaaaggttgtttcaccgacttccacatcg

SEQ ID NO: 186881 - DNA, 48 bp, Homo sapiens
aaactttcgcctgagcctattttgattccaaattacagaaatgcagtc

SEQ ID NO: 186882 - DNA, 83 bp, Homo sapiens
ggagagccgaccattttcagttgactttttcaggaaaatgattcagtttgaaaaggagcaaacggagtctctctgtcgcccag

SEQ ID NO: 186883 - DNA, 80 bp, Homo sapiens
acacttgagttaagcagtagtgtttgggaagaaaaacagaggagttctattaagacggaattggcagcaatgaaacagat

SEQ ID NO: 186884 - DNA, 100 bp, Homo sapiens
gtagctcttcactcctcagcgcgacgtcgtgtcgagttcccaaaaagctccgcaggggctgtagggagactgggctggcttagatgaagatgaagatgca

SEQ ID NO: 186885 - DNA, 49 bp, Homo sapiens
ccagcaagctactgaagaaatgttgctcaaagcattcagcaaaccaggg

SEQ ID NO: 186886 - DNA, 100 bp, Homo sapiens
gtaatcctgacgaaattgaaattacctccgagggaaacaagaaaacatcaaagaggtctagcaaagggaagtcgttgcatatgatgatcccaaaattcca

SEQ ID NO: 186887 - DNA, 100 bp, Homo sapiens
ggggaggagtttcatgaagagcccaaaacctattacgaactcaaaagtcaaccgctgaagagcagtgatgtttatccatgcatcgttgagacttcggaac

SEQ ID NO: 186888 - DNA, 49 bp, Homo sapiens
tgcccttggacaaagcctgaaaccagtctgcgctcctcagaccaccggc

SEQ ID NO: 186889 - DNA, 101 bp, Homo sapiens
ctttgaggaacgcagcctgaatgttgcagaatgaagaagagtctggagaacctgaacaggctgcaggtgatgctcctccaccttacagcagcatttctgca

SEQ ID NO: 186890 - DNA, 75 bp, Homo sapiens
aaactctctctgcaagtccttaactttgttcactcattccagaatctccctggaaaaggagacatgaatgtctgc

SEQ ID NO: 186891 - DNA, 50 bp, Homo sapiens
ggagaagccgcccaaagaactggaaataatgcaaaaggtgtcccaaggct

SEQ ID NO: 186892 - DNA, 75 bp, Homo sapiens
tggaggacggcgtgctcaaggagggcttcctggtcaagaggggaagtcgagacaacatgagtgtgattttgatct

SEQ ID NO: 186893 - DNA, 100 bp, Homo sapiens
tgagtgtctgtccccagagcctcagtttgtgcaggacaccgacatggaacagggactcactgggggtagatgatgagctggagatcaaggcctactatgc

SEQ ID NO: 186894 - DNA, 100 bp, Homo sapiens
ggaggagcgcgcgggcacagggtgccgctgaccggtacaagaagtatgtcttcctggaccccctggctggtgctgtaacaaagacccatgtgatgctggg

SEQ ID NO: 186895 - DNA, 82 bp, Homo sapiens
accagccgcacgccgaccggcgccgggagatcctgggtaccaagccagctgcctccattgacccatggggggtgcccactgg

SEQ ID NO: 186896 - DNA, 112 bp, Homo sapiens
gaacaacccgttcttgcctcaggccagtcgcctccaggccaagagggatccttcacccgtgtctgcctctgaagagccaatccattcaggatgggaaaccacgcaggcaaac

SEQ ID NO: 186897 - DNA, 50 bp, Homo sapiens
agggtctgcgaatttcatatatgacgatatggagtcttgctctgtcgccc

SEQ ID NO: 186898 - DNA, 98 bp, Homo sapiens
atcgcctcggtgcagggctccaccccgtcgcctcgacagcaacatggccaacgccctggccagcgccacttgcgagcgctgcaagggcggctttgcgc

SEQ ID NO: 186899 - DNA, 104 bp, Homo sapiens
ctgacggcaacctctacaaggccaagttcatctcctccgtcaccagccacatctaccagtgtgtcccggcatggatatccggaacaacctcactaggttgcatg

SEQ ID NO: 186900 - DNA, 75 bp, Homo sapiens
gctgccaggggggacagccagccagcagcaggagggttgatgataattagaagcatgctttccactgaacttccc

SEQ ID NO: 186901 - DNA, 75 bp, Homo sapiens
tgcacaagccccatcaagatgttcaagtactgtccctatgagaagccaaagatttcatccggcacttgatggaga

SEQ ID NO: 186902 - DNA, 82 bp, Homo sapiens
gtacgtgcctgatgtgttttataaggtgtggacactgccagcggctgcagccgacttggaatgacctgggagacaaatacaa

SEQ ID NO: 186903 - DNA, 100 bp, Homo sapiens
ggaacagaaacatagagaggaactggagcaattgaagctgactactaaggagaataaggtctgccctacttgagagaatgcctgtcatggaaaaagtgac

SEQ ID NO: 186904 - DNA, 80 bp, Homo sapiens
gtcaggtccgggctcctggacttcgcctttcccgagccctggaggtggggagaaaagtattggtaaaggttttcaaggtg

SEQ ID NO: 186905 - DNA, 90 bp, Homo sapiens
gaggccagaaggcagaacttatgctgactacgaatctgtgaatgaatgcatggaaggttgtaagccaatgttgtgaggcttcaagttcag

SEQ ID NO: 186906 - DNA, 100 bp, Homo sapiens
gacgcagtcagctgcgtgattcccgtgattgcgttacaagctttgtctccttcgacttggagtctttgtccaggacggatgctgaaatttctggaaaaga

SEQ ID NO: 186907 - DNA, 100 bp, Homo sapiens
cgctgatgccgcccgcggcgaggtggcccggaccgcagtgccccaagagaggtctatcagccacagtctctgcaagtttccaagagcagcagaaaatgaa

SEQ ID NO: 186908 - DNA, 50 bp, Homo sapiens
aaagtaacagtgagatagagcagtgaagttattgccagtggactgtgaga

SEQ ID NO: 186909 - DNA, 100 bp, Homo sapiens
cccggtccattctcctcgcgctgcaaggatgctcctgggatttcggagaggccgcaggagtcatttcggacacttggcattcagggacgtggccatagaa

SEQ ID NO: 186910 - DNA, 100 bp, Homo sapiens
ggacaaatacactgaactttgatgaaccaagatcactccatggatgaaatgacagctgtggtgaaaattgaaaaaggagttggtggcaataatgggggca

SEQ ID NO: 186911 - DNA, 80 bp, Homo sapiens
ttaaaaatcaccagttactttaatgagaattgaatgatctggcacgggaccctccagcacagtgttcagcaggtcctgtt

SEQ ID NO: 186912 - DNA, 99 bp, Homo sapiens
ccaggacccgggctttagctatggcagcggcagcaccgggagtcagcagagtgaagatgagcagcaccagcagtaagagggctccgaccacggcaaccc

SEQ ID NO: 186913 - DNA, 82 bp, Homo sapiens
acaatggcatttacagaaagagtcaacagcagtggcaacagttgtcgagatgtccacagaaggaggatttggtggtactagc

SEQ ID NO: 186914 - DNA, 75 bp, Homo sapiens
gcccctgccccacggagcaggctgccacctccaccgccgatggcaaaccagtgaaatgtctcaagaataccccag

SEQ ID NO: 186915 - DNA, 50 bp, Homo sapiens
cgagaactttctcgagccactgccattgaggagagcaccacagtggtcac

SEQ ID NO: 186916 - DNA, 83 bp, Homo sapiens
accaaacatgaatgtagtgacaagctggcccaggagccagctagatattaacaacaagaagagtgtaactgattcaatccgtg

SEQ ID NO: 186917 - DNA, 50 bp, Homo sapiens
cggacatagaggccaaccaacctttggagcgcaaatctgtccaaggctgc

SEQ ID NO: 186918 - DNA, 100 bp, Homo sapiens
ctgcgggtgctggagctatacagcggcgtgggcggcatgcaccacgcgctgagagggtttgtgtttagtgaatcagagggatctgcattagaacagtttg

SEQ ID NO: 186919 - DNA, 100 bp, Homo sapiens
cagaggtcgtggaggtggccgtggaggcagaggtggcatggggagggtgaggacaaaatcttcttaatcaacaagcttcactccatctacgagaggaagg

SEQ ID NO: 186920 - DNA, 100 bp, Homo sapiens
ccggcaactactttggattcacccacagcggggcggcggcggcggcggctgcggcccaatatagtgtccgagctgcaggaggagggaatgaacgccatca

SEQ ID NO: 186921 - DNA, 97 bp, Homo sapiens
cccaaggaaaaacgtgagcttcagtttcggcgaaaggtcttagcagtcacagactcacctgccaggaaggtttctgctgatgtactccacggttctg

SEQ ID NO: 186922 - DNA, 104 bp, Homo sapiens
ttgacttggaagcaatgtttgaacaaactcgaagaacagctgtggaaagaagttgcaaaacactgggcctgttacatgaacagaatatggcaaaaatgagacta

SEQ ID NO: 186923 - DNA, 100 bp, Homo sapiens
cccgctggcccccgatcaccatgtcggctttcgacaccaaccccttcgcggacccagtggatgtaaaccccttccagttgattatggaagattcccacaa

SEQ ID NO: 186924 - DNA, 100 bp, Homo sapiens
gaagctcttcagcaagaggaccgggctgggcgcgcccggccgcgacgcccgggacccagattgcgggttcagcaatacgagaattggagacccaaccagc

SEQ ID NO: 186925 - DNA, 75 bp, Homo sapiens
aactaagcgaggggatcctcatgagttaagaaacatatttctacaggtgtcagctgtgatgcatgtttaaaagga

SEQ ID NO: 186926 - DNA, 75 bp, Homo sapiens
ccgaggagctggggccatcaaggtggagcccacagtgaccatctccccatccaggacagaggccctcaaccacca

SEQ ID NO: 186927 - DNA, 51 bp, Homo sapiens
gctagggctcagtgatgaaaaaggacttacacatattattgaaactcgaaa

SEQ ID NO: 186928 - DNA, 75 bp, Homo sapiens
ttctcatgcatttattgatctgactgaagattttacagcagtaaaagatgatgaatgcgagtcagatgcagaaaa

SEQ ID NO: 186929 - DNA, 100 bp, Homo sapiens
cagccatcgaggcgagccagagcctgcagtcccacacgtctcacagaaagttctccgctcccagacatgggtccctcggcttcctgcctcggaagcgcag

SEQ ID NO: 186930 - DNA, 100 bp, Homo sapiens
aaacagagccttgaggctgcggggcacacggccctggagcgactgattcacccccagctctgtgagctgtgcatagaggcgctggagcggcacgtcatcc

SEQ ID NO: 186931 - DNA, 100 bp, Homo sapiens
ccgaattctgctggaggcagcgccatatcctggaggtgaaggcatgaacaaccgggaggtgctggagcaggtggagcgaggctacaggatgccctgcccg

SEQ ID NO: 186932 - DNA, 101 bp, Homo sapiens
ctgcagcatccttgatgataaaccagtaaatgagaggaaaattctcagaatttaaagctcatacagctccagttcgaagtgtagacttttcagctgatggc

SEQ ID NO: 186933 - DNA, 100 bp, Homo sapiens
aatgaaaagatcaaacaggtcaacgaacgagccacactctttaggataacatccaatgccatgatcaacaagcagctgacacaggatgatgatactgatg

SEQ ID NO: 186934 - DNA, 100 bp, Homo sapiens
aaccccttcgcggacccagtggatgtaaaccccttccaggttgcagagcctgaggcctgtgatcagatgtacgagagcttagcgcgactccattcaaact

SEQ ID NO: 186935 - DNA, 96 bp, Homo sapiens
atcaacatcacggacatctcaaggaatatcacttccatgtactttgaattttatgaggggccttttgaatataactccacaagatgcctggagctg

SEQ ID NO: 186936 - DNA, 100 bp, Homo sapiens
cagtaccaagagttggtgggagacgggtgaagtacaggctcagtctgcggccaagactccatcctgcaaggtggagattttcattttacctttatgtatt

SEQ ID NO: 186937 - DNA, 75 bp, Homo sapiens
aggcgctgcgcaagcacgctgaggagggctaccagctgcatggagcagaggtgaacggtgggctcccatctgcat

SEQ ID NO: 186938 - DNA, 100 bp, Homo sapiens
caccaagctaaagaggctgcccagaaagcagttaacagtgccaccggtgttccaactgtttaaaatgcagaggccaggatgtgggcccagccctgtgcca

SEQ ID NO: 186939 - DNA, 100 bp, Homo sapiens
gacatgagagaaatgaaaaaccttttaagcaaactcagggaaactatgcctttaccattgaaaaatcaagcattggtgccttgattggactaggaattgc

SEQ ID NO: 186940 - DNA, 100 bp, Homo sapiens
gccttccgaggccaggtgaacgttaccggccccctgacctccagcagatccacacgttgagccagtgatacagagaggccatgagagtctggtgcaccac

SEQ ID NO: 186941 - DNA, 100 bp, Homo sapiens
ttaaaaaatttattaaaggaagcacacctaaggaatacatggtttacaggaagcatacctacatgaggcttgatggctcatccaagatctcggagaggcg

SEQ ID NO: 186942 - DNA, 100 bp, Homo sapiens
agaagaagcatgtcgaattttagtggacaatctgtgtgatatggagatggtcaacaaagtgagaatgactaatagtagcagctccccaagccttctaaat

SEQ ID NO: 186943 - DNA, 83 bp, Homo sapiens
caagaaaccaacattcccaacagccaccaccaccaccagatgagacacctatggctgccgatgaaggctcagcagagaaacag

SEQ ID NO: 186944 - DNA, 75 bp, Homo sapiens
gcttggcgtgtgctaataaatgtgtcttctgttggcgatggggtcgaggatttggtcttttgggttccatttttg

SEQ ID NO: 186945 - DNA, 100 bp, Homo sapiens
cttcggcgacgtcgagaacgacgaggacgcgttgctgcggcgtctgcgaggcccgagggacagaactgtaccgctctctttttggccagctccaccctcc

SEQ ID NO: 186946 - DNA, 95 bp, Homo sapiens
agcccatgaagagatggtggattctcactgagttttgactagcggaagaaaaggagacagggtctggctatgttgcccaggttggagtgcagtga

SEQ ID NO: 186947 - DNA, 100 bp, Homo sapiens
ggcgacctccggcggcgggaggcccggcctgggcagatggtttcacccaaatatcactggtgtggaggcagaaaacctactgttgacaagaggagttgat

SEQ ID NO: 186948 - DNA, 98 bp, Homo sapiens
tccaagatgcagttttttgatgctgaggagctcctggtcgatgaagaggatgatgtttttggtgaaggttatgaagacagtatggagtttccagacca

SEQ ID NO: 186949 - DNA, 101 bp, Homo sapiens
ggaggttcgaagctgagtatgtgacagacagagtttcactcctgttacccaggctggaggacaatgatgtgatctcgggtcaccacaacctccgcctcccg

SEQ ID NO: 186950 - DNA, 73 bp, Homo sapiens
ttgaaccccggaggtggaggctacagttgaaatcacaaagattagacacctttttagataggtgttcttcagc

SEQ ID NO: 186951 - DNA, 100 bp, Homo sapiens
caggctgagtggatttggccagtcaggaagcttctgccggttagctggccacgatatcaactatttggctttgtcagggctggtgaattaccatatctcc

SEQ ID NO: 186952 - DNA, 50 bp, Homo sapiens
tagaatcttgcctgctccacagtttgcactcctcaagactttgatccttg

SEQ ID NO: 186953 - DNA, 83 bp, Homo sapiens
cccccggctccatcttgcgggagaccgggttgggctgtgacgctgctgctggggtcagtcagactcagtcacatgcccactcg

SEQ ID NO: 186954 - DNA, 98 bp, Homo sapiens
tgctgtggaggctgaggaggcggcggcggagatctgggttgattcttcaccacactgaaaccattaggaaaaatccttgtggttaacagcagaggctt

SEQ ID NO: 186955 - DNA, 90 bp, Homo sapiens
ctctctgctgcatgcactattgctgtaagattggagctggagtgagccttccaggaattttggctgccaaatgtggtgcagaagtaatac

SEQ ID NO: 186956 - DNA, 103 bp, Homo sapiens
cacttgcctgagcgccccggcggcccgagcgcgccccaagcccgggcgccaccgctgccacctccgcgagggagttcaggcacaaaagcaacatcaccttcaa

SEQ ID NO: 186957 - DNA, 51 bp, Homo sapiens
acgcagctggctggcttcagtggaccagcgaaccctcctggtgtactggcc

SEQ ID NO: 186958 - DNA, 100 bp, Homo sapiens
ggatggaacacttcagtgcattcaagaactcccccactggaaaggattctgaaagaaatgaagtcagccctcagaaatgaagttgactgcctgctggctt

SEQ ID NO: 186959 - DNA, 100 bp, Homo sapiens
accattcccttgaaactctctcagggtcttactctttgcccaggctggagtgcagtggcgcgatcatggctcgttgcaacctcgaccacctgggctcaag

SEQ ID NO: 186960 - DNA, 75 bp, Homo sapiens
gttccagttccagagaacgttcgagatctcgtgggtcgaaatcaagggcaattgaaggaacagactaaaaatcgt

SEQ ID NO: 186961 - DNA, 98 bp, Homo sapiens
gtttactgcatcagtgatggaggacagagtgcgagcctccattatggcatgctgaatttaccaaagaagaattggttcagaagctcagttccaccaca

SEQ ID NO: 186962 - DNA, 100 bp, Homo sapiens
ttcagcccgtcagcaagtggcaagcctatggactcaaaggctatcctggtctgaatttcctgctgctgttcacaaagatgctttttatctttaacttttt

SEQ ID NO: 186963 - DNA, 96 bp, Homo sapiens
gaatgaaagatggatattgcactgccgacattgaatatctggaagatgttaaggattggggtgcccaacagaagaaagcaaatagatcatcagaaa

SEQ ID NO: 186964 - DNA, 50 bp, Homo sapiens
cagcgagccacgggagcgagccaggctactgcagcactggggtgtcagtt

SEQ ID NO: 186965 - DNA, 75 bp, Homo sapiens
aaaaaaggaacttattgatgacattgagtggaaagaggcaaaacctgatgaattaatggattccaaattgagatg

SEQ ID NO: 186966 - DNA, 50 bp, Homo sapiens
cgcctgggctgccggcacttcgcggcagatgagatccgaaatggcccata

SEQ ID NO: 186967 - DNA, 100 bp, Homo sapiens
cttcgcaagaagcaccagttcaagtggccctcagggcatccccgttttcggaagcctgcaaccggccccacaaattctagcagtgccaagaagaaggata

SEQ ID NO: 186968 - DNA, 82 bp, Homo sapiens
cgagcgcaaggacagcgcgaggtccgcgcagcccagcgcagccatgtctcctccgggctggggctgagcaagccctcggagt

SEQ ID NO: 186969 - DNA, 82 bp, Homo sapiens
gctgctactgtgtccagcgcaggttacaggaggttccagtggcatcgggaagtgcattgctatcgagtgctataaacaagga

SEQ ID NO: 186970 - DNA, 87 bp, Homo sapiens
tgatgatggatccatttctcctattgaggagtcaacgttggtcaaagaaaaagtgatgtatgaaaaagaggcaaaacaacaagaaga

SEQ ID NO: 186971 - DNA, 82 bp, Homo sapiens
ggagaaggcttgggctcgcgccgctgaagacaatgcagatcttcgtgaagactctgactggtaagaccatcaccctcgaggt

SEQ ID NO: 186972 - DNA, 82 bp, Homo sapiens
ttccagaaaacagaaatcgaaacagatacagagatgtaagcccatgtgacagagctgaatgaacctctctccaatgaagatc

SEQ ID NO: 186973 - DNA, 127 bp, Homo sapiens
gcgactcgagggtgacgctcgctccgctcgtcccgctcgtcatggcctacccgggatacggaggaggggtgctgcgacaagagactttggacaaaaattgacttgagtaggtgtaaggccattgtgc

SEQ ID NO: 186974 - DNA, 100 bp, Homo sapiens
gtttaaacagaaatcaccttcagctgtttcctgagttgctgtttcttgggactgcgaagctatacaggctgttataaattggcactgggattttgtgagc

SEQ ID NO: 186975 - DNA, 83 bp, Homo sapiens
gccacaccatttgccgtggccaggctagaggttctccccatgacaccacctgaacgtctcttcctcccaagggtgtgtggcac

SEQ ID NO: 186976 - DNA, 100 bp, Homo sapiens
tgccatgtgcctctggctcaagcccaggctttggtcaccagtgagctggagaagttccaggacaagactgatacactggaacacgaactaagaagagaag

SEQ ID NO: 186977 - DNA, 83 bp, Homo sapiens
gagccttttgacccaatcatatagtggggctcagggccagtgctcactcttattgccttatgccagcctggaccatcttggag

SEQ ID NO: 186978 - DNA, 100 bp, Homo sapiens
gaggagtcagctgcaaatattctcttctgttctacagacctctctcctcttcctgctcatggctcttctcacagacagttttatcatcttatcatttttg

SEQ ID NO: 186979 - DNA, 75 bp, Homo sapiens
gtcgcagcgagctggagccgccggagttggttcgactatgcaatgagggcgcccggaagatggaaaggactgaga

SEQ ID NO: 186980 - DNA, 88 bp, Homo sapiens
ggacggcccggatgagtacgataccgaagcgggctgtgtgccccttctccacccagaggatggccagccggagcagtgacaaggatgg

SEQ ID NO: 186981 - DNA, 83 bp, Homo sapiens
tctacatcctgcgggtgcctttgaaaatcaacgacaacttgagcacaggcccccagaactctccttccagctgaactccctgg

SEQ ID NO: 186982 - DNA, 100 bp, Homo sapiens
atccagtggaatgcaccacagccatctcacatttccaagtacattctcaggtggagacctcatggggtcctgtcccagcaattcgtggagctcatcaaca

SEQ ID NO: 186983 - DNA, 82 bp, Homo sapiens
gagctttgcgggaaagcagcgggtggcccagttgaaatccttcccttcctctaccttggaagtgcctaccatgcatccaagt

SEQ ID NO: 186984 - DNA, 100 bp, Homo sapiens
cgcttccatgcggttcgggtccaagatgatgccggtcatcatcagatttgaaatatttaaagtggatacaaaactatttcagcaatgcagacaattaagt

SEQ ID NO: 186985 - DNA, 90 bp, Homo sapiens
gctgcaccaagtggcgaaggagccggctccaaggacaaggtggagcagacacctcgcagtcaacaagacccggcaggaccaggactcccc

SEQ ID NO: 186986 - DNA, 50 bp, Homo sapiens
ctggccctaaccacagagtcaccttgagatggagtctcattcactctgtc

SEQ ID NO: 186987 - DNA, 90 bp, Homo sapiens
atcagaatctccaggagtaaggagaaaaagagtttccccagtgcctggatctgaaacttgcccacccttcgggatattgcaggacgctgc

SEQ ID NO: 186988 - DNA, 83 bp, Homo sapiens
ctcgggaagagatgcgaggatgacaaggactgtggtctggagctcaatgatgaagatggccaccgctgttatccgctggagga

SEQ ID NO: 186989 - DNA, 100 bp, Homo sapiens
acttcctcgctgcagcggccctggcgggtgccctggctaccatggaccatcctgctggtcagcactgcggctggtgtcatggagaaactccagctgggcc

SEQ ID NO: 186990 - DNA, 75 bp, Homo sapiens
ggtgttcccgaactagagtggtgcacgatctgattttctggagagatgtgaagaagactgggtttgtctttggca

SEQ ID NO: 186991 - DNA, 100 bp, Homo sapiens
caaagagtcaaggtggggagccaacatacaatgtggctgtcggcagagctggtagagatgttccatttaagcagacctcttccatagctgtagctggagc

SEQ ID NO: 186992 - DNA, 98 bp, Homo sapiens
cagtcccgggacaggatgttctccaagttcacctccatcctgcagcacgccgtggaggcggcaaacacagagcagcccaagctgagtagagatgagca

SEQ ID NO: 186993 - DNA, 100 bp, Homo sapiens
ggatacaaggctggcatgactcacatcgtgcgggaagtcgacaggccgggatccaagcagatttactatgctgggcctgtcaataatcctgaatttacta

SEQ ID NO: 186994 - DNA, 90 bp, Homo sapiens
ggaaaattgaccacagcacagtacagagtatctaagaggtatattgagatcttcagaagtagcaggagtgaaatcaaaggattttatgat

SEQ ID NO: 186995 - DNA, 75 bp, Homo sapiens
tatgaagacacgcttcttctggaagaccagccaacaggccgtcgctttcgggttctctcatcgcttcgtcgttcg

SEQ ID NO: 186996 - DNA, 78 bp, Homo sapiens
ttattgtgaaacctcccgtgagaaaggtgcacaggatctaccgaggggctggcggaagcttccagaaggcacagacgg

SEQ ID NO: 186997 - DNA, 75 bp, Homo sapiens
ctggatcaccgacagcacagacagaatccctgctaccaagttcctgagttggaggtagaagaagaaacccaagtt

SEQ ID NO: 186998 - DNA, 83 bp, Homo sapiens
ctgaagagcgacaagccgctggcagccgcggatctcaccgccgctcaggcccttctgcagaggccgggctggaggagaagatg

SEQ ID NO: 186999 - DNA, 100 bp, Homo sapiens
ttcccacatgggtgtactcgtgttccagaatagcctaacatggcagaccagagacagcgctcactgtctacctctggggagtcattgtaccacgtccttg

SEQ ID NO: 187000 - DNA, 74 bp, Homo sapiens
acagtgtctgctcttgccctggctttttacctagcaaagatgaactaccccgggcagagggtctgggcaccagt

SEQ ID NO: 187001 - DNA, 109 bp, Homo sapiens
acgtgcagctcgggctcttcatggccgtcatgccgactctcatacaggcgggcgccagtgcatcttctagccatgaaccagagaatcagtcagagtgctccagtgaaac

SEQ ID NO: 187002 - DNA, 134 bp, Homo sapiens
cgctgctgcctacgcgccatggagcatcgcatcgtggggcccgggccgtaccgagctaccaggctggtgttacacataatattgcattacttcgagaggtgataatcaactcacgctttgtaaaaggagacatc

SEQ ID NO: 187003 - DNA, 88 bp, Homo sapiens
caacttctgaaatttacagaaacaaactacatctcagggccctcagccacaagtacggtggacacagcagccatgtgacaaatgtggc

SEQ ID NO: 187004 - DNA, 100 bp, Homo sapiens
agcagctgcagcagtggcagctgcagtagcggcagcagccccagcctcaaggccagtcatctgcaagcagcagaccccggagctggagccagccgccacc

SEQ ID NO: 187005 - DNA, 100 bp, Homo sapiens
ataaaaacagaacaggaggtggtagagggcatggatatctctactcgctccaaagagttttgattcatcatggataatctgtcatcagaagaaattcaac

SEQ ID NO: 187006 - DNA, 87 bp, Homo sapiens
gctctgctgtgggcgctgctggcgctctggctgtgctgcgcgacccccgcgcatgatcttatctagtaagctgcctcagaggggcca

SEQ ID NO: 187007 - DNA, 82 bp, Homo sapiens
aggaggtcacccgcgtgctaatggtggaaacccacaacgtgcctccggagccagcgtggtggccatagacaacaagatcgaa

SEQ ID NO: 187008 - DNA, 118 bp, Homo sapiens
tttgactcttccagttgaagtgtcattctacagtgtttcagatgacaatgctccctctccttatatgcaaaaatattttgattctggggattacaacatggctaaagcaaaaatgaag

SEQ ID NO: 187009 - DNA, 90 bp, Homo sapiens
acctcaccgtgcaccttcgcaagaagcaccagttcaagtggccctcagggcatccccgttttcggtgtcccagatgacctggcactgggc

SEQ ID NO: 187010 - DNA, 100 bp, Homo sapiens
gccacatgaaagttttcagcctcatccagcaggcggtgacccgctaccggaaggccatcgccaagatctgcgatgagctgggagtgaagcggccatcttc

SEQ ID NO: 187011 - DNA, 80 bp, Homo sapiens
cgaacagtctcgttgctgcctctgtgtacgctgaggggggaggccgaatacatcaagcaatggtaacatctttaaatgaa

SEQ ID NO: 187012 - DNA, 74 bp, Homo sapiens
cccatgggcacggccaacatccagctccacgaccaggccccgtccccatgcctcggggtgcagtgtgcatttgg

SEQ ID NO: 187013 - DNA, 75 bp, Homo sapiens
ccggctgtaccggcagatcctcaggggcaagtacagttactctggggaggtgaaaggtgtagcagtcactcggcc

SEQ ID NO: 187014 - DNA, 96 bp, Homo sapiens
cctttgagcaaatgaaagtgtttgaaagggtgtcacgcagtgtcagaaagagagctcagaaatatgctcagcaagtcttgcagaaggaatgtcgtc

SEQ ID NO: 187015 - DNA, 101 bp, Homo sapiens
atagtgctacttcatgacatcatccataccaaggagacgctgacacttgtgtttgaatatgtggacatggatttgattgacatactttggaggcaagatat

SEQ ID NO: 187016 - DNA, 100 bp, Homo sapiens
gaaaaagattcctttcttggcaactggaggtcaaggcgaatatttaacttatatctgcctgtcagacgctgaccggaaaggagattgagattgacattga

SEQ ID NO: 187017 - DNA, 89 bp, Homo sapiens
ttctgctcttggtgcaggatctgcagctactgctgcatcagaagaaatggaagcctgtctagcagtccagaggagatgtctggagctga

SEQ ID NO: 187018 - DNA, 50 bp, Homo sapiens
gcaccggatcaccaagacggaggccactgcagaacaaattagacttgcac

SEQ ID NO: 187019 - DNA, 82 bp, Homo sapiens
agcaggactgcgccgcgtcttcctcaaggctgaaggtgatgtggccgccctcaaccgacgcatccagctcgttgaggaggag

SEQ ID NO: 187020 - DNA, 82 bp, Homo sapiens
ggcggatgccctgcagtacctgcagaaggtctctggagacatcttcagcaggagaactacgatgacccgcacaaaacccctg

SEQ ID NO: 187021 - DNA, 100 bp, Homo sapiens
gagtgaagatggacactggaagctaggaggaatggaaactgtttgtaaagtttctcaggccacaccagagcaagcccttgtgattcgaaatggtgagaaa

SEQ ID NO: 187022 - DNA, 100 bp, Homo sapiens
caagggggccagttcctgccgtctgctcttctgcctcttgatctccgccaccgtcttcaggccaggttagaagtttcatgcattcaaataatggcaccat

SEQ ID NO: 187023 - DNA, 95 bp, Homo sapiens
gtccatggcaatgggtcctggccctgccgaccacctggagaccttatcaaccctctcaacctcactctttctctggtgcccctgggtgaactgac

SEQ ID NO: 187024 - DNA, 102 bp, Homo sapiens
gccatatctagtttgcccacacccagtgacatctttgtgtcctactctactttcccagggggatatgagactttctactcggaatatcctgagtgttgcgtg

SEQ ID NO: 187025 - DNA, 73 bp, Homo sapiens
aactacgtggctgaggacagaagcctacaggcagagccgttggtgaaagatgctccttgggatgaggtcccgc

SEQ ID NO: 187026 - DNA, 89 bp, Homo sapiens
tccatgtaccactggtaattatgacttttggacagtccaagctatatcgaaggatcaagtcttccataccagggaccaggccaaaacca

SEQ ID NO: 187027 - DNA, 82 bp, Homo sapiens
gagccttcaaaagcagtgcaactggctcagtattcacagggaaagctgtgagggtcatgttccttggggaactggaagaaat

SEQ ID NO: 187028 - DNA, 97 bp, Homo sapiens
tcactgaggaggtttgaggcgcgcgctctgggcagggtaaagaggatgaatatccaaagaagcccttggggcagcttccacctgaacttcagtcttg

SEQ ID NO: 187029 - DNA, 83 bp, Homo sapiens
ccagaaacagagcgatgagcttgccctggtcagcccaaggccaaccccactgtcactctgttcccgccctcctctgaggagct

SEQ ID NO: 187030 - DNA, 98 bp, Homo sapiens
aaagatggagcaaaaccactttccctgaaatccgacactactgattctagtcaagtgtgaaaaactcaaattactgtcttccatcatataccgcttat

SEQ ID NO: 187031 - DNA, 75 bp, Homo sapiens
ctggcagcgcagctcggcctcacccagacccagccactcatctctgcccagctgctgccctccccaggaggcctc

SEQ ID NO: 187032 - DNA, 99 bp, Homo sapiens
agggcctcggcctggcgctgctggccgtcctgctgtgctcggcgcccgatccacaggatgagcaggaacggatcgaggaaaggctggcttatattgctg

SEQ ID NO: 187033 - DNA, 98 bp, Homo sapiens
ctggattctaaggcaacacttccttgaagaaacaagcttacagcattttgaaagcgaagcagaagccgtagaatcagcggcgagcctgttgaaagaac

SEQ ID NO: 187034 - DNA, 76 bp, Homo sapiens
tcgacggatctctttacaagacgcacccacagcttttggattccgtgcctcccactgccattagtcacttcaaaca

SEQ ID NO: 187035 - DNA, 100 bp, Homo sapiens
ctccaggacagcatccaggcctcattggacagcattcgaggcctggtctccaagtcctctcctaagaagcctcgtggacgtaacatcttcaaggcccttt

SEQ ID NO: 187036 - DNA, 75 bp, Homo sapiens
tgctgaaaaggaagttttctggaatgggagtggacgcttctcttgtgagccagctggaggtcttacctctttgac

SEQ ID NO: 187037 - DNA, 83 bp, Homo sapiens
gaagaataagcacaagagaaagaaggttaagctggctgtcctgaaatattataaggtgttgtggatggagctccatattccat

SEQ ID NO: 187038 - DNA, 90 bp, Homo sapiens
cagcagatggcggatgccctgcagtacctgcagaaggtctctggagacatcttcagcagaatgtcatacccaggctatcccccaacaggc

SEQ ID NO: 187039 - DNA, 74 bp, Homo sapiens
tcctgcaaatgcaaagagtgcaaatgcacctcctgcaagaaaacgggcgatgatgagatctcatttgaccctga

SEQ ID NO: 187040 - DNA, 75 bp, Homo sapiens
tacccccatgctgtggcacggcttcagaaccagaagagtgtgttaattgcacagatgaatgccgagtgcttggtc

SEQ ID NO: 187041 - DNA, 100 bp, Homo sapiens
cgaacacctgccgcggtcctcccgccggcgctggctccagcagtacccgcggctacgggaggagatggagcgcatcgtgaccacccacatccgggagcgc

SEQ ID NO: 187042 - DNA, 90 bp, Homo sapiens
ctggaggatgtgcggggtgcgccggcagaggatccagtgttcaccatcctggccccggaaggatcctggcttcctggacaagcaggctcg

SEQ ID NO: 187043 - DNA, 75 bp, Homo sapiens
tagcaggagacccttggaaggaggatcatcctgaacatggggtcctgtttcttgttcgagagcttctcaacgtga

SEQ ID NO: 187044 - DNA, 100 bp, Homo sapiens
tttagatgttgaacaacttggaattccacttctaggtcaaatggaccccgttccacacctggaaccgctgtacaaaaagaagaatgagactctttaaaaa

SEQ ID NO: 187045 - DNA, 75 bp, Homo sapiens
ctcgcactctgttcttccgccgctccgccgtcgcgtttctctgccggacccgtcgccatgggccgtgtgatccgt

SEQ ID NO: 187046 - DNA, 75 bp, Homo sapiens
aactacagaaacctggtctccctaggtggcgacatgtctaagaatgtgagccagtcacagatggcaaaattgaac

SEQ ID NO: 187047 - DNA, 112 bp, Homo sapiens
ctggtgcagccaccctcgctccctctgctcttcctcccttcgctcgcaccatggtgagaagccctaccactgcaactgggacggctgcggctggaagtttgcgcgctcagac

SEQ ID NO: 187048 - DNA, 100 bp, Homo sapiens
cgacccgctgctcagcgtcctcatgtggggggtaaaccactcgaaaggcctaaagaatgtatttgacgaagcaatattggctgccctggagcctccagaa

SEQ ID NO: 187049 - DNA, 75 bp, Homo sapiens
ctcgctgtgagacatgtctgagactcctgctcagtgtagcattaaggtgggtttgctgagttctctcgttgtttc

SEQ ID NO: 187050 - DNA, 75 bp, Homo sapiens
tggattcaatgtcatccagagcccagagcaggcatccagggcattgtggatgcctaccgccaagccctgccccaa

SEQ ID NO: 187051 - DNA, 50 bp, Homo sapiens
ttcctgaggtggacctgggcatcgacacagtgccaccctacagccctggg

SEQ ID NO: 187052 - DNA, 98 bp, Homo sapiens
gcccggcggcggtttcggcgcgcggccgggctggcgatggaagatggaaggaaggagcgcagcggcggctatgagaggttttcctccgagtacccaga

SEQ ID NO: 187053 - DNA, 99 bp, Homo sapiens
caggactcagaggccgccatcaaccgccagatcaacctggagctctacgcctcctacgtttacctgtccatggcattctgaaggcaaatcctgtttaga

SEQ ID NO: 187054 - DNA, 73 bp, Homo sapiens
caccgaggaaatgcgcttcctgagggagtgggtggagagctatgctgggactcatgtatgtctactggactca

SEQ ID NO: 187055 - DNA, 97 bp, Homo sapiens
gcggccgcagcatctcggaggactggggtatggccgtcaatgtgtactccacatctgtgaccagtgaaaatctgagtcgccatgatatgcttgcatg

SEQ ID NO: 187056 - DNA, 75 bp, Homo sapiens
gtcccgagaccgcaccacccgcctctgggccccagacaggaatatttttcaagatgtcttacacagagacactct

SEQ ID NO: 187057 - DNA, 100 bp, Homo sapiens
agtggatcgagcagctgaacgagtgcaagcagctgtccgagtcccaggtcaagagcctctgcgagaagaatatgacagatacctagcatctagcaaaata

SEQ ID NO: 187058 - DNA, 74 bp, Homo sapiens
ccgtcttctcaggagaccagctggtccaacattttaggacagcaaattaatgactttacccttcctgatgtgaa

SEQ ID NO: 187059 - DNA, 82 bp, Homo sapiens
ccccggcggagcccgcagcttccctgccggcctggtctccaagtcctctcctaagaagcctcgtggacgtaacatcttcaag

SEQ ID NO: 187060 - DNA, 82 bp, Homo sapiens
cgccgatcgcgggcaccggagccagccccgcagcgggttaatttggagtggcccctggagtcagtttcctacaccatccgag

SEQ ID NO: 187061 - DNA, 83 bp, Homo sapiens
gtttgcaatatgactttggaggaattctcggctggagagcagaagaccgaaaggaccaagaatcgccttcagccctgtctggt

SEQ ID NO: 187062 - DNA, 75 bp, Homo sapiens
ctcccagccgacatgtctctagtggcggaagccttcgtctcccagattgcagtagagatggggtttcaccatgtt

SEQ ID NO: 187063 - DNA, 96 bp, Homo sapiens
ggacaaatgcatttctagtggctacaaatgcccctcagatcttcagtttagatcttggaggcatatcaactgtggttctaaatggctatgatgtag

SEQ ID NO: 187064 - DNA, 98 bp, Homo sapiens
gtgtcggcgcctcattcgggtggagctgagccggagacaggtctcagtggcccttagcagcagctccattcgtgtggccatgctggaggaaaatgggg

SEQ ID NO: 187065 - DNA, 90 bp, Homo sapiens
gagccatctgtggtgccaattgaagatgctgctagagaaactgaacggcacagtgccctgcctgttggataccagcaccatccccgctga

SEQ ID NO: 187066 - DNA, 89 bp, Homo sapiens
gacttcgatgatcgtgtgtcggatgaggagaaggatggtctggtggtatttgggaaaaattcagcccggcccagagatgaagtgcaaga

SEQ ID NO: 187067 - DNA, 100 bp, Homo sapiens
ggagaactaaatgggagaagaggaatgttccctgacaatttcgttaagattggtgaaagacaacaagtgttagtaacagaagaatcttttgattccaagt

SEQ ID NO: 187068 - DNA, 75 bp, Homo sapiens
cttcacccgcttccgcagcccgctcgtgcccggcttctggtcctggccggaccagaatatggccaagggatgaac

SEQ ID NO: 187069 - DNA, 136 bp, Homo sapiens
agaggtggaggggaggattttgaggacacttgtggagagctcgaattccagaatgatgaaattgttgattcgcctttgccagtctcatctcgtgtctgctttgttaagttccatgatccagactcagcagttgtgg

SEQ ID NO: 187070 - DNA, 76 bp, Homo sapiens
atatgcagaatgcagaaatcatcagaaaaatgactgaagaatttgatgaggaggagatgttaaagtaacccatctt

SEQ ID NO: 187071 - DNA, 100 bp, Homo sapiens
gcttagctgggtctcggccacggcgtggagagcggcaacaaaacctggaaatccaccggaagataaaacagtctgagcaggagctagcctatctggaaag

SEQ ID NO: 187072 - DNA, 75 bp, Homo sapiens
gcgagcagggagcggagtaccagcacttcatccagcagtgcacagacatttctcttgggaagttgtgcatctgac

SEQ ID NO: 187073 - DNA, 100 bp, Homo sapiens
ggattacctgctttacaagcaaatgaagcaactgaaaaaccccttggaaatagtcagcatacctggctgtgggcagaatcctgttagacaagccagtgtg

SEQ ID NO: 187074 - DNA, 100 bp, Homo sapiens
gatgacctttcaaatgtttcttctgatgactcagtacaacttcatgcctacatttcagacacagctttcactttcagaagaacagaatgaagtaatgaaa

SEQ ID NO: 187075 - DNA, 90 bp, Homo sapiens
cggacgggaaggcgggagacgagaagcctgaaaagtcgcagcgagctggagccgccggagaaacaagtgttgaaaatgttaaaggctgtg

SEQ ID NO: 187076 - DNA, 100 bp, Homo sapiens
gttttctctctcctttttggagacagattcgcagtggtcgcttcttctccttgttgtgacttctcaccaggagatttggtttgggccaagatggagggtt

SEQ ID NO: 187077 - DNA, 101 bp, Homo sapiens
cgtctgccttcgcttcacggcgccgagccgcggtccgagaaaatgtttataggaggccttagctgggacactacaaagaaagatctgaaggactacttttc

SEQ ID NO: 187078 - DNA, 101 bp, Homo sapiens
tttctaatatctcgaaatgcggctgcttttcaaggatcttacacatttgttccatggcttctcagctttaaaaggggaagtgccctagaagaaaaagagaa

SEQ ID NO: 187079 - DNA, 50 bp, Homo sapiens
tcagaactgaaaagtgctgaagaactcccccactggaaaggattctgaaa

SEQ ID NO: 187080 - DNA, 89 bp, Homo sapiens
ccttggatctttctcatacccaaaacattggacagatgctgcgtactcatttcacacattctcagatacatcttagagaaggctttcca

SEQ ID NO: 187081 - DNA, 100 bp, Homo sapiens
agaagagcgaccagctcactaagaacatgaactatctatgagaagctagccagtgctttcacagaggagcaggctgtgctgtataaccaacgtgtggaag

SEQ ID NO: 187082 - DNA, 50 bp, Homo sapiens
ctgcttagcacccctggccaagaagctccaccatgaggcgaggtggatgg

SEQ ID NO: 187083 - DNA, 96 bp, Homo sapiens
cttttctagcctgctgatgtgacaactgtgatgtgcctgcaacaacaggaaaggcaatgttatattaagatcagaggttggatttatgcaaacctg

SEQ ID NO: 187084 - DNA, 100 bp, Homo sapiens
gctgaaggaaaagtggagtctgatttcttttgtcaattaggtcacttcaacctcttattggaagattatccaaaagagacatattgatgtctttgactgt

SEQ ID NO: 187085 - DNA, 75 bp, Homo sapiens
agtgggcgagaacgtccactgcgggccggcgaaagctggggacggcaaaacagaacagaaaggcggagataaaaa

SEQ ID NO: 187086 - DNA, 50 bp, Homo sapiens
cctcgcctcctcgcagcagcgccatggtggaagcagggaaaggcctggag

SEQ ID NO: 187087 - DNA, 82 bp, Homo sapiens
tcgggtgggagtgacccgatttcccagcctgattacatcaaccccagagccgtgcagctgggctcccttctcgtccgcggcc

SEQ ID NO: 187088 - DNA, 95 bp, Homo sapiens
ctggctgacaaacccctcttcagggctgacttggctctggagcacatggatgaagtatgctcctcgcagcttctaacttcagtaaggcgcatggt

SEQ ID NO: 187089 - DNA, 100 bp, Homo sapiens
tccctacttatggttttacatgcttcgggctgctacatcaactctctcaggtggcgacatgtctaagaatgtgagccagtcacagatggcaaaattgaac

SEQ ID NO: 187090 - DNA, 90 bp, Homo sapiens
cacaccttaagaattctcaggaaaaatggaggagatgtataagaaagctcatgctgctatacgagagaatccagtctatgaaaagaagcc

SEQ ID NO: 187091 - DNA, 90 bp, Homo sapiens
cgacgctgctgggtccgctgagcggggcgacccgaggcgattgtggaaaaatgtgacagactcgctgagagaatctgaaattgataaggc

SEQ ID NO: 187092 - DNA, 100 bp, Homo sapiens
tggagtgttccttccgctagtgatcctttgcaccctgcttggagacggacttgcttccgttgttgacctcctgtactggagagacattaagaagactgga

SEQ ID NO: 187093 - DNA, 100 bp, Homo sapiens
gaaggcttatgaggatggctgcaagactgtcgacctaaagcctgactggggcaagaccctgcttcgggacggcaagcgggagagcatcgtcagcaccctc

SEQ ID NO: 187094 - DNA, 88 bp, Homo sapiens
attctctgctgtgcctgatcccatcccgcagtggaacaacaatgcctgccttcacgacactttgccaccatcaccttgaccttcatcg

SEQ ID NO: 187095 - DNA, 101 bp, Homo sapiens
acaggaggtggtagagggcatggatatctctactcgctccaaaggatatgggccctcacattttccaaacctgtccatctgctaactattttgactgcaga

SEQ ID NO: 187096 - DNA, 100 bp, Homo sapiens
tagcggatgggtgctattgtgaggcggttgtagaaggtatttggaaagctcatctctggagatgctgaacctacaccagaacaagaggaaaaagcactat

SEQ ID NO: 187097 - DNA, 89 bp, Homo sapiens
gcgatgtctgtggactgtcttgggcagcatgcagtgctttctggcaagaagacagtttcgtggtgggcacagccgagggaacagtcttc

SEQ ID NO: 187098 - DNA, 50 bp, Homo sapiens
ccggggcctgatgaatgacatcgctatcagttgagggatttgcagttgat

SEQ ID NO: 187099 - DNA, 100 bp, Homo sapiens
tgaagaggaaaacgttattcagggagaacggctccaagccaagggccatcgtggtggatcctgttcatgggaccgctcaggaagtggcagcgaagaagac

SEQ ID NO: 187100 - DNA, 100 bp, Homo sapiens
aggacatgagggcttagaattaagagattatcaactgaatggtttaaattggcttgctcattcttggtgcaagggtctaaattatggataataatggaat

SEQ ID NO: 187101 - DNA, 98 bp, Homo sapiens
agaagaggacgacgacgacgaggaagaggaggtttctgagggtgaaaagttcggaccctttgctggagagaagagaatgcctgaagacttggatgaaa

SEQ ID NO: 187102 - DNA, 50 bp, Homo sapiens
attccagactcgtgggggaaaggctgatattaacctggctgcagagccaa

SEQ ID NO: 187103 - DNA, 83 bp, Homo sapiens
gaaacaattgatttgctcttacgtatttgtgtgacttgactcttcaaacacaaaggatttttagactctgaggagcagttgga

SEQ ID NO: 187104 - DNA, 75 bp, Homo sapiens
agaaagttcatctagaaatctcaaagccatgtctcagtcactgattgtccctgggaagagccccacgaggaagaa

SEQ ID NO: 187105 - DNA, 100 bp, Homo sapiens
agcaagttagtggattaaaatctcccaagaggaatgacaaacaaccagctcttcaggtgttggtaaatcatgcttattgctacagtttacagacaagagg

SEQ ID NO: 187106 - DNA, 100 bp, Homo sapiens
tgtggcaccgtctggaggagctctacacgaagaagtgatcccattaagatactaatgccatcactgtctcctacaatggaagaaggaaacattgtgaaat

SEQ ID NO: 187107 - DNA, 75 bp, Homo sapiens
cctggaacagcagcatcattgtcaaagggaagaaggagaaagggccaacccctgaagaagcaatacagaaactga

SEQ ID NO: 187108 - DNA, 82 bp, Homo sapiens
ctctctatgatatgctaagaaagaatcttgtcactttagccactgctactacagaacattcagaagattctcggccttgccc

SEQ ID NO: 187109 - DNA, 80 bp, Homo sapiens
gaaaatcaacgacaacttgagcacaggtgaaaggtgtagcagtcactcggcctacacccacagcatcgaccttgtgaacc

SEQ ID NO: 187110 - DNA, 99 bp, Homo sapiens
attgaagtagatcctgacactaaggaaatgctgaagcttttggcctcaggagagcgttaccatgtggagccccacccagaacatctctgcggggcctac

SEQ ID NO: 187111 - DNA, 100 bp, Homo sapiens
ggacagctaccgcagcatgagcgaaagctacacgctggaggtgttggatcctgaacaaaaccataacttcacagatcattatctaaatgtggcctttgac

SEQ ID NO: 187112 - DNA, 98 bp, Homo sapiens
tcagccttggccatgccaagagaggagttggaccttctggagtgttacaccttcacagttgttgatcacatagcatggtcatccactcacagcttaaa

SEQ ID NO: 187113 - DNA, 82 bp, Homo sapiens
aacaccgaggaggcggcggagcagcgggcggaggtggaccggatgctcagccgccaccggcacggccaggccagcatggtgg

SEQ ID NO: 187114 - DNA, 98 bp, Homo sapiens
tggcactgtggttcctgcatgaagacagtggctggcggtgcctggacgtacaaactttgtgtggacagtaatgacctcacgtttccgattgcctgctg

SEQ ID NO: 187115 - DNA, 98 bp, Homo sapiens
ctggatcaggcgcccgagggccggggctggaggagactggcggagctggcggggagtcgcgggcgcctccgcctcagacacgagacgacttcctgggc

SEQ ID NO: 187116 - DNA, 75 bp, Homo sapiens
tgttgcgaaggcagccatctttagttcgtctttcctagagaggtgaatgaaaactttgccattgatttgatagca

SEQ ID NO: 187117 - DNA, 100 bp, Homo sapiens
tgaccgacgccaacatggcggcgcccagtggcgtccacctgctcgtccgcagagcaaaatcaccaggacagccaatacaagtggtttatgtaccatccca

SEQ ID NO: 187118 - DNA, 100 bp, Homo sapiens
ccaagtgaaaggcactatcgagattggaaccacagaagggaccattgcaagctgcagaaaatgagaagaccctactgaccagcccaagaagacagatgac

SEQ ID NO: 187119 - DNA, 98 bp, Homo sapiens
ttgtatgcctcaatttgctggatttaagcactgctgcactttatgagacaatgcagatcttcgtgaagactctgactggtaagaccatcaccctcgag

SEQ ID NO: 187120 - DNA, 50 bp, Homo sapiens
gagcacaacaggagctacgaggagttggttttacttgtaatggacacaag

SEQ ID NO: 187121 - DNA, 98 bp, Homo sapiens
gtctacactgtacatgctttttattacaagactacggagcataggaggaaaattcatcatctggtctggtgtggcagatgtggatagctggaccctcc

SEQ ID NO: 187122 - DNA, 74 bp, Homo sapiens
tacgggggcaatggcatcgtgggagcgcagggtctgttgggatggtatatggtgaaaagtggactagaagaaaa

SEQ ID NO: 187123 - DNA, 100 bp, Homo sapiens
cttctacctaattttcaccaatgagtttggaatctgtgagtgcaacgtgtaaacagctgagccaagaactaatggaaaaatatgaagaactgaagaggat

SEQ ID NO: 187124 - DNA, 100 bp, Homo sapiens
tgcacatccttcgaaaagctgccaagttgaaaatggacgagtaatcgcctgctttgattcattgaaattttatcttcaagacactaaaagtagtaatggt

SEQ ID NO: 187125 - DNA, 75 bp, Homo sapiens
caaggagcacggtttcgtaggatggtttgaaacatcagcaaaggaggaggaagccaagaatctggtgagcgaagc

SEQ ID NO: 187126 - DNA, 101 bp, Homo sapiens
gccaagaggaatcagaaacctgaagttagaaaggctcaacgagaacaagctatcaggttggtcaaagaaaaagtgatgtatgaaaaagaggcaaaacaaca

SEQ ID NO: 187127 - DNA, 71 bp, Homo sapiens
ggtttccctcccacctttgccattcctcaagctgcaggtattcaaaacctttgaccacatggcccgtcagg

SEQ ID NO: 187128 - DNA, 101 bp, Homo sapiens
ttgagccccatcgtggattccaagacatccctgctgagagagccaaggtttttggcatcatcctggtttccatctttgcctatgatgccttcaagatctac

SEQ ID NO: 187129 - DNA, 98 bp, Homo sapiens
ctggcttagtgaacattgtacctgtcctatgtgcaaacttaatatattgaaggccctgggaattgtgactacacttgctgctttgaaggatgaagttg

SEQ ID NO: 187130 - DNA, 101 bp, Homo sapiens
gtgtactttccatttgccttcctggactgctgtgattgcacctgccatcttatgcagaaatgacctgaagacagactgaaacaacgtgttctacagcctga

SEQ ID NO: 187131 - DNA, 90 bp, Homo sapiens
ggaagttttagcctagctgttctcaaggcggattaattagcccaagaaacattatattcatgtgcacaggtttcatattccagaaggttg

SEQ ID NO: 187132 - DNA, 100 bp, Homo sapiens
gtgaaccagatccagaagactgtgatcgagcccttaaaaaaagccccccaagatgaacccagtggtggagccactgtcctggatgctgggcacctggctg

SEQ ID NO: 187133 - DNA, 114 bp, Homo sapiens
cccgagaatgggaattctcttcactagaatatggagactgttcaatcaccagggggccacctacagatgctcctgcagtggacacagcagaacaagtctatatctcttccctgg

SEQ ID NO: 187134 - DNA, 83 bp, Homo sapiens
ctcttcagggatgagtcatgtggcagtggaaaatgcgctcgggctggaccagcaggtgcgcgcggagccatggttatcatgtc

SEQ ID NO: 187135 - DNA, 80 bp, Homo sapiens
ttttagatacttttaaacacccgagcgctgaggtctgctgagaacagacccagtccctgaggaaggagaagatgttgctg

SEQ ID NO: 187136 - DNA, 82 bp, Homo sapiens
agattatggaaaaattcaatacaattagtgtctccaaatgcaacagacattcgtcatgtcctcaaatacaatgcttcaaaaa

SEQ ID NO: 187137 - DNA, 51 bp, Homo sapiens
caaaccttgcttctaggagataaaaaggtccagcaagactatgaatctctg

SEQ ID NO: 187138 - DNA, 75 bp, Homo sapiens
tgccctcccttgctccatggccagtcaacttacacggtgcaccagtgaacactagtctgaatgtataccgaaata

SEQ ID NO: 187139 - DNA, 99 bp, Homo sapiens
aaacagaccagtttctagtgacagacagcggcaggacagtcatcctctataagattttcgacaatgaagccaaagacgtggagagagaagtttgcttta

SEQ ID NO: 187140 - DNA, 88 bp, Homo sapiens
gacatattcctctcctgatctggcctcatctgttccagggaggtgggattgaggggagcagcctctgggagtgacagtgctgacaaga

SEQ ID NO: 187141 - DNA, 71 bp, Homo sapiens
acgggccatacccaataaccaggtgcttggcaaaatcgagcgggccattgttgttcaggggatgaaggaag

SEQ ID NO: 187142 - DNA, 100 bp, Homo sapiens
gagcctagcacctcttatactgatacacagtgccaacataaacctacatcgtaaactgttgaccaaagaactcgatgacatgggcctggactcgtcgcag

SEQ ID NO: 187143 - DNA, 48 bp, Homo sapiens
ttgatcctgcagcccaaggtgacggagagacgaggtctcactatgttg

SEQ ID NO: 187144 - DNA, 98 bp, Homo sapiens
ggacattttacccttcagtcggcccaagaaatcaaaataaaggaaacacatttcatatactgcaggtggtgaaattgcctctacctttgatcacccag

SEQ ID NO: 187145 - DNA, 133 bp, Homo sapiens
cgaagacataaatccctgagtgcccgggaggagccttaacaagcgcacggagccctcaaggcattggaaaccctaattgttgatctcgtgagctgcgggaaggagcactccctggctgtgtgccacaaaggaa

SEQ ID NO: 187146 - DNA, 90 bp, Homo sapiens
gatgagccacatgtgtttcaaaatggccctatgcttagggtggacaagatcgaggaacttgatcaagaaaacgaagcagcgttggaaaat

SEQ ID NO: 187147 - DNA, 80 bp, Homo sapiens
ctttaccatctttgtggctgtgcttgccaggcctggctccagcgatcagtgggtgaccgcggctgcgagggactttgtca

SEQ ID NO: 187148 - DNA, 100 bp, Homo sapiens
cctagttggcattgaaggttcactcaaaggcaggattgcatgtcgtggcaaaaacatggaagtgagacttatttttctctctggactgtgcatagcagta

SEQ ID NO: 187149 - DNA, 100 bp, Homo sapiens
ggagcagcttctttatcccttcatctgtggataagcaggtctgtggctgtcctctctattggaaagcccccatgttcagggctgcagggggagagaagac

SEQ ID NO: 187150 - DNA, 51 bp, Homo sapiens
ctcccaaggagctgagattacagttttgggctatgatgcattaggcttctg

SEQ ID NO: 187151 - DNA, 100 bp, Homo sapiens
agacgttgaactctcagtggtcctacctggggatattatcaaatctactactgttcatggcaggttgctgctccaagatagccaaaatgtggaagcactg

SEQ ID NO: 187152 - DNA, 74 bp, Homo sapiens
aaccacttgaccttgcacatatagtcaaaccagtccagctacgggggcccagccagccagcagctgagtggggg

SEQ ID NO: 187153 - DNA, 74 bp, Homo sapiens
gttggcgaaggaacggctctcctttgtttgcagtaactattggtacttcagagatgaatgcattcttggatgac

SEQ ID NO: 187154 - DNA, 100 bp, Homo sapiens
gagtggatcgcctgcctggataaaaggtgcttttgaagatgatgatatcacgcacgttgaaggaagtgtagatcctattcgagatatagaaataatacat

SEQ ID NO: 187155 - DNA, 51 bp, Homo sapiens
tgaaaacctgggatccacagaggaaaggtatattttggaacttcacatcca

SEQ ID NO: 187156 - DNA, 82 bp, Homo sapiens
ggacggcgaggccctcatgtaccacacgaacactctgctccagccaaggtggtgagggcagctgttcctaaacagcgcaaag

SEQ ID NO: 187157 - DNA, 100 bp, Homo sapiens
gaagctgggatgcagccacagctgcagatccggggagtaggctgaagacctaactgcagcatgtctgtatttggagatggggcctctacagaagtcatta

SEQ ID NO: 187158 - DNA, 100 bp, Homo sapiens
ccgagaacgtgcgggaagagaagatcatcgagcatttcaaacggtgactccccggacagctcaacaccaaagctttcgcgggcacagcggccgcagtcgt

SEQ ID NO: 187159 - DNA, 100 bp, Homo sapiens
cacaatattaaaactttacctgggggtcagtatagaccttctgatttgctgtgccctgagacatatgtttgggtacccattgagcaatgcctgccttcac

SEQ ID NO: 187160 - DNA, 90 bp, Homo sapiens
cagggaggaggaggcggcagcggcggaggaaggcggcgcaccccgagaggatttgaagcctagcaacattgttgtgaaatcagactgcac

SEQ ID NO: 187161 - DNA, 100 bp, Homo sapiens
cagccacctctctcaactgtatagctatcctctttttaagggctgggagaactcaggaagcctgatagttctgccccagagacaagtatgaataccacag

SEQ ID NO: 187162 - DNA, 88 bp, Homo sapiens
aaaccagagagtcggagggagtccatctggagcggccaaggattttgcttgcccaaagaatttatggaagattcagctggagagggag

SEQ ID NO: 187163 - DNA, 80 bp, Homo sapiens
tggcagctctggccctgctctttgccatccacagacaatgcagatcttcgtgaagactctgactggtaagaccatcaccc

SEQ ID NO: 187164 - DNA, 75 bp, Homo sapiens
gttaagctggctgtcctgaaatattataagatgcctgaggaagtgcaccatggagaggaggaggtggagactttt

SEQ ID NO: 187165 - DNA, 75 bp, Homo sapiens
tgctctgcctccggggacaagaaactagagcaaataaccgttttgaaattcctaaagagaaaattgttatttctg

SEQ ID NO: 187166 - DNA, 100 bp, Homo sapiens
gtgcggcgaaggaggcagaggcacttatgcttgtcagggatacccacccaccatcccagggtctacaacatccacagccggaccgtcacccgctatcctg

SEQ ID NO: 187167 - DNA, 51 bp, Homo sapiens
tgctcgcggccgcgcctttgagccccttcaatgaccggccgatgtgcagga

SEQ ID NO: 187168 - DNA, 100 bp, Homo sapiens
aaagaacatccacagaatagacctgaagacaaaaatccagaagtacaagcagtctgtcttcccgaggctgctgtccatgacactgagtccagatcttcac

SEQ ID NO: 187169 - DNA, 50 bp, Homo sapiens
tgtcaacagaggctggttctgtgagaagcttgaattcggagtgatttacc

SEQ ID NO: 187170 - DNA, 96 bp, Homo sapiens
tgacatcttctgggatttagtctggtttattacccagaactctttgtctgggtcagtcaagaaccatttccaaacaaggacatggagggaaggctt

SEQ ID NO: 187171 - DNA, 100 bp, Homo sapiens
atggatatctctactcgctccaaaggacttgtgccctggggctgcctggcatctgggggcctcctcagagccagggctctttctggttgaggctgagact

SEQ ID NO: 187172 - DNA, 87 bp, Homo sapiens
ccaagatgccactggtgaagaagggccgttgctccagggagaactgcaaatatcttcatccacccccacatttaaaaacgcagttgg

SEQ ID NO: 187173 - DNA, 100 bp, Homo sapiens
gaagatgtttacagtgcagtcttatcgaaggatgtgcatgaaggacagcctcttctcaatgcatactggagcatagtgaaagagtctattttgaagcttc

SEQ ID NO: 187174 - DNA, 100 bp, Homo sapiens
ccaggattcaggtcccggtttgagtcttgaagaatttattgcttttgagcatcctgaagaagttgattatatgacggtgacacgctgttgcaggccctgg

SEQ ID NO: 187175 - DNA, 100 bp, Homo sapiens
ggtgtcctggtgcacccccagtgggtgctcacagctgcccattgcctaaagaagatggtgattgctcacaccaaagccttggacccctcccagcctgtga

SEQ ID NO: 187176 - DNA, 75 bp, Homo sapiens
gggttaccagcgacgcaccctgtcatgatcagttccagaagtggctcctgggtgatgagccgggtctgggacaat

SEQ ID NO: 187177 - DNA, 75 bp, Homo sapiens
aaacaatttctcctgctctgcagcttctgttcagacgaaatctcacaaaactgtcccttatcttcagtcacatgc

SEQ ID NO: 187178 - DNA, 100 bp, Homo sapiens
tcagagtgacagttacccgagatcagccacgcagagtcctgccttcctttgggtggtggctaatgccgtagcggcattatctgaaatcagtgagtctcac

SEQ ID NO: 187179 - DNA, 75 bp, Homo sapiens
tctgcgcgcgggagttcgaggccctgcggagctgcttcgccgctgcggtaaacctagcctttaagcaacctggaa

SEQ ID NO: 187180 - DNA, 75 bp, Homo sapiens
ctttggcaagttcgaccagatcgccaagcacctccgcgcaaaaagagtccctttttgaaaagcaaaaacaaggac

SEQ ID NO: 187181 - DNA, 83 bp, Homo sapiens
cagcacacgggcaaatagctgtggtagagttcctacttcagaatgtggatccataaagaacccagccaacccgcagagggagg

SEQ ID NO: 187182 - DNA, 90 bp, Homo sapiens
aagggccggcccgcctccctggccggggcgcagttcggaggttcagctcctgcccctcctaaagctgaagccaaagcgaaggctttaaag

SEQ ID NO: 187183 - DNA, 100 bp, Homo sapiens
actggagggcggccgagataccccacgcacgtgcgtgggactcatgaactcaccaatcccgggatcgccgaggtcacgatccggccagatcgcaagatcc

SEQ ID NO: 187184 - DNA, 100 bp, Homo sapiens
cggcaagctgtgcgacctcttctgcggccggcctgggcaggtgtcttcctcgagaggcaggcaggggatcccggacgtactggttttggattaggaattg

SEQ ID NO: 187185 - DNA, 82 bp, Homo sapiens
cttctcacagaaggaagataaactccacatatttctggactaggccctggccaggcccccgaggtggcccccacgcggacag

SEQ ID NO: 187186 - DNA, 50 bp, Homo sapiens
ctgcccaaaggaggaagacactgaggttatgtgcttcacatgatcactac

SEQ ID NO: 187187 - DNA, 73 bp, Homo sapiens
gaaaaagctccaggattctgacagggatgttgcgaaggttccctccccatatggtcccaccacatcatacgct

SEQ ID NO: 187188 - DNA, 76 bp, Homo sapiens
aagaagcacctcaaggacttgaagcttacactccagagggaccctccattttccatatccaggaaaatgtgatgcg

SEQ ID NO: 187189 - DNA, 100 bp, Homo sapiens
gaaaaagctccaggattctgacagggatgttgcgaagggaaataaatgcccggcttgatgctgtatcggaagttctccattcagaatctagtgtgtttgg

SEQ ID NO: 187190 - DNA, 88 bp, Homo sapiens
acgacaagcaacctaaataaagaacgtggggactgtacctcccttcagagccaacatcacttagaagcactgtgacttctgccgtgtt

SEQ ID NO: 187191 - DNA, 74 bp, Homo sapiens
ctgtggaagaagcataatatggtgaacggccgcctggcaggtgagaagccctaccactgcaactgggacggctg

SEQ ID NO: 187192 - DNA, 82 bp, Homo sapiens
tatctatccaagtgaaaaaagtctggtaaaactgcataaacagcttcttggacacttaatgattgttggcaagaaatgtgct

SEQ ID NO: 187193 - DNA, 101 bp, Homo sapiens
actctggactccacaaggagaacaggagacccccaaaagggatatcagttttagagaatgtggcgtggagaaattctcaaggaaagagtaaaatgctggtg

SEQ ID NO: 187194 - DNA, 75 bp, Homo sapiens
cgctggcagccgcggatctcaccgccgctcagggattgtcaccagacctgcaatctatggagcagattcggagaa

SEQ ID NO: 187195 - DNA, 74 bp, Homo sapiens
tgccaaagcctaccatgagctcttggaggcgagcctgctgcgggagattggcggcgtctaccccgggagctaaa

SEQ ID NO: 187196 - DNA, 98 bp, Homo sapiens
gccgggtcaccttcgaggcggacgagaatgagaacatcaccgtggtgaagggcatccggcacaggagaaaacgacgctccacacctttaacttcttcc

SEQ ID NO: 187197 - DNA, 75 bp, Homo sapiens
cagcgggttgcctccgctccccatacggcggccccagatacactgcctctaggactgggacagatagccactgag

SEQ ID NO: 187198 - DNA, 88 bp, Homo sapiens
cgcccgtgagggctacgtgctgcagcatcggtgtgtggctatttttaaagacaaacagaacaagcctactggttttgccctgggaagt

SEQ ID NO: 187199 - DNA, 82 bp, Homo sapiens
cgaggagagctctgacgttcccagggagttgataggcgccatgtcagaaccggctggggatgtccgtcagaacccatgcggc

SEQ ID NO: 187200 - DNA, 79 bp, Homo sapiens
aacgagagaaggaaattagtgatgatgaggcagagaagaggcgatggcggcgatggcatctctcggcgccctggcgctg

SEQ ID NO: 187201 - DNA, 82 bp, Homo sapiens
cggcggacggttttcgtacgggcggccgtgcgcgaggcgaggtcagcccaaggccaaccccactgtcactctgttcccgccc

SEQ ID NO: 187202 - DNA, 100 bp, Homo sapiens
ggcccggccctgaggatggacccaggagatcccgctggtgaccctgccgctggcgagcgccaccgcatggcttgactgctgtggctccagcacactgact

SEQ ID NO: 187203 - DNA, 100 bp, Homo sapiens
atttaagaatctggattgtttataatttgggcatttgggtacttagtcatggattactatgtgggtggtgatttactgaccctgctcagcaaatttgaag

SEQ ID NO: 187204 - DNA, 75 bp, Homo sapiens
ggccggctggcggtcacctggcacaccagcgcccgcaggatgcccaggtacaagaaaattccccaggacacagag

SEQ ID NO: 187205 - DNA, 90 bp, Homo sapiens
cctgcggacgaggccgggacttggccgagcggatcctaataaggggaaaatggtgcatctgcagacgcagcaggaggtgaagctgcgcat

SEQ ID NO: 187206 - DNA, 100 bp, Homo sapiens
gaggcgggtgaccctgttcctgaacggcagccccaagaacggaaagtattctaccttgtaaatactgttatttgtatatactgtaaatgatgacatcggt

SEQ ID NO: 187207 - DNA, 75 bp, Homo sapiens
aaaaatgacccaccaatggaagcagctggcttcactgctcaggatgaacactggcgtggagaagcactccgggag

SEQ ID NO: 187208 - DNA, 82 bp, Homo sapiens
actcaattacacttcgactctcaaagcaataccaggatagctgttgtttcagagaaagggagcctcttaaacagaatcttac

SEQ ID NO: 187209 - DNA, 80 bp, Homo sapiens
gtctgggaccttaacagggagccatgaatcaggaaacccaggcccaacggcaggtggatgcaagaagaaatgttccccaa

SEQ ID NO: 187210 - DNA, 75 bp, Homo sapiens
caaaaacacattctgggatgtggatggaagcatggtgcctcctgaatgtgctgcaatagtattttctacacttac

SEQ ID NO: 187211 - DNA, 98 bp, Homo sapiens
attggagaaaagcgaaggattgtggtcccgcctcacctggggtatggagaggaaggaagagatgatgattattctccaccgtctaagagaccaaaggc

SEQ ID NO: 187212 - DNA, 83 bp, Homo sapiens
ccggattggcagtggttttgacaacatcgacatcaagtcggccggggatttaggaggaatcattatagattctaaaaatatat

SEQ ID NO: 187213 - DNA, 75 bp, Homo sapiens
aggaggaagaattcccaagccaaagctttccagtgagacggtttaagcggaagcatcttactgccattgactgcc

SEQ ID NO: 187214 - DNA, 75 bp, Homo sapiens
acaagaaagtgagagtcattgatcccaggaaacaagagattgttgctgtttattacagaggtcagctgggaagag

SEQ ID NO: 187215 - DNA, 49 bp, Homo sapiens
gaggcagcgcggccgcagcagccctaattgccattgccttcagaaagtg

SEQ ID NO: 187216 - DNA, 50 bp, Homo sapiens
tgctgtggaagaccagccccaaagcaatgtctcaggctgtgcagacaaac

SEQ ID NO: 187217 - DNA, 97 bp, Homo sapiens
ccaaatgccggcatgctgaaactcagagagggaagatgtcttgcaagtacagcagccacacccagtcaaggcggataagaaggcggcacaagaaaag

SEQ ID NO: 187218 - DNA, 83 bp, Homo sapiens
cgcgcctcgctcagctccaacatggtgaaatgacaatggatgctctgttggctcgattgaaacttctgaatccagatgacctt

SEQ ID NO: 187219 - DNA, 100 bp, Homo sapiens
agagcctgagccaccaaagcacaaggcagaaaggagtgggaggctgccggcgtggaccgcgggaaggcggggctggggctcggcgggaggccacccccac

SEQ ID NO: 187220 - DNA, 101 bp, Homo sapiens
tcctccccaagtagctacctatcacagagcaattaaagttacagtagatggacctcgggaacccagaagaagcccagaacctcatggccctcaccaatgtg

SEQ ID NO: 187221 - DNA, 135 bp, Homo sapiens
cccaggatccctcagatctgtggagcagatccgatggagaggctgagctgctccaggacttgggattctgaagactactttgaggtcaacattccaacagacctacgagcaaaacattctggggaaataagtgag

SEQ ID NO: 187222 - DNA, 100 bp, Homo sapiens
cggggacctggtgttcgccaagatgaagggctacccacactggccggcccgggttatgaagacagtatggagtttccagaccatagtagacatttgctac

SEQ ID NO: 187223 - DNA, 74 bp, Homo sapiens
agcagcccagacgcggcacagagagggcctgggagcttgctgcagcttcaggtccctgtgcgttttattgcgac

SEQ ID NO: 187224 - DNA, 100 bp, Homo sapiens
gaaaatgcagatgttccagtggttcgagggaaacccaccttgcgtacaagaggtgtaccagccccagcaataaccagatctggacgttggtggttggcta

SEQ ID NO: 187225 - DNA, 98 bp, Homo sapiens
tcagctacgaggaggcgctgaggagagattatggcatcgtcaaagcattgtggtgtcttttttactgctgcttgctgtgcttatagctacgtattatg

SEQ ID NO: 187226 - DNA, 129 bp, Homo sapiens
ggatgactctccaggtgcaggaccctgccatctatgactccaggtcttcagcacccacccaccgtggtacaggctactgcagcactggggtgtcagttgttggtccgacccagaacgcttcagttctgc

SEQ ID NO: 187227 - DNA, 100 bp, Homo sapiens
gctatggcggcaattcccccagattcctggcagccacccaacgtttacttggagaccagccttatgtttgatcatcggccaaggtcctggcgagaactgc

SEQ ID NO: 187228 - DNA, 88 bp, Homo sapiens
ggtgtcttcagtcagggaggacaggcatttattgaaatggcaaccacagaggatgctcaggccgcagtggattattacacaaccacac

SEQ ID NO: 187229 - DNA, 95 bp, Homo sapiens
ctgactccggcgggagagtaaaggcggtgacagtgatcctccattaaagcgtagcctggcacagaggctagggaagaaagttgaagctccagaaa

SEQ ID NO: 187230 - DNA, 82 bp, Homo sapiens
ccttctggaccgagtgatgataatccggaccatgctgtatactccacaggaaatgaaacagcattactctactgactggcag

SEQ ID NO: 187231 - DNA, 50 bp, Homo sapiens
gccgagcaggctgagcgatacgacgcggaatggccaaagactatgacggg

SEQ ID NO: 187232 - DNA, 75 bp, Homo sapiens
tcaacatcaactacgtccctctgaaggatgagagccactcagagtgggtgtcttgtgtccgcttctcgcccaaca

SEQ ID NO: 187233 - DNA, 100 bp, Homo sapiens
catgagtgttcctgtggtctctgcacctcctttctgaatgtctgatcacagatacggggatggtggctctactttccagagcacaacaggacactgtgta

SEQ ID NO: 187234 - DNA, 82 bp, Homo sapiens
ctgacgctgctgctgtgtgcggtgctgctgagcttggcctcggcgtcctcgggggacggcaaaacagaacagaaaggcggag

SEQ ID NO: 187235 - DNA, 82 bp, Homo sapiens
cccgtccgtccgccgccaccacccactccggacacaggagccttcacgtaaatgggtccagtcatgcctcccagtaagaagc

SEQ ID NO: 187236 - DNA, 90 bp, Homo sapiens
gcggataagaaagccgctgaggacaagtgcaagcaggtgtaatcctgagagattcacatggtgttgcacaagtacgttttgtgacaggca

SEQ ID NO: 187237 - DNA, 90 bp, Homo sapiens
cgtatgtgtccaccgttgaccacaaaaaacatcaagatgtatcagccactgctggctgttggtgatgaaacttatcaggacatatttcgt

SEQ ID NO: 187238 - DNA, 100 bp, Homo sapiens
cgccaacaacccacctccaccggcatgcccaagagaatcgtaaatgcaaaaattgcttgccttgacttcagcctgcaaaaaacaaaaatgaagcttggtg

SEQ ID NO: 187239 - DNA, 100 bp, Homo sapiens
ccctggtgatcacttttgaaatcacatttcgttccaaaaatattactatccttgagctccccgatgaattactaaaagatgtaactgaactgcagatcct

SEQ ID NO: 187240 - DNA, 74 bp, Homo sapiens
gttcagccccgggtcactccacttgacatgccaccactgctctttgaggtgtcatccctggagaatgcttttca

SEQ ID NO: 187241 - DNA, 90 bp, Homo sapiens
cgcgggtctgctctgtgtgccatggacgggagctccagaggagatgtaataccttaattactttgattgaaagagaaaacatggaactag

SEQ ID NO: 187242 - DNA, 100 bp, Homo sapiens
ggtcgtgcggcaagtgagcgatttggtgaacagacactcccttctgtagctctgcggccgtcacgatgttctggaagtttgacttgaacaccacgtccca

SEQ ID NO: 187243 - DNA, 100 bp, Homo sapiens
ctcagatgttggatatttgcttggaaaaacgtgtgggtacgaccttgaactccatccggcacaacctgtcactgcatagtcgattcatgcgggtccagaa

SEQ ID NO: 187244 - DNA, 75 bp, Homo sapiens
cggagcccggctcccgcaccatggaggaggacgacagctacggtattttgaaggtggcgtctcatctgtctacct

SEQ ID NO: 187245 - DNA, 83 bp, Homo sapiens
cgggtacctgcggccaattcggtggaacgaggacgcggactgcgaaggcagtacctggagtagaacagaaaaattattatgtc

SEQ ID NO: 187246 - DNA, 100 bp, Homo sapiens
gcccgcgttccccccccgcccagagtcatggcggcagcagccgctctgagggcgcctgctcaggaattgaatgatctggcacgggaccctccagcacagt

SEQ ID NO: 187247 - DNA, 99 bp, Homo sapiens
aaacaattgatttgctcttacgtatttgtgtgacttgactcttcaaacacaaaggcagtgtcatcattaggctgtctttgtgccttaacagtattgatc

SEQ ID NO: 187248 - DNA, 82 bp, Homo sapiens
ggcggagacactggcagggccagaaacgcgcgcagcgggggcgggaggtttttatcatgaaaaatggatctatgtccataaa

SEQ ID NO: 187249 - DNA, 82 bp, Homo sapiens
gatagcgcagttggcgcggcagtacgctgggcacaggatctgtggatggtggagcagtggcagcaggggcttcaggccgaga

SEQ ID NO: 187250 - DNA, 50 bp, Homo sapiens
gaagcccatcgatgaatactgccgggtgtgtttccattgtagaaaacctg

SEQ ID NO: 187251 - DNA, 75 bp, Homo sapiens
tgaccactgccgtgcgcctgccagcgttacagtgtttctgccacctctgtacaaaagacaattttacttgtgtga

SEQ ID NO: 187252 - DNA, 100 bp, Homo sapiens
acatcctcatccgagcctttgatttgagtgggtgcaagtgaaagtgtaggaaaacatatgcttgaagcgtgcaacaataatctggaaatggcagtcacta

SEQ ID NO: 187253 - DNA, 83 bp, Homo sapiens
tggacatcgagcctgagggaggggaaaggcgcaggcagcgtccgtctccaagagagtatgaagagagtgcgtctgtagggcag

SEQ ID NO: 187254 - DNA, 98 bp, Homo sapiens
gacaagtgggaagaccgatgggaatggttaagactgagtcatctctgaatttgagcaatggtgaaacggaatctgtgaaaaccatgattgtccatgat

SEQ ID NO: 187255 - DNA, 90 bp, Homo sapiens
tgtgaccttgccaaggagcagggcccatacgaaacctatgagggctctccagttagcaaaggagatagagtaatgataaaccgcttagac

SEQ ID NO: 187256 - DNA, 100 bp, Homo sapiens
aaaagggtcatcatctctgccccctctgctgatgcccccatgttcgtcatgggtgtgaaccatgagaagtcctgctgcagccccacttcatcaaggcaga

SEQ ID NO: 187257 - DNA, 75 bp, Homo sapiens
tctctagcaagtggtcaggacgctgattgttctgcgcaggttggaggagagttcatggagagcctgcaggaccca

SEQ ID NO: 187258 - DNA, 75 bp, Homo sapiens
taacccttaccacccagcagcagggcatcaaggtgatctctctggccacctccttgcctacctgagcctcagccc

SEQ ID NO: 187259 - DNA, 75 bp, Homo sapiens
ctgtatgttggaggttatgaaagaccctttgcacaaatcaaggattgccccctgtgggtcactttctcagtcatt

SEQ ID NO: 187260 - DNA, 75 bp, Homo sapiens
cagcgacggcacagcgggaagaatgtctgcagatctccaggggagcccaccagcctagtcaacatggcctcggaa

SEQ ID NO: 187261 - DNA, 100 bp, Homo sapiens
tcgtgttcgtcctcggcggccccggcgccggcaaggggacccagtgcgcccgcatcgtcgaggtgagcgagtgctgtgctttcatgggcctcttctttat

SEQ ID NO: 187262 - DNA, 51 bp, Homo sapiens
gaacctttaagcgtaacagagtcacctggttgtggcagcactgcctgaagg

SEQ ID NO: 187263 - DNA, 100 bp, Homo sapiens
ttcctgtacctgaagtgtagcgaaaatgctactatgactcttcctggaatacacccacctaccttgaaccaggtgtgctgggcatcaaggtgaagatcat

SEQ ID NO: 187264 - DNA, 100 bp, Homo sapiens
gaaacccactgaagacgtctgcgtgagaatagagaccaccgaggttcgagaacttgtcttggacaattgcaaatcaaatgatggaaaaattgagggctta

SEQ ID NO: 187265 - DNA, 83 bp, Homo sapiens
acatgcttcgagatctccgagatgccttcagcagagtgaagactttctttgtaatagcctgcagctggtgttttgagaagccc

SEQ ID NO: 187266 - DNA, 82 bp, Homo sapiens
ccagcacagaagtggaattgaatctgctctaaaggagaccaaggaaataatgcaaaaggtgtcccaaggctcctgaccagtg

SEQ ID NO: 187267 - DNA, 90 bp, Homo sapiens
tccttactgccacctgacctgaagcagaagaaatcacagacagcttccagaccaggttgacacgaatgaacagctgaaaagaatagccca

SEQ ID NO: 187268 - DNA, 97 bp, Homo sapiens
ttaaattttaatgaagatattctgtgtccacatggctaatctagacgaaatccagatgagttcacctacattccttagagctttaatgactgctgtt

SEQ ID NO: 187269 - DNA, 100 bp, Homo sapiens
cggcctgcgcagccacctcaagaataaaagccgccctcattctaggggagaatataatgtttacagcacctttcaaagtcatgaaccggagtttgactat

SEQ ID NO: 187270 - DNA, 100 bp, Homo sapiens
atttaaaagacagtcctcgtcagcactgactttcagctatggaatcgagtctgataaggaggagaaaccacaacattctgtgatacccaaggaagtgaca

SEQ ID NO: 187271 - DNA, 100 bp, Homo sapiens
gtgaagatgatgaggatgaagacctttatgatgatccacttctacttattaaataatgcatggtcatggaggctatgattctgattttagtgatgatgaa

SEQ ID NO: 187272 - DNA, 82 bp, Homo sapiens
cactttcgccagcccgtgccgcgagcgcggcctgcaggaggtgaccctggcaaagatgagagtgcacatttcgtcctgcctg

SEQ ID NO: 187273 - DNA, 100 bp, Homo sapiens
cccgggcaaagcccatctggtccgccgagcagcaattctgtggtgttcttggtcacacatttatggagtttctgaagggcagtggagattactgccaggc

SEQ ID NO: 187274 - DNA, 74 bp, Homo sapiens
agtctcagcatctcttccaacagaaccagttggctggatctattattggcaaaggtggtcagcggattaaacaa

SEQ ID NO: 187275 - DNA, 100 bp, Homo sapiens
ctggacccatgtcactgaccccctcatagattctgaaaaagagttccacgtcctcccttatcgagtctttgttccccttcctggatccactgtaatgttg

SEQ ID NO: 187276 - DNA, 98 bp, Homo sapiens
gaaaggaatgagaagacagaagtcagagacaagaagaggctaacatgactgataccactataatttagtgcacaattccaccttcctttgtgctccat

SEQ ID NO: 187277 - DNA, 98 bp, Homo sapiens
taaactggcagcttcacattttcttgctcattcttctctctatgcacacaagggtgcacttacatttcaatcgaccaagttccaaggacctatgccat

SEQ ID NO: 187278 - DNA, 98 bp, Homo sapiens
actggacctccaaggaagccacgtgcagacatctacaaccttcgatctcctgacgagccagaagcctgtcttagatgttcatgcagaactagacagaa

SEQ ID NO: 187279 - DNA, 82 bp, Homo sapiens
aaagcagtatctggagccagtgcaggaaaactacagactgtggctgaaaaggaagtgaaaggggccgtgtactctatggtgg

SEQ ID NO: 187280 - DNA, 129 bp, Homo sapiens
tctctgctgctgttgcacactgggttgcagcctatggcctgttatttgtctcaacaaaagaatggagttcgctcttgttgcccaggctggaatgcaatggcatgaccttggctcactgcaacctctgcc

SEQ ID NO: 187281 - DNA, 140 bp, Homo sapiens
gttctgtgttttctggtgtgctgcaggacatcaattcttcaaggcctgttttactaaatgggacctatgatgtgcaggctgctgatactttggctgtgaggcaaaaaaggagaatttatgatatcaccaatgtcttagag

SEQ ID NO: 187282 - DNA, 145 bp, Homo sapiens
tatgtcagcgagagcgccaccagcaagaagatcgcccacagcgtcttcagcaagggcgacagcgcctacctctcagacgcatcttctctccagactgccgatcccagaaagccaggtgatcaccattaaccccgagctgcctgtg

SEQ ID NO: 187283 - DNA, 98 bp, Homo sapiens
attaccacattgaagacaatctcaaggaccaaaaaagaacttcgtgtgaaaattttcctgggctcctctggtgcaagtgtggtagctattgacaacaa

SEQ ID NO: 187284 - DNA, 97 bp, Homo sapiens
cttcatcctttacgagcacggcctcttgcgctacgccctggatgagatgcagccgcagcacggtccttggcaaacaaggatgagaaaaatatccaac

SEQ ID NO: 187285 - DNA, 75 bp, Homo sapiens
aaaatatcaacgatgaaagagtatttgggaaatcagtcagcttggtttacagtcgtggcttccaacatcctccct

SEQ ID NO: 187286 - DNA, 75 bp, Homo sapiens
gataatagagcaacaataagccctttacacttggctgcagttggctgggataacatggcattcatcttcctcaat

SEQ ID NO: 187287 - DNA, 75 bp, Homo sapiens
gaagaagaatttcgatctccgccctggggtcattgtcagatgaggaaactgaggtccagagaagttgaagttttc

SEQ ID NO: 187288 - DNA, 100 bp, Homo sapiens
taaatgaggaaactgaggcccacctggatgaagatactggcccaaagtcccaagggtcactcaggatgtgtcaactgtctggagtggaatgagaaaggag

SEQ ID NO: 187289 - DNA, 101 bp, Homo sapiens
cctgctggccctcatgacagtggtcatggccgtgtgctccctgcctctcacgcagagtgacaaagacctcgatgatgccttggataaactctctgacagtc

SEQ ID NO: 187290 - DNA, 82 bp, Homo sapiens
ccaaggaataaacatgcaatgaacccaaaaggacttaattcagtgcacaaatgagatgaatgtgaacatcccacagttggca

SEQ ID NO: 187291 - DNA, 75 bp, Homo sapiens
ggtcgcgcaggagccgggctgcctcgagccggggctggaggctccccgggagatcgggctggtggtcatcctggc

SEQ ID NO: 187292 - DNA, 83 bp, Homo sapiens
ggactccttcggcagtccacccaccgccgccgcctcccaggccagaagcggactcctagaagaggggagcagcaaggatggaa

SEQ ID NO: 187293 - DNA, 101 bp, Homo sapiens
agttgctctgcgtcatcaaagacaccaaactgctggcatctctcgggacaactggcacaagcgccgcaaaaccgggggcaagagaaagccctaccacaaga

SEQ ID NO: 187294 - DNA, 75 bp, Homo sapiens
atatgatggggagcttgaggacacttaccacgaagctgtggaaaatctctgttctcacaaagtctccccaatgct

SEQ ID NO: 187295 - DNA, 100 bp, Homo sapiens
ttctggttgcagatctagtgaatgctcagaaagacagtatgcaagatgagtcaagtcagacttcattacagaaagaatggatcttctaaccaaagacgga

SEQ ID NO: 187296 - DNA, 97 bp, Homo sapiens
caactgatacataataagacacaatctattctgctgattcacaattatggagactgtgtgctggagaatctggtaaaagcaccattgtgaagcagat

SEQ ID NO: 187297 - DNA, 80 bp, Homo sapiens
acgcggtctgcaagctgacgtataaacgcttcgttaagggactcaggcagtacgggaagaacttcttcagaattagaaag

SEQ ID NO: 187298 - DNA, 74 bp, Homo sapiens
ggctgtttgccagcagtgcctgtctaatgttaatactccagtgaaagaacagagcatgtaacttctaatgccag

SEQ ID NO: 187299 - DNA, 98 bp, Homo sapiens
tctgatgaaagacttcagcctctgctcaatcacctcaggtgcacttacagagtgctacgatgaactggggaacagatatcagcttccagtgtattgct

SEQ ID NO: 187300 - DNA, 100 bp, Homo sapiens
ctagggaggacctcacttccccggggtgtaataatgttaactgagatttgagttctgtgaacctgcatttgttgttggtaattgcctccagatagcttct

SEQ ID NO: 187301 - DNA, 82 bp, Homo sapiens
ccccgcggtgcggtgccggctgccccctgttggccgccttgaggtcagcccaaggccaaccccactgtcactctgttcccgc

SEQ ID NO: 187302 - DNA, 75 bp, Homo sapiens
catttccaatttgctggaaaaaatgacatccagcgacaaggactttaggaaccaaccggtgagccctctcctaag

SEQ ID NO: 187303 - DNA, 82 bp, Homo sapiens
ttggggacggagcagcgcgtcgtggggcgagcggcagggcagccccgagaaccacaggtgtacaccctgcccccatcccggg

SEQ ID NO: 187304 - DNA, 75 bp, Homo sapiens
ggcgagaggaagagggactaggtccaaacgctaggtggctgggtccaggtcctccaaatgcagtgaggttaggaa

SEQ ID NO: 187305 - DNA, 75 bp, Homo sapiens
ggggtagtgtctgggatccagtacgagttgaatcattgttcaaataagatcctggccaatttggagcaaggctta

SEQ ID NO: 187306 - DNA, 95 bp, Homo sapiens
cggcggaacatctggaggctgggaaatgaagaagctcattcacacagaagacccatttaatgatgaacatcaggagaggcaagaggtggaaatgt

SEQ ID NO: 187307 - DNA, 82 bp, Homo sapiens
cggagatggtgcagaagatggaggagattgcttgcacacatttagatgtggatttagtctgcataactgtaacagagaaact

SEQ ID NO: 187308 - DNA, 99 bp, Homo sapiens
gcaacatggtgaacccccatctctacaaaaatttagccagaatccttgcgtgaatatgttctacaaaggcatccagtttcagtctgaagctacaaaaag

SEQ ID NO: 187309 - DNA, 98 bp, Homo sapiens
tactggttctgtgtttggtcaagcagccagtactggtggaatagtctttggccagattgctgctaaaattgattcaattcctcacttgaataattcca

SEQ ID NO: 187310 - DNA, 75 bp, Homo sapiens
tccctcagtgactcccttggcaaccctcatctgcacactgattgccatattggtggtgccaccaccacaacagaa

SEQ ID NO: 187311 - DNA, 83 bp, Homo sapiens
caccagcggttccatcctacacttggcttcagctttagctgcagctgcctctgttcagccacttgcaacacaatgtttccaac

SEQ ID NO: 187312 - DNA, 73 bp, Homo sapiens
gtatgaacttttcacatacattgagaagagtaaaagtccaccagcggctcatgagcgctcagagagctcagaa

SEQ ID NO: 187313 - DNA, 90 bp, Homo sapiens
ggagaagatgtgccgccgctgccaacgtcgagcggcgacggctggttctttatagagttggaagcaagacatcagaataatatcttcata

SEQ ID NO: 187314 - DNA, 50 bp, Homo sapiens
ccaagttcaaccaagccattgctgaccggttccctgatgtgttacctgct

SEQ ID NO: 187315 - DNA, 75 bp, Homo sapiens
tctctacagtttgttgtagaaccaagtgaagccacaaacagatcagttactaaaccaaggagatttaactgaaag

SEQ ID NO: 187316 - DNA, 100 bp, Homo sapiens
agccaccccgcgggatacgcctcagcgcgctgcatcttcctcccgtgaggctggccgagctccacgctgatctgaagatacaggagagggacgaactcgc

SEQ ID NO: 187317 - DNA, 75 bp, Homo sapiens
gtcacatggattgttttaaagcaacctataaacatcagctctcaacagaacgaggtcactcggacactatggtgt

SEQ ID NO: 187318 - DNA, 76 bp, Homo sapiens
ttcacccccaaggagtctcgctgcttttgtggtaagaatgattgatgttggctgatattggagtgctcattcacat

SEQ ID NO: 187319 - DNA, 50 bp, Homo sapiens
ggattctgacagggatgttgcgaagggcagctttggaagaagtagaaggt

SEQ ID NO: 187320 - DNA, 100 bp, Homo sapiens
aaagttcacgtgactgtggatctcaagtactaccggccaactgaagtggttgtacctacaacagatcatatagatacagaaaaattgaaagccagagaac

SEQ ID NO: 187321 - DNA, 100 bp, Homo sapiens
acatggtagtgagtcgcgaagtcgggaccatcgtcgtgaggatcgtgtgcattacaggagtcctccacttgccactggaggccaagtgaggttggtgcag

SEQ ID NO: 187322 - DNA, 83 bp, Homo sapiens
cactcagctggggacagcagcctcaccaacacagcaccaacagcttccaagatagtaacagtacgagctcaactggaggcagt

SEQ ID NO: 187323 - DNA, 115 bp, Homo sapiens
tatctcatctggcttggcgcctgaggttctcccattaggtggtgtaactgtcacactccctcaggcaggaccatggaacacagcatctttggtcttcaatcagtccccttcaatg

SEQ ID NO: 187324 - DNA, 100 bp, Homo sapiens
tcttacgtctgcggaagtgcagctgcctcagttcttagcgcaggcatcctgacatcgaggcccaggagagaggagtccggtgtctacttgagaaacagct

SEQ ID NO: 187325 - DNA, 100 bp, Homo sapiens
gacatcgtggacattccaggaacctctgttgccatcagcaactgtgatggtctggagtgctcccaccccagcccgttgctgcccagctattggaacactg

SEQ ID NO: 187326 - DNA, 83 bp, Homo sapiens
cgctgctggacgaagagctctcctccttcttcctcaactatctcgctgacacgcaggtggtggtgaagtttattaagaaggag

SEQ ID NO: 187327 - DNA, 75 bp, Homo sapiens
ccgagttggagaacaggcgtggccagcactggctccttgatgttcaaatctgaacatcaatgatgtactagggaa

SEQ ID NO: 187328 - DNA, 50 bp, Homo sapiens
acgccctggtgctcaccaagcaaggcagagatctggctccacaaggaggc

SEQ ID NO: 187329 - DNA, 90 bp, Homo sapiens
gaggaaacagctatatgggaacaacatacagtgacgcttcacagggctgacgttcctcagggagtgattcgagtgcaagctccccatctt

SEQ ID NO: 187330 - DNA, 80 bp, Homo sapiens
aagctttatttacaaccagggagtctgtggttgactactgcaacagaagaatcggactctgaaatacctaagaatgactg

SEQ ID NO: 187331 - DNA, 83 bp, Homo sapiens
gtgcaatcttaaaagaaactgtgaagcaaattcgtcagatcaaagaacaagatgtggtcaaaggtgaaaagattcttccggta

SEQ ID NO: 187332 - DNA, 75 bp, Homo sapiens
ctcgctcgatctcacagtcctccactgacagctacagttcagcttcaccagcctccaccaagacgggacaagcag

SEQ ID NO: 187333 - DNA, 100 bp, Homo sapiens
cttatactcatggtctttgtcaattatggaggaggaaaatattggtacttcaaacatgcaagttggaatggctaccctgtcatgatcaaggcctcagcag

SEQ ID NO: 187334 - DNA, 75 bp, Homo sapiens
gcagacatggacccctcgcgagccatccagaacgagatcagctccctcaaaggtttggtgcacctcgatttggag

SEQ ID NO: 187335 - DNA, 82 bp, Homo sapiens
agccgatccagcctgcggagcctgtggggcagcatgctacaagtgaaaactgatgagaaactgaatgtgtctgatgagaata

SEQ ID NO: 187336 - DNA, 87 bp, Homo sapiens
tcctcctagaccgacttctgcagtacgagaacgtggatgaagactcttcgggttctgtacagagtaatgagatgtgtgacggctgca

SEQ ID NO: 187337 - DNA, 98 bp, Homo sapiens
gcagaaccaacgaggtggccgaatcttccttcaggatatcaagcccaaagcagtgtccacaccagcaccagctacaactcagcagtcagctcctgcca

SEQ ID NO: 187338 - DNA, 98 bp, Homo sapiens
tggagatcgtggtggatattttccgaaagctgggactgaggcagtgccttgtaactcacaatggctgacctcaagagaatttgcaagacaatagttga

SEQ ID NO: 187339 - DNA, 82 bp, Homo sapiens
accttagcatctgcaggatttgaccgactgatatgcagaagtcaattcatctggaaagactatctctgagtcagacttaaac

SEQ ID NO: 187340 - DNA, 98 bp, Homo sapiens
cttcaaaggaccggacccagagaagaggaaaactctaccggtgcaggaatcaaagatcaactcccactgaggacaaatggacctgtaattccgggtgt

SEQ ID NO: 187341 - DNA, 98 bp, Homo sapiens
ttgtctttggcagcgaaatggcctcaggcagtgcaacaagacatccaacggaagcgacagctgcgaccttatgtgctgcgggcgtggctacaacccct

SEQ ID NO: 187342 - DNA, 100 bp, Homo sapiens
ggcgttggcggcggcggcggcggcagcggcagcgcggcggggccggggttctccaaaaaatgtggaatcctttgcatctatgctgagacattctcctctt

SEQ ID NO: 187343 - DNA, 100 bp, Homo sapiens
attgtacccagagtgcagagccgcctttccagcatgcaggggctgctcagatttggcagctgatcggaagctctttcgtcttgtctccaatgactccttc

SEQ ID NO: 187344 - DNA, 75 bp, Homo sapiens
gccaagaggaggacagttcgctacacagcaatgcatcgagccgtgttgaaatccttgtctcctgtagacccagtg

SEQ ID NO: 187345 - DNA, 75 bp, Homo sapiens
tggccgcgcactcgcctcagctgagcctggatgggaaactcttgtctagtgatgtgactcattacgtgatcccag

SEQ ID NO: 187346 - DNA, 100 bp, Homo sapiens
gcaagctccatggtgaatccactaggaatgtcattgaagcacgaacttccaggagccggtgcagccgctgacacagcagcaggtggcgcagatgcagctg

SEQ ID NO: 187347 - DNA, 50 bp, Homo sapiens
cttgacctcctgacgataaccagccctgacggagtctcactttgtcaccc

SEQ ID NO: 187348 - DNA, 82 bp, Homo sapiens
ggccaagggaccaaggtggaaatcaaactacggactccagaattcctcagcagcatcctttcatcaacctacccaacctgta

SEQ ID NO: 187349 - DNA, 50 bp, Homo sapiens
cttagccagcccgagcaagtaaagattgtgaaaatgcctcgtgtaaaagc

SEQ ID NO: 187350 - DNA, 100 bp, Homo sapiens
tccaaccaaacagccgattggagacgggagccaaccagggctgcattggagctcttcacagatggaatcacaaataaacttattggctgttacgtgggaa

SEQ ID NO: 187351 - DNA, 100 bp, Homo sapiens
gtggagctgtgcctgtgccccgccagctaccggggggactcatgccaggtgctgtggctgtagctgacctctttggaccgggatgtgggtatcctgggct

SEQ ID NO: 187352 - DNA, 100 bp, Homo sapiens
tcggccctgctgcgagcccacacgcccctccacatggctgccctcctcctgcttccctggctcatgttgctcacagcctacagcaggggaagatgttttt

SEQ ID NO: 187353 - DNA, 75 bp, Homo sapiens
gagataaatggaattcttttaccatcttattaattcactctgacgccacaggtcatcatctggatcatcccattc

SEQ ID NO: 187354 - DNA, 100 bp, Homo sapiens
ggaagcctctctgctaaaccccctctggctggaggcgtgatcctgggtgtggccctgtggctccgccatgacccgcagaccaccaacctcctgtatctgg

SEQ ID NO: 187355 - DNA, 99 bp, Homo sapiens
aaccttccgaaggcccatacctgcattccatcattccgaggggatcactttctctgaaagtgttggcagaattgcccattattgttgttttaatgtatc

SEQ ID NO: 187356 - DNA, 96 bp, Homo sapiens
tcaacaaacggcgggaacccattcccagtctggaggccatttatttgctgagccccacggagaaggtgttcacagagcacccactgctgccgttct

SEQ ID NO: 187357 - DNA, 74 bp, Homo sapiens
cccttatgcaacagtttctctagtgggcccttctaggaccacctggcttcatgtgtggatttccacggctcttg

SEQ ID NO: 187358 - DNA, 54 bp, Homo sapiens
agggaccacggtcaccgtctcctcaggttttgagcaaaattttggactgtgaag

SEQ ID NO: 187359 - DNA, 90 bp, Homo sapiens
tcctcttcagaaagaaaaaagaagaagtccccgagttcaccaaaattcagacattgtacctggactatgccagagtccccaatagcaatc

SEQ ID NO: 187360 - DNA, 100 bp, Homo sapiens
cggggcctggacaccgggcgcaggagggcagcaccagaggccagtggcactcccagctcggtgcccaaggaccaagtccttgacactgtctacctgttcc

SEQ ID NO: 187361 - DNA, 75 bp, Homo sapiens
ggacggggagctgaacgtggacagcctcatcacccggctgctggagggtgtcgtgaaaactacccctaaaagcca

SEQ ID NO: 187362 - DNA, 100 bp, Homo sapiens
aaattgaaagttcaagggtagaactaagaagtttggaaaagattatatcccagttgccaaccggaacatgaacattttgcagtactgcccctcttccgac

SEQ ID NO: 187363 - DNA, 74 bp, Homo sapiens
ccaaccacaagacgactcaataggaggaagatgcctgtgaggagccaccaacatttgaagctatggagctcatt

SEQ ID NO: 187364 - DNA, 95 bp, Homo sapiens
cagggcctggtcgagacaactatttttgaggtatctgaggctaccccacagcactctctggcattggcagctctgtggccatggatatgttccag

SEQ ID NO: 187365 - DNA, 83 bp, Homo sapiens
cagctcttcacccggttcagtgacaacaaccaagcattagtgtgatgaatgcagactctgctaccattttggctgtttggatc

SEQ ID NO: 187366 - DNA, 89 bp, Homo sapiens
gggggatatccacagttcgatcaagatacgaacctaaactttcaaaacctgtcagtgattgggttccgaatcctcctcctgaaagtggc

SEQ ID NO: 187367 - DNA, 74 bp, Homo sapiens
ctaaagaagccctctcagcacagtccagggatcttttgaaagatgctcacatagtagaatggtccccaagagga

SEQ ID NO: 187368 - DNA, 75 bp, Homo sapiens
cggagccgctgctcgagctgctgctggattgaactcagagaagccggggaatgtggttcctgttttaacgtagta

SEQ ID NO: 187369 - DNA, 100 bp, Homo sapiens
agtgggagcactggaagtacgggcagttgcagtgttggagctaaaactatatcatcatgtacatagaaaaatccaaaggattctgcaaaaaagctactag

SEQ ID NO: 187370 - DNA, 75 bp, Homo sapiens
ggagactacaatgctgctaaatttactaaagctgcaaagatgttccagcaggtcgacttcaacaggaagccaggg

SEQ ID NO: 187371 - DNA, 100 bp, Homo sapiens
gcttgttctgtatccagagggcattcagactaaaatctacaaccttctcattcagacacacgggctggtggactaggcctcaattttgtcggtgccaatg

SEQ ID NO: 187372 - DNA, 100 bp, Homo sapiens
ctctgcttttgccacagcagttcctgcagcttccttgaggagaagagcttgaagttgttcagaaggaagtggcagagatgctgaagggcagaattctagt

SEQ ID NO: 187373 - DNA, 75 bp, Homo sapiens
gcaggttctaagaagactcttcccggttgatcgtggattatttgagggtattttactggatgaagcctcaggtgt

SEQ ID NO: 187374 - DNA, 100 bp, Homo sapiens
atggtgctgacaggtgctgccttctttcacaaggtgacagagctgaatgaacctctctccaatgaagatcgaaatctcctctctgtggcctacaagaatg

SEQ ID NO: 187375 - DNA, 100 bp, Homo sapiens
gcgcgttccggaggcccggccacctctgagaagggagacgacgctgctgggtccgctgagcggggcgacccgaggaactgtggaaggtgcatcagtgaag

SEQ ID NO: 187376 - DNA, 100 bp, Homo sapiens
agcgacggggcgctgcctggcccaggcgcacacggaagtgatttgtcccatcagatgaaaagaagaaacaaggttgtcaacgagaaaatgaaactctaat

SEQ ID NO: 187377 - DNA, 82 bp, Homo sapiens
tttgcaccccgtggggtggtgcacacagaacaacaaggtgttgatgccgccggacgattctgaaaaagagttccacgtcctc

SEQ ID NO: 187378 - DNA, 80 bp, Homo sapiens
acatgagtgatgtggaggaaaacaacttcgagggcagaaatgccgggacattctgcttcctgtcatcaccaaagagctga

SEQ ID NO: 187379 - DNA, 75 bp, Homo sapiens
caagaggacccatatctgaatgaccgctgccgagatgaggacggggacttggttgccttttccagtgacgaggaa

SEQ ID NO: 187380 - DNA, 100 bp, Homo sapiens
ttatatcaatttaggaaatgtcttgaaagaggcacgcatttttgacagatatttgatcaagttccttgcaaagcttgctcagaccagcgatgtgaataaa

SEQ ID NO: 187381 - DNA, 99 bp, Homo sapiens
cagactgtcactcaagaaatcgacattcaagtgcaaagttccccatcaagtggacggcccccgaggcagccctgtacgggaggttcacaatcaagtctg

SEQ ID NO: 187382 - DNA, 75 bp, Homo sapiens
gacggcgagacgcgcagcgccggcgcccgggagacccaggaggagcccgcaggccaagactaaggggctgcagag

SEQ ID NO: 187383 - DNA, 98 bp, Homo sapiens
cattgcttatgaatatctgtgccacttagaggaagccaaaagggtgcttattggttctccgttagttggccaacccaaaaacagaactggagatgtct

SEQ ID NO: 187384 - DNA, 75 bp, Homo sapiens
aggcgctttctggaatgtgtaacatagacacagatatcattctctgctggaactgggtgagaagcgtaaaggcat

SEQ ID NO: 187385 - DNA, 75 bp, Homo sapiens
gcggaggctgtaaaacctggcactctgcttggctctgtctcccactccgtgctgtctgagatgcaggtgattgag

SEQ ID NO: 187386 - DNA, 50 bp, Homo sapiens
cctgagatggggggaaagccgaacattcagaagattctcggccttgcccc

SEQ ID NO: 187387 - DNA, 82 bp, Homo sapiens
cccctgctatccccaacaagaggaaagacacacctaccaagaagccagtcaagcggccagggcgaccattgacgaggtggag

SEQ ID NO: 187388 - DNA, 82 bp, Homo sapiens
ccgggcggcgaccggggcctgggtccacgccgagggcaggacgaacttcaccagcaaattgtggctactaatttgccccctg

SEQ ID NO: 187389 - DNA, 80 bp, Homo sapiens
gggggctcaagcggagaagcgttttatgtgctgaaagagttggccagatgactaagacatataatgacatagatgctgtc

SEQ ID NO: 187390 - DNA, 75 bp, Homo sapiens
cataggacaggctgaggctgagtctcagtgttgccctgttcagtctgaggttggagtgcaatggtgtgatctcgg

SEQ ID NO: 187391 - DNA, 75 bp, Homo sapiens
ctgcacagccgcggcggcagcagcagtgagagcctctgacctgtccaggtgccctgtccagctgactgcaaggac

SEQ ID NO: 187392 - DNA, 100 bp, Homo sapiens
ttggctcctacttgattgcacacggtttcttcagcgtctatggcatgtgtgtggacacgctgttcctctgcttctcctggtccgacccccagtggcacta

SEQ ID NO: 187393 - DNA, 100 bp, Homo sapiens
acccagacaaagagaagaaaggcctggagagtcgtgcggacagcattgggagcggccgagccatcccaattaaacaggacgcacaagaccagccactgct

SEQ ID NO: 187394 - DNA, 90 bp, Homo sapiens
tgtatcagtacaaaggcatggggctgtccatgggcaccatgatctgtggctgggataagagaggccctgctaggtgtggtggcgcacgcc

SEQ ID NO: 187395 - DNA, 82 bp, Homo sapiens
agctcaccaaactgaagatgccttctcagtcagttgagctaaaagatggcggcaaggcagcccaggcaaatgtaagaatagg

SEQ ID NO: 187396 - DNA, 82 bp, Homo sapiens
tggtggcggcagtcggatagacaataccacaacaacacattttgcagagcaaagaatggccgagtggattctgaggaccgga

SEQ ID NO: 187397 - DNA, 50 bp, Homo sapiens
ccgccccctgcggcccagcgcccccagttttaacagtgtatgccagggaa

SEQ ID NO: 187398 - DNA, 75 bp, Homo sapiens
gagaagtcatttccttggagatcaacagacttcacagagaatgcagttgtcttgacttcaggtctgtctgttctg

SEQ ID NO: 187399 - DNA, 100 bp, Homo sapiens
cttacagatggacctgtacgcgctgctaggcattgaggagaaggcagcggacaaagagtactaaggctcgtacgtctgcatcgattatcttacgtggggc

SEQ ID NO: 187400 - DNA, 82 bp, Homo sapiens
tcccaaggtgctgggattacaggaattgaatgatctggcacgggaccctccagcacagtgttcagcaggtcctgttggagat

SEQ ID NO: 187401 - DNA, 100 bp, Homo sapiens
gtggaggaggcgccccgcgcagctggctggcggagcatgagcgccccagacgccgcaccaggctgcaggccagcccttcaagttcactatcccggagtcc

SEQ ID NO: 187402 - DNA, 100 bp, Homo sapiens
gaaaaggaaaaaggacgaagaggagaaacaagctatgtactctagcactgacacgtttacccacttgaaacaggtggatgagcttttagaaaagtacatg

SEQ ID NO: 187403 - DNA, 98 bp, Homo sapiens
tgataggctgcgctaccggaatgtcatccagcgagtgattagttatctaaatgatctggatagaatatcccagtctaactacattccaactcagcaag

SEQ ID NO: 187404 - DNA, 101 bp, Homo sapiens
acaagcctctgtagatggtccagatgtacattgaagatgtcagtttctacatgtgggaagtagacattgaaggctttatggtttacagacaagatctttag

SEQ ID NO: 187405 - DNA, 110 bp, Homo sapiens
cgccactggggcagccagcacaatcgggcggaggtggcgctgccccttcagacaatgcagatcttcgtgaagactctgactggtaagaccatcaccctcgaggttgagcc

SEQ ID NO: 187406 - DNA, 101 bp, Homo sapiens
cttacctcctaattggatccaagcatgaaaagggaacatccttctgtatcagaaattcccatgtttccatatccagatttcttcaccaaggcagataaaga

SEQ ID NO: 187407 - DNA, 75 bp, Homo sapiens
ggagcagtagatgatgatgtagcagaagcgaaaacagtgttacaccagaagagcagccggcctcctgtaccgatc

SEQ ID NO: 187408 - DNA, 100 bp, Homo sapiens
cagagcagcccaccagagcagccgcagagcatgattctgtgctgaacgcctccggtccctgctgcatactctggagatcaccgaccttgctgacttctcc

SEQ ID NO: 187409 - DNA, 116 bp, Homo sapiens
ctcatggcctacagggactttctgcagtgcctctgagaacttacgcagatcagccgaggtgctgataagactgtgaaaggcccagatggactgaccgcctttgaagccactgacaa

SEQ ID NO: 187410 - DNA, 75 bp, Homo sapiens
gagacaggaggcagtagccaaacacccagaaatcgaaacgagttggctgagactcttgcactcctgaaagcacaa

SEQ ID NO: 187411 - DNA, 98 bp, Homo sapiens
gattggaaaataccacaggatggagactacgagtttaagaagctcattcacacagaagacccatttaatgatgaacatcaggagaggcaagaggtgga

SEQ ID NO: 187412 - DNA, 108 bp, Homo sapiens
ttgtcgcgagctgctgatacagaagagatggatattgaaatggacagtggagatgaagcctaagaatatgatcagaaaaagcttgtggtgaaggggggcaaaaaaaag

SEQ ID NO: 187413 - DNA, 74 bp, Homo sapiens
cccggggaggatgaagagcgaggcactgtggaggactttccttatcccagttgattgtgcagaatacactgcct

SEQ ID NO: 187414 - DNA, 51 bp, Homo sapiens
gtacatctgaaagccgggaaatgttttccaagagataacttcaccaagatg

SEQ ID NO: 187415 - DNA, 100 bp, Homo sapiens
ggagcccgtgccagctatggggtcagaaggggccgtgtatgcttcgagatgaagctcctggagtggatccggcgcaccatcccctggctggaggaccgtg

SEQ ID NO: 187416 - DNA, 89 bp, Homo sapiens
gggaaaaaccgcgaagtcatggggctctgtcgggaagcggttgtggaacaggaaatgaaaaaggactggctttttgcccctcattatcg

SEQ ID NO: 187417 - DNA, 100 bp, Homo sapiens
gaaggctgtgagcaagctgtatgcatccaaagcacacatgaactcagtgctcatggggatgaagaaccagctcgctgcagaaccttggcctgaaaatgct

SEQ ID NO: 187418 - DNA, 89 bp, Homo sapiens
ggaaacttcgctatcatggagatcgtatcgtgatttccgatacccacctggacacccccaggagtataaacacaacatctactattggc

SEQ ID NO: 187419 - DNA, 90 bp, Homo sapiens
tcagaactgaggaacaaaaacccccatcctgggaaaaatggggaagctggtgtctggaaatgaagtatggaaatgaaatcatgaataaag

SEQ ID NO: 187420 - DNA, 98 bp, Homo sapiens
cggagacccagtcgctacgggagcagccagagtgtgggtacgccacgctgcatcacgtcattgacaagtccacagaagaccggatggagagcttcttt

SEQ ID NO: 187421 - DNA, 100 bp, Homo sapiens
ctcccgagtagctgggactgcagcatctggcacaatgtttttgtttggtttggtttggtgttgtaaagagagaggatcttgctatgtttgccagactggt

SEQ ID NO: 187422 - DNA, 100 bp, Homo sapiens
agcgcgcccgggcccgagaggaggaggccggggctctccgggcctcccgccgcttagcctgatgctggaaggacgaagcttatgttcctgaggaagaatt

SEQ ID NO: 187423 - DNA, 97 bp, Homo sapiens
ttgactttggcagaatatcatgaacaggaagaaattttcaaacttagactaggacatctcaaaaagagaccgtatcatattcgctccagtacttcca

SEQ ID NO: 187424 - DNA, 102 bp, Homo sapiens
atgcgtacgtagagtttgagaatccagatgaagccgagaaggcgctgaagcacatggatggaggcacaacagttggcccaggaattggcttggtgtgtggag

SEQ ID NO: 187425 - DNA, 83 bp, Homo sapiens
ccgcgtcctactttgacagctgcagggccgcggcctggttggtacgccttattacatgtctccagagagaatacatgaaaatg

SEQ ID NO: 187426 - DNA, 91 bp, Homo sapiens
aaaagatccggaagaaatatccggacagggtccccatgtcattgaaaatttgcatgcagcagcttaccggaatgccttggctaatcccttg

SEQ ID NO: 187427 - DNA, 82 bp, Homo sapiens
gctgcgcggcgcggcggccgggccctcgagacggggacggaacaagatcactcaaggtgaaggataatctactaataccagc

SEQ ID NO: 187428 - DNA, 100 bp, Homo sapiens
ccgccccgaactaagcagggcggtcggggcgccagcagagacttcagaaggaacgcctcatgaatgacttctctgcagccttaaacaatttccaggctgt

SEQ ID NO: 187429 - DNA, 100 bp, Homo sapiens
cccgaagaagaaaggattcgttacagccagagattggtaaaatgtcggttccaggaccttaccaggcggccactgggccttcctcagcaccatccgcacc

SEQ ID NO: 187430 - DNA, 98 bp, Homo sapiens
gcatcgtgcacagagacatcaaaccagagaatctcttgatttttcggacgccgcccgatactacattccctgagcccacctgcctgtcagcatcaccc

SEQ ID NO: 187431 - DNA, 98 bp, Homo sapiens
cttagaggacttccctttggatgtagcaaggaagaaattgttcagttcttctcagacgaaatctcacaaaactgtcccttatcttcagtcacatgctg

SEQ ID NO: 187432 - DNA, 100 bp, Homo sapiens
agctgtctcagtttggggcaagtttatacgggcaacaaagagcagacgccgctattcctggcggcgcgggaaggagcggtggaagtagcccagctactgc

SEQ ID NO: 187433 - DNA, 100 bp, Homo sapiens
aacctcatagctcaagaaacatgttgtgaaatatcagatactaaggaggagacatcacagctttcccagatcgggaggaaaaatatggaatgtgttttac

SEQ ID NO: 187434 - DNA, 83 bp, Homo sapiens
tgtcgggctggccatggcgaggggtgcacggcggccacctgagtggcgcggcggtgtcagttactccacaggatccgctgaac

SEQ ID NO: 187435 - DNA, 82 bp, Homo sapiens
gccactgaagatcctggtgtcgccatgggccgccgccccgcccgttgatgtgaagttcatttccaatccgccctccatggtg

SEQ ID NO: 187436 - DNA, 101 bp, Homo sapiens
aaccagaaccaaatcaccggtaccgggtcggccaggttcccgcaaaacattgccagctagtgaggcataatttgctcaaagtatagaaacagcccacctgt

SEQ ID NO: 187437 - DNA, 75 bp, Homo sapiens
cccccttcaagcaagggcatgatgcctccactaacagcaaatcacccaccttgaggtcataaaggagctggaagc

SEQ ID NO: 187438 - DNA, 74 bp, Homo sapiens
tttccttgcagtcgcctgctgctgtcgtcgggaggttcgagaacttgtcttggacaattgcaaatcaaatgatg

SEQ ID NO: 187439 - DNA, 126 bp, Homo sapiens
caaagaactggaaagtgtatcaagtttcaggtcctggaagcgcatccctgccgtcatctacaggttggacttgttgaaataatcctgatacattcctacaatggccactgctcagctttctcactg

SEQ ID NO: 187440 - DNA, 100 bp, Homo sapiens
gtcatccctgtgtatgtaggagtgaatataaaaggacttcatctcctcaacatggaaactaagttatctggaagtattttggatgtgtatagcggtgaac

SEQ ID NO: 187441 - DNA, 90 bp, Homo sapiens
agattatatcgcatcctatggctcaaagaaagatgattatttgtcatttacgtgctgaagcatattgacttgaggaaaacgccttccttg

SEQ ID NO: 187442 - DNA, 75 bp, Homo sapiens
aaaagtggcactgaggctctggaacttctgcccagctctccttggggatggagaagtttatgtttgggatgtgaa

SEQ ID NO: 187443 - DNA, 100 bp, Homo sapiens
gattgttcaccacggagcatgaagacagagcgggtgactggaggtggctccccagtcaccaggagactaaagtccatcaaaaacatccagaaaattacca

SEQ ID NO: 187444 - DNA, 98 bp, Homo sapiens
cgagatgtctcgctccgtggccttagctgtgctcgcgctactctctctttctggcctggaggctatccagcaatcttatggcaagggccttatatgac

SEQ ID NO: 187445 - DNA, 74 bp, Homo sapiens
tgatacagcttcagttaatgaaaatgggctagccctactgccaataaagggaaaataagagatgctcatcgacg

SEQ ID NO: 187446 - DNA, 97 bp, Homo sapiens
cagtcatgaccactagacccacagctgttaaagcaacaggtgtcatggagaaactccagctgggcccagagattctgcagcgggaaaatccaaggct

SEQ ID NO: 187447 - DNA, 75 bp, Homo sapiens
gtggcgaagtggagagtgacatgcagttggatggcggtgactgcgtggacctgagagtcagtatactaagactgc

SEQ ID NO: 187448 - DNA, 100 bp, Homo sapiens
aaaattcaaaactagtccttattttccaaccacagtggagtctttcattttggatcaggatgatttggaaaatccaatgctggaaacagcttccaagttg

SEQ ID NO: 187449 - DNA, 95 bp, Homo sapiens
gagcgcccggattggggatgagtatgcggaggacagctctgatgaggagggactttgaacatgtcggggatcgccctcagcagactcgcccagga

SEQ ID NO: 187450 - DNA, 75 bp, Homo sapiens
cagacggcgagacctcctgcacagatctctggaaacatggctacagaacatgttaatggaaatggtactgaagag

SEQ ID NO: 187451 - DNA, 100 bp, Homo sapiens
ttttatgcatctttatccaatcaagtgcccttggacaaagcctgaaaccaggtaaagaagcagctttgaatctgagcttcatatcgaaagaagagatgaa

SEQ ID NO: 187452 - DNA, 95 bp, Homo sapiens
attctctcccaggccacaagacatttcctgctcggaaccttgtttactaattatgagttcccccagagccttctcatcctcaacctgtctggaaa

SEQ ID NO: 187453 - DNA, 100 bp, Homo sapiens
ccatcagagagcacaaattgtagccctacccggaaaaggtcttcatctgagagtacttcttcaacaggccagacggttttgctgtctcagcctactgtgg

SEQ ID NO: 187454 - DNA, 75 bp, Homo sapiens
agctggaaattcctgacgttcattgatctggcaagaaacctattggaattcgagacttaattaatgaagctttgc

SEQ ID NO: 187455 - DNA, 75 bp, Homo sapiens
cccagatatcctgcctatgtttgccaaaggccccttcacagatgtagtcactacaaatcttaaattgcgaaatcc

SEQ ID NO: 187456 - DNA, 86 bp, Homo sapiens
cactcccgcccacgtcccatttcgcccctcgcgtccggagtccccgtggccaggaacaagcacatcatgattgacttggggactgg

SEQ ID NO: 187457 - DNA, 101 bp, Homo sapiens
atagcaatagacagttagaaagaagtggaagatttggtggcctgggcagcatggccgtattccggtcgggtctcctggtgctgacgacgccgctggcctcc

SEQ ID NO: 187458 - DNA, 74 bp, Homo sapiens
ccgccccgaaactttcaccgcgagcgggtggatccataaagaacccagccaacccgcagagggaggggaggggc

SEQ ID NO: 187459 - DNA, 76 bp, Homo sapiens
gatatttcatatgttttagctacaaacatttatctaaggttgcttatcaagtgtcccacaaatgaaaaaaatttct

SEQ ID NO: 187460 - DNA, 75 bp, Homo sapiens
cagggatatacagaccttactatcccggatggagggaaatgtttcaacgtgcgcaagcgttgcggcggcgggcag

SEQ ID NO: 187461 - DNA, 111 bp, Homo sapiens
ctgaagagtgtggctgtgaagctggggaagacgcagaaggtgaaggtgctcacgggcacggatccagacatttaatgtggatgcaccatgccagaccgtggaagatttaac

SEQ ID NO: 187462 - DNA, 100 bp, Homo sapiens
aaaaaccatctgtgctggggctttgattgcaaaagactgggtgttgactgcagctcactgtaacttcaccctgaagcgggcccttgaagtcttcaagcag

SEQ ID NO: 187463 - DNA, 99 bp, Homo sapiens
tggagcaaggagaagagccatggatatcagagggagaaatccaacgacctttctatccagttggtgagtttgtaagtgatgcccttctcgttcctgaca

SEQ ID NO: 187464 - DNA, 100 bp, Homo sapiens
gtgttggagtttttgatgttttaacatttgataacagtcaaaataataatccattggcattaatggcccagtaccagacttaaaaggaattgtattcgtc

SEQ ID NO: 187465 - DNA, 78 bp, Homo sapiens
caccaggagatttttcgggacattaccaaaccactcattttagcaaagtgtgggatgctgtctcaggagatgaattga

SEQ ID NO: 187466 - DNA, 74 bp, Homo sapiens
gagcggcacggctgaggcccgcaagcgcaaggtactccaaagattcaggtttactcacgtcatccagcagagaa

SEQ ID NO: 187467 - DNA, 75 bp, Homo sapiens
tgccgctcctaagcctgcacagccgcggcggcagcagcagtgagagttcaaggagcagggacaagttacaggaat

SEQ ID NO: 187468 - DNA, 100 bp, Homo sapiens
aaatggcattaatgtgagaaaatgtagacatgaagaagtgagcctgccttctggtacaagatgcctgtggaatgttcggtgaagtgcacttggagttcac

SEQ ID NO: 187469 - DNA, 89 bp, Homo sapiens
tggcgctgaggacccggacagccgatgctcccataatactctcagatagtgaagaagaagaaatgatcattttggaaccagacaagaat

SEQ ID NO: 187470 - DNA, 82 bp, Homo sapiens
agtaaacctggcagctgaagataaaaggtggaagaatcaacagccgtgatgtctggatttataactcacagttaaatatttg

SEQ ID NO: 187471 - DNA, 98 bp, Homo sapiens
ctctcttcaccctgccgtcatgtctaagtcagagctgattgggcagaaagtggcccatgctctggcagagggactcggagtaatcgcctgcattgggg

SEQ ID NO: 187472 - DNA, 111 bp, Homo sapiens
cgaggcaaggagctaaagcagcgtgcgttcagccctggggtcctctcagggtgcgccatcattgtccgaggtcagcctcgtggtgggcctcctcctgagcggcagatcaac

SEQ ID NO: 187473 - DNA, 100 bp, Homo sapiens
gccccacttgctcgtgcactttacacacatgaggaaacttggatttaactggccagaagcaggtattcaaagcagagaacaatccctgggtgacccccat

SEQ ID NO: 187474 - DNA, 88 bp, Homo sapiens
tctgggggcgctggcggcctgcgcagccacctcaaggccaagaataaggagacgggtgctttggctgcggccaaagtcattgaaacca

SEQ ID NO: 187475 - DNA, 100 bp, Homo sapiens
ttcccttcagtcctccctcggtgttaacgtctgctccagctcgcagcccgctgctggatctcacattcttgaaggtggcattgaagagcactaagatcgg

SEQ ID NO: 187476 - DNA, 100 bp, Homo sapiens
ggaagacagtgacccgcccattcatgaaagtctcagcatagaaaatacattgtgggcaagcaccattgttgcatcaggtttttagaacttcagccataaa

SEQ ID NO: 187477 - DNA, 83 bp, Homo sapiens
cgcgtcccctgcacagcacagaggggcagccggagagcctgggaaaggtgagaagccctaccactgcaactgggacggctgcg

SEQ ID NO: 187478 - DNA, 89 bp, Homo sapiens
ttgaggactgccagctggcgctgcaggttcttcacacacccccattcggcgtagtacccagagagctcaagatgtgtggcagttttcgg

SEQ ID NO: 187479 - DNA, 83 bp, Homo sapiens
tgaagaaactgctgaactctcacaatctattccagaggggagcttcaccacttcattgacggctttaatgaagagaaaagcaa

SEQ ID NO: 187480 - DNA, 91 bp, Homo sapiens
agagcgagctgagtggttgtgtggtcgcgtctcggaaaccggtagcgcttgcagcatggcacgtggactccctttaatccagtgactgtca

SEQ ID NO: 187481 - DNA, 83 bp, Homo sapiens
cctgtccttcaagaaaggcgagcggctccagattgtcaacaacacattgaccgactcatcagtcacggggccgacatcctgaa

SEQ ID NO: 187482 - DNA, 83 bp, Homo sapiens
ggcgggggatgtgagcgctgagcccttggcagatcatggaagggaagtggttgctgtgtatgttactggtgcttggaactgct

SEQ ID NO: 187483 - DNA, 100 bp, Homo sapiens
ctcgtgtgtgcacccccgatcccgccagccactcgcccctggcctcgcgggccgtgtctccggcatcatgtgtgggaaatgaggcaagttatcctttgga

SEQ ID NO: 187484 - DNA, 126 bp, Homo sapiens
tgaactcctgggctcaagcgatcattctgactcagcctcccaagtaggtaggaccacaggtgtacagaacatgggcctggaattgatatattcacacctggtaaacctggagaatatgacttggaa

SEQ ID NO: 187485 - DNA, 88 bp, Homo sapiens
ttgcattcaacattcaggctatcagctgctggtgaagaatattcagctggaggatggcaaaatgatcctggcctcgaacttctttaag

SEQ ID NO: 187486 - DNA, 98 bp, Homo sapiens
tgggtgcagcttctctagctggccttgctgttgatgagttttgatcatcctgagaaaaatgggccttggcctgcagacccaataaaccttccctccca

SEQ ID NO: 187487 - DNA, 100 bp, Homo sapiens
gctggaacaggagttccgatcgacccggtaccaagaaggggagtgcccgcggcagattgcagccttcttcgctgagtctctgcccagtgtgggagggcag

SEQ ID NO: 187488 - DNA, 100 bp, Homo sapiens
gagaagagaggctatgtgaaggctgggctctggactccagaggcagtgatagaacacccagacgcagccttcaacaattggatccatggctttgacagaa

SEQ ID NO: 187489 - DNA, 75 bp, Homo sapiens
actttccaaagtggatgcctccggggaggtgcagagcattgtagaccaaggagccatggataggagaagtatggg

SEQ ID NO: 187490 - DNA, 82 bp, Homo sapiens
tatctttggcttgcagccaacaatggggtgtccctggccagtgtccttccacctgtccacaagcatggggaacatcttcgcc

SEQ ID NO: 187491 - DNA, 100 bp, Homo sapiens
ctccgttaccttccaccaccccgtgcttcccgctcgatcgatccagccctatcagatccccatcacagggcaagaggattatgacagattacgaccgctg

SEQ ID NO: 187492 - DNA, 100 bp, Homo sapiens
ttagaggcatctgttctatcttcccatcataaaaaaggtctaaaattcccaggactccacagctttgcaccagataagcctggaggaatactaatgatgg

SEQ ID NO: 187493 - DNA, 100 bp, Homo sapiens
gagaatgcgagagaaagagcctccgtcaccacatagccagtccctgagacgaataggaccttgtccctggatgaggtgtaccttattgactcgggtgctc

SEQ ID NO: 187494 - DNA, 100 bp, Homo sapiens
tttttttcttatgaagcttcttctggttggaaacttgtcaaatttcatcaggtggttggaggcaaagtaaagaagcccggtaaacgtggtcggaagccag

SEQ ID NO: 187495 - DNA, 100 bp, Homo sapiens
tgcgggcggcgctgtgtccgtcgccatgacagctacctgaacgacctggagcgtattgcacagagtgactacatccccacacagcaagatgtgctacgga

SEQ ID NO: 187496 - DNA, 100 bp, Homo sapiens
cctggtcagagcgcggatggccgtaaccccgaaggaaatttcaggacctcaaggggctcggctatgagaaggggaagcctgtgggtctagtgggcgtcac

SEQ ID NO: 187497 - DNA, 100 bp, Homo sapiens
ctgggcatggccatcgtgcctctttgggcttccatgggcaactacatcaccaggatggccatgagctacccccaccaattgcctttgatgttgaagcccc

SEQ ID NO: 187498 - DNA, 100 bp, Homo sapiens
tggtgatggcctacgggagcctgcgagcagctgatgcagctgtacagtgcgcgccagcggcggcggctgaaccggggcctgcggcggaagcagcactccc

SEQ ID NO: 187499 - DNA, 101 bp, Homo sapiens
attttcagcctgtgtcgatacaataatcgacttgcagaacataatagctgaaacctttggacttcaagaaaattatatcaaaattgtcataaataagaagc

SEQ ID NO: 187500 - DNA, 75 bp, Homo sapiens
cagcacgctcgacttcatgctcggcgccaaaggatcttaagattgaaagtgatgttcaagaaccaactgaaccag

SEQ ID NO: 187501 - DNA, 75 bp, Homo sapiens
ttcgttgctcacagctatggaggacttgcttttgttgaactggcttgcacagaaatctggaggcagtatcaccta

SEQ ID NO: 187502 - DNA, 50 bp, Homo sapiens
gaaatactgccatcgagggctcagacttcacagagaatgcagttgtcttg

SEQ ID NO: 187503 - DNA, 123 bp, Homo sapiens
tctcatcttcaccgtcaaggccaacagggactgcagcttcctgtccatctccaaggcccacttctatgagacatgaacaagctgagtggaggcggcgggcgcaggactcgggtggaagggggc

SEQ ID NO: 187504 - DNA, 100 bp, Homo sapiens
cctgcgcccggggcgcgcccaccgcgccgcatccatgttcgaggggtcctggtgttcctggaacaggctctcatccagtatgcccttcgcaccttgggaa

SEQ ID NO: 187505 - DNA, 101 bp, Homo sapiens
gaggcggcgagaggcgggctgaggcggcccagcggcggcagcgccgtgccgtccctgcagtgacaccgaggtgctcctagccgtctgcaccagcgacttcg

SEQ ID NO: 187506 - DNA, 100 bp, Homo sapiens
ttccgttctggaaaggcacccatccttattgctacagatgtagcctcccgtgggctagaatacgaattcaagccttgaatagccttggagctggtccttt

SEQ ID NO: 187507 - DNA, 75 bp, Homo sapiens
aggtggtggacgagacggaggcgctgcagcgcttcttcgaagggaaggaagccatgctgaagcaccgggactacg

SEQ ID NO: 187508 - DNA, 73 bp, Homo sapiens
aagatttgtaaagaaaactcttagattgctcatttagaaagtggatgtgtgggataacatgtccaatgtgtcc

SEQ ID NO: 187509 - DNA, 130 bp, Homo sapiens
ttgtggatgcctctcatcgggagaatgctcttcaggatagtatcttggccagggaactcaaacagcagatgcagttgtattccctgaatgactataaaccacccatttcgaaagcgaaaatgacccaaat

SEQ ID NO: 187510 - DNA, 73 bp, Homo sapiens
gcctgaggatgatgccccagctgcagttcaaagatgccttttgggaactttatattgctgttggaatatctgg

SEQ ID NO: 187511 - DNA, 113 bp, Homo sapiens
cgctcctgctcctccaggcgctgcccagccccttgtcagccagggctgaacccccgcaggactcacaccacccggcaagaactgctcactacggctccctgccccagaagtca

SEQ ID NO: 187512 - DNA, 75 bp, Homo sapiens
gtccgagccccggccccaagtaacgccgccgccccggagccgccgaggaattttgttgtcagagaataaaaggag

SEQ ID NO: 187513 - DNA, 82 bp, Homo sapiens
atccagcaaggtcggcagagcaaggggcttacgcagaaggacctggccacggtctctaattaacagaagatggcaaagccca

SEQ ID NO: 187514 - DNA, 100 bp, Homo sapiens
aagacgaatcgttaaacatctgaaagggtcagaccgcctggacattagggcagcccggattcttctggataatgaccattacgccatggaaaaattgaag

SEQ ID NO: 187515 - DNA, 75 bp, Homo sapiens
cttggatccacttacagaaactatgtatgtccctgggaagctgcatgatgtggaacacgtgctcatcgatgtggg

SEQ ID NO: 187516 - DNA, 100 bp, Homo sapiens
tcgtctgggatctgacaagaggaccccgctgctaactcggctacaacatttggcagagagcctggcccaactagagaatctgtgcaaacagctgtatgaa

SEQ ID NO: 187517 - DNA, 102 bp, Homo sapiens
tactgatacagagacgatggtcggaatcagatttgaaaatgaaagtcatggcctgtatgagaagaaaaagacctcaagaaagcaacgaaaggaacgcaagaa

SEQ ID NO: 187518 - DNA, 100 bp, Homo sapiens
ggggaccccggcgagcccagagaagagcttccctccgcagtccgggccgaggagggacagtccacgccgagtatggatggagcagatctgtgttttgaaa

SEQ ID NO: 187519 - DNA, 90 bp, Homo sapiens
aacatggcactgttgcctatcagaagtcaattcaaaggacctgcccccagagagaggcagagcggcttgggtaaatccaccttaatcaac

SEQ ID NO: 187520 - DNA, 90 bp, Homo sapiens
gccacccagtcccacttcaaacattcgtctcggaaaccccgcctcttacagtcacgaggagaggaagaagcggggagagaccaacaatga

SEQ ID NO: 187521 - DNA, 100 bp, Homo sapiens
ctcacaaagaagtacgaagagcaagtattgtccttacaaaagaatttggatgccacagtcaccgcacttaaagaacagattcaattagcagagcctcaca

SEQ ID NO: 187522 - DNA, 100 bp, Homo sapiens
aatgcctatgatctggaagccaacctggctgtcctgaagctaatcagcatgattcttcagaggctcttcaggttctcctctgtcattcggtcagccgtct

SEQ ID NO: 187523 - DNA, 100 bp, Homo sapiens
cgcggccccacctacgttaacatgacggtcggctccttcgtgtgtacctcctgctccggcagcctgagtgcctgtgaagaaaacggggtattgccctgag

SEQ ID NO: 187524 - DNA, 100 bp, Homo sapiens
agaagcagttcaaccgcatgaagcagctggctaaccagaccgtgggcagttcgttcccacatgcagggcagcacaaggagaatgggcgtcatgactgatg

SEQ ID NO: 187525 - DNA, 100 bp, Homo sapiens
ccagcagctaggcatcaagtacatcgggatgaggaatgagcaagcgaaatggagatcttcacccttttcaacaaaccgaagagccatcagaagtgccggc

SEQ ID NO: 187526 - DNA, 100 bp, Homo sapiens
gacctttccttccaggcggtgagactctggttgctgaatgctataaagccaggacttgttaaaaagatcaatagattgcctacccccattgcaggactgg

SEQ ID NO: 187527 - DNA, 90 bp, Homo sapiens
ttgcttgatggcttagaactctccacagccatcactcatgtccataaggagggacacactcaggacaccaacaccttctttctgtgccgg

SEQ ID NO: 187528 - DNA, 82 bp, Homo sapiens
aaaatattatggtctttgtgcacatttacatcaagtgtaaggcaaacattggtgggcaccgatcttcctgttcattctgcaa

SEQ ID NO: 187529 - DNA, 95 bp, Homo sapiens
cgccgccgaagaagcatcgttaaagtctctcttcaccctgccgtcatgtctaagtcagaggcctcatcatttctgtctcctgtttctccacttcc

SEQ ID NO: 187530 - DNA, 76 bp, Homo sapiens
caggctcctgccctggactaccgagtggatccggattggtgccaatgtctccaacttcacttttgctcctagcacg

SEQ ID NO: 187531 - DNA, 99 bp, Homo sapiens
agtacgcctacttctataaagtcatccaggatgattgtagagttgtcttggcaaaacaggaaattacaaggttactggaaacattgcagaaacagcagc

SEQ ID NO: 187532 - DNA, 98 bp, Homo sapiens
gggagcatgggtgccaaggagtcacggatcggattcctcagctacgaggaggcgctgaggagagtgtaatgaacaagtctggggtgaatcgtgtagtt

SEQ ID NO: 187533 - DNA, 100 bp, Homo sapiens
ttaccggaacggcggcgacaagggtgttcccgaactagagtgggacatccaggcagaaattgatgcccacaatgacatatttaaaagcattgacggaaac

SEQ ID NO: 187534 - DNA, 75 bp, Homo sapiens
ggcatgtatgaatattatgccagtgaaggacaaaatcctttgcaaaaggtggacaagtcctattttcaagagaag

SEQ ID NO: 187535 - DNA, 82 bp, Homo sapiens
tggtgtaccaggcgaagctggccgagcaggctgagcgatacgacgaacccagtgacttgattgtaaaaatttacagagcgga

SEQ ID NO: 187536 - DNA, 75 bp, Homo sapiens
tccagccgcaatgccattaccagttcctacagctccactcgaggcatctcacagcgatgtcaccatttctacctg

SEQ ID NO: 187537 - DNA, 98 bp, Homo sapiens
ggaaggcgcgagtgaggaaaggaggtactgtagtaatctatgccagcaattatgacaatgttagcagaccatgcagctcgtcagctgcttgatttcag

SEQ ID NO: 187538 - DNA, 75 bp, Homo sapiens
ctgtgatgcctgcagagctgtggcttaccagtgaccaatggggctgaggctgtgtccactgaggctaagatgact

SEQ ID NO: 187539 - DNA, 114 bp, Homo sapiens
agggactctctctacccatatttggaggacatcccagaccctgaagtaaactggatcccctgtaataatcgtaacaggtgcaaagttccccatcaagtggacggcccccgaggc

SEQ ID NO: 187540 - DNA, 100 bp, Homo sapiens
cgactgtaagcaatctacgaagaccgaggaaaagctgcggatcgtcagtatttaaacagatcacatcatgcgtgagtacaagctagtggtccttggttca

SEQ ID NO: 187541 - DNA, 87 bp, Homo sapiens
cgcccgaagagccaagagtcagtattccggccagcttcacgaagtcagagaggcaaagccatgactacagtagtggtacatgtggac

SEQ ID NO: 187542 - DNA, 80 bp, Homo sapiens
gtcatcatgggccggcctggaacagcttcgagagctgtgcccaggagtgaacaaccagccctacctctgtgagagtggtc

SEQ ID NO: 187543 - DNA, 98 bp, Homo sapiens
actacaaatctgaagatgaaacagagtatggctgcagaggatccatctgtcttagcaaggctgtcatcacaataagtttataccatggatagcacaaa

SEQ ID NO: 187544 - DNA, 100 bp, Homo sapiens
ccagtccgggcaagaggcggatggacacggacgtggtcaagctggcatgacgcgcctcctgctcaccaagattcccttcttcagagaaataatagtgagc

SEQ ID NO: 187545 - DNA, 87 bp, Homo sapiens
ccatttgtcttgcaaagtgttggaggacagacattaacagtatttactgagagctcatcagaagtgcctttcaccttctgccatgat

SEQ ID NO: 187546 - DNA, 101 bp, Homo sapiens
ggtggcacagcggtgtcgtggccgtgttgctgatcgcctgggtggttgttggcgtgtccctgcagcgaaggatcctggtcatcatcagatttgaaatattt

SEQ ID NO: 187547 - DNA, 100 bp, Homo sapiens
ggcgatcaaggccaagtatccgccagtcaataggaagtacgagttgagttattctccccacctcagaagtaccagcttttggtgtatcatgcagattctc

SEQ ID NO: 187548 - DNA, 98 bp, Homo sapiens
cgggaaggcgggagacgagaagcctgaaaagtcgcagcgagctggagccgccggaggtacctcaataataatgagttgacagcggtaccatccctggg

SEQ ID NO: 187549 - DNA, 75 bp, Homo sapiens
gaggagccgatactgagcttcttcctatttgccatgggtgctagtattgtctcaagactatggcaaacacttact

SEQ ID NO: 187550 - DNA, 75 bp, Homo sapiens
aagagccaaactcattttttgatgcaacagatcctgaaggacacagccctgcagaaagtgaagcgtggccagagc

SEQ ID NO: 187551 - DNA, 98 bp, Homo sapiens
tgcaccccctccaaacctcaccagtaacaggagactgcagcagacccaggcccaggtggatgagacagccgctcaggaagcaatcttgcatgcgtctg

SEQ ID NO: 187552 - DNA, 75 bp, Homo sapiens
tcctggatgacctcttcgtctttatgcagaagaggggaaaatggctttgtaaagaagtttgaacctaaatctggc

SEQ ID NO: 187553 - DNA, 90 bp, Homo sapiens
cctgacccaaccactgtctacgtggacatgagagccctgagacacgacagtgccggtggtggtgtgcacattgagccccggtatagacag

SEQ ID NO: 187554 - DNA, 99 bp, Homo sapiens
tatttgaagaagagatcacttcaggtggcttttgtggagtgtgtcccggcatggatatccggaacaacctcactaggttgcatgagctggagaattgct

SEQ ID NO: 187555 - DNA, 113 bp, Homo sapiens
agattgtgcagtgctcgactgtgaggatggagtggctgcaaacaaaaaggtagcagaaggtcaagaaatttgtgtgattgaagccatgaaaatgcagaatagtatgacagctg

SEQ ID NO: 187556 - DNA, 51 bp, Homo sapiens
gtttgttcaggaaccaccagtgacagatgacttttttgaacgaaccattct

SEQ ID NO: 187557 - DNA, 131 bp, Homo sapiens
tccaaagtgttcttcactctttttgccctgcttggtttcttcatttgtttctttggacacagattctggaaaacagtgcctcctttggtgaaggtgacacatcatgtgacctcttcagtgaccactctacg

SEQ ID NO: 187558 - DNA, 96 bp, Homo sapiens
cctgattcaagtgttggcggatggaagggaggagactcctgaccctcagaatgggtcttactgaagtaacacaaagcttaaaaatggaaaatgaag

SEQ ID NO: 187559 - DNA, 75 bp, Homo sapiens
tacacatcaacccgcacttcaaagggacggtggtcacgcctgttcaagagtgaagatagtccaagtcctaagaga

SEQ ID NO: 187560 - DNA, 83 bp, Homo sapiens
gatcgcttctggcagaccgaaccggcgctcctgcccccggggtgacgcgcagctcccagccgtttgacaacttaaatgctgcg

SEQ ID NO: 187561 - DNA, 75 bp, Homo sapiens
ctccatcacccaccaacaacaccacaataatccacagccaagataaatcaagggagagatctcagtgtggtgtga

SEQ ID NO: 187562 - DNA, 100 bp, Homo sapiens
gttgccaagcacttacattgaagggttgccccaaggccctacaacggcagaagagactgttcagaaagggcctactgcagtgcatgaaggtggtatggac

SEQ ID NO: 187563 - DNA, 100 bp, Homo sapiens
aaggtatatttttgtggaatgaaaaggaagtattagaaatgagctgaagaccattcacagaagataccatcccacgaacacagatagaaagaaggaaaac

SEQ ID NO: 187564 - DNA, 75 bp, Homo sapiens
cagagctgaggactgcctgtttgcaggtggatggtctgaagcatttgctggagacaggggcctcggtcaacgcac

SEQ ID NO: 187565 - DNA, 83 bp, Homo sapiens
tcaagtaatttggagtgtgcctagggattgggatgatttggctgggcattaatttgaagatggagttttaacattgaatgcgg

SEQ ID NO: 187566 - DNA, 100 bp, Homo sapiens
tgatgtgcgacaaggagttcatgtgggccctgaaaaacggagacttggatgaggtgaaagactatgtggccaaggccaaagaggtgctgaaaaaatattt

SEQ ID NO: 187567 - DNA, 58 bp, Homo sapiens
gaactctgtccagttttcaaaccacacagcatctgcagaaaaagaggcaatcaagggt

SEQ ID NO: 187568 - DNA, 82 bp, Homo sapiens
ttgaagagactcgaggataatttaatctgcaaaatggctgataatttggatgaatttattgaagagcaaaaagccagattgg

SEQ ID NO: 187569 - DNA, 75 bp, Homo sapiens
cccggctcggagctgctcatcaccaaggccaagaacgggcacctggctgtggggaggatactgaggcacacagag

SEQ ID NO: 187570 - DNA, 74 bp, Homo sapiens
ccccgccgccctcgcaacctggcagccgccgccgtggaagcatttaaatcaaacggtattgagatggattgggt

SEQ ID NO: 187571 - DNA, 100 bp, Homo sapiens
agattctggacaagtgtaatgaaattatcaactggcttgataagaatcaggaccgagatctcactcagcagacagcagcagcccgggagcctgagctcag

SEQ ID NO: 187572 - DNA, 100 bp, Homo sapiens
gggtttatattttcaaaatctatgaatgaaagcatgaaaaatcaaaaggagttcatgcttatgaatgctcgacttcaggaccgaggtgatgagttcacat

SEQ ID NO: 187573 - DNA, 86 bp, Homo sapiens
gggaggaaggaacgaggcaaggagctaaagcagcgtgcgttcagccctggggaggatcccttttcccccagaaattactcaatgct

SEQ ID NO: 187574 - DNA, 96 bp, Homo sapiens
caagatggcggacggggagctgaacgtggacagcctcatcacccggctgctggaggaatccggacaatcagatagttcaaaccagcaaggagatgc

SEQ ID NO: 187575 - DNA, 98 bp, Homo sapiens
cgggctgcaggcgggggtgctgcagaggacacgaggcggcgggctggagacatggaccgcggcgagcaaggtccctgacaggctggatgaaatgagat

SEQ ID NO: 187576 - DNA, 89 bp, Homo sapiens
cagagtcagtaagaccatggctacgtcctcgatgtctaaggaagcatgagtgggaaaagcatgggacctgcgccgcccaggtggatgcg

SEQ ID NO: 187577 - DNA, 100 bp, Homo sapiens
tggccttgatttggcagctaatgagaagttgggatgaatgggttccggagagcagagtactcaaatacgtggacaccaatttgcagaaacagcgagaact

SEQ ID NO: 187578 - DNA, 104 bp, Homo sapiens
tggagcctcagttggaagcagccgatccagcctgcggagcctgtggggcagatttctctatgaatcatcatcaagaactctgggagaacttttgaattcataac

SEQ ID NO: 187579 - DNA, 75 bp, Homo sapiens
gtagagaccagttagacaagtatcaggaaaacccagagagacatttgaggaaaattgcctaagaattatgaccca

SEQ ID NO: 187580 - DNA, 75 bp, Homo sapiens
gctttggtagtacccattaacaaggtgtatgtggaatttgatgatcttgaatgggataaacgagagtgggttaaa

SEQ ID NO: 187581 - DNA, 75 bp, Homo sapiens
tctgagggtgccctcaatgagcacatgaccagcttagcttctgtcctaaaggcagacctgttatcctaaactagg

SEQ ID NO: 187582 - DNA, 100 bp, Homo sapiens
gaaataagcatcctcacagcacagtacacgaccagatgcctttgagtaatggacagatgggccagcctctcaggcctcaggcaaattatagtcaaataca

SEQ ID NO: 187583 - DNA, 82 bp, Homo sapiens
tgcatctggctgttagaagaattcatgctcatccggggagcatcgagtacagctgtccggcctccaacgagtgtgagatcac

SEQ ID NO: 187584 - DNA, 100 bp, Homo sapiens
gggctttcgcccgggtcctcctagaaattccccccgaagaagactcccccacatctgggtactgaacgacacctgggtctccttcccttcctggtctgag

SEQ ID NO: 187585 - DNA, 100 bp, Homo sapiens
ggtctgcctgctgcactgctttggtttttcgttggaatatacgttgcacatttatggcgattctgagtgtgagggcagacttctgccaggctcagcacag

SEQ ID NO: 187586 - DNA, 75 bp, Homo sapiens
cggaaaaggacgcaaagttctccggcgaggtgtggacactgccagcggctgcagccgacttggaatgacctggga

SEQ ID NO: 187587 - DNA, 50 bp, Homo sapiens
cacctatggacaagtctataaggtttttagaacttcagccataaaaatgg

SEQ ID NO: 187588 - DNA, 100 bp, Homo sapiens
gcattggtaactccagtctctaacgttttagaaaatcataacaagcggttctctaccctgtaaagctccatcaagtatgatggtgaaggatgaatatgtg

SEQ ID NO: 187589 - DNA, 75 bp, Homo sapiens
tggtcagatgaacccatcaaagagtgcgagattaaaatggcttccagaggaaagacagagacaagcaaattaaag

SEQ ID NO: 187590 - DNA, 90 bp, Homo sapiens
cctccaccaaaggaggaagatttttttgcctctcacgtttctcctgagcttagagctttcacagacaacagagacgacatggcattgggg

SEQ ID NO: 187591 - DNA, 100 bp, Homo sapiens
acagctatgcatgctgcttttgatgtctgacaacgtggatcgttgttttgaaacgtggacacacgtttgcaaaatggatttgctcctgggatgaagctgg

SEQ ID NO: 187592 - DNA, 74 bp, Homo sapiens
tcagctttgaggaaaagccagtttatatccaagacttagatgaggcatgttatgttacccagagaactttccaa

SEQ ID NO: 187593 - DNA, 50 bp, Homo sapiens
ctcgccatgtcctgctgcccgaaaccaaggtgtatgttggtaacctggga

SEQ ID NO: 187594 - DNA, 100 bp, Homo sapiens
cccaggcatcagagatcatgagaggtcttcaaagcttcacctttctccaaaggcagatgtgaagaacttgatgtcttatgtggtaaccaagacaaaagcg

SEQ ID NO: 187595 - DNA, 83 bp, Homo sapiens
ctgtacaggtcgcgggagtcgtagggaggacgccgggacacctggaagccgagaaatggttattcagcttctcaaggctggaa

SEQ ID NO: 187596 - DNA, 90 bp, Homo sapiens
ggtggctgagcagaggacccggcgggcggcctcgcgggtcaggaacaagactgccaatggagactgccgcagagacccccgggagcggag

SEQ ID NO: 187597 - DNA, 100 bp, Homo sapiens
gcggggcccgcgccccccgagcaggtgctttacaaggccaagtacggtccaatgtggatgtcctacttagggcctcagatgcacgtgaacctggccagtg

SEQ ID NO: 187598 - DNA, 87 bp, Homo sapiens
aagtgcagctgcctcagttcttagcgcagtaatctcaggggcgatataatcaatgaggtggtcctaaagttgctcaaggctggatgg

SEQ ID NO: 187599 - DNA, 90 bp, Homo sapiens
cgctccgtggccttagctgtgctcgcgctactctctctttctggcctggaggctatccagcccctcccaggcccaatacttcaaagcatc

SEQ ID NO: 187600 - DNA, 75 bp, Homo sapiens
acaaaggtcgcctttgctactaccgcgactggctgctgcggcgcgagaatgtgtctgtgaaaactacaagctggc

SEQ ID NO: 187601 - DNA, 100 bp, Homo sapiens
ggcgtgccagtggctgaatttaacacggagaccaccccagctacgaacagattcaggtgttgacagctcttctaccacaagcagtgcttctccaatgccc

SEQ ID NO: 187602 - DNA, 90 bp, Homo sapiens
gaactcggcgccgccaaacagcccagctcgcgcttcagcgtcccggcgccgtcgcgccactcctccgatgaacagagtatctgccaagcc

SEQ ID NO: 187603 - DNA, 90 bp, Homo sapiens
gcctcagtgtggtttgggcccaaagaggtgtccacagcttgtgccaccgccgtgctgggcaatcaggtacaggatctcagacatatctcc

SEQ ID NO: 187604 - DNA, 75 bp, Homo sapiens
atgatgaaattgaggaattcatggtaacttctgaaaatttaagtgttactgcggaaatgcaaaacttagtccatc

SEQ ID NO: 187605 - DNA, 88 bp, Homo sapiens
tgctgctctgacgtgctgaagaaatttgtgtggagcgaggaaaggtgtgctgtgcctgaggccagcaaagtggaagatgctttctaca

SEQ ID NO: 187606 - DNA, 90 bp, Homo sapiens
tggagtccgcgctggaccagctcaagcagttcaccaccgtggtggccgacacgggcgacttccacgaaagtttcctacactactgaggtt

SEQ ID NO: 187607 - DNA, 97 bp, Homo sapiens
acagagccaaaccatatcatccagcgtccaggaagattcaggtcactcagacttgaaggatggtggagccgccaccaaaatgcagattttcgtgaaa

SEQ ID NO: 187608 - DNA, 51 bp, Homo sapiens
ctaccacagccctgcggacaacaagcggacttaattcagtgcacaaatgag

SEQ ID NO: 187609 - DNA, 90 bp, Homo sapiens
ggcttatgggatacagctggacaagaagattatgacagattacgccccctatcctatccgcaaacagctggctttgctacagctgaccac

SEQ ID NO: 187610 - DNA, 76 bp, Homo sapiens
ataatgcccagcggcccgccaggtcccgatgaaggtcaccgtgtccaaagggggcgaccgggacagtgacgacgac

SEQ ID NO: 187611 - DNA, 80 bp, Homo sapiens
ccaggggccgtggggcagccgcttccctgagctggaggggatgttcgagctgacctgcactctgcctctggagaaggacc

SEQ ID NO: 187612 - DNA, 82 bp, Homo sapiens
agaagtcgcgtgtctaggtgagtcgcggtgggtcctcgcttgcagttcagcgaccacgtggggtgccgaggctcaggcagca

SEQ ID NO: 187613 - DNA, 100 bp, Homo sapiens
ttccaatcgctcctgtttgtcttctgctttggcccagagcagatcctgaagatagttaaggaggctggatttgatctgacacaggtgaagaaaatgttcc

SEQ ID NO: 187614 - DNA, 90 bp, Homo sapiens
cgcggccagggccgaggcaggcctgacccggggccgggcagcccgcgcgactttcggatgtttggatctggccgagaacataactttaca

SEQ ID NO: 187615 - DNA, 101 bp, Homo sapiens
tgttgcatcgcttacaaaggatggcagtttcttctcctcggtatcagaagctctgtaaggtacctgtttcccaggcaactactgatcaggcatttctggac

SEQ ID NO: 187616 - DNA, 100 bp, Homo sapiens
agttaaaccttcacctttaaatggatgaccatgtcacaatcaggaagaaacatctccaaagacccatctttaggcttctctgcagaatgtcaaacaaaga

SEQ ID NO: 187617 - DNA, 75 bp, Homo sapiens
ttgtccgcggttcctcctcctgtcgctgcccgtgtgattactgagactcaggaacttaagagatttgagaacttc

SEQ ID NO: 187618 - DNA, 75 bp, Homo sapiens
agcgaagccgaaaaaggcagcagcgaagtgcttcttcgggcggaggaggaagtaggggtgcacctcagcactatc

SEQ ID NO: 187619 - DNA, 100 bp, Homo sapiens
cctgctgctcggggtccgcgcggcctccgcggagccagcctgacatttaccccggtaactgctgggcatttaaaggctcccaggggtacctggtggtgag

SEQ ID NO: 187620 - DNA, 75 bp, Homo sapiens
gtctggttgacagcgctggcactggggacctctcttacggttaccaggactccacaggcaaatactggacggtgg

SEQ ID NO: 187621 - DNA, 100 bp, Homo sapiens
gctgaggcggccaccgcgactccggctctgcgctcggctgcctgacttcttcctgctgctgcttttcaggggctcttgagatctgtcaacagagaaactt

SEQ ID NO: 187622 - DNA, 90 bp, Homo sapiens
catgaagcacaccgtggtagtatactggcgaaagttcaccaaaaaggccccaactagcagctcccagagaagtttcgtggagtttatctt

SEQ ID NO: 187623 - DNA, 100 bp, Homo sapiens
tttaacgaatggggttgtgatggcccaggttcttcaaaagatatacatttcatcaatgaagccttctggacctggagtttcctatatgagaaggattttg

SEQ ID NO: 187624 - DNA, 97 bp, Homo sapiens
tcagataccagtgctactgctatggccgtggcattggggagtggcattgccaacctttacagacctatccaagtgatggaggacgaggagaaggcag

SEQ ID NO: 187625 - DNA, 100 bp, Homo sapiens
aaatggcgactgtcattcacaaccccctgaaagcctggccatgggcaagatgatggagcaggggccggtgctgatcatcaccttccaggcacagctggtg

SEQ ID NO: 187626 - DNA, 125 bp, Homo sapiens
ttcagtagtcattatcctcatggaatcaacacagctatttaccaccctggtcacagatgtggacgagtgcctggaaccaaacgtctgcgcaaatggtgattgttccaaccttgaaggctcctaca

SEQ ID NO: 187627 - DNA, 99 bp, Homo sapiens
ggatcgtgaccgagaccgtgaccgagagcgtgaccgagagcgcgaatatcgtcatcgttagaagttatgtgaaatcctagctaaagaaaaggacactat

SEQ ID NO: 187628 - DNA, 101 bp, Homo sapiens
ctttggcatcactgcagctagtaatttgccttctggattacatccacgacagcgatggcagttccagcagcagccaccagagcctcaagagcacagccaaa

SEQ ID NO: 187629 - DNA, 75 bp, Homo sapiens
gctcaagttttcaaatgtatctgggtgagcctcacgtggatggggagcctggagatttacggttccgaatcaaag

SEQ ID NO: 187630 - DNA, 80 bp, Homo sapiens
cacagcaagcctttgtatttgggcagaacttgagggacagagttaagacaatgcagatcttcgtgaagactctgactggt

SEQ ID NO: 187631 - DNA, 83 bp, Homo sapiens
ggaactggagcaattgaagctgactactaaggagaataaggtgtgatccctcacatccacaaatctctgattggaaagaaggg

SEQ ID NO: 187632 - DNA, 89 bp, Homo sapiens
gtgtaccaggcgaagctggccgagcaggctgagcgatacgacgagctcccagctcctccagcagccgacaggaggcccgtcaagatgca

SEQ ID NO: 187633 - DNA, 75 bp, Homo sapiens
gaagcggaggcgctggggcaccatagtgacccctaccaggatctgaacgtctatgacactctttcgagctgacac

SEQ ID NO: 187634 - DNA, 83 bp, Homo sapiens
atggaccatcctgctggtcagcactgcggctgcttaaagcttttcaagccaggccaagaagctgtgaagtaccagggtcctcg

SEQ ID NO: 187635 - DNA, 82 bp, Homo sapiens
caaaatgccgccctacgacgagcagacgcaggccttcatcgatgctgccaatggctctaatgaagatagaggagaggttgca

SEQ ID NO: 187636 - DNA, 96 bp, Homo sapiens
aaaaacctggttcctgaagatgaggcaaatataggggcatcaggcccagaggcagagctacacaaccatggaatccaaattaattcctgttctgtg

SEQ ID NO: 187637 - DNA, 89 bp, Homo sapiens
ctgttcctaaaaaagtggaggcaccaccagctaaagggcatgaattgttgtccgaattacagcagcgtcgatttaatggctcagacgga

SEQ ID NO: 187638 - DNA, 89 bp, Homo sapiens
ctgaggcttggagtcccagtgatcctaccacccaggcagtaacacagtacccaacagtttgcagaaaaaacttcagcatgtgccaggaa

SEQ ID NO: 187639 - DNA, 85 bp, Homo sapiens
ctggttacagctgtttccacgtgcggtgctcgtcgggagtgatcacctaccctacagcagcgtcaccctttacaccagaaagctg

SEQ ID NO: 187640 - DNA, 101 bp, Homo sapiens
gcgagattggcgcgactggtgatttcgatattgctgcctctgagtttattgaggaaatgctgctgaaagccgaaattgcctgggaagaaaaaatgaaagag

SEQ ID NO: 187641 - DNA, 100 bp, Homo sapiens
cgttgaggacttccacatggagattggcacaggaccagactcaagacacacaactcataacagttgatgaaaaattggaaatgggtcctgatgaatatga

SEQ ID NO: 187642 - DNA, 87 bp, Homo sapiens
gctgagtcctgctttaaggaagcagcaccgggtgctcagcagttctgcttcttgctttccactcgagctgggggccttggaatcaat

SEQ ID NO: 187643 - DNA, 100 bp, Homo sapiens
ctgtcaatctgaattcaataactgatcctgtgttgagagagtttagaagaagaatgtgaatcctctctttgcacatctgcgttaagagccaggaatctag

SEQ ID NO: 187644 - DNA, 50 bp, Homo sapiens
attgaataccttcaacccaatccagcgcgttccttcacctcgggcagaat

SEQ ID NO: 187645 - DNA, 75 bp, Homo sapiens
aatggtggagaagaaaacttcggttccatgccattgcagtgtcaactaggcctcagttacttttcagtttgccca

SEQ ID NO: 187646 - DNA, 100 bp, Homo sapiens
ttcgtcatggggctgtttggaaagacccaggagaagccgcccaaagaactgttgctgatcatctgggctgtgatccacaaacccggttctttgtccctcc

SEQ ID NO: 187647 - DNA, 75 bp, Homo sapiens
cttccccagccacatggaactttccatgccattgcagtgtcaactaggcctcagttacttttcagtttgcccaaa

SEQ ID NO: 187648 - DNA, 100 bp, Homo sapiens
gcggctttttgagcggtcccgcatcaaggctctggcagttcttcgtgccatgaaggaggacagtgaaaaagttccgagcttgttaactgattatattctg

SEQ ID NO: 187649 - DNA, 80 bp, Homo sapiens
cccacgtctgtctggtgataccaggggcagagggaccactctgacagacaggggcaagtgtccgagtggtgaatcagcta

SEQ ID NO: 187650 - DNA, 51 bp, Homo sapiens
caactatctgggggggacattcccagccaaaatgaagtttaatccctttgt

SEQ ID NO: 187651 - DNA, 87 bp, Homo sapiens
attttaccccctcccccctgagcccgaggtgctgacgtcgcaaaaaaattggatagagatttactgaccttaagcactatagtgatg

SEQ ID NO: 187652 - DNA, 100 bp, Homo sapiens
gtgctgggtgcagatgcagtgtggctctggatagcaccttatggacaggcccgatgagagaaagggaaagttaaggatgctggagcagaacaatggattt

SEQ ID NO: 187653 - DNA, 148 bp, Homo sapiens
gaaaggtaggaagattccaaaactagaggagctactttcaaaaagagatttcactggagctattaccctgttggaggccataggaaaaggatacagagtagagtttcatgaacctgaaacttggtggaaatttgatcctgaagaatta

SEQ ID NO: 187654 - DNA, 97 bp, Homo sapiens
tcagagctcggagctggacccccccatcgagtcgctgatccctgaagaccaaatagcgaacacttgccaagtatttcaatccttgctatgccactgc

SEQ ID NO: 187655 - DNA, 100 bp, Homo sapiens
cgacagccaggcccgggagaagactttgtttggagaagctgcctatttcttcttctaccagtaatctccatgtggaccgggaacaggatgtcatcacctg

SEQ ID NO: 187656 - DNA, 75 bp, Homo sapiens
gcaggactgtgtcaaggagatcggcctcttgaagtgatcagcctttgagcctttcccacattgaagatggtgaaa

SEQ ID NO: 187657 - DNA, 83 bp, Homo sapiens
caagcgcttcgccatcgacataggtttggtgcacctcgatttggaggaagtagggcagggcccttatctggaaagaagtttgg

SEQ ID NO: 187658 - DNA, 50 bp, Homo sapiens
acggaggtcaacctcactctgatctggagtggagtcggttcttatacaac

SEQ ID NO: 187659 - DNA, 74 bp, Homo sapiens
agggtcgccgcaccccaggatggatcccccagaggtttcagactgaaattcaaacagtgaataaacagttccca

SEQ ID NO: 187660 - DNA, 83 bp, Homo sapiens
ttagagctgtttatgaagcactgagaaatggacatgagagatggctttagaagaaaaagtttctactcttcccattatgcgag

SEQ ID NO: 187661 - DNA, 100 bp, Homo sapiens
cctacttcgatctccctgctgggctgatggcccccctcgtgaaggccccttctggatctgtgccacgttggcctttgtcctggccgtcactggcaacctg

SEQ ID NO: 187662 - DNA, 100 bp, Homo sapiens
ccgagcaggctgagcgatacgacgaaccgcatgcacgagtctctcatgctcttcgactccatctgtaacaacaagttcttcatcgatacctccatcattc

SEQ ID NO: 187663 - DNA, 90 bp, Homo sapiens
gagcgccggttcttgccctgagtctgcttctggcagttgggtccctcatcgggtatagtcagtgttgcggagataggaacatgggagaga

SEQ ID NO: 187664 - DNA, 100 bp, Homo sapiens
catcaacaagatgttgtcctgtgctggggctgacaggtcagaatggcggcagtggagcatcgtcattcttcaggattgccctactggccctacctcacag

SEQ ID NO: 187665 - DNA, 98 bp, Homo sapiens
gcccaagtccctctactcgcgaggtggatgaaaatactaggaaaagtttatttaagttacgttctacatgggatgaaatattccctttgaagaaactt

SEQ ID NO: 187666 - DNA, 100 bp, Homo sapiens
atcaccatggaaaaagtgacttgagcagatgagttttgatcatcctgagaaaaatgggccttggcctgcagacccaataaaccttccctcccatggataa

SEQ ID NO: 187667 - DNA, 50 bp, Homo sapiens
tagcctgggagctgtgtgtctggacaggacagtcattttgtttactcatt

SEQ ID NO: 187668 - DNA, 78 bp, Homo sapiens
gcgggtctgctcgggggtctacttcgagggggactcattggcgccccctgaggtggactttgacaggctgctggccag

SEQ ID NO: 187669 - DNA, 82 bp, Homo sapiens
ccgggtgtgagctgcctgaaaatgcactcggatgccgccgctgtcaggcgtgatggtgggcatgggtcagaaggattcctat

SEQ ID NO: 187670 - DNA, 90 bp, Homo sapiens
gctgctgaccgaggcccccctgaaccccaaggccaacagagagaagatgactcaggtccgtgtttatgatccagcatccccccagcgccg

SEQ ID NO: 187671 - DNA, 100 bp, Homo sapiens
cacttgtgaacattcaagtgaagcaaaagcctttcatgattatccaaactgattatccaccagacactcagcgtcttagaagatattgtggagaatatct

SEQ ID NO: 187672 - DNA, 87 bp, Homo sapiens
gaatctgcccacccctcctgtaacccagcctgtttcacttcttgcaataagagctaactgccatcaagagccatcagtatgtcttca

SEQ ID NO: 187673 - DNA, 74 bp, Homo sapiens
caaataagccatctcttcagttaattttggatccgtctaacacagagtggggcagcaccaaaacaggagagcag

SEQ ID NO: 187674 - DNA, 76 bp, Homo sapiens
agagggactccctggggactgcgggctcagcgcacctcattatcaagggtaatgtgaggctacaggagatgatggc

SEQ ID NO: 187675 - DNA, 100 bp, Homo sapiens
ggcagcagatgaacctgcactggctgcacaagctggagtgggccatgaagctctggtggccacacagtgaagccatgattgccttcctcatgggttacag

SEQ ID NO: 187676 - DNA, 97 bp, Homo sapiens
agctaccggcccaaggccatctacctggacatcgatggacgcattcagaaggtgtcatggagaaactccagctgggcccagagattctgcagcggga

SEQ ID NO: 187677 - DNA, 82 bp, Homo sapiens
ctgaagcgactgagtccgcgatggagaaagacatcctcatgcaccgatggcggtacccgtctctgtccctccatggcatcga

SEQ ID NO: 187678 - DNA, 100 bp, Homo sapiens
gtaattttggccgtggtggaaactttggtggaagagcttttagagctctttgacagtgaagatcctcgggagagagattttcttaaaaccacccttcaca

SEQ ID NO: 187679 - DNA, 87 bp, Homo sapiens
cgctcctggagaccaacgaaatcccctcgcttatcctgtgggggccgccgggctgcggcaagtcaaataaagtgcccgtggtgcagc

SEQ ID NO: 187680 - DNA, 82 bp, Homo sapiens
ttcccaggtcctcaactttgaagagatcgactacaaggagatcgaggtggaagagataccatgtttgtgtggaagtgccccg

SEQ ID NO: 187681 - DNA, 83 bp, Homo sapiens
ccaacattcgggtcagcagtggcactcagaggaaaagcatgacagtgatatatcagcatatacttacgagcgcactttgatga

SEQ ID NO: 187682 - DNA, 75 bp, Homo sapiens
ccctcagaggccccggtgctggcagctgagcccgaggctgacaaggaaaccctgatagattggtgtgatgaaaag

SEQ ID NO: 187683 - DNA, 89 bp, Homo sapiens
aagcaagaagcccgaacccaccaggtgtcattccacacatccacaaatctctgattgggaagaaaggacaacagaagactgtctaaagg

SEQ ID NO: 187684 - DNA, 100 bp, Homo sapiens
ccctggatgccctgaagatcagcatccgccagctcaagtggaaggaggcaacaattggcattgactttttatcaaaaactatgtacttggaggatcgaac

SEQ ID NO: 187685 - DNA, 100 bp, Homo sapiens
tatctttcgttctcttttttgactgtaataatgagacaaaagcaagccgggaggctggctgcctctcctcctgctgtctctgctggtggccacatgggtg

SEQ ID NO: 187686 - DNA, 100 bp, Homo sapiens
ttaccgctgaggagctgcagtctctgtcaaggttcaaaccttgtactactcagctgatcacaagctgcttgatgggaacctactagatggacaggctgag

SEQ ID NO: 187687 - DNA, 90 bp, Homo sapiens
atattactgatgggagaatcacacctgagccagcagtcagtaatacagaaggatagagtggtgacttccaagcttcatgcagaaccggac

SEQ ID NO: 187688 - DNA, 100 bp, Homo sapiens
aagaaggctcgagaagagcatgagagagcccagaggagatttaccgcattgtttctcagaagcaaatgtcagacagacgcgaaaatgacatgtctccaag

SEQ ID NO: 187689 - DNA, 96 bp, Homo sapiens
gggttcagcctcatcgtcggccagcctgagggtcctaggggtgagcccctccagactccgaataggagatcaagagtttgattcattgcctgcttt

SEQ ID NO: 187690 - DNA, 89 bp, Homo sapiens
ggcaccggctgcattgttttcgggatcgaggggtgagggcgctatggcacccggctgcaaaagagatatgtcagtattgaattctccca

SEQ ID NO: 187691 - DNA, 100 bp, Homo sapiens
cccctgtggtgccaagagaatattggaattccaggatgaagatttgataaagtggaaggcactgtttgaggaagtccctgagttactcactgaggcagag

SEQ ID NO: 187692 - DNA, 100 bp, Homo sapiens
ggcgattcggtgaagcgattcctgcaggcgttggttcccctctttgacctgttgttgacctcctgtactggagagacattaagaagactggagtggtgtt

SEQ ID NO: 187693 - DNA, 75 bp, Homo sapiens
ggaaaggttcgccctggtgctggtgaatggctatgtggtgaaccttttctgggcatttgacacccacaagcaaga

SEQ ID NO: 187694 - DNA, 90 bp, Homo sapiens
atgaaggcaactaccgcgagctgcgctggttcaccccgtggtcgaggagtcgggagaaaactggttgtcctggatgtttgaaaagttggt

SEQ ID NO: 187695 - DNA, 95 bp, Homo sapiens
ataaaatttatcaagaaagagccagccaggcggagagggagatgcaaggtgagggtggcctgcagagcctgctgggaaacatgagccacagccag

SEQ ID NO: 187696 - DNA, 100 bp, Homo sapiens
ggaccacgctgctctatttttaccaacagggacagagcagaatgggctgatatagatccggtgccgcagaatgatggccccaatcccgtggtccagatca

SEQ ID NO: 187697 - DNA, 75 bp, Homo sapiens
gccacaggcgagctcacaggtcgtcatgcccccactcgtcaggggggctcaggatggcacatttcctagaggcag

SEQ ID NO: 187698 - DNA, 100 bp, Homo sapiens
ctggagatgagcacgccctttacctgcgtttcctggatgctcttaaagtgctgaagctgctgaaagatggcagaagaagtggtggtagtagccaaatttg

SEQ ID NO: 187699 - DNA, 101 bp, Homo sapiens
caaacaaccaaccctgatttcctgcttctccttttcatgagtgttcctgtggtctctgcacctcctttctggtgctgataagactgtgaaaggcccagatg

SEQ ID NO: 187700 - DNA, 98 bp, Homo sapiens
agaatccgtgtctgggagaaacctcgtggcctggtctccattatttgagatgagttacatcttggagcatcccagccatcactcttccacctgctcct

SEQ ID NO: 187701 - DNA, 75 bp, Homo sapiens
atcgtggacagcagagttgctccaacagcaaatattttttcccaggtccttcaagggttagattacttacacagt

SEQ ID NO: 187702 - DNA, 75 bp, Homo sapiens
cctggcagatccttcagcaaaagctgtccttacagtataggcagatctctccctcatataacggatgtttcttgg

SEQ ID NO: 187703 - DNA, 75 bp, Homo sapiens
gccgcccgcagagcaagcgcggggaaccaaggagacgctcctggcactgcagagacagggtcttgctctgttgcc

SEQ ID NO: 187704 - DNA, 83 bp, Homo sapiens
ccaaccctgccagcacctggaccttggacattcagacttcagaatggttctcccagcagagatgtgggtccttccctgggtct

SEQ ID NO: 187705 - DNA, 84 bp, Homo sapiens
tctggtgaagtggaaaggatggcccccaaaacccaacatgagtgaagtttcctgcaagaaacgggacgactatttggaatggcc

SEQ ID NO: 187706 - DNA, 82 bp, Homo sapiens
cgccagcggccgagcgggcggcttcctggcctgggcgctccggtggcggcggagctacccagccttcatgctgttttggaac

SEQ ID NO: 187707 - DNA, 83 bp, Homo sapiens
ggcaggggccctgcaccacagctctccaggacataagaccagttttaaaatcaaagatgggaaaatcggagaaaattgccctt

SEQ ID NO: 187708 - DNA, 75 bp, Homo sapiens
agctccctgcatctattggctcccactgactgacagccagatcctacaagcaatggggaagtcctatcatccagg

SEQ ID NO: 187709 - DNA, 100 bp, Homo sapiens
cttggatcaacacctttaacttcaagaagacaggcacgtctgagaatggtggatgtggtggagaaagaagatgtgaatgaagccatcaggctaatggaga

SEQ ID NO: 187710 - DNA, 75 bp, Homo sapiens
gaggacgcggcgggcgagcgagaggccgaggtatctccagatgaaatggccactgcttgatgtccaggcagggag

SEQ ID NO: 187711 - DNA, 75 bp, Homo sapiens
ggactacaatgcaggactgctctcctactacacgatatcttaatgcaattcagacaatgtgtccacacattcttc

SEQ ID NO: 187712 - DNA, 100 bp, Homo sapiens
ggcaagttatcctttggaaatgtgctcacactgcctccccatggccacccatggaccagtcggcattcacttcctcccttctgcggcccataaaagccct

SEQ ID NO: 187713 - DNA, 100 bp, Homo sapiens
ggcctccgaccacaaagacatccacagcagtgtttctcgggttggaaaagccattgataaggtcatagcaaatgacagaagtcccttggtgggcaaaatt

SEQ ID NO: 187714 - DNA, 101 bp, Homo sapiens
cgaacccaggagctccgcacggcccagctgtgagatacagtaagttcaagatgtcagaggccaggccgcccccgctgctcgggcagcacacaacgcacatc

SEQ ID NO: 187715 - DNA, 73 bp, Homo sapiens
tgcacaatacctcgtgatgccacttattacagttaccagaacaggagtttaatctgattgataggcgtgagct

SEQ ID NO: 187716 - DNA, 100 bp, Homo sapiens
agatggatggtgatgagatgacccgtattatctggcagttcatcaaggagaagtgccaggtggagctcaacaggaaagtcctagcggatctggccatcta

SEQ ID NO: 187717 - DNA, 50 bp, Homo sapiens
ccacaggatggagactacgagtttagtaaccaacgagtagacctttacaa

SEQ ID NO: 187718 - DNA, 50 bp, Homo sapiens
gctgtcggccaagctcatcgccaacggcctgtttaaagaagaaaacccgt

SEQ ID NO: 187719 - DNA, 90 bp, Homo sapiens
actttcaaaacttctttttcaagaaactaagaggaccagtatcagctgtgctaccgtgcggccctggagtacctcggcagctttgaccac

SEQ ID NO: 187720 - DNA, 51 bp, Homo sapiens
gacgtccgctttggagaactacatcaaccctcttcaagtctgcaataaaaa

SEQ ID NO: 187721 - DNA, 100 bp, Homo sapiens
cgggaagtttcgcgaatgtcagcattgacatgtgtgcgatcatagacagtgccggtggtggtgtgcacattgagccccggtatagacagttcccccagct

SEQ ID NO: 187722 - DNA, 100 bp, Homo sapiens
gggggtcgtgggccggagcgcctccttcgcaggcttcagcagtgcacagagccggaggatcgcgctgtcgagcattgcaaacgccatgtgtggaactagg

SEQ ID NO: 187723 - DNA, 90 bp, Homo sapiens
gaaaagctttggatgaaggagcttcaaacccaaagaggtaagcattcagtgaaaatgcctcgtgtaaaagcagctcaagctggaagacag

SEQ ID NO: 187724 - DNA, 88 bp, Homo sapiens
ccatggtccatccgagagaagctatgtttagcatcttctgtcatgagaagtggcgatcaaaattgtgatgtaaattggagtcaaccag

SEQ ID NO: 187725 - DNA, 50 bp, Homo sapiens
ccctggggatggcgcatcacacaccaaagatatcagttttagagaatgtg

SEQ ID NO: 187726 - DNA, 83 bp, Homo sapiens
gcggggcgcgggcggcggacagattgaccttcagagcgagccacccggcccaagttgaagaagatgaagagccagacgggaca

SEQ ID NO: 187727 - DNA, 78 bp, Homo sapiens
attttctttaaggatggtttagaaatggaaaaatgtgtgtacctgaaggaaatcttaaaagaaattggtgttcagaat

SEQ ID NO: 187728 - DNA, 100 bp, Homo sapiens
cagaagtaccttgcagagagaaatgaaataacctttgacaagattttcaatcagaaaattgattttcagttcacccactagaggcaaagacgtaagagag

SEQ ID NO: 187729 - DNA, 80 bp, Homo sapiens
gaagagtctacctgtttactatcaaagagcaccacagagaccttcagattggtccaaaaagaagaatgagcccctaggga

SEQ ID NO: 187730 - DNA, 91 bp, Homo sapiens
tcggatcatgtctggtggctccgcggattataacaggtgctggagaatctggtaaaagcaccattgtgaagcagatgaggatcctgcatgt

SEQ ID NO: 187731 - DNA, 75 bp, Homo sapiens
ctgtggccattctgctctatcttggattactccggtcggggacaggtacatctccgttcatggatgcattaacag

SEQ ID NO: 187732 - DNA, 80 bp, Homo sapiens
tacgcagaaggacctggccacgattattttcgaaataccagtatttcgactccagggggatgttcatttctatagtattt

SEQ ID NO: 187733 - DNA, 75 bp, Homo sapiens
gcggcacgcacgcggtgcagggtaacatggcggatgcggaagagacctcataagtccatccaccggcgccgcaca

SEQ ID NO: 187734 - DNA, 100 bp, Homo sapiens
tcaaaatggaaactatcagcctgagctctcctcaacatcacccaaaggaggtgtaccttcagttgaatttttagaatctcccattacggcagtagacagc

SEQ ID NO: 187735 - DNA, 82 bp, Homo sapiens
ctcggatcctagccctcgtgcctccatggactcgagtgtaccgagtacagaggatcgaagtagaatgtatgacagtttgaat

SEQ ID NO: 187736 - DNA, 80 bp, Homo sapiens
tgggagcaaaaccaacgcctggctcggagcagcagcctctgaggtccggcctctttggcctacccccgttggctccgctg

SEQ ID NO: 187737 - DNA, 99 bp, Homo sapiens
tcatgaagccgctggtcgtgttcgtcctcggcggccccggcgccggcaaggggacccagtgcgcccgcatcgtcgagttaagtgggcagaccaacatcc

SEQ ID NO: 187738 - DNA, 50 bp, Homo sapiens
ggtggaggtgttaaatgaaagatgatcaggatggtgctttcacaaaatgg

SEQ ID NO: 187739 - DNA, 75 bp, Homo sapiens
ccgcggcttaaatgatgtattttgtgatcgcagcgatgaaagatagcagactccttgaaagcagggtccttgttt

SEQ ID NO: 187740 - DNA, 96 bp, Homo sapiens
tggcgggaagtgtgaagcggccaatggcacggaggcctgcgtgtgcccgtggttgacacgagctgtgtccccagctgttcccgtctacaatggcat

SEQ ID NO: 187741 - DNA, 82 bp, Homo sapiens
aagcagttctacaaggcgagccagtgtaaacaggaacatcgataagtagtgtaaaaacttgcacaatgaaatccgaagccaa

SEQ ID NO: 187742 - DNA, 83 bp, Homo sapiens
cgcccagatgatgcggtggtgggggacctgccggcacgcgactccccccgggcccaaaaggctgtggccaggccagctgggct

SEQ ID NO: 187743 - DNA, 100 bp, Homo sapiens
cgcgaggccgcagagctaaatgggggcctctccagggagtgctctgttcacggctccatcgctgttagtgatctgtgaaaatggttcgctattcacttga

SEQ ID NO: 187744 - DNA, 101 bp, Homo sapiens
cggagtacctgcgctatgaagacacgcttcttctggaagaccagccaacagaaggcaaggttctggatgatatggaaggcaatcagtgggtactgggcaag

SEQ ID NO: 187745 - DNA, 100 bp, Homo sapiens
gtctatcgccggctgccgcatcatcgggcgcatgtgtgtggttcttcgcacactcatgggacacaaagccaacatctgcagcctggatttccacccgtac

SEQ ID NO: 187746 - DNA, 75 bp, Homo sapiens
aacagaaaactcaaaaaccatctggtgctgtggattgcaaccttgaatgagtccttcaataatgttaaacagtgg

SEQ ID NO: 187747 - DNA, 82 bp, Homo sapiens
cgtgggcggtgggccccagccccacagaccagcccagcattcagatcaggatcctcatgaccagccaaagagaagaagaatt

SEQ ID NO: 187748 - DNA, 99 bp, Homo sapiens
cctacatcccacagagatacccagacaacaggatcgtctcgtccaagagtcattcaggagagcaggaaagaaaaggccatccctgtggatgtcgcgctg

SEQ ID NO: 187749 - DNA, 74 bp, Homo sapiens
gcggccgagactctggcctgcagtcgccgccgccgccgccagaaccctgccatcagcatcactgaaaacgtgct

SEQ ID NO: 187750 - DNA, 101 bp, Homo sapiens
gtcaccatgggggctgtgctgggtgtcttctccctcgccagctgggtactccaaagattcaggtttactcacgtcatccagcagagaatggaaagtcaaat

SEQ ID NO: 187751 - DNA, 100 bp, Homo sapiens
gaaccccctgttcgggccccagctgaagaatgagaccatctggtcaaaatgcagatcttcgtgaaaacccttaccggcaagaccatcacccttgaggtgg

SEQ ID NO: 187752 - DNA, 82 bp, Homo sapiens
gggaggttacgcagcaaaccatccagaagccacgaaggaagacaggaggtccgaggagaaagcggcagccatggcagcctca

SEQ ID NO: 187753 - DNA, 75 bp, Homo sapiens
ccagctggaaggcagattcaagcagctgcaaggtcaactttgtagtgtgccaactctttgccttgctagcagcca

SEQ ID NO: 187754 - DNA, 98 bp, Homo sapiens
agggaaggaagcaaagcaaatggagaatggcatgctggtgacggacagtgcagggaagcaactgcagaggacagagcgggatgccaccagcttgtcca

SEQ ID NO: 187755 - DNA, 100 bp, Homo sapiens
aagcaccatgacgtccatccatttcgtggttcacccgctgccgggcaccgaggaccagctcaatgacaggtgtcacgtcttgaaattttaaatgtcctca

SEQ ID NO: 187756 - DNA, 99 bp, Homo sapiens
gaaatgaagagctgcttttaagatttcttataggaaagacgtgcaggacacccacacgtacagtgcagaacttgaccgaccagacatcaagatggcaac

SEQ ID NO: 187757 - DNA, 90 bp, Homo sapiens
agctgagagaccctgtgacctcgggactcaacacctcggtggtggattcaccaatgaacttgaagcatcctcatgacctagtcatattaa

SEQ ID NO: 187758 - DNA, 83 bp, Homo sapiens
gcgcatctgcgcacgcacacagacaatgcagatcttcgtgaagactctgactggtaagaccatcaccctcgaggttgagccca

SEQ ID NO: 187759 - DNA, 51 bp, Homo sapiens
tttgaatgttgttggaatggatctgacagtcagaagaagaagttgtagaag

SEQ ID NO: 187760 - DNA, 98 bp, Homo sapiens
cctccagctccaggccggtccgctgccaggtcaacggcagagacttatccagagcaactcatgaccaggctgtggaagctttcaagacagccaaggag

SEQ ID NO: 187761 - DNA, 106 bp, Homo sapiens
cgatgtccccagcacataataacttggatatccttggaacagaagatcttattgtggaagtgacttccaatgatgctgtgagattttatccctggaccattgataa

SEQ ID NO: 187762 - DNA, 74 bp, Homo sapiens
agttgatcttccagcctcaccggattcccccactctttcctcagaagcgaatcttttgggtgagttgtgaggct

SEQ ID NO: 187763 - DNA, 90 bp, Homo sapiens
gataacactgtacaagctttcaaagtcaatggctattgagtggccagacttccccaacaaatgccaaattggagaaactggactctcagc

SEQ ID NO: 187764 - DNA, 75 bp, Homo sapiens
ctcttctttacttaacactagaaatattgggtaaatacggcatcatctgcatggaggatttgattcatgagatct

SEQ ID NO: 187765 - DNA, 90 bp, Homo sapiens
aagcaatcctaccatgtcagccttcccagtagctggaactacagttcagccaggccctggccatccggagctataccaagttcgtgatgg

SEQ ID NO: 187766 - DNA, 82 bp, Homo sapiens
gaagcgcgagcgcgacgagtataagcggaggttatgagtgccagtgagccgccttagatagaagcatcgtcagcactttatt

SEQ ID NO: 187767 - DNA, 96 bp, Homo sapiens
ctaatcaagcgagacccgccggcctacatcgaggagatggcccactgcgtgaccttggttcagctgtccatttcctgtgaccatctcattgacaag

SEQ ID NO: 187768 - DNA, 75 bp, Homo sapiens
gaaactcatttttccctacgtggaattggatctacatagtgataaaaagttgattgcagaaggacctggggaaac

SEQ ID NO: 187769 - DNA, 100 bp, Homo sapiens
gatccacgttcagaagctgactctgcaggcaagaccgacgttattttcctggtggctgtgttcaaaaccacccaaagtgaatgagagccacaagtctgaa

SEQ ID NO: 187770 - DNA, 100 bp, Homo sapiens
ccgctccttgcccgagaacatccagtttgatgtttactacaagttgacatgaagacaatggagactgcagagaaactggctagatttgttgctcaggtgg

SEQ ID NO: 187771 - DNA, 83 bp, Homo sapiens
cgacgaccctagtgctcgtcgccgtggcgccatgggtgttgtccgcagccgcaggttccctctcccagcctgtgctgactcag

SEQ ID NO: 187772 - DNA, 82 bp, Homo sapiens
cggagagtacatccccaccgtgcttaatgccagaccgggagttggaggtgtccgatctcgagttgggatccagcaaggcctt

SEQ ID NO: 187773 - DNA, 90 bp, Homo sapiens
cgcgggcggcgcggcccagctcgttccaggcgaagctggagaagtcactggagcatctccggaagcagatgcaggatgcgttgctgttcc

SEQ ID NO: 187774 - DNA, 75 bp, Homo sapiens
caggatgaaaaccaagaaggagattttgaagatgcagatacccaggactcagaattcatgattgaagaaatgcag

SEQ ID NO: 187775 - DNA, 98 bp, Homo sapiens
tcgtgaccgagaccgtgaccgagagcgtgaccgagagcgcgaatatcgtcatcgttagaagaaggccaatgatgaggccaatcagagtgatacaagtg

SEQ ID NO: 187776 - DNA, 101 bp, Homo sapiens
accagttcctcggggtgcagcaggactcacaccacccggcaagaactgctcactacggctccctgccccagaagtcacacggccggacccaagatgaaaac

SEQ ID NO: 187777 - DNA, 73 bp, Homo sapiens
tcatgctggccaagaagatcatcattaaggacggaggcacggaaacttttgagaagaactttgaaagagaaac

SEQ ID NO: 187778 - DNA, 82 bp, Homo sapiens
ctatcacttccaaagttcaggagcttcagaacttctcacggatgattgatatccagaccaggatggctgggcgagcattgga

SEQ ID NO: 187779 - DNA, 50 bp, Homo sapiens
ctcaaaacaggctggagaaatccgagagtctcactgtcgcccaggctgca

SEQ ID NO: 187780 - DNA, 99 bp, Homo sapiens
ggcgtcgtcaccatggcagcatccgctggaggcccagctaatgttctctatgggccactccacaccaagcaggcagtgagcatgtttcttggagcagtg

SEQ ID NO: 187781 - DNA, 137 bp, Homo sapiens
gaaactctggataagtgtttcgaaaatgtgtgtgaattggatttgatcttccatatggataagcaggcaccccccgagcccagctccacacaccgttcctggatctcctctccccaggcggagcgtgcccctgccca

SEQ ID NO: 187782 - DNA, 100 bp, Homo sapiens
cagaagtggaaataattaatgaccgaacagaaacccctcctcccctagcttcactcaatgttagtaaggttatcaatactctggctgaccatcatcatcg

SEQ ID NO: 187783 - DNA, 75 bp, Homo sapiens
ggcgtgagagcagctgacctcatcaaagattttaccaagtatatgactctcaacccttctactaagaggaagaat

SEQ ID NO: 187784 - DNA, 83 bp, Homo sapiens
gtttgaggtctccagtgttgccgactgcttggactctgcagatcttgatgtggaagaaatggaggactcagaaccaaggattt

SEQ ID NO: 187785 - DNA, 100 bp, Homo sapiens
gaaaagagccctggaatatgaagagacatgcgatggtagatcaacccccaggtcacggtctagatcacattctcgatccagaggaaggcgatactctcgc

SEQ ID NO: 187786 - DNA, 100 bp, Homo sapiens
cttcagcatcgtcacggacactcctgagctacagagactgaagaggactcaggagcaaatcagtaatgtgttggagcgggccggagagaagtagagtggg

SEQ ID NO: 187787 - DNA, 90 bp, Homo sapiens
gccagctgcagcccccgatgcccaaaccactttctcctttacatagcctgacaccctatcaggtatgtcaccacgccgactgccagcagc

SEQ ID NO: 187788 - DNA, 90 bp, Homo sapiens
tgggctcctactcagtgtgcaagcgatgtgtgcataaagccacagacaccgagtatgccgtgaaggtggagatgaagaagagaatgatga

SEQ ID NO: 187789 - DNA, 105 bp, Homo sapiens
caaccacaaggcagacatcagctcctggttcaacgaggccattgacttcatagatctgccttctggagactgcgccgtcctcccgggagagccagaaagaggaca

SEQ ID NO: 187790 - DNA, 75 bp, Homo sapiens
cccagaggtcgtggaggtggccgtggaggcagaggtggcatgggagatcgagatggtgatcatggagcgtagcaa

SEQ ID NO: 187791 - DNA, 80 bp, Homo sapiens
gaggtggagcaggccctgactccagaacactctgctccagccaaggtggtgagggcagctgttcctaaacagcgcaaagg

SEQ ID NO: 187792 - DNA, 101 bp, Homo sapiens
tttgatgattgtgtagataaatcgtccccagcactgcgacagttgtgatcgtggtgtgcgtcagcttcctggtgttcatgattatcctgggggtatttcgg

SEQ ID NO: 187793 - DNA, 122 bp, Homo sapiens
tggcacttcattggccacctacagaaacaaaatgtcaacaaattgatgggagctcagtctgaatattcttggagaaagatgctgagtggcattgcagccttcctacttgggctaatcttcct

SEQ ID NO: 187794 - DNA, 90 bp, Homo sapiens
ggaaggtgcgtgtggggctgggtctcggagtgggagacgtggagtgcaggttcctggtagagttacacagttgtgccgccagtatagcga

SEQ ID NO: 187795 - DNA, 98 bp, Homo sapiens
tgaggatgaagattcaccaaataagctatatactttggttacctatgtacctgttaccactttcaaaaatggtaaacctatgctacgccagggagata

SEQ ID NO: 187796 - DNA, 75 bp, Homo sapiens
tgatgcagcaggcatcatccgctatgcaattgggatacaaactggactctcaggacaaaacgacaccagccaaac

SEQ ID NO: 187797 - DNA, 100 bp, Homo sapiens
ctctttttaagaggcttcgcgcagttccaaccaacaagagaagggataaaccgccaggttgaacctctggaccctccggcaggctctgctcctggtgagc

SEQ ID NO: 187798 - DNA, 48 bp, Homo sapiens
aacccccaaattggctgggacaggtggtcgtgtgatggtaacagatgc

SEQ ID NO: 187799 - DNA, 96 bp, Homo sapiens
gaaaaagctcaaaatgaggaaattctgtatgttcttcgccattatattcaggactgggctaatgctaatgtcagcagacagattgaggacactgta

SEQ ID NO: 187800 - DNA, 100 bp, Homo sapiens
ctgccggccggcccggaccctggacaccatccagctggctttcaaggtgaatgaaaactttgccattgatttgatagcagagcagcccgtgagcgaggtg

SEQ ID NO: 187801 - DNA, 75 bp, Homo sapiens
gtggaaaggaaccgttctggatcagatggtcatccagactcagagctctctctacagagaggaaattctccactg

SEQ ID NO: 187802 - DNA, 75 bp, Homo sapiens
tgataaactgcgaggacagagccactggtgctctacggaaacgtattcgagaggacagaaaggccaccacagctc

SEQ ID NO: 187803 - DNA, 100 bp, Homo sapiens
ggaggaggcggtggccgtggtgcgggctctgcagcgagcgctcgatggaacctcatcccagggttgaaaggaggagcaggaggtactgatggacaaggag

SEQ ID NO: 187804 - DNA, 82 bp, Homo sapiens
gcttcagtcactggacacaagctttctggcctcagcctcaccatgtgtgtcaggagctgtttccagtccccccgtctccagt

SEQ ID NO: 187805 - DNA, 75 bp, Homo sapiens
gttccagagctacaaaagtttttccagggccatcgatgcacccctcggagctaatagcggagatgagaaacagtg

SEQ ID NO: 187806 - DNA, 100 bp, Homo sapiens
gcagcacgccgtcattgacatcaatgccttcccaggtactccaaagattcaggtttactcacgtcatccagcagagaatggaaagtcaaatttcctgaat

SEQ ID NO: 187807 - DNA, 100 bp, Homo sapiens
ctggggtgtggaaaaacccggtactgtgcactattctttcccaggaaccattggataaggataaaggattgctttgtagcggaaatggaggataaagttt

SEQ ID NO: 187808 - DNA, 82 bp, Homo sapiens
tctgagggagggtccgagccagccgctgttttgccggaggagcccctcaggccggcgccctgcgtccggcagaggaggcgag

SEQ ID NO: 187809 - DNA, 100 bp, Homo sapiens
aggcctcgggggcgtacaggcgcagcggccgcagcagcagcggcagtcacaggcacatcagcaaagaggtcgtttatacgcaatgcagactggaatgaag

SEQ ID NO: 187810 - DNA, 100 bp, Homo sapiens
caacaccaccttcatctccaccatcggtctgcctcgtggtaagaacagcgagagtgactaagctccagtgataagggcaatgctgtttcttgagcctgct

SEQ ID NO: 187811 - DNA, 121 bp, Homo sapiens
ctcccttgaaaccggcactgggacttctcgatctctggaggcacctgttgcaagtgacagtggactcccgaaaaattgaccaggaagggaaaatcccagatgaaactttggagaaattgaa

SEQ ID NO: 187812 - DNA, 83 bp, Homo sapiens
ctcaccacgcggcgggccaccggccggcacgaaggcgtccccacgctggaagggtgccaagtcctgccctgccaacttcttgg

SEQ ID NO: 187813 - DNA, 87 bp, Homo sapiens
atattcagtggtgtttttctcaggtgaaaggagcagtagatgatgatgtagcagaagatgatggacctagccaaagtgagtctgcta

SEQ ID NO: 187814 - DNA, 74 bp, Homo sapiens
cgaagaagctgcagccgcacctggccaagggcatccgtgtcattctggaccttactcccaactaccggggtgag

SEQ ID NO: 187815 - DNA, 82 bp, Homo sapiens
agcgcaggagccgcgcccggacccaggatgccgacaaaaggatcaaggtggcgaagcccgtggtggagatggatggtgatga

SEQ ID NO: 187816 - DNA, 75 bp, Homo sapiens
ccagagacctacgtggcagctgtgaaaaaagccatttccgaaggacaggcgacactaacaggtgaagatctcggg

SEQ ID NO: 187817 - DNA, 96 bp, Homo sapiens
ttccggctgcagcccgaccagtccaagagccggcagcatgacgaattgcagccttcttcgctgagtctctgcccagtgtgggagggcagatcattc

SEQ ID NO: 187818 - DNA, 100 bp, Homo sapiens
ggtgattgcattgctgggcgtctggacatctgtagctgtcgtttggtttgatcttgttgactatgaggaagttctaggaagtggttacctggaaggaaag

SEQ ID NO: 187819 - DNA, 119 bp, Homo sapiens
tcttccgcagtgattgaagctttgataaatgaaatcttcctaagtataggatctatttggaaagtcagacccatacctggaattccacaagcagacatctgatggaaactggctaatgg

SEQ ID NO: 187820 - DNA, 100 bp, Homo sapiens
attcagaaaagagcaacttggagctgtaaagatcttggcatatacagaagggctgcatggaaaatggctgttcacagagatacgatcaatcttttctcgt

SEQ ID NO: 187821 - DNA, 124 bp, Homo sapiens
agatcatccatgtgagtgaccatgcagcaaaagaaggagggtcctctcagtgattaagcagtctctggtcccagcccaccccatggcccctcccagtcccagcaccaccagcagtaataacaac

SEQ ID NO: 187822 - DNA, 98 bp, Homo sapiens
ccgcgtagacctccgctcccccagttccaagattatcccctaaaactcatagacccaggtctcccagacagaacagtattggaaatacccccagtggg

SEQ ID NO: 187823 - DNA, 75 bp, Homo sapiens
gagtgctttgtgatcgaaaccctgaccggatcccataaacactgtcggaataaataccttacgtacactttagat

SEQ ID NO: 187824 - DNA, 74 bp, Homo sapiens
ggccgagcaggctgagcgatacgacgctgtttttggaaggaagaaagatggaaagcggtgcagttctgctggaa

SEQ ID NO: 187825 - DNA, 100 bp, Homo sapiens
ggagtttccacagtgattgatgctgcctcagaaagtccagtatcccccctggagtcacattcgaaagctgcttcaaactcaaaggaaacaaccccattgg

SEQ ID NO: 187826 - DNA, 142 bp, Homo sapiens
acactacataagcgaggctgtggaagatgctcccagctacagagggtaccgggatgcctgcaccattactgggttctcatgtatcagccatcttctgtaagggtgcccagtgtgacttcggttgatcctgctgctattccgc

SEQ ID NO: 187827 - DNA, 136 bp, Homo sapiens
aatgagaaccctacttgcctaaatgaggaatgtctttcctaccatctaaaatacgaaggtttctggctgggactccctggaggaaaagcggaagcggcagcggtctgaacgcctggaacggattttccaacttagt

SEQ ID NO: 187828 - DNA, 96 bp, Homo sapiens
acagcgagcctgggctggaggagcgggcggaggggacggtcaacgagggacgcccagaatcggacgcggcagatggagcagatggtgctttttacc

SEQ ID NO: 187829 - DNA, 75 bp, Homo sapiens
gccacatcgggggcaccaccctccatgcctttgcagatttccacaagacggcaccctatgtcgtcactggcagcg

SEQ ID NO: 187830 - DNA, 75 bp, Homo sapiens
accacgtcagaaatggaagcaggaagtcctggagtggattagaacaagatgacatgagaattttatacaaatacc

SEQ ID NO: 187831 - DNA, 75 bp, Homo sapiens
ggccatcattgacgggacgggctctgtaggtgatgatccaatgccctttgacattaaagctgagatgacactgaa

SEQ ID NO: 187832 - DNA, 82 bp, Homo sapiens
gggcacgctgactggaggctggcggacaggcgacagcgacctgcggcagccctgggcgctgcctatggcacagccaagagcg

SEQ ID NO: 187833 - DNA, 83 bp, Homo sapiens
tacaacaattccgtttagcagctgttgggccaactacacagaccttactccccttagaacagatttgagttctgtgaacctgc

SEQ ID NO: 187834 - DNA, 100 bp, Homo sapiens
gacttcacagtttctgctctggacatggatttgattgacatactttggaggcaagatatagatcttggagtaagtcgagaagtatttgacttcagtcagc

SEQ ID NO: 187835 - DNA, 95 bp, Homo sapiens
cctgcctcagatgatgcctatccagaaatagaaaaattctttcccttcaatcctctagaattagtaagctgtgtgggctggactactgctgaaga

SEQ ID NO: 187836 - DNA, 83 bp, Homo sapiens
ggcagccgaggccgcgaactgcatcatggaggagcatcagatccatgctgctgctgactcggagccccacagcttggcacagg

SEQ ID NO: 187837 - DNA, 50 bp, Homo sapiens
ttcgctctttgcatcttaactgcagatcaatggtggagagaagcggcctg

SEQ ID NO: 187838 - DNA, 78 bp, Homo sapiens
caacccgcagagacttctactggctgcgctcctttctggccggagaatgcgctgcagttcattaaacaatattggaaa

SEQ ID NO: 187839 - DNA, 50 bp, Homo sapiens
taactccttgctgccaacagagccttctgactggagtccagagttgccac

SEQ ID NO: 187840 - DNA, 74 bp, Homo sapiens
ccaatcccgagtgctctacttgagagagaagaagaaggaggttcctgctgtgccagaaacccttaagaaaaagc

SEQ ID NO: 187841 - DNA, 90 bp, Homo sapiens
gttggaggttatgaaagaccctttgcacaaatcaagctcgatcaagtcatccgccaaagaagcctgtccagtttggaactgttcctctcc

SEQ ID NO: 187842 - DNA, 100 bp, Homo sapiens
tgcgatgcgcgggaagacgttccgctttgaaatgcagcgggatttggtccttatgtcgtcagaagatcgagaagctcaggaggatgaattgctggccctg

SEQ ID NO: 187843 - DNA, 100 bp, Homo sapiens
gtgggaagacattcagcgagaggaacaccatggagacccacaagctcatccacacaggccctgggtgccaggccctgtggatgcacaaggtcccagcatc

SEQ ID NO: 187844 - DNA, 100 bp, Homo sapiens
atctgcaaaaatatcccccggcttgtgagtggatgggtaaaacctatcatcataggtcgtcatgcttatggggatcaagaggtcacaagccccaaagtgg

SEQ ID NO: 187845 - DNA, 82 bp, Homo sapiens
tcccactccctgaaatctggagtgaagaacgccgccatccagccaccattccaagggttatgtattaagctctattgaaggc

SEQ ID NO: 187846 - DNA, 51 bp, Homo sapiens
cgaggcgccgcgcacagtcaagaagaagaagctcattcacacagaagaccc

SEQ ID NO: 187847 - DNA, 88 bp, Homo sapiens
tcttgaaggtttacacttgtcaacttcctcttcagtcatcagtgatgataatgaagataattcaaatgatgggacccagccatccaaa

SEQ ID NO: 187848 - DNA, 51 bp, Homo sapiens
ggtgcaaagggatgtgcccaagtcagactccaagaatgaaaaggctctggg

SEQ ID NO: 187849 - DNA, 87 bp, Homo sapiens
cttctacattgaccacaacaccaggaggaccagctggatcgacccccgggacagtttgtgaagtgtggatatgcaggctctaacttt

SEQ ID NO: 187850 - DNA, 99 bp, Homo sapiens
atccctggactctgcagagtgaagagaaaatagcaaacgatccagacggcagggagtgcatcaaaggtgtgaacacagcaccttgcagagtgaagtcaa

SEQ ID NO: 187851 - DNA, 82 bp, Homo sapiens
tttatttataatgacccaaccttggaagtttgtcacagtgaatcaaaacagctcaggctgcacgaagaaaaggttattaaag

SEQ ID NO: 187852 - DNA, 74 bp, Homo sapiens
gcggaacgcaggagacacaagaagcggatccagggcctggagattgtgaacccacaggcggcagagaagaaggt

SEQ ID NO: 187853 - DNA, 82 bp, Homo sapiens
agacccagctcttccaggactttgagccagtccagaccctgctgctgtcttcaaagaaggttgtgaccgagattcccgacga

SEQ ID NO: 187854 - DNA, 100 bp, Homo sapiens
cccgggattatatcatggaaccctccatcttcaacactctgaagagcagctgctcagccaggaactgagatctttaatctgccagcagttactacgtcag

SEQ ID NO: 187855 - DNA, 98 bp, Homo sapiens
tttgttaaggattccaagtaactcttatttggtgactctcctattccatctgtttcttcgggatcatcttcacctctttcagccacttctgccccacc

SEQ ID NO: 187856 - DNA, 75 bp, Homo sapiens
gaagagacacagtatggtagccacacccccaggccctgaagaggaaagtgaggatgactctcatctcgaaggcag

SEQ ID NO: 187857 - DNA, 100 bp, Homo sapiens
ctgcagcctgacttgggctgccctgatcatcctgctgctccccggaagaatgggtaccacagaccatgtcatcgtcctggcgtccacgaaccgagctgac

SEQ ID NO: 187858 - DNA, 93 bp, Homo sapiens
cacacacgtggtctgtagcgacagcggcttggaagtgctctaccagagttgcggaactgtggctgcaccatctgtcttcatcttcccgccatc

SEQ ID NO: 187859 - DNA, 75 bp, Homo sapiens
aggagctgtggttgtaacactctacaagatgggttttccggaagccgccagtttgtgaagaaatatgggaacctt

SEQ ID NO: 187860 - DNA, 100 bp, Homo sapiens
cgcagccttgcagaggcagttccacagccccttcatcttccgtgaggaggatcccagccgccagatcatgtttgagaccttcaacaccccagccatgtac

SEQ ID NO: 187861 - DNA, 87 bp, Homo sapiens
ttttgtttccacacatgacaggacttcagctgagattgctgcaattaagtccaaggcttgcgagaaggtcatttccgtgggtcaaac

SEQ ID NO: 187862 - DNA, 132 bp, Homo sapiens
ctgataggacgttttgttccctttgctgccgtagctgctgctaattgcattaatattccattaatgaggcaaagagacggggttttgccacattggccaagctgatctcgaactcctggcttcaagtgatcc

SEQ ID NO: 187863 - DNA, 87 bp, Homo sapiens
ttttttcgaaagctgggtttcccgggagatcccaggcggtgacagagtggagccatggctagagatgaggaaactgaggctcagaga

SEQ ID NO: 187864 - DNA, 100 bp, Homo sapiens
cgatgccagagccaggtgaactggaggagcgatttgccatcgtgctgattgtagaaggcatgaaacaaaaaatgtggagtattgaaaatattgccttcgg

SEQ ID NO: 187865 - DNA, 74 bp, Homo sapiens
aagttttccgtgaacatgccaacaaattgattgagattccaaacagaggcattgatttactgaaaaaagataaa

SEQ ID NO: 187866 - DNA, 75 bp, Homo sapiens
ggcgccgcccggaactgcagcggaccactctgcttcatttttgggagaaaacttctcacactatggcagccatcc

SEQ ID NO: 187867 - DNA, 75 bp, Homo sapiens
gtctggagtgcgtgggggaccggctgttggcggagacaagaggagcagcagcggcaccgcccctcaccctggagg

SEQ ID NO: 187868 - DNA, 100 bp, Homo sapiens
ggaacacatcgatctgggtatcaaatatgacccaagcattggtatctacggcctggacttctatgtggattatacttactcagctgttaagagtaggcaa

SEQ ID NO: 187869 - DNA, 50 bp, Homo sapiens
ctgaaagtacgtctaatagacagttccatgccattgcagtgtcaactagg

SEQ ID NO: 187870 - DNA, 100 bp, Homo sapiens
cgctgacccaggggctggagcgaatcccagaccagctcggctacctggtactgagtgaaggtgcagtgctggcggtgagcatagctaccccaaaacagaa

SEQ ID NO: 187871 - DNA, 90 bp, Homo sapiens
cgttcctgctgctctgcctgctccacaagcggcgccgcgccctcggcctgcacggactaaatgtgttaaatgggcttgccaacaatatgg

SEQ ID NO: 187872 - DNA, 100 bp, Homo sapiens
tctatggtatggactacgcgacctccaaggatgcccgtgagcctgttgtcggggccaggtctcggtccatcagcggtgcctcctcaggcctttccaccag

SEQ ID NO: 187873 - DNA, 50 bp, Homo sapiens
accacctccagcccctgcgcctcgatgcctggaatgatgtcgtcagtaat

SEQ ID NO: 187874 - DNA, 100 bp, Homo sapiens
gcgggaccccgagcaccgggccctctgcgacctggggccctgggtgaagtgctccgccgcccttgcctccaggtctgccatcatggatgttctcgcagaa

SEQ ID NO: 187875 - DNA, 75 bp, Homo sapiens
atcatgggcaaaggacagatccaggatgaaacaggcgcctatttaatcgacagagaccccacctactttgggcct

SEQ ID NO: 187876 - DNA, 82 bp, Homo sapiens
cttttcagggcccccaaactgtcacagaaagagctgttaacacttcctagataacggcaattctgtggtgttcttggtcaca

SEQ ID NO: 187877 - DNA, 90 bp, Homo sapiens
agaaaaccttaatagtgttgacaaatgtaactaaaaatatagtggcatttaaggttaatttggagtggcccctggagtcagtttcctaca

SEQ ID NO: 187878 - DNA, 82 bp, Homo sapiens
ttggctgtgaatgcacattgtgttctgcaaaaaacaaaaaggatagcctccggcattccagtgtttcctgaggttataggcg

SEQ ID NO: 187879 - DNA, 100 bp, Homo sapiens
agagtttgcgacgtggtaaagaaataaggcgagtacacaagcgaagactttccagctcagagagtgaagctatcatggtgaacttacttcagattgtgcg

SEQ ID NO: 187880 - DNA, 50 bp, Homo sapiens
ggcagctgtactaggactgggaacgggtggagctgatcagaataatgttc

SEQ ID NO: 187881 - DNA, 100 bp, Homo sapiens
gctgggggtgctgggcgacctgcaggcagcaccggaggcccaggtctccgtgcagcccaacttccagcaggacaaggtgctggagaatctggtaaaagca

SEQ ID NO: 187882 - DNA, 75 bp, Homo sapiens
aagcagcagagtttctacaaatgctagaagctatcaaagcccttgaagtcaggtttattcttcagtccaaggaag

SEQ ID NO: 187883 - DNA, 90 bp, Homo sapiens
cgacgtcgagagggagccgctgccgcgttagttccgagcttgaagtcagtgacccagggcctggtcatcgggcagctgagcagccacttc

SEQ ID NO: 187884 - DNA, 101 bp, Homo sapiens
aatattctagaaggggaaaagctacttcaagatgccactgccgccaggagccctgtaacatcagccatcgtcaaccccaccgtgttcttcaacatcaccgt

SEQ ID NO: 187885 - DNA, 90 bp, Homo sapiens
agaggcagtggcgcttgagttggtcgggggcagcggcaggtaatctgtaagtcagatgctccaacaggggatgttcttcttgatgaagct

SEQ ID NO: 187886 - DNA, 75 bp, Homo sapiens
gaagaagctgaggatgaagaagatgtttgtgtttaaggagaaactaacaatgaaaacggcctcgttgacggagga

SEQ ID NO: 187887 - DNA, 83 bp, Homo sapiens
cccagacaagatggacaccgcggaggaagcgccatcatgaccgggtcctataacaacttcttcaggatgtttgatagagacac

SEQ ID NO: 187888 - DNA, 90 bp, Homo sapiens
gggatccttcacccgtgtctggactatcggacaaaacctttctgctgcagcgcttgtccattttcctcaaaattcttctctgcctacaaa

SEQ ID NO: 187889 - DNA, 100 bp, Homo sapiens
gaagccagtaagtcgtcgcacgctggactggatttattcagtgggtttctattgcctgggctggagtgtagtggcatgatcatggctcactatagccttg

SEQ ID NO: 187890 - DNA, 80 bp, Homo sapiens
cggcctcccaaagagctgggattacaggtcaaaggccctttcagaagcaactccatttcattggataacttaaaaccctc

SEQ ID NO: 187891 - DNA, 102 bp, Homo sapiens
gaaagactgattcggaactttggaaaaactgtgagggttacacatcattttggaatgactgtatatcatctggattacgtggctgtatgttaattgaattag

SEQ ID NO: 187892 - DNA, 100 bp, Homo sapiens
ggaccaggtagcccctgtggctaacagttacagagggacactcaagggtcgggctgggagtgatggagccagaggaatgcctggacaaactggccccaag

SEQ ID NO: 187893 - DNA, 90 bp, Homo sapiens
caagataatagccagctccccagaaatgaacctgcccacggtgtccgcgctcagggacttacaccagaggatcgataagttccgtttcac

SEQ ID NO: 187894 - DNA, 100 bp, Homo sapiens
caaggaagatggggagccaaagaccaagcatctcagagaagaggaggaagaaggcgagaagcacagagttatgcccagccaagtcttcagtatatccagg

SEQ ID NO: 187895 - DNA, 98 bp, Homo sapiens
ccagagcctggagtctgcgaaggccgggacccggttccccggcccacagtgggggtgtgcaaacccgagagaactggtgatccgtatgtgaaactttc

SEQ ID NO: 187896 - DNA, 74 bp, Homo sapiens
gaagagcaaaggcgatgatgccacattacctaagaaaaagtcagcactttttgaagtgtctgaggttataccag

SEQ ID NO: 187897 - DNA, 90 bp, Homo sapiens
agcgagcctcttctgataactcaggatttacttgaaatgaaaggagattccaacctacttcaggcatgttatttgaaagcaattgagacg

SEQ ID NO: 187898 - DNA, 110 bp, Homo sapiens
gattgtgaggcctccccagccatgtggaactaaccatctgctgcagaatcccaggggaaaggcagcatctccgaggatgagctgatcaccgccatcaaagaagcaaaggg

SEQ ID NO: 187899 - DNA, 100 bp, Homo sapiens
aagtacgcattttttgagtgtaaaagatcagtggcctgatcttttggccagaaggagattaaaaagatgcccctcaagatggctgtgcctgtcagctgca

SEQ ID NO: 187900 - DNA, 101 bp, Homo sapiens
ccccgacccctgcagctgtgaggtatcattggaacatttcaagatcatcaaatcaaattccacagggattggtgaccaaccagaaggctcagacatctgat

SEQ ID NO: 187901 - DNA, 50 bp, Homo sapiens
cgcagcccgacgttccgctgctgggatggtcatcatgggccagtgctact

SEQ ID NO: 187902 - DNA, 96 bp, Homo sapiens
cttgagggactgaagccatgcaggacccctgggcagacctcttcagaaatagcaggtttgcaatggtctggagcagccaaggaagcagcagcgctc

SEQ ID NO: 187903 - DNA, 74 bp, Homo sapiens
cgcgtgtctaggtgagtcgcggtgggtcctcgcttgcagttcagcgaccacgggccaattcctgtccccccagc

SEQ ID NO: 187904 - DNA, 74 bp, Homo sapiens
gcgctgtgatgcctgcagagctgtggcttaccagcttgtctttaaccgaactgtcacactgaaggaagacccag

SEQ ID NO: 187905 - DNA, 90 bp, Homo sapiens
ggagcgcaggcctcgtgccgttacggccatcacggcggccgcagtggcgtcctggagccctcctcagggaacagctcctgcccaggtctg

SEQ ID NO: 187906 - DNA, 75 bp, Homo sapiens
ccttagaagtgcttaaggaagagtgatgaagatgggcttccccaaggatttattgacattgctacttgagtgtga

SEQ ID NO: 187907 - DNA, 100 bp, Homo sapiens
accggtaccaggcagacatcaccgacttgttaaaagaagggaagtgctcagcggctgcactggacgtcctcgccaatgtcttccgggaggaactgctgcc

SEQ ID NO: 187908 - DNA, 76 bp, Homo sapiens
aatgaatttgcccaatgttttgatgattggcagagacccactgtctgtatggaagctccaaaaggaaagataccag

SEQ ID NO: 187909 - DNA, 100 bp, Homo sapiens
aaatgctgccttccttgttggatgctacatgatgatgtcagttcatacagactgtattgtgtcagtgcagattttaagtacattgatggaaataacaatt

SEQ ID NO: 187910 - DNA, 100 bp, Homo sapiens
aggtgctgctggaggcaggaatggatgtgagctgtcaaaaagtgaagtcactgcttttgctgtcttggatcaagaccagaaagaaattattgataccaat

SEQ ID NO: 187911 - DNA, 83 bp, Homo sapiens
tgtgtcaaacatccatatcataagtggaattttggagatattcaaagaacccagtgacttgattgtaaaaatttacagagcgg

SEQ ID NO: 187912 - DNA, 75 bp, Homo sapiens
ccaggcgaagctggccgagcaggctgagcgatacgacggttccgtggggaccccactgcctggagtacaggtgcg

SEQ ID NO: 187913 - DNA, 76 bp, Homo sapiens
gttttaactacagacccagtctctgccaactaagtttggtgcgaacgccattctgggggtgtcccttgccgtctgc

SEQ ID NO: 187914 - DNA, 100 bp, Homo sapiens
ggctgcttccctgggctgggcgtcagccgccaccggcagcagcagcaccaccggacgctggaacagtgaaccatggagctgtatttcggtgaatatcaac

SEQ ID NO: 187915 - DNA, 100 bp, Homo sapiens
tcacatccagcagaggaggcgggggcagccgctgagacggtttttcacaaggtggccaggaagctggtgatcctggaaggagagctggagcgctcggagg

SEQ ID NO: 187916 - DNA, 94 bp, Homo sapiens
ccttagctgtgctcgcgctactctctctttctggcctggaggctatccagctgccctctggtggtcagaagatgctgtgctgtctcgttaggat

SEQ ID NO: 187917 - DNA, 100 bp, Homo sapiens
taaccattttaaacaaagccgtctgtagaggatcctttccccattgccctggccaacgtcaacattgggagcctcatctgcaatgtaggggccggtggac

SEQ ID NO: 187918 - DNA, 100 bp, Homo sapiens
caatctcagttgcttgctggaattgttgtggataagccaccttctggatgtattcttggcctgggtagcctctagaaattcaaacacagtggtgtttgtg

SEQ ID NO: 187919 - DNA, 82 bp, Homo sapiens
accatcgacaccgaaaactccaccgtagcccttgccaaaggtcagcccaaggctgccccctcggtcactctgttcccgccct

SEQ ID NO: 187920 - DNA, 50 bp, Homo sapiens
gatacattgcaaggacaggttccaaggtctcggtccagctcgacttccag

SEQ ID NO: 187921 - DNA, 123 bp, Homo sapiens
gggaggctcggcggcgggcggcagcatgtcggtggcggggctgaagaagcagttctacaaggcgagccaggctcttgtcaggatggtgaagctgttcatcggaaacctgccccgggaggctac

SEQ ID NO: 187922 - DNA, 100 bp, Homo sapiens
gacacacctaccaagaagccagtcaagcggccagaaaccagcctggacaccaagtctgtgtcagaaggccacctcaagaggaacatcgtggtgaagaccg

SEQ ID NO: 187923 - DNA, 100 bp, Homo sapiens
tgagtgatgtggaggaaaacaacttcgagggcagaatgatgattattctccaccgtctaagagaccaaaggccaatgagctaccgcagccaccagtcccg

SEQ ID NO: 187924 - DNA, 75 bp, Homo sapiens
ggtccctcgcctcccggccgagctgacgtgtcgtgtgggagccaatgggagatgggaagaaaatcatttccttgg

SEQ ID NO: 187925 - DNA, 100 bp, Homo sapiens
tctcttcagggatgagtcatgtggtggtgaaaaatgaccctgaactggaccagcaggtggcagagatgcatggcgagctgattgagttcaacgagcgcct

SEQ ID NO: 187926 - DNA, 87 bp, Homo sapiens
aaagactaggagacatggatttatctacgtcatcccacaattcttctgatgacaagaatcgacgtaattccagtgaggagagaagta

SEQ ID NO: 187927 - DNA, 74 bp, Homo sapiens
tcctgccgcagagctggccgcgccaaataatgtctctgtggagccgccaccaaaatgcagattttcgtgaaaac

SEQ ID NO: 187928 - DNA, 101 bp, Homo sapiens
tagcctggccatgaatcaactgggaacaatcattgtatcagggtccactgaaaagggtggagagattcaaccagttagcgtgaaagttggagataaagttc

SEQ ID NO: 187929 - DNA, 96 bp, Homo sapiens
aagcctgaagaccccggagcccctttagccatgtggatacctacggagcacgagaaatacggcgtgggtagtatcttccccagcagatgttgctga

SEQ ID NO: 187930 - DNA, 100 bp, Homo sapiens
acagatgtatggctgacaagacgctcccagagtgttcaaaattacctgttctggaggacacgtgccggcggcaggacttcaacccctgtgaatatgatct

SEQ ID NO: 187931 - DNA, 75 bp, Homo sapiens
cgccgacggtcttcagggtcacgagatgagcgctatcggtcaggcaacaccaacattgcttagaagatttggatc

SEQ ID NO: 187932 - DNA, 100 bp, Homo sapiens
aacagaatttatatagagatgtgatgttggagaactacagaaacctcgtctccctggccagtggcccagctgaggtactcagttccagccccaagctgga

SEQ ID NO: 187933 - DNA, 51 bp, Homo sapiens
cctcccaagtaactgggattacagcacttttccagccattaactccaggct

SEQ ID NO: 187934 - DNA, 100 bp, Homo sapiens
gtggtcgtggtggggggcggcatctcagtgtccaaagccgactgctatgtgcaactgtggctgcccacggcgtccccaagccctgcccagactaggatag

SEQ ID NO: 187935 - DNA, 74 bp, Homo sapiens
aagagcaaacagattcagtggcctgcattgcccatctgcacaggggaactgaggagaaacaggaatgaagagtg

SEQ ID NO: 187936 - DNA, 100 bp, Homo sapiens
cagtgagcaccttttggcccaatgaatatcaggggatgttcgtctaaccccagaagactttgctagagctcagaagtactgcaaatatgctggcagtgct

SEQ ID NO: 187937 - DNA, 106 bp, Homo sapiens
tgggaggctccgttgcctgctcccggagggagacgcgctgccgaggagaacccagcggggtgcttcaaggatgaccgcatcgtcttctggacttggatgttctcca

SEQ ID NO: 187938 - DNA, 100 bp, Homo sapiens
cctacaactcatgcccagcagcagcaagcaggatttttagactctgaggagcagttggagctaatccacattatggaaatggaaaccaccgaacctgagc

SEQ ID NO: 187939 - DNA, 71 bp, Homo sapiens
ccaccgcgcactcggagatgcagccgctgctgagatctgtatctgtggacctgaatgttgatccctcgctt

SEQ ID NO: 187940 - DNA, 90 bp, Homo sapiens
gaagtggttggaaatggcacctatggacaagtctataagaatggactgctgaattatgaagtatttcagacccagtagtagaacatcact

SEQ ID NO: 187941 - DNA, 113 bp, Homo sapiens
caaatatcggaacccctccttgaagctgatggtgaatgtgtgcggacacactctatcccttcccactggaggcatgtgatgagaggaaatcaccgaaaacgtggctgcttcaa

SEQ ID NO: 187942 - DNA, 89 bp, Homo sapiens
gatcgtggcctctcgagagcaagcttattgcaggagtgaccaggacactacctcctagaagtaatgcccacagaaagcgcaagttgttc

SEQ ID NO: 187943 - DNA, 82 bp, Homo sapiens
aagccatcggatggatgagcagtcacacagactttgacaatgcagatcttcgtgaagactctgactggtaagaccatcaccc

SEQ ID NO: 187944 - DNA, 59 bp, Homo sapiens
tgcccggccgagaccccgtctgggaggttcaggaacaagtgcatcccactctctcagct

SEQ ID NO: 187945 - DNA, 90 bp, Homo sapiens
gaattaggtggtctgactaccagtggctctgcagagaaatacaggtatcaggatgaagatacacctcctcaagagcatatttccccacaa

SEQ ID NO: 187946 - DNA, 88 bp, Homo sapiens
tcaccccaagctccagaagtccaggctgagccaaaccaagcttcaagttgttgaaactgatttctcaactccaacaccaagaaggaaa

SEQ ID NO: 187947 - DNA, 112 bp, Homo sapiens
ctgaccagagctgatcccgagcagcgtcatgtacccctgtagattttcgttccgtcacccaggctggagtgcagtggtgtgaccttggcttgctgcaaccctttgcctcctg

SEQ ID NO: 187948 - DNA, 90 bp, Homo sapiens
gaaaaatggggcagaagaagagcagaaaatagcagccaggaaccaagaaaacttgcacccggcccctgcaagacttgtctccatctagct

SEQ ID NO: 187949 - DNA, 72 bp, Homo sapiens
gaactcctccagcctccagaaacctggctttctccggaccccctgtttctggaacagaggagggtcagagaa

SEQ ID NO: 187950 - DNA, 82 bp, Homo sapiens
tgctgccgggttgcgctccgtgcacctcttgcgggttactataacaacagtaccaaggtggctgtgaaaaccctgaagccag

SEQ ID NO: 187951 - DNA, 100 bp, Homo sapiens
agctgtggttgctgctgtgatatggaggaagaagagctcagatgtatcggcaagcagtgtaaacggaggacttggggaaaaaggaccacatagtccatcg

SEQ ID NO: 187952 - DNA, 90 bp, Homo sapiens
aggaaatgaaggaccatatggtcagcccaacagccgtagcatttttggagaggaataacagagagctatttgcatgcaaagaacatcatc

SEQ ID NO: 187953 - DNA, 98 bp, Homo sapiens
ggaggctggagattccacccaaatcctcttctccaagaaggtggagtttgtccatatgctcaatgctaccatgtgcgccactacccgtaccatctgcg

SEQ ID NO: 187954 - DNA, 75 bp, Homo sapiens
ggtggtgctgaatgagctctttggcaagttcgaccagatcgccaaggtcttcgccttgatcgtgttctcctgcat

SEQ ID NO: 187955 - DNA, 75 bp, Homo sapiens
cgacgtgctgtgcttactggtcggcatgttatttgaaagcaattgagacgcaaccgaactttgcagtagcttgga

SEQ ID NO: 187956 - DNA, 74 bp, Homo sapiens
tgcattacggtctctataagaagatgatcggtgtccgcaatgttgccagtgtctgtctgcagattggctaccca

SEQ ID NO: 187957 - DNA, 80 bp, Homo sapiens
gatcctgccaccgggaggtgtggaagagccggagaccgtcaatgtgcccgcgtgctggccgacgagaggtctccccagcc

SEQ ID NO: 187958 - DNA, 83 bp, Homo sapiens
ctttgtggatggacttgattctgatgagaggtcaaagagccccctgaaatcaatttagttttgtaccctcaaggcctaactgg

SEQ ID NO: 187959 - DNA, 83 bp, Homo sapiens
agtgaagtggttgcggtaacctggcctgggcctgaagtgagtgagaggcacatgaaggtgtgcaactgaggaacatggctcaa

SEQ ID NO: 187960 - DNA, 100 bp, Homo sapiens
agatcgggcccgagtgtgtggcacttctaccctagccgggcccagcccccgagcagtgcagcctcccgagtgcagagtgcagcccctgcccgccctggcc

SEQ ID NO: 187961 - DNA, 101 bp, Homo sapiens
tgacggtcggctccttcgtgtgtacctcctgctccggcagcctggccatcgatgcacccctcggagctaatagcggagatgagaaacagtgggtttgcact

SEQ ID NO: 187962 - DNA, 90 bp, Homo sapiens
gcagctgcctcagttcttagcgcagaatttatagagcggcagcacgcaaagaacaggtattactactaccaccggcagtaccgccgcgtg

SEQ ID NO: 187963 - DNA, 82 bp, Homo sapiens
ccacactgtgagcctcagcagctccagccagcggacccgacggctgagaggtcaaaatgcagatcttcgtgaaaacccttac

SEQ ID NO: 187964 - DNA, 100 bp, Homo sapiens
gttgaaggacaacagggatctacagaaattcctgcaagattgtcaagaggtcaactttgtagtgtgccaactctttgccttgctagcagccatttggttt

SEQ ID NO: 187965 - DNA, 50 bp, Homo sapiens
cccggcccgcctgtgtggacgggttcagaatctcccatgatgattggtga

SEQ ID NO: 187966 - DNA, 100 bp, Homo sapiens
cttctaccgggctgagccaggccccttctcagattgcaaacagtggttctgctggattgataaacccagctgctacagattgtgaagaggtctcttgaag

SEQ ID NO: 187967 - DNA, 83 bp, Homo sapiens
tgctgacctgataatgaagaattattttgcaccactggatgttgtttactgactccagggattagagctcgatctgcaaggct

SEQ ID NO: 187968 - DNA, 50 bp, Homo sapiens
gcctcaggcgtgcgcggacggtgtgcggaggacactggaggtgaagaagg

SEQ ID NO: 187969 - DNA, 75 bp, Homo sapiens
gctgtggcaatggaacaggcttgagaaacagatggtttgtgaagaaggtgacaagctaacctactcaaaatatgg

SEQ ID NO: 187970 - DNA, 88 bp, Homo sapiens
agaactacagaaacctggtctccctaggtgaaatgacaatggatgctctgttggctcgattgaaacttctgaatccagatgaccttag

SEQ ID NO: 187971 - DNA, 60 bp, Homo sapiens
gtttgttccctgacaactttgtaagagtttgatctgtggatgaaatgaatcatgattttc

SEQ ID NO: 187972 - DNA, 88 bp, Homo sapiens
ttgtatctcaggaattaagaatttttcctaaaagaagaaatgtgtgttctgcgaatgactcgagctagacgttcccaggtagaacagc

SEQ ID NO: 187973 - DNA, 83 bp, Homo sapiens
ggaagacttccagtagctccaaggaggttaaggaacatgaatctgaaggtggaagaacacctttgatgaaagctgcaagagct

SEQ ID NO: 187974 - DNA, 75 bp, Homo sapiens
aaagactcaggacggacaagcacagtcttcggaaggaattgcacgtaggtgaaaaccagattgaaatgttagagg

SEQ ID NO: 187975 - DNA, 100 bp, Homo sapiens
tacattcactcaggacaggcagataaggttgctgaatgctataaagccaggacttgttaaaaagatcaatagattgcctacccccattgcaggactggtg

SEQ ID NO: 187976 - DNA, 74 bp, Homo sapiens
agagccctggactgtgaagagtgaggagaccatagctgcacagccaggcttgcttccggcgtcatggctcaaag

SEQ ID NO: 187977 - DNA, 100 bp, Homo sapiens
cgggtgcggataagggacccgacactgatgttgtggcagcactgcctgaaggtatgagaccagattctaatctttatggttttccatgggaattggtgat

SEQ ID NO: 187978 - DNA, 75 bp, Homo sapiens
tgtgggtccaatcaattgattctacacaaaggcatccgtgtacaagatttgcagagaaatgtatgacgatggagt

SEQ ID NO: 187979 - DNA, 100 bp, Homo sapiens
gagcagtccagaaagcggcttatcgaacagagccgggagttcaagaagaacactccagagacatgtgcaagccagccagcgcgccatagccttaattgca

SEQ ID NO: 187980 - DNA, 76 bp, Homo sapiens
ccaggaatcctttagggaagttatttgtgatccagctttgcttcctgagcccaatcacgtcatgctgaaccaccta

SEQ ID NO: 187981 - DNA, 98 bp, Homo sapiens
tggtgctatacttgaattttctaaggtgtcattagctcactgaaaactgaagctaatttggaagttttgaagtcaattcctagtgaaaaattaatgat

SEQ ID NO: 187982 - DNA, 101 bp, Homo sapiens
attctctgccccccacccaccgcgccggcgctcccttgtcacgcctcgggaagcgcgcacctgccaagcagctcaatctgaaattgaagtgtctgtctctg

SEQ ID NO: 187983 - DNA, 101 bp, Homo sapiens
ccagaggttcacaaaacaagtgtagtaggttacttcttgctgcagattctgcgcaggatcggagctgtgggccaggctgtgtccaggacggcgtggtcggc

SEQ ID NO: 187984 - DNA, 98 bp, Homo sapiens
tttcaaggcgggctgtaactggtggcatttgtcccgggaccagggggcggaggaaagcgcaaagggaaaagcaagaagtggaaagaaatcctgaagtt

SEQ ID NO: 187985 - DNA, 83 bp, Homo sapiens
cgctcacctgcgctgtgatgcctgcagagctgtggcttaccaggtggcctccatgaaccagcgccgtgtggatttctaccttg

SEQ ID NO: 187986 - DNA, 75 bp, Homo sapiens
cgcttccagcaattcatccgggtctgctcaccaggtggccagataccgcccacgtgcccccatcattgctgtgac

SEQ ID NO: 187987 - DNA, 83 bp, Homo sapiens
ctggggacggcgaccctaggagagtgagacggtttaagcggaagcatcttactgccattgactgccagcatttggctcggagt

SEQ ID NO: 187988 - DNA, 100 bp, Homo sapiens
gggcagaccccctcgagccgcgaaggagcccgagaagcagccacgatgtgcggtgagccttccagatggtcaccctcacactgcgattgctgctgcaaga

SEQ ID NO: 187989 - DNA, 101 bp, Homo sapiens
acaacttccggcaggtccagaagttcgatgagaggctggtatacacctccttctcccaaggtgctggagaatctggtaaaagcaccattgtgaagcagatg

SEQ ID NO: 187990 - DNA, 75 bp, Homo sapiens
aaaagaaatacctgtgatttgctttctcggagcaaaagtataactggagtgccaaggctaaaagacgaaatacca

SEQ ID NO: 187991 - DNA, 51 bp, Homo sapiens
gggatattattcggttgaccagaggaccaagatcactccatggatgaaatg

SEQ ID NO: 187992 - DNA, 74 bp, Homo sapiens
cgggcgccatccgggaccggcggttgtctgtggccggaggctgatcagggacctggtggccttagtctttcagg

SEQ ID NO: 187993 - DNA, 73 bp, Homo sapiens
gctcatcgagaagcgggctttccaggacaagtactttatgatagtggggatggctataatggatttggtaatg

SEQ ID NO: 187994 - DNA, 75 bp, Homo sapiens
tttgaagtagaagaagctgatggacactatcttgatcagaagaggctgaagcaggggctgtatcgtcatccgtgg

SEQ ID NO: 187995 - DNA, 100 bp, Homo sapiens
gggttctattttccctcctcaaactgactttgcagccacggagaggaatggaagttggatacactttgtgacttgtacgagacactgaccattacacagg

SEQ ID NO: 187996 - DNA, 100 bp, Homo sapiens
gccagcagtcagtaatacagaaggatgaggagaacaatccccttgagacagaatatggcctttctgtctacaaggatcaccagaccatcaccatccagga

SEQ ID NO: 187997 - DNA, 82 bp, Homo sapiens
aagtaggccgtctcgctctgggtctccaggcccgcgaccgtccgccagtcgtcccgagttttctttttaaaagcggaaggag

SEQ ID NO: 187998 - DNA, 79 bp, Homo sapiens
cgtgaccgagagcgtgaccgagagcgcgaatatcgtcatcgttagaaggtgaactgtcacccctacaactcagcttgca

SEQ ID NO: 187999 - DNA, 75 bp, Homo sapiens
ggtgacttcacttttgagtgcaactgccttccaggtaactcaactggacccaaataaatcattattggaggtaaa

SEQ ID NO: 188000 - DNA, 101 bp, Homo sapiens
cgctatggatgatcgagaggatctggtgtaccaggcgaagctggccgagcaggctgagcgatacgacggtactaggttttgacaagcttgcatcatgcgtg

SEQ ID NO: 188001 - DNA, 95 bp, Homo sapiens
cccctactgcggctggtgcgtcgtcgagggacgcttttccagaagcctgttaaaagcaaggtctccccacaagcaacttctctgccacatcgcca

SEQ ID NO: 188002 - DNA, 75 bp, Homo sapiens
ctcatattagtgcctgtgatggcatctttcatctaacacaagcatcagatggtgaaggagaaggagacacagaag

SEQ ID NO: 188003 - DNA, 87 bp, Homo sapiens
gcgaatatcgtcatcgttagaaggctctccccggaggctcagccccctctgctccccatgggcaactgccaggcagggcacaacctg

SEQ ID NO: 188004 - DNA, 73 bp, Homo sapiens
ttcgcccccatcctcaacttcctgcgcaccaaagagttggatcccagggtgaggacgcttgagcggaagttag

SEQ ID NO: 188005 - DNA, 80 bp, Homo sapiens
actgctgccgccgcccccggagctgctggtttcattcgaggtttcgggccgggtggctttgagtataagcgcgctatcgt

SEQ ID NO: 188006 - DNA, 98 bp, Homo sapiens
accttgggatgtggacacaatttgtaaggtacctttaaaacagggcagaagccttatggattggattcgactgaccaaaagtggaaaggatctaacgg

SEQ ID NO: 188007 - DNA, 99 bp, Homo sapiens
cggtcctgtctctcgagttggaggcatcttgacttagttgctgggagcctggccaagatagccaggttaaccaaacgctttgaagcagccaaagaagat

SEQ ID NO: 188008 - DNA, 78 bp, Homo sapiens
aattcagaagaaacaaaagtgccaccgaagaggtgagaacaaaatcatgcacaagtgaagctgatgtggaggctgtca

SEQ ID NO: 188009 - DNA, 100 bp, Homo sapiens
gcattggcgaccagcgcttcacggggatgtggagacgctggtagcggggccaggaaggctccggacggagcaggttttctggaccacagacacactgccc

SEQ ID NO: 188010 - DNA, 89 bp, Homo sapiens
tcctgagcgccatggctcactccccggtgcagtcgggcctgcccggcatgcagggctccatgaagaaggagttcccgcagaacctggga

SEQ ID NO: 188011 - DNA, 88 bp, Homo sapiens
gatcgggtggagtgtaggtcatatcgccgcggtatctcttccaaatgcacaatgaaggagttctcatcaacagcacaaggcaatacag

SEQ ID NO: 188012 - DNA, 90 bp, Homo sapiens
acatcagttatattccatctactgtctttttcttcaatgggcagcatatgaaagtggattatgggatattcaaatagaagccttgctgat

SEQ ID NO: 188013 - DNA, 101 bp, Homo sapiens
aatgatcagtagcaccagtgtttatgttcagacttggttccttcaacctagagaaagttgaaaacccagctgaagtcattagagaacttatttgttattgc

SEQ ID NO: 188014 - DNA, 109 bp, Homo sapiens
tggccccccgagcgccgggaccatgtcccagctgcagctgtggctgcagtttgaggctctgaacaaggtgagaagccctaccactgcaactgggacggctgcggctgga

SEQ ID NO: 188015 - DNA, 101 bp, Homo sapiens
gcggcgccgcgggagcgccgggccccgacggtttttctatatgagtggagaagacagctgttaccagggaggtcatacaacatttttttaggatgtctgaa

SEQ ID NO: 188016 - DNA, 83 bp, Homo sapiens
aaatcagatgcagctgttttaactatccctgcctgtgactttcaagaactgaaggcagaagctagtctaatggaccagatgag

SEQ ID NO: 188017 - DNA, 100 bp, Homo sapiens
tggggaccaccatgttcacgtgacatcaagaggaagcggaaaccagtggccacagcatctttgtctagccccagtgcagtggccacagatgtctttaatt

SEQ ID NO: 188018 - DNA, 127 bp, Homo sapiens
gggaccaggcggaggcgtcgcgggagcctttggggcaccacagagatgcggtgaccatgcagcaggtggccaggacagtggctaaagtggagctctcagaccacgtgtgtgatgtggtgtttgcact

SEQ ID NO: 188019 - DNA, 100 bp, Homo sapiens
tatgatcaaagctacttcccttcgaccattgtgactaagatatgaggccccaggattcctggcgaggtcctcctccccttttccagcagcaaaggtttga

SEQ ID NO: 188020 - DNA, 52 bp, Homo sapiens
gcctggtcaaggtggctcagaccacagagctcccagctcctccagcagccga

SEQ ID NO: 188021 - DNA, 75 bp, Homo sapiens
ctggggcggcaccggatcaccaagacggagacctgcctagagctggaacgttacctccagagcgagccctgctat

SEQ ID NO: 188022 - DNA, 100 bp, Homo sapiens
ttctcagagcgggaggccagctttgtcctgcacaccattggcaaaactgtggagtatctgcactcacagggggacagagcgggatgccaccagcttgtcc

SEQ ID NO: 188023 - DNA, 98 bp, Homo sapiens
ggggttgccggagagaagaggattggtcctgcttttaagcctagctgaaattcttttcaagtctgcgggccaggcatcgacatccgcaacgactatca

SEQ ID NO: 188024 - DNA, 100 bp, Homo sapiens
cgacatgcgtcttccctgacaagaagtccgaagggaaaccagactgtgatgactgggagagcgggctgaatgcaatggagtgtgcattacatttggaaaa

SEQ ID NO: 188025 - DNA, 50 bp, Homo sapiens
ctggaggagctctacacgaagaacaaccatgtccaagggacctgcagttg

SEQ ID NO: 188026 - DNA, 100 bp, Homo sapiens
ctgcctggaagctgcattgcccttggtcctgggcctgcctgccccctggggaacacagctgcctgctgaagatgaagtcttactacagaaattaagagag

SEQ ID NO: 188027 - DNA, 80 bp, Homo sapiens
cttggtttcgggatctcggtgctgcagacggcgagacctcctgcacagataacgaaggaggcccaacttcattcaataag

SEQ ID NO: 188028 - DNA, 98 bp, Homo sapiens
aagcgccgggccctgctgcgggggggagagccactgacgccgggaccgggaccgccgccgccgccgccaccatgttggaaaatggatataccttattt

SEQ ID NO: 188029 - DNA, 90 bp, Homo sapiens
gcgacttgcgaggatgagagcgacgaagccaactgtccagtgttatagttttgccgctggactcttccctcccttcccccaccccatcag

SEQ ID NO: 188030 - DNA, 100 bp, Homo sapiens
cgctgccggcggcgggtcgtgggggctgactgtcgctctgcctttgacaggagaggctgcttcttgtagagacctggacaaacaccagactcagacgtac

SEQ ID NO: 188031 - DNA, 98 bp, Homo sapiens
ctgagaagagaagtggagcaccaggagactgcctatggctcagtttatgaacctcttaaaagcattaatcttccaagacctgataatgaaactctctg

SEQ ID NO: 188032 - DNA, 97 bp, Homo sapiens
gacgaagtggtccgctttgccaagaagatggacaagatggtgcagaagaagaacgcggttgcttctagaactgctggagttactgtttgacaagttt

SEQ ID NO: 188033 - DNA, 82 bp, Homo sapiens
tatctacaagggggtccgcaagctcttttgaaacagatggtcaccatgtttagatattagcagtcccgtatgtgcatgtctg

SEQ ID NO: 188034 - DNA, 90 bp, Homo sapiens
gaatcctaaagcgtttcctcgcttgcattcagctcctctgtgtttgccgcctggtgtctcgactgcattgtgagagtgaatctttcaaga

SEQ ID NO: 188035 - DNA, 81 bp, Homo sapiens
cagagccccagctcctgtctggtctgtgagatgtcctcactgtttcaggagctgctccaagccaggctgaaggaggagaag

SEQ ID NO: 188036 - DNA, 98 bp, Homo sapiens
ggagctctactaatgggaaaaacaaatttagatgagtttgctatggggttgtcttttggaaatgcaggtttaaggacaaattatctgcttaagctaga

SEQ ID NO: 188037 - DNA, 100 bp, Homo sapiens
ggcgactagcggcggcgggagcggcgccgagaggccgtgcgggacgcgggcgccaggaccggccgaacgcagagaacaagttgaaatcatcgcagaagga

SEQ ID NO: 188038 - DNA, 97 bp, Homo sapiens
caatgtttgaacaaactcgaagaacagctgtggaaagaagttgcaaaacactggagatagaatctcactatgttgaccaggctggtcttgaactctt

SEQ ID NO: 188039 - DNA, 98 bp, Homo sapiens
ggagatcctgcaatctgaaaagcagactgaaagggaacaaagaatcggcctggcagtgccctggagaaggaggtggagagcatgggggcccatcttaa

SEQ ID NO: 188040 - DNA, 89 bp, Homo sapiens
atgacaccaagcaaagcctacttagtttagatctccagacaacaagggaggtgtcacagttttccatttagatcaacaacttcaagttc

SEQ ID NO: 188041 - DNA, 83 bp, Homo sapiens
cgcatcgccacagctgaaggctgcgagggactaagagcagagagccttcacgtaaatgggtccagtcatgcctcccagtaaga

SEQ ID NO: 188042 - DNA, 137 bp, Homo sapiens
cagaaacatagatttggcaactcctttacatcatacttggacatatcaagcattggtgcacgatgtactggttttgagagattacctgaagttgcactcaaaagcaagatatactactaactttgaaatggaataag

SEQ ID NO: 188043 - DNA, 83 bp, Homo sapiens
gatcaacccagagctattgccttagatccttcaagtggcaaagtgtgggatgctgtctcaggagatgaattgatgaccctggc

SEQ ID NO: 188044 - DNA, 75 bp, Homo sapiens
aaaaatgccagccagaagaggcgttcgctgcgcgtgcacattccggcatgggcaagaaggacgaccccaagctga

SEQ ID NO: 188045 - DNA, 98 bp, Homo sapiens
aattctatctcttgggcaatcttcacggggctggctgctctgtgtctcttccaaggcatgctgcagacagacctttccgtccttcatgaacacacgtg

SEQ ID NO: 188046 - DNA, 51 bp, Homo sapiens
ctacaagtgggctgagtaccatggccatgcggaccctcagttggaagcaca

SEQ ID NO: 188047 - DNA, 100 bp, Homo sapiens
gtgctggccttggtctggattcaaaggttcagaattttcacagctgtattcaggtaactgaagattttgtgtctccagaacatcttgtagagtcatttca

SEQ ID NO: 188048 - DNA, 51 bp, Homo sapiens
gtttgcaaagcacctgaactgtcagaaaaagtggacagggcagtgctgaag

SEQ ID NO: 188049 - DNA, 90 bp, Homo sapiens
gggccctgatggtggctttcgtcaagtcaaagaagctgtcatgcgttgaaacctcgacctgtctcccagttggttgcacagcaggttact

SEQ ID NO: 188050 - DNA, 97 bp, Homo sapiens
ggaccgtgctagtgacctgactgatgccttcgtggagtatggactccaattgccttgacagtgtttttagtggctgttgcaacattatgtaaagaac

SEQ ID NO: 188051 - DNA, 75 bp, Homo sapiens
ccagcccgtggtccttctccatattcgagctggaagacccaggagaaggcggaggctcaggtgcccacatgatca

SEQ ID NO: 188052 - DNA, 76 bp, Homo sapiens
cccctcggcctcggagcaacgagcgcagcgccggagattcctgtcaacgtccgattctgcctcgaaggcatggagg

SEQ ID NO: 188053 - DNA, 97 bp, Homo sapiens
agtggctcatgacactaagaagtaaaattacgaactcactgagctggaagtcattcaacgggaattgaataggtctcctctgagcctccggcctcca

SEQ ID NO: 188054 - DNA, 80 bp, Homo sapiens
tgcccgctcacctgcgctgtgatgcctgcagagctgtggcttaccagtgagaaggcaaccaaagtgcaggacatcaaaaa

SEQ ID NO: 188055 - DNA, 88 bp, Homo sapiens
gcctgcccagaggccacccagcctcctagacaggcattgaagttgatatcgatgtggagcacggagggaaaagaagccgcctgacccc

SEQ ID NO: 188056 - DNA, 82 bp, Homo sapiens
gacatatctgagggagaagcacaagatcatgcacagagatgaagttgcggagaataatgaacatgatgtcacttctactgaa

SEQ ID NO: 188057 - DNA, 95 bp, Homo sapiens
ctgcgggtggcggtggtgtgctcgagcaaccagaaccggagcatggaggcgcacaacatcctcaggcagatggctcggtgagctgcaagaggaca

SEQ ID NO: 188058 - DNA, 75 bp, Homo sapiens
taaaaagtcctttgaaatggtgctggatgaaattagaaagcttggtgatccagctatttttcctgccgtaattgt

SEQ ID NO: 188059 - DNA, 75 bp, Homo sapiens
aactggagagaactgctggaaggagactggatgatagaattgcgaggattaaatccaccacacagggtgaaatct

SEQ ID NO: 188060 - DNA, 99 bp, Homo sapiens
ctgtaatggcctttcttatactctagaatatacaaagacaaaaggagattctgatgaagaagttattcaagatgtgttttccaagcagtgaagcacttg

SEQ ID NO: 188061 - DNA, 98 bp, Homo sapiens
tgcttggattgtctgcttcaagccctggctcaaaataactaatagggatgccaaaggaaaaatatgatcctccagatcctcgcagaatttataccatc

SEQ ID NO: 188062 - DNA, 100 bp, Homo sapiens
caccctgtggcagaagtgggcaaggtggcagagaaggaaggatggcctctggacatccgagtggaatcaaactgatggctgaaggcgagttgaaggatat

SEQ ID NO: 188063 - DNA, 100 bp, Homo sapiens
gggcccgcaagggcggagggggcccgaaggacttcggcgcgggactcaagtacaactcccggcacgaggtactccaaagattcaggtttactcacgtcat

SEQ ID NO: 188064 - DNA, 100 bp, Homo sapiens
cagattcgcagtggtcgcttcttctccttgatttcgactgggtctgggatgacttaaataagtcatcagccaccctgctgagctgtgacaaccgtaaggt

SEQ ID NO: 188065 - DNA, 74 bp, Homo sapiens
agcatctgggccatcttcaatctggatgaactgcagctttgcaagaattgcttttacttgtcaaatgctcgtcc

SEQ ID NO: 188066 - DNA, 75 bp, Homo sapiens
cgccgcgcacggacttcggcagagcccccaaatacatcaagatgtttgtactggatgaagctgacgaaatgttaa

SEQ ID NO: 188067 - DNA, 74 bp, Homo sapiens
aagatatgttgtgggttgtcgtcgacagttggactaaatgctcttccttcagaggattatccggggcatctact

SEQ ID NO: 188068 - DNA, 50 bp, Homo sapiens
tggggaccaacttgctctgcctgccaagaacccagtgacttgattgtaaa

SEQ ID NO: 188069 - DNA, 74 bp, Homo sapiens
ctcgttggaagaaaggatcttgtccaggtgacctccaaattcgagctctatacctgcctcagccctctggtgac

SEQ ID NO: 188070 - DNA, 50 bp, Homo sapiens
ggcgtttctgtacatggattatctgatgttctcagtgcagctgagtcttg

SEQ ID NO: 188071 - DNA, 51 bp, Homo sapiens
aaggcatggaagtcatcagaaggagccaaaaacctgtatatcatctccgtg

SEQ ID NO: 188072 - DNA, 98 bp, Homo sapiens
ccgggactgattcctttgcagcctaacctggacttcatggacacctttgagcctttccaggaagaagctgtgaataaggtgaaaattcaggccatgtc

SEQ ID NO: 188073 - DNA, 50 bp, Homo sapiens
ctttgtgattccctaccgctgcttagacaagttggatggcttgaggactg

SEQ ID NO: 188074 - DNA, 93 bp, Homo sapiens
cgagatcgagctgccggacgtggagcccgcagccttcctggcgctgctgagtttcagtctagaaggcttgacaggaggagctggtgtcggaaa

SEQ ID NO: 188075 - DNA, 82 bp, Homo sapiens
ccaagttcatctcctccgtcaccagccacatctaccagtgcaccgtccaggtgaggttagagctggggcatcgcgcccaact

SEQ ID NO: 188076 - DNA, 100 bp, Homo sapiens
gcggagtcagacggcgctatgtacgccctcttcctcctggccagcctcctgggcgcggatttccacaagacggcaccctatgtcgtcactggcagcgtag

SEQ ID NO: 188077 - DNA, 141 bp, Homo sapiens
gcgcctctactttctggagtttgtgtaaaacaaaaatattatggtctttgtgcacatttacatcaagtgtaaacaggaacatcgataagtagtgtaaaaacttgcacaatgaaatccgaagccaaggatggagaggaggag

SEQ ID NO: 188078 - DNA, 74 bp, Homo sapiens
aaagcaaccggcttaaacatctggaagctcaaggtactaggggtaggagattttgccgtgagtgacatcagttt

SEQ ID NO: 188079 - DNA, 90 bp, Homo sapiens
gtccgggtccggagcgccacagagtctgagggatttggagacaggctgttccttaagcagagaatgagcttactctctcagatgacttcg

SEQ ID NO: 188080 - DNA, 96 bp, Homo sapiens
cggctacatccttggggagtttgggaacctgattgctggggacccccgctccaggttggcaacaatgagtaaaccagaattaaaggaagacaagat

SEQ ID NO: 188081 - DNA, 50 bp, Homo sapiens
ggaacatggcgttgctggtgcgagtcctttttcagtcattcagtcagtac

SEQ ID NO: 188082 - DNA, 100 bp, Homo sapiens
agccaccattccccacgagttccaaactctagcgtgaatcaaactgagttccctgtattgaacactgatatacaaggaatgaatagaagtcaagaaaaac

SEQ ID NO: 188083 - DNA, 100 bp, Homo sapiens
atgagatttacctgtgagatgtttcatcccaacaggcacttgatgacattagtgaaagcatcaaagagcttcagttttaccgaaataacatcttcaagaa

SEQ ID NO: 188084 - DNA, 100 bp, Homo sapiens
cagcaactggctgagggactcacagctgatgacctgctgctcgtgctgatctcaggcaagtagcctgcagtatgaaatgctgctgctgacggattctatc

SEQ ID NO: 188085 - DNA, 100 bp, Homo sapiens
tttaggggctcacctgccttgcatcgttccgagtcctgtactggactgcatcaggccgcgtctcctcaggtccaagtggtaagaagttcagaagcaagcc

SEQ ID NO: 188086 - DNA, 50 bp, Homo sapiens
cttctgtctcgaaccttcaccactaacatttaagtaagtcttccccaaca

SEQ ID NO: 188087 - DNA, 100 bp, Homo sapiens
cgagcctatgccctggcttttgcagaaagaggagcgttagttgttgttactggctgaccaacaaagttcctatcaaaagacccagcacaggtcttctcat

SEQ ID NO: 188088 - DNA, 121 bp, Homo sapiens
actgctggggtggtggttccaatgagacagggcacaccaaactccatctgttggaatcgaagcctcttaaaatggcagatgacttggacttcgagacaggagatgcaggggcctcagccac

SEQ ID NO: 188089 - DNA, 83 bp, Homo sapiens
catgctctttgtagcgtggtgcttctgttgctcacaggacatcgctgccggctcccatgttcagcagaagcgacttcagcgtg

SEQ ID NO: 188090 - DNA, 110 bp, Homo sapiens
gcgaggtcgagtaccttccctgtcccatcgcaaacccaaagatccccgttcctggagattctgattgaggtcaaaatgcagatcttcgtgaaaacccttaccggcaagac

SEQ ID NO: 188091 - DNA, 96 bp, Homo sapiens
cgccgcgcttgctgctggtaacagggccttgcctagtgggccttccttcccagggaaggagacttggtctgaaagatgccacattcctgcagcctc

SEQ ID NO: 188092 - DNA, 82 bp, Homo sapiens
ccgcctcccccgtccggtccctctctccacggtaagggcaaaatgatgcttcaacacccaggccaggtctctgcctcggaag

SEQ ID NO: 188093 - DNA, 83 bp, Homo sapiens
cctccctcaccttggacacctcgcttggacggaaatggagagctggatttctccacttttctgaccattatgcacatgcaaat

SEQ ID NO: 188094 - DNA, 95 bp, Homo sapiens
aggaatggattgaaatctaatgaaccgaaactttggttacgccccatggtgtccatcctgccagcagactgattcagaatgggaggcttttgcaa

SEQ ID NO: 188095 - DNA, 73 bp, Homo sapiens
gtaatcagcaggccaaagactcagaggaagtgactttggtccagagacttctccagtcctgcaccttgaccac

SEQ ID NO: 188096 - DNA, 75 bp, Homo sapiens
cagctccacgaaaggcagccgcggatcgccgcgctcagcgacaaacaaagaaccatggagtctggcagtaccgcc

SEQ ID NO: 188097 - DNA, 50 bp, Homo sapiens
ggtgaatgcacagcaacttcttgaaaattgctaccaaggccaatccatgg

SEQ ID NO: 188098 - DNA, 75 bp, Homo sapiens
ccgaccttctgaacaaggccaacacctatgcagaaagcggcagcccagaatctcgtgttaatgcgatccatttct

SEQ ID NO: 188099 - DNA, 98 bp, Homo sapiens
gcccgcaaccggggcgaatcatggcggccgccaaggtcctctcagggtgcgccatcattgtccgaggtcagcctcgtggtgggcctcctcctgagcgg

SEQ ID NO: 188100 - DNA, 100 bp, Homo sapiens
cggagcgtgcctcggcggcctgtcggggagtgcctgcagggcaccatccgcaacagccaggaggcggaggtctcctgccccttcattgacaacacctact

SEQ ID NO: 188101 - DNA, 100 bp, Homo sapiens
tgttaaaggaacctctacaacgaaggtgaagccacggaagataagtaagactttgaccccgacgcaggcttcagtgattgccgcggatcagaagcctgag

SEQ ID NO: 188102 - DNA, 73 bp, Homo sapiens
gccggcctcgcctcctcgcagcagcgccatggtgcagaggccaagaccgttttgcccaagaaggagaaaatga

SEQ ID NO: 188103 - DNA, 100 bp, Homo sapiens
tagcttcgcagtctggaaagctttaggagttcacagttggaatgcagtagccctctgggcctgggatattgtggttgataactgtgccatctgcaggaac

SEQ ID NO: 188104 - DNA, 103 bp, Homo sapiens
acgggacctttgaaatacagtaaatggttcactgagacttttttgacggagagggacaaacaatccaagtggagtggaattcctcagctgctcctcaagctgc

SEQ ID NO: 188105 - DNA, 82 bp, Homo sapiens
accagtgctttccctgccggtgcgcaggggaagcgtgactgtgctcaggtcaaaatgcagatcttcgtgaaaacccttaccg

SEQ ID NO: 188106 - DNA, 100 bp, Homo sapiens
cggaaatatggcctcaatatgtgccgccagtgtttccgtcagtacgcgaaggatatcggtttcattaaggtatgcccaagaggacagagaacgaatgcac

SEQ ID NO: 188107 - DNA, 82 bp, Homo sapiens
tttaaaaagaaatggtgtaaaagttcctggtgaatatcgaagaaaggagaacggtgaactcctcctcccacatctgatggag

SEQ ID NO: 188108 - DNA, 100 bp, Homo sapiens
acgcaaagagatccagcccccttataagccaaaagctgacaaatgaccagttggtggcgtttctctcccgataccgagatatgaatttcttgaagtcaca

SEQ ID NO: 188109 - DNA, 75 bp, Homo sapiens
agaaggggaactcctgctgcccactcaggaaaatgtttataggaggccttagctgggacactacaaagaaagatc

SEQ ID NO: 188110 - DNA, 82 bp, Homo sapiens
tgaagggcatgtccctgcttgtcagggctgagagcgacggtgctgttgtcaagaccaatgccaatgcagagaagacagatga

SEQ ID NO: 188111 - DNA, 100 bp, Homo sapiens
aaaagcgagcgatcgagcgagcgcgcgcgcgaaaactccgggcaggcgtttataaactggaaagaggctaaactgacttggagttttttcaaacagtctt

SEQ ID NO: 188112 - DNA, 74 bp, Homo sapiens
tccctgagccaggccagcgccgacctggagaggattctgcagattgggaaaaagaactgcagcaggaacttcaa

SEQ ID NO: 188113 - DNA, 83 bp, Homo sapiens
ccatgtcagacgcagccgtagacaccagctccgaaatcaccaccaaggtggccatggtggaggtgcagctggagagtgaccac

SEQ ID NO: 188114 - DNA, 99 bp, Homo sapiens
aagacatgaatggattcccagtcaagaaatgctcagccttccaattttttaagaagcggagaccatggcgagcccagggaaagacaattatcgaatgaa

SEQ ID NO: 188115 - DNA, 51 bp, Homo sapiens
cttcacttttgagtgcaactgccttccagacaaatttacatgtattggaga

SEQ ID NO: 188116 - DNA, 74 bp, Homo sapiens
tcagacaagacggtggaggtcaagcccgggatgaagtcacggtgacttaagagattaaaattaatttggttgct

SEQ ID NO: 188117 - DNA, 100 bp, Homo sapiens
gccggagtgagaagcaagaaggccctggacacagcaatatctctgggctttcacagggttcagaatctcccatgatgattggtgagttgagaagtgacct

SEQ ID NO: 188118 - DNA, 75 bp, Homo sapiens
gcgcgagctggtggacaaagcgtgctttacaaggccaagtacggtccaatgtggatgtcctacttagggcctcag

SEQ ID NO: 188119 - DNA, 102 bp, Homo sapiens
ctgtgacatgtctgatcccttgctcccatccctgcagcatgaacaagaattaaacaaccaccatgtcgagcaaaaaggcaaagaccaagaccaccaagaagc

SEQ ID NO: 188120 - DNA, 82 bp, Homo sapiens
actacgagttccagacgcgccagctggagctgaaggccaagaactatgccgatcagaattctcagagagagttcaacagcag

SEQ ID NO: 188121 - DNA, 75 bp, Homo sapiens
tttttccttcctaggagaaatcgaggagctgcggctctaccccccggagatgctggaggtcagcagattggcttc

SEQ ID NO: 188122 - DNA, 83 bp, Homo sapiens
ccgagcgcggtggtgccctcagccccgtcctcttgtcctcctcagcctcgctggtcctttggggtcctgctctgggagatctt

SEQ ID NO: 188123 - DNA, 100 bp, Homo sapiens
gcagcccggacagtttcgactacgtgaaggccctgcggcagcgcatcgcggagaccagatcacaaaatttgtccaggatagacatagagctagaagaaac

SEQ ID NO: 188124 - DNA, 99 bp, Homo sapiens
cttgtgctgtgccgcattgccagcaatgtcctcaacaccaagcacccgtacccctcggaggagcagaagaaacagctggcgcaggacacggggctcacc

SEQ ID NO: 188125 - DNA, 96 bp, Homo sapiens
gaaaaataaaacgagaaattcaaaatctaaaactctttcgtcatcctcatattatcaaacttgtattgaaaatgtgtcccgacagaattgtccaat

SEQ ID NO: 188126 - DNA, 100 bp, Homo sapiens
ggaaaatagagcaagagaaaaaccaagcgcttgaacagctccagaaagccatgggtcctaaaatcaccctaaatgacctcatccccgcctttcagaacct

SEQ ID NO: 188127 - DNA, 101 bp, Homo sapiens
gttggaggaactggcccggaaacaggaggacggctccctgcggactgccgtggccgctgggagagcttcgtggaggagacgctgacggagacgaaccgcag

SEQ ID NO: 188128 - DNA, 100 bp, Homo sapiens
cgaagttctaaccctcctgctcgatctcagagctcagacacagagcagcagtcccctacaagggtgtccgcaatgttgccagtgtctgtctgcagattgg

SEQ ID NO: 188129 - DNA, 100 bp, Homo sapiens
ctgccaactttccaagtctggggatggccagactaccatggctgcaggagtcttgcctcagaatgaacaaccatattctaccttggtgaataacagcgag

SEQ ID NO: 188130 - DNA, 90 bp, Homo sapiens
ttactgctggtattctctgatgtcctcagcccagccagacacctcctactggacatccgtggcaaactttacctggcccccctcaccacg

SEQ ID NO: 188131 - DNA, 83 bp, Homo sapiens
cctgcctggagggagccctcctggctgggggcaagaagaggactgtcagaaggacgtagaaggcacggttttactgtgaggag

SEQ ID NO: 188132 - DNA, 101 bp, Homo sapiens
cagacccaggatggggccagaacggacaggggccgcgccgctgccgctgctgctggtgttagcgctcagtcaagttgtcacaggtagtactgatggaattg

SEQ ID NO: 188133 - DNA, 100 bp, Homo sapiens
cgattcttctaatggatgggaacatgggatttggagtccaggaatgagactaagcatttatctgtaggaaaagatattattcaaaacactggttctcagt

SEQ ID NO: 188134 - DNA, 96 bp, Homo sapiens
atggagctgcgccgaggccagatcctctggttccggggcctgaaccgtatccagactcaggaatcctcagagagcaccaacaccaccatcgaggat

SEQ ID NO: 188135 - DNA, 83 bp, Homo sapiens
gaacagcataactggaacatagaggacgacatagacagcctaaacccagttctcagggacaacccgcagcttcatgaggaagt

SEQ ID NO: 188136 - DNA, 75 bp, Homo sapiens
atttattatgggatctgagcgccatcagccagaatatgtttcgacagcaacaaaagattcttcaacaatctagaa

SEQ ID NO: 188137 - DNA, 136 bp, Homo sapiens
cggctgcgctcggcggaagacgcggcagccctgcgagaggcagcagcggagacgcggtgctcctcgggcgccaagcgattcatgatgttgctatcaaaagttgagaaattgtcagaagaaatcatggagataatgc

SEQ ID NO: 188138 - DNA, 75 bp, Homo sapiens
cgggcgccaggaccggccgaacgcagagttaacaagcacaagccctggctggagcccacctaccacggcatagtc

SEQ ID NO: 188139 - DNA, 82 bp, Homo sapiens
gactcttctgacctccgcgcgacgtacccgccgccgccgttggctggagacctgcctagagctggaacgttacctccagagc

SEQ ID NO: 188140 - DNA, 75 bp, Homo sapiens
tgacatggaggatgatttcatgtgcgatgatgaggaggactacgacctgacagcccacctgaggatattgaccat

SEQ ID NO: 188141 - DNA, 98 bp, Homo sapiens
acaattaccaaacagaatggacaagcttaataaaataaccgtccccgccagtcagaagttgagaacgagcctctgactccaggttatcatggattccc

SEQ ID NO: 188142 - DNA, 78 bp, Homo sapiens
cggcgcggcggcggcacgatggtcatggcgtatttcgtcgagaatttttggtttggtgccctggttgtcagatgttgg

SEQ ID NO: 188143 - DNA, 80 bp, Homo sapiens
tatcaagcagagcggtttcgaagacttggccagtgaaactgaaattgcattcttctgtgaagaagattataagaactaca

SEQ ID NO: 188144 - DNA, 146 bp, Homo sapiens
aaaaactgggtctgtgactacaacatattgctgcaatcaggaccattgcaataaaatagaacttccaactactggatttgctgtcacagatgcatcactacaatgctggggttaaacaaagtgctcttcttggacttaaagacctt

SEQ ID NO: 188145 - DNA, 80 bp, Homo sapiens
gcagcattggtgaagttgaatctgcaaaacttattcgggataaagtagcagatcacgcgatggaagccggcagccctgtg

SEQ ID NO: 188146 - DNA, 83 bp, Homo sapiens
ctcggcgctgccgtctctggaggagtactggcaacagaagacagcgacagctgtggcgcactgcaaacgcggcaatggtctca

SEQ ID NO: 188147 - DNA, 100 bp, Homo sapiens
gagttaccaatcagactggacttaagggaggagatatcaccaaacatgatggaacaggcggacagtccatttatggagacaaatttgaagatgaaaattt

SEQ ID NO: 188148 - DNA, 100 bp, Homo sapiens
ccatgtgtatgattcccaggctgaagccatgaaaacatcagcatttattgctggtgcaaaggaggaagagctgcgcaaaggtggagaccccaaatatgcc

SEQ ID NO: 188149 - DNA, 90 bp, Homo sapiens
cagaaatgagatccgcttcctgcccaacggtggaggccacaagcaggaaagaaaaggccaagcagaggcccctggccctgaacactgtgg

SEQ ID NO: 188150 - DNA, 89 bp, Homo sapiens
caagtcgggtggctgcggcgcgggagccggcgtgggcggcggcaacggggcactgacctgggtggtgcccaagcaaggaaagaaataat

SEQ ID NO: 188151 - DNA, 75 bp, Homo sapiens
ggccgatgcagaggctgagtgcaagtggttttcccgctgtatccttcagagaacaatgactgatgttgcagattg

SEQ ID NO: 188152 - DNA, 97 bp, Homo sapiens
agaaacaattcctcctgattatagattagaagaggtcaaggatccaaggattctgtagctacaatgttgtcaagactttttcgaatgcatggcctct

SEQ ID NO: 188153 - DNA, 90 bp, Homo sapiens
gcagccagggcgggggggatggcgtctccccgactccacctgagggactggctcctggggcatccccacgctcatcatgctggacccgca

SEQ ID NO: 188154 - DNA, 88 bp, Homo sapiens
tccttggtttccttgggagtaggtcttcgaaacttgtgtggccagagctcccagcccctgatggagtcttgctctgttgccaggctgg

SEQ ID NO: 188155 - DNA, 96 bp, Homo sapiens
ggcccatcggaattccagggagacctgggccccagggacccccagggccggcaggagagaaaggggctccttggaatgcagtagccctctgggcct

SEQ ID NO: 188156 - DNA, 90 bp, Homo sapiens
cagaattctggacaatcaaaacttaactcctggatacaggatggaatccgacgtggtaggcccagagcagatactgtccgcgatttaata

SEQ ID NO: 188157 - DNA, 111 bp, Homo sapiens
agaccgcgcgcagggcctgcagcgggagctggacggcgagcgcgagcggcgcgagaaagatttttagactctgaggagcagttggagctaatccacattatggaaatggaa

SEQ ID NO: 188158 - DNA, 83 bp, Homo sapiens
aagagcagcggaaaatgatccagtcacagagaaaattcctgttccaagagaaaataaggcaacatcaatgaaggagagaagag

SEQ ID NO: 188159 - DNA, 75 bp, Homo sapiens
aacagagcagcagcagcagagatgataacatgtttcagattggagaaatgaaggcagaggtcaccaaactacata

SEQ ID NO: 188160 - DNA, 83 bp, Homo sapiens
acttcctcacccgcgcctgcgacctcgcaaacggggattcagcgtccgatcctttggaacagggactcacgtgaagcttccag

SEQ ID NO: 188161 - DNA, 51 bp, Homo sapiens
ccaggatgatgaagcagaagaggcttctccatatacaacctcaactccaaa

SEQ ID NO: 188162 - DNA, 89 bp, Homo sapiens
aagcacgctactacctggtgcagggcctgattgaggactgccagctggcgctgcaggtgcgtggtgctgaagctggccagcttggggat

SEQ ID NO: 188163 - DNA, 98 bp, Homo sapiens
ggcaactcctggcacactgctcctctttctggctttcctgctcctgggtcatcgagcagctcggtgggaagcagctggtcatgaaccacatgcatcat

SEQ ID NO: 188164 - DNA, 90 bp, Homo sapiens
ctgaacttcctggacttggaagacatcaatatcctaagtgtgaacgtgaagtccccagccctgctgctgagccagttgctgccctacatg

SEQ ID NO: 188165 - DNA, 128 bp, Homo sapiens
cttctctgaggcggcgagagatggtcaggtctggagctcgaccgggccaggttgaaatcacaaagattagacacctttttagataggtgttcttcagcaccactgacaacacggttctgacagtattt

SEQ ID NO: 188166 - DNA, 100 bp, Homo sapiens
ccttaacacagtagcagctggaaccatgacaggcatgttgtataaatgtacaggatctcatctggccaccgcgttctggaagaggcgagagggagagcgt

SEQ ID NO: 188167 - DNA, 74 bp, Homo sapiens
cgtggactccctttaatccagtgactgtcaggtcgatcatatccgagtcgtccggaaatccattgcccgtgttc

SEQ ID NO: 188168 - DNA, 90 bp, Homo sapiens
gtaccaggaccctgctgcagtttcctttgtcacagcattgggatcccgtggcagttgcagcactgaagtggagaaggagacccaggagaa

SEQ ID NO: 188169 - DNA, 124 bp, Homo sapiens
gggagcggcggccgcgccatgtggctgctggggccgctgtgcctgctgctgagcagcgccgcggatatctcagtgagcctgctgacccttgtggtcactgcctgtggtctcgctctctttggcg

SEQ ID NO: 188170 - DNA, 50 bp, Homo sapiens
ggaaaccccgcctcttacagtcacgaggtggacagtctagttgcaggaaa

SEQ ID NO: 188171 - DNA, 83 bp, Homo sapiens
gatctggcccaacgatggcgagggcgccttccatggagacgcagagtcggatggcagagagcttgcgcctctttgactccatc

SEQ ID NO: 188172 - DNA, 100 bp, Homo sapiens
tggacttgaggatttacacttaaggaaggatggggaaaatgtggtggaaggagcctgggagaggccaggcctccccggactgctagcctgcttttcctgg

SEQ ID NO: 188173 - DNA, 51 bp, Homo sapiens
tctgtcgggtactatattttggcaaggtgttacctcattttgaaagtcttg

SEQ ID NO: 188174 - DNA, 98 bp, Homo sapiens
attcctgctctctttacacttacccacagggaacttggcagaaggtgatacaggtggttcagtcagattggatctggttcctcgcgtcttggaacagc

SEQ ID NO: 188175 - DNA, 100 bp, Homo sapiens
ttaccagagataattgataacaccctgtaacagctgagtgaggaattttaaattggaacaagagcaagaaaaaaacaaaatcttgtcagaagcactggag

SEQ ID NO: 188176 - DNA, 96 bp, Homo sapiens
agacgtgcagcggcaacatccagcggatcagccaagccatgaagcagccgacacgagtcgttgttcataaaacagcttttgaaagttgagagcaca

SEQ ID NO: 188177 - DNA, 100 bp, Homo sapiens
aggaaagtctgtcattctggactgcacccctacgggaacccacgaccattatatgctggaatggttccttgccgtatctgaggaacagcagcctgcactc

SEQ ID NO: 188178 - DNA, 98 bp, Homo sapiens
tcgtgtgaactatagagtttgtggacagatttatattgccccagcatgagaccagatgtaagctctcctccatccagctcctcaacagcaacaacagg

SEQ ID NO: 188179 - DNA, 90 bp, Homo sapiens
ttgagctgcagcagagggagcttgccttgaaggacaagaacagcgccgtcaccagcaggtggccaaggtggaatacgtcaggaagaagcc

SEQ ID NO: 188180 - DNA, 100 bp, Homo sapiens
caaataccccattgaacacggcatcatcaccaactgggatgacatggagaaggtgatggtaatgcccgaaggagcagacacggtgtccaggcccagtccc

SEQ ID NO: 188181 - DNA, 73 bp, Homo sapiens
cccgcggcggcgcgctcacccgccccgttcaggtggttccgagttgagacaaattacgaccactggaagccag

SEQ ID NO: 188182 - DNA, 80 bp, Homo sapiens
tgtcggcgcgggagcagcacttccacagccaagtgcgggagtccacggtggtgctgtgggtcggcctgggcgtcctggtg

SEQ ID NO: 188183 - DNA, 100 bp, Homo sapiens
ataaacttggcttcctcgcttctgctcctcagggaaatcctcattgacgattcaatttgttgaaggccaatttgtggactcctacgatccaaccatagaa

SEQ ID NO: 188184 - DNA, 100 bp, Homo sapiens
aggaagcgctggaaatagccagagagatgggcccctagaagcctgtttctccgtacagtccaggacctccagccccatggagcccccgatcccacagagc

SEQ ID NO: 188185 - DNA, 148 bp, Homo sapiens
acgccaactcttcgttcgattattagctttagtgaaatgggctaataatgctggcaaagtggaaaaatgtgcggagcctgtggtgctgaccgacacaaatcttgtgtatcctgccctgaaatgggaccttgaatacctgcaagagaat

SEQ ID NO: 188186 - DNA, 75 bp, Homo sapiens
gattgttccccagagtttggggaccccttgtcttgacagtatcatgcacagggtcatacagatgagctttggggt

SEQ ID NO: 188187 - DNA, 100 bp, Homo sapiens
aatggagaccaaaagtatgttgtaccttgtgacagaatatgccaaaaatggagaaatttttgatggatctgtctgtagaaactctgttcagcttcatgca

SEQ ID NO: 188188 - DNA, 75 bp, Homo sapiens
ccgaccagtggagtgaggctacggtcattgcaaactcggccatcagcagtgtttcagatacaccacctccaccgc

SEQ ID NO: 188189 - DNA, 74 bp, Homo sapiens
caacatccagctcctggaccttcctggaatcattgaaggcgcagcccaagcacctggtgaatactcagtaaaca

SEQ ID NO: 188190 - DNA, 87 bp, Homo sapiens
actaagagaacatttcacacctgaagcaacccaattagcatctgaacaattgcaagcactttggagtttaacccttctgccaatcca

SEQ ID NO: 188191 - DNA, 100 bp, Homo sapiens
caaacagctggctgtggatcaacttttttcagagaccttggcgataaaggtgatgacacaatgactggtgatgggggagaataccttaggcctgaggacc

SEQ ID NO: 188192 - DNA, 75 bp, Homo sapiens
acttttacctgtttggattaatatgtctctgttcaggtgcgttgtagaagacaagaactcaaaggtggcctggtt

SEQ ID NO: 188193 - DNA, 74 bp, Homo sapiens
ggatgatctacgtaaaatcagtgacttaagaataccacctaactggtaccccaatctgaagtcagtaaatgaac

SEQ ID NO: 188194 - DNA, 50 bp, Homo sapiens
gaaaggatgacaagttgggagtcacaggggacaagatgccaactggcaag

SEQ ID NO: 188195 - DNA, 83 bp, Homo sapiens
ctggaagctactactacgtggtgcttggaaagttactccacaggatccgctgaacataggatgttgccacaaaatctacctcg

SEQ ID NO: 188196 - DNA, 83 bp, Homo sapiens
cataagtggaattttggagatattcaaagactgtgaaccagaagagctgactgactggtctatggatgaaaaatgttcatttt

SEQ ID NO: 188197 - DNA, 80 bp, Homo sapiens
acgtgggcaccttgcgcttcttgcagtcgtttaaggaagaaatctctaaacgttttaaatcacatactgaccaacttgtg

SEQ ID NO: 188198 - DNA, 100 bp, Homo sapiens
ccttgaacaaacagattgcgcaaaagaccaaacatcttgaagagctcccaaaagtggcccacgaaaccttcaagtgtacaatgcaacatctaacagcctg

SEQ ID NO: 188199 - DNA, 75 bp, Homo sapiens
ccatccagctcatcgctcgcatcgctgccgccaacggggttggatggcaagcatgtggtgtttggcaaagtgaaa

SEQ ID NO: 188200 - DNA, 109 bp, Homo sapiens
gtggctctgaggtcgcctggggaccccagaagaaaccagcctggacaccaagtctgtgtcagaaggccacctcaagaggaacatcgtggtgaagaccgtggagatgcgg

SEQ ID NO: 188201 - DNA, 100 bp, Homo sapiens
taaagctgagagcttgattccagggcctgccctgctcctggtggcacccagtggcctgtactactggaagctcttcgtgggcggtcttgactggagcacg

SEQ ID NO: 188202 - DNA, 80 bp, Homo sapiens
ggccaacgagctcaacgccaggcgccgctcctttacagggcgaagctgtgctcaggcccgggctggacgcagagccagag

SEQ ID NO: 188203 - DNA, 137 bp, Homo sapiens
cagtttcaaaagaattggccaaagaagttgagaaaatgggagcagttttcatggatgcccctgtttctggtggtacatggtaggatcaacttcctgaccttgtgacagatcctgccagtaacatgagaggaaatgag

SEQ ID NO: 188204 - DNA, 100 bp, Homo sapiens
agaaaattttggtggagaattatccaacaagaaaaagacctgtggctattaagataggtccttccatagtgacgccccccaaggacatctggaatgtcac

SEQ ID NO: 188205 - DNA, 100 bp, Homo sapiens
catgcatcctgccgtcttcctatccttacccgacctcagatgctcccttctgctcctgattctgcctgatcaatgcaggagtcctgtacctctacttcag

SEQ ID NO: 188206 - DNA, 74 bp, Homo sapiens
catatttgggtccaactgtgaagccagatgataagtgaatcatctacagcctctgccctggtcgcataaatttg

SEQ ID NO: 188207 - DNA, 76 bp, Homo sapiens
gatcttctttgagaaccacccatatttcaggagtccagctacttgctcttttagttcccactttgatatcttacct

SEQ ID NO: 188208 - DNA, 98 bp, Homo sapiens
ttacagagaacaatgaagctatacagacttccagatggattggagaggtcaataagagtcagcgcctttaaaaagaaatctactcactcttctgtgtg

SEQ ID NO: 188209 - DNA, 74 bp, Homo sapiens
gctctgtaccaactgccggaaagtgctgcggaaggccggtctaattgaagccaacggagaactcaaggtcttca

SEQ ID NO: 188210 - DNA, 100 bp, Homo sapiens
cgccgattcctcctccttggtcgccgcgtccttggctggcgtcctaaatgcgatggccaggtattactgacacaagtgtggaagcgtttaaacctggtag

SEQ ID NO: 188211 - DNA, 83 bp, Homo sapiens
agtcacagtggactcccaaggggcaggcccgaggtatgaagaagcaaatcattgacgacttcatcacccgaaacaaatatcta

SEQ ID NO: 188212 - DNA, 82 bp, Homo sapiens
ttcgcctttcgctgcagtccgtcgacaatgcagatcttcgtgaagactctgactggtaagaccatcaccctcgaggttgagc

SEQ ID NO: 188213 - DNA, 98 bp, Homo sapiens
aacagttcaccaccattaccggacaagcagtgggaagagctctgttatcaatgcaatgttgtgggataaagttctccctagtgggattggccatataa

SEQ ID NO: 188214 - DNA, 100 bp, Homo sapiens
gtcactgtaagatcacaagcctgtatgtggaatgtaggtaccatctacctgttcatgtaattggacaccatgctgtgagtccttactccatagttttgcc

SEQ ID NO: 188215 - DNA, 75 bp, Homo sapiens
ggagcctagcatggaagagcgcgcgggtccggcagatgccttcaattaagttgcagagttctgatggagagatat

SEQ ID NO: 188216 - DNA, 82 bp, Homo sapiens
catcgaccagaccatgctctccatcctgctcttcttccacaggtttttagaacttcagccataaaaatgggcagaattttcc

SEQ ID NO: 188217 - DNA, 82 bp, Homo sapiens
atcggaggatttcccaagcagttgttgcacaggtaacaggatggcaatgattcagatgaattcatgtaaaaggagaaaagga

SEQ ID NO: 188218 - DNA, 99 bp, Homo sapiens
cttgagccccatcgtggattccaagacatccctgctgagagagccaagctctctattggaggcatcatcattctgaaggataccagtgaagacattgag

SEQ ID NO: 188219 - DNA, 100 bp, Homo sapiens
ggacccagaccctggagcctcagttggaagcagccgatccagcctgcggagcctgtggggcaggagaagatggggagccccgaggatgacctgattggga

SEQ ID NO: 188220 - DNA, 50 bp, Homo sapiens
tgaagagggaagacacgcggaaacaggcatgaaagatggccagaagataa

SEQ ID NO: 188221 - DNA, 99 bp, Homo sapiens
ggacattctaactcgcctgccagagagtgtggaaagactcacaggcgtgagcatctcccaggacagagcgggatgccaccagcttgtccaaagggaagt

SEQ ID NO: 188222 - DNA, 90 bp, Homo sapiens
ctgcgaccccagtcggtgctccggggaggtcacctgacgaggagtgccggtggtggtgtgcacattgagccccggtatagacagttcccc

SEQ ID NO: 188223 - DNA, 100 bp, Homo sapiens
aaattgagcaagaaatggctacattacaatatactaacccacaacttctggaggttggcatcaactaccagtcccccacagtggtgcccgggggtgctgt

SEQ ID NO: 188224 - DNA, 100 bp, Homo sapiens
tgggagccgctgggctcggaggactcggagtcggagggcttggagttccaggtgttgggggccttggaggtttttcgttggaatatacgttgcacattta

SEQ ID NO: 188225 - DNA, 101 bp, Homo sapiens
acacctgagccaggtgaagggccccgtaaattggaaggatgcacaagttccaaggttacgtttcagcaccccctgtaatggcctatcctgctactacacca

SEQ ID NO: 188226 - DNA, 58 bp, Homo sapiens
tttttgtcacctccaacaacatccgcgagatcgagcaatacgtttggtttaatattgg

SEQ ID NO: 188227 - DNA, 82 bp, Homo sapiens
cagctatgtcatcaacgggcgcaccaagatgccatggacaatattaccaggcagaaccaattctacgatacccaagtcatca

SEQ ID NO: 188228 - DNA, 82 bp, Homo sapiens
ggcgctgctggcgctctggctgtgctgcgcggcccccgcgcatgattctgaaagtcaagaagacatcatccggaatattgcc

SEQ ID NO: 188229 - DNA, 75 bp, Homo sapiens
ccaggagaaattcgccctcaaacctcaccttctccctgcatcacagagagaagcaagcagaaggcccggaggaga

SEQ ID NO: 188230 - DNA, 130 bp, Homo sapiens
gaactgttccttcagccaaagaaacaagccgtggaataggtgtatcaagtaatggtgcaaagcctgaaggcttccgttacaagatgaggtctgtgtatgctcacttccccatcaacgttgttatccagga

SEQ ID NO: 188231 - DNA, 98 bp, Homo sapiens
ccacaacctccgtctcccaggttcaagcgattctcccgcctcagcctcctgagtagcaattacagattaaaaggagcccaagccccatctcatcctag

SEQ ID NO: 188232 - DNA, 116 bp, Homo sapiens
tgaatgtaacaaatgtgatgacaagaaggagagatctctgctgcctgcattgagggagaagcctgtgtctcccaaatcaggaacactgaagagccctcccaaaggatttgatacga

SEQ ID NO: 188233 - DNA, 90 bp, Homo sapiens
aatgatggtgccactattctaaaaaacattggtgttgacaatccagcagctaaagttttagttgaggatattcctcaaagcagaaagtga

SEQ ID NO: 188234 - DNA, 100 bp, Homo sapiens
gttggcctgggtacaagcattcctcgtcagcaacatgctcctagcagaagcctatggatctggagccctcaggcagcccctccacagggcccctctcctg

SEQ ID NO: 188235 - DNA, 75 bp, Homo sapiens
gtttacagtctgactactggaaggtgaaaggtgtagcagtcactcggcctacacccacagcatcgaccttgtgaa

SEQ ID NO: 188236 - DNA, 100 bp, Homo sapiens
cacagaatttcagcagttctctgatttttatattttattcctcttcctatccaatccctgccttttgagtccaggtgatgtggacgagtgccaccgcgtg

SEQ ID NO: 188237 - DNA, 75 bp, Homo sapiens
tgcggagctgcttcgccgctgcgttacagatgtagagctaaaacgactgaaggatgctttcaagaggacctgtgg

SEQ ID NO: 188238 - DNA, 50 bp, Homo sapiens
cgtcaatcagagcgtcctgtgcgattggcatctttgcaaacgaggcattg

SEQ ID NO: 188239 - DNA, 96 bp, Homo sapiens
acagattctgttgcgaaggcagccatctttagttcgtctttcctagagaggttcacgcaaagaatctgctccacaagttttgcttccagaagaaga

SEQ ID NO: 188240 - DNA, 75 bp, Homo sapiens
gccatgtgatactccaggacaaggcttcttggacacttaatgattgttggcaagaaatgtgctgctgatctgggc

SEQ ID NO: 188241 - DNA, 100 bp, Homo sapiens
actttatcaaaaacatgattacagggacatctcaggctgagctctcatctccctgggacccgcagcatggctgagggaagcttcagcgtgcaatcggaaa

SEQ ID NO: 188242 - DNA, 128 bp, Homo sapiens
ttcacctgaatgacatctacctccatcaggaccccagatgtctgacagccctgtgtgacaccaagataagtaacttccatgccattgcagtgtcaactaggcctcagttacttttcagtttgcccaaa

SEQ ID NO: 188243 - DNA, 75 bp, Homo sapiens
ttgggtcagtggagccattgacgcagctgttccatttcctccaagtcaccggcttacagcaaaagaagtgtttga

SEQ ID NO: 188244 - DNA, 106 bp, Homo sapiens
ggcaatttccctgagaaccgtttacttccagaagattggtggagcttgatctgaagagctgttgcgcagccattggtacctgtattggggaaacatagcatacaag

SEQ ID NO: 188245 - DNA, 50 bp, Homo sapiens
cttggagtccggacatctgaaacttgacagagtcttgctctgtcacccag

SEQ ID NO: 188246 - DNA, 74 bp, Homo sapiens
cacagaggaaactctgcattctcgcttcctggaggacttatcaaactggtttcaaagcacagagctcaagtaat

SEQ ID NO: 188247 - DNA, 100 bp, Homo sapiens
aagaactcgtcatgctctttgtagcgtggtgcttctgttgctcacagaagtgcctagctgccactccatttatatgaggcaagaaggcttcctggctcat

SEQ ID NO: 188248 - DNA, 83 bp, Homo sapiens
cggcacacgcgcagccccggcctctcggcctctgccggagaaacagcgggctgacgcacgaggcacacaggaaggaggtggag

SEQ ID NO: 188249 - DNA, 80 bp, Homo sapiens
gcctcgcctcgggacccgcggtccccgctcttgctgaaataggagaaccagtgttaggaaagcagcacaacgatacctga

SEQ ID NO: 188250 - DNA, 100 bp, Homo sapiens
cgcttctcagatccccgccggaagtcccaataggggcacaaaacgtccccgggatgatgaagaggaggagcagaagatgcgtcggaaacaaactggtact

SEQ ID NO: 188251 - DNA, 75 bp, Homo sapiens
gaggcatgagaagtcccgcaagtttctgcttagcaatgtcctctccagagaaagatggaggagcgccggctgcgg

SEQ ID NO: 188252 - DNA, 74 bp, Homo sapiens
gccaggggcagccggctctggtgctcccagaagaggatcagtttgacaacttagaaaaacacacacagtgggga

SEQ ID NO: 188253 - DNA, 75 bp, Homo sapiens
gcatcatacaccggctgttcgaggccttgactgtaggctttatcctgtggataaacgcagagtgaacgagtttgg

SEQ ID NO: 188254 - DNA, 74 bp, Homo sapiens
tgatgggagagtagttgagccaaaacgtgctgtagcaagagaggaatccttaccagagatccagaaagaacatc

SEQ ID NO: 188255 - DNA, 50 bp, Homo sapiens
tcgtggacttgcagtacatcaagaaaccagaggaagccgctcatgacacc

SEQ ID NO: 188256 - DNA, 90 bp, Homo sapiens
gaacggcccaggtccccgcccgcaggtcccgggcaggacctcagcagccatgtcgaagccccatagtgaagccgggactgccttcattca

SEQ ID NO: 188257 - DNA, 100 bp, Homo sapiens
ctgcgttcgctcaccgctgtcacctgcacggtgtggctggcggcctacggactcttcaccctctgcgaggcatctgcatctgggaccgacctcctgggct

SEQ ID NO: 188258 - DNA, 100 bp, Homo sapiens
cgaggccggcacggtggccacgctgggttattctcgttcaagttaatccaggtgagactttcacaataagagcagaggatggaacacttcagtgcattca

SEQ ID NO: 188259 - DNA, 90 bp, Homo sapiens
caattttttttcaagaactgccgtcttctttgcctgcactaatgcttcctgcctgacacagctcacttcaagaagtgcacaatgtcagaa

SEQ ID NO: 188260 - DNA, 74 bp, Homo sapiens
gcagacatctacaaccttcgatctcctgacgagtctataagaaggagaaagctcgagtcatcactgaggaagag

SEQ ID NO: 188261 - DNA, 50 bp, Homo sapiens
gcctctcaaaatgctgggattacagctgaagaaggactaccttgatggcg

SEQ ID NO: 188262 - DNA, 85 bp, Homo sapiens
caaatacttgtgcactgggagaggtgaatggaagagaatccgaagaagaaaatctcaataaatctgaaataagtcaagtgtttga

SEQ ID NO: 188263 - DNA, 50 bp, Homo sapiens
agaagactcccccacatctggccgttggacataccagatggtcgaagagc

SEQ ID NO: 188264 - DNA, 90 bp, Homo sapiens
aggaaatcagaattatccactgttgcttttgacattactggagaagtcccaggataatgttatcaaaaaaaccgtgaggacatactgaat

SEQ ID NO: 188265 - DNA, 100 bp, Homo sapiens
tgaacagactagccactttgcattgactggaaacaatggcatttacagaaagagtcaacagcagtggcaacagatgccagcttggagagtcacgtgagag

SEQ ID NO: 188266 - DNA, 101 bp, Homo sapiens
gaagaataagagatgtcagttgcactccttagatacgcacaagccaaaacctttggggtttgttatccaggcataagaccaagaaattatcttcagaaaag

SEQ ID NO: 188267 - DNA, 90 bp, Homo sapiens
ttagacttgtttcttatatgtgatgccattccagcactggactcatggaggctgagcatttattcagggcatccgtttccgaggctttag

SEQ ID NO: 188268 - DNA, 98 bp, Homo sapiens
agaaagagaggaaggaggcacagagcagttggagcttgctgcctggaagaatgacggtaaaaatgcatttgcaaagggagaaaatgaaggccaaacag

SEQ ID NO: 188269 - DNA, 100 bp, Homo sapiens
cttgggttttttgtggcttccttcgttattggagccaggcctacaccccagcttctagggacctattaaaagagttcccacagcccaaaaatcttctcaa

SEQ ID NO: 188270 - DNA, 75 bp, Homo sapiens
aggtcaagctgctgctgctcggacttggatgttgtgggtgatggtatgcagtgtcctccttcacctttgcttttt

SEQ ID NO: 188271 - DNA, 82 bp, Homo sapiens
aacagtctcgttgctgcctctgtgtacgctgaggggggagcattgcagtgtcgagatggctatgaaccctgtgtaaatgaag

SEQ ID NO: 188272 - DNA, 82 bp, Homo sapiens
ctcagctccgagtccagggcgaggcagtcgacaagtactttaagcttcctcatgcttccagtaaaccaccccggatttcagg

SEQ ID NO: 188273 - DNA, 83 bp, Homo sapiens
ggcgcgggaggtgttcgagaacgaccccgagacggtgttggataaatacaaccctccagaccacttcctccctgagtcctaca

SEQ ID NO: 188274 - DNA, 123 bp, Homo sapiens
agggtccaggccatgaagagtcctgaccacaatggggaggacaacttcgcccgggacttcatgatggggtcgaggatttggtcttttgggttccatttttggaaaggatggtgtattaaacca

SEQ ID NO: 188275 - DNA, 50 bp, Homo sapiens
agtggcttggccaatggcacagggaagacatgtaaggaatttgcataaga

SEQ ID NO: 188276 - DNA, 75 bp, Homo sapiens
acagaaggggcacatggccatcccgagagtgaatatggaggtgagaccataccaggacctgcatttaatccagca

SEQ ID NO: 188277 - DNA, 100 bp, Homo sapiens
ctgatgattcagacgagtctttagataccttttttgaaatcatgaatcctgtttatagtcctggatcttctggggttccctatgcaaatgccaaaggaat

SEQ ID NO: 188278 - DNA, 75 bp, Homo sapiens
tggaggaggataacaagttttgtgcagattgccagtctaaagctggtgccgacaagaaagccgaggctggggctg

SEQ ID NO: 188279 - DNA, 100 bp, Homo sapiens
agcagggaagcatggctattgtggatgtaaaagccatgttcaagctctggattctctggagtttgaatgtttccagtattggaaccccaccaagtaggac

SEQ ID NO: 188280 - DNA, 95 bp, Homo sapiens
gcttcatcaacgatatatgtcagatctaaaggcagagatcctacaagaatccaggatgatgatcccagattgccagcgcaggttggaagccgcat

SEQ ID NO: 188281 - DNA, 51 bp, Homo sapiens
gagtgcttccccttgccgagcactgggttttgacacaagggcgcatatctt

SEQ ID NO: 188282 - DNA, 75 bp, Homo sapiens
ccatgtggaaaccattcttctgtgtatagtgtaagaccaagttcgtgcagtgcccagatggggagctccagaaac

SEQ ID NO: 188283 - DNA, 100 bp, Homo sapiens
ggaagacaacctggaccacacagactccacgggtattcaatacagggggtgcccctcggatccttgctttggactgtggcctcaagtataatcagatccg

SEQ ID NO: 188284 - DNA, 87 bp, Homo sapiens
gaaatgcgttgaggatttggcactctacttaaaaccactaagtggaggtaaagcttggctggtccattggtccaaatcatttgataa

SEQ ID NO: 188285 - DNA, 140 bp, Homo sapiens
ctgagatggagctgcgccgaggccagatcctctggttccggggcctgaaccgtatccagactcagctgtcagctgctagtgtgggtaactgtcccaccaaaaaatatatgccagctgttacttcaaccccaactgttaat

SEQ ID NO: 188286 - DNA, 80 bp, Homo sapiens
cgaactgcctatccgtcattgagacttattcatgctgtcagagggataacaaagccattgacctttgccgattgtgttgg

SEQ ID NO: 188287 - DNA, 51 bp, Homo sapiens
gcggccatggtccaaccttgaaggtgtgactgcacagaaaagttacaaaac

SEQ ID NO: 188288 - DNA, 100 bp, Homo sapiens
tcctctgttgaagcaagaagacaaactgtatggtggagaaagaagtgggaaggatctgcgcgggtgtcatggagaaactccagctgggcccagagattct

SEQ ID NO: 188289 - DNA, 75 bp, Homo sapiens
cggcgggctcctgcgagaagcaagcggaacttcctgagttggaatcgaagcctcttaaaatggcagatgacttgg

SEQ ID NO: 188290 - DNA, 98 bp, Homo sapiens
ggtaatagatgtctgacaaactaaagaaagacttgtgttacccttagattgtaagcaaaagaaatcaaggtcaagatctggaagcaagaagaaaatgc

SEQ ID NO: 188291 - DNA, 82 bp, Homo sapiens
tcgcagactacggacctgtctgggtctcagccgccaaagaccccgtccggtaggaggaggcctcggtggtaccagaagagga

SEQ ID NO: 188292 - DNA, 100 bp, Homo sapiens
atacttcttgatgaagaaggtcacatcaagttaacagcactctcgagtggaccctgaggagctcttcaccaagctcgaccgcattggcaagggctcgttt

SEQ ID NO: 188293 - DNA, 90 bp, Homo sapiens
gtggccggaggagtctcagagctgtcagaaaggtgattgcatactcggaacatcgttaccgtatctttggggaaaccatcgatattgcag

SEQ ID NO: 188294 - DNA, 124 bp, Homo sapiens
gggagcagcgggagcagccggaacgatgccggccgtgagcctcccgcccaaggagaatgcgctcttcaagcggatcttgatatcagttttagagaatgtggcgtggagaaattctcaaggaaag

SEQ ID NO: 188295 - DNA, 74 bp, Homo sapiens
cggaggagaagccggaggaggacaacgactaccaccgcagcgacgagcagcctcccgcgacgatgcccctcaac

SEQ ID NO: 188296 - DNA, 96 bp, Homo sapiens
ggaaactgcgaggcgaaggtgaccggggaccgagggaagaggcgtcctgccaaggcctggtcaggcaggagaaccaggctctgctgccaccgagtc

SEQ ID NO: 188297 - DNA, 100 bp, Homo sapiens
tacgacttagataaatatgatgaggaaggtgacccagtgtgctggaattgatgttcgtctgtgtgatgttggtgaggccatccaagaagttatggagtcc

SEQ ID NO: 188298 - DNA, 96 bp, Homo sapiens
ggatccctcagttggtcgattcaggaacatggtgcaaactgcagtggtcccagtcaagcaaaacaagctatcgatcagggaagatctccagttata

SEQ ID NO: 188299 - DNA, 75 bp, Homo sapiens
gtacgcctgcattacacctggcgggagctctggtcagtgagaaagtggcgtgtgaaaagtgccctgggagccatg

SEQ ID NO: 188300 - DNA, 100 bp, Homo sapiens
ttgggaccaagaattcctgaaagttgaccaaggaacactttttgaactcattctggcatctctcgggacaactggcacaagcgccgcaaaaccgggggca

SEQ ID NO: 188301 - DNA, 71 bp, Homo sapiens
gcagggcgttggctatgtgcccatcacagatgacgtccggttgtttgccttcgtgcgcttcaccaccgggg

SEQ ID NO: 188302 - DNA, 75 bp, Homo sapiens
accaagcggcagagattcttggtagatcaaggttatagcttcaaggtggagattctggacgcaaagacaagggag

SEQ ID NO: 188303 - DNA, 100 bp, Homo sapiens
gcctcaccctgctcttgctgctgctcctgggactagaaggacatttcatatatatggatttcacagctacactcgatccacgccccacaccacatacagg

SEQ ID NO: 188304 - DNA, 100 bp, Homo sapiens
attttcaaaatgccctgcgtagaggagttacccagggagattatacacctatggaagacagtgaagaaacctctcagtctctacaaatagatcttgggcc

SEQ ID NO: 188305 - DNA, 51 bp, Homo sapiens
ccgggccatggccgccgccgatgccgagactacgtctactttgagaactcc

SEQ ID NO: 188306 - DNA, 51 bp, Homo sapiens
aacgccccggtggagaagctgagggcaagcaggaggacttcaagacgacag

SEQ ID NO: 188307 - DNA, 100 bp, Homo sapiens
gtctcaataccgtcatattcacggggccggtgggaaagtcagcaggatgtatcccaaaccacagtttccagaggaatagctcctgcccccgccctctctg

SEQ ID NO: 188308 - DNA, 97 bp, Homo sapiens
ggctatcacaagctgcaccagcttctaaccgaggccttattggaaggagaaagtaatccagagatagtgatctgggctgagcacgttgaaaacatgc

SEQ ID NO: 188309 - DNA, 95 bp, Homo sapiens
ccaggctttggctcaaaagaatggtgaggcaggcgactaatcagattgtgatgaattgtgctgatattgatattattacagcttcatatgcacca

SEQ ID NO: 188310 - DNA, 74 bp, Homo sapiens
tgaggccggtgacatgtctgtgagctgcggaggctgcggcccccaggatgaagatttgataaagtggaaggcac

SEQ ID NO: 188311 - DNA, 100 bp, Homo sapiens
atgaacggggagcagcagcttgatgcaggcatgattccaacagaactgcagcagctctggaaagaagtgacaagtgctcatactgcagaagaaaccacag

SEQ ID NO: 188312 - DNA, 98 bp, Homo sapiens
taccagccaacactgctgacatttctcagagatttcaaatcatgaaggttgatagggtgtgatgaatgcagactctgctaccattttggctgtttgga

SEQ ID NO: 188313 - DNA, 100 bp, Homo sapiens
ccaggtgtctgagcacagcatcatcaaggacttcaccaagcagagattccatcgtgcctggctcacataagcgcttcctggaagtgaagtcgtgctgtcc

SEQ ID NO: 188314 - DNA, 100 bp, Homo sapiens
gctgtcatcacaaaagagttgattgaaattatctctggtgctgcagctctttccgatgaagttaaattccgtcaagatttaatgaatattgcgggcacaa

SEQ ID NO: 188315 - DNA, 82 bp, Homo sapiens
aggacagggtcacagactaggaaggtttttagaacttcagccataaaaatgggcagaattttccttgatcatatcggtggta

SEQ ID NO: 188316 - DNA, 75 bp, Homo sapiens
acttgcttttgcttcagcgttctgtggttgtcaacagtttgaacaaaaaagtggtgcagtttttgatgaaattgt

SEQ ID NO: 188317 - DNA, 100 bp, Homo sapiens
ggaagctcattgaagcagaggacaacatgaactgccagcgagtccctgtggcccatcgaggccagaaacgcagccattgccaatcactgcttcacctgcg

SEQ ID NO: 188318 - DNA, 127 bp, Homo sapiens
ttctctccctctgcccccccttccccacgcaaccccagatccatttacactttacaagatctgaaactggacaatgtcctgttggaccacgagggtcactgtaaactggcagacttcggaatgtgca

SEQ ID NO: 188319 - DNA, 50 bp, Homo sapiens
cttctggagagctgaccaaacactaaggggacatggatgaagctggaaac

SEQ ID NO: 188320 - DNA, 82 bp, Homo sapiens
tccggcccgggactcgggtttgggcgaccaggaggtgccggtggccgcgctcggacccggacatggatttgattgacatact

SEQ ID NO: 188321 - DNA, 83 bp, Homo sapiens
atagaagccgggattgagcgcatcaaggtgcccgtggttgacacgagctgtgtccccagctgttcccgtctacaatggcatca

SEQ ID NO: 188322 - DNA, 100 bp, Homo sapiens
cagtcatccagcgcgcctggcgaagaattcagatcaggaaggaggtggaaagaaaaagaagaaaaagaaggacaagaaacacaaaaaggataagaagcac

SEQ ID NO: 188323 - DNA, 74 bp, Homo sapiens
gcccgagcgggaagagactggagatgaggaggatgggagtcccatcgatagaagcagatttgggatatcctgga

SEQ ID NO: 188324 - DNA, 75 bp, Homo sapiens
gccaccggcttatggagcatggcatcatccagcatgacctgaagattatcggctataagagaataagaattgcag

SEQ ID NO: 188325 - DNA, 99 bp, Homo sapiens
ggctgcgccaacatgcttctcatggctgccctgtggggcctctacatgtccctggttaatgtgggccatgtctgtttccctgaaacctgggctcttgaa

SEQ ID NO: 188326 - DNA, 144 bp, Homo sapiens
tgaggtgatggcaacggccaacttcggcaagatccagatcgggatttacgtggagatcaagcgcagcgatgcaacatggccaacgccctggccagcgccacttgcgagcgctgcaagggcggctttgcgcccgctgagaagatc

SEQ ID NO: 188327 - DNA, 98 bp, Homo sapiens
cctgatttctcctgaatttggaaactatttctgttatttcaagaaaccaagaagggccaggagaaatgggaaaagctgtgttgattcctaaagatgac

SEQ ID NO: 188328 - DNA, 106 bp, Homo sapiens
catagcccaggcccggaagctggtggaacagctacgcatagaagccgggattgagcgcatcaaggtccgcgggagagctgtggggcttggtgagtgtttcgtggcc

SEQ ID NO: 188329 - DNA, 91 bp, Homo sapiens
gccgagcgggcggcttcctggcctgggcgctccggtggcggcggaggtctcctctgagcctccggcctccataagacccaaaacagatgac

SEQ ID NO: 188330 - DNA, 100 bp, Homo sapiens
tggaggagcagttgtctgatgaagagaagcaatggtacagcagttccatgaaagtcatttgcgtgtggttgactgatagattagacctccaactccatat

SEQ ID NO: 188331 - DNA, 100 bp, Homo sapiens
ctgattttagaattcaccagctcctcagaagtttggcgaaatatgatgggccaaggttgctcgggtgattggtttactggcttcgcacaaaactgatctc

SEQ ID NO: 188332 - DNA, 132 bp, Homo sapiens
cggagagagaaggaaggaggtggttgtgcaggatggcgacggcggcctacgagcagctgaagctttgtcgccgtgatcctgaaggcgctgacctacgacgagaagcggggtgcctgcagcgtgggcaccaac

SEQ ID NO: 188333 - DNA, 101 bp, Homo sapiens
gagatcctggacctatgaatatccagtttgagccatcggatctaagatccaaaagtcttcccaagggattgttgaagaaacttctgaagagggaaactctg

SEQ ID NO: 188334 - DNA, 74 bp, Homo sapiens
gaaaagcgaggcaaggcaggcggattcacaatgacatcctttcaagaagtcccattgcagacttccaactttgc

SEQ ID NO: 188335 - DNA, 75 bp, Homo sapiens
agatttcccaagagcagcggaaaatgatccagtcacaggccgagacgcatccagagctttcgtgaccggggactg

SEQ ID NO: 188336 - DNA, 101 bp, Homo sapiens
ggatgtggttctggatgacgagaatccactcaccggagagatgtcgagtgacatctatgtgaagagcttagcccgaaacagagccaagccagcccacctaa

SEQ ID NO: 188337 - DNA, 75 bp, Homo sapiens
tcccccatcccccacagtgcaccctgctggtgaaggacaaggatgaaactgattccaagacagcctccccgtgga

SEQ ID NO: 188338 - DNA, 91 bp, Homo sapiens
ctcaatatctgtcttcggtggactccttcggcagtccacccaccgccgccgcctcccaggatcccatgacagattctgttgtcacgtctcc

SEQ ID NO: 188339 - DNA, 75 bp, Homo sapiens
gttacaacacccacgagaagagaatctaccagtccaatatgctaaatagtaatgttgcaggtcagtggaatccag

SEQ ID NO: 188340 - DNA, 100 bp, Homo sapiens
gagcaaagcaagacttgtttgaacccagcagtgccaacacggaggataaaatggaggtggacctgagtgaacgagctccttcccttaacagagctgagag

SEQ ID NO: 188341 - DNA, 75 bp, Homo sapiens
ctgttgcagccatggtgcattgcagttgcgtgttgttcagaaagttgtcgagatgtccacagaaggaggatttgg

SEQ ID NO: 188342 - DNA, 78 bp, Homo sapiens
tctttaaggcaggagctgatgaagagagagcagagacagctcgtctgccgtggggccaattttttaactcagatcttg

SEQ ID NO: 188343 - DNA, 98 bp, Homo sapiens
ggagaacttccgctttggaaaccctctgcacattgcccagaagcttttccgagttttgcaggcaactttgagggaagagaagaaacttcgagttgaaa

SEQ ID NO: 188344 - DNA, 115 bp, Homo sapiens
gtcggcggctcagttgtccatgaccctgaaggtccaggagtacccgaccctcaaggacggggaggtttactgcatcgacgcgcggttctacgggaacgtcagccggttcatcaac

SEQ ID NO: 188345 - DNA, 98 bp, Homo sapiens
cgcggcgcctcatgaacctgcataacaatgaggccggcaggaagaaaatacaagattttggagggcagaaatgaatcagcattaaaaacaacactagc

SEQ ID NO: 188346 - DNA, 72 bp, Homo sapiens
gttgctgtgctccaaggacacacaggatcaattacatctttacagatgagtgatgtgtctgcaggaggagcc

SEQ ID NO: 188347 - DNA, 61 bp, Homo sapiens
gatccgactacaactacgagagcaaattcacttcgaggcagagaatgggccgacaccatct

SEQ ID NO: 188348 - DNA, 75 bp, Homo sapiens
ctggctgttagaagaattcatgctcatccgggtttactcctggcttgggggcattaggaagcactggaggctctt

SEQ ID NO: 188349 - DNA, 90 bp, Homo sapiens
atggagagaaaattgtggtccagggagagcctggggacgacttttacatcatcacggaggctctggctgggctttgaccttcgctccgac

SEQ ID NO: 188350 - DNA, 133 bp, Homo sapiens
ctggaggtcaacgaggccgagctgctgcggcgccgcaactttaaagtcatgatctaccagagggctctgaactcctacttcgagcctccggtggaggagagcgccttggaacgccgacctgaaaccatctctg

SEQ ID NO: 188351 - DNA, 100 bp, Homo sapiens
gctgcatcaggacgtggacttggtgtgcattaacctgccgccgcccctcaccagacagatcgctgtcaaaaccctagatgggaccatctagttgcaggaa

SEQ ID NO: 188352 - DNA, 82 bp, Homo sapiens
ccgccagcacgcgcctgcttcccgtctgcgcgagtccacgcagctccccagagcaaatttttcagaacataaaacaagaata

SEQ ID NO: 188353 - DNA, 127 bp, Homo sapiens
ctggggagtcttgagggacccccgactccaagcgcgaaaaccccggatggtgaggagcagacaatgcagatcttcgtgaagactctgactggtaagaccatcaccctcgaggttgagcccagtgaca

SEQ ID NO: 188354 - DNA, 82 bp, Homo sapiens
cggtggtgtgctcgagcaaccagaaccggagcatggaggcgcacaacatcctcagatccatctgtgtgtgctgtggaattca

SEQ ID NO: 188355 - DNA, 82 bp, Homo sapiens
cgcgctgctactgggcgccgcgggccacctgtaccccggagaggacggccgaagccctgcagcccacgctacagccggagat

SEQ ID NO: 188356 - DNA, 99 bp, Homo sapiens
cccactccggattcctccacaccacccacacaccagtcggcagcctccctgtactaaggctcgtacgtctgcatcgattatcttacgtggggcaaatga

SEQ ID NO: 188357 - DNA, 101 bp, Homo sapiens
aagaagataataatgctagcagagagagcccaccatgaggctattgtctggaagagcctgtattgtcctcacaatagtatagaagaattcaagagaggaga

SEQ ID NO: 188358 - DNA, 100 bp, Homo sapiens
ccgcgcccactgcgtgcggcgccacggaccatgtcggacttcatcacctgattcttccaatgagaattccgtagcaactcctcctccagaggaacaaggg

SEQ ID NO: 188359 - DNA, 75 bp, Homo sapiens
caggacatcctggaacctgggaaagggtgtctgatgatttgtgagcctcaagtgactactctgtggaatcatctg

SEQ ID NO: 188360 - DNA, 82 bp, Homo sapiens
cgctcacctgcgctgtgatgcctgcagagctgtggcttaccaggtgccacttcggataaaccctttggactcctaactccaa

SEQ ID NO: 188361 - DNA, 100 bp, Homo sapiens
atcggagaataatttctttctcgctgatcgcctaacttctactgacgaagcttggaagttgcagaagcctcaagtactacagccttccagcagccttccc

SEQ ID NO: 188362 - DNA, 74 bp, Homo sapiens
ttgaagtgcttggagtgcagaactgaaagagctctgcattctccagactctgtgctttcctaagataggaaccc

SEQ ID NO: 188363 - DNA, 94 bp, Homo sapiens
ccgcgcggagcgccccttcgcgtcccctgcaccatgagctggggcaccgagctctggggactggtgattgcagctggaagtgcccatgaccgag

SEQ ID NO: 188364 - DNA, 100 bp, Homo sapiens
agctggttacccagcagttgccccatctgctcaagccacagatccatgatgtgcagttctctggagcaggcgctggctgtgctggtcactaccttccaca

SEQ ID NO: 188365 - DNA, 74 bp, Homo sapiens
caacatcctcctggccaccgactcctacaagccattcaaactcctccccacgacactctgaagcagcgacggca

SEQ ID NO: 188366 - DNA, 90 bp, Homo sapiens
gagaagaagcgcaggcacaggaagctggtgacggcgatgaacggggaacgcccttttgcttgtgactggcagggctgcgacaagaagttc

SEQ ID NO: 188367 - DNA, 100 bp, Homo sapiens
tgtgactggggcaggaccatcaggaagaagagtgacaggaccaccctagattcacaggaaggggactacacaacgttatgaacaccaagaggcggttcac

SEQ ID NO: 188368 - DNA, 100 bp, Homo sapiens
gcgcgaacgagcgacggcggaacccgtgggcctgtggactgcagcctcggcggtcagcaggttcacctttccttgccagtgaagatggcgtgcttggcgg

SEQ ID NO: 188369 - DNA, 143 bp, Homo sapiens
cgaggcgaatcggctgcggtttgctgggaacggagggctgcagcgcccaccctgcgccagagaccagataaagcaaatgtgcaataccaacatgtctgtacctactgatggtgctgtaaccacctcacagattccagcttcgg

SEQ ID NO: 188370 - DNA, 89 bp, Homo sapiens
tgacagtctgcatgtgcagttttcaggaatggcggcgctagatagtaaggcatcagggaagatgggaatgcgagctgtagtctattata

SEQ ID NO: 188371 - DNA, 83 bp, Homo sapiens
caggaacagaggacagtgagtcgctctcgtccctccagacaatgcagatcttcgtgaagactctgactggtaagaccatcacc

SEQ ID NO: 188372 - DNA, 75 bp, Homo sapiens
caggattccacagtgtcctctggaaaatggtcatgcagaaggcttttgtatgatgtgtacaatgcaagcacatat

SEQ ID NO: 188373 - DNA, 89 bp, Homo sapiens
ggacgacgaggagcagggcctgactgcgcagagtcattcaggagagcaggaaagaaaaggccatccctgtggatgtcgcgctgccacag

SEQ ID NO: 188374 - DNA, 75 bp, Homo sapiens
ccaggagaggcggggtcggcgggagccagcgagccacgggagcgagccagggggcaagcgcgatgaagagctggt

SEQ ID NO: 188375 - DNA, 75 bp, Homo sapiens
ggttccttaaatgtcgaagaaggggcttctgaagaccttaagactcatatggttgtggctaatacaatggaagac

SEQ ID NO: 188376 - DNA, 100 bp, Homo sapiens
ctgtggagaaggcgctccggggcgaagcaggtaccgctagagcgacatgatggtggaatctgcctcggagacaatcaggtcggctccatctggtcagaat

SEQ ID NO: 188377 - DNA, 97 bp, Homo sapiens
tgggaagtgaagtcagtgcctcagttgctgagaatggatcttggagaatgtctgaaagtccatgacctggctttaagagcggattatgaaattgcat

SEQ ID NO: 188378 - DNA, 101 bp, Homo sapiens
ccgggccagcctggggcggccggccaggaaccacccgttaagaaaacctttccaacctatgagagaaagagatgtgaagaaagaagacgggtcatagagat

SEQ ID NO: 188379 - DNA, 100 bp, Homo sapiens
ctgaaatctggagtgaagaacgccgccatccagccaccattccaaggaggaagacagcgaacccctcccaccacaggatgcccagacctctgggtcactg

SEQ ID NO: 188380 - DNA, 97 bp, Homo sapiens
ggcaactgcagcccgaggacaagcggctgtgcaatggatgagcttcatagtctggatccaagaaggcaagagttattggaagctagatttactggag

SEQ ID NO: 188381 - DNA, 75 bp, Homo sapiens
gtcctctccaaactttgacctgagtgagtgacctgcaggaagaaggcaagaatgccatcaactcaccgatgtccc

SEQ ID NO: 188382 - DNA, 100 bp, Homo sapiens
gaaagcggcttatcgaacagagccgggagttcaagaagaacactccagagtgctacacacgcagggccctgtcgatggcagcctttacgcgaaggtgagg

SEQ ID NO: 188383 - DNA, 82 bp, Homo sapiens
agtggaggcgccgctctagcggccgggactctgaactatggcgatgccatggacaatattaccaggcagaaccaattctacg

SEQ ID NO: 188384 - DNA, 98 bp, Homo sapiens
atcatccgcctcaccacgagctacctgaagatgcgcgccgtcttccccgaaggaagatgaagtcctcagtacattctgaagaagatgattttgttcca

SEQ ID NO: 188385 - DNA, 90 bp, Homo sapiens
catggagtctccctcggcccctccccacagatggtgcatcccctggcagaggctcctgctcacagggagtggttttcagagacatttcag

SEQ ID NO: 188386 - DNA, 50 bp, Homo sapiens
gttcctggtgatattgtagaaattgctgaatgggaggtacagaatcgtat

SEQ ID NO: 188387 - DNA, 100 bp, Homo sapiens
cgcactgctcatcttggccatcactatacacaacgttccagctgggaacttctggggtaggacgttgtctgctatctccagttccacagacccaaccagt

SEQ ID NO: 188388 - DNA, 78 bp, Homo sapiens
gattctgaggaccagcagatggccagtcacgagaacccaggtgtttgagaagtcccccctgcgggtgaagaacttcgg

SEQ ID NO: 188389 - DNA, 101 bp, Homo sapiens
aaccaaggaacctgctttgatgacataagtggctacacttgccactgtgtgctgccatacacagatattgatgatgttaagaagttcaaaccgggttacct

SEQ ID NO: 188390 - DNA, 100 bp, Homo sapiens
ccagaacaacccccacgccagctacagcgcccctccggtgctggagaaccggaccaaggactccaagctggagatggaggtgctggagaacctccaggag

SEQ ID NO: 188391 - DNA, 90 bp, Homo sapiens
ccgagacacctactcagagaagtccctccaccggctctgtggtcctactgctctgttggctcatgaaataggttttggaagtaaagttac

SEQ ID NO: 188392 - DNA, 100 bp, Homo sapiens
tatcacacctgtattggcctgccaggacagagtgctcagagttttacaggttaacgtccctaaaacccgccggactttctgtaagaagtgtggcaagcac

SEQ ID NO: 188393 - DNA, 100 bp, Homo sapiens
acaaatgaaatcatgtgatgacgaagatgattacagtttaaggtctctccttacggggccagggcaatttcttttcgttcttgcccgtgttgaactgggc

SEQ ID NO: 188394 - DNA, 97 bp, Homo sapiens
cccgcgcctgggctgccggcacttcgcggcagctctccacacaaggagatgcaagtcaggtgattgggcctcttactgaaggacagagaagaaatgt

SEQ ID NO: 188395 - DNA, 82 bp, Homo sapiens
tggtggaacagctacgcatagaagccgggattgagcgcatcaaggaaggcaacagcccccaggggagcaaccagggagtcaa

SEQ ID NO: 188396 - DNA, 100 bp, Homo sapiens
ggccccaggcctcctgtgggacgccagtcaccagcaggagcagccaaccagcagcagccatcatggagtgggctcgggatgagtttgaaggcctcttcaa

SEQ ID NO: 188397 - DNA, 100 bp, Homo sapiens
ccccatgccctggctgttcccacctgactttgaaggtggaattctcatcaacagttgtggaatatggttgctccttgagggcaggacagttcttatggct

SEQ ID NO: 188398 - DNA, 100 bp, Homo sapiens
aaggcttctggggagataaaaattgcctatacttactctgttagcttcgaggagtccaggcatgataaagaaaagatagaaaagaaagagaaacgggaca

SEQ ID NO: 188399 - DNA, 83 bp, Homo sapiens
caggcgcaagcgcagagagcggaggcggtggtggtggcggccgctggccagtgtggtataagttgaaatccaaaccaggaaag

SEQ ID NO: 188400 - DNA, 101 bp, Homo sapiens
aatggaaaaagataaagtgaagattcatggaatattgtccaatactcatcggcaagctgcaaattccctgaccaggagcgcacccctccccaacgactccc

SEQ ID NO: 188401 - DNA, 83 bp, Homo sapiens
taacgagattcaagattatttgcaacagctcacgggagcaagaacggtactctcgcctccgccagtggaacaccctctatctg

SEQ ID NO: 188402 - DNA, 111 bp, Homo sapiens
gtgagacttcgagagccctgtcatcttctaaacagagcagcagcagcagagatgataacatgtttcagaaattattcttgacagaagtattttaaaagaaaaatctttacg

SEQ ID NO: 188403 - DNA, 100 bp, Homo sapiens
acgtgaaggagaaattcgactatggcaacaagtacaagcggcgggtgccccggagccaaatctcctcagccacctgttgaagaagaagatgaacacttcg

SEQ ID NO: 188404 - DNA, 75 bp, Homo sapiens
aagacattgtagaagctgccagaggagccacagaaaacagtgtttacttggagactaaggtgtcagtatgttctt

SEQ ID NO: 188405 - DNA, 96 bp, Homo sapiens
gggaggtgaatttccatgtcaacatagtcctgttgatcacagccgagttaaattgacattaaagactccttcacaagattcagactatatcaatgc

SEQ ID NO: 188406 - DNA, 98 bp, Homo sapiens
ccgccctgggccgggccccaccggacggtgaacctgttctctgacccaccccagcccaaccacagcatccacacgggaatggtgccccaggggaccaa

SEQ ID NO: 188407 - DNA, 82 bp, Homo sapiens
tgcagttgttgctctaggagctgaaaccagtgggtagatgtcgttctgaaacgcaggacccattccaacaatctcgtaaaac

SEQ ID NO: 188408 - DNA, 99 bp, Homo sapiens
cctggtggacgtgcacccagaggaccaggcggcggaccttctaccgctttgaggctgtgtgggatagctctctgcataactcccttcttctgaaccgag

SEQ ID NO: 188409 - DNA, 75 bp, Homo sapiens
ggtggccgctagctccaaggaagcaaagaatggctcaagaagtactgacacatttaaaggagcatcctgatgctt

SEQ ID NO: 188410 - DNA, 82 bp, Homo sapiens
gcaactccagggtgtctggtccacgacctatcctaggcgccatgatgcctgaggaagtgcaccatggagaggaggaggtgga

SEQ ID NO: 188411 - DNA, 80 bp, Homo sapiens
agaagaattcatgctcatccggatgcagcagcttttttatgagaattacgagcagaacaaaaaggggtacattagagatc

SEQ ID NO: 188412 - DNA, 74 bp, Homo sapiens
ctatgttgggagtgttcgctttcgaggtggatgaaaatactaggaaaagtttatttaagttacgttctacatgg

SEQ ID NO: 188413 - DNA, 82 bp, Homo sapiens
tcacacaagctaaagacgggccattttccagacctcatccaggacagagcgggatgccaccagcttgtccaaagggaagttc

SEQ ID NO: 188414 - DNA, 50 bp, Homo sapiens
gccggctcggtggaggcggtggccagatcaaagaaatcggctggacagat

SEQ ID NO: 188415 - DNA, 75 bp, Homo sapiens
gcttcaaaagccagactggaactgagggaagagaatcccttgaaccacaacgtgcagtagacattgaaaccagag

SEQ ID NO: 188416 - DNA, 100 bp, Homo sapiens
ttgaggcccctggacaagctgcccggcctgaacacggccaccatcttgctccaaagacaacaggccctccctctgccctcccgtctgtgagctccctgcc

SEQ ID NO: 188417 - DNA, 75 bp, Homo sapiens
gatgagaccaaaatcattctggaaggtgtcttgctgcaggtaactaatgaagaagtggtcaaccacagagtcttc

SEQ ID NO: 188418 - DNA, 100 bp, Homo sapiens
ccagaaagagctgaaccacatgctgtcgacagagtgcaagacgatgacttgcaaaatgtcgcagctggaacgcaacatagagaccatcatcaacaccttc

SEQ ID NO: 188419 - DNA, 75 bp, Homo sapiens
tggacacccagcctgagcaagcgccacagaagcctcgtctcctggaggaaaatgcacaggagaaaacgacgctcc

SEQ ID NO: 188420 - DNA, 100 bp, Homo sapiens
ttggaacctcactgaaaattggtattgttggattgccaaatgttgggaataggaggccttcaagattttgtgctgaaatctgcaacactgtgtagcctgc

SEQ ID NO: 188421 - DNA, 100 bp, Homo sapiens
ggccgcgccgcagagatgtgactcgggccgaaggccagctggagcgtcggcgctgcggggccgcgggggtcggttttgaagtacaggaagaaggttatct

SEQ ID NO: 188422 - DNA, 76 bp, Homo sapiens
ttccccggaatcgtgtgctgggctggtcccccttggctgtgtacatgatgccaaccgagggggatgattcgtctaa

SEQ ID NO: 188423 - DNA, 101 bp, Homo sapiens
cggagcccgggaggggccgcgccgccaccgtctgaactaggatgtcccgacatgaagctcctgcgccgagtgcctgaagttcgaaaagggcccctttggga

SEQ ID NO: 188424 - DNA, 100 bp, Homo sapiens
ttttcaccactttgggattgctctaccacaactggaaacaagctcacatcttcctgtgggaaaccttctagcaacaggatgagtctgcagtggactgcag

SEQ ID NO: 188425 - DNA, 88 bp, Homo sapiens
cctgaggctgcaccaagtggcgaaggagccggctccaagggcgtgatggtgggcatgggtcagaaggattcctatgtgggcgacgagg

SEQ ID NO: 188426 - DNA, 127 bp, Homo sapiens
agttcctattgattcatcagattttgcattggatattcgcatgcctggggttacacctaaacagagatggtgaattgtctttgagtcggtcacttgtcaatagctctgataaaatcattcgaaaggc

SEQ ID NO: 188427 - DNA, 82 bp, Homo sapiens
gcggacatggtcatgagctttgtgaacctggattacttctctaacaggatcaccagtttgctccacaaagcacaatgtctcg

SEQ ID NO: 188428 - DNA, 75 bp, Homo sapiens
agaactcccacaatgccacaggaggaggcagcagggaaattggattccaagatccatcaaggagcaaagaagggg

SEQ ID NO: 188429 - DNA, 83 bp, Homo sapiens
ctagaatcaactgagagagatgcttaaaaatcaccagttactttaatgatcttgactcgtctgctgaacaaatcctctgacct

SEQ ID NO: 188430 - DNA, 97 bp, Homo sapiens
aaggaggagattctgaagataaggagccgtgttgaaatccttgtctcctgtagacccagtggaacccataagtaattcagaaccatcaatgaattca

SEQ ID NO: 188431 - DNA, 75 bp, Homo sapiens
tgctcgcacgggagccagctgggtgatatggaatgtgcagatgtcccactattaactccaagcagcaaagaaatg

SEQ ID NO: 188432 - DNA, 100 bp, Homo sapiens
cggaaatctggaaccgggatggcgacgtctacactgagtcggaggcgaaggatgaaaaggagcagcttatacagtccaagagttccgttgccagtctcgt

SEQ ID NO: 188433 - DNA, 82 bp, Homo sapiens
aagcgtctccgttgggtccggccgctctgcgggactctgaggaaaagctcgcaccagtggtcccaggctgcacccatggcag

SEQ ID NO: 188434 - DNA, 100 bp, Homo sapiens
ccggcttttgggggatcactgtcctctctcggcagcagcaattctgtggtgttcttggtcacacatttatggagtttctgaagggcagtggagattactg

SEQ ID NO: 188435 - DNA, 51 bp, Homo sapiens
tggactttgggcgtcccattgccatggctattcaagatctctggcagtgga

SEQ ID NO: 188436 - DNA, 100 bp, Homo sapiens
cgaagatcgagtaggaactgcaggggaaatggaaagtgaaaggtgtagcagtcactcggcctacacccacagcatcgaccttgtgaacccagcgacctga

SEQ ID NO: 188437 - DNA, 96 bp, Homo sapiens
tgctggctcagtacatattcaccttgaagaggaagacggggcggaagaccaagatcatcgagatggtcgagatttaatttgcatccagtctatgga

SEQ ID NO: 188438 - DNA, 75 bp, Homo sapiens
ctcctgttacctcctcctatgaaggaattacgagtgaaggtggaagttaaacgagctgagcctcgggacagcaag

SEQ ID NO: 188439 - DNA, 51 bp, Homo sapiens
caaaaagacacttatactatgaaagagcaacaagtggtcctggtggcatcc

SEQ ID NO: 188440 - DNA, 97 bp, Homo sapiens
tgatgaattttgtcctgttttggatgcaacatttgtaatggtggctcgtgattctgaaaataaaggagtttcgctcttgttgccccggctggagtgc

SEQ ID NO: 188441 - DNA, 100 bp, Homo sapiens
ttcgtctcttacgtctgcggaagtgcagctgcctcagttcttagcgcagaacgtgttacgagtcagtttttagtgaaaaaacattgagctaggagccaag

SEQ ID NO: 188442 - DNA, 83 bp, Homo sapiens
cccggacccgcggcgccggcctcttggagtcggagcttcgcgacggcagcggcaagaaggttcttctgtgtggcagttcagaa

SEQ ID NO: 188443 - DNA, 75 bp, Homo sapiens
cgaccttctggtttgtaaagatgaaaatgggcagagaaagcaaccagcacgtgtggttctcaaatataggcattc

SEQ ID NO: 188444 - DNA, 82 bp, Homo sapiens
ggaaccctggtcaccgtctcctcaggagccaaaaacctgtatatcatctccgtgaaggggatcaagggacggctgaacagac

SEQ ID NO: 188445 - DNA, 100 bp, Homo sapiens
tgaagaagtgatgtgtttaaatggaaactggacggaaccacctcaatgcaaagttattaatgaagtgtggcaagaagaaacaattgggcgtctactacaa

SEQ ID NO: 188446 - DNA, 115 bp, Homo sapiens
ggccacgcccggggccaccctccccaagtccccatctcaggtatgttctcctacgtcatgctggccagcagccctctcttctgctcccctgagtggcctcggaagctggtgtcct

SEQ ID NO: 188447 - DNA, 96 bp, Homo sapiens
gcagtcccagcgccaccgggcagcagcggcgccgtgctcgctccagatttatcagcaagactgttgaacgcataactgcccaagatgcctgtccct

SEQ ID NO: 188448 - DNA, 75 bp, Homo sapiens
gctggaagggaaggaaaaacctgtatgtggaaccacctgtcttgccaagaaatattgctgttccttactgccaac

SEQ ID NO: 188449 - DNA, 51 bp, Homo sapiens
gtcctgtacagcatcgccgagaagaaatctcctgcaaagaagctgagccat

SEQ ID NO: 188450 - DNA, 97 bp, Homo sapiens
tgcccaaccccctcctgacttatgagctctatgagaaattcacgattgattcatggtgcaaagatcatagctacgtgattgctggttattatcaagc

SEQ ID NO: 188451 - DNA, 100 bp, Homo sapiens
gagctggccatggtgccccactatggtggcatcaaccgagttcggagatcacccctgacctgctacctcggccgccccggttgcttctattggtcaatcc

SEQ ID NO: 188452 - DNA, 89 bp, Homo sapiens
tacagcaaggtttactctgaatcccaatcctacaggagttcaaaacccacacataaatttggagacagacaacttgtcacgcatacagg

SEQ ID NO: 188453 - DNA, 82 bp, Homo sapiens
atcgacgtcgtgatccagaagtccagagctgaggactgcctgtttgcagatgacgacaacccccccgtgtcttttgtgaagt

SEQ ID NO: 188454 - DNA, 50 bp, Homo sapiens
ctcccgagtagctgcgactacagataaacaggggtcacatgacgacagaa

SEQ ID NO: 188455 - DNA, 75 bp, Homo sapiens
ctcggctggcctctgcgcctttctctcatcccgtttgcaggcctttcagatatatccatctcacaagacatcccc

SEQ ID NO: 188456 - DNA, 100 bp, Homo sapiens
gtggaacacccctggcacaacaacgagattctacaagcctctgtagatggtccagaagagaagctgaatttggacgacagccagtgggaggacatccacg

SEQ ID NO: 188457 - DNA, 85 bp, Homo sapiens
tgtttgcaaaatggatggtcagcacaaccaatttgcattactcagaattctgcaaatgcagattttgcaaactttgatgcatttg

SEQ ID NO: 188458 - DNA, 74 bp, Homo sapiens
caaggatgaacattctgccgaagagaacaagacgtgtgaagactcaggtgctgccagtgggtactgaacttcca

SEQ ID NO: 188459 - DNA, 82 bp, Homo sapiens
atccagccttagcaaaccagaggtcatggaaaatggaagatttgcaaaatacaaatattttacccatgtcatgatcaataag

SEQ ID NO: 188460 - DNA, 82 bp, Homo sapiens
gtccctaaaattgccaaggaactgggatttcaacctgaaagtggaggctgcgaaaataggagcagcctcagaacaaagtgag

SEQ ID NO: 188461 - DNA, 98 bp, Homo sapiens
cccctgtcttccccaacgccccggagccgccggccgctagcgtcagcgccagccaggtggaagttgatgggtcgaaactaaatgtgaccagcacgtgg

SEQ ID NO: 188462 - DNA, 83 bp, Homo sapiens
cagccgcacgcggagcccggcggctactcggggccggacggacattgtgcgcgcggagccatggttatcatgtcggagttcag

SEQ ID NO: 188463 - DNA, 98 bp, Homo sapiens
agaaccgtggagtcagaatgcctgcatgcagatctcatcaccatgggctgaagactttaagtgacaagtcaagagaagcaaaagtgaaaagcaaaccc

SEQ ID NO: 188464 - DNA, 83 bp, Homo sapiens
tctcactctgttaaagctggtctgttctaactgaggttcgatacaagaggctgttttcctagcgtggcttgctgcctttggta

SEQ ID NO: 188465 - DNA, 98 bp, Homo sapiens
tgcactggaggcggtgcgaccttgcggggcggtgcaagctggcggaacccgcgtgagagaggcagagaagaggcgatggcggcgatggcatctctcgg

SEQ ID NO: 188466 - DNA, 100 bp, Homo sapiens
agcttggccttggagcgaggctatcacaagctgcaccagcttctaaccgaaaataatagtgtaatccttgctgatgaaatgggcctaggaaagaccatcc

SEQ ID NO: 188467 - DNA, 78 bp, Homo sapiens
ggagggaccaaggtggagatcaaacgtacaccaggggttggaaaaaccacactaggcaaagaacttgcgtcaaaatca

SEQ ID NO: 188468 - DNA, 100 bp, Homo sapiens
cgcggatgacgagtggctggataacatggagtcgggcaagatggcgcctcccaagaacgctccgagagatgccttggagctgatctacaaagaattcttc

SEQ ID NO: 188469 - DNA, 118 bp, Homo sapiens
catgtgatgacaatcttactgaagagccattttttcaccatgctaaaaaggcccgatgagagaaagggaaagttaaggatgctggagcagaacaatggatttctctttctctttcatg

SEQ ID NO: 188470 - DNA, 105 bp, Homo sapiens
cagcgggtcttgggtcctccgagagcagcagcggttgaagctgatctgggctatccaggtggaaaggcgaaagtcatccataaggaatctgatatgatcatggca

SEQ ID NO: 188471 - DNA, 100 bp, Homo sapiens
acctttgcccaaatccaaaccagaactgtcatacataaagtacacagaaatgaagagaaaagtcgtgaatactcacaagctgagattgagtcctaatgag

SEQ ID NO: 188472 - DNA, 75 bp, Homo sapiens
agcagcaccaaatccaagatggcggccagcaggaggctgatgaagccccgtcgcagaatttagtctcaaaggaaa

SEQ ID NO: 188473 - DNA, 75 bp, Homo sapiens
ccctgaaggatcctctctatcagattgatctgcaggtctatctgactgttttgaagcatggtgatggcactactt

SEQ ID NO: 188474 - DNA, 88 bp, Homo sapiens
tgggaccagtgtgaatttggaagggatcgtgtggcatgaaacagaagaaggatggacaaccggaaattttctacacattttggaattc

SEQ ID NO: 188475 - DNA, 109 bp, Homo sapiens
tggaaagtggaaacaacaattatgaaacaacctggcccatgagatgatagctgtggaaggtgtgtgttcctgccagacaacggcgccttctttgtcaactacgtgatca

SEQ ID NO: 188476 - DNA, 50 bp, Homo sapiens
gagatggcccaacggatggaacaggcaattgccttgcctcctattgcaaa

SEQ ID NO: 188477 - DNA, 83 bp, Homo sapiens
gcgggcggcttcctggcctgggcgctccggtggcggcggagggcgcggatggcgtcggggcgccccgaggagctgtgggaggc

SEQ ID NO: 188478 - DNA, 98 bp, Homo sapiens
agagattgtctcggctcttgagtacttgcactcgcgggacgtggtataccgcgacatcaagagggctgaggactatgggcctgtggaggtgatctccc

SEQ ID NO: 188479 - DNA, 100 bp, Homo sapiens
tcaacgccagcagctccctctgccctatgaacagcttaagcacttttaccgaaaaccttctccccagatttccacaagacggcaccctatgtcgtcactg

SEQ ID NO: 188480 - DNA, 100 bp, Homo sapiens
tcaatgaaacaatattaaattatgaagatgtaaggaaaaaatcctacgctaacactgtcgcagtttgaaagatacattatggtgccgagtggtaacatgg

SEQ ID NO: 188481 - DNA, 95 bp, Homo sapiens
ggttcggagtcaccactcgcaaacaccactgggaagaaggagaaagggccaacccctgaagaagcaatacagaaactgaaggagacagagaagat

SEQ ID NO: 188482 - DNA, 83 bp, Homo sapiens
ggctatgcagctatcgtggacgtcactggccctggtggggattgacagccacgggaagcggaatcggacatgtccaaaccacc

SEQ ID NO: 188483 - DNA, 80 bp, Homo sapiens
cacgacgtggacttctacaaggcccgcatggaggagccattccgtagtgccatcccgagcaacgcactgctgcagcttcc

SEQ ID NO: 188484 - DNA, 51 bp, Homo sapiens
tccgattccgccaccagatggcactagcgctcctggttgcagccagaatgc

SEQ ID NO: 188485 - DNA, 82 bp, Homo sapiens
cctgtgtcctggttgagggtctccagggttctttggggcccgagtatccatttgaggccctcttccgcagccagcactacgc

SEQ ID NO: 188486 - DNA, 98 bp, Homo sapiens
gggactggaggacgagcaaaagatgcttaccgaatccggagatcctgaggaggacgtgttcctcatgatccggcgccacaagaccaccatcttcacgg

SEQ ID NO: 188487 - DNA, 83 bp, Homo sapiens
ccgcgcgcagggcctgcagcgggagctggacggcgagcgcgagcggcgcgagaaacgtctgttcctcacacaccccgcccaag

SEQ ID NO: 188488 - DNA, 100 bp, Homo sapiens
gccagcctgctcgaaactttagtcggcctgatggcttagaggactctgaggatagcaaagttccagtacaatggtcagatatggtcactttgaaagccag

SEQ ID NO: 188489 - DNA, 76 bp, Homo sapiens
tgtggcaaaacgaaaaagctcaatgcctcagaaattcattgatatccttggaacagaagatcttattgtggaagtg

SEQ ID NO: 188490 - DNA, 101 bp, Homo sapiens
gtgacatcaagctctgtgagggtttcaatgaggtgctgaaacagtgccgacttgcaaacggagaatggccaccagtccttactgagcagcgatgatcaact

SEQ ID NO: 188491 - DNA, 90 bp, Homo sapiens
tgctgctttaggcccttctggctttggaccttctggaggaagtggcaccaagaagcacgtggttgagaagcatcagaatcgttcccacgg

SEQ ID NO: 188492 - DNA, 96 bp, Homo sapiens
ctacaattccttctctgttctgcggcacaaaatgtattgctgactacagacccaaggatggagaaaccattgagctgaggctggttagctggtagc

SEQ ID NO: 188493 - DNA, 146 bp, Homo sapiens
gtgcttccaccatctcctaggagctgatgacatgtccagaccaggtctcatgcttggtgcctggtgccaggtgattatcctgaaccatccaggccaaataagcgccggctatgcccctgtattggattgccacacggctcacattg

SEQ ID NO: 188494 - DNA, 50 bp, Homo sapiens
agtgaagaaattattggtacctgcagtcaaactgtgctgaaaatatccgc

SEQ ID NO: 188495 - DNA, 115 bp, Homo sapiens
gttccttgtggagccggagctgggcgcggattcgccgaggcaccgaggcactcagaggagggtggcccagttgaaatccttcccttcctctaccttggaagtgcctaccatgcat

SEQ ID NO: 188496 - DNA, 87 bp, Homo sapiens
cgaggatctggaggcacagctgcagtctgacgagaggggtttacccaaggtccagcctagcccctaggcaccatgtcggacagtgat

SEQ ID NO: 188497 - DNA, 83 bp, Homo sapiens
tgaagatccattggtaaattgatcaggatttttggcctaccctccaaagaaaaggtcatgatgatgggcagcgcccgagtggc

SEQ ID NO: 188498 - DNA, 90 bp, Homo sapiens
atccttacgcccctggggcggtaccagaagtcatcaatgggcagcatgttccggcaacagtccatcgaggacaaggaggacaagccccca

SEQ ID NO: 188499 - DNA, 73 bp, Homo sapiens
gttcatctttagagcaagaggagcttcaagcattgcagatagagcaaggagatgtatcggcaagcagtgtaaa

SEQ ID NO: 188500 - DNA, 98 bp, Homo sapiens
tcccatttcgctgaagagagttcgagaatgtcgaggtcttggcgagcaggagcaacacttcagagcaagaccaggcggggactgaaatgcgcgtgaag

SEQ ID NO: 188501 - DNA, 51 bp, Homo sapiens
gagggggagccccgcgcgcggcgtcgggatcatggcccaagttgcaatgtc

SEQ ID NO: 188502 - DNA, 100 bp, Homo sapiens
gaagaaaatgatggatgcctttgatgcttgggaaggaaaaggtaactcagcagttgaaggcgcgattcttaccaagtccagttgttattaagaaacgtat

SEQ ID NO: 188503 - DNA, 117 bp, Homo sapiens
agcggccggaggagccatggactgcagcctcgtgcggacgctcgtgcacagatacgctgtggaaaatctctgttctcacaaagtctccccaatgctctacaagcaactgcgtcaggc

SEQ ID NO: 188504 - DNA, 99 bp, Homo sapiens
gtctctcttagctccagatttgatggccttcacaatccaagttccacaatatattgactactgccacaattccggtggtccgtactgagaagaacagtt

SEQ ID NO: 188505 - DNA, 100 bp, Homo sapiens
ttggacttggccatgtgagatacaaggctacacagagacagatcaaagcagctcccaagttacatgctacagtcagaagaactccgggcctccctcctgg

SEQ ID NO: 188506 - DNA, 75 bp, Homo sapiens
ttcaaacctgtatctgtgcaggcaatgtgtttgggcttcctgtagacacccttttcctgcgcaacagagctgggc

SEQ ID NO: 188507 - DNA, 75 bp, Homo sapiens
gggggacccagtgcagtcttggaaggggccggtagcactggctgtatccttgaacttgagaacattcctccggct

SEQ ID NO: 188508 - DNA, 100 bp, Homo sapiens
tacaagtgcatctgcaagtctggctacacaggggacggcaaacactgcaaaggtctgttgagcgaccgtaagaaggtgactttgggcacccagcccaccg

SEQ ID NO: 188509 - DNA, 103 bp, Homo sapiens
cggcggccgaaagcggagagatgctgggcgtggcggccgggatgacccacaggacccagatgatgtggtaccagttggccaaagaagagcctggtgttggtgc

SEQ ID NO: 188510 - DNA, 75 bp, Homo sapiens
gcagatcatcctggcgatctacttcctctggcaggttgcccccaagtttcctggcagtgtgtgatactgaggagg

SEQ ID NO: 188511 - DNA, 98 bp, Homo sapiens
caaggagccacacctggaccagaccccaggaaagtggtcatcaggactggggagaatgacttaacctccgcttccttatctgcaaagtgcgaacgcca

SEQ ID NO: 188512 - DNA, 49 bp, Homo sapiens
ctccagcaggcgctggctcctgctcagcttttggaaaagaagaagagag

SEQ ID NO: 188513 - DNA, 82 bp, Homo sapiens
ctctggagtgttggctgcatatttgcagaaatgtttcgtagaaaacaatgcagatcttcgtgaagactctgactggtaagac

SEQ ID NO: 188514 - DNA, 111 bp, Homo sapiens
agaccctggagcctcagttggaagcagccgatccagcctgcggagcctgtggggcaggttttgctgttactgctcagtgtagtcacaccttgaataagaaatggaaaacct

SEQ ID NO: 188515 - DNA, 76 bp, Homo sapiens
aggcggccgtcagcaacctcgtccgggtgcccccaagtggccaaaggagacagtgaagcccgtggaggtggaggaa

SEQ ID NO: 188516 - DNA, 51 bp, Homo sapiens
cccaaagtgctgggattacggctgattcagaaaggcaccaagttagttttg

SEQ ID NO: 188517 - DNA, 100 bp, Homo sapiens
ttccaacactacttagctttccaaggaagtcctgacggccacgctggatctggaggacgtccggagctacagggcggagatttcatctcgaaacctggcg

SEQ ID NO: 188518 - DNA, 75 bp, Homo sapiens
atgatttttctgaggaagtaaccaaacaagaagacctcatgagagagtcactattccaggtcctcaggatatagc

SEQ ID NO: 188519 - DNA, 75 bp, Homo sapiens
ctggagtcggaggcgatatttctaggggtgtacttgttggggtcaggacgcaaacatgcagatctttgtgaagac

SEQ ID NO: 188520 - DNA, 75 bp, Homo sapiens
tgtctgatcccttgctcccatccctgcagcatgaacaaggtgccacttgaagaatggatgatgatgattttggtg

SEQ ID NO: 188521 - DNA, 85 bp, Homo sapiens
tggtgcccagccgggaactccccatcgcgttttgccagcgataatacgcctcaggagctggagtcagatggcagcactatggagg

SEQ ID NO: 188522 - DNA, 75 bp, Homo sapiens
tgtggattcctcagagagtgaacttggaatcttggacctcatccagaattgttaagactcgaatcagaaatggag

SEQ ID NO: 188523 - DNA, 100 bp, Homo sapiens
gattgctatcacttctgcagaatccagtggaatacggcaggagaatgatatggttgattcagcgcctcagtgggaagctgtattaaggagacaaaaggaa

SEQ ID NO: 188524 - DNA, 75 bp, Homo sapiens
ggtcatccatgacaactttggtatcgtggaaggactcatggacgtagccaccaagcgcatattctctgcgctgcg

SEQ ID NO: 188525 - DNA, 50 bp, Homo sapiens
ccaggacccactggaagcctagaaatgctatctctgaccgccggaggctg

SEQ ID NO: 188526 - DNA, 82 bp, Homo sapiens
gcagccatgaccgtggagttcgaggagtgcgtcaaggactccccgcgcttcaggtactccaaagattcaggtttactcacgt

SEQ ID NO: 188527 - DNA, 75 bp, Homo sapiens
ctcttcaccatgttcggaatgctgctgttcgctggtgggaagggatacccacccaccatcccagggtctacaaca

SEQ ID NO: 188528 - DNA, 75 bp, Homo sapiens
gaaagcatgaaaaatcaaaaggagttcatgcttatgaatgctcgacttcagggaagctgtgattaagcactcatt

SEQ ID NO: 188529 - DNA, 124 bp, Homo sapiens
tccgattagccttttctctgccttgcttgcttgagcttcagcggaattcgaaatgcaaaatgatgcttcaacacccaggccaggtctctgcctcggaagtgagtgcttctgccatcgtcccctg

SEQ ID NO: 188530 - DNA, 100 bp, Homo sapiens
tgggaacccaggccccgccgaggcggccaggaacagattatcagtctggtcaatcagatctgcggcaaagtgtctggtaaaaacggcagcattgagaact

SEQ ID NO: 188531 - DNA, 75 bp, Homo sapiens
aatcggtcgcctggaggaccagtatttcccatggaggattctacttcaaagaaatcctgccacccgatgattaaa

SEQ ID NO: 188532 - DNA, 90 bp, Homo sapiens
caaggcccaggttactgccgctggtcctcagaagagtggatcccagggttcagggcaccccaggcaataccgggccttacggacttgtcg

SEQ ID NO: 188533 - DNA, 98 bp, Homo sapiens
gagtggttcaccctggtcaacaagaagaacgctctcatccggaggcaggaccagctgcagctgctagatttaccgcattgtttctcagaagcaaatgt

SEQ ID NO: 188534 - DNA, 90 bp, Homo sapiens
aatggggggattaccatcactgtgaacttctggtataagaaacagcttcatgagtttgccatcacagagccattagtcactttccaagga

SEQ ID NO: 188535 - DNA, 50 bp, Homo sapiens
ttcccagatatcacgtattaagagagaaaggccttgggaaaacaactggg

SEQ ID NO: 188536 - DNA, 82 bp, Homo sapiens
ggaagacgaatcgttaaacatctgaaagggtcaggagaactacgatgacccgcacaaaacccctgcctccccagttgtccac

SEQ ID NO: 188537 - DNA, 75 bp, Homo sapiens
tttgtacgaagccattgccctgcagtgagacggtttaagcggaagcatcttactgccattgactgccagcatttg

SEQ ID NO: 188538 - DNA, 74 bp, Homo sapiens
gtcgacatgagtgatgtggaggaaaacaacttcgagggcagagagatgatatgcctgccatcatgcttgttaat

SEQ ID NO: 188539 - DNA, 100 bp, Homo sapiens
ctggccgtgatcaaacactgcaaggaccccctccggctcaagtgtgtcaagcaaggtataagtgtgctagcggagtgtctagattgtcctgaattgaaag

SEQ ID NO: 188540 - DNA, 80 bp, Homo sapiens
cgtgcactccgcacctcggggacattattgcgcgtggaacggctgcttttggaaggggtcgggccccggctcagtggtcc

SEQ ID NO: 188541 - DNA, 74 bp, Homo sapiens
gtggtgcaggacgtggccagcgccttggactttctgcataacaaagtggggtgccgaggctcaggcagcatgac

SEQ ID NO: 188542 - DNA, 100 bp, Homo sapiens
atgctgccagggtccctgaagagggaagacacgcggaaacagagtacaggggctcaggtccaggtggcaggggatatgctacccaactcaactgagcggg

SEQ ID NO: 188543 - DNA, 74 bp, Homo sapiens
tctcatatgtaagagccattggaataccagttactggaccattatcagaattgcaaatagcctatgtatgcaga

SEQ ID NO: 188544 - DNA, 95 bp, Homo sapiens
atagagctgccagaggttccctccgagccccttcctgagaagatcccagatcgtaaagctgaaaattgaaatcatgaaagtagacaggactaaac

SEQ ID NO: 188545 - DNA, 76 bp, Homo sapiens
gggcggtgagcgcccatatgggggttctggagagcggggtgtggggccaccagcccctcgggttccaagatgcagc

SEQ ID NO: 188546 - DNA, 75 bp, Homo sapiens
tcggacgtagcccggcttgtattgggagctggtcaggctcaccatcgagaagcagggacgtccgtctccgacgag

SEQ ID NO: 188547 - DNA, 101 bp, Homo sapiens
tagaggcagtggcgcttgagttggtcgggggcagcggcaggaactttatattgctgttggaatatctggagccatccaacatttagctgggatgaaagaca

SEQ ID NO: 188548 - DNA, 100 bp, Homo sapiens
gacgcgctgctggccgcccgggaggtgttcaagacccagggggtgatcaagtacatggggccggcaggttatttccagaaagaagagaatggcaaagtat

SEQ ID NO: 188549 - DNA, 112 bp, Homo sapiens
ctgctccggggcccctcctgctgcgtgactcacaggcacattgcagagagaagctgccgctcccagttttacagacatttcaccagaggaattgaggcttgaataccataac

SEQ ID NO: 188550 - DNA, 75 bp, Homo sapiens
aaactcctctccaccagcgccaagagtatggtttgaagtggtgaacatggatttttctcggcttcacatgtacag

SEQ ID NO: 188551 - DNA, 74 bp, Homo sapiens
tccatcactaccaataccatcaataccagctctgacaaaacagcccgacggccatggaggctgaagagacgatg

SEQ ID NO: 188552 - DNA, 98 bp, Homo sapiens
tcaaactcgtctttggcgaggacggggcgccggcgccgccgcccccgggctcgcggcctgcaggttggctggctcctctggctgatggcatgttgagg

SEQ ID NO: 188553 - DNA, 103 bp, Homo sapiens
cgcgaggccgcagagctaaatgggggcctctccagggagtgctctgttcacggctccatcgctgttaagagacaagagagacacctccaacttcgacaaagag

SEQ ID NO: 188554 - DNA, 100 bp, Homo sapiens
tatcccctgttaaaaccatatgaaagcgtgatgaagatctcacattcttgaaggtggcattgaagagcactaagatcggaagatgagtgagcttgaccag

SEQ ID NO: 188555 - DNA, 83 bp, Homo sapiens
cactttagaccctccacctaattgcaggttctggagacagcctgtatttcttggatcttggcttccttccatcttcaaagcca

SEQ ID NO: 188556 - DNA, 74 bp, Homo sapiens
catcaacaaagaagaccacacactgggaaacatcattaaatcgccatcaaccgtgctatgcagaaaccccagga

SEQ ID NO: 188557 - DNA, 100 bp, Homo sapiens
agaatttgctactagatgaagacaataatatcaagctgattgtggaaggaatgaaggccagctgaatggtgaaacaaatacacccattgaaggaaaccag

SEQ ID NO: 188558 - DNA, 76 bp, Homo sapiens
tccagagattgtggagcagatggcccgtgatgctgatgagcgagagaagtggatccatgccttagaagaaacaatt

SEQ ID NO: 188559 - DNA, 100 bp, Homo sapiens
actcgcaagattgagttatttggacgaccacacaatgtgcaacccaactggtggagaaggaacgtgataaagaagtaagcgatgatgaggctgaagaaaa

SEQ ID NO: 188560 - DNA, 146 bp, Homo sapiens
cagagcaccaaaacacactggaaacaaacagtatttctactggaaaaaccattttcagttaaagcaggatgtacagttacccagcacgtgtacctcctcctcctcctattgctcgggctgtagtgccctcgaaacgtcagcgtgta

SEQ ID NO: 188561 - DNA, 101 bp, Homo sapiens
tacaagatggggacggcaggagggaagtgagaagcccaactaaagccccacatttgcagctcattgaaggaaagcaatggctgccatccggaagaaactgg

SEQ ID NO: 188562 - DNA, 101 bp, Homo sapiens
gcggcaggatctcccggctctcggtccgggacgtgcgcttccccacgtcgcttgggggccacggcgcggacgccatgatatgagggaaggcaccattggag

SEQ ID NO: 188563 - DNA, 96 bp, Homo sapiens
tgacagatccttttggtagcacttctgatgctgtaattggttctgtcatatgttgaagaatccatacaccattaagaaacagcctctgcatcagtt

SEQ ID NO: 188564 - DNA, 75 bp, Homo sapiens
caaagtgattccccggaatcgtgtgctgggctggtcccccttggcattgccacctggggtatcgttgtcatggca

SEQ ID NO: 188565 - DNA, 82 bp, Homo sapiens
ttgacgtccagaagaccaagtacctgcagatcctgacctctctgatgagatggatcggaattcctggtgactggaaggggga

SEQ ID NO: 188566 - DNA, 83 bp, Homo sapiens
aaaagatatacaagaaggagatacattaaatgcaatagcccttcagtactgttgtacggttggactccatgaaagaattgcac

SEQ ID NO: 188567 - DNA, 71 bp, Homo sapiens
ttgctcttccatccgcctttgatcgtcttcctcttcagccatccagcccgcagggccccggaccccggctt

SEQ ID NO: 188568 - DNA, 100 bp, Homo sapiens
tgcttttgatgtctgacaacgtggatcgttgttttgaaacagttttccgtctgatgaaggttggccatttgcaaagtatcttggagcttgtggaagaatg

SEQ ID NO: 188569 - DNA, 74 bp, Homo sapiens
gctgctcccttcgccttcgccctttccacctcgcggcagttcgactcccaagacagctgggctgcgaccaatgg

SEQ ID NO: 188570 - DNA, 97 bp, Homo sapiens
agcagaactggtgggctctcctgatgcctgtacacctcttgaagccccagaatctcttatgttaaagcacaagtgcatacaccttgatagcaccaaa

SEQ ID NO: 188571 - DNA, 52 bp, Homo sapiens
gcggcggcggcaccccgggcgcggttcttcccaggagactctgccggccttt

SEQ ID NO: 188572 - DNA, 100 bp, Homo sapiens
catatttgatggaacaatcattagttcagtgcagtgtctgacttgtgacagggatatgggccctcacattttccaaacctgtccatctgctaactatttt

SEQ ID NO: 188573 - DNA, 100 bp, Homo sapiens
gggcggtgggccccagccccacagaccagcccagcattcagatcgcctgataggcttgccagaggggcgtgctcgcaatcacaatcgaccgcaacaaatc

SEQ ID NO: 188574 - DNA, 82 bp, Homo sapiens
ccgtccctcaccgcggcatcaagcaggtatcgagaaccttccctgcgaacttcagaggaacttccagctgatgcgagagctg

SEQ ID NO: 188575 - DNA, 90 bp, Homo sapiens
attctgagtggtgctcctggctgctgtccgtggctgaggattgaccctcttgctggaatgacatctcttagtataggtggttcagctgcc

SEQ ID NO: 188576 - DNA, 100 bp, Homo sapiens
tcctctcgctccccggccgcccacccccagcctggagtcagatggagttcagtatctccgccctatccatccaggagccgagcaacggcaccgccgccag

SEQ ID NO: 188577 - DNA, 98 bp, Homo sapiens
ttctttttaatgcattaaagcacatggtctctaattaacagaagatggcaaagcccagccacagcagctatgtccttcagcagctaaacaaccaaaga

SEQ ID NO: 188578 - DNA, 100 bp, Homo sapiens
catccatggagggaaagagacagcttgagaaaagggactttggaaaaaggctgtctctagacagcagtcttgtggccaagatgctgaattatcagggaca

SEQ ID NO: 188579 - DNA, 100 bp, Homo sapiens
ctctgtttgcatctaccctgctgaacctgaaacaagcagaggaagcaaaaactgctgacacagccattccatttcactgatatgaggaagacatggagac

SEQ ID NO: 188580 - DNA, 100 bp, Homo sapiens
cgtggaggagatcgagcgccgaggcatggaggaggcaaaagtgaccgccaataacgacaagaaccgcaccttctccgtctggtacgtccccgaggtgacg

SEQ ID NO: 188581 - DNA, 82 bp, Homo sapiens
cgtatttgtgtgacttgactcttcaaacacaaagggccatgctggataaggagctggctgcctctgtgaacatcctactcaa

SEQ ID NO: 188582 - DNA, 90 bp, Homo sapiens
atgatattgagtcggaaacggggtccactggtgccctggagacccgcagcctcaaggatcacaaaggtggttcagaatctggggagcctt

SEQ ID NO: 188583 - DNA, 50 bp, Homo sapiens
ggaggccctgctggtttctgtgcgggacctgcaagcgcaggaccgagccc

SEQ ID NO: 188584 - DNA, 100 bp, Homo sapiens
tgtaaggctgtgcccttcgttcaggtggacagtgacaccgtgtggaatgagatgcactcctccagtgctgtgcgcatggcagtgggctgcctgctggagc

SEQ ID NO: 188585 - DNA, 100 bp, Homo sapiens
gcaagagtctcccctccagcgggagacagcgggctcctgtctcgggacgctgggacacctgtcgccttctctgcgatatgataccagctattttgtggag

SEQ ID NO: 188586 - DNA, 85 bp, Homo sapiens
tccctgatccctggagcgacgacggccgctgcctaagctggaaagtatgatctcgtgaaaccttgagagaaactgaatgacgaat

SEQ ID NO: 188587 - DNA, 50 bp, Homo sapiens
agaaatttgaagagatgattcaacaaggttacacatcattttggaatgac

SEQ ID NO: 188588 - DNA, 74 bp, Homo sapiens
ctggctgtctggagcctggactggcagcaggccctgcaggaagcgcaacaggaaaggagagaagaatggcaagg

SEQ ID NO: 188589 - DNA, 74 bp, Homo sapiens
caaagaaacaagccgtggaataggtgtatcaagtaatggtgcaaagcctgaaggccatgtggaagagctgtggg

SEQ ID NO: 188590 - DNA, 75 bp, Homo sapiens
ccagctctaatgagcaacagtacactggcaactattcaaggtctcctagtaggacaaggaaagcccagcaagcac

SEQ ID NO: 188591 - DNA, 100 bp, Homo sapiens
atggaccctcagctgcggctgctgctggaagtcacctatgaagccatcgtggacggagggctactacaaagttctgggaaagggaaagctcccaaagcag

SEQ ID NO: 188592 - DNA, 100 bp, Homo sapiens
ctgcctctacgacaacttcgactgccacgccggtggccgcgagcgcacttgcaaatgcatcaaattgcaatttggaggagaggcagcacaagcagaagcc

SEQ ID NO: 188593 - DNA, 98 bp, Homo sapiens
cgtggaccaggctctgaaggagtttggcagaatcgacattctcattaactgttcgaacctctgacatgggtggctatgctacttgccatgacttcact

SEQ ID NO: 188594 - DNA, 82 bp, Homo sapiens
gaagttgggaactcagaccgtaccttgcaacaaggcgtttgcaatggctgctactgtgaacttggaacttgatcccattttt

SEQ ID NO: 188595 - DNA, 50 bp, Homo sapiens
gtccccgaggaggggaccatgacacaaaagaacattggagctatcatgtc

SEQ ID NO: 188596 - DNA, 98 bp, Homo sapiens
tttaattcagcctttggaagttttttggccatggttgcttgttatccgggcaatggaacgggttatgtacgtcatgttgataatccaaatggagatgg

SEQ ID NO: 188597 - DNA, 75 bp, Homo sapiens
aagctgaaacacaaggttcatctgagggaatctggaaaaattgcaatcaaaacatcatttctctaagaaaatttt

SEQ ID NO: 188598 - DNA, 75 bp, Homo sapiens
cttccggagcttctcagaagacagagggttttcttttgagatacgtaggtaacctttccagagatgtgacagaag

SEQ ID NO: 188599 - DNA, 76 bp, Homo sapiens
ctagccaggaacatggactgaagtatccagcgctcattgggaatttagttaaggatttgttaaggattccaagtaa

SEQ ID NO: 188600 - DNA, 101 bp, Homo sapiens
aagaagtggagcgtgtcctgaaggagttccaccaggccgggaagcccatcggagatcccaggcccacaaatcaacgcatcaataagcacgtcaacaatgat

SEQ ID NO: 188601 - DNA, 100 bp, Homo sapiens
cccaggtgtaccccaagctgtacttgtcacctcgaattgagcagctcttgtcaggatggtgaagctgttcatcggaaacctgccccgggaggctacagag

SEQ ID NO: 188602 - DNA, 100 bp, Homo sapiens
ccgggacccggttccccggcccacagtgggggtgtgcaaacccgagagaactgggcctgctccttttcttcagaggatttgttaattatctaaaagtcag

SEQ ID NO: 188603 - DNA, 75 bp, Homo sapiens
tgatcgccaaccagcctgtcgtgatcgacaacaggccgggaagttaaacttgtagccaccacctccgctcttccc

SEQ ID NO: 188604 - DNA, 90 bp, Homo sapiens
ggaaacgatccgctcccaaaacgagtccatgttgtacttagatgggcagcggcatttcaactccatgagtggcccagcgaccttgagaaa

SEQ ID NO: 188605 - DNA, 98 bp, Homo sapiens
gccaagaaagacaaagacccagtgaacaaatccgggggcaaggccaaaaagaaggcaacgcggtaaaaatattgcttcggtgggtgacgcggtacagc

SEQ ID NO: 188606 - DNA, 75 bp, Homo sapiens
ttcccgggaggggggagcggcgttggaggccaccgtttccaggttggtcaaagaaaaagtgatgtatgaaaaaga

SEQ ID NO: 188607 - DNA, 90 bp, Homo sapiens
cgcttgaaaagactgggcttgtccttgctggtgcatgcgtcgtcggcctctgggcagcagtccaagtggtaagaagttcagaagcaagcc

SEQ ID NO: 188608 - DNA, 90 bp, Homo sapiens
cttccaaggatatttgggctgcctccggagtcacagtgtcttgggccgccggaaggaagaattcctttggctaccggaagaaaagggagg

SEQ ID NO: 188609 - DNA, 78 bp, Homo sapiens
tatacgtggattccagaggggtgacagcgaaatatcccaaagagaagattgatattgggctgcctccacccaaagtct

SEQ ID NO: 188610 - DNA, 102 bp, Homo sapiens
cgtggactgcggggacggggttggcgcccggcagcacgtgttcctggtttcagcacaagtgcatacaccttgatagcaccaaatataaaccggagaaatgag

SEQ ID NO: 188611 - DNA, 92 bp, Homo sapiens
gattggatgagtctcaagatggacaaccgggatgttgcagacaaagatcattccactcagcctgggacgatggggaggaaaaaaatccagat

SEQ ID NO: 188612 - DNA, 100 bp, Homo sapiens
cgttgctgagctggtgtggaacgtctgtgatcagtgccctgcaggagtcattaaatcaaaacttcatgctgatcatcacccaccgagaagtccagcggga

SEQ ID NO: 188613 - DNA, 83 bp, Homo sapiens
ggcagctccaaccatgggaggccgcgtctttctcgttgccaggtataaactccgaattgttaagccaccaaaattacccctag

SEQ ID NO: 188614 - DNA, 100 bp, Homo sapiens
ctgggcttcatgcgaaatcagcattttgaggcctgccagtgagcttctaccatcatggacctattgttcgggcgccggaagacgccagaggagctactgc

SEQ ID NO: 188615 - DNA, 74 bp, Homo sapiens
gcagttcgaaaactggataacactaagtttagatctcatgagggatggtctcactgtgttgctgatcttgaact

SEQ ID NO: 188616 - DNA, 74 bp, Homo sapiens
gcacaggggccactcagagtcgcccgagaagcctacaagaggaagacagaagcagcaaagaaggaatatctgaa

SEQ ID NO: 188617 - DNA, 98 bp, Homo sapiens
gaagacaagaattcctacactccctgcctcaaccaaccacagcaccgggaagtccagtcagcggcagatggtgttcggggtggtcaccgccattgact

SEQ ID NO: 188618 - DNA, 82 bp, Homo sapiens
ctcccaccacccaccagggcccctgaggctgacccgcggctgattgagtccctctcccagatgctgtccatgggcttctctg

SEQ ID NO: 188619 - DNA, 98 bp, Homo sapiens
ggaaaaccaggagcagggcaaacgcaagattgccaaattcgaggagaagcacttgtcgcagaaaccacagctccagtgactacagctccaaggagaac

SEQ ID NO: 188620 - DNA, 80 bp, Homo sapiens
aggccaggttcccaagagctcaggaaacaagcctccaggtctgcttccccgcaaaggactatacatggcaaatgacttaa

SEQ ID NO: 188621 - DNA, 98 bp, Homo sapiens
aaactgcagccagttactatggcagttgcaaaatattcaggagaccgtcgttgccttgtatttccagagaacaggatattaccttccaaatgatgatg

SEQ ID NO: 188622 - DNA, 74 bp, Homo sapiens
tggtgatggagattttgatgtggatgatgccaaagttttattagtatgaggccgtcatggaccgggtccagaag

SEQ ID NO: 188623 - DNA, 74 bp, Homo sapiens
ctgctgaacccattgccagccgggcctccaggctgaatctgttcttccagggtgtccgcaatgttgccagtgtc

SEQ ID NO: 188624 - DNA, 98 bp, Homo sapiens
cgggacccggttccccggcccacagtgggggtgtgcaaacccgagagaactggaaatgagccgtcagactgctacagcattacctaccggtacctcga

SEQ ID NO: 188625 - DNA, 100 bp, Homo sapiens
ggcagggcctggggaatgcttttttatctcatattagtgcctgtgatggcatctttcatctaacacaccactttacctgcattgtgaaggtactttttac

SEQ ID NO: 188626 - DNA, 100 bp, Homo sapiens
tatcagcagaatttcaagcgaggctctgggcagagtggaccacggggagccccacgaggtcggattgtttgtgctgaacgaactgtcctcttgcttcaga

SEQ ID NO: 188627 - DNA, 89 bp, Homo sapiens
gccaagacataaactcaaccccttctcttccaaaaggaagagaggatggtgatgcaccggttacaaaagatgagaccacctgcatttca

SEQ ID NO: 188628 - DNA, 90 bp, Homo sapiens
caagatgctctctctggaccgatcccactgctagagtaccgtggcacaatctcagctcattgcaacctctgcttcctgggctcaagcact

SEQ ID NO: 188629 - DNA, 75 bp, Homo sapiens
tttaaagtgccctattccttgccaaaactaggtggtggagtctatggcccttctccttgaatctgagtgaaatta

SEQ ID NO: 188630 - DNA, 75 bp, Homo sapiens
caaaggtggctaaggacctcaacccaggagttaaaaaggattcaggacaagctataccgcttgtagtcgagagct

SEQ ID NO: 188631 - DNA, 75 bp, Homo sapiens
caccatcattgcatttacctcggatcatgacgactgcaagaacattgccaacatcatgaagacactcgcctatcg

SEQ ID NO: 188632 - DNA, 100 bp, Homo sapiens
cgagcggagcccgcggggccagaagttccacctggtgccaagcatcaacaccatgagtggcagtcaggagctgcagtggatggtacagcctcatttcctg

SEQ ID NO: 188633 - DNA, 50 bp, Homo sapiens
cgagcttttcctccaggcctttgagagttacactcctcttcctgggtcca

SEQ ID NO: 188634 - DNA, 50 bp, Homo sapiens
ctgcaggcggcccactggcagttcgagcagaaagatgaaggtcttagaat

SEQ ID NO: 188635 - DNA, 75 bp, Homo sapiens
gctgtggagacccacctgctcaggaaccctcaccttgtttcggactatagaggtacttggaaggctccatcgccc

SEQ ID NO: 188636 - DNA, 80 bp, Homo sapiens
tggaagtgtctcttagcagcgcgcggagaagaacggggagccagatggtcagtaggacagaaggtaacattgatgactcg

SEQ ID NO: 188637 - DNA, 75 bp, Homo sapiens
ggctgccgcggctacgctgaggctctccgctcaggattactacagcatcccatttcccacacccactactccgct

SEQ ID NO: 188638 - DNA, 90 bp, Homo sapiens
aattcagccatctacaagcgagttctaaaattgcagcaagttatgcagggtcttgctacgtacgttgcccaggttggaatgcagtggcgt

SEQ ID NO: 188639 - DNA, 89 bp, Homo sapiens
gggagggaaatatgtcatgtatcccatagctgtgagtggcgatcacgagaacaataagtccagaacacatattacataatggagccggg

SEQ ID NO: 188640 - DNA, 100 bp, Homo sapiens
ctctgaggaggagagccaggaccggcaactgaaaatcgtcgtgctgggggacggcgcctccgggaagaatgaagagcttcgaaacttgtctttgtctggc

SEQ ID NO: 188641 - DNA, 100 bp, Homo sapiens
gtgttgtgagagatttctgcagtgaagattgctgtaaaaaatttcaggattggtactacaaggacctgaaggagaagaaggagaaggtggaggagaaggc

SEQ ID NO: 188642 - DNA, 147 bp, Homo sapiens
ccttcttcctcctcgggcgcccgcggcgatgttcaaccgcgccgtgagccggctgagcaggaagcggccgccgtcaggtcaagaagaagagagattggccctagaaactgccctgatgtacggagctaaaaagcccctcaacacaga

SEQ ID NO: 188643 - DNA, 74 bp, Homo sapiens
ggaggcggaggcagaggtggaggcgctttgaaagatggaaatcatattatgtagaatacttgggtgacatctgc

SEQ ID NO: 188644 - DNA, 75 bp, Homo sapiens
tgcgagctcctcaagaatctcgtgctcaccggtttctcccacatcgacctgcactgcccctaacttcagagatgc

SEQ ID NO: 188645 - DNA, 89 bp, Homo sapiens
cttgggttttttgtggcttccttcgttattggagccaggcctacaccccaggtgactcgaaaagccctgtttcctggtgactctgagat

SEQ ID NO: 188646 - DNA, 75 bp, Homo sapiens
tggcgggaagtgtgaagcggccaatggcacggaggcctgcgtaatgagtctgcaggtcttaaacgacaaaaatgt

SEQ ID NO: 188647 - DNA, 100 bp, Homo sapiens
acatctcagaccactggatccgcatgcgctcccaggaggggcggcctgtgcagggtggggctcctgtacgaagagggtgttcgcaaggcccagagcagcg

SEQ ID NO: 188648 - DNA, 50 bp, Homo sapiens
gtgagggtgtaacttacaaaaagggagaagaaatgggtgaccgttggtga

SEQ ID NO: 188649 - DNA, 73 bp, Homo sapiens
ttttctcatggatgttcttcttcgagtatttgtagaaggagccatccaaaactctgtttgtcaaaggcctgtc

SEQ ID NO: 188650 - DNA, 101 bp, Homo sapiens
attgattgtcttatatttcaagttaaggtccaaaaaaactccagctgtgaaagcaacataaatggtatttttagaaagccaaggaattgagttaaatccac

SEQ ID NO: 188651 - DNA, 82 bp, Homo sapiens
gatttcgggaaatacttgatttagtatgtaaaagatgttttgatggcccactgcgtgaccttggttcagctgtccatttcct

SEQ ID NO: 188652 - DNA, 100 bp, Homo sapiens
aggaagcccccaagcgggtcagcctggccctccagctccctgaacacggcagcaaggacatcggaagactatcctattaagtgtaatctcactgcttaat

SEQ ID NO: 188653 - DNA, 73 bp, Homo sapiens
ggatttaaattattaacagatgagaagtcttgccaagctatcagttgagggatttgcagttgataaaatggct

SEQ ID NO: 188654 - DNA, 90 bp, Homo sapiens
ctttggccttctagggactgacttcaaagaaggaaggaaagaatcaggcagatcacttcagcatcggtgaggttggtctctcaagaaccc

SEQ ID NO: 188655 - DNA, 100 bp, Homo sapiens
ctatacaagattaacattcagtgtcatggagaaactccagctgggcccagagattctgcagcgggaaaatccaaggcttatttatgccaggctgagtgga

SEQ ID NO: 188656 - DNA, 98 bp, Homo sapiens
aatgaatatgttcatggtgatataaaagcagcaaatctacttttgggttacaaaaatccagaccagaacattaaccaggtggtatttgttggaaattt

SEQ ID NO: 188657 - DNA, 100 bp, Homo sapiens
tatgctatgtcttaagagaaggggctaatgccacaagtgatatgttctattttgcagttgaagatggtggcatttattaatacagcaaaagaaatttatg

SEQ ID NO: 188658 - DNA, 83 bp, Homo sapiens
aaagactatgcccaattcttcaactcctaccagccagatcaacacaattgatatctccggagtagagatgaagagagaatttc

SEQ ID NO: 188659 - DNA, 75 bp, Homo sapiens
agccgtcttcgaactcaggagaagtgcagtcattggagaaatcgatgaagaaacagattctgcgcttgatttggg

SEQ ID NO: 188660 - DNA, 123 bp, Homo sapiens
gtggtgtggacagaagcggatacgggccaccactctcctggaaggtggcttccgaggaaacttgcagaagagaaccagctcacagtgtagggggaggagcttcccaaaacaagacagaggcag

SEQ ID NO: 188661 - DNA, 90 bp, Homo sapiens
ggtgcatttcaagtgaagtgtgctgatgaagtcctctataaggtgggtcatgataactgggtacgtggagttctgttccattctgggggg

SEQ ID NO: 188662 - DNA, 100 bp, Homo sapiens
ccagaggatgttctaccggccctccagttaccagccccctctgcagaatgccaagaccttgccaccatggaagaaagagtacaaagacgatattatgaaa

SEQ ID NO: 188663 - DNA, 88 bp, Homo sapiens
ccggtcccaagcacagtttgtccactgaggaggaaactctggcagagcctctcggccccgactcagcatcccctgctcttctatcaca

SEQ ID NO: 188664 - DNA, 100 bp, Homo sapiens
ctacccacccaccccaccaataaagtagcatgacgtctgtccttcagctgccaatatctacatttccttcaaggaacttagtgatttggcccgtgaccct

SEQ ID NO: 188665 - DNA, 97 bp, Homo sapiens
acgggtttctcacaggattcttctttgcagcaaggtcccagggctggtggttgctttgggtctacagctacgtcttacccgcctcctgcctcaacag

SEQ ID NO: 188666 - DNA, 50 bp, Homo sapiens
cgctggagagggggcgctgagctgttgggacatgtcatgctgcccaagga

SEQ ID NO: 188667 - DNA, 100 bp, Homo sapiens
gagcgggtcaagctgctgctgcagccatgcctgatggagctctggacacagctgtctgcgctgacgaagtggggagcgaggaggacctgtatgatgacct

SEQ ID NO: 188668 - DNA, 75 bp, Homo sapiens
gatgaatattacatcatataccgaaatgtttttgataagcatcttcatgatacagttaagaggaatcttgacagc

SEQ ID NO: 188669 - DNA, 98 bp, Homo sapiens
atggcggagctaggagctggcggcgacggccacaggggcggcgacggcgcagtgcgaagcgaaacagagctggactggccattatggaggaggagctg

SEQ ID NO: 188670 - DNA, 74 bp, Homo sapiens
atccggcttcggatgaggtgagggaggagcaggtcctggtgcttgatggtcgaggccatctcctgggccgcctg

SEQ ID NO: 188671 - DNA, 100 bp, Homo sapiens
accatcgcccaccatggctgtggcccagcagctgcgggccgagaggtgagcctcctcatgcagaagcaggcctgggtgccggttatgtggtccttattgt

SEQ ID NO: 188672 - DNA, 97 bp, Homo sapiens
aggcaggaccagctgcagctgctagcccacaggcggttttgtgagctgcttccccaggagcagcggagcgtggagtcgtcacttcgggcacaagtgc

SEQ ID NO: 188673 - DNA, 100 bp, Homo sapiens
ctgggccggaagacgcgccacgacgtgggactgcccggggtgtctcgcgcacgggccctcaggaagggagagctggtgacggcctccaaggccatcattg

SEQ ID NO: 188674 - DNA, 100 bp, Homo sapiens
ttcgttggccagaatgtgaatgtattgactggagtgagagaagaaatgctgtggcatctgttgtcgcaggtatattgaattctgcttggtcagaatcgtg

SEQ ID NO: 188675 - DNA, 74 bp, Homo sapiens
ctgtcgggcgccgctcagccgtgccctccgcccctcaggaatatcagaagctctttcctgacattcccataggg

SEQ ID NO: 188676 - DNA, 75 bp, Homo sapiens
tgtgggagttgtgtctgccactcggctgccggaggccgaaggacttcattgacttaactagagagaccagaccaa

SEQ ID NO: 188677 - DNA, 90 bp, Homo sapiens
tgtacttctgtttctcagtttatctggatgttatcagatcacagaccatggtctcagtccagttacaacacagggatcacaacaaacaca

SEQ ID NO: 188678 - DNA, 100 bp, Homo sapiens
cgccgaccgctacgctgtctactggaacagcagcaaccccagggaaggcagagaaaatccatcaagttgtaccctacccaccctttggtgacttttccaa

SEQ ID NO: 188679 - DNA, 100 bp, Homo sapiens
agtgggcaggaagaacccatcgggcagctacacatcttgaaagagaagctcttcctgtgagctttgaaaagtccagccgcatttcatgagcagagaagga

SEQ ID NO: 188680 - DNA, 75 bp, Homo sapiens
tggatatgtgcatggatctgaaagttcatcctgaacaggaaaagcctgggttactaggtgtctttcagaagctga

SEQ ID NO: 188681 - DNA, 51 bp, Homo sapiens
cagggcacaccaaactccatctgcccacagcccccatcccgtagcccttcc

SEQ ID NO: 188682 - DNA, 90 bp, Homo sapiens
ttgtgattgttagtggaacttctacccgacacttacatgccatggccttctacgttgtgaaaatggttatcaatactctggctgaccatc

SEQ ID NO: 188683 - DNA, 100 bp, Homo sapiens
agctcccccaagagccggaaagctgaagaaatcaggggagaaacccctgcttggtggaagcctgatggaatatgcaatcttgtctgccattgctgccatg

SEQ ID NO: 188684 - DNA, 96 bp, Homo sapiens
tgagcctgtgcaattatttcgagagtcaaaatgtggatttccgaggcaagaaggtataccaagcttggctacgcaggcaacactgagccccagttc

SEQ ID NO: 188685 - DNA, 95 bp, Homo sapiens
agcccgaaaagaagattactctgcaacagctaaagttttcggctttgtgagaaaccttaccatcaaacacgatggccagcaacgttaccaacaag

SEQ ID NO: 188686 - DNA, 100 bp, Homo sapiens
gctatggtgggcaaactaagccgattttccggaaaaaggaatcagagatcattgatttcttcctgggggcctctctcaaggatgaggttttgaagattat

SEQ ID NO: 188687 - DNA, 75 bp, Homo sapiens
aggcgaagatccggactctgggtgttttgctaccgtgaccgtttagtttttcccaggtcatgagtctcgggctac

SEQ ID NO: 188688 - DNA, 90 bp, Homo sapiens
gaccgtggggaaactaaaaacgcatctatctaacgtttaccctagcaaaccattactccacaggatccgctgaacataggatgttgccac

SEQ ID NO: 188689 - DNA, 92 bp, Homo sapiens
cctggagcctcagttggaagcagccgatccagcctgcggagcctgtggggcagataaaagcttcgatgatgaagaatcagtggatggaaata

SEQ ID NO: 188690 - DNA, 75 bp, Homo sapiens
gagggcatggatatctctactcgctccaaagcattgcagtgtcgagatggctatgaaccctgtgtaaatgaagga

SEQ ID NO: 188691 - DNA, 100 bp, Homo sapiens
gtctacacatgttcgaccggatggtcatctatttcttcatagcggcttcctacgcaccctggagctccggcagcagctggggcaccgcctgcagctgaac

SEQ ID NO: 188692 - DNA, 98 bp, Homo sapiens
cggcctcccgcccgccgcgctccagatgaagtgtgagcactgcacgcgcaagggactgctgagatgtcctctattcttgaagagcgtattcttggagc

SEQ ID NO: 188693 - DNA, 83 bp, Homo sapiens
ttctgagcaggaagggcagcaggtcaaaatgcagatcttcgtgaaaacccttaccggcaagaccatcacccttgaggtggagc

SEQ ID NO: 188694 - DNA, 75 bp, Homo sapiens
cccgggagcagccagcccgtgggcgagccgcccgcccgccgagcagccatgaggaagctcttcgtgggcggtctt

SEQ ID NO: 188695 - DNA, 75 bp, Homo sapiens
gactccggcgctcgccatggccgacgaaaagcccaaggagcatcagatccatgctgctgctgactcggagcccca

SEQ ID NO: 188696 - DNA, 101 bp, Homo sapiens
cttcccaatcccactgatgaggatcagcccatgttcttctcaccactaaatccaatacgagttcatattgatattggagctgatggcagagccacaggaga

SEQ ID NO: 188697 - DNA, 82 bp, Homo sapiens
ccaagactgcctttctatttattttacctcagtataacattagcgtgcctacagcaggtacaatgactcttcttgcttttca

SEQ ID NO: 188698 - DNA, 90 bp, Homo sapiens
aacccagacagaggggagcacagagaaagagaatgatgaagagaaaggcccggagactactattgcagatatcatccgaacatgtttggg

SEQ ID NO: 188699 - DNA, 75 bp, Homo sapiens
cgcggctaaagcagattggagctctgcagtaaccacagaatacaatgatttgaagactgaacttaaagactatct

SEQ ID NO: 188700 - DNA, 50 bp, Homo sapiens
ccaggccagcatggcgcagcacagacctcacagaatgaggttcctgcggc

SEQ ID NO: 188701 - DNA, 75 bp, Homo sapiens
ctggctctgggccttgaacattccgaaactgtcaagattggcaaggttgagggcaaaggcaatggaatcaagaca

SEQ ID NO: 188702 - DNA, 82 bp, Homo sapiens
ctgacagcgcgcacttcacccgcagttggtctggcggcttctctgttgacaactcagctggttccacaccctggcaattgtg

SEQ ID NO: 188703 - DNA, 100 bp, Homo sapiens
tggtttctgcagacctggaagaggtagctcagaaatgtggcttgtcttacaaggccaatggaagcagtgctgtgatgaaatcatgaaaattgaaactcct

SEQ ID NO: 188704 - DNA, 83 bp, Homo sapiens
cagtcagtctcttggtttggtctctaaaagtaaagggttggtcaaagaaaaagtgatgtatgaaaaagaggcaaaacaacaag

SEQ ID NO: 188705 - DNA, 83 bp, Homo sapiens
tgacctccgcgcgacgtacccgccgccgccgttggctggagatgggcccaaaagcacaagaactggaggtttcagaagacgag

SEQ ID NO: 188706 - DNA, 100 bp, Homo sapiens
ctcagaggtgcttgtaccgtgatgtgatgctagagaacctggctctcatatcctcgctgggctgtagtacatgagcgagctagagaaatcaccaccgttt

SEQ ID NO: 188707 - DNA, 50 bp, Homo sapiens
tctcatgaaagccctggaaatgccacaggaaggatttttactgggagagg

SEQ ID NO: 188708 - DNA, 98 bp, Homo sapiens
ttggccaaagaagttgagaaaatgggagcagttttcatggatgcccctgtttctggtgtgcctgatcaactttctagcgggagaacgatcatggaggt

SEQ ID NO: 188709 - DNA, 100 bp, Homo sapiens
tgacctatgaaggagctgtcaatctgaattcaataactgatcctgtgttgagagaggctgtattcatcaccaaagaaaaaacttacaccaatgcagaaat

SEQ ID NO: 188710 - DNA, 82 bp, Homo sapiens
gagctctggacaagctggaatgcatccaagagaatccctcaacatgctggtgacttaagagattaaaattaatttggttgct

SEQ ID NO: 188711 - DNA, 59 bp, Homo sapiens
aaaaatagtgatagctttgataagatgaccatgaaagctgtggttctaattctaccaac

SEQ ID NO: 188712 - DNA, 100 bp, Homo sapiens
attttgacaatctggttatttaaaaatcatcgattccgcttcttgcatgaaactggaggagcaatggtgtatgagtaatcaagtcagaggattatatgac

SEQ ID NO: 188713 - DNA, 50 bp, Homo sapiens
gacaacattaaaccatcagatgaggtatagctaggcacttccgttttgga

SEQ ID NO: 188714 - DNA, 90 bp, Homo sapiens
ccagaagtggagaccagcagaactccaccagctcatctttgggtgaaaaattgtcgggatcttctgcagtccagctacaacaaacagcgc

SEQ ID NO: 188715 - DNA, 50 bp, Homo sapiens
atgacaaaatgtggccacagcttttggtcacacagcggcagtgataaaga

SEQ ID NO: 188716 - DNA, 87 bp, Homo sapiens
ccacctagaagaggtgatgatagctttggagacacaaaactcatcagatttatctgccaaacccaaattctcaaagcctttcaaccc

SEQ ID NO: 188717 - DNA, 100 bp, Homo sapiens
ccccgccgtcgcagcccccgcgctggtgcagccaccctcgctccctctgctcttcctcccttcgctcgcaccatgatccagagacaatggccccgatggg

SEQ ID NO: 188718 - DNA, 83 bp, Homo sapiens
cgggtttgccgccagaacacaggttttaaaatcaaagatgggaaaatcggagaaaattgcccttccccatggccagcttgttc

SEQ ID NO: 188719 - DNA, 82 bp, Homo sapiens
cgtggcctacatagagtcgcagggagcccaccgggcgggcctggccaagccggcacagtcttcactaccgtagaagaccttg

SEQ ID NO: 188720 - DNA, 75 bp, Homo sapiens
tttatacactcttagtgctgtccaggttcaacttttagatacaaagagacaactggatacagagacaaatcttca

SEQ ID NO: 188721 - DNA, 98 bp, Homo sapiens
ttcagactagataacatagttttccaccctaaagaggttgcacgttttcaaaaaatacctaatggtgaaaatgagacaatgattcctgtattgacatc

SEQ ID NO: 188722 - DNA, 100 bp, Homo sapiens
ctggaggttgtgcgcaactgcatctcctacgtgtttgaggggaaaatgcttgaggccaagaaggtgccccacctcaaccagaatgcctggaacaacctgg

SEQ ID NO: 188723 - DNA, 98 bp, Homo sapiens
ggaggagggctggttccggctgcagcccgaccagtccaagagccggcggcatgacgagatgaccggaaagaagggatgaccgcgtttgtggaaaagag

SEQ ID NO: 188724 - DNA, 100 bp, Homo sapiens
ggtactacacaaccgtctccagccttggtctgagtggactgtcctgcagatagtgtgtgtaccatatcagtggcgtgtaactatgctcatcattgttctt

SEQ ID NO: 188725 - DNA, 50 bp, Homo sapiens
ggtgtacctgctttgcttctctgcagatgtatcctccactcctcgctggc

SEQ ID NO: 188726 - DNA, 74 bp, Homo sapiens
ccagcagccctccacccaggagtacgtgctgcatgtctacggtatgtcctggatgatgaatacacaagctcagt

SEQ ID NO: 188727 - DNA, 98 bp, Homo sapiens
acggcacctacacttgcgaggcgtccaataagcacggccatgcgagggcgctctacgtacttgtggtctacggaggcaagatccaaactgagatggag

SEQ ID NO: 188728 - DNA, 75 bp, Homo sapiens
tgaagaccataagcactagtgatccagccgaagtactcgtcaaaaatagccagatcatcaatgctgtggtactgt

SEQ ID NO: 188729 - DNA, 74 bp, Homo sapiens
agcagatccggcagaccttcaagtctcactttggccggcccatgcagaatgccaccaagtatggcaacatgaca

SEQ ID NO: 188730 - DNA, 82 bp, Homo sapiens
tgtgcaggacaccgacatggaacagggactcactggggccctggcctcccacgactacatcctgaagattgtgcccacggtt

SEQ ID NO: 188731 - DNA, 83 bp, Homo sapiens
cgctggagctgggtcagtccgccgctcaccccgcggccgcaccttcccgccttctcaggaagtaccaccaagaacagggaagg

SEQ ID NO: 188732 - DNA, 50 bp, Homo sapiens
gtggtgcggcaccggcgagccagctagcaggacccagtgctccataaagg

SEQ ID NO: 188733 - DNA, 100 bp, Homo sapiens
acccagaacggatagctccctcctggaaaagggacagcaaggaaggggggaagctggtgtcctactccacagccagtcttggggttagaggaaccctgag

SEQ ID NO: 188734 - DNA, 100 bp, Homo sapiens
ctccgccgcggcactgatccccacaggtagctacagcaagctgggtagcaggcagatccaaaggatatcatgaagtttccagggcctttggaaaaccaga

SEQ ID NO: 188735 - DNA, 100 bp, Homo sapiens
gagaccaacgagatcctgcacatgtctttctgtccaggcagccatcttgtctggagacaagtctgagaatgttcaagatttgctgctcttggatgtcact

SEQ ID NO: 188736 - DNA, 100 bp, Homo sapiens
ggggcttacgcagaaggacctggccacgtttcaggaccacgtcaagacttgtggcaagtgtcgagtcccttgcagattccacgccatcggctgcctcgag

SEQ ID NO: 188737 - DNA, 48 bp, Homo sapiens
tcgagttcaacatcatggtggtcgccattcaaactcctccccacgaca

SEQ ID NO: 188738 - DNA, 50 bp, Homo sapiens
acgggagtattatgaaaagatctttttggtgttgagccagacttgaccag

SEQ ID NO: 188739 - DNA, 100 bp, Homo sapiens
ggctccggacccataccagagaattatgatcaacttcaaccctcacttcgatttggaggacagagactgcaaggaccagttactctccacaagaaaattc

SEQ ID NO: 188740 - DNA, 100 bp, Homo sapiens
gggggagtcatttacctccctggtctcaggtgtctctcacaggcttggacttaaggatcagcaggagagagaaatcattcacgttctcatggattgctgc

SEQ ID NO: 188741 - DNA, 101 bp, Homo sapiens
atgacgcccgggacctgcatggccaggcagagtcagcagctgcagtgtggaaggtgcactacatcctccaggaggtggtgatgggtgggatggtgttggaa

SEQ ID NO: 188742 - DNA, 82 bp, Homo sapiens
ggaccacggcgcagacgcgggcgagctgcggctcggacgccagcggacacgcgggcgagtgtggacgaatgtggaacctcgc

SEQ ID NO: 188743 - DNA, 89 bp, Homo sapiens
ccccatcgatgtgcggcgtccgctgtataagatggggcgcctacccttcttcagcaagatgggaacagctgagtctgaaggaagagaaa

SEQ ID NO: 188744 - DNA, 50 bp, Homo sapiens
caaaattgcaagacctttcatagaggtcaagctgggctccgcgctagggg

SEQ ID NO: 188745 - DNA, 75 bp, Homo sapiens
gttttcttatgcttataagagtggaacagttggagtgcctcaagcttattgcctctcaaaaatttacagacaaac

SEQ ID NO: 188746 - DNA, 90 bp, Homo sapiens
gatttctactgccccgtctgtcaggaggtgctcaaaacgcccgtgcggaccacggcctgtcagcacgtttggctggggaacagaccaggg

SEQ ID NO: 188747 - DNA, 97 bp, Homo sapiens
cagaatctgcccacagagttcgggatgtagtaactggagttagtcccctgctcttcaggaaactcagtaatcctgacatattttcatccactggaaa

SEQ ID NO: 188748 - DNA, 75 bp, Homo sapiens
gaaagatattatccataatcctcaggccttgagtcctcagttcacagatgtacaggtggatcatctgaatctcct

SEQ ID NO: 188749 - DNA, 100 bp, Homo sapiens
ttctgtcaacggcaggggcaggcctagtttgactctgacagtcctcccactaagccattcaaactcctccccacgacactctgaagcagcgacggcacag

SEQ ID NO: 188750 - DNA, 97 bp, Homo sapiens
gagcacccagcgcacccagagcaacctgcccaccagcctggagggtctgagcaacctcgcagagctggcatgccccacgcccaaggaggatggtctg

SEQ ID NO: 188751 - DNA, 90 bp, Homo sapiens
agagcctgcccatctacaaactgaaggagcaattggtccaggaatggaagttggatacactttgtgacttgtacgagacactgaccatta

SEQ ID NO: 188752 - DNA, 100 bp, Homo sapiens
cccatcaaatggatgtccccagagtccattaacttccgacgcttcacgacagccagtgacgtctggatgttcgcaaaccagtccagctacgggggcccag

SEQ ID NO: 188753 - DNA, 77 bp, Homo sapiens
acagccctccatcttgcagcccagaagatatcgtagtaaagtgttatcccgttggctggctggcttaccattgcaac

SEQ ID NO: 188754 - DNA, 118 bp, Homo sapiens
ggcgccgagaggccgtgcgggacgcgggcgccaggaccggccgaacgcagagatggggctggcgagggcctggcacggggctgcatagtgcctggagtcaccagcacctacagacgga

SEQ ID NO: 188755 - DNA, 98 bp, Homo sapiens
aactgcaacagaactatcaactgtatacttatttggtggagatgaaatttcaagacagcagtatcgcagcaaatgatggctcagacattcattctgct

SEQ ID NO: 188756 - DNA, 82 bp, Homo sapiens
tccgcgcccggccggacccgggcccgagggggcttcgccaccttctcctcctgcttccccggcctctgcgagggcaagcctg

SEQ ID NO: 188757 - DNA, 80 bp, Homo sapiens
caagatgttgtcctgtgctggggctgacagacctgcctagagctggaacgttacctccagagcgagccctgctatgtttc

SEQ ID NO: 188758 - DNA, 75 bp, Homo sapiens
acagctatgcaaatatagaacactaaagtgttacatgacagatgtatgagtttgaagaaggtgaagaaggagaag

SEQ ID NO: 188759 - DNA, 74 bp, Homo sapiens
gctgggctggaggcggcggagcgcgagagcttcgagcggactcagggaaaagcttcactctgaccatcactgtc

SEQ ID NO: 188760 - DNA, 100 bp, Homo sapiens
cttatatgtgatgccattccagcactggactcatggaggctgagcatttattcagatgacaagagcacctcaaaggcagcagcctcaaggagcagccatg

SEQ ID NO: 188761 - DNA, 73 bp, Homo sapiens
ctaattgcctcctgatagcacacagaaagacccaacatgagtgaagtttcctgcaagaaacgggacgactatt

SEQ ID NO: 188762 - DNA, 83 bp, Homo sapiens
aaaaggcaaactcttcacctgcaaatgcagccctgaggatttggctactgcatataacaacagggggcaaatcaagtacttca

SEQ ID NO: 188763 - DNA, 100 bp, Homo sapiens
tggtggctataacttaaaaaaacttcaggctgaaacagccccaggtggtacactggcagatgacatgatgcgtacagatgtctgcgtgtttgcagcccaa

SEQ ID NO: 188764 - DNA, 74 bp, Homo sapiens
ctcatcatgatggacttggagctgccgccgccgggactcccgtcccagcaggcttgtgagaaggttggcatgca

SEQ ID NO: 188765 - DNA, 82 bp, Homo sapiens
agaagtcgcgtgtctaggtgagtcgcggtgggtcctcgcttgcagttcagcgaccacggtcgccatgggctactcacactcc

SEQ ID NO: 188766 - DNA, 83 bp, Homo sapiens
taagaaggatttcagcaaatttggagcaggaacaacaagctcaccctcttccgccagctgcagcagatgacgtacagcctgat

SEQ ID NO: 188767 - DNA, 80 bp, Homo sapiens
gtgcgcatgtttgctgactacctcgcccacgagagtcggagatcctgataacttaagtgactctctcttttccggtgatg

SEQ ID NO: 188768 - DNA, 100 bp, Homo sapiens
cctaacatcttccacaaggatcccgatgtgaacatgctgcacgtgtttgttctgggcgaatggcagcccatcgaggagtgggaggagcggcgcaggcaga

SEQ ID NO: 188769 - DNA, 100 bp, Homo sapiens
gccaagcaggtgaccatggcagaactgaacgccatcattggggcttttatacagaaaaacctaagacaattaaactacgtatggattgggcttaacttta

SEQ ID NO: 188770 - DNA, 83 bp, Homo sapiens
ctcaggggttccccaggaatatcgatacaacaccaacagagcttttatctcagttatcaggagtgagacgttctgcaggagga

SEQ ID NO: 188771 - DNA, 73 bp, Homo sapiens
atctttatgcaaagccagcgttacagtaatgttccagtggtatcattggtcgtagcaggaaagatttcaagag

SEQ ID NO: 188772 - DNA, 73 bp, Homo sapiens
aggtgatcctgatggcctgtcgagagatagagaatgggcgggtgcagcagtaccgcgtcgccatgactgccaa

SEQ ID NO: 188773 - DNA, 87 bp, Homo sapiens
ggagtctctgtccgggggcctggctaaggaaaccctattacctccagaggctgggaggcggcagaatgcagccagaggagggcacag

SEQ ID NO: 188774 - DNA, 50 bp, Homo sapiens
gtccacgtcgggtcagatccgacagaaggaatgctgtctctgcaatttga

SEQ ID NO: 188775 - DNA, 100 bp, Homo sapiens
atgactcacatcgtgcgggaagtcgacaggccgggatccaagtcgctggagccggtgtcctggagggagggccccagtgggcacagcacactgcctcggt

SEQ ID NO: 188776 - DNA, 82 bp, Homo sapiens
gcggtggcgcgggccgaagcgcccggagcgggagcgagcggcgcggcccgtctctgctttctatccgtcaagatgataaagt

SEQ ID NO: 188777 - DNA, 100 bp, Homo sapiens
aaactatagagaagaagatcttattctgcaatgtagacaatgtgatagcccagtgagtgcaaaaacaaaacctttaggatcaagagatgttttgccaaat

SEQ ID NO: 188778 - DNA, 83 bp, Homo sapiens
agctcaccgacagtgccctgagggccttcgagagctaccgcgccagacagaccatggtgaatccgggcagcagctcgcagccg

SEQ ID NO: 188779 - DNA, 50 bp, Homo sapiens
gctcatggctctcaccttgctcacgaaaaggtatagtttggcagtggggc

SEQ ID NO: 188780 - DNA, 95 bp, Homo sapiens
cagtgggtgctcacagctgcccattgcctaaagaaagaaaggatcttcttcctgtaacgtgcgcccagcttgcacagacaaagattatttctaca

SEQ ID NO: 188781 - DNA, 75 bp, Homo sapiens
ccttattgctacagatgtagcctcccgtgggctagaaactgttttggctgggcctacttcacctataccttctct

SEQ ID NO: 188782 - DNA, 100 bp, Homo sapiens
gtctcttctaagctgaataaagctgttttggaactgtcaggtacctcaaagcgttccatctgtcttgcttgctccaagtcatctaatggctcttctgacg

SEQ ID NO: 188783 - DNA, 75 bp, Homo sapiens
cgagttggtcggtcccggggtcacccgctacgggaagcaggcctcgccacaggaaaaccgtcttcagatacagtc

SEQ ID NO: 188784 - DNA, 101 bp, Homo sapiens
cgggctgaggcggcccagcggcggcagacaaagtttacatggggccaggacaactgtatcaagatttacaaaacttgttgcatgacttaaatgtaattggc

SEQ ID NO: 188785 - DNA, 100 bp, Homo sapiens
ggtcgtcttctcggcgacaactgccctgctcttcatcccaggtcgtttatacgcaatgcagactggaatgaagatcgatagtaaaactcctgaatgtcgc

SEQ ID NO: 188786 - DNA, 75 bp, Homo sapiens
tagacattgaccccgaggagacggtccccgcggaagccgcggtgtcggcgccatggcggagctgacggctcttga

SEQ ID NO: 188787 - DNA, 75 bp, Homo sapiens
ttcgcctgcaaacgcggtgggggctgctcggcggtcaggagcagagattttattccctcaaagttgcccccaaag

SEQ ID NO: 188788 - DNA, 97 bp, Homo sapiens
agaggaggagagcagtgatggagatgaggattccagaggtgatgggagcttgttgtgagaatgttattggatatatgcccatccctgttggagtggc

SEQ ID NO: 188789 - DNA, 82 bp, Homo sapiens
ccctctctatgatatgctaagaaagaatcttgtcactttagccactgctactacaggacagaggtcagatcaaggccacccc

SEQ ID NO: 188790 - DNA, 90 bp, Homo sapiens
aaacaccaacaggatacattgaaagggtggttctcttcccaaagtggaagccaaattcatcaattatgtgaagaattgcttccggatgac

SEQ ID NO: 188791 - DNA, 82 bp, Homo sapiens
tggagcctcagttggaagcagccgatccagcctgcggagcctgtggggcagctaacaacctgagagaagattacaaatttca

SEQ ID NO: 188792 - DNA, 73 bp, Homo sapiens
ggcccggctgcagcgagcgctggacggagaggaaagcgagtccagcaagctaaaagtacagaaggtggagccc

SEQ ID NO: 188793 - DNA, 90 bp, Homo sapiens
agcagggcctgtgccccaaagatgcaaacggagagtgcgtagaagggctgcgggaaaatgactatctgctgattcattcctgccgccagt

SEQ ID NO: 188794 - DNA, 97 bp, Homo sapiens
atcgtgggagccgtgggtcagatcggcaacacggggcccaaggtatatgccatccgcgaggcagccaccagcaacctgaagaagctagtggaaaagt

SEQ ID NO: 188795 - DNA, 99 bp, Homo sapiens
cactgtctcggagcctgaagacgacagcccaggatctatcacccctccatcttctggaacaggtgaatactgctatgcatgaggcaaaacttatggaag

SEQ ID NO: 188796 - DNA, 114 bp, Homo sapiens
gcaagaggcaaaacttcggacatagaggccaaccaacctttggaggtacaaacacaagtgcgccttgcaaaaaaaaactttgacaaattgaagatggatgtttgtcaaaaagtg

SEQ ID NO: 188797 - DNA, 84 bp, Homo sapiens
ttagacaaatctatctctctggacttcattcctggaaaaagaagttcatcagattcaaggacagtcattttgtttactcattca

SEQ ID NO: 188798 - DNA, 50 bp, Homo sapiens
agttattaaaggctttgtagaaccagagtccatgttgtacttagatgggc

SEQ ID NO: 188799 - DNA, 80 bp, Homo sapiens
ttcggtcttgctgctctcgtccatgaaccttcctggaggagagctggtcccattaagcaactaccagattttaaacagat

SEQ ID NO: 188800 - DNA, 82 bp, Homo sapiens
tggagcctcagttggaagcagccgatccagcctgcggagcctgtggggcaggtatcatgatattagctggtttgacatcaag

SEQ ID NO: 188801 - DNA, 101 bp, Homo sapiens
aaccttctggccaaggtgattcagattgcaacgtcatcctccacagctaaggaaaatgtttataggaggccttagctgggacactacaaagaaagatctga

SEQ ID NO: 188802 - DNA, 75 bp, Homo sapiens
ggaaccgggatggcgacgtctacactgagtcggaggcgaaggtccagcaccatgtgctaggtcactcccagcgcg

SEQ ID NO: 188803 - DNA, 113 bp, Homo sapiens
ctttgtagtaagcttcgaaatttgctacatgacaatgagctgtcaggaacggaaaacagttcttccttcaaagcatgcagtacctgaagtaatagaagactttctctgcaatt

SEQ ID NO: 188804 - DNA, 75 bp, Homo sapiens
ggaaaccaacagtcacacatgtacattacagtgaagtgcgccacaagcaaaccagctttctttgcagagaagctt

SEQ ID NO: 188805 - DNA, 100 bp, Homo sapiens
ctctctcatcgaggcccaaaccgccaagatttataccatggacacagagatcccctaaggtcctggcccaggcctgcccaaagagaagcccaggatggtc

SEQ ID NO: 188806 - DNA, 99 bp, Homo sapiens
ctcaagatgtggaactgtggagaaattctaggacatgaacaagctatcctttcatcgaggacagcaaacattatggactcagtggcatttgaggatgtg

SEQ ID NO: 188807 - DNA, 75 bp, Homo sapiens
tctcttactacaggagcaaattgccaattctgctccagtgggagaaaacaagtggtaagcatccgtggcattcaa

SEQ ID NO: 188808 - DNA, 80 bp, Homo sapiens
cttcaaccccgagccgctggtgctacagcacaggaagtcctggagaacctgaaggaccgctggtaccaggcggacagccc

SEQ ID NO: 188809 - DNA, 80 bp, Homo sapiens
ttctggaagaagaagaagagcatgatcggcatgtccaccaaggcaggcaagcacgaggagcggcaggacgagcatggcta

SEQ ID NO: 188810 - DNA, 101 bp, Homo sapiens
atccattggtaaattgatcaggatttttggcctaccctccaaagaaaagacaaagaaacagccttggtataatagcacgttagcatcaagacgaaaacgac

SEQ ID NO: 188811 - DNA, 75 bp, Homo sapiens
ccttcaaaccgacgcatactcaggagcagaggaaggcgaagtgatatacacagattggaaaatggaaaaagaccc

SEQ ID NO: 188812 - DNA, 90 bp, Homo sapiens
gagcgagtaaatgttgccttggtttacccacccacgccgactgtgatcagcccctgttccaagtccctcgtctgagctggctcactcgcc

SEQ ID NO: 188813 - DNA, 100 bp, Homo sapiens
acagtatctcacctccctaaactggttaatagtggcatggaagatccatttgacgctgaccggaaaggagattgagattgacattgaacctacagacaag

SEQ ID NO: 188814 - DNA, 100 bp, Homo sapiens
caacatgaaaatgatgagaatgaagacctttatgatgatccactttcacttaatgactagtggagccgccaccaaaatgcagattttcgtgaaaaccctt

SEQ ID NO: 188815 - DNA, 75 bp, Homo sapiens
agaagaagcacgcagaggagccctgggtccacctgcattactatggcctgaggaatgcaagttctagccggtttt

SEQ ID NO: 188816 - DNA, 82 bp, Homo sapiens
aaaagatccagaaaagaggcaaagcaagcgagaagtcgcgggcccagcccacagcagggtgctggagaatctggtaaaagca

SEQ ID NO: 188817 - DNA, 50 bp, Homo sapiens
gaatgaagctgcagaccctcgcagtcaaaatgcagatcttcgtgaaaacc

SEQ ID NO: 188818 - DNA, 83 bp, Homo sapiens
ctcaaagtgcccaaggagcgcctggctcttctccacaaagacacacgggaggcgtgggcagcttcgacatcgccggcctgctg

SEQ ID NO: 188819 - DNA, 75 bp, Homo sapiens
atcccagcagcggattcaccatctcaaaacctatccaggatgggggccccgtttgtctgggccttgggccttttg

SEQ ID NO: 188820 - DNA, 75 bp, Homo sapiens
tgcttccagtgggaatccacattaagaagtacaatagcattcgcggttcttctttgcggtccagttggtccaaag

SEQ ID NO: 188821 - DNA, 83 bp, Homo sapiens
aagtggaccaactatctgagcggggacggcaaaacagaacagaaaggcggagataaaaagaggggtgttaaaagaccacgaga

SEQ ID NO: 188822 - DNA, 90 bp, Homo sapiens
gaggcgggagcggagacctcgctgcgctcatggcgtcgcccggtgctacacacgcagggccctgtcgatggcagcctttacgcgaaggtg

SEQ ID NO: 188823 - DNA, 100 bp, Homo sapiens
gtgttaaagctgaacaggaaccgaatctcagctatcccacccaagatgtttaaactgccccaactgcaacatctatacacatatgggaagcctgtccctg

SEQ ID NO: 188824 - DNA, 88 bp, Homo sapiens
tctgatattgaagaggaagaactgaccagagctgatcccgagcagcgtcatgtacccctgaaaatgtttataggaggccttagctggg

SEQ ID NO: 188825 - DNA, 100 bp, Homo sapiens
tggcccagtatccaggtcgaggttctgcagaaggttgtgactttagtatacagtccacgctgcttttatgagctgtaacactcaccgcgaagatctgcag

SEQ ID NO: 188826 - DNA, 75 bp, Homo sapiens
gggaccatcccaaaatgacagagctctaccagtctttagcactttgttagtgaacgtaaatatgatgaggatctg

SEQ ID NO: 188827 - DNA, 83 bp, Homo sapiens
gtcctggggctctgccgggcgcgtccccggaacgcactgctgctcctcggattttttatcaagcagaaatgcatcgaacaacg

SEQ ID NO: 188828 - DNA, 75 bp, Homo sapiens
acagatgatacctttgatccagaacttgcagcaacaataggctttcagtccagtgtaaagctgttggagcgcggg

SEQ ID NO: 188829 - DNA, 75 bp, Homo sapiens
cgtgggtaggagatggagaaattccaagttcagattctccagaactgataaatttcaaacggaagagagtggcag

SEQ ID NO: 188830 - DNA, 90 bp, Homo sapiens
gaaaaaaaggagcttgccttctgagctttgtaccaaagacctgggaaaagaagaaggtagataatgactataatgcccttcgagaaagac

SEQ ID NO: 188831 - DNA, 100 bp, Homo sapiens
aaggtcatctcggagactagaggctggataccaaatagcagtggaaaccggttatatgtcaccacacccatctccattaggagccccagagcacgtctcc

SEQ ID NO: 188832 - DNA, 96 bp, Homo sapiens
taaacagagcagcagcagcagagatgataacatgtttcagttgaaggagaagagccaggcgtgcggagggaacttggggtccattgaagagctgcg

SEQ ID NO: 188833 - DNA, 90 bp, Homo sapiens
cctgaagcccctcagcgactcagaccctgacagtgacaaagattcttctgatgtagagcgactggaaagattcttcgactcagaagatga

SEQ ID NO: 188834 - DNA, 102 bp, Homo sapiens
cttcgagtgacccgggtgccgaggagcgggaagagttgctgggatagcctgggctggaagctcttctacgtcacaggctgcctgtttgtggctgtgcagaac

SEQ ID NO: 188835 - DNA, 100 bp, Homo sapiens
gacaattgaaaatgaatgaatgtacacacctcattgtgcaagaaccaaaaggagttggggacttttcccagccagacacctctccggacaccaatggtgg

SEQ ID NO: 188836 - DNA, 101 bp, Homo sapiens
tggaacttgtgattgagcagtttgaagacttgctagttaggattttattactggcagcatgtatatcttttatggcggcagctatgccatccacgactccc

SEQ ID NO: 188837 - DNA, 100 bp, Homo sapiens
gcggtgtgggcgcgtcaggccgcgacgagggcgctgagtgttttaactcaaatgggtgatgaaaaggactcttggaaagtgaaaactttagatgaaattc

SEQ ID NO: 188838 - DNA, 75 bp, Homo sapiens
ggctgaggctgcggagagtgtgcggctccaggtgggctcacgcgggaataaccagcaagtacctgtcaagaatga

SEQ ID NO: 188839 - DNA, 100 bp, Homo sapiens
tgggacgtctgagactttctccttcaagtacttggcagatcactctcttagcaggagctctttgttcaatgcctagccacctattcctacagacacggca

SEQ ID NO: 188840 - DNA, 101 bp, Homo sapiens
cggaggacgagctccgggatgctgtactccttgtctttgcaaacaaacaggactcacaccacccggcaagaactgctcactacggctccctgccccagaag

SEQ ID NO: 188841 - DNA, 100 bp, Homo sapiens
aattcatcattcctaatgttgtaaaatacagcccgaactgcaagttgcttattgtttcaaatccagatctgaagaggaatgattatacgcctgataaaat

SEQ ID NO: 188842 - DNA, 100 bp, Homo sapiens
gtggaggccctggtgcccggcccttggtgctgagtatccagcaagagtgaccggggtgaagaagcaaagactcggctcccaggccagtgccagtacttgg

SEQ ID NO: 188843 - DNA, 75 bp, Homo sapiens
ccggagtctctatactcactcgtatgaggtaccagatcatgtttgagaccttcaacaccccagccatgtacgttg

SEQ ID NO: 188844 - DNA, 83 bp, Homo sapiens
gaaagaagtgataggagggctctgtagggatcgcttacacctgagacgaactacagaacagcacgtaccagaggtggaagtcc

SEQ ID NO: 188845 - DNA, 74 bp, Homo sapiens
ccacctttgtcaccagaatgaatgaagtgcttcagatttaaatagcaatagccctctggaacaagacaattcat

SEQ ID NO: 188846 - DNA, 100 bp, Homo sapiens
caaagaaacaagccgtggaataggtgtatcaagtaatggtgcaaagcctgaaaacaagcgagtgagcatcaataaagatgagctgaagtcaacgtcaaaa

SEQ ID NO: 188847 - DNA, 83 bp, Homo sapiens
tttcagcagttggcacacatggttaaggaacaggaggaaaccattcagagaacatacatatgatagttgagaaagacacatat

SEQ ID NO: 188848 - DNA, 75 bp, Homo sapiens
ggaatgattctgatgatgatgatgaggaggcagacagtggggaggaagaatgccggtcacagcccaggaggtatg

SEQ ID NO: 188849 - DNA, 95 bp, Homo sapiens
cgcaaggataaggagcaacagaaggactcacctgtgttttgccgcttctttcacttcaggaggatggctccagaagttgcagctgttgagaggaa

SEQ ID NO: 188850 - DNA, 100 bp, Homo sapiens
ggggactcggagctgagaggagctgctgctcggaccagcgcggaaattcagttcatgaagataagaagtttcttgacaaatacatgccccagttcatgaa

SEQ ID NO: 188851 - DNA, 114 bp, Homo sapiens
agccaagaggaggacagttcgctacacagcaatgcatcgaggagagatgaatggagagtatagaggcagaggatttggacgaggaagatttcaaagctggaaaaggggaagagg

SEQ ID NO: 188852 - DNA, 100 bp, Homo sapiens
gaaggagttccaccaggccgggaagcccatcggagacctgtcggccatggagcctaatgatagtaccagtaccgctgtggaggagcctgacagcttggag

SEQ ID NO: 188853 - DNA, 82 bp, Homo sapiens
acgaagagcaggccagcccggacctctggagtgcccccagcccagagcccgacccaagaagcttcgcttccacccaaagcag

SEQ ID NO: 188854 - DNA, 75 bp, Homo sapiens
atcgctcacccctgttctcggaaaccatccacgaccctgcgcttaaattcctagcgaagtgccgtaagaaaaaga

SEQ ID NO: 188855 - DNA, 75 bp, Homo sapiens
caggtggggagctgccccgtgggccggctggcctgctgtctgccttgggctccctgatattgatgatttggctga

SEQ ID NO: 188856 - DNA, 50 bp, Homo sapiens
cggccttctgcaattccgacctcggttgccatggctgctgttgacagttt

SEQ ID NO: 188857 - DNA, 101 bp, Homo sapiens
agtacaaagacaaatatctggccaagcacagctcgagtttgaagatgccgcatttggattggatgaattccaaattctgcttgcttgctttttaatattga

SEQ ID NO: 188858 - DNA, 75 bp, Homo sapiens
caatttgtacctgcaggcctcctacacctacctctctctgtcatccgtccttggctcaggatttggagagcttgc

SEQ ID NO: 188859 - DNA, 82 bp, Homo sapiens
cgacgagatcttccgcaacctggagaacgccaagcgcttcgccatcgacataggtatcacctcttctgggctcaagatggac

SEQ ID NO: 188860 - DNA, 100 bp, Homo sapiens
tgaagctgtctcaaacattcaagaaaacacacagactccaactgtacaagaggagagtgaagaggaagagaaggaagactcgccagccagatgccaaaga

SEQ ID NO: 188861 - DNA, 90 bp, Homo sapiens
cattttggtgccaagccgaaccgagccggggcgccgggagctattgggacctgcgggctagcttgtcactttctgcaaaggtttccctca

SEQ ID NO: 188862 - DNA, 98 bp, Homo sapiens
gcgggaacgattgggctgagcagaggacgacatgttgcttttcgtggagttactgcaacaaggaggtatacaataaggagaatcttttcaacagcctg

SEQ ID NO: 188863 - DNA, 82 bp, Homo sapiens
agaggaccagactttgttaatgaaggaactgtggctgcaccatctgtcttcatcttcccgccatctgatgagcagttgaaat

SEQ ID NO: 188864 - DNA, 100 bp, Homo sapiens
aatgggtccaggccgtggtcagccgcttcgacgagcagccgagagacacacaagattgcagtattttatgttgctgaaggacaagaagacaaacactcca

SEQ ID NO: 188865 - DNA, 98 bp, Homo sapiens
aatgatccttactaaccacgaccatcaaatccgtgtcggagtccttacagactaagatgcttggtgaagcagctggaaagaggtgatgttaacgtcgt

SEQ ID NO: 188866 - DNA, 75 bp, Homo sapiens
cccccattcattctggattggtggatctgaagtacaaaatattttccaggacttcattgacttaactagagagac

SEQ ID NO: 188867 - DNA, 100 bp, Homo sapiens
tgcccagaaccaaagtgcccttcggtggccactcctggtcagggcaacgggcatgaggaggtagttgcatgcgcctgggatggacagacatatatcattg

SEQ ID NO: 188868 - DNA, 98 bp, Homo sapiens
attctgcatttcaactctagaggaaaaaattgaaagagaaaaggaattagcagaagacattatgtcaggtgaccaagaatatggcccaggtgaccaaa

SEQ ID NO: 188869 - DNA, 98 bp, Homo sapiens
acgcatcactggccgagcccactggggctcacaccacgcaggttaagaatgtctgaggggtcaggcggtgctggcaagatggctgcacttgagaagat

SEQ ID NO: 188870 - DNA, 101 bp, Homo sapiens
gagctggaatctatgggattttcagctcgatacaatttcacacctgggaggtggggaagacagggctccagctaccacaggacgggctctgggtatagccg

SEQ ID NO: 188871 - DNA, 100 bp, Homo sapiens
aacgttctaaaaagaggcgaaaggaagcaagcagttcagaagagccaaggaataaacatgcaatgaacccaaaaggggattcatccaaccatcatttctg

SEQ ID NO: 188872 - DNA, 75 bp, Homo sapiens
ccgggaggaggtgacaaagctaaggatggagttgcaggtgtccagcgatcacccggaagttcaggctgaattctg

SEQ ID NO: 188873 - DNA, 100 bp, Homo sapiens
tgtttggataacctaatcactgtcctgtacaccctcagtgattacacaagtgttggagtgtggatatgagtcatggaactctggggctatgttgctgcca

SEQ ID NO: 188874 - DNA, 100 bp, Homo sapiens
ggcccagaacatgcggcacacctacctaagccccttcaccatcgtcacgcccaacattgcggctgtggacaaattgaatgtaattgatgatgatgtggag

SEQ ID NO: 188875 - DNA, 75 bp, Homo sapiens
aaaatccgcaagaccatcatgcagggctgggttacgacccctacaaccctgagctgcccaagccccccgcgcaga

SEQ ID NO: 188876 - DNA, 60 bp, Homo sapiens
catggaagtccgggagagaatacacagagccagaatcaacagtgagacaattatgaaacc

SEQ ID NO: 188877 - DNA, 82 bp, Homo sapiens
cttctctgtcagctctttccccgtcagcatcccagccgtgctcacggagcgcagctcagctgggctggaactgccctcctgg

SEQ ID NO: 188878 - DNA, 88 bp, Homo sapiens
tttcgcccctcgcgtccggagtccccgtggccaggtgtgcaactgaggaacatggctcaagaaactaatcacagccaagtgcctatgc

SEQ ID NO: 188879 - DNA, 100 bp, Homo sapiens
gtgtcatggcttcagcaagaggccacaagtgtaaacaggaacatcgataagtagtgtaaaaacttgcacaatgaaatccgaagccaaggatggagaggag

SEQ ID NO: 188880 - DNA, 100 bp, Homo sapiens
ctgggcatccagggctcgtacttctgctcgcagctgcatccagatctcattatgcatcagaaaaatgaaaaaacagaggaaaattctatggaggaaagga

SEQ ID NO: 188881 - DNA, 74 bp, Homo sapiens
tgctgcaaaacgtgactccccacaataagaacctacaagcagcaattggcgcctattatgactttgagagccca

SEQ ID NO: 188882 - DNA, 75 bp, Homo sapiens
agcgactgccgcgcgatagtcagggagctgtgcgggtcctggttgcaagagagtgataccaagaagaagcagggg

SEQ ID NO: 188883 - DNA, 100 bp, Homo sapiens
tcaaaggttccgttacagttactatgatgaatcccagggggagatttatagatccattgaacatctagataaaatgatacgtttgaaatggtttctgaag

SEQ ID NO: 188884 - DNA, 95 bp, Homo sapiens
tgattcccaaggaaggctgcaagattcgatgtgccaacgagaccaagctggatcttacagagaaagactatgaaatacttttcaaatctattaat

SEQ ID NO: 188885 - DNA, 101 bp, Homo sapiens
gccaccccgcgggatacgcctcagcgcgtgaactttgaggcgctgatcatcaccatgtcggtagtcgggggaaccctcctcctgggcattgccatctgctg

SEQ ID NO: 188886 - DNA, 81 bp, Homo sapiens
actggaccaagatcgagcccagcgtcaacttcctcaagtcgcccaaagacccaacatgagtgaagtttcctgcaagaaacg

SEQ ID NO: 188887 - DNA, 151 bp, Homo sapiens
cagctcttccagaccttcactgtgcaccgcagccctgtcaccaagatcatgctgtcggagaagcacctcatctcagggcacttttgtgattcccctgcttgtgactgcacaccgggaccccactcaattcaaagacccagactgcttcaac

SEQ ID NO: 188888 - DNA, 139 bp, Homo sapiens
catctgttctttaggaaacttggaaaccttgtgaagaacaccctagaaaaatgtcagagagaaaatggatttattggatgacgtagtagatgaaagtgatgacaacgatgatattgatgtagaagctgaaaacgaaact

SEQ ID NO: 188889 - DNA, 90 bp, Homo sapiens
agagaataaaactccagcgagatccgggccgtgaacgaaagcagtgacggaggagcttgtaccaccgggtcgacatgttaaaacgggtca

SEQ ID NO: 188890 - DNA, 98 bp, Homo sapiens
ggcatctacccctggccttgacgctatctcccatcacctctgctatccagacaggactcaccgagaaagcaacagcccacaattgcctgcattttctt

SEQ ID NO: 188891 - DNA, 82 bp, Homo sapiens
gccagggtggagaagagccagcccagacacttcgtgtatgatcatgtgttcgctgagaagatcacttccttgcaaggtcagc

SEQ ID NO: 188892 - DNA, 100 bp, Homo sapiens
gcacacctgccgacggcttcacagtcctctccaccaagagcctcttccttggccagaagtttcaccaggtgatatggatcggacacaaattgagcttaat

SEQ ID NO: 188893 - DNA, 100 bp, Homo sapiens
gcattcagatgcatcagccgtttgtaaagcacctgtcgtgagccagggcagatgattctggaccagatgaagcctgaggagccttccagctctaagatag

SEQ ID NO: 188894 - DNA, 49 bp, Homo sapiens
ggatcgcccaatccacatgcttttccagctgttccatttcctccaagtc

SEQ ID NO: 188895 - DNA, 100 bp, Homo sapiens
ccctgaccattttctactgtccctgcgcgaggcctgatggaattgggactgtttcagtggaagaaaaagaaagatttgaggagataaaagagagactctc

SEQ ID NO: 188896 - DNA, 101 bp, Homo sapiens
ccagtatttcttcttgtaagacaagcctgcagcgggttcagctgcatattgccatgtttcaggagtattttatcaatcagctgaagatagaaggagttgaa

SEQ ID NO: 188897 - DNA, 51 bp, Homo sapiens
cttacacagtatttaaatggcccaggagttattcctgatgaagctaaagct

SEQ ID NO: 188898 - DNA, 90 bp, Homo sapiens
gggggatgagagctgcaccgcgcgggacaagtcgccggcggcgcccgacggagcaggtacaggtttgcagattccgccagcagcacagca

SEQ ID NO: 188899 - DNA, 79 bp, Homo sapiens
aaggagcaagagcaagatcaccgtgacatccgaggtgcctttctccaaaaggagcgagaacccgagcagcgccatgagc

SEQ ID NO: 188900 - DNA, 50 bp, Homo sapiens
ggcgcgccagagcggcatcgaggaagggaaaaggccgaggcatcagcgtg

SEQ ID NO: 188901 - DNA, 100 bp, Homo sapiens
ccatttccaagagaagagcacagaagagggagaagtggctgctctgcgcctcacggccagatcccagactgcttccccacaacaaagagaaatgatggat

SEQ ID NO: 188902 - DNA, 90 bp, Homo sapiens
gtctttggagaacttctggagctggccaacgtgcaggagtctatccttcactggagtctgatgatgatgaccctgctttgaaatctcgac

SEQ ID NO: 188903 - DNA, 82 bp, Homo sapiens
ccgcgattctcagggattgatcgcctcttcaggtggtgatgatgtccagcaactctgtgaagcaggagaagaggagtttttg

SEQ ID NO: 188904 - DNA, 100 bp, Homo sapiens
ctccctgcatatctgaagcggctcccagtccctgaaagcattaccgggttcgctaggctcacagatctgcaactatgtgggaccagcaaaggttattgtt

SEQ ID NO: 188905 - DNA, 98 bp, Homo sapiens
atgcggctcgtggtggatggcatggggcgctttggcagcaagggcaagtattttgtaaccttcccatatccatatatgaatggacgccttcatttggg

SEQ ID NO: 188906 - DNA, 100 bp, Homo sapiens
agatctggggtctcctgcagccctaccagcacctgatctgcgggaagaacgccagcgaaggagcttaattccgtcgcttctgagctgtctgcacggcagg

SEQ ID NO: 188907 - DNA, 95 bp, Homo sapiens
gccggattatgttttgctttcagaaagaggaatgcctcgacgtcgagaatttgtgatgcagcacttgcagaagcaagagggtgcagtgaatcccg

SEQ ID NO: 188908 - DNA, 75 bp, Homo sapiens
gacatccaggcgaactcggcctatcgctaccctccgaagtccgctgaagaaacacttaaattctggaaatagcga

SEQ ID NO: 188909 - DNA, 83 bp, Homo sapiens
ttcggccgcatccccatgcgcttctcggtgctgaaactatgttccaacttcctgtcaacaatcttggcagtttaagaaaagcc

SEQ ID NO: 188910 - DNA, 75 bp, Homo sapiens
cgaggggctggaacacctcgccaaagcagagaaataccatatcagcgggaacaagattggctgggagaagacggg

SEQ ID NO: 188911 - DNA, 75 bp, Homo sapiens
ggcggagaccccttctatgaccgcttcccctggttccggctggtgggcaggcaaggtgcccggcgacgactgccc

SEQ ID NO: 188912 - DNA, 82 bp, Homo sapiens
cctcagcccctttcaactctacttcaacccgcaccttgtgttccggaagttccaggtgctgccttcacctgcctggagactg

SEQ ID NO: 188913 - DNA, 96 bp, Homo sapiens
ggaattgatctcgccaaaaaggacatctttggagccaggagctctgccagtgccggccgggagaaggcaattgctcctgctgtaaggagtgcatgc

SEQ ID NO: 188914 - DNA, 75 bp, Homo sapiens
tttgatggaatggtctcctgatggtgaatattttgctactgctggaaagattgtagaaggcatgaaacaaaaaat

SEQ ID NO: 188915 - DNA, 48 bp, Homo sapiens
gctgaggaggcggcggcggagatctggttatccatcttggtgcatcct

SEQ ID NO: 188916 - DNA, 98 bp, Homo sapiens
gaggaaccacaagaaaatcaaaagaaacttttgcccttatcagtaacacctgagttttctggatatgccgcagaaggatccgtgccagaagcaagcct

SEQ ID NO: 188917 - DNA, 90 bp, Homo sapiens
cattgatcttaggaggaggtgatgtacttatgccctactgccaataaagggaaaataagagatgctcatcgacgaattatgcttttaaat

SEQ ID NO: 188918 - DNA, 110 bp, Homo sapiens
tggaatctgatcctccacttcagagaacaggggctcatgatcgttcagaaagtggagaattggcatttattaaacaactagttcgaaagatcctaattgttattgcccgc

SEQ ID NO: 188919 - DNA, 100 bp, Homo sapiens
ggcatgagagaacttggcgacgatgggagagaaggtgacttgggacgagctgggtttgaagcgtctgtgggatgtccagtcctcatcaccgggggcatcg

SEQ ID NO: 188920 - DNA, 75 bp, Homo sapiens
atcctccacaccgacaccatctggaggaggcgttgccgtgaggagcaattgtatgatggctatgatgaagagtat

SEQ ID NO: 188921 - DNA, 51 bp, Homo sapiens
gtggacgctgactcggaagtgcagaacccttaggagaaatcttgagagtgg

SEQ ID NO: 188922 - DNA, 87 bp, Homo sapiens
ggagtcggatgagcttggcatttcccaggatgagcagctatccaagtcaagcaagcagagtgctggtagcatcccgtaattttgcaa

SEQ ID NO: 188923 - DNA, 100 bp, Homo sapiens
tcgaagagattgtagagaagctaaaaggagaacttgaaagttcggaccagatcctgtgccggtatcagaatatctggaacatcaacctgcagttgcggcc

SEQ ID NO: 188924 - DNA, 100 bp, Homo sapiens
ctcgatcgaggacgacttcaactatggcagcagcgtggcctccgccaccgtgcacatccgaatggtggcttttcatggcctgccactgaaaatcaagaaa

SEQ ID NO: 188925 - DNA, 100 bp, Homo sapiens
acactgccaagcagccttagccctagtgtagagctttaccgatttgttacaactcaagcaagggccagcagaaattctcttttgacagatataattgctg

SEQ ID NO: 188926 - DNA, 75 bp, Homo sapiens
cggggaggcggcggccgcggcggtcgctgggggccacggagcctgagcttagaccatgctcagcctccaagcagc

SEQ ID NO: 188927 - DNA, 82 bp, Homo sapiens
atggacgtgcggggccctgaagcccccggcgggcgcgcgctgcgggacgcggttttaaaatcaaagatgggaaaatcggaga

SEQ ID NO: 188928 - DNA, 97 bp, Homo sapiens
ggagcccggccggagctgggtctggagacgccgtggcagcctgaacggagtgtgcgacggattgggagagcaaagactcaggtggactgaaggccgc

SEQ ID NO: 188929 - DNA, 100 bp, Homo sapiens
accaaccccataaagtgacacagtacaagaagggcaaggattctctgtacgcccaggcatggccgaaacagaagccctgtcgaagcttcgggaagacttc

SEQ ID NO: 188930 - DNA, 75 bp, Homo sapiens
gctggataccactacatgcagcagcttcctgtggatatcttgatattgcagaccatgcggcatccaacgatccac

SEQ ID NO: 188931 - DNA, 97 bp, Homo sapiens
gatcttcttcactgcctctggcatggatgagttggactaaatgctcttccttcagaggattatccggggcatctactcaatgaaaaaccatgataat

SEQ ID NO: 188932 - DNA, 74 bp, Homo sapiens
aagaggacccaggagaaattcgccctcaaaatcgatgctatagaagacaaacaagggaaggttttttttccttt

SEQ ID NO: 188933 - DNA, 82 bp, Homo sapiens
tgcgaggaaaatggcggcgggaggatattagaaatggctactccccagtcaattttcatctttgcaatctgcattttaatga

SEQ ID NO: 188934 - DNA, 50 bp, Homo sapiens
gtttgacgacactgatggtttgcggatgtgatgctggtacaacccagagt

SEQ ID NO: 188935 - DNA, 90 bp, Homo sapiens
cttgcaggaactgcagaagaagctgtctctgctgatagactccttccagaataactcaaaggactcagaattcatgattgaagaaatgca

SEQ ID NO: 188936 - DNA, 78 bp, Homo sapiens
gtcagtactgattgaattactcaaggctgcctctctgcaaagttgaggtcaaaatgcagatcttcgtgaaaaccctta

SEQ ID NO: 188937 - DNA, 75 bp, Homo sapiens
cacagaccctcgggcctcatcatggccaggaagattcgggaactggagcctctcctctgtcacagtgacaatcca

SEQ ID NO: 188938 - DNA, 100 bp, Homo sapiens
ctgatttctgcagctctgtgtgaaggtaatagcctgcagctggtgttttgagaagccctactgctgaaaacttaacaattttgtgtaataaaaatggaga

SEQ ID NO: 188939 - DNA, 100 bp, Homo sapiens
aaaaatcgccaaaaattacttggagcaaagggcagtcggcggagcttcgccaaggctggcgcagtcgaatgaagaaggagccccacaggaaggaattctg

SEQ ID NO: 188940 - DNA, 100 bp, Homo sapiens
ccacctagaactggattgtgcggattccccagctttccgttgcacaaacagtgaagtgacagtccagcccagcccctatttgagttaccggctacccaag

SEQ ID NO: 188941 - DNA, 101 bp, Homo sapiens
caagaacgtcaaacactccaacgattgagagcatttaaagatgatcgagcggtccacggaccaggtcatcaagcctgttaacctggaagcgctctccaagt

SEQ ID NO: 188942 - DNA, 98 bp, Homo sapiens
cattccaggtcacctatagcctatgagagaggaagaatatattttgacaattatcggcgctgtgtcagcagtggtcagtatatatccgagccgctgtc

SEQ ID NO: 188943 - DNA, 90 bp, Homo sapiens
caatccctcgcctccggaggcggcgaggagcggcggatcaggatcctcatgaccagccaaagagaagaagaattaggaagcataaatcaa

SEQ ID NO: 188944 - DNA, 50 bp, Homo sapiens
gtcttgtggaagatctggaagaaacagctctatgatggaccacggcagat

SEQ ID NO: 188945 - DNA, 82 bp, Homo sapiens
ccagcctgtcatgagacctccaaacccctttggccctgtatcaggagcacagctctaagcgaaagacatgaggcctcagcct

SEQ ID NO: 188946 - DNA, 74 bp, Homo sapiens
tctggacttgccagccccacaatcatgcaatgacatttaaccaagtaatccagacggggccagatgaagaaggt

SEQ ID NO: 188947 - DNA, 100 bp, Homo sapiens
ggtggaaaagatccatgccaagatggcagaaacggtggacacaagcgaaatggtcaacggcgctacagaacaaaggacgagctctaaagagtccagcccc

SEQ ID NO: 188948 - DNA, 110 bp, Homo sapiens
cctgggcttcccttactacctgaagatcaactactcctgcgaggaaaaggctgtcattatttgtatcaaaaacaaagaatttgaaaaggcttcaaaaattttgaaaaaac

SEQ ID NO: 188949 - DNA, 75 bp, Homo sapiens
gcatctaatactttacttgtgaatgaagattcattatgagtatctcttgctcctcctcctccctccatcctacag

SEQ ID NO: 188950 - DNA, 100 bp, Homo sapiens
cttgccgcagccgcctcagaacccgaccaacatccagaacttccagctgcccccaggaagcaatgaggctccccaagaacacacctgaggaaaaggacag

SEQ ID NO: 188951 - DNA, 97 bp, Homo sapiens
aaacactgcagaaaggctatctgaagaaaagtagaaggaaaaacagaacgttgcaaactctggaaaaaaacttggccttatgtttgatcatcggcca

SEQ ID NO: 188952 - DNA, 100 bp, Homo sapiens
gtggaggaaaacaacttcgagggcagaatggagaacttaatgttctggatgatattttaactgaagtaccagaacaagatgatgaactgtataatccaga

SEQ ID NO: 188953 - DNA, 75 bp, Homo sapiens
agttcatctccttctgcatccttaactgagaatgaggattccagtggaatgacactggtgatgcttgccgccgcc

SEQ ID NO: 188954 - DNA, 90 bp, Homo sapiens
tctcttctcagctgtgcacaagatagaagagggacatattggggtatattacagcaggagcgagaacccgagcagcgccatgagcaacac

SEQ ID NO: 188955 - DNA, 83 bp, Homo sapiens
aggatctgggcttggaaatgcctcaggtggctttctagaagatgaccatagaggaccttccagattttccattagaaggaaat

SEQ ID NO: 188956 - DNA, 100 bp, Homo sapiens
ccaccattcctaccaagcagacacagaccttcactacctattctgacaaccagcctggtgtgcttattcaggtgtcaggcccttgaaaggaaaaattctg

SEQ ID NO: 188957 - DNA, 100 bp, Homo sapiens
cgctggagctggtgtgactacggagagaaccatccagctcaacgtcacctggtaacctgactgagtcctgggcagatgataacccccgacaccatggcct

SEQ ID NO: 188958 - DNA, 76 bp, Homo sapiens
ccggcgggaccataagggcttaactcatatatttaacccccctccaaaaagtttctgacgtagaagagcttacccc

SEQ ID NO: 188959 - DNA, 90 bp, Homo sapiens
tacttgaagatagccatcagccgctacgtgactcttttctccaggttttgagaacagagtgctgttttagagctggcagcagcatctcag

SEQ ID NO: 188960 - DNA, 75 bp, Homo sapiens
ttctgtgtcagggaatgctcctggctggtgcggacacaacccaataggctcttgtcaggatggtgaagctgttca

SEQ ID NO: 188961 - DNA, 90 bp, Homo sapiens
accccaagccctgtggccacctctgctgctgtgtggtgcgaggctgtgagcagaacgccgtgcgccacaacctcagcctgcacaagtgct

SEQ ID NO: 188962 - DNA, 100 bp, Homo sapiens
aaccacgaggaggccaccctgggggcgtttctcatctgtgagctctgccagtgtggaaccagcggggaaactgaggctcggggtggagcgcaggattgtg

SEQ ID NO: 188963 - DNA, 100 bp, Homo sapiens
ccttgctgatctgagctcagacctgccaatttaccagagataattgataacaccctgtaacagctgaatgccttcaattaagttgcagagttctgatgga

SEQ ID NO: 188964 - DNA, 109 bp, Homo sapiens
gaagaagtagaagcatcgaaagcgttggagaggtgttaccggaacggcggcgacaagggtgttcccgaactagagtgggagtatgcatcaacaattgtgtcaggaactt

SEQ ID NO: 188965 - DNA, 100 bp, Homo sapiens
gttagcagtcacgacctccagcacagatgccttcaattaagttgcagagttctgatggagagatatttgaagttgatgtggaaattgccaaacaatctgt

SEQ ID NO: 188966 - DNA, 75 bp, Homo sapiens
cttcggtggactccttcggcagtccacccaccgccgccgcctcccaggcggacctacgtgggcgccatgcccggg

SEQ ID NO: 188967 - DNA, 75 bp, Homo sapiens
ggttgactttccaatgattgtcacgagaaagctgcacagtatcaagtcagtaacagatccaagagatggaaagag

SEQ ID NO: 188968 - DNA, 82 bp, Homo sapiens
gccgcgtctccgcgttcccagcccgggtccccgcgttcacagccccagcgcagccaaatgggcggactgttgaagtggctga

SEQ ID NO: 188969 - DNA, 75 bp, Homo sapiens
ccagcctggggcggccggccaggaaccacccgttaaggccgactgcagcagtggcccagggcaaagagtgtgcgt

SEQ ID NO: 188970 - DNA, 49 bp, Homo sapiens
cagaagcgactttggtgagactctggtgctgacctggaggggaagcggc

SEQ ID NO: 188971 - DNA, 98 bp, Homo sapiens
cgtgaccgagagcgcgaatatcgtcatcgttagaaggccaggagtggtggctcacacctgtaatcccagctctgggaggccaaggccagtggattgct

SEQ ID NO: 188972 - DNA, 100 bp, Homo sapiens
aaggaaaaactggagagcttcatcaaaaatagtgatagctttgataagccggattcagaagccagccagagcccacaatacagcttcgagtcattacctc

SEQ ID NO: 188973 - DNA, 74 bp, Homo sapiens
tccagggtccaggttccagcgcccggcggcccagggctggtgaattaccatatctccgtcaagtgcagtaacca

SEQ ID NO: 188974 - DNA, 100 bp, Homo sapiens
ccaaccagtgtgtccaagctgctcggcttggagcaatgacgtccatggtgtgtaaggtggaagcagggaaaggcctggagatgaggaagctggttctctc

SEQ ID NO: 188975 - DNA, 75 bp, Homo sapiens
cgagaacgtgcgggaagagaagatcatcgagcatttcaaacgtaatctatgccagcaattatgacaatgttagca

SEQ ID NO: 188976 - DNA, 100 bp, Homo sapiens
tggaggaggaggatgaatttgatagagagcacatttctagccgaaggcataaagatcgagttgcagggaaaccactgaagccaaaatacagcccttacaa

SEQ ID NO: 188977 - DNA, 98 bp, Homo sapiens
ctagccgctactttgtaatccggatccaggatggtactggctgaatataaaaaagctgtaaccactaatcagtggcaccgaagattagagtttccaag

SEQ ID NO: 188978 - DNA, 98 bp, Homo sapiens
tcctgtacagcctgcagaactgcagctgctggaggaggtgaagtggcatcgatgtcatctttgaaaagtttctactttgtcccttaatgccaccctaa

SEQ ID NO: 188979 - DNA, 82 bp, Homo sapiens
ctggtgtaccaggcgaagctggccgagcaggctgagcgatacgacgcttcggaaccaaaaagaagcttcccagagccggggc

SEQ ID NO: 188980 - DNA, 50 bp, Homo sapiens
tcttcgtaggcggagtcgccgagtcgcttataggctttatactgtggtgc

SEQ ID NO: 188981 - DNA, 100 bp, Homo sapiens
ggcttccagctcagcagggaaccctgcagatccgccgtcactggggtggcaatgtcctgggtcctaagtctgtggctcgtatcgccaagctcgaaaaggc

SEQ ID NO: 188982 - DNA, 95 bp, Homo sapiens
gcctgttggaccttcgagcctagctgctcgcacaggactcggccacctgcccttcctgcaccgactggccaggccttggtatgttcctgcttcat

SEQ ID NO: 188983 - DNA, 90 bp, Homo sapiens
acggagacatgtgactttaccctcttcccctcgaagcaacactccaatgggcaccgtctgcgtcctgctgtccttccccttcatcttcag

SEQ ID NO: 188984 - DNA, 100 bp, Homo sapiens
cagcatgccagggtcatcccgtccagtctctgatcgaaggggagtttccacagtgattgatgctgcctcagttttatgtgctgaaagagttggccagatg

SEQ ID NO: 188985 - DNA, 90 bp, Homo sapiens
ccgaaacgccgaatataatcccaagtgggctcgggatgagtttgaaggcctcttcaagcagccagcagaaaatgtcaaccagtacctcac

SEQ ID NO: 188986 - DNA, 98 bp, Homo sapiens
gctgcctggcccaggcgcacacggaagtgagttcaccgaacagcagaaagaatttcaagctactgctcgtaaatttgccagagaggaaatcatcccag

SEQ ID NO: 188987 - DNA, 98 bp, Homo sapiens
ttcgacgggaccgtctttgagggactcatgtaaagtctctcccttaatgctcagttcttagaagaccgaggatgagtaagagatacttacagaaagca

SEQ ID NO: 188988 - DNA, 82 bp, Homo sapiens
ccgcacaggaaaatctgcccttattctgaaaaggaggacaaatatgaagaagaaattaaacttctgtctgacaaactgaaag

SEQ ID NO: 188989 - DNA, 99 bp, Homo sapiens
gtttgcggttcagccctttgatgaccgcagcagccctcaatctgattggccctcgagctgtggatgtgctgtctgagttgtcctatgcccctatgactc

SEQ ID NO: 188990 - DNA, 75 bp, Homo sapiens
cggggagctacggtaacgatcagtggctgcagttgtgtgacttcattgagacacattacctgaatgagcaggtga

SEQ ID NO: 188991 - DNA, 101 bp, Homo sapiens
caggcggagcagggccttggaccccgcggcgcccctcggcctcggagcaacgagcgcagcgccgttccagggtctccctccactgctgtagtaacccgggt

SEQ ID NO: 188992 - DNA, 78 bp, Homo sapiens
ggtcttcagcgaatgatctttgagaattaaacaaccaccatgtcgagcaaaaaggcaaagaccaagaccaccaagaag

SEQ ID NO: 188993 - DNA, 97 bp, Homo sapiens
gtgcagctccgaagctctttggacctagcaggttcggcggccgggaatggtcctagtgccagatcgtgtcataaaatgtgcattgatattcaacgga

SEQ ID NO: 188994 - DNA, 98 bp, Homo sapiens
acgacctcgctgtgctcccaaagtactttgtgcagtaggagggaaatctggactctttgcctgtttggataggaagatgatccctatgatcttgaaga

SEQ ID NO: 188995 - DNA, 97 bp, Homo sapiens
actccactcaagagctgctcaacaccaccatggaccaccttaatgaattacatgaacgacagccttcgcaccgacgtcttcgtgcggttccagccag

SEQ ID NO: 188996 - DNA, 87 bp, Homo sapiens
caccatgagcaccaagcagatcacttgcaggaacttatgctgtgctatttgattaaaccctctactatgactgacaaggaaatggag

SEQ ID NO: 188997 - DNA, 101 bp, Homo sapiens
gagcatagagacgctactggaggcggcccgcttcctggaatggcaagcgcagcaacaacagagagcacgtgaaatggtggagtcaatgaagaaagtagcag

SEQ ID NO: 188998 - DNA, 90 bp, Homo sapiens
gaaggcaactgtgtttcacttaccagaatactacgttcagctaaattaagtttaatggatcgagaagtggcgttgcttgctgaaatggac

SEQ ID NO: 188999 - DNA, 80 bp, Homo sapiens
caccaccggcttccaagcaaccaacttcgggcgcgctgtacagcaagtcaatgccatggctaccacatactgttgattgt

SEQ ID NO: 189000 - DNA, 96 bp, Homo sapiens
cggtttgggagaaggagaatgtaaaattgcattgctccatagcaggctggccagaacctcgtgtcacgtggtcatttgattgcccgcctcagaacg

SEQ ID NO: 189001 - DNA, 83 bp, Homo sapiens
ttactggaaactggatgcagcaaggaaataggatttaaccgctctctgcctcccagtaaaggcatgacttcctggcaccacag

SEQ ID NO: 189002 - DNA, 75 bp, Homo sapiens
agcctttcctgacatgcacaactccaacatcagcaagatattggctgtcacaagatgaaggtagaggcacattat

SEQ ID NO: 189003 - DNA, 98 bp, Homo sapiens
ggattttcagctcgatacaatttcacacctggtcagtatgggaatcctttaaataaatatatcagacattatgaaggattatcttacaatgtggattc

SEQ ID NO: 189004 - DNA, 98 bp, Homo sapiens
gcatctggacccgccggcgccgctgccgttggtgatctggcatgggatggaaatgcactcggtgatggaaagagagccactattctgaagaacacttg

SEQ ID NO: 189005 - DNA, 98 bp, Homo sapiens
ataaagatatacaagattccctaacagtgtctgtgggaacattctccatggccagtgaggaagtcttgaagaatagagccataaagaaagcaaagcgc

SEQ ID NO: 189006 - DNA, 75 bp, Homo sapiens
cagctctgctgagagagtgcaagccgtggggattattcaagatcaggttgtagccattttcaacaaggatcactg

SEQ ID NO: 189007 - DNA, 74 bp, Homo sapiens
tcagtttgatgtccagaggaagtacttcaaggaagctcttgatagaaatggctattcctacaaagtggcagtcg

SEQ ID NO: 189008 - DNA, 83 bp, Homo sapiens
agtccaagaacagcatccagtggaagtgcccattctgcatttattccaccaaccgccccgctgccatggagtgccacctcaag

SEQ ID NO: 189009 - DNA, 82 bp, Homo sapiens
cagaacccggccctcaccgccctcaccacccctatccagacggctgcccttcaagtaccaggggaggtgaccatccactaca

SEQ ID NO: 189010 - DNA, 75 bp, Homo sapiens
cggcgcggggtgagcgtcgaggaggcgcaggagactgaccgcaacggcagggactggaatgtcacgtggaatacc

SEQ ID NO: 189011 - DNA, 82 bp, Homo sapiens
ggaggtgttccacccgacgcatgagtggcaggcccttcagccagacaagttggatggcttgaggactggtactaaaaggaaa

SEQ ID NO: 189012 - DNA, 132 bp, Homo sapiens
gtaaatgaagatgccaaccaggcggaaaaaaacacagtcatgggcagagttcttgaggaagccagagaacgccagatcaagtgtcccaagtgtgataagctgttcttgagaacaaatcacttaaagaagcat

SEQ ID NO: 189013 - DNA, 98 bp, Homo sapiens
aagcccatgttgcagcgggactttattaccgctttaccaggttatatcttaagtgtggtgctgctaacattgcccaggcagcatctggttcagcttta

SEQ ID NO: 189014 - DNA, 100 bp, Homo sapiens
ttttttcatattacatctacaagaggggacaagtacctttatgaaccagtgtatcccaagaagcagctcttgaagctcaccttgtccctgtcttgcactc

SEQ ID NO: 189015 - DNA, 90 bp, Homo sapiens
agtactcatcgactgatgtggcagactttgctccctggcaaaaggctggtgaattaccatatctccgtcaagtgcagtaaccagttcaag

SEQ ID NO: 189016 - DNA, 75 bp, Homo sapiens
gtggtattcgccggcacgcgaagtggccgcatccgcaaggacctgtggcggatccggagcccctgtggtgactgc

SEQ ID NO: 189017 - DNA, 83 bp, Homo sapiens
actgccctggcacccagcacaatgaagatcaaggaagaggatcacctagcccgggtagaagaggcaatcacccgtatgcttgt

SEQ ID NO: 189018 - DNA, 98 bp, Homo sapiens
tcccaagtattcactctatgaagtgcatgtcagcggagtgacaaccatgagtggaaaaaactaattatggttcagcactggcctgagacagtatgcga

SEQ ID NO: 189019 - DNA, 101 bp, Homo sapiens
atccaacccaccaccccatcagagccaacagcaattaaaagtcagttaaaaatttgtaagatttctgctcatggcagatcttcttccaatgtaaacggtgg

SEQ ID NO: 189020 - DNA, 75 bp, Homo sapiens
cccatcactgcttccctcagccataacagatatggaatgtgcagatgtcccactattaactccaagcagcaaaga

SEQ ID NO: 189021 - DNA, 75 bp, Homo sapiens
ggggtgatgaagatggttatgaagaagaagaagatgagaacagtagacagtcgaaatgactgctgtccatgcagg

SEQ ID NO: 189022 - DNA, 74 bp, Homo sapiens
tctgtgccagtagtgggcatgtagaggtatggaacccttcagatcaaagcttaccaataaattcagtatgtaga

SEQ ID NO: 189023 - DNA, 100 bp, Homo sapiens
cggcgctgtagtgcggcgtgggagccccaggttctttagtggaagaacgcgaagcgaggatgaggtctcctctgagcctccggcctccataagacccaaa

SEQ ID NO: 189024 - DNA, 100 bp, Homo sapiens
gcgggaaatcgggctgaagcgactgagtccgcgatggagggcgtgatggtgggcatgggtcagaaggattcctatgtgggcgacgaggcccagagcaaga

SEQ ID NO: 189025 - DNA, 80 bp, Homo sapiens
aagttgcctcttctggtgtcaaagcttttggacattcctggggaagcgcctcttggacgcgtgtgaccgatgcccagatt

SEQ ID NO: 189026 - DNA, 100 bp, Homo sapiens
cgtggtgacattgtatcattggtactatgtcttcagcagtggtgcagttatatgcagcagatcggaactgtatgtggtcaaagaagtgcagtggtgttgc

SEQ ID NO: 189027 - DNA, 100 bp, Homo sapiens
ctttgaatgtgaaccagctttctacacatgcgtggaagtcactgctggaaacagatcctgataacttaagtgactctctcttttccggtgatgaagaaaa

SEQ ID NO: 189028 - DNA, 90 bp, Homo sapiens
gcttcatcaaaaatagtgatagctttgataaaggcggggtttcaccatgttgcccagactggtcttgaactcctgagcttaagcaatcca

SEQ ID NO: 189029 - DNA, 101 bp, Homo sapiens
cctcttcaacatcatgatggagaactcagagagtgagacttttgacacgttagtctttgatgctctggcaatattacataatttcagttccacaaatccaa

SEQ ID NO: 189030 - DNA, 95 bp, Homo sapiens
ttcttagtgaaaagcaaacacagggatctgaccgccctatgcaaggaatatgaaaaattagctgccagtttaaatgaagcaagacaagaactaag

SEQ ID NO: 189031 - DNA, 75 bp, Homo sapiens
gagataattgataacaccctgtaacagctgaagatggaatttcaccgtgttgcctaggctggtctggagctcttg

SEQ ID NO: 189032 - DNA, 100 bp, Homo sapiens
ccagattgtacagtccatttctgacctgaatgaaatattcagggacttaggggcgatgattgtagaacagtttcgccgtgaggaagatgcggaaaaggct

SEQ ID NO: 189033 - DNA, 75 bp, Homo sapiens
agaggagctggccaagaaatgcagcatcacagtgtcacagggtcatgtaggtacaacagcaaccaagaagatcga

SEQ ID NO: 189034 - DNA, 98 bp, Homo sapiens
tcggtcacgaggtggaagaggtagaggacgatactctgaccgttttagtagtcgcagacctcgaaatgatagacggtgccatggagaactggggcctt

SEQ ID NO: 189035 - DNA, 100 bp, Homo sapiens
ctgaagaagcccacgcagattttaattcccactctagattctgacatcacttagtgctcttacccagctgatgaaaaagatgccccatttccgaaaacag

SEQ ID NO: 189036 - DNA, 100 bp, Homo sapiens
catggcttggagcacttcctattccactggattgggaaagaccatggcaggaacttgatgggaaacctgcttctcctactccggttattgtggcctccca

SEQ ID NO: 189037 - DNA, 96 bp, Homo sapiens
gataaatcagacagaacagttaatcctcaatttaagcctgatctaacccctagaaacagccaaaattgaccaagaggcagaggaaaattcactgac

SEQ ID NO: 189038 - DNA, 100 bp, Homo sapiens
gctgagatgggcaccgcggatctggggccgtcctcagatctttaatctcatgaagtacgacagctacagccgcttcttaaagtctgacttgtttttaaaa

SEQ ID NO: 189039 - DNA, 82 bp, Homo sapiens
ctctctcgctgtgagacatgtctgagactcctgctcagtgtagcattaagagagaagaagaaggaggttcctgctgtgccag

SEQ ID NO: 189040 - DNA, 75 bp, Homo sapiens
ctgaagttacacccatcacagaattttcatagagctggactattggaaggatctcactggcatcgaatctatgga

SEQ ID NO: 189041 - DNA, 75 bp, Homo sapiens
ctttctttggaagtacagcagaggccttagaactttacagactagcatggcaaagcttctctccgatcttagtgt

SEQ ID NO: 189042 - DNA, 79 bp, Homo sapiens
agaagaaggctgctattgaaagagagtatgcacagatttgaatataacctgccgctttgcaggtgtattccacgtggag

SEQ ID NO: 189043 - DNA, 106 bp, Homo sapiens
cagcggtggccacacgtcacacagtggggacaacagcagtgagcaagccagagactgctgctactttgaaacgtacgatagaggccctgatggacagaggagcaat

SEQ ID NO: 189044 - DNA, 90 bp, Homo sapiens
agtgaagcctgcctacagttttcacaaatctctatacacagaatgggattttacatatgctggacagaaataagagaatcaagccccggc

SEQ ID NO: 189045 - DNA, 82 bp, Homo sapiens
atcctgctgggcttcgtccagatcgggaagggaggctactcacagtcgaactacaactccccggggtccggccagaactaca

SEQ ID NO: 189046 - DNA, 75 bp, Homo sapiens
gacaccttctcaggttgcctttgaaataagaggaactcttttaccagttaattggccttggtcctcacagctcca

SEQ ID NO: 189047 - DNA, 100 bp, Homo sapiens
tcggccaagaagataatcgtcaagcacgtgacggtcatcggcggcgggctgatgggcgccggcattgcccaggtggaaaacgaagctcattcccaacgtg

SEQ ID NO: 189048 - DNA, 101 bp, Homo sapiens
ggatcctgtaaatccctatccagagtttttggagctgtacaggtctgctcaccaggtggccagataccgcccacgtgcccccatcattgctgtgacccgga

SEQ ID NO: 189049 - DNA, 87 bp, Homo sapiens
ggttcctgaacctgttgccagatggtgcaatgttcaaagtactcaagatgaatttgagatcctaattatctcatggctaatgaacgc

SEQ ID NO: 189050 - DNA, 100 bp, Homo sapiens
ctcgtatgcaacctcaggcttcagccatggggtgccgaggctcaggcagcatgacgacggagacctttgtgaaggatatcaagcctgggctcaagaatct

SEQ ID NO: 189051 - DNA, 80 bp, Homo sapiens
ccgggttctccgcccccgccgccgccattacggagctcccagtggagcttactccacgggaacagcctctagataatctg

SEQ ID NO: 189052 - DNA, 80 bp, Homo sapiens
gcggctttcggcaagaactggattcgtggcgccacaagctcattcactgtgtagttttctttttaaaagcggaaggagag

SEQ ID NO: 189053 - DNA, 98 bp, Homo sapiens
tggaccctcctcccaactgtagggtacatccccagttacttagacaaggacgagctctgtgtagtgtgtggtgacaaagccaccgggtatcactaccg

SEQ ID NO: 189054 - DNA, 98 bp, Homo sapiens
aagcgacggcccgtacaaagacagaagcgttggtttcaggccatgatccaaaggaaccagagcagttgagaaaactgtttattggtggtctgagcttt

SEQ ID NO: 189055 - DNA, 75 bp, Homo sapiens
catcacgcagaaggggtgaaagagactcggtgacagatacaggtgtgtagctgggacggtgctggtctgagctgg

SEQ ID NO: 189056 - DNA, 100 bp, Homo sapiens
agaaagcaggcgaacccgcggcgcaataacggttcctaaatatttgtcacagcaatgggctaaagcctctggaagaggtgaagttgggaaactgcggatt

SEQ ID NO: 189057 - DNA, 100 bp, Homo sapiens
aacggagctgagacgcacctcccagagccttgagatagaactccagtcccatctcagcatggttctgtacagagtaatgagatgtgtgacggctgcaaac

SEQ ID NO: 189058 - DNA, 75 bp, Homo sapiens
gctcaccgaagatggaagggacaggcaagaaggcagtggctggacagcagcagattgctgagctgaaaagaggtg

SEQ ID NO: 189059 - DNA, 90 bp, Homo sapiens
ggagagtgtctccagcatcctgcaagtggctataatagatgaatttgagcagaagcttcgggcctgtcataccagaggtttggatggaat

SEQ ID NO: 189060 - DNA, 51 bp, Homo sapiens
ccacacagtgtccagatacgaggcaattttccagattattcaaagtatcag

SEQ ID NO: 189061 - DNA, 82 bp, Homo sapiens
cccgtgccgcgagcgcggcctgcaggagtttccccctttctagggtgaggatggttctacacagccacccggagttccttag

SEQ ID NO: 189062 - DNA, 100 bp, Homo sapiens
ctacatcttgggtatcctgcaggaggaggaggaagaagagaagctggacgctctgcaggggatcctctctgctttcctgattgtcactgctgttccaagg

SEQ ID NO: 189063 - DNA, 99 bp, Homo sapiens
aaaagaagacggtgggatcaggagatggtaacagtacttcaatttctaccttaaggacttcctgtctactgggttgtgcagtaatgcaagataacccag

SEQ ID NO: 189064 - DNA, 82 bp, Homo sapiens
cttaccaaggaatctgcttttcaagtatgccaccaacagtgaagaggctcgtgaagaagaaatgactgcaaaagtaagggac

SEQ ID NO: 189065 - DNA, 100 bp, Homo sapiens
cgtctctcgcgagcaagcttcctttttggccagctccttcagttcactagagaaaaaatccttattgcgagataacgtggacctattgggaagcttggca

SEQ ID NO: 189066 - DNA, 75 bp, Homo sapiens
cttgagcatcgcatccacggattcctttgcttccgcagcagaggtggaacacctacataatttcattttgtttcg

SEQ ID NO: 189067 - DNA, 75 bp, Homo sapiens
ggggcctcaacaagcaaggctacaaatgcaggctctggagggcagtatgagctttttgctgtgattgcgcacgtg

SEQ ID NO: 189068 - DNA, 74 bp, Homo sapiens
cggacgcaaagctgtcatcgtgaagaacccagcaagtccctataaccttgcatataagtataattttgaatatt

SEQ ID NO: 189069 - DNA, 80 bp, Homo sapiens
catgtctgcgagccaggattcccggaccaagaatcgccttcagccctgtctggtgcatccttggcagaaagtgaggagga

SEQ ID NO: 189070 - DNA, 102 bp, Homo sapiens
gcctgaggcagccaaagaggaagcagcttgggcttccagctcagcagggaaccctgcagacaatgcagatcttcgtgaagactctgactggtaagaccatca

SEQ ID NO: 189071 - DNA, 51 bp, Homo sapiens
tttccctatggagccagttacgaccgaagtgattcgcctttgccagtctca

SEQ ID NO: 189072 - DNA, 83 bp, Homo sapiens
gaaaagatgaaacggaccctcaaaatgatgcttcaacacccaggccaggtctctgcctcggaagtgagtgcttctgccatcgt

SEQ ID NO: 189073 - DNA, 100 bp, Homo sapiens
gtaatttgtgaaagaagcaaaaataaatctgtggaactgaaggagcggatcagagagtatttaaaggggggggccctcagcctcttggccttgaacgggc

SEQ ID NO: 189074 - DNA, 75 bp, Homo sapiens
caaggagctaaagcagcgtgcgttcagccctgggacggtctggaaaatcccgaagcagaagcccgtattcatcta

SEQ ID NO: 189075 - DNA, 75 bp, Homo sapiens
gttaatcctcaatttaagcctgatctaacccctagaaacagctctttcgacgtgtagcagcagctttgccgggaa

SEQ ID NO: 189076 - DNA, 93 bp, Homo sapiens
tgaggtccgcggcagggtcccgcatggcggcgcacaggaagcacgacaatgcagatcttcgtgaagactctgactggtaagaccatcaccctc

SEQ ID NO: 189077 - DNA, 88 bp, Homo sapiens
tgctgtgtcgacatgtagctaacaccatttgtaaagcagatgctttcagaatgaccgaagaagcatgccgaacacggagtcagaaacg

SEQ ID NO: 189078 - DNA, 100 bp, Homo sapiens
cataaattctgaactcaaagacgacttgcttttgtatcaggacgaggaggcgctgaacgactccattatttctgctactcccgagcccggagaggaccca

SEQ ID NO: 189079 - DNA, 89 bp, Homo sapiens
ggacgccgaggcctcgggcgggggctggcccggggttccagtccaaaagaaactcttccttcaaaacctgtgaagaaagagaaggaaca

SEQ ID NO: 189080 - DNA, 98 bp, Homo sapiens
caggttaggccgagctttgcgggaaagcagcggctgcactccccgaaagtgcggcagaggtgtcaccgatgtcgtcatcaccagggaggaagcggagc

SEQ ID NO: 189081 - DNA, 100 bp, Homo sapiens
cgacgtagctgtcaacagcgacttctaccggaggatgcagaactagatgaacggcgcaaaaggaggcaagaagaatgggagaaagttcgaaaacctgaag

SEQ ID NO: 189082 - DNA, 75 bp, Homo sapiens
tccgagtctccgccgctgcgggcccgctccgacgcggaaggagctcagggcaagtggcagtagccagaggatgtt

SEQ ID NO: 189083 - DNA, 82 bp, Homo sapiens
tggagctcatgccactggtcaccctccccaaagagctactggaaacctgaagtgatgattgctgctcagggaccactgaagg

SEQ ID NO: 189084 - DNA, 95 bp, Homo sapiens
tttctttcttcatgaccctgcccttgccagaatttcctgcgctgttccacctcattcaacttcaggcccagctgagagccagcctggaggttacc

SEQ ID NO: 189085 - DNA, 100 bp, Homo sapiens
gcaaaccgagacaagttcaccccgaagtctgccggcccgccatgttcatagaggataaagcagtagacaccctggcttacctcagtgacggtgacgcccg

SEQ ID NO: 189086 - DNA, 50 bp, Homo sapiens
ggcgccgcggctcttttctaaaagttacttcctcctgtgctggttccaag

SEQ ID NO: 189087 - DNA, 100 bp, Homo sapiens
cacagcaagttcctgcttctgggacagctctactgacgctcttcaccaccaggagtgttccttgagaaggactatgagatttaccgggattacagtgcgg

SEQ ID NO: 189088 - DNA, 51 bp, Homo sapiens
gaaggacggacttcaggggcaggtcctggctataagtcaccatggcacagc

SEQ ID NO: 189089 - DNA, 83 bp, Homo sapiens
tccagagcgtgaagatcaagatcgggtgcttcaaggatgaccgcatcgtcttctggacttggatgttctccacctacttcatg

SEQ ID NO: 189090 - DNA, 75 bp, Homo sapiens
atgactggagaggatggctactatttcaccaatctgctgcattaatactacattgtcaaagacaaagacgaacat

SEQ ID NO: 189091 - DNA, 96 bp, Homo sapiens
gagcttctggcctttcaggtgttgaagcaactgcagtggccacaagtaatcatcctgagactgactacaagaacaaagactgggtcttcatcaatt

SEQ ID NO: 189092 - DNA, 50 bp, Homo sapiens
caagtcatcagactgcataaaatcaggccgtggtggtggaggcagtggag

SEQ ID NO: 189093 - DNA, 100 bp, Homo sapiens
acagcgaggaggagatgaataagtgggttcgttgtatttgtgacatctgtgggtttaatccaacagaagaagagatgtggtcttgctatgttgcccaagc

SEQ ID NO: 189094 - DNA, 90 bp, Homo sapiens
agcaagatattgacgacctcaagcggcagaatgctcttctggagcagcaagcaattcatgatgaccaataaactggacacggcaatgtgg

SEQ ID NO: 189095 - DNA, 82 bp, Homo sapiens
gagctcacttggccaatcatgatgaactaatttccaaggtatgagggtgctggttgatgctcgagagaagcttcatattccc

SEQ ID NO: 189096 - DNA, 51 bp, Homo sapiens
gacatacaccatgggggaggccagtgtggaaagctgtatgtgatggcttct

SEQ ID NO: 189097 - DNA, 82 bp, Homo sapiens
cggccatcgtcatcctgctgctgaagatctggaagacgcgctcctgcgccgggcctgcggcctcaccatggacccagaatgc

SEQ ID NO: 189098 - DNA, 101 bp, Homo sapiens
cattggtctgcaggacatcactttagatgatgtactaaggctcgtacgtctgcatcgattatcttacgtggggcaaatgatttcatgtgtgatgagatgga

SEQ ID NO: 189099 - DNA, 78 bp, Homo sapiens
ggaagtgtagaacgtcattcagagggcaagcgacttggtaatgaaggtggatgctcttctgtcagcgcaaccaaaagg

SEQ ID NO: 189100 - DNA, 100 bp, Homo sapiens
ctttggagccggccccaggcagcgtgtgtcggtcgcctagtctggagaactagtcctcgactcacgcaaagaatggctcaagaagtactgacacatttaa

SEQ ID NO: 189101 - DNA, 97 bp, Homo sapiens
aggtgcgcagcgagcgctccgagcggcgcgcaccaggcggatgccccagccggggcccagcgaacgccagcccttagagatttgtttgattccatgg

SEQ ID NO: 189102 - DNA, 98 bp, Homo sapiens
gtggataccgtcaagctggccaagcacaaagagcttgctccctacgatgagaactggttctacacgcgagctgaataatccagaatggctactctgat

SEQ ID NO: 189103 - DNA, 50 bp, Homo sapiens
ggatagcatgagctcagacaccgccagggaccctgatgctcccataagac

SEQ ID NO: 189104 - DNA, 75 bp, Homo sapiens
cgaagcgcccggagcgggagcgagcggcgcggcccggactgctccattgctggctgcctgcggttccgctgtgac

SEQ ID NO: 189105 - DNA, 73 bp, Homo sapiens
tggagagcccgtccgacagcgctgagttgactatattgtggagtatgactatgatgctgtacatgatgatgaa

SEQ ID NO: 189106 - DNA, 74 bp, Homo sapiens
gccgagtcgcgcggaggcggaggcttgggactggtcgaattgacaaatcttaccctacagtatgtggccacaca

SEQ ID NO: 189107 - DNA, 90 bp, Homo sapiens
cagattcgcagtggtcgcttcttctccttggtgaccattgtgaggtagatattttgttctaattttccagatgaggaagctgagacccta

SEQ ID NO: 189108 - DNA, 74 bp, Homo sapiens
aagaaggcgtttgctgaagcaaggagaaatatgggtgactatgaccagagcaggaccaaagtgctgcacatgag

SEQ ID NO: 189109 - DNA, 100 bp, Homo sapiens
ggcaactggagaaggcaaggcagctgttctgaaggtgaaaattagttctgctgtgcttaaagctgcggcccatcactatggagctcaatgtgataagccc

SEQ ID NO: 189110 - DNA, 98 bp, Homo sapiens
ggagccgctggggtcccttttgcctcagatactattttgaaggcccgatgagagaaagggaaagttaaggatgctggagcagaacaatggatttctct

SEQ ID NO: 189111 - DNA, 100 bp, Homo sapiens
acatcagtttcatggtgaaacgcataagacacccagtcagcttgaagagtttcaaatggaccctaccactgagaaatcaagatggcagtctactatgggg

SEQ ID NO: 189112 - DNA, 100 bp, Homo sapiens
cccagactctgttggatcagaaggtcaaggttctgctccagacgagcccttaccacgttgactcactcctgcagctcagcgatgcctgccgctttcaaga

SEQ ID NO: 189113 - DNA, 100 bp, Homo sapiens
cagcccgcggcgaccaagatcaggaacctgccctggcagcccctggaagagatcatcacctactacccagccatgaaggctgtgaacgagcagggcaagg

SEQ ID NO: 189114 - DNA, 98 bp, Homo sapiens
gaatgtgcagtcacagagaaaggggaacccacctgtctctgcattgaggtgagaagccatacaaatgtgaattgtgtgataaaggatttgctcagaaa

SEQ ID NO: 189115 - DNA, 99 bp, Homo sapiens
catgttctccaaaatggccacttacctgactggggaactgacgggatttttttcccaggaagccatcccgtcagaggggttcaagtgatgaaagttggc

SEQ ID NO: 189116 - DNA, 51 bp, Homo sapiens
tgcacccagaggaccaggcggcggttttttgccctgacatctcttcgtctt

SEQ ID NO: 189117 - DNA, 75 bp, Homo sapiens
agcgcccctccgagctggggttggacgctgccagtttgcacagcagcagggaccattgcaatttagagatgtggc

SEQ ID NO: 189118 - DNA, 100 bp, Homo sapiens
cccagataagaaaaagcgcaaggcaaatacacagtttcagctccagaatttgtttttgaacatggctatcaaacttacctgcccacggaaagtaatgaaa

SEQ ID NO: 189119 - DNA, 60 bp, Homo sapiens
gacaacattcagacccatttccagtcatgactccagaacctgggtatcaacccagcaaac

SEQ ID NO: 189120 - DNA, 101 bp, Homo sapiens
gggcggaatgacagcggcgaggagaacgtcccgctggatctgacccgagatagggccagatttgagtgtgtgaatttttgagtgaaacctggaacccaaat

SEQ ID NO: 189121 - DNA, 82 bp, Homo sapiens
aggcaaggagctaaagcagcgtgcgttcagccctgggagctgtttcccattcagatggagggtgtcaagctcacagtcaaca

SEQ ID NO: 189122 - DNA, 80 bp, Homo sapiens
gtgattactccaagtcagaggcagcagaagccaagtgcttgatgctagctgaagttaagtgggcagaccaacatccacct

SEQ ID NO: 189123 - DNA, 75 bp, Homo sapiens
accgagagcgcgaatatcgtcatcgttagaagctttgtgtccctggtgatgttggaacattaatgatggaacatg

SEQ ID NO: 189124 - DNA, 100 bp, Homo sapiens
aaaatggaaattcaggagatccaactgaaagaggccaagcacattgctgaagatgccgaccgcaaatatgaagaggtggtggctttgagtgggatgatga

SEQ ID NO: 189125 - DNA, 99 bp, Homo sapiens
cgccggcaccatgggctgctgcaccggacgctgctcgctcatctgcctctgcgcgctgcagttgtgcctggagccctgcaaggaatcaggggacctgag

SEQ ID NO: 189126 - DNA, 114 bp, Homo sapiens
ctgggacctgggaacctactgtggggccgcggccggaccgagcgcctcgacctcggtctgagacaatgcagatcttcgtgaagactctgactggtaagaccatcaccctcgagg

SEQ ID NO: 189127 - DNA, 100 bp, Homo sapiens
cggaggcctcgggggcgtacaggcgcagcggccgcagcagcagcggcagtcacaggcacatcagcaaagaggtagtatagatcaatcagtgttaaaagaa

SEQ ID NO: 189128 - DNA, 90 bp, Homo sapiens
tgacaccagcacagcaaacccgccgggatcaaagtgtaccagtcggcagcatgggtgacagagctgaatgaacctctctccaatgaagat

SEQ ID NO: 189129 - DNA, 98 bp, Homo sapiens
gccgaggctacagagccggcggcaggggatggcaagatagcggcgcgggagcgtaccggacacagcaggtcaggagagattcaacagcattacctcag

SEQ ID NO: 189130 - DNA, 83 bp, Homo sapiens
cgggtctcgggggccgctctgggatcccggccaccagcaattgtccgtgcctacaccaactaatgttacaattgaatcctata

SEQ ID NO: 189131 - DNA, 83 bp, Homo sapiens
agatcatcgagcatttcaaacggaaccacgtgaatgttgagggggcgacacacaagcaggtggtggacctgattcgagcaggc

SEQ ID NO: 189132 - DNA, 90 bp, Homo sapiens
cgagtatgagcagttcatcgcagggacctctcccaatgttgctcgtaatgccattgtcaactgtgctgagctggtgacctatgacctcat

SEQ ID NO: 189133 - DNA, 96 bp, Homo sapiens
gcggcgggaactgttggccgcgcggcctcgggaacggcccaggtccccgcccgcaggtcccgggcaggactttgtttggagaagctgcctatttct

SEQ ID NO: 189134 - DNA, 100 bp, Homo sapiens
atgacttgcaattcctgtgtttggaccattgagcagcagattggaaaagtgaatggtgtgcatcacattaaggtcttatcacaatggccatacttagaac

SEQ ID NO: 189135 - DNA, 75 bp, Homo sapiens
caggagtactccacagaggataaatttcaacctccggggccacaatagcgagcgtactgtaagaactctgtggac

SEQ ID NO: 189136 - DNA, 90 bp, Homo sapiens
tgctgttaacaactcagcggctcgagaagaagttgacagacagctgtgcagagatgccatcttccccatccctgtggcctgtgatgcccc

SEQ ID NO: 189137 - DNA, 100 bp, Homo sapiens
cgcgcctcgaggccgagtcaagatgacgtccggttgtttgccttcgtgcgcttcaccaccggggatgccatgagcaagaggtccaagtttgccctcatca

SEQ ID NO: 189138 - DNA, 97 bp, Homo sapiens
ttgaagggtcggaaacgccctacgtggacaggacacccggcccagcttttaagacggaatcagtccccaatgcctggaaattcctcattggattact

SEQ ID NO: 189139 - DNA, 100 bp, Homo sapiens
ggacaagaccatcgagctcatgacaacgactgaaagacctttcattcagaagctgtttcgtcctgtggctgcagatggacagttgcacacactaggagat

SEQ ID NO: 189140 - DNA, 98 bp, Homo sapiens
tggagaacctggcacttatgtcctccctggacgaagttatacggaagcgtctcctcattgatggagatggtgctggagatgatcggagaattaatctg

SEQ ID NO: 189141 - DNA, 82 bp, Homo sapiens
taccccactcctgggccgtccctgaagaatgcaagttctagccggtttttcctacaaggaatccagttgaatacaattcttc

SEQ ID NO: 189142 - DNA, 74 bp, Homo sapiens
aggcatcaaggcatactcctgagacctcatatggcaaactgcgaccttgccggatggagtgctgtgatgtgcca

SEQ ID NO: 189143 - DNA, 82 bp, Homo sapiens
ttccgagaggaacctctatgccgacatcgacgccgcctggcaggccctgcgcaccagatatggctcgtggacagcagaaaat

SEQ ID NO: 189144 - DNA, 98 bp, Homo sapiens
gataacgggaggtgaatttccatgtcaacatagtcctgggcagcgaggtcacaggccccacctttgctgatggcgagctcatccccagggaacccggc

SEQ ID NO: 189145 - DNA, 75 bp, Homo sapiens
aaagtgttgagttggcttttagttgccaccttccagagaagaggtacgagatgacaagacaaccataaagtgtga

SEQ ID NO: 189146 - DNA, 111 bp, Homo sapiens
aaaagcggtacattgcttcttatttagcactcacagaatgcctaccgcaggaatgggatggcttttctagcctgctgatgtgacaactgtgatgtgcctgcaacaacagga

SEQ ID NO: 189147 - DNA, 75 bp, Homo sapiens
gaaacatatgttacgatagccgcagaagtcaattcatctggaaagactatctctgagtcagacttaaaccactct

SEQ ID NO: 189148 - DNA, 75 bp, Homo sapiens
gaacccctggacgggagagtctgccggcggagaatataagacagttgaatttctgaatgaaaagctggaaaaaag

SEQ ID NO: 189149 - DNA, 100 bp, Homo sapiens
ccagaggactgggaggagcatgtcaacagaacccagtgacttgattgtaaaaatttacagagcggaatcatatgctggtctccaagagtttaaagcagcc

SEQ ID NO: 189150 - DNA, 100 bp, Homo sapiens
gtccgtggggcaccgatgtctgggattactgcacggggtcgcgccgtggcggagcaggtgtagaatgagccaaggagactcaaacccagcagctattccg

SEQ ID NO: 189151 - DNA, 97 bp, Homo sapiens
aagattcatggaatattgtccaatactcatcggcaagctgcagtaaaataccatgaagattttgaaaaaacaaaggggagaggctttactcccgtcg

SEQ ID NO: 189152 - DNA, 75 bp, Homo sapiens
cagaactgtgttcgcaattcttacgatgtcttctctttgctacgttcataattggacccttgaagacactcttca

SEQ ID NO: 189153 - DNA, 83 bp, Homo sapiens
tgccccttggtgggctgaagcttcatggagggagttctgggaaatcgttcattcatttacagatgaacagaaaagactcttct

SEQ ID NO: 189154 - DNA, 78 bp, Homo sapiens
gtaaagtcttggacagacttaaaccagttataggggtaaacactgatccagaacgccagagactgctgctactttgaa

SEQ ID NO: 189155 - DNA, 90 bp, Homo sapiens
cccgaggccagatgcgtttaaaatcgaggagttctcggagtttggaaagcaacaatggtgtggttggtgaatatggcagaaggagacccg

SEQ ID NO: 189156 - DNA, 74 bp, Homo sapiens
cttcggcaggagaacgagctgctgcagaacaaagttgatctctctaatgtattagatcttcatgcctttgatag

SEQ ID NO: 189157 - DNA, 76 bp, Homo sapiens
ctccagcagcagctcagtaatgcccagctgcatagcctggctgccgtccagcaggaaagggcactggtgtcctgca

SEQ ID NO: 189158 - DNA, 100 bp, Homo sapiens
aaatgatgaagttctggttgctggatttggtcgcaaaggtcatgctgttggtgatattcctggagtccgctttaagggccaaaagagaaacattggctac

SEQ ID NO: 189159 - DNA, 80 bp, Homo sapiens
tctgggcgaaaattggatgtgaaaatgaagccagaccgaggtgaagcaaaaaatttattgccatatcttggaccccacaa

SEQ ID NO: 189160 - DNA, 74 bp, Homo sapiens
caactaccagccttgcttgaagccaaaatgcatgccatatcaggagctgaagaagaagctgttcaaacgccggc

SEQ ID NO: 189161 - DNA, 106 bp, Homo sapiens
atgaacccagggcactgtggggacagggcgacgtgtgtccaggcgtttgccgggtctcactctgctcactctgtctcccaagctggagtgcagtggtacagtcacg

SEQ ID NO: 189162 - DNA, 87 bp, Homo sapiens
ccaaggcccctccggccagggccgggagccgggccggcctagccaggccaagtcctgtatctgccatgtctgtggcgtccacctcaa

SEQ ID NO: 189163 - DNA, 98 bp, Homo sapiens
ctggcccaggcgcacacggaagtggtctgccatcatggatgttctcgcagaagcaaatggcacctttgccttaaaccttttgaaaacgctgggtaaag

SEQ ID NO: 189164 - DNA, 82 bp, Homo sapiens
atgcccagagtcaaggtacaatcagttgaaactgttgaagggtgtacacatgaggcccagctgtcaactcaagagaaagaaa

SEQ ID NO: 189165 - DNA, 75 bp, Homo sapiens
ccgggactccctgtgccttgcttggagctgacgccgacggagaagaggtgaagagtccagtgaaatggagcaaat

SEQ ID NO: 189166 - DNA, 75 bp, Homo sapiens
aaggattccaagtaactcttatttggccacggaaaggtatgatatatttgatccaagacagtccattccagtccg

SEQ ID NO: 189167 - DNA, 102 bp, Homo sapiens
cgtcgggccagggccggttctgcaccatcttcaggtcctactccaggggcgctcaggtactccaaagattcaggtttactcacgtcatccagcagagaatgg

SEQ ID NO: 189168 - DNA, 97 bp, Homo sapiens
ctctacaagatggcggcggtcggggccgaggcgcgaggaggtgttgactttaaggtgaaaacaatttcagtggatggaaataaggctaaacttgcaa

SEQ ID NO: 189169 - DNA, 75 bp, Homo sapiens
cgaacatcttctggacctttgtccaggcaagaaacctattggaattcgagacttaattaatgaagctttgcatcg

SEQ ID NO: 189170 - DNA, 100 bp, Homo sapiens
gagttcaactttcccagaagttgttctaacgctgcctttgctttaaaacagtattacttgcggaagtgaccaagttcactcctggatgctagctacaagc

SEQ ID NO: 189171 - DNA, 98 bp, Homo sapiens
cggcggcggcggcggccttgggccggtggacgtacccagcgctcgctcagatttcttttatccaagatattggaaggctccctctgaagcgacacttt

SEQ ID NO: 189172 - DNA, 82 bp, Homo sapiens
ctgctggatgccgagcgcctcaagcgcgagattccagctaagaaagagtcttgtccaaacactggaagagacaaagaccacc

SEQ ID NO: 189173 - DNA, 88 bp, Homo sapiens
cacagttcgaggggccaaggcagaagaaatcttggagaagggtctaaaggtgagggttcagagtatggtgccagtggagaagatgcgc

SEQ ID NO: 189174 - DNA, 100 bp, Homo sapiens
caagaagtttctcagctgaataaaattcatgctgaaacacttaagggcactccacagaaggatgttattatcaagtcagatgcaccggacactttgttat

SEQ ID NO: 189175 - DNA, 75 bp, Homo sapiens
atgggctggtcaatgcatcctacaccaaactgcagccaggcccagacatgtccgtccttgtaagttaaaagcttc

SEQ ID NO: 189176 - DNA, 82 bp, Homo sapiens
cttaagctgcctcattcttccatcctcagaacgccttagattttagtgatgatgaaaaagagaaggaagccaaacagaggaa

SEQ ID NO: 189177 - DNA, 75 bp, Homo sapiens
ccagcatgactcatccccgggagtgttgaaatgtgacagtgatgataacatgggtgccaaaaatacttcaatagg

SEQ ID NO: 189178 - DNA, 82 bp, Homo sapiens
gtgcctgggggccccgcagaaaatgagaatggagccctaaagtccaggtgctcttgatgatttcgataaagccaaaccctcc

SEQ ID NO: 189179 - DNA, 75 bp, Homo sapiens
ggcaccaacggcaccaactattcgcggagctggaatgactggcaacccaggttgcagtattttacagagctagcc

SEQ ID NO: 189180 - DNA, 96 bp, Homo sapiens
cacccctgtattctcctccgaaccccttcatgcccaaatcccggaaactccagcgtgtctccagccgtggcgtccgacctccgatcatgaacgggc

SEQ ID NO: 189181 - DNA, 96 bp, Homo sapiens
gcagcctccatcttggaagcggccgccggcgcctaggtgctggagaatctggtaaaagcaccattgtgaagcagatgaggatcctgcatgttaatg

SEQ ID NO: 189182 - DNA, 96 bp, Homo sapiens
attttgaatgttgttggaatgagatgtgaatggcagatggataaaggaagacggtctttctgtggaatttggaacaattctagtttacacatgtga

SEQ ID NO: 189183 - DNA, 100 bp, Homo sapiens
ctaatgaagcagacttggatgaagagctggtcattaagggatccatcctacagaaattcatgatgttgctatcaaaagttgagaaattgtcagaagaaat

SEQ ID NO: 189184 - DNA, 73 bp, Homo sapiens
tctactccaggaagtgaaaatgtgctgcctcgagagccgctggtggtgtttttaaggctcatcttactttccc

SEQ ID NO: 189185 - DNA, 95 bp, Homo sapiens
tgtttccacatcggtcagaaaaagattgtaaacaggaacatcgataagtagtgtaaaaacttgcacaatgaaatccgaagccaaggatggagagg

SEQ ID NO: 189186 - DNA, 97 bp, Homo sapiens
caccgcttcgagtctattgccattgcccaaggagcctcacagtctactcagagaaaaataaaagaaggcaaaatgagtcctccccatttccatgcaa

SEQ ID NO: 189187 - DNA, 50 bp, Homo sapiens
aagaagaggaaatgactgagtcccagtgatggaatggggagaagatatta

SEQ ID NO: 189188 - DNA, 78 bp, Homo sapiens
cgcctctcgatgggcagctcgcacttgctcaacaagggcctgccgcttgggcagctgtgcggagggtagtggcagcca

SEQ ID NO: 189189 - DNA, 71 bp, Homo sapiens
agcccccggcccaagggcgacttctccagccgggcccgcgaagtggtctcagctgagtctgctctgatcac

SEQ ID NO: 189190 - DNA, 88 bp, Homo sapiens
cctcggaggcgttcagctgcttcaagatgaagaatggagatgtatgcatttcgattcttcatccgcctgtagatgacccacagagtgg

SEQ ID NO: 189191 - DNA, 100 bp, Homo sapiens
ttcagatcttcacagcacagttcctgggaaggtggagccaccagcctctccttggtgaatggctatgtggtgaaccttttctgggcatttgacacccaca

SEQ ID NO: 189192 - DNA, 97 bp, Homo sapiens
cgcccgaaccaccatgacccacttcaacaagggcccttcctatgggctctcggccgaagtcaagaacaagttttccaagagataacttcaccaagat

SEQ ID NO: 189193 - DNA, 75 bp, Homo sapiens
gccgcctgaggaggcgagctagccgggagttacaccgccaccgccagtgagtcccactgcggccaccacgccaag

SEQ ID NO: 189194 - DNA, 90 bp, Homo sapiens
aaaggacaaggggaaatggaaggggcctccagggtctgcagacaaggcagggtcagtcatatcatttggatcaaaaaatagaacaatcgg

SEQ ID NO: 189195 - DNA, 90 bp, Homo sapiens
caagaaacctcaggacttgagtaacagcaacatggtgaaaggtgtagcagtcactcggcctacacccacagcatcgaccttgtgaaccca

SEQ ID NO: 189196 - DNA, 133 bp, Homo sapiens
gtttcagatcacatgtaccggatggcagttatggctatggtgatcaaagatgaccgtcttaacaaagaccgtgatgatccggttgttccttcactgtttaaacaaaagacatctgatgaacttttgcactggc

SEQ ID NO: 189197 - DNA, 95 bp, Homo sapiens
tatggtgaacctcttggacggaaaactcatattgatgattacagcacatgggacatagtcaaggctacacagagtgacagtgaggattcacattt

SEQ ID NO: 189198 - DNA, 98 bp, Homo sapiens
ttttcctgcaactcggcggcgccacgcggcccgccggccacgcgccctgggacaaccacgtctccggccacgctttctgtatgagcccaatagccaag

SEQ ID NO: 189199 - DNA, 80 bp, Homo sapiens
cgcaggcgcagacccacccgccatgaagccccccgcagggatcactgagattctgatgaacagaccttctgcccgcaatg

SEQ ID NO: 189200 - DNA, 100 bp, Homo sapiens
tggctccctcattaccgtcgccagcggagcgaacccgagagcgtggagcgggctgggccagagacttggaggaggccttggagatgggggtggactggtc

SEQ ID NO: 189201 - DNA, 100 bp, Homo sapiens
ggatgaggctctgcggctggtccaggccttccagtacacagacgagcatggggaagccacaagtatatggttatgatgacttgcagatgcttcagacaag

SEQ ID NO: 189202 - DNA, 74 bp, Homo sapiens
tttctttgatgcgacctcaggaaggagatgaggtagctacagcaagctgggtagcaggcagatccaaaggatat

SEQ ID NO: 189203 - DNA, 101 bp, Homo sapiens
ccagagcagcccacccatgccgtgtgtgtgctgggcaccttgactcagcttgacatctgcaggctctagaccaagatagaacagcccttcagaaagtgaag

SEQ ID NO: 189204 - DNA, 96 bp, Homo sapiens
agaggggagtcatcatgagcgatgttaccattgtgaaagaaggttgggttcagaagagggccaccagtggtaaaaacagagatggtaacaatttct

SEQ ID NO: 189205 - DNA, 100 bp, Homo sapiens
ctccgctccccacttcagacgagctcttcctgcctggaatctgatcggcttcagctccccaggaatatgattgaaaacagcatgtttgaggaagaaccag

SEQ ID NO: 189206 - DNA, 149 bp, Homo sapiens
ccaagcgcgtcacattcccgtccgacgaggatatcgtgtctggagcagtggagcccaaagacccctggagacatggtactccaaagattcaggtttactcacgtcatccagcagagaatggaaagtcaaatttcctgaattgctatgtg

SEQ ID NO: 189207 - DNA, 98 bp, Homo sapiens
caaaaaccctgcaggagaacttcttgaaccaaacgcaacagaatagaaaaggaatgcaggataacccagttaatggttcaagcactgtcttcctgttg

SEQ ID NO: 189208 - DNA, 100 bp, Homo sapiens
ccgggaagcactacaagggtcctgaagtcagttgttgcatcaaatacttcatatttggcttcaatgtcatattttggggatagctgggagtatggccacc

SEQ ID NO: 189209 - DNA, 75 bp, Homo sapiens
gtttttctattcatgattggacatgtcctagacatcacttagagcttccaatcagaagactatacaacctcctag

SEQ ID NO: 189210 - DNA, 82 bp, Homo sapiens
tccagcctggagaaataccctattaccaaagaggcacttgagtttggcaatgaggagcagcagctggcgtgggccaagcggg

SEQ ID NO: 189211 - DNA, 82 bp, Homo sapiens
acggaagactggccgcatgggatttgtagggccaccagatgcctccacccagaaaggtcagatgtgggagagttccagagtc

SEQ ID NO: 189212 - DNA, 100 bp, Homo sapiens
caggtcacagtaaggccaaaaatgtgcatactcacagagttagagagagggatggtggaattttggagagtaaaaggctgaaccttgttaaagagaaaac

SEQ ID NO: 189213 - DNA, 108 bp, Homo sapiens
ttgcttggaattctgcccactctgcggagttagcagtcacgacctccagcacagcacggtgtcttggaaaatggaaagaattgggagccttcctaccgctggtgaaat

SEQ ID NO: 189214 - DNA, 98 bp, Homo sapiens
tgatgggccctgtccctgtctcccagagcctgagccaccaaagcacaaggcagaaaggagtggtcctcagaatggttggaatgaccctccagctttga

SEQ ID NO: 189215 - DNA, 100 bp, Homo sapiens
cccgggaggaaggaacgaggcaaggagctaaagcagcgtgcgttcagccctgggcagttggaattgatcacaccttttcagttgtacttcaatcctgaat

SEQ ID NO: 189216 - DNA, 100 bp, Homo sapiens
gaaagccagcctaatccaaagactgtggaacttttaagtggagtggtggatcagaccaaagatggatggaaaatggttgatcattatgttagccgtgtcc

SEQ ID NO: 189217 - DNA, 90 bp, Homo sapiens
aggacgccggaacaccctggaagccgagaaatggtcatcatcagatttgaaatatttaaagtggatacaaaactatttcagcaatgcaga

SEQ ID NO: 189218 - DNA, 100 bp, Homo sapiens
gctgaacggcggagcgggagcggccggaggagccatggactgcagcctcgtgcggacgctcgtgcacagatacgtttcacgtggcaggatgactatactc

SEQ ID NO: 189219 - DNA, 50 bp, Homo sapiens
gggcagtatcaacggagtctccggggtgtttggagtagatgacaatcagg

SEQ ID NO: 189220 - DNA, 75 bp, Homo sapiens
gctgagcaccattaagtgtgggcgtctacagagatgtatgacctgccatattcagtaagaactgagattggaata

SEQ ID NO: 189221 - DNA, 100 bp, Homo sapiens
accctttcattttgtttggaagatggaccaaagcgatacaggaaatcctcattgacgattcaatttgttgaaggccaatttgtggactcctacgatccaa

SEQ ID NO: 189222 - DNA, 99 bp, Homo sapiens
gctgcctcgtgactttcgaagataattccaaatactgggtcctatggaaggacatacagcatgatcatcgatgtgaggccagcctccactcgcttcttg

SEQ ID NO: 189223 - DNA, 100 bp, Homo sapiens
acctctgcggcatcaaccagaagcttttggctgaggccttgaaccaagtcacccagttctgattcaaaggagtctatgtctactgtgccggctgactttg

SEQ ID NO: 189224 - DNA, 98 bp, Homo sapiens
agtgaaacagctgcaaaggttgcattgatgaaattaaagatgcatgctgatggcgataagtcattaccacagaacggccggtttgtgggcgatgctga

SEQ ID NO: 189225 - DNA, 100 bp, Homo sapiens
gactctgttcagcagatgtatacaaccaatcaggagcagttacaggaaattgaggtgaccccagggtttgaagaaaaggagggggagctgctggtgaggg

SEQ ID NO: 189226 - DNA, 100 bp, Homo sapiens
cttcaacctcttgttggaagattattcaaaagatgtggaaatggaggcccagaaagatgaaatcatctgccccagctgtaataggactgcccatccactg

SEQ ID NO: 189227 - DNA, 100 bp, Homo sapiens
cttcagtctcttcgtaacagaacagcccacgaagcggttatccatggccaccatccagccccggaagaaaacctccaggttcttgctgccctgcgactcc

SEQ ID NO: 189228 - DNA, 50 bp, Homo sapiens
tattttcgtccccagaggaaggcgaaccagtggctctgaatatcagcgtc

SEQ ID NO: 189229 - DNA, 75 bp, Homo sapiens
aggggccgatgcagtgacttctctgctgcagattctgctctctttgctgaactcggttatttcacagacactgat

SEQ ID NO: 189230 - DNA, 75 bp, Homo sapiens
cagccgatgcaccgagtccagcccaggaaaatggagaggccccgagcattcctctgattcagaatacactctctc

SEQ ID NO: 189231 - DNA, 128 bp, Homo sapiens
atgctttgaaatctgataagaaagtacggaccataataatcaggagtgaagtcccagggatattctgtgctgggcaattaaagcatttcaggaggtgctttatgttgatcccagcttttgtcgagcca

SEQ ID NO: 189232 - DNA, 75 bp, Homo sapiens
tggatgttttgtccagggcagcatctctggtgcatgctgatgacgaaaaacgtgaaaattatctcagtgaacgag

SEQ ID NO: 189233 - DNA, 100 bp, Homo sapiens
ctggactttagggctgtggtgatggatgaggtggtgctgacaatcgagcaaggaaacctgggatgatgaagataaactgacctggaaggatcgtttccca

SEQ ID NO: 189234 - DNA, 100 bp, Homo sapiens
gtctctttgccctagcccacgccgccttttccgctgcgcagcgtcaaaatgcagatcttcgtgaaaacccttaccggcaagaccatcacccttgaggtgg

SEQ ID NO: 189235 - DNA, 75 bp, Homo sapiens
attcttgaagatggaatcaccaagctaaacaccattggccactatgaggtcttcaaagcttcacctttctccaaa

SEQ ID NO: 189236 - DNA, 100 bp, Homo sapiens
gtcttttgaaaggtgtactgcaaggaacaaaatgtttgtaaattctccttttaccaagggaattgacataggggatagcttaactattccagatgaattc

SEQ ID NO: 189237 - DNA, 100 bp, Homo sapiens
gtgaggatcgtgtgcattacaggagtcctccacttgccactgggaccgagatctcactcagcagacagcagcagcccgggagcctgagctcaggaggaac

SEQ ID NO: 189238 - DNA, 114 bp, Homo sapiens
ctgcgtgtcaggtgttactcggggtgcgccagtggaagcgggaggcagttgcagctttcaggtgaacagccccccctcccagcccccccagcccgtcgtccctgctaagcccgt

SEQ ID NO: 189239 - DNA, 90 bp, Homo sapiens
gggatcggttcctccaggagaagttagcttcagagttctttgtggatggacttgattctgatgagaggatttctctctgatcaaacggac

SEQ ID NO: 189240 - DNA, 100 bp, Homo sapiens
tacatgggaggatgtaggactgtgggacccatcacttacgaaaaaccaggtattagaaaactactcggatgctccaatgacaccaaaacagattctgcag

SEQ ID NO: 189241 - DNA, 82 bp, Homo sapiens
gtgcaactgctcatcctggcctacgtcatcgggaccaagaatcgccttcagccctgtctggtgcatccttggcagaaagtga

SEQ ID NO: 189242 - DNA, 74 bp, Homo sapiens
ctgcgaccgctgccttctcgggagcttactccacgggaacagcctctagataatctgagttgttgaaaatacga

SEQ ID NO: 189243 - DNA, 74 bp, Homo sapiens
cccggttccccggcccacagtgggggtgtgcaaacccgagagaactggttcaggaaccttttcagctggctact

SEQ ID NO: 189244 - DNA, 75 bp, Homo sapiens
atcagtggatgggggtcaccgtccagagccaaggtccagggggcaaggtcgtgcgcctgtacagatcagtttatg

SEQ ID NO: 189245 - DNA, 100 bp, Homo sapiens
gctgggtatggaagctatgggtacggaggcaactcggcgacagcaggctacaaacaccttccaccatgaccacctcagcaagttcccacttaaataaagg

SEQ ID NO: 189246 - DNA, 100 bp, Homo sapiens
cttcggagttggggctgagcagtcctcggggagagcgcgccaagaccgctgcagccgctggctgactgtgctccattgaagtgacttgtgaatcagccag

SEQ ID NO: 189247 - DNA, 83 bp, Homo sapiens
cgtcgtgatccagaagtccagagctgaggactgcctgtttgcaggtagttgtcctgggaacccctgcagaagaagatggtggt

SEQ ID NO: 189248 - DNA, 82 bp, Homo sapiens
ccgcggccgcaccttcccgccttctcagatgaagttggagcccttgtttttgacattggatcctatactgtgagagctggtt

SEQ ID NO: 189249 - DNA, 131 bp, Homo sapiens
tgttcgtccgcggagatctctctcatctcgctcggctgcgggaaatcgggctgaagcgactgagtccgcgatggagctctagaggacaaaatcccagtccttggcacaaactcaggaaatggaagccggag

SEQ ID NO: 189250 - DNA, 100 bp, Homo sapiens
gggaaactcagcctgtgaccccagcgtgggtgaagataggatcaagatggccatgtggcaggatcgggtgctaccaaggttttgcttttgcatggaaatg

SEQ ID NO: 189251 - DNA, 73 bp, Homo sapiens
cccactaacggggacttcacctttgtctcctcagcagacgcggaagtgaaattaaatggtggcagacatgtcc

SEQ ID NO: 189252 - DNA, 100 bp, Homo sapiens
tgcagttagtgctcatggatttaaggtatattacgaagacttgaaaaagtctaagcacattaattatggccagttgaatgcattatgccacattagagga

SEQ ID NO: 189253 - DNA, 100 bp, Homo sapiens
ccggcgcggccatggcgacgggcggccagcagaaggagaacacgctgcttcacctcttcgccggcggacctgatggccaaaagaaaggaagaaaattttt

SEQ ID NO: 189254 - DNA, 83 bp, Homo sapiens
ctacggaccttaaaatacccgcaacagccccttcgtcccaagaactgtggctgcaccatctgtcttcatcttcccgccatctg

SEQ ID NO: 189255 - DNA, 75 bp, Homo sapiens
tatgacactgaaatctgtaacgttctaggcctgattcttcactacctgagacgtctaaaaaggagcacatctcag

SEQ ID NO: 189256 - DNA, 83 bp, Homo sapiens
gagcgggtaccgggcgcgggcagagcgcggcggcgcgggatttgcagatttacagaatggctgcacattaatggaaagagaag

SEQ ID NO: 189257 - DNA, 120 bp, Homo sapiens
tgttttcttatttagccggagtgagaagcaagaaggccctggacacagcaatatctctgggctttcacagatgagctgcttcagaaagagcaaaactattcagatgacgtcttggccaac

SEQ ID NO: 189258 - DNA, 100 bp, Homo sapiens
ccctcagaccccttccttccaaagggaatcagagatcattgatttcttcctgggggcctctctcaaggatgaggttttgaagattatgccagtgcagaag

SEQ ID NO: 189259 - DNA, 87 bp, Homo sapiens
atacccttccatttcaaagaacagaatgctaaggaagctgtggcaagaaaaagaagatgtccctgtggaaatgtccaatggtgaacc

SEQ ID NO: 189260 - DNA, 100 bp, Homo sapiens
tattctttactggatcggcacttacacctgtcttcaaaaaagaaagaatctcagttacaagagaggacctgactggaacactgaattgtataatgaacgg

SEQ ID NO: 189261 - DNA, 75 bp, Homo sapiens
tatagaaatgctttgtactaccgcagcaacatggctgacatgctttataatttgccattctcaagcacaacctgg

SEQ ID NO: 189262 - DNA, 98 bp, Homo sapiens
cttttcctccgcctggtgggtccctccctgctgcgggacagcagctggtgtcatctgaagacagaagtgccctgtgggctttggttacgttctatggg

SEQ ID NO: 189263 - DNA, 100 bp, Homo sapiens
cagctctataagcggacgtttcctgtgctgcttcgacttgcgtgtgatgttgatcaggcttatgtagacatgaggaagattggcagtagccggggaatgg

SEQ ID NO: 189264 - DNA, 100 bp, Homo sapiens
caaagacgttctcaaggagaaggcagacctggggacacttagtcggtctggatgaaccagcttcgggagctgggcaagaagctctgcttaaacaagagca

SEQ ID NO: 189265 - DNA, 100 bp, Homo sapiens
cgtccccagccctgcctctccctgggctctggctgaagccgacgtagcttctctgaacagacgcatccagctggttgaggaagagttggatcgtgcccag

SEQ ID NO: 189266 - DNA, 88 bp, Homo sapiens
ccagagaagaggaaaactctaccggtgcagaccccaagactgcttctgagacagaaacagatatctgtgctgaatgggagataaagac

SEQ ID NO: 189267 - DNA, 101 bp, Homo sapiens
cacaatggcactgaggagaaggaggaggagatgagttggaaggtgtgcctaccgcatgttgccgctgctgtttctgctgggacgtctgactccagttcctt

SEQ ID NO: 189268 - DNA, 100 bp, Homo sapiens
gaaatgtgaatctcaggagagagcagccagagtggagatggctggccgagctctcaagcagactggcagcaggagcatcgaggccgccctggagtacatc

SEQ ID NO: 189269 - DNA, 100 bp, Homo sapiens
gacactgaagccacccaggtgtaccccaagctgtacttgtcacctcgaattgagcaccagagactgctgctactttgaaacgtacgatagaggccctgat

SEQ ID NO: 189270 - DNA, 97 bp, Homo sapiens
accttcgactttcagataaccccagcacccagtcagcttgaagagtttcaaatggaccctaccactgagaaatcaagatggcagtctactatgggga

SEQ ID NO: 189271 - DNA, 100 bp, Homo sapiens
gccacctttggggccgatgacttggtactgaccctgagcaacccccagatgtcattggagggtacaggtacaggtttgcagattccgccagcagcacagc

SEQ ID NO: 189272 - DNA, 98 bp, Homo sapiens
tggacgagcctcccgggaagcccctcagctgtgaggagaaggaaaagaggagctctacggtgactttgaagacttggaaacaggggacgtgcacaagg

SEQ ID NO: 189273 - DNA, 100 bp, Homo sapiens
ggagaattatgggagcgcatttccccagggggttggggacatgggcagagcctattgggacataatgatatccaatcaccaaaattcaaacagatatctc

SEQ ID NO: 189274 - DNA, 100 bp, Homo sapiens
atatgaattcgaaaagcagttcaacgagaatgaagccatccaatggatgcaggaaaactgacagaacaatggcagcccgagtacttataattggcagtgg

SEQ ID NO: 189275 - DNA, 87 bp, Homo sapiens
aacgcggagagcacgccatgaaggcctcgggcacgacgcaaacatgcagatctttgtgaagaccctcactggcaaaaccatcaccct

SEQ ID NO: 189276 - DNA, 75 bp, Homo sapiens
ggattttgcacttgtgcagaccgggcgagcagagtaagaagcaggtgtttcagtcacctccagtaacacgggcgt

SEQ ID NO: 189277 - DNA, 89 bp, Homo sapiens
agaacccagaagcctacaatgaagaactgaagaagctggagttgctcagacagtgcccaccagaagtatgtccgacaagcctggcagaa

SEQ ID NO: 189278 - DNA, 100 bp, Homo sapiens
cgtggtccagcttccccctgagccggtgcagttggcagatgtgaatggagtcattgaggaggagtttaccatggcccgcctgtacatcagcaagatgaag

SEQ ID NO: 189279 - DNA, 89 bp, Homo sapiens
gaaagcttctctctgtcccttggcttctgtgtggtcccagaagatatgcctcctccagtttcaagtttgcctatctggggcgcctggct

SEQ ID NO: 189280 - DNA, 90 bp, Homo sapiens
gtgaggaagtggagatagctgagctcactacaggccatccttcttgcctggatatgacaatggagcttgtttctatgattaagacctacc

SEQ ID NO: 189281 - DNA, 75 bp, Homo sapiens
gccagccacgaagttctcgcgagagtcgtctcctcgataccaagccatcatctctcagcaaggtgacatatttgt

SEQ ID NO: 189282 - DNA, 100 bp, Homo sapiens
ggggccccagcagcccccgaaggccctatcaggacatggagtatgaaagacgtcattgaaattatgagactatcattcaaatggaagcattatagttctt

SEQ ID NO: 189283 - DNA, 83 bp, Homo sapiens
atttgatttccggagtcagtcattttactgtcaagacatttcttcggcattctgcaacaggcttcaacggaccacaccaaaat

SEQ ID NO: 189284 - DNA, 71 bp, Homo sapiens
gggaccggtgtctggcggatgcggtcgtgaagatagaaagggctattgcaagacacgaagtccgagaaatt

SEQ ID NO: 189285 - DNA, 75 bp, Homo sapiens
gtgcagctgcctcagttcttagcgcagattttatcatgtgggcaacctgctgcaactggttctgcctggatggac

SEQ ID NO: 189286 - DNA, 100 bp, Homo sapiens
tgccgtgcagttttgaatcctttatgttgcacgtgcattatttaatcacatagacaagtcaggattgaaggatagttctgtcgaagaactcaagaaaaga

SEQ ID NO: 189287 - DNA, 74 bp, Homo sapiens
cagtaatgaagatcacaaaatcgcttatgacccttctttgtcttcgcacatgccacctgggacagcaagaccag

SEQ ID NO: 189288 - DNA, 98 bp, Homo sapiens
gggaaatcgtgcacatccaggctggtcagtgtggcaaccagatcggtgccaaggtgtggacactgccagcggctgcagccgacttggaatgacctggg

SEQ ID NO: 189289 - DNA, 50 bp, Homo sapiens
cttgagtccatgagattttagagtgctaccaagtcaggattgttaccccc

SEQ ID NO: 189290 - DNA, 73 bp, Homo sapiens
ccatggcggagtcggcgcctgctcgggctaccaagcagtttctcgaagagattaacaagtggacagttcagta

SEQ ID NO: 189291 - DNA, 90 bp, Homo sapiens
gatgaagatgatgacgatgatgatgaagaggatgatgatgaagaatctctccagcgaacactgaatgagttaaaagagtatcaaaagcag

SEQ ID NO: 189292 - DNA, 50 bp, Homo sapiens
gcttaagctgggcatggatttaacaagaaagccctgacatgctgcagtcg

SEQ ID NO: 189293 - DNA, 90 bp, Homo sapiens
ggaccccttctttgtggtgaaagggcatcaagcatgatggaaccatgtgtgatacctgccgccagcaaccaatcattggcattcgatgga

SEQ ID NO: 189294 - DNA, 100 bp, Homo sapiens
cttgcagcacagtcccctgaggggaaccatggacaccaagaaccagcctccacatccttccacccacccaggattcagcagaagatggctgtgccaccca

SEQ ID NO: 189295 - DNA, 51 bp, Homo sapiens
cgaaaaactatgctgaccagaggtgaagttgaacaaattgctatgatgaaa

SEQ ID NO: 189296 - DNA, 100 bp, Homo sapiens
ttgcagtgatctttcagagaaagcgcctgttcaactttgtcctctctcagtgccggtggtggtgtgcacattgagccccggtatagacagttcccccagc

SEQ ID NO: 189297 - DNA, 100 bp, Homo sapiens
tgcatcgtcccctggactctctcaatggacatttgggagcaataaaaataagaagaaaggaaaagccagaaaaatagagaagaaaggaaccatgaagaaa

SEQ ID NO: 189298 - DNA, 100 bp, Homo sapiens
ccacccaacgaaggcttctgcccgtgcctggagtctggaattcagaacgtcagcacctgcaggttcaagagttatgatgacttgtaccattggtccgttg

SEQ ID NO: 189299 - DNA, 51 bp, Homo sapiens
ggggagttctctgtgtctgtgaatggccataaaatgcagtaaaaacaaatc

SEQ ID NO: 189300 - DNA, 100 bp, Homo sapiens
gagttcagcttccaaagagatacagggcagaggaaaatgcaagaagactgatggagcaggcttgcaatattaaagtggtgaaaactattggcttgaggga

SEQ ID NO: 189301 - DNA, 97 bp, Homo sapiens
agactgatgcttattagtcatcaccgttattcctactaacgtcctgtgtcactgagatttgagagggaagatctgatctcctagaattagagttggt

SEQ ID NO: 189302 - DNA, 74 bp, Homo sapiens
cgcccaagcagcccctgccacacatcgaccgcgaagggtgttggggatgtcctttgcactgaccctgaactgcc

SEQ ID NO: 189303 - DNA, 74 bp, Homo sapiens
gctttctgcgccatcctgcaccgccaccggcccgacctcatactcgtttgtgaacagccaggagtggacgctga

SEQ ID NO: 189304 - DNA, 50 bp, Homo sapiens
cctggcgcccagcaccatgaagatcaagaaaccagactgtgatgactggg

SEQ ID NO: 189305 - DNA, 123 bp, Homo sapiens
gaattcccagaagaggcagcatgcggaaggcattgctgggagcctgaaaactgtgaatggagccagtctacttgatgacttatacaagtatttcttcttccatcactcccacggagacaccat

SEQ ID NO: 189306 - DNA, 119 bp, Homo sapiens
gacgagggaggtgccgccgtcgcccaggatgggctgggaatgaagcgatgtagccttttaagagaactacgatgacccgcacaaaacccctgcctccccagttgtccacatcaggggcc

SEQ ID NO: 189307 - DNA, 100 bp, Homo sapiens
agctgaggactgcctgtttgcaggaggagagtaaacgatggaccgtgcggctggatatttctgcccctcaggtgatatttcctgatgatttcaaattcaa

SEQ ID NO: 189308 - DNA, 50 bp, Homo sapiens
tctcacctatgccctcatgaacgtaatttgcctagtgggattgggcctgg

SEQ ID NO: 189309 - DNA, 50 bp, Homo sapiens
agaactacgtgttttatccaacagtgagaaagatcagtctaaagaaaagg

SEQ ID NO: 189310 - DNA, 101 bp, Homo sapiens
agatggcatcaaacagtgaaatacaggcctggctttcagacttggctgtattcatcaccaaagaaaaaacttacaccaatgcagaaatcggttagtccatt

SEQ ID NO: 189311 - DNA, 80 bp, Homo sapiens
ttcaaactcctccccacgacactctgaagcagcgacggcacagcgggaagaatggtcgagcctcttaggcagagtttaac

SEQ ID NO: 189312 - DNA, 100 bp, Homo sapiens
caagggaagagaaaagtctgcgttagtctggagaagttggactagtgaggagagacaggtttgggcaagtccaccctcatggacaccctgttcaacacca

SEQ ID NO: 189313 - DNA, 82 bp, Homo sapiens
cagcaggggtcagctgggccgcaggggcgcgcagcgcggggagctgccagccactgaggcggctcccagctgcgttggcgac

SEQ ID NO: 189314 - DNA, 83 bp, Homo sapiens
ctggcggtcacctggcacaccagcgcccgcaggatgcccagatgagtgaccgaggaggtggcgttcctttgaggaaaattgac

SEQ ID NO: 189315 - DNA, 107 bp, Homo sapiens
ggcgggactgcactcgagtgtccagacctgctcgatgatggccgccaagaacgagtcatgtttgacaaaattacatctcgaatccagaagctttgttatggactcaa

SEQ ID NO: 189316 - DNA, 87 bp, Homo sapiens
acggtctacaaaggtctggacactgaaaccaccgtggaagtcgcctggtgtgaactgcagtgtaaacaggaacatcgataagtagtg

SEQ ID NO: 189317 - DNA, 90 bp, Homo sapiens
acctttgatctaagggttcagcctttcaatgtgacacaaggaaagtattctacagtgctttctcctgctcaagacagccacacgaacacg

SEQ ID NO: 189318 - DNA, 74 bp, Homo sapiens
gtaggaccgagcgcgggcaggcgggaggcaacggagctaccagccgaccaagatcactccatggatgaaatgac

SEQ ID NO: 189319 - DNA, 99 bp, Homo sapiens
ctgaattgtgctgccttggccaaaagaggacaaccctccatatgataagggagccttcagaatcgaaatcaactttccagcagagtacccattcaaacc

SEQ ID NO: 189320 - DNA, 100 bp, Homo sapiens
cgctcatccacagagccacatctgttaggctgctctttggcgtaaattgcaatcgattagggatcgtttctcagaatcaagttagaagtgagagttcaga

SEQ ID NO: 189321 - DNA, 88 bp, Homo sapiens
gaagcgcggagggagccgcgggatggaccgcagcgtgtccggagcggtgactggaaggggtacacaggcaagaccatcacggacgtca

SEQ ID NO: 189322 - DNA, 82 bp, Homo sapiens
gtatttgactgagagaaacccactgaagacgtctgcgtgagaatagagaccaccgagtgcacctatgatatgtgttttagaa

SEQ ID NO: 189323 - DNA, 100 bp, Homo sapiens
ttcgcactgtgcatacaggacgggtccatccatcgcataagagcaaagaatactattgttgccacagggtttgaggaactactggccaacctactaaatg

SEQ ID NO: 189324 - DNA, 51 bp, Homo sapiens
ccacagccctccactcaacacaggaaggctgaagccgacgtagcttctctg

SEQ ID NO: 189325 - DNA, 90 bp, Homo sapiens
aagctgttcctggacaaaatctgagctaactcactgaagaatcaacagattgaggcaaccatccggtgctggagaatctggtaaaagcac

SEQ ID NO: 189326 - DNA, 58 bp, Homo sapiens
tgtgttgtgccaatggtggagaagaaaacttcggctcaaatctaatccaagtgaaaat

SEQ ID NO: 189327 - DNA, 83 bp, Homo sapiens
cagctgacggagatggtgcagaagatggaggagtacctggagtagaacagaaaaattattatgtctgtgttcccttgggactc

SEQ ID NO: 189328 - DNA, 100 bp, Homo sapiens
ggaagcacctgactacgaagtgctatccgtgcgagaacagctattccacgagaggatccgcgagtgtattgtaatgactccacagggaagaggcactgta

SEQ ID NO: 189329 - DNA, 50 bp, Homo sapiens
gtgcaaacccgagagaactggtttgcccgaccatctgtaagtcacacggc

SEQ ID NO: 189330 - DNA, 87 bp, Homo sapiens
tagatcgatttcctatcggagatcgagaaggagaatggcagaccatgatacaaaaaattcctccacgtactgggaaggcaaagcaga

SEQ ID NO: 189331 - DNA, 43 bp, Homo sapiens
cgttacgggcggtacggaggagactcggtgaaatacctggagt

SEQ ID NO: 189332 - DNA, 74 bp, Homo sapiens
tcccatctaccgcaactctcagttcgagagtaaaggccctgggaggagcggggacactgaggacctctctccaa

SEQ ID NO: 189333 - DNA, 100 bp, Homo sapiens
tcttggggaaactcggagggaccctggcccggaggaagaaagccaaggaggctctaagcgaaagacatgaggcctcagcctgaaatgaggttgttttgag

SEQ ID NO: 189334 - DNA, 90 bp, Homo sapiens
gcacccaggcgactgcctcatcttcaaggtctattctggataagcaggttttgtgaagacatttattctttcttggacctcagatttacc

SEQ ID NO: 189335 - DNA, 75 bp, Homo sapiens
tgtcagtttcctgaggcctccccagccacgctttctgtacagcctgcagaactaattgcttcagattgctggaat

SEQ ID NO: 189336 - DNA, 75 bp, Homo sapiens
ccagcagcccccgaaggccctatcaggacatggagtatgaaagacggttatcaatactctggctgaccatcatca

SEQ ID NO: 189337 - DNA, 75 bp, Homo sapiens
catgatgtgcgatgtgcggaagggcacctccacccggttgtttgatgtgtgcacagtgtcacgaacagacagaga

SEQ ID NO: 189338 - DNA, 75 bp, Homo sapiens
agcatgtcaataaggggtcataggtggaaaagacatggtatgatctcgtgaaaccttgagagaaactgaatgacg

SEQ ID NO: 189339 - DNA, 90 bp, Homo sapiens
agatacaggaagatttccacggttgctcactcggattcttcaaaaacttcacctgaaggaggactcagagagagtaatgataattaccgg

SEQ ID NO: 189340 - DNA, 100 bp, Homo sapiens
cattttcctacaacactggtgataacacaacatttcctgatgctgaagataaagaattcacaggtaaagaatgtgaagactctcaactcgtatctcattt

SEQ ID NO: 189341 - DNA, 106 bp, Homo sapiens
ggagatgcttcagagagaggaagccgaaaacaccctgcaatctttcagacaggtcagcccaaggccaaccccactgtcactctgttcccgccctcctctgaggagc

SEQ ID NO: 189342 - DNA, 78 bp, Homo sapiens
gcgggctccgcgcccggccggacccgggcccgagacctccttgaggcccgccgcccgcgggcccacgagtgcctgggt

SEQ ID NO: 189343 - DNA, 97 bp, Homo sapiens
tctagtcttgactaccttccatgtaccactggtaattatgacttttggacagtccaagctatatcgaaggtctatagaagaggagggaaaaacacac

SEQ ID NO: 189344 - DNA, 82 bp, Homo sapiens
ggaaccagaacccaggcccacggaggaagagccgggcagtccctggagcgggccagaggccacaagaggaagctgaatgaag

SEQ ID NO: 189345 - DNA, 100 bp, Homo sapiens
gttcctccaggagaagttagcttcagagttctttgtggatggacttgattctgatgagagaatcccctactttgaaactagtgctgccaatgggacaaac

SEQ ID NO: 189346 - DNA, 100 bp, Homo sapiens
ccagagttgcctctcagatgtggatactgagatccaggagcagttttgtgtgagaatagaaaagaatcctggccttggatttagtatcagtggtggaatt

SEQ ID NO: 189347 - DNA, 112 bp, Homo sapiens
ggccgtccagcagatggcggatgccctgcagtacctgcagaaggtctctggagacatcttcagcagtcctcaaccactgaagaagaagcttgatgcttggctgtcagaagac

SEQ ID NO: 189348 - DNA, 125 bp, Homo sapiens
gcagggctgaagagaagatggaggagctggtggtggaagtgcggggctccaatggcgctttctacaaggtttgcctgcaatgagatttcattctctacatttaaaggacatcctttctgagctgc

SEQ ID NO: 189349 - DNA, 100 bp, Homo sapiens
gccatcgttgctgccttcttcgtcaagatcactcctgtaaactctcacaagagatgtttataaaacacttggaacaatacagattgtactaagaaaatgt

SEQ ID NO: 189350 - DNA, 49 bp, Homo sapiens
ggcggagcggccggtccacggaggaggcctctccttccgatgaaaagag

SEQ ID NO: 189351 - DNA, 89 bp, Homo sapiens
gcctggattataaggatgtcatccccatggctgatgcagcaggcatcatccgctatgcaattggggcccaacagcgccctggaatcctg

SEQ ID NO: 189352 - DNA, 82 bp, Homo sapiens
tccgccgctgcgggcccgctccgacgcggaaggcctgtatgaactcaatctcaccaccgatagccctgccaccacgggagcg

SEQ ID NO: 189353 - DNA, 75 bp, Homo sapiens
caacatttaccgaaagccacccatctacaaacagcatggttctcagctgctgcgggagttgaaaaagatggacga

SEQ ID NO: 189354 - DNA, 75 bp, Homo sapiens
tctacgatgtcacccgcttcctcaacgagctgagatctgtatctgtggacctgaatgttgatccctcgcttcaga

SEQ ID NO: 189355 - DNA, 75 bp, Homo sapiens
ccagcctgcggagcctgtggggcaggttggactccatgaaagaattgcacaaaacaaatcgacagcagcatgaga

SEQ ID NO: 189356 - DNA, 100 bp, Homo sapiens
tgcgaccggggttcagcgctcgggtgaggagctggtggcgtcggcaggttcgaggcgattcgagatgagcagcagctgctcagggctgagcagggtcctg

SEQ ID NO: 189357 - DNA, 135 bp, Homo sapiens
ggaaattgctgtggtttacttccgggatggctacatgcctcgtcagtacagtctacagaattctggggagacattgccaaggaattttactggaagactccatgccctggcccattccttcggtacaactttgat

SEQ ID NO: 189358 - DNA, 100 bp, Homo sapiens
tgcagaaggtctctggagacatcttcagcaggttccccaaggactctagcacctggactgtggaccaccagctcctgtggggggaggccctgctcatcac

SEQ ID NO: 189359 - DNA, 75 bp, Homo sapiens
ctggctgcacttgctccacgggtcaggggatcggagggggacggtatgccctggtagttgcaggagatattgctg

SEQ ID NO: 189360 - DNA, 98 bp, Homo sapiens
aatccttgctctgcgatggactattccctggctgcagccctcactcttcatggtcactggattcactccttctccagttgcacagccacacccttcag

SEQ ID NO: 189361 - DNA, 75 bp, Homo sapiens
ctagtgagtcggcggctgatttagaaggaggttcaggctacggtgagccgaagggtgtacaactatgagcctttg

SEQ ID NO: 189362 - DNA, 58 bp, Homo sapiens
ctcatgactcccagagaggatggcatctagaagagacagtgtctcaccttgtcaccca

SEQ ID NO: 189363 - DNA, 127 bp, Homo sapiens
cttcaaaacctcttacattccagtagaaaactctctctgcaagtccttaactttgttcactcattccagaaaggggatgtttgggctgaaggtgaagaagaagagaaataaggcagagaaggggtta

SEQ ID NO: 189364 - DNA, 83 bp, Homo sapiens
gaggagatgcttcagagagaggaagccgaaaacaccctgcaatctttcagacaggtggaatgaatcttacttgttgaatatct

SEQ ID NO: 189365 - DNA, 100 bp, Homo sapiens
ggaaacttcagatacgaaatatcccgcctcatttacagtgggaggagaatggggtactaagagaaaagcacgaagctgtggatcatagttcccagcatga

SEQ ID NO: 189366 - DNA, 100 bp, Homo sapiens
caaccggctctctctatacttctgagaaactggatcatgaagctgttcaccagcacaccctcacggtcatgaacaaattggagctctggcagatcagcat

SEQ ID NO: 189367 - DNA, 76 bp, Homo sapiens
ttccctcagcacacagaggatgatgctgactttgatgaagatactgtggatggtagggaagaaaagtctgcttctg

SEQ ID NO: 189368 - DNA, 100 bp, Homo sapiens
cgcacctacgcgcgccgctgggtgttcctgctcgcgatcagcctgctcaactgctccaacgccacggtatgacctggacgcgtgtgacattcaagaaaaa

SEQ ID NO: 189369 - DNA, 100 bp, Homo sapiens
gcctctgttgagttgagaatcagcaggggactgttgacattcagggatgtggccatagaattctctcgggaggagtgggaacacctggactcagatcaga

SEQ ID NO: 189370 - DNA, 75 bp, Homo sapiens
cacacatccccgaccacttgcggcctgagtatgatctctgttgaggagctggcgcggaatctggtcatcaaggtc

SEQ ID NO: 189371 - DNA, 90 bp, Homo sapiens
ctggagaacctggtgcaaatgggcttccaggagctgcaggagaaaggggtgaacctggtctcagaggtgaaattggtaaccctggcagag

SEQ ID NO: 189372 - DNA, 83 bp, Homo sapiens
cggagcgggcggcagagcagggcggcggcgactcgttgcggagcaggagctggccaacctggagaagtggaaggagcagaaca

SEQ ID NO: 189373 - DNA, 85 bp, Homo sapiens
acgacgtgaaggagcagatttacaaactggccaagaagggccttactccttcacagatcgcctgccctcctatacctggtccccg

SEQ ID NO: 189374 - DNA, 83 bp, Homo sapiens
ccagaccctggagcctcagttggaagcagccgatccagcctgcggagcctgtggggcaggaacctatccgcttacggtacaag

SEQ ID NO: 189375 - DNA, 100 bp, Homo sapiens
agcaacttagcgaagctgccggtgaagatgctatagaatgtgctgtccatacacaagaagagcttcaaaatccagccgtcctatgtatggagctgtcact

SEQ ID NO: 189376 - DNA, 100 bp, Homo sapiens
cctgcaatgaagatttgtgagaagctgaagaagttggatagccagatctgtgagctgaaatatgacagcccacctgaggatattgaccataaggactcat

SEQ ID NO: 189377 - DNA, 75 bp, Homo sapiens
ccaaatccaagatggcggccagcaggaggctgatgaaggtccgcgggagagctgtggggcttggtgagtgtttcg

SEQ ID NO: 189378 - DNA, 100 bp, Homo sapiens
aaagtgttacatgacagatgtatgaggcatgagccatgagcccaagtccccttcgctagggatgctttccaccgcgaccaggaccaccgccaccgtcaac

SEQ ID NO: 189379 - DNA, 100 bp, Homo sapiens
cgagaaagaacacgctttgttgcttctaaacctctggaggaggagcatactggagcatagtgaaagagtctattttgaagcttcaaacttagtgctgctg

SEQ ID NO: 189380 - DNA, 98 bp, Homo sapiens
gctgccagcacctgcaggcggagaagaagaagatgcagcagaacatccaggattcagtccccgtgggggtggctttggcggccgagggggctttggtg

SEQ ID NO: 189381 - DNA, 82 bp, Homo sapiens
cactgaaattcatcctgagatgagttgtgaatgggagagttcacatccgcgactggcgagaggagacactgtggaagacaaa

SEQ ID NO: 189382 - DNA, 75 bp, Homo sapiens
ccggcccacagtgggggtgtgcaaacccgagagaactggaagatgctgtggacaattatcgagatagactaacag

SEQ ID NO: 189383 - DNA, 100 bp, Homo sapiens
agctgggtctgaatcagtgcatgtcgggaattatcaaccatgaagagctcagcctgaggaagaaaggcctggagtgcctcgtgtccattctcaagtgcat

SEQ ID NO: 189384 - DNA, 75 bp, Homo sapiens
agttcgtgcaggcgtacgaggatgtgctggagcggtacaaagcacaggaagtcctggagaacctgaaggaccgct

SEQ ID NO: 189385 - DNA, 50 bp, Homo sapiens
ctgaagagttccttaagaatactgctgcacttagagctgtgggcaacatt

SEQ ID NO: 189386 - DNA, 99 bp, Homo sapiens
ggggaggccgatgacctgggctctgggcctctgaagtgctgggattacaagcgtgagctaccacacccagcgaggaagccaagtttaacgtgtgtgctc

SEQ ID NO: 189387 - DNA, 100 bp, Homo sapiens
gaagacaaggagatggtgacgactgtgaagggggtcatcaaggctgtgctggatggagtgaagaacacacatgcaggacttgaaagatgttactaataat

SEQ ID NO: 189388 - DNA, 90 bp, Homo sapiens
cgctttgatggttatgtattccttgacaataaagggtttggagaacattgattaaggaagcattttcctgattgatgaaaaaaataactc

SEQ ID NO: 189389 - DNA, 83 bp, Homo sapiens
gcacacaagtgtgaggagttgctaaatgctcaggtggcagatatgctgttggagctctgtgtcaccgagttggaggatgtggc

SEQ ID NO: 189390 - DNA, 83 bp, Homo sapiens
ctggtcttgctcggccgatgaagtgcagaggtttttttctggctgaaggtgatgtggccgccctcaaccgacgcatccagctc

SEQ ID NO: 189391 - DNA, 75 bp, Homo sapiens
cataccaattcttgaatgacatccgagcgaaagagaaagagttacattacttcgttcagaaccatttcacaagtg

SEQ ID NO: 189392 - DNA, 100 bp, Homo sapiens
ggaaaggaaaagactcatatcaacattgtcgtcattggacacgtagattcgggcaaatcctgatcctaactgttgtcttggagtatttgggctgagcttg

SEQ ID NO: 189393 - DNA, 98 bp, Homo sapiens
tgatatcagacaccgagcttcagcaagctctctccaacgatgagtccaacaccatccacttgaaggtgattgagcagcggccagaccctccggtggcc

SEQ ID NO: 189394 - DNA, 75 bp, Homo sapiens
tatcggcgccgcggcaagagccagcttcgagagctgtgcccaggagtgaacaaccagccctacctctgtgagagt

SEQ ID NO: 189395 - DNA, 85 bp, Homo sapiens
acaggtctacgccacatcacttaggattgttaaaatgagtcttcggaagcaaacccctagtgacttcttaaagcaaatcatcgga

SEQ ID NO: 189396 - DNA, 100 bp, Homo sapiens
ctaccatgttcctgaattgattaagtgagaaagatcagtctaaagaaaaggagaagaaagtgaaaaaaacaattccttcctgggctaccctttctgccag

SEQ ID NO: 189397 - DNA, 100 bp, Homo sapiens
cagcccgacgttccgctgctggggttttgacctgtagcagagaaccaattctggagaacagcctcacttctttgattgaatacttacataatgcattgga

SEQ ID NO: 189398 - DNA, 100 bp, Homo sapiens
ggaagttcaggaaacatccaagaaaaatgtccttaaagcaattgagcaggctgatctactgcaggagcatccagcgtcggctgtccctccagctccccat

SEQ ID NO: 189399 - DNA, 124 bp, Homo sapiens
aggagaaatatttcctattgagaacatctatagtgctaccaaaattggaacgtcaaggtcgtgggaaataaaaggcagttctacacagactgcagcaacggttgcatctgcatatcctaagagg

SEQ ID NO: 189400 - DNA, 74 bp, Homo sapiens
atgctccgatgtgcagcccaagctctgggcccgctacgaggaatgcagtagcatggatagttgatggtgaattt

SEQ ID NO: 189401 - DNA, 90 bp, Homo sapiens
cagattcgcagtggtcgcttcttctccttggtccaacctaaacatgtgaaggaagctttccggttactgaataaatcaatcatccgtgtg

SEQ ID NO: 189402 - DNA, 75 bp, Homo sapiens
ctgaagctatgaattcatcttttgaaactgctattgccacaagaatctaggtaaaaatggcttatctaacagtag

SEQ ID NO: 189403 - DNA, 100 bp, Homo sapiens
gctgttttcgacaggtgtgcaggtttcggcacatggagattgatgaaggatttgatgccctggatccctttattcccatcctggtttccaactataaccc

SEQ ID NO: 189404 - DNA, 112 bp, Homo sapiens
ccggagctgggcgcggattcgccgaggcaccgaggcactcagaggaggattttttatcaagcagaaatgcatcgaacaacgagaatcaagatcactgagctaaatccccacc

SEQ ID NO: 189405 - DNA, 50 bp, Homo sapiens
tgctgatcctccagctgctgaccctctgggatccagttcttggtggagaa

SEQ ID NO: 189406 - DNA, 75 bp, Homo sapiens
agtcactcaaatccgtggactacgaggtgttcggaagagtgcagggtgctggagaatctggtaaaagcaccattg

SEQ ID NO: 189407 - DNA, 75 bp, Homo sapiens
tacacaaatgtgcttatcccaaaatggcatgatatatggacacggatacaggaatcagagatcattgatttcttc

SEQ ID NO: 189408 - DNA, 125 bp, Homo sapiens
gatcctgcagtttcaaaagaattggccaaagaagttgagaaaatgggagcagttttcatggatgcccctgtttctggtgattcacaatgacatcctttcaagaagtcccattgcagacttccaac

SEQ ID NO: 189409 - DNA, 90 bp, Homo sapiens
actgctcacacctgaaagaccactgccgcacgaccccctgtgaaggtgaccccaaaggagccatgataacccatcaaaatattgtttcaa

SEQ ID NO: 189410 - DNA, 100 bp, Homo sapiens
aaaattatgaaactgaggaaaatacttgaaaaggtggaggctgcatcaggatttacctctgaagaaaaaggacttcctccgtcaggcagctggcaggacc

SEQ ID NO: 189411 - DNA, 87 bp, Homo sapiens
gacccaaagtgccatgtctttaatcaatacgagaattggagacccaaccagccagacagcttcttttctgctggagaagactgtgtt

SEQ ID NO: 189412 - DNA, 76 bp, Homo sapiens
gagcctcacgagtcgaggtcctgcaggtggagctccggcagccgccctgtatgaatctgatgaacaagaaaagagt

SEQ ID NO: 189413 - DNA, 74 bp, Homo sapiens
acccgcgaacccctctgggatccccgccgctctgtctacaacccgagaagtccattggaatattaagcccagga

SEQ ID NO: 189414 - DNA, 74 bp, Homo sapiens
gaggctggcccaggcagccgcgcttcgaaggacgccgccgggagctgcggagaagttaaagtctgacacggctg

SEQ ID NO: 189415 - DNA, 75 bp, Homo sapiens
gaaatagcaaacttcatgcagctggtggaactagatgtgtctcgaaatgtgagtgttgcagagagctgctggaca

SEQ ID NO: 189416 - DNA, 75 bp, Homo sapiens
gagaccaagaaccaaccaattccggacacacttggactcgacagactctaagcatttaaatcaaacggtattgag

SEQ ID NO: 189417 - DNA, 98 bp, Homo sapiens
gccatcgaaatgccctcacaccagacctacggagggagctggaaattcctgacgttcattgatctggtaaaataccatgaagattttgaaaaaacaaa

SEQ ID NO: 189418 - DNA, 100 bp, Homo sapiens
agatcattgacaagactcaactgaactcctccagcctccagaaagatcgctacggttcctactgatccgagctctgtgactcaggcttacgatggtgacg

SEQ ID NO: 189419 - DNA, 100 bp, Homo sapiens
ccgctctggagggactctccttctcaccgttccgggaacaaatgctagatacgggaaagctctggcaatttaaatgacccaaataaggaggcactggcta

SEQ ID NO: 189420 - DNA, 97 bp, Homo sapiens
cagggccgaggggtgtgggcgggaggcccggcctggcttagtggggacccagggcatcagacacaggtacagcctgtacacccgcacctggctcggg

SEQ ID NO: 189421 - DNA, 75 bp, Homo sapiens
ggcctccctagccatgtggaactgccctgggaggagcggggacactgaggacctctctccaaattggcctctcaa

SEQ ID NO: 189422 - DNA, 83 bp, Homo sapiens
gtcgacatgagtgatgtggaggaaaacaacttcgagggcagagaagacctccgtgtggatggccgtggctgtgaggactaccg

SEQ ID NO: 189423 - DNA, 75 bp, Homo sapiens
ccacttcctgagcaatttgctggctcaatcctttatcctattgaaacctgtcagaggacatgccttttagcccca

SEQ ID NO: 189424 - DNA, 115 bp, Homo sapiens
cagcagccaggagtcatgagcgacagcggcgagcagaactacggcgagcgggtttggtgcacctcgatttggaggaagtagggcagggcccttatctggaaagaagtttggaaac

SEQ ID NO: 189425 - DNA, 74 bp, Homo sapiens
aattcaagaagttgaaaaacgcttttcacgtcacctggagagatgcacagagtgcctggaagagctgggatgtc

SEQ ID NO: 189426 - DNA, 86 bp, Homo sapiens
ccgggagcaggagctgggcctaggtctgcgccctgcagatatctggggaagatgaagtagagtgctctgacaaggacgagcccgac

SEQ ID NO: 189427 - DNA, 75 bp, Homo sapiens
aggataccttggtcccagagtcatcatgaagggtgaagcaagaagcatttcatttgcacatctttcttggacttg

SEQ ID NO: 189428 - DNA, 75 bp, Homo sapiens
gtggtgcagagatgtttcatgtccaggaaatggtggccaccaccacctatcatgacagatggtgaagatgcggat

SEQ ID NO: 189429 - DNA, 100 bp, Homo sapiens
cactttaatattcctgccatcacaaaagctggacaagcgaaggaaagaccacagcaagattctttcattcgtctcctcctagcctgggggaccaggctcg

SEQ ID NO: 189430 - DNA, 100 bp, Homo sapiens
aggacacttgtggagagctcgaattccagaatgatgaaattgtaaatctccgagaagcaagggataatgctgtggctgaaaaggaacgagcagtgatggc

SEQ ID NO: 189431 - DNA, 75 bp, Homo sapiens
catcgtgaaattgagggatcacagggagcattggctgctgcaatacattctgaccagatctgactttgttcatca

SEQ ID NO: 189432 - DNA, 100 bp, Homo sapiens
cggctgcgggccaggggtactcggaaggcgcgggcaggagcctggcgaggatgcaccttcccctgccttggaaaggtactaggttttgacaagcttgcat

SEQ ID NO: 189433 - DNA, 90 bp, Homo sapiens
tgctgcggacagtgaaccggacagtcatcaccatgggccgggatcacattctgattgtagatatagttgtaggtactccgggaagactag

SEQ ID NO: 189434 - DNA, 75 bp, Homo sapiens
ttaaggaacaggaggaaaccattcagaggtacactgaggaggggacggctccgtcttcacattgtgcacagatct

SEQ ID NO: 189435 - DNA, 101 bp, Homo sapiens
agctctacgttcgtgacatcaaacctcctgttgggccatttccgagaactcccatcagtttctgtatagtgtaaaagagtccggcagcgtcttctcttgag

SEQ ID NO: 189436 - DNA, 100 bp, Homo sapiens
actttgaaggaaaagaatgtagaatgaggatagaagagaggaaatcccaacatttaacagaccagtcccagtgctgaccagtcccatcgtatctctgacg

SEQ ID NO: 189437 - DNA, 82 bp, Homo sapiens
aggagacatggacgaagccttcaaatccatcaagctcatcaaaagaaattcattgagtttgaagatgctctggaacaagaga

SEQ ID NO: 189438 - DNA, 97 bp, Homo sapiens
aatttttcaaattcagtttcccttatatactgcttacaagcataatactcaccctactattgagtgctcaagtaaagctctttgtgacagggctttt

SEQ ID NO: 189439 - DNA, 80 bp, Homo sapiens
gatttacagatgcaggatcggaaagaatcccggccagacgtgcgaacagctccagctggaacgctgtaaatgtaagccta

SEQ ID NO: 189440 - DNA, 100 bp, Homo sapiens
ttcagagtctttcgtttgcagaacccaaaagccagagtgcctgaacaacggattgagctatatcagatggatgatgatgacgacgacgatgacgtaggag

SEQ ID NO: 189441 - DNA, 75 bp, Homo sapiens
cagagaccaacgagatcctgcacatgtctttagcaaaatatgctgtgaattccatcaagaagaaagtcaacgaca

SEQ ID NO: 189442 - DNA, 89 bp, Homo sapiens
tcaaaaagttctgaaaacatgttggttaaacccatccagagtaatggctgcggccttacccaggaccctgggggagttgcagctgtata

SEQ ID NO: 189443 - DNA, 100 bp, Homo sapiens
ctctgttcctttctatcccactttcaaggagggaatggctttggaagactatcagagacttaattcagtgcacaaatgagatgaatgtgaacatcccaca

SEQ ID NO: 189444 - DNA, 98 bp, Homo sapiens
ctccccgcgctgtctcggcggcccaggggcaaaggtgcatgggagaagacccggctggccctggaggccgaggtgtccgagctgcgggcagaactgag

SEQ ID NO: 189445 - DNA, 100 bp, Homo sapiens
gttttggaatgtacccatctcagatgaagttgtccgagcggaactgcattgagattgttaataaattgattgctcagaaacagctagaagtagttcatac

SEQ ID NO: 189446 - DNA, 100 bp, Homo sapiens
cttcaagctcactgatattttcctctgcttgatccattgtgctgttgagagcctctagtaaatttttcaggaagaagaccttcgtcagatcttcatgtta

SEQ ID NO: 189447 - DNA, 100 bp, Homo sapiens
agcatatctccaggaaacaggaaagctcattaagaacactcagacttacaccttcaccatcagccaaagtgtgctggtcaccaacttgaaaccagcaacc

SEQ ID NO: 189448 - DNA, 114 bp, Homo sapiens
ggagaagggacagacatcaacttttggatccaagctggagtgcctgtggcactaaggaaaacagatcatctctccctagacaaagccaccatcccgcccgaaatctttcagaaa

SEQ ID NO: 189449 - DNA, 99 bp, Homo sapiens
ttcagaggcccaaattgaggcgcaatgatgagaggatgtggtggtctactctgatgtcaatcttgagggctagaacagtgcaaccctgaaactcgtcct

SEQ ID NO: 189450 - DNA, 74 bp, Homo sapiens
cttcagtcagagtgtgatgctttccccaacatatcttcagatgagtcttgcctggagctgctgaagactgctat

SEQ ID NO: 189451 - DNA, 74 bp, Homo sapiens
gcatcctcctggccatgttcctcgtccactacgggcatcgatggcccactgcgtgaccttggttcagctgtcca

SEQ ID NO: 189452 - DNA, 75 bp, Homo sapiens
tcaacctggagctctacgcctcctacgtttacctgtccatggcctatgttgtccttggccagtttctggtgctaa

SEQ ID NO: 189453 - DNA, 75 bp, Homo sapiens
agatgcacacccttcctgggtgatgtttttccagaaaggaggagtcaaggaagcccttagtgaacgagaactctt

SEQ ID NO: 189454 - DNA, 90 bp, Homo sapiens
gggcagtatagagacgtcggacttcacgggtggactccgacgaccagtggggagagtactcctgcgtcttcctccccgagcccatgggca

SEQ ID NO: 189455 - DNA, 97 bp, Homo sapiens
cgacatcctgcggacctactcgggcgccttcgtctgcctggagattgttggacgtgataagtatgagcctgcagctgtttcagaacaaggtgataaa

SEQ ID NO: 189456 - DNA, 78 bp, Homo sapiens
gtccctcagcaaagatggtacaaaagagtctttggaggatgcggctttgatggcaacaggtgtgccctggggctatga

SEQ ID NO: 189457 - DNA, 96 bp, Homo sapiens
tgcagacttatgaagttgaccttaataagtctggtggtcggaggatgaccaaggtggtgcgtgacttcctgaaggcccagcaggtgcaggcgcccg

SEQ ID NO: 189458 - DNA, 51 bp, Homo sapiens
gcgccgctcctgcgggtgcccttgtcaggcgcattggagtgactgtctggc

SEQ ID NO: 189459 - DNA, 75 bp, Homo sapiens
cgccgagtcctagcgcctggcctgcgcgccgctgcccgcgccacaggactcgctgattcttgagaagagtcaaaa

SEQ ID NO: 189460 - DNA, 75 bp, Homo sapiens
gagcttcattatgtggaaaaagctgctgcagacatatctgaagagatggattaagaatgctttggattaaggatt

SEQ ID NO: 189461 - DNA, 100 bp, Homo sapiens
tcaccaggaacgattggaccagcaccttgatcttggattttctagcctccagaactgttatgatgtgattgctcaagcccaatctgggactgggaaaacg

SEQ ID NO: 189462 - DNA, 100 bp, Homo sapiens
gcctgatcatgcagacatctccaactgtgggaactctttccagcttgtgtctggggggtacgttaaaagcagtaaaatcttccaaaggaaagaagaagag

SEQ ID NO: 189463 - DNA, 100 bp, Homo sapiens
cggcggcggcgcctcccgggctccggctccggcttctgctgttgctcttctccgccgcggcactgatccccacagaaccttttgatggaacaaatacagc

SEQ ID NO: 189464 - DNA, 90 bp, Homo sapiens
tctcaacccctacaacttattcctgtccggagacagcctaaggctcagcctcacaggccaaagcatcagcaccagaacgcacacccagcc

SEQ ID NO: 189465 - DNA, 89 bp, Homo sapiens
aaggatgcagctgtgatctgtcgtcagcttggctacaagtaccccaatctgaagtcagtaaatgaactaatctacaagcgtggttatgg

SEQ ID NO: 189466 - DNA, 110 bp, Homo sapiens
tcacccaggtccgcctccagaaggtggtctgtgagaacccgaagaccagccagaccatggagctcgcccccaacttccaggatgaaaataaacccatctggatgcatgct

SEQ ID NO: 189467 - DNA, 74 bp, Homo sapiens
gttcgagaacgaccccgagacgctccagaggtcctgaacaaccagaggtacggcctgagccccgactactgggg

SEQ ID NO: 189468 - DNA, 82 bp, Homo sapiens
gtcttcagcggggcgctccaggaggcactcacaggagccaaaaacctgtatatcatctccgtgaaggggatcaagggacggc

SEQ ID NO: 189469 - DNA, 97 bp, Homo sapiens
ggagcccgagtccgcgggaagatggcggcgccgctcatccccctctcccagcagaattcctagaggacctgtgcaacaacctcttgaggatcgaatc

SEQ ID NO: 189470 - DNA, 75 bp, Homo sapiens
ggaatacatggaagtccgggagagaatacacagagccatatctctcagaagatagaagtgtgcaagaagtactac

SEQ ID NO: 189471 - DNA, 98 bp, Homo sapiens
ttgaaggcgtagctgagatgccagctcagagacgatgataccaagctgctactattctgaccaagtccactttggagaaccagaattggagagctacc

SEQ ID NO: 189472 - DNA, 100 bp, Homo sapiens
cgatgggcgacccggaaaggccggaagcggccgggctggatcaggatgagtggcagtgtccttgttaaacggatgttccggcccatggaagaggagtttg

SEQ ID NO: 189473 - DNA, 93 bp, Homo sapiens
atgcaggatgctaccatcaaagtgcgcccacagcagcaaccttggagcaggcaggtttttagaacttcagccataaaaatgggcagaattttc

SEQ ID NO: 189474 - DNA, 75 bp, Homo sapiens
gtgtgccggcagctagcagagaagagaatgctgtctctgctggatgaaccgaatcctaacagtccagccaatagc

SEQ ID NO: 189475 - DNA, 142 bp, Homo sapiens
cgagatttgggagagacgctctgaactgactgccccgcatcaccggagcgtcccagctgcgaggagacaatgcagatcttcgtgaagactctgactggtaagaccatcaccctcgaggttgagcccagtgacaccatcgaga

SEQ ID NO: 189476 - DNA, 101 bp, Homo sapiens
cgccgacgacccagcagccgccatggctctgctccgaggggagagaccattctaacacaggtaccgtccagacagtgcctctgagaaagggaacctaaagg

SEQ ID NO: 189477 - DNA, 87 bp, Homo sapiens
tttatggccaaagaaggggagtatggcaaattctttgttacgaagcagatgaagtacttagagcagcagcaggatgagaccaaacaa

SEQ ID NO: 189478 - DNA, 75 bp, Homo sapiens
gtcccaacatccccaactggtggcagagttatgagttctgcacggagctaaaccagccgaccctgcccaacatcc

SEQ ID NO: 189479 - DNA, 75 bp, Homo sapiens
aaaaactacaatcataaagaaatccaacttaccttgtcagctttgatgacagtagggaaagaaccatttcctacc

SEQ ID NO: 189480 - DNA, 100 bp, Homo sapiens
gcacatggacattgaacaggcgaacctgcaccagctggccactgagatgttcagcccacaagagcttactggtgaaggaatgggacaagacccatcttta

SEQ ID NO: 189481 - DNA, 82 bp, Homo sapiens
ctggagatccgcgaccgcatgtggctcaagatcaccatcgccaatgccgtcatcgagcatgggcatgtgtttcatcgggaag

SEQ ID NO: 189482 - DNA, 100 bp, Homo sapiens
aggactggagtggtttgtctgtgatggctggaagttcctctgtaccagcgcacgtaccgggtgccgaaggaggtccgcgtggagcctcagaagttcgcgg

SEQ ID NO: 189483 - DNA, 75 bp, Homo sapiens
gaaaataagtatttccaccatatgaaagcaagtgattgctttcctttcctcatttttggaagccctgcctaacac

SEQ ID NO: 189484 - DNA, 75 bp, Homo sapiens
agaggaggaggttaagaactcagtcaggctcatccccagctggaccacggtgtgtgtagcccacaatgccctgga

SEQ ID NO: 189485 - DNA, 100 bp, Homo sapiens
tctgcgtctctggagacaagggcactacacgcacttcagaatgaagagttatggtcatcatgggccagtgctactacaacgagaccatcggcttcttcta

SEQ ID NO: 189486 - DNA, 74 bp, Homo sapiens
ggacatgagggtccccgctcagctcctggggctcctgctgctctggttcccagagccccccaagatgaacccag

SEQ ID NO: 189487 - DNA, 77 bp, Homo sapiens
agacggctcacctgtgcgggatggaacaaaagtgtggacgaatgtggaacctcgctctgtggctgtgttcccttggc

SEQ ID NO: 189488 - DNA, 74 bp, Homo sapiens
cgagttgagtacttggatagacttatacctcagagagagctgagtgagatgcgggcacctccagctgctacaaa

SEQ ID NO: 189489 - DNA, 98 bp, Homo sapiens
tcaagggttctcttgtttatcgaggtttttgggctggtggtttcggcaggatgctttgcgtgtgggatggaaaatggattccgagtctataacactga

SEQ ID NO: 189490 - DNA, 100 bp, Homo sapiens
tctgccggtccatgttttcagcacccattgcctgaagtgttagcaccttcactccgttgatattcactgatggactccaaagaatcattaactcctggta

SEQ ID NO: 189491 - DNA, 75 bp, Homo sapiens
ccttcatctaccatggctcagccgggaactctgaacctcaataacgaggccgaatacatcaagcaatggtaacat

SEQ ID NO: 189492 - DNA, 80 bp, Homo sapiens
gcgggccattagagatttcttctggaaaactggaaacaagcgctggccgcgcgccgaacccgagtccggcggcaccgacg

SEQ ID NO: 189493 - DNA, 101 bp, Homo sapiens
cctgctggtgcccctggtgacaagaccaatgatgcgagctcagagtcaatagcatccttctctaaacaggaggtcatgagtagctttctgccagagggagg

SEQ ID NO: 189494 - DNA, 74 bp, Homo sapiens
gagccaaactgtccaaggctttggcagttctctttggtttccagcaagatgcatcaaaccttaccatagcatgg

SEQ ID NO: 189495 - DNA, 100 bp, Homo sapiens
tggcttggcgcctgaggttctcccattagggcccaatgtaaaggctgttgctactgctgtggaacagatttacccatttgtgtttgaaagcaggaaagaa

SEQ ID NO: 189496 - DNA, 144 bp, Homo sapiens
cttggactggacatcttttaaccaggagagaattgttgatgttgctggaccagggggttggaatgacccagatatgcacacaggtgaactccagaaagaagaagctatggccgcagtgattctggagagcatctttctgaagcg

SEQ ID NO: 189497 - DNA, 82 bp, Homo sapiens
gtccgccgccaccacccactccggacacaggttgtactcagactatctctactttgcaagttcgaataaatccgcggacgac

SEQ ID NO: 189498 - DNA, 85 bp, Homo sapiens
gaaagaagtgataggagggctctgtagggttccgaggccacatggttggaccaagccatccagtgcgtggctgagatcctgggcg

SEQ ID NO: 189499 - DNA, 75 bp, Homo sapiens
catcccaggacctaccagaatctggacccagatgatgtggtaccagttggccaaagaagagcctggtgttggtgc

SEQ ID NO: 189500 - DNA, 75 bp, Homo sapiens
cacaataccaggcatacatttggcagaataaatgaaccagatagtcactgccaatccttggaacacaattgctct

SEQ ID NO: 189501 - DNA, 100 bp, Homo sapiens
tcagtgccattgcccgaaccctgcaggaatggtgtggtggctggaggtggccgaattgacaaacccatcttgaaggctggccgggcgtaccacaaatata

SEQ ID NO: 189502 - DNA, 82 bp, Homo sapiens
ccgactgatccagctggtggtcctggtctacgtcatcgggtgagaagccctaccactgcaactgggacggctgcggctggaa

SEQ ID NO: 189503 - DNA, 143 bp, Homo sapiens
caacagctggaagagtctgggccacacgatttgacggaaacatcttacttgccaaggcaagatctaggtactctgtggatatccccttggacaaaactgtcgtcaataaggatgtcttcagagatcctgctcttaaacgcaag

SEQ ID NO: 189504 - DNA, 74 bp, Homo sapiens
cggccccggagctgcctggaggcggccgcactcgggtatcgagaaccttccctgcgaacttcagaggaacttcc

SEQ ID NO: 189505 - DNA, 100 bp, Homo sapiens
tccaaataaacagaatttgattgctgaggtttcaaccaaggaagatgagaatgtgcctactgctcctgatcctccaagtcaacatttacgtgggcatggg

SEQ ID NO: 189506 - DNA, 82 bp, Homo sapiens
cttttggtgtacagggtctgggatgggtgtacgaaggaagcaagattgggaaaatgaggtacgttagtgttcgcgattttaa

SEQ ID NO: 189507 - DNA, 98 bp, Homo sapiens
cagcctcccaagtaggtgggactacagactgcgccatggggctcagcgacggggaatggcagttggtgctgaacgtctgggggaaggtggaggctgac

SEQ ID NO: 189508 - DNA, 89 bp, Homo sapiens
agatgccccagaccacgagagcctcaagcttctccagagaggaatttgctgacacaatatcttccgcctggtgctgggcatatcctaag

SEQ ID NO: 189509 - DNA, 83 bp, Homo sapiens
gaggaggggccccagcagcccccgaaggccctatcaggacatggagtatgaaagacgcaattctgtggtgttcttggtcacac

SEQ ID NO: 189510 - DNA, 82 bp, Homo sapiens
atcataaaaatgaacagttttgtggaatagatgaccaaatattgcccccgaggaattagcacttgttcacaacttgaggaaa

SEQ ID NO: 189511 - DNA, 90 bp, Homo sapiens
ggaattacaggattctaaagaaatgaaacaattacttgattccaagatagaagagtcatcagaatttgatgtgagggctttctgcaacca

SEQ ID NO: 189512 - DNA, 80 bp, Homo sapiens
catcgatagggatgcagaggatcagaaccggtacctggatggcatgatgtgggcgctatctccaactgtctttgcacttc

SEQ ID NO: 189513 - DNA, 124 bp, Homo sapiens
accctggagcctcagttggaagcagccgatccagcctgcggagcctgtggggcagaactgccattggatgtccagaatcccctgtagttgataatgttgggaataagctctgcaactttctttg

SEQ ID NO: 189514 - DNA, 74 bp, Homo sapiens
ctacaaccagcctaagggtttctctactatgtccagattgtctcaaagcttgccaggagcagattgaggcggtg

SEQ ID NO: 189515 - DNA, 97 bp, Homo sapiens
cttggcagaaagtgaggaggaaaacacccccattaccaccatcatggcagtggagtttgacgggggcgttgtgatgggttctgattcccgagtgtct

SEQ ID NO: 189516 - DNA, 88 bp, Homo sapiens
gagaatatttaatggaaaatcgcttggttaaaacctgacacttttaacagtgagaaagatcagtctaaagaaaaggagaagaaagtga

SEQ ID NO: 189517 - DNA, 74 bp, Homo sapiens
gactggaccccaacaggtttaaccccaagaccttcttcatactgcatgcagatataatttctacagtagaattt

SEQ ID NO: 189518 - DNA, 83 bp, Homo sapiens
cgccccccaggaggggcgagagggagccgcagctgatgtcaggctcttgtcaggatggtgaagctgttcatcggaaacctgcc

SEQ ID NO: 189519 - DNA, 75 bp, Homo sapiens
gtcttcgagaatcccaaacaaggaaagctccgcaccaaggtggagaacggctggtacacacccccaaaagaagac

SEQ ID NO: 189520 - DNA, 82 bp, Homo sapiens
cgccactgccgcaggaggcgtgagggccgcgttcgcaccaaaaccgtgaagaaggcggcccgggtcatcatagaaaagtact

SEQ ID NO: 189521 - DNA, 99 bp, Homo sapiens
caccatgcccagtgccagtgactggattggcatcttcaaggaagctgaatatggtgggcatgatcagatagatttgtatgacgatgtcatatctccatc

SEQ ID NO: 189522 - DNA, 100 bp, Homo sapiens
cccctcggccttccgacgtgggcggtgggccccagccccacagaccagcccagcattcaggtttacccaaggtccagcctagcccctaggcaccatgtcg

SEQ ID NO: 189523 - DNA, 104 bp, Homo sapiens
gcgcgcagggcctgcagcgggagctggacggcgagcgcgagcggcgcgagaaagtctcctccgggctggggctgagcaagccctcggagtgaccgtgggtgaca

SEQ ID NO: 189524 - DNA, 50 bp, Homo sapiens
cgaagatttccaatcatttctaaaatctgaacagaattaagacgaacgag

SEQ ID NO: 189525 - DNA, 100 bp, Homo sapiens
cacctcccaccatggacagcttcgacttagccctgctccaggaatgggacctcgagtcactgtggaaagaccacagcaagattctttcattcgtctcctc

SEQ ID NO: 189526 - DNA, 89 bp, Homo sapiens
ctctggttatgatagtcgttctgcacgtgcatttccatatggcaatggtgagccggcctcatcctagtgactaccccctcctgatcctc

SEQ ID NO: 189527 - DNA, 50 bp, Homo sapiens
gtcctggcggcttcagctttgaagtcgtccctggggatgagcccagggag

SEQ ID NO: 189528 - DNA, 71 bp, Homo sapiens
tgccccatgtgccagaaggagttcgcccccaggagctggagttcctacgcgtggccaagaaggagaagctg

SEQ ID NO: 189529 - DNA, 107 bp, Homo sapiens
ggagctaggccggcggcagtggtggtggcggcggcgcaagggtgagggcggccccagaaccccagttgcggagcaggagctggccaacctggagaagtggaaggagc

SEQ ID NO: 189530 - DNA, 87 bp, Homo sapiens
tgctgcggcgcccgctggccgggctggctgcggccgccctgggccgggccccaccggacgtggagcccacagtgaccatctccccat

SEQ ID NO: 189531 - DNA, 100 bp, Homo sapiens
atgtgcagcccaagctctgggcccgctacggcatctctcgggacaactggcacaagcgccgcaaaaccgggggcaagagaaagccctaccacaagaagcg

SEQ ID NO: 189532 - DNA, 83 bp, Homo sapiens
tggagggagacgtgctggacacactggaggcgctgggcaacatggctgacaaggccaagcctgccaaagctgccaacaggacg

SEQ ID NO: 189533 - DNA, 97 bp, Homo sapiens
ctcaaagggagatgctgacagcacagaatcgcaaaacaagggttcctccagttttggtggtggaaatgtcacagacatcaagcattggtagtgcaga

SEQ ID NO: 189534 - DNA, 100 bp, Homo sapiens
aaggagcagagcggccggaagcgcggagggagccgcgggatggaccgcagggtgcgctggctctggccctgcctgtgggttccggtgtggtgcagtcgct

SEQ ID NO: 189535 - DNA, 74 bp, Homo sapiens
agtcctgacaatgggcagaacgaattcagtgatatcattaagtccagatctggataacttcaaactaatgtgta

SEQ ID NO: 189536 - DNA, 100 bp, Homo sapiens
ttccccgagagacggcaccatgacccagggaaagaattacctctctgaacaggactttgtgtctgtgtttggcatcacaagagggcaatttgcagctctg

SEQ ID NO: 189537 - DNA, 117 bp, Homo sapiens
acaagtgagccagatttcacctctgcaaatatgagagattctgcagaaggacaagtgttggacagccggagtcagtctccatggagattatctttgataacagatttcttctgggga

SEQ ID NO: 189538 - DNA, 75 bp, Homo sapiens
gcgacggcggcagcggccggagccgggccgggcagctagcagggcgcttcgggtccggaccctatttgtcagtgg

SEQ ID NO: 189539 - DNA, 74 bp, Homo sapiens
tctgcttttgcaggggcttcgggaagcagggattccagtgccaagatcttcaggtgaagtctgagccatcttcc

SEQ ID NO: 189540 - DNA, 76 bp, Homo sapiens
cggattgatcaggccagcttagactattcatacgctcggtattctgaggccctggccagcacgaggatcctcaagc

SEQ ID NO: 189541 - DNA, 123 bp, Homo sapiens
gcccgaatcactgatggaattggacagtgcatggagatggttcagcaggacaaggctttctccagacctgactaggctaaaggagagatacgccaggactaagagagacatcttggctttgag

SEQ ID NO: 189542 - DNA, 100 bp, Homo sapiens
tttccagcagtcagttgaacaagacaacttatttgataatgaagctgataggaccttgatatatataactctctacatttctgaatgtctgaagaaactg

SEQ ID NO: 189543 - DNA, 100 bp, Homo sapiens
aaagtctttccaaaaggtcaaggttcacaagggaaatcctcattgacgattcaatttgttgaaggccaatttgtggactcctacgatccaaccatagaaa

SEQ ID NO: 189544 - DNA, 100 bp, Homo sapiens
gaggcgcggctggcgccgctgcgcgcatgggcctgttcctggcccgcagccgccacctacccagtgaccatgatagagtgtaggtcttcctgaaactctc

SEQ ID NO: 189545 - DNA, 100 bp, Homo sapiens
ggcggcgcgtctggaggaggctgcagcagcggaagaccccagtccaggtctggtccgagagcaggaggctgggctgctgcagttcctccgcctggacggc

SEQ ID NO: 189546 - DNA, 83 bp, Homo sapiens
gggccctggatgagggggaagggcctcaaagccagaagagacaagctctcactatattgcccaggctggactcgagctcctgg

SEQ ID NO: 189547 - DNA, 88 bp, Homo sapiens
cggcctgaggtcaaggagaaattgaactaaactctcctttgaagactgcatagaatgtcaagctaaccaggcgtccgctacttcagaa

SEQ ID NO: 189548 - DNA, 101 bp, Homo sapiens
ccctgcaaaggagtccctagagacacctagtaatgtgaagctgtggtctaccaatctagacaactcagtggcaagcattgaggcaaaggctaatgtgtgct

SEQ ID NO: 189549 - DNA, 90 bp, Homo sapiens
ttccagtcctgcaagctccattcatgagtcctcgaatgccaccttgctgaccaatgcagagaagattgccaccatcaccaccacacacac

SEQ ID NO: 189550 - DNA, 98 bp, Homo sapiens
gctgctgggcacccacggagcctccggggctgctccaaagacaacaggccctccctctgccctcccgtctgtgagctccctgcccagcaccacctcct

SEQ ID NO: 189551 - DNA, 82 bp, Homo sapiens
tcggtgctggagaacttcgtgggccgcaaacggggattcagcgtccgatcctttggaacagggactcacgtgaagcttccag

SEQ ID NO: 189552 - DNA, 75 bp, Homo sapiens
cggacagattgaccttcagagcgagggggggccctcagcctcttggccttgaacgggctgttcatcttgattcac

SEQ ID NO: 189553 - DNA, 99 bp, Homo sapiens
gtaggaattgccttcttggcaactgtggtcactcaactgctagtatataatggtgtttaccatgagcatttgtcctgtgctttcacattctttctgcat

SEQ ID NO: 189554 - DNA, 73 bp, Homo sapiens
ctcctggccttggttggggaagtgggggagctggcagaactcttgggagtcaggcctagggaaatccaccctc

SEQ ID NO: 189555 - DNA, 149 bp, Homo sapiens
ttgcccagctgctgccccacaacgaggctgcaagagagatcctcctgatgcccactccagggaagcatgggagattacctggggcaattgatgttatcggtcagactataactatcagccgagtagaaggcaggcgacgggcaaatgag

SEQ ID NO: 189556 - DNA, 101 bp, Homo sapiens
gaatggctatgtgaccatgtcggtgggaaaagtctttcaccctgggtccagattttggctatgtaactcgagggccccaaacagggggtatcagtggactg

SEQ ID NO: 189557 - DNA, 74 bp, Homo sapiens
aagtcacctgacacatttgtgagaactatttatgcagttccttcctgtgtacagcccttctgaggaggagaaga

SEQ ID NO: 189558 - DNA, 75 bp, Homo sapiens
tggaaagggatcggccacgtcatcaaggtccctgatacaagaagaacggccaatccgacagattttgtacctcgg

SEQ ID NO: 189559 - DNA, 83 bp, Homo sapiens
gccgcctcgggaccggctgtatgattaggccacaatcttcaatgagtaaacatattccttttggatgctcttccaagagtcac

SEQ ID NO: 189560 - DNA, 116 bp, Homo sapiens
gccagccgcaccatgccgctcctaagcctgcacagccgcggcggcagcagcagtgagaggctgcaagatcaaggccctgcgggccaagacaaacacctacatcaagaccccagtgc

SEQ ID NO: 189561 - DNA, 98 bp, Homo sapiens
cggggccgggcgacctgggcaccagcaggacccgaggccaggagccaggggcccagaagaaactcagccaagaatgtttaaagcagctggcaatcaag

SEQ ID NO: 189562 - DNA, 50 bp, Homo sapiens
tttattgtggtggagtccaccccgctgtgacctgtactccggctggttgg

SEQ ID NO: 189563 - DNA, 100 bp, Homo sapiens
gcactgaggacccggtgccggaggccgtgggcggcgacatgcagcagctgaaccagctgggcgcgcagggcgtggaaaagataccccagtctgcggtgac

SEQ ID NO: 189564 - DNA, 100 bp, Homo sapiens
ctccaggagagaaactcacgctctctcaccagaactcagagtcttcctaatattaccagatgaagaaaacctgcttgatatcacacagtcaggagtcaac

SEQ ID NO: 189565 - DNA, 100 bp, Homo sapiens
ggcttgtggtgcggcctcaccatacaggaacagggcagacgttagcgtgagtgatcactctcaatcccggaggtgaatacgctttggccgaatacacaga

SEQ ID NO: 189566 - DNA, 101 bp, Homo sapiens
accaaaagagaggcaccgctggaacactaatgaggtgtcagttgtacccgaggcgttctcagcagcagcaagtacctgtggtggatttccaggctgaactg

SEQ ID NO: 189567 - DNA, 100 bp, Homo sapiens
cagtgtttcatgaagtattttacagacgaaatgaaagtgaactggtgtcacaagttcctgggtggagctacccatgaacagcagcaatggcaatgataat

SEQ ID NO: 189568 - DNA, 80 bp, Homo sapiens
aacatgatcaggcatctccatcaggatttcaaccagagatggatattgatgatgttaagaagttcaaaccgggttacctg

SEQ ID NO: 189569 - DNA, 100 bp, Homo sapiens
atgccaactctgcttgaaggactcacagagctttgtaagcaaaaaccagcagatcctttgattaactgctgaagtactgatcgagttctgcatttcttca

SEQ ID NO: 189570 - DNA, 126 bp, Homo sapiens
gtctctttccagaggccaggctttatgggagcatgggttaccagcgacgcaccctgccatctggctgctgtgcacaggcgctcgtgaggctgccttccggaacattaagaccattgctgagtgcct

SEQ ID NO: 189571 - DNA, 82 bp, Homo sapiens
gcacaaagagcttgctccctacgatgagaactggttctacacgcgagctggtgcatggctgcctcctaatcccatagtccag

SEQ ID NO: 189572 - DNA, 100 bp, Homo sapiens
ccgcgcggctcggagccctggaagcagcagctcaccgaggacggggactctctgcgctcctcagaccaccggcaggtgaacagcctgatgcagaccgagg

SEQ ID NO: 189573 - DNA, 100 bp, Homo sapiens
gactcgcgatcttccttccggagccatgtcagaaggagtggacttgattgatatatatgctgacgaggagttcaaccagtctattatcctcccagtccac

SEQ ID NO: 189574 - DNA, 90 bp, Homo sapiens
ggttgtcttagtctttgctctcagcatcggtgcacttgtaatatacttcatagattcatcaaaatgctttgttctgtacaagctgcccaa

SEQ ID NO: 189575 - DNA, 82 bp, Homo sapiens
gatacgggagctcaaagtgtgccttctcgggggggatatgagactttctactcggaatatcctgagtgttgcgtggatgtaa

SEQ ID NO: 189576 - DNA, 82 bp, Homo sapiens
gacacggtctgggccgccgaatctccggccgaagagcggcggcggcagcggcggatattagaaatggctactccccagtcaa

SEQ ID NO: 189577 - DNA, 100 bp, Homo sapiens
ccagggccaggtgggcaactgctggtttgtggcagcctgctcgtcacttgcctcccgggagtcgctgtggcaaaaggaggccccgtgtgggccgcggccc

SEQ ID NO: 189578 - DNA, 75 bp, Homo sapiens
gtcgaaaggattggattggcatctttagagacatgatgagctacattgggcccaagaggacagcagtggtgcggg

SEQ ID NO: 189579 - DNA, 51 bp, Homo sapiens
cagaagatggcggaggcggggattcacaatgacatcctttcaagaagtccc

SEQ ID NO: 189580 - DNA, 75 bp, Homo sapiens
gctgccaaaagaaatgtcttagatagtagttctgacttcccttcaaggttgattgagtccagcctgggcagtgta

SEQ ID NO: 189581 - DNA, 96 bp, Homo sapiens
aaatgggttggaaaacatgggagggagctgagcacataacgacttacacgttcaatactcacaaagcccagcataccttctgtaagagatgtggcg

SEQ ID NO: 189582 - DNA, 98 bp, Homo sapiens
ggaatcctgatgctcctgtagaaacattttgggagattagagaggaagaagctattcagttggatggattaaatgcatcacaaataagagaacttaga

SEQ ID NO: 189583 - DNA, 83 bp, Homo sapiens
gccgtccgccgcccgccggatcccccggaccccccgaccatgacgacaacccccccgtgtcttttgtgaagttctccccgaac

SEQ ID NO: 189584 - DNA, 101 bp, Homo sapiens
ggaaccacaagaaaatcaaaagaaacttttgcccttatcagtaacacctgaggtgatctgtgaaaatggttcgctattcacttgacccggagaaccccacg

SEQ ID NO: 189585 - DNA, 75 bp, Homo sapiens
accatgtttggattgaagccgcctctgtattacttaccaggttcattttccagacactgaaagagcagaatggct

SEQ ID NO: 189586 - DNA, 78 bp, Homo sapiens
cccagtcccaacttcgggccccggccccgcgcgccccggcccggccccgcgagggacccagacatggagctgcgggaa

SEQ ID NO: 189587 - DNA, 75 bp, Homo sapiens
tctcgacctgctaacagaactggaccttttcggtagcctttccagtaaatatatgactcagggaaaagcctcagc

SEQ ID NO: 189588 - DNA, 100 bp, Homo sapiens
ctcctgtctccgatgaggacgaaggctttgaagacaagattcccaaaaggagattctctgagatgcaaaatgaaagacgagaacaggcacagcggactgt

SEQ ID NO: 189589 - DNA, 75 bp, Homo sapiens
tatttatctggatgtaccaatatctgatgacagttgtatagcagcttgagtctactgaaagcatcctgcaggaag

SEQ ID NO: 189590 - DNA, 90 bp, Homo sapiens
tcctcggcctcttctgtgtcttcactttctgggagtgacgttcccgtggaccgggagcccgtggaccgggagccggtggtgtgccacccc

SEQ ID NO: 189591 - DNA, 76 bp, Homo sapiens
tgggatatcatggcatctatctgggccatactggagatgttactattcaaacacagatgcagtcatttatgtagta

SEQ ID NO: 189592 - DNA, 83 bp, Homo sapiens
agggatgcagaggatcagaaccggtacctggatggcatgtctctgctttctatccgtcaagatgataaagtcgtgtgcccgag

SEQ ID NO: 189593 - DNA, 96 bp, Homo sapiens
cgcctgcgaccccagtcggtgctccggggaggtcacctgacgaggaggattatctactatctagatccatctgttctgtccggcgtttcctgtttt

SEQ ID NO: 189594 - DNA, 75 bp, Homo sapiens
ggggaaccaaggagacgctcctggcactgcagggcgaatcaaagccatccagctggagtactcagaggcccggag

SEQ ID NO: 189595 - DNA, 74 bp, Homo sapiens
cggttccgtctacaagaaacacccccagagagagaacggctgttgcgctccaaaaggcatcgagggaaaagtct

SEQ ID NO: 189596 - DNA, 90 bp, Homo sapiens
ggccgagccgggatctcaggtcctcgggggcggcggccacgccaaggacgggaatacggttggacagaatgaactgaagattacaagtga

SEQ ID NO: 189597 - DNA, 73 bp, Homo sapiens
gggagcgagctgggagggagccgcgcgcctttgtgcgcgcgccgagctccagtgatccacaagctcagaaata

SEQ ID NO: 189598 - DNA, 100 bp, Homo sapiens
gcctaacaagatggaagcaggtttaaaattttacataagaagttacctttttcaggaagggccatactgatgcagagattgaggcaatattcacaaagta

SEQ ID NO: 189599 - DNA, 75 bp, Homo sapiens
cagcctcctcactggcctgccccaggctgagcagtccaaagtcctgagcgccgtggaggaccgcatggacgagct

SEQ ID NO: 189600 - DNA, 100 bp, Homo sapiens
tggagtgttaacagtgtagggaaaatagagtgtgtatcagcagagaccaccgaagactgcatcgccaagatcatggcctgcaggagttgttccaggcccc

SEQ ID NO: 189601 - DNA, 83 bp, Homo sapiens
tgaacagccaggaatggacgctgagtcgatctgtcccggagctcaaagtgcagcaagcaactttgactgctgtcttggataca

SEQ ID NO: 189602 - DNA, 50 bp, Homo sapiens
tggaggagtacgcgcgagagccttggctgctgagaactagccctagacct

SEQ ID NO: 189603 - DNA, 100 bp, Homo sapiens
ctggccccggctgcccgcgccggctactccgaggagcgctgcagctggaggggcagttggttgaatctggcgatgtggaacccatggatatggagggctg

SEQ ID NO: 189604 - DNA, 100 bp, Homo sapiens
ctgcgcgccgctgcccgcgccacaggtttacccaaggtccagcctagcccctaggcaccatgtcggacagtgatctaggtgaggacgaaggcctcctctc

SEQ ID NO: 189605 - DNA, 100 bp, Homo sapiens
aaattcctcattggattactgtgttttaaacagaatttcgtgaacagccttttatctccaagcggaaagaaaggtgctccatctcgaaaagcgagaaagg

SEQ ID NO: 189606 - DNA, 49 bp, Homo sapiens
gaaggactcctcgctctatataggttttgagcaaaattttggactgtga

SEQ ID NO: 189607 - DNA, 74 bp, Homo sapiens
aaataatgaccctgggtggaaaaatttgacaggaacttccataggcaaatgtccaaagaacaaattatttaaag

SEQ ID NO: 189608 - DNA, 100 bp, Homo sapiens
ccggacctgagcagcccgtacctctccaacggacccctgtctcccggaggagcgcgcacccgtgttacacgttcccaagaagaacttcgagaagataaag

SEQ ID NO: 189609 - DNA, 83 bp, Homo sapiens
cacacgggcgagaagccctacgagtgcaacatctgcaaggtccgcttcaccaggtctgataccacaacttataggggttgctc

SEQ ID NO: 189610 - DNA, 90 bp, Homo sapiens
acacagggattttgaaaatgctgcacatcccttaatagtcatctacatagagcatggatcattttgatgacattggtcccagtgttgtaa

SEQ ID NO: 189611 - DNA, 100 bp, Homo sapiens
agggcatcgaggacccccaggcactcctggagggtgtgaagcatcagaagagctaacaattgctggaatgacctttacaacttttgatcttggtgggcac

SEQ ID NO: 189612 - DNA, 83 bp, Homo sapiens
ctcacttgcatgtatttggaacaaaaaaaggagatgcctggcagccccgctctctgcatcgaggggagctgcagcgggagtca

SEQ ID NO: 189613 - DNA, 83 bp, Homo sapiens
gggaactccgccatgtcatccacttcgcccaacctccagaacttcagcgagagggaagcatcgagactctgagtaacagctca

SEQ ID NO: 189614 - DNA, 51 bp, Homo sapiens
cactcacctctctctgctcatgcagcactgcctcctaaaccaccaaaacct

SEQ ID NO: 189615 - DNA, 100 bp, Homo sapiens
gggcacggtcaacgggaggcttctcaagagacaagtggaggtaaacgtccgtaacaagatcctgtacctgatccaggcctgggcgcatgccttccggaac

SEQ ID NO: 189616 - DNA, 90 bp, Homo sapiens
agctgttttaaatctagtagataagccaggtgaaaggtgtagcagtcactcggcctacacccacagcatcgaccttgtgaacccagcgac

SEQ ID NO: 189617 - DNA, 74 bp, Homo sapiens
ctaccgcaatgtgatgctggagaactttacacttctggcctctctggtggacagtttgcggttgtgaagaaatg

SEQ ID NO: 189618 - DNA, 100 bp, Homo sapiens
ccgcaggagagacacgctgggccgaccccagagcggcgctggacagcatgatgccttcttctgtagagtgggcgctttgcagaatacgtgttgaatgaaa

SEQ ID NO: 189619 - DNA, 90 bp, Homo sapiens
ttccctggaaacatgccacccggcatagccctcaacaagaagaggaaaataccatttttaaggcttttatcttgagaacatggtgtctgg

SEQ ID NO: 189620 - DNA, 100 bp, Homo sapiens
aaggaagcaagcagttcagaagagccaaggaataaacatgcaatgaacccaaaagggtttcagcaacatttgctgcaagtttagtcaccagtcctgcaat

SEQ ID NO: 189621 - DNA, 89 bp, Homo sapiens
ccggctccggcttctgctgttgctcttctccgccgcggcactgatccccacaggagatacaactcgtcaacgaatcaaattcagtgatg

SEQ ID NO: 189622 - DNA, 89 bp, Homo sapiens
tcctcatcatgaactttctggagacaattgtggcaattaataaagacccagaagctccaattttccaagtggcagattatggaatagtt

SEQ ID NO: 189623 - DNA, 100 bp, Homo sapiens
acgagtccttggagaggcagatcctggagctggaggagcggcacagtgccgaggtagctggctaccagagaggaggttcagatgagcccctgctgacttg

SEQ ID NO: 189624 - DNA, 50 bp, Homo sapiens
cagccgccaaagaccccgtccggtaggctgatcagctgaccgaagaacag

SEQ ID NO: 189625 - DNA, 100 bp, Homo sapiens
gcaaatcccctgctcagggtcttcatccagaaacgaggttgattcttcaccacactgaaaccattaggaaaaatccttgtggttaacagcagaggcttca

SEQ ID NO: 189626 - DNA, 82 bp, Homo sapiens
tggaccagtttgttcgttacgaggaaaagtgtaatgttggttggagctcgagaaggaatctggatactgtgtgccggaccag

SEQ ID NO: 189627 - DNA, 100 bp, Homo sapiens
cgaggatctggaggcacagctgcagtctgacgagagggactctgctaacaccagatagtggaaagaaaccatgtgctgaaatgtttgacgacactgatgg

SEQ ID NO: 189628 - DNA, 80 bp, Homo sapiens
agtcaggaccgtagctcatgaaaaggtattgcgcagcgatgcacggccatcaagtaccacttttctcagcccatccgctt

SEQ ID NO: 189629 - DNA, 75 bp, Homo sapiens
gaactcgtcatgctctttgtagcgtggtgcttctgttgctcacaggctcagtagatgaaggcgtttctgagggct

SEQ ID NO: 189630 - DNA, 97 bp, Homo sapiens
ccgggatcaaagtgtaccagtcggcagcatggagcagcccgacggccatggaggctgaagagacgatggaatgccttcaggagttccctgaacatca

SEQ ID NO: 189631 - DNA, 90 bp, Homo sapiens
ctcggtcaccatgtggtcctcagggaatgacagaggaagaggaagacaaacttctggcactgaaagacttcatgatgaaatctaataaag

SEQ ID NO: 189632 - DNA, 74 bp, Homo sapiens
ttcttgatcagtatctcactctgctggcagatgatccataatctatgccagcaattatgacaatgttagcagac

SEQ ID NO: 189633 - DNA, 100 bp, Homo sapiens
cgttgcggccatcgccctgccggaccgcgcctcaggctcccccaggtatggacctgtctgccaatcaggacgaggagaccgaccaggagaccttccagct

SEQ ID NO: 189634 - DNA, 100 bp, Homo sapiens
ggccgtcaagatcctcaagaagaagaagttgcgaaggatccccaacggggaggccaacgtgaagaaacccaacatgagtgaagtttcctgcaagaaacgg

SEQ ID NO: 189635 - DNA, 100 bp, Homo sapiens
ccggctgtggcgcgcggacggaaagtttatgccgacggaaagtttatgccgacggactgtgtccggcgatgggcacgggccattcgttcctggttaactc

SEQ ID NO: 189636 - DNA, 100 bp, Homo sapiens
aaggggtccctgaggaggctcagcccccacggctgggccaagagagaggtggtgttcccactgatgaagagcaggcgactgggttggagagggagatcat

SEQ ID NO: 189637 - DNA, 104 bp, Homo sapiens
cggaaaatggccgccgccgccgccgccgcgccgagcggaggaggaggaggaggcgaggaggagagactcctgcttagacgcctggtgactctcatttcgcagca

SEQ ID NO: 189638 - DNA, 139 bp, Homo sapiens
atttacttcactctggccatggagaacatcaagagcagcagaggtctaatggggaacatcattattgaattgtatgagagagtaaaacttgtctcggcacagagtcaagtaaagaaagccaacatacagtggagcccct

SEQ ID NO: 189639 - DNA, 100 bp, Homo sapiens
ttcctcctcctgtcgctgcccgtgtgattactgagactcaggtggatcttcttgttccaaccaaagtgactggcatcattacacaaggagctaaagattt

SEQ ID NO: 189640 - DNA, 75 bp, Homo sapiens
gccttgaaaagcagaagacaatccaaaacaaacgctattcctctcacgtacagagccagatggactccttcggac

SEQ ID NO: 189641 - DNA, 100 bp, Homo sapiens
caccatcttcaggtcctactccaggggcgctcagatcttcagtgtctattggatttttccaagagaaagtttgtaaaattccttacactgtagatgtgga

SEQ ID NO: 189642 - DNA, 74 bp, Homo sapiens
caccttcccctgccttggaaagaaatgagtggtggattggctccaagtaagagcacagtgtatgtatccaactt

SEQ ID NO: 189643 - DNA, 82 bp, Homo sapiens
cttagaccgtgttttccaggagtgtctcacttatgatggagaaatgggcttccgagtggacctgccaatcaagtcggcccgc

SEQ ID NO: 189644 - DNA, 82 bp, Homo sapiens
cagccgatccagcctgcggagcctgtggggcaggatgacgacctcaggcgcgctctttccaagcctggtgccaggctctcgg

SEQ ID NO: 189645 - DNA, 95 bp, Homo sapiens
tgtgtacctctatgacacagaacgaggctgaccggttccctgatgtgttacctgcttctgctactgatccaaactgcagaacttctcattcatcc

SEQ ID NO: 189646 - DNA, 98 bp, Homo sapiens
ggaggagtctcagagctgtcagaaaggtcatttatagcaaatacactgacctggttccaaaggaggttatgaatgcagatgatccagacctgcaaagg

SEQ ID NO: 189647 - DNA, 100 bp, Homo sapiens
gctgtaattgctgaacttaaaaagcagtctaaacctgtgaccacccctgaagaaattgcacagggcatcttctctgcattcagtttcatccaagtcattc

SEQ ID NO: 189648 - DNA, 101 bp, Homo sapiens
ccggttccccggcccacagtgggggtgtgcaaacccgagagaactggtgggaagtaccttctgtctatagtggtgttatcctgggaattaaagacaattta

SEQ ID NO: 189649 - DNA, 100 bp, Homo sapiens
acatggatgtcaaatactttgcacaggaagctataagtggagctggagtcagatggcagcactatggaggactattcacaggaggactggggaaaccaca

SEQ ID NO: 189650 - DNA, 90 bp, Homo sapiens
aagaactgatccaggggacaaaagaggggaaactgagagttcccaattaataatgaagcagggctctgagatacttttggagaaacacaa

SEQ ID NO: 189651 - DNA, 75 bp, Homo sapiens
catcgagtgtgacgtggtgaaaggttgatgaaaagcccagaaccttgatgacagattgtctggttataaagcatt

SEQ ID NO: 189652 - DNA, 75 bp, Homo sapiens
gcagtctaaacctgtgaccacccctgaagaaattgcacagttgtcactcagcccagtccatcagtttctcagccc

SEQ ID NO: 189653 - DNA, 83 bp, Homo sapiens
tcggcactgctactgcgaagacagctggcagcgagcagctgatgcagctgtacagtgcgcgccagcggcggcggctgaaccgg

SEQ ID NO: 189654 - DNA, 82 bp, Homo sapiens
gggggatccagtgacgtgcccaaccacagagaccagggggatatgagactttctactcggaatatcctgagtgttgcgtgga

SEQ ID NO: 189655 - DNA, 99 bp, Homo sapiens
tggagcagttgtatgtgtagaaagtgaaatcagaggagatgtaactatcggtgtgatgaatgcagactctgctaccattttggctgtttggatcctcct

SEQ ID NO: 189656 - DNA, 100 bp, Homo sapiens
atcaacgtggagagcttgctgctctctatcaatatcagctcacatcattgaaaagataattttgaagacatgttttgctgaaaagacactaagaaaaatt

SEQ ID NO: 189657 - DNA, 82 bp, Homo sapiens
tagtgtttgccagagttgattgtgatcagcactctgatgactatcagccagttcgtctgctcagtaaacctggggaactgag

SEQ ID NO: 189658 - DNA, 74 bp, Homo sapiens
gaagacatgacacttacaagatggacagggatgataattgggcctccaagagtgaatggaagagaatccgaaga

SEQ ID NO: 189659 - DNA, 98 bp, Homo sapiens
ccagccccccgcgggacgcctgcgtctacagcagctgctactgctggtgctcaagaccgaatcggctgggcttttggcctaggattagaaaggctagc

SEQ ID NO: 189660 - DNA, 100 bp, Homo sapiens
agactttctccttcaagtacttggcagatcactctcttagcaggtacagcctgtacacccgcacctggctcgggtacctcttctaccgacagcagctgcg

SEQ ID NO: 189661 - DNA, 100 bp, Homo sapiens
ccctgagactttcagaaacttattcacagttaccaaagctgatttactgagaaggggaacttggaagtgctgctcttcaccattcagagcaagatgaggg

SEQ ID NO: 189662 - DNA, 100 bp, Homo sapiens
acaacccctgcaaacttggattcaggtgatgggcagaatctgtttacgaaagacgtgacagtgatcgagggagaggttgcgaccatcagttgccaagtca

SEQ ID NO: 189663 - DNA, 74 bp, Homo sapiens
gaagagaagagggtggctaatgattaagaggttggcgatttgaaggagctgcagacactagacatttctaccaa

SEQ ID NO: 189664 - DNA, 99 bp, Homo sapiens
cagagaagatccttgggctccaggtccagcaggcggagcactgttcaagagcacagtccctggaggacccattggagggcaaaccagagttactctgag

SEQ ID NO: 189665 - DNA, 73 bp, Homo sapiens
tcatatgtctcaggcttccatgcagcctgccttaccggcatttataagacgctgtttggcatatcgaaaagaa

SEQ ID NO: 189666 - DNA, 75 bp, Homo sapiens
attccaagtaactcttatttgggtctcccttgatctgagaatggctacctctcgatatgagccagtggctgaaat

SEQ ID NO: 189667 - DNA, 98 bp, Homo sapiens
ggccacgcatgtgcccacagtatgggccatcgaccaatatcgtgtgtgccaggaggaaactcttggaaggcgaggagacccgactcagtttcaccagc

SEQ ID NO: 189668 - DNA, 100 bp, Homo sapiens
gggctgggcagccgccgggtgggcgagctggcgcggggtacctgttgacttgggaagggccaggatcgcgatcaatggttcaccggaacagcacaatccg

SEQ ID NO: 189669 - DNA, 90 bp, Homo sapiens
tgatgggaaatacaaatgaaccaagcacacgtgtccgacagtctctggtcccagcccaccccatggcccctcccagtcccagcaccacca

SEQ ID NO: 189670 - DNA, 75 bp, Homo sapiens
gtaccaggaggcgttggccaaggctggttggtggagaatttgaactggagatgaactctattatccaggatgctg

SEQ ID NO: 189671 - DNA, 50 bp, Homo sapiens
gtgacggtgccaccgcggcgccccttcagatatttcaacactcctctcag

SEQ ID NO: 189672 - DNA, 51 bp, Homo sapiens
acgaaagctttcctaggccaaaaagagccatctgcagccagggacaaggat

SEQ ID NO: 189673 - DNA, 98 bp, Homo sapiens
agatgagctgtcctttcaggaaggagccattatttatgtcatcaagaagaatgacgatggcagtggagctactgctgtggttcaggcagccctatgca

SEQ ID NO: 189674 - DNA, 50 bp, Homo sapiens
agatcctgtgctttactctgaagactcctcccctcgccacagtcctgagc

SEQ ID NO: 189675 - DNA, 75 bp, Homo sapiens
ggtggtggatgtcatcgagaagaacgagagcgtgcatataacctacagcaagcgagcatggcagctggctgcacg

SEQ ID NO: 189676 - DNA, 98 bp, Homo sapiens
gcaagtgccgcctccctccggaggtgcgcggaggcttggtgtgccagattaatgatgttttgcagcagttttctacgtctgaaattttttatgtctct

SEQ ID NO: 189677 - DNA, 51 bp, Homo sapiens
ctggcagcagcatctcagcccaagagaagtgctcaatggtgcccaggctgg

SEQ ID NO: 189678 - DNA, 100 bp, Homo sapiens
ccacgataacatttagcctggaacagagcggcactcggcctgagcgggcctcaggcccaggcccaaggccaagtgagagagcccaggccacaggacatgc

SEQ ID NO: 189679 - DNA, 100 bp, Homo sapiens
cccaccatggacagcttcgacttagccctgctccaggaatgggacctcgagtcactgtgggtgttttgaatgctgtatcaaatgcctggggggcattccc

SEQ ID NO: 189680 - DNA, 83 bp, Homo sapiens
cgaagagagctctgttgttgcagttgactatagtcaatggggccaatggagccaagtgtatggaaacccacaacagtatggac

SEQ ID NO: 189681 - DNA, 150 bp, Homo sapiens
acctaaattttacctgcgatggaaattcagttatcagtcccgtgggcaatagagtcactgtatttgaccttaaaaagaatgttttgaccgagtctgcgaggatcgcccgtggcaaaatcacagacctggccaacctcagtgcagccaacc

SEQ ID NO: 189682 - DNA, 100 bp, Homo sapiens
ctgaggaggcccatggagcaagataccagtgattggggctctgattggcaagcaggagggccgaaatatcgaggtgatgaactcctttgagctgctgtcc

SEQ ID NO: 189683 - DNA, 90 bp, Homo sapiens
ttgaggaaatcaaggacttcctgctcacagcccgacgaaaggatgccaaataagagcttaaagcagcgcctgggtaagagtaacatccag

SEQ ID NO: 189684 - DNA, 74 bp, Homo sapiens
tacaggcatcacaagatggcctaccctcctgtacttgttccaactcaaaagaagctcattcacacagaagaccc

SEQ ID NO: 189685 - DNA, 100 bp, Homo sapiens
cagaaaagagccgtactgcttggactgaccttctccgaagtgccttaacaacaattcttgactgttgggatccagatgtcctcctcgcactttcttacca

SEQ ID NO: 189686 - DNA, 101 bp, Homo sapiens
caaaagatgaagacattctccaagtgcctctacggcagacacatgcaggccaacccagaaccaccgaagaagaataatgacaaatcgaaaaagatcagccg

SEQ ID NO: 189687 - DNA, 110 bp, Homo sapiens
gtgatctagtgtctgacttttctagggaatccaatcaataaaattgaagactggctgcaggattgcgggaagatgatccctatgatcttgaagatgtttctgcacagaaa

SEQ ID NO: 189688 - DNA, 100 bp, Homo sapiens
gcggcgcgcggcggccgaggccaggtactccaaagattcaggtttactcacgtcatccagcagagaatggaaagtcaaatttcctgaattgctatgtgtc

SEQ ID NO: 189689 - DNA, 100 bp, Homo sapiens
gcctggccctgggaagagaagcctagatatctgcatttgagacggagttggcttatctctcaggaaatagacttacagtggatgaacaggagaaatcaat

SEQ ID NO: 189690 - DNA, 100 bp, Homo sapiens
gagaggctgggccaactccagcacgggctgcgggacaggtgtccctggccagtgtccttccacctgtccacaagcatggggaacatcttcgccaacctct

SEQ ID NO: 189691 - DNA, 99 bp, Homo sapiens
tatgaaaagacatcgtatccagttcaaatattctggtcctgaagatgatgctgctatcagcctgagcagttgaagacatctcttcatcgaggactaacc

SEQ ID NO: 189692 - DNA, 100 bp, Homo sapiens
agccaataggacatgatccaggaagagcagtaagggactgagctgctggaacttagtgatttggcccgtgaccctccagcacaatgttctgcaggtccag

SEQ ID NO: 189693 - DNA, 99 bp, Homo sapiens
ggcggtggcgcccggagcccgaggaagaaatgcagagtaacgtggaagtggtccacacctaccgccagcacattgtgaatgacatgaaccccggcaacc

SEQ ID NO: 189694 - DNA, 100 bp, Homo sapiens
aaagcattagaacatcacagaagtgaaatacaggctgaacaggacagaaagactgggcatttagctatggagacattattatcccttacttctaaacgag

SEQ ID NO: 189695 - DNA, 100 bp, Homo sapiens
tgacacatgtcaacactggccgaaacctccatagtcaccacttcacttcacctctttctggaaaccaggtattgaccaagaagaaattacaggacttagt

SEQ ID NO: 189696 - DNA, 90 bp, Homo sapiens
tggagccaccagcctctccctggtactctttgagcacatcaaattcttccattgccgctcttctctgtgccctttatccgcacttcccag

SEQ ID NO: 189697 - DNA, 99 bp, Homo sapiens
agagctcggaggggcgctgtgtgtacatcacccccatggaggccctggcagagcagggtgtgggccgaagatatgctcatgtggtgttgaggaaagcag

SEQ ID NO: 189698 - DNA, 83 bp, Homo sapiens
tttcagagaaagcgcctgttcaactttgtcctctctcaggaagatgagaatgtgcctactgctcctgatcctccaagtcaaca

SEQ ID NO: 189699 - DNA, 100 bp, Homo sapiens
tcgaagaacagctgtggaaagaagttgcaaaacactgggaaaagaattccatggcaacatcattaaagtgtcctttgccactagaagacctgaattcatg

SEQ ID NO: 189700 - DNA, 82 bp, Homo sapiens
tggctgactacctgctgtacaccctcaacaaacaccagcgctttgggtgccagaaccctgtggagcatcatgaactgggaag

SEQ ID NO: 189701 - DNA, 100 bp, Homo sapiens
actgttcctggaggaatccgagaagagcagagcggagggagccccagacacgatgccatggacaatattaccaggcagaaccaattctacgatacccaag

SEQ ID NO: 189702 - DNA, 90 bp, Homo sapiens
attcgcagtggtcgcttcttctccttgtgctgttccctcgtcacaccaatgccagtgctcgagacaacaccatcaacctgatccacacgt

SEQ ID NO: 189703 - DNA, 101 bp, Homo sapiens
gcggcgcccggatgggcagctgaggtattgttgcagcatctggcagtgagactgaggatgaggacagcatggacattcccttggacctttcttcatccgct

SEQ ID NO: 189704 - DNA, 100 bp, Homo sapiens
catggcggagtcggcgcctgctcggaaacattgaatgaggaggataaagcaaagattgctaaaagcaagaagaagatgaggcagaaggttcaacggggag

SEQ ID NO: 189705 - DNA, 75 bp, Homo sapiens
cttctacatcagactcaatcagctctttctttggagctcgaggccatgagcagatataccagcccagtgaaccca

SEQ ID NO: 189706 - DNA, 83 bp, Homo sapiens
gccgcgaaccgcagtatcatgctggccaagaagatcatcattaaggacggaggcacgaggtcctgctgtactagccaccaaag

SEQ ID NO: 189707 - DNA, 83 bp, Homo sapiens
ctgcaaggaactgatagcttatggttctccattgtgatgaaagcacatggtacaggagcatattaatgaaaagtgccataaac

SEQ ID NO: 189708 - DNA, 100 bp, Homo sapiens
catacaatgaagtagacattggtggaaacatttaattttatcatgtgggcaacctgctgcaactggttctgcctggatggacagcctgaggaggtcccac

SEQ ID NO: 189709 - DNA, 75 bp, Homo sapiens
ccaacatcaaaaggaatgacttccagcttttcatcttagcaaaaaagttgcaatcagcaccccctagacggaagg

SEQ ID NO: 189710 - DNA, 90 bp, Homo sapiens
agcggcggagccgcctcggacgtgctactatatcggggccacagatgatgcagccaccaaaatcatcaatgaggtatcaaagcctctggc

SEQ ID NO: 189711 - DNA, 75 bp, Homo sapiens
atgatgaattgggtagagagaccaaagatcttgatgagaattatatccagatcgagagacagaagattctgaaag

SEQ ID NO: 189712 - DNA, 50 bp, Homo sapiens
ccagcatcaagatccgtctgacaggaatcactagatttgatctacttggc

SEQ ID NO: 189713 - DNA, 97 bp, Homo sapiens
gccctcgtccttccatggcactggcaccggcagcggcggcgcgggcggaggcagcagcaggcggacgtggcccagtggaacatcgggagcctccgga

SEQ ID NO: 189714 - DNA, 89 bp, Homo sapiens
ctggattggacaagcaggcaaagctgagcttcagcgcctgctcctggtcatcactaaccagatttacttggagtacatgtgaaagaaaa

SEQ ID NO: 189715 - DNA, 75 bp, Homo sapiens
gctccaaatcccagactagctgctaccccaagcccgggagcttctcaggacagtggtgattatcctcttaccatg

SEQ ID NO: 189716 - DNA, 83 bp, Homo sapiens
cgacctcgacgtcttgcctgtgtcccacttgttcgcggcctataggaaattcgaaatgagtcccatgactatcctcatagagt

SEQ ID NO: 189717 - DNA, 106 bp, Homo sapiens
agaaaggatgctcgaggatgctgtccaggtgggcggccgcgggcgcgatgcggcactgcaggtatggtgatccggtccaccgtgtggttaggattcccaaattttg

SEQ ID NO: 189718 - DNA, 100 bp, Homo sapiens
ggcagcacatttcctgcatggctgcaatagcaagaaagcctattttctgtatatgtattccagatatctgatttttggaccaggcgatgatgcagtgaag

SEQ ID NO: 189719 - DNA, 100 bp, Homo sapiens
gttttgtacattgggagagatcgttggttcacagggaagtcgcctggaaaaaccaatagtgcactatcagaataactcctaaggactctcgttgggttgg

SEQ ID NO: 189720 - DNA, 96 bp, Homo sapiens
gttgtaacactctacaagatgggttttccggaagccgccaggaccctggtttgatatgtacctatctgctcgagactccgttgttctgaactttaa

SEQ ID NO: 189721 - DNA, 73 bp, Homo sapiens
ccaacgtgaacctggcatatctgggcgccaagccgcggagcctccagacggctcctgcccctcctaaagctga

SEQ ID NO: 189722 - DNA, 97 bp, Homo sapiens
cgccgtcggcagcaagaacagagagagaggtggacagatctgagagatactgagggtttggaatcacttgctaggagtcttgtctctctgccaccca

SEQ ID NO: 189723 - DNA, 99 bp, Homo sapiens
catggatcagaatgatgaccgcctgaaaccagaagctctgcctgcagttgaacacaaagacctggaggagactcccacctccttcagggagaagaaagg

SEQ ID NO: 189724 - DNA, 99 bp, Homo sapiens
attcgttgccgccggaggggaagcttgggatcatggattggtggaaagtggaagtgaacgatcgtcagggttttgtgccggctgcgtacgtgaagaaat

SEQ ID NO: 189725 - DNA, 100 bp, Homo sapiens
gtttcctaccaggtcacacactgttgcagcgcaggtccagatacttcgtctgcttcggatcctgggccggaaccacgaggagagcagtgagaccatgaat

SEQ ID NO: 189726 - DNA, 90 bp, Homo sapiens
cgccaagccaagctcaacctcaaatcagtactgagggggatatctgcattacctccacctcctccacctccaccaccaccagcagctccc

SEQ ID NO: 189727 - DNA, 75 bp, Homo sapiens
atcgggcctacagcagcttcggcggcggcagaggattttctggcatccttaaatcttgtgtcaaggattggttat

SEQ ID NO: 189728 - DNA, 108 bp, Homo sapiens
tggttagagaagaattttccaaatgaatttgcaaaacttactgtaggccatttatgccagtgttcttcctggagagttgatgagggggtacatgacccagtttcccac

SEQ ID NO: 189729 - DNA, 100 bp, Homo sapiens
ctcagcccttcggaattttcccaacttcagaaatatgctgagtgacactgcccatctctaagataagaacctggaaaggggactctgttggccattggaa

SEQ ID NO: 189730 - DNA, 99 bp, Homo sapiens
cggctgctgcagcccgggcggctgccgagaaggagggaggggaaacacaaagccggctacgcgctgcgagttgcagcatgagaaagccgaactagaaca

SEQ ID NO: 189731 - DNA, 117 bp, Homo sapiens
gatggaggtggtgaagagagatgacgaaaccataaaggagcatttatgtaaggtaccagatccccaggggctgcagggctcaccagcagagattcctctgtcctggatggcacagac

SEQ ID NO: 189732 - DNA, 82 bp, Homo sapiens
tcatggtatgaggttgactcatttacaccatttcgcaaagtgtgggagtcaccaggtgattctagggctagtgtgtagtttc

SEQ ID NO: 189733 - DNA, 100 bp, Homo sapiens
gactgacgtgtttggagggaaatgggaatgtacacgataattaaagagtaaagttgtgctcaacggtgagactgctgctcctcgggccattttgaccggc

SEQ ID NO: 189734 - DNA, 90 bp, Homo sapiens
agattctgaaacttcttgacaatttgcttgcgcttataaggtgctgctacccccgtatgatgatgccactgtgaatggtgctgccaagga

SEQ ID NO: 189735 - DNA, 75 bp, Homo sapiens
catcaaaaatagtgatagctttgataatctgcgggccaggcatcgacatccgcaacgactatcagcagctgaagc

SEQ ID NO: 189736 - DNA, 82 bp, Homo sapiens
accagatccgggagcacgtcatctccatcgaggggaaagcaggcaggatgggagagtcgccgatagaaccacctcttccctg

SEQ ID NO: 189737 - DNA, 74 bp, Homo sapiens
agagcccggaaccactctttgtgccgcagcttcgcaggtgaagtgctgcggctgggtcagcttctacaactgga

SEQ ID NO: 189738 - DNA, 90 bp, Homo sapiens
gaacgtgccatggagacgcttaacgcatatagcactttctacattgtgggtttaatattatcaatgcagataccttttgtgggattccag

SEQ ID NO: 189739 - DNA, 75 bp, Homo sapiens
gcggctctctggtccgcagcggcaacagtaacgaaaaacagggctgtgtctgcaattgaactccaaggtgcagaa

SEQ ID NO: 189740 - DNA, 82 bp, Homo sapiens
agagatcacatttcaactagattcttaggaagtatggattcactaacttcagcgaaggtgaactggtttaagaatagagatg

SEQ ID NO: 189741 - DNA, 96 bp, Homo sapiens
tccgcgaggcacctgtccccagcctgcacctcaagctcctcagcgtggtgcccgtccctgaaggatgatcacggacgtgcagctcgccatcttcgc

SEQ ID NO: 189742 - DNA, 75 bp, Homo sapiens
gccagtgatatgctatacatgaatgattacggacctgaagccaaagaacaagatgcgctagtggacagattgctg

SEQ ID NO: 189743 - DNA, 100 bp, Homo sapiens
gaagttctacgcacgcgtctgcagaagtggctcaggcctggttggccgccagctgacttgagtcgcccaaagagcacctccaccagttccatgaagaaaa

SEQ ID NO: 189744 - DNA, 100 bp, Homo sapiens
cagcttctgctgtccttctttgtggagagcaaggtgtttcggcatggagaccgaagtcccattgacacctttcccactgaccccataaaggaatcctcat

SEQ ID NO: 189745 - DNA, 100 bp, Homo sapiens
atgccaacaacaaggaacactctgtggagttggaaaatggatataccttatttgattatgatgttggactgaatgatataattcagctgctagttcgccc

SEQ ID NO: 189746 - DNA, 90 bp, Homo sapiens
atctcaaacaaagaggcaagcagtggctctgaagccctgcagcagtgttgtgacctctcccagctctggttccgagaattcttcctggag

SEQ ID NO: 189747 - DNA, 94 bp, Homo sapiens
gtcaatgagcactatccacacgacaggcctacactctattcaaacagggtgcgaagtaccacattactgtcatctccctgtgagtgggattggc

SEQ ID NO: 189748 - DNA, 100 bp, Homo sapiens
cgcaggtcttcacccaggccctggagtgcatgcgcaggtgtgtagctgggacggtgctggtctgagctggaccttgtctgatggcttcctccaaccctcc

SEQ ID NO: 189749 - DNA, 96 bp, Homo sapiens
ccgacaaacaccacgagaattccgcagcccacacgatgagtgtgggtcagagagccaaactgactatatctccagattatgcctatggtgccactg

SEQ ID NO: 189750 - DNA, 82 bp, Homo sapiens
gttttacagtcgccagggacaagaacagttgcacactgacaagaaacagatcagtgttgggttcattggctatccaaatgtt

SEQ ID NO: 189751 - DNA, 100 bp, Homo sapiens
tcacaagatcactcacctgtccacactgcagcaaattgtggctactaatttgccccctgaagatcaagatggctctggggatgactctgacaacttctcc

SEQ ID NO: 189752 - DNA, 100 bp, Homo sapiens
ctgacgtctccaagcttagcacaccagccttcggtggcaagctgaagaacccactccaagttgtcctggtggccacccacgctgacatcatgaatgttcc

SEQ ID NO: 189753 - DNA, 90 bp, Homo sapiens
ctgagagaaacctgacatgtgggcatacctcagtgatccttaataggaaccactgtgtctcttgaaacaacaaatagtctcttggattta

SEQ ID NO: 189754 - DNA, 82 bp, Homo sapiens
aacgccgtgttcgacatcctggccgtgctgcaggagcacgtgaattgcctctgcttacgttcaggccctgtcctaaacccag

SEQ ID NO: 189755 - DNA, 75 bp, Homo sapiens
caagagtttctgtttagatgaccagtctcctgacatatctgaagagatggattaagaatgctttggattaaggat

SEQ ID NO: 189756 - DNA, 101 bp, Homo sapiens
gcgagagcccagaagctctgagaccagccgcatctacacgtgggcccgaggaagagtatggtttgaagtggtgaacatggatttttctcggcttcacatgt

SEQ ID NO: 189757 - DNA, 98 bp, Homo sapiens
aaattcagcccagcgcactacctgctgcctctcctgcctgcgctggtcctcagcaccaggctttccttaaagtttcccatgtctcaatggactcctga

SEQ ID NO: 189758 - DNA, 83 bp, Homo sapiens
ccgagtgcgggcgcgggcgcgggcgctcccggcgagccacgagtgaagacatttccacctggacacctgaccatgtgcctgcc

SEQ ID NO: 189759 - DNA, 50 bp, Homo sapiens
cgatgaagtgcagaggtttttttctgataagaccatcatcatgtggaaac

SEQ ID NO: 189760 - DNA, 98 bp, Homo sapiens
cacttttgagtgcaactgccttccaggtcttagtggtgcaatggctagtataagcgtgcgttcgagtaccccaggctctcctacacatgtaagcagtg

SEQ ID NO: 189761 - DNA, 88 bp, Homo sapiens
cccagacggctcacctgtgcgggatggaacaaaaggttttccagaagccccacgaggtggtaatggtgctgctgattcagaccctggg

SEQ ID NO: 189762 - DNA, 83 bp, Homo sapiens
cttctgcggctctcggtgccctctccttttcgtttccggaaacatggaaggcaacagcccccaggggagcaaccagggagtca

SEQ ID NO: 189763 - DNA, 115 bp, Homo sapiens
gtcacatccaacttcctctatgccaccgaaatttgggaccaagctgaacagctttccaaagagcaaaaaggaaatctaccactgtcgaagacaaataaaatatagcaaagacaag

SEQ ID NO: 189764 - DNA, 100 bp, Homo sapiens
gggcgcagccggagccggtgccgcagctgcgatggccgtggccgtggggagaccgtctgtcaaaatgcagatcttcgtgaaaacccttaccggcaagacc

SEQ ID NO: 189765 - DNA, 51 bp, Homo sapiens
cggcattttcctgccctacagccctgtcagccctgacaaaggtcagctagc

SEQ ID NO: 189766 - DNA, 50 bp, Homo sapiens
taatcccagctactcaggaggctaaggcaggagaatcgcttgagcccggg

SEQ ID NO: 189767 - DNA, 100 bp, Homo sapiens
tggagtccgtggatgaaggtggggtggcgtggcaagccggactaaggaccggggacttcttgattgagactatagaccagtttgaatatgatggttgtga

SEQ ID NO: 189768 - DNA, 75 bp, Homo sapiens
cagacgctgccagcatcgccgccgccagcttgccttgcgccatggactggcagccagacgagcagggcctgcagc

SEQ ID NO: 189769 - DNA, 100 bp, Homo sapiens
ctgaaaatgcccctggggagacacatgcacaagacagtgaagagcgattatatgttagagatagctgatcaagtggaccaggaaattgctttgaagttgg

SEQ ID NO: 189770 - DNA, 100 bp, Homo sapiens
agaggatctggtgtaccaggcgaagctggccgagcaggctgagcgatacgacgggtctggctctgtaacccaggcttgaatgcagtggcatgatgggtgc

SEQ ID NO: 189771 - DNA, 95 bp, Homo sapiens
gacccaccatggagacccgctacaacctgaagagtccgggttttcaaatggaacattttgatgcatcacttagtacctatttcaaggcattgcta

SEQ ID NO: 189772 - DNA, 74 bp, Homo sapiens
gaaagacaagaaggacagagacccccccaaaagttcgctgcacccagtttggccttctctgaggtcagatcgga

SEQ ID NO: 189773 - DNA, 90 bp, Homo sapiens
gcggtagcagcgactcatgagagcgcggccggaggacagatactctcttaacttactggaataaagtatcacctcaggagctcataaaca

SEQ ID NO: 189774 - DNA, 90 bp, Homo sapiens
ccgacagccttgctgactatttcaagaaggacaaccacctggagaagttcttcaccctctgccactccctggagagccaggtgaccttcc

SEQ ID NO: 189775 - DNA, 74 bp, Homo sapiens
cggtaacaaacgagggttcccgggattggaccgacgcagccatgcatgtttgggaaaataacaaccctttccaa

SEQ ID NO: 189776 - DNA, 50 bp, Homo sapiens
ttttttaatgtggttggaacaactgaggctggaagtacaccttgttggag

SEQ ID NO: 189777 - DNA, 75 bp, Homo sapiens
ccgggagccgtccgtgtcaccgccggaacctggcgcaggtcgcaatggaagaagagatcgccgcgctggtcattg

SEQ ID NO: 189778 - DNA, 151 bp, Homo sapiens
caagtcttgagggatgcacctatggattccattgaatgggctgaagtggtgatcaatgtgaacaatattctcaaggatgaaatctttgacatggtaaaaccaaaggatcctttgaaaatctctcttcaggatttaatcaacagtaatcaag

SEQ ID NO: 189779 - DNA, 82 bp, Homo sapiens
ccgcgcgcagggcctgcagcgggagctggacggcgagcgcgagcggcgcgagaaagatacatgatcccttaattcaggctca

SEQ ID NO: 189780 - DNA, 100 bp, Homo sapiens
gcacgaactctgctcactgcaaccttcacctcccaggttcagacaccaagctggatggtttccttttaggcaagaaggaggtcatcagcaggctcccaac

SEQ ID NO: 189781 - DNA, 55 bp, Homo sapiens
tggcgtgcaacatggggcttgagaaagggaggatgaaattttgaacagatcacca

SEQ ID NO: 189782 - DNA, 100 bp, Homo sapiens
ctcggaagagcgctcccaggagaaacaaaactcagcctcctcccaagctccctgtgggtcctagccacaagctctccaacaattactattgcactcgcga

SEQ ID NO: 189783 - DNA, 97 bp, Homo sapiens
tacaaagaacatgctcacatcttcaggtgcctcattcacatacgtcaaggaaattgaggctcgtgctgtcttggaaagagaatttaacaaccttttg

SEQ ID NO: 189784 - DNA, 100 bp, Homo sapiens
cgccgagagggcgggccagggccgcactccggagactcgcggttgctacgcgcaccatggctggaggagctgtaaaccggatcaaagaaattatcaccaa

SEQ ID NO: 189785 - DNA, 95 bp, Homo sapiens
agggtcagtttcccgagtacccaccagagggcgccactaaactgggaaggatcagaatgttctctctccagtcaactgctggaatctcctcttaa

SEQ ID NO: 189786 - DNA, 82 bp, Homo sapiens
gtgaacctggcatatctgggcgccaagccgcggagcctccagacgggatggagatattctagcatccaacttctctgttgac

SEQ ID NO: 189787 - DNA, 75 bp, Homo sapiens
atcagaccgtacaggttgagggatgggactggaaatcaaatgttacaggcacgtctgagaatggtggatgtggtg

SEQ ID NO: 189788 - DNA, 75 bp, Homo sapiens
cccaaatatcctcggaagagcgctcccaggagaaacaaccagaataaaagctacttggccgtaaggctaaaagac

SEQ ID NO: 189789 - DNA, 75 bp, Homo sapiens
ctagaattacctggaacttcatcatcatctacttcacaggaattgccatttttttcggctttgtgagaaacctta

SEQ ID NO: 189790 - DNA, 95 bp, Homo sapiens
aaatgatgaccagtgtttactcctctctgagactgtctggggagctctccgaggcccagcttcccgatcagtggagacgttgaaggagatgatta

SEQ ID NO: 189791 - DNA, 100 bp, Homo sapiens
ctcatgggattcgccagctagctaattatgtctggtgctccgtccgcacacctgagagctcccacgaaggcctcatcaccgatccccacagcccctctcg

SEQ ID NO: 189792 - DNA, 83 bp, Homo sapiens
gagagaccggtgggtccgctgacacacaccagaacccagcttagactagaaagtctagaagacacacacataatgaaggggga

SEQ ID NO: 189793 - DNA, 90 bp, Homo sapiens
ggccagctgcagcgtgtagtgcgagtggggcggacgcgcgcagcccgcccgcccggcgaccagcaaggctggagtgcagcggcgtgatct

SEQ ID NO: 189794 - DNA, 88 bp, Homo sapiens
agctggaacagtgcatggccagcaagcactatctcagtgccactgacatgttggaggaggcaaaacagattcagaatctgcagaaagc

SEQ ID NO: 189795 - DNA, 83 bp, Homo sapiens
ctaccccaggaacccgcgccgcgagggctccttccctcagttcaaaaggtgatgacctatcaacagccattctcaaacagaag

SEQ ID NO: 189796 - DNA, 82 bp, Homo sapiens
aagaggaggcggaaaaggacgcaaagttctccggcgaggatgccggaccagatctctgtctcggagttcatcgccgagacca

SEQ ID NO: 189797 - DNA, 90 bp, Homo sapiens
ccaactaatagtaatggcccggaaccgtgaaggaagtcagcctcataccaaaccatccgtttttgtcatgaaaaatggaacaaatgtcgc

SEQ ID NO: 189798 - DNA, 100 bp, Homo sapiens
atgcattgagcttgggtcaggacaattccatttggggaccagagatggacggtcactcagcctatggaggggagctatccagtttgggaagatttcataa

SEQ ID NO: 189799 - DNA, 101 bp, Homo sapiens
attctaatcaagaaaatgatttgctatgggaagagaagtttcctgaaagaacaactgttactgaattacctcaggtgctcgagtttggcttttcattggtt

SEQ ID NO: 189800 - DNA, 100 bp, Homo sapiens
cgctggaccagatgttcgacgccgagactggtccctcttccggatgttctcccgaaccctcacggagccctgccccctggcttcagagagccgagtctat

SEQ ID NO: 189801 - DNA, 81 bp, Homo sapiens
gacagaagcgactttggtgagactctgtacctgcaagatgagaatggcgtgggctacgtgctgagtggggctgggaatttc

SEQ ID NO: 189802 - DNA, 100 bp, Homo sapiens
ccagcttgggccattaccttgccctggtctgcaggtggagtcttcatgtaagatgcagacagacatgctgaactatctggaagtccactgaaaagcaaaa

SEQ ID NO: 189803 - DNA, 51 bp, Homo sapiens
gaataaacatgcaatgaacccaaaagggaacaagcacaagccatttgcaag

SEQ ID NO: 189804 - DNA, 83 bp, Homo sapiens
cctcgttttaggtggaagactagtctattggttaccggtgtatacgccagacaattctgtggtgttcttggtcacacatttat

SEQ ID NO: 189805 - DNA, 83 bp, Homo sapiens
ctgggattcgcgctgctgggcacccacggagcctccggggctgcttccccgggcgctgcctggacaggcctgcctgcgtgctg

SEQ ID NO: 189806 - DNA, 96 bp, Homo sapiens
ccactgtgtacaagatatgtgcctggatgcagctcacctccgtttctgatgaagaattgaaaagaagagtagctgaggagctggcattggagcaag

SEQ ID NO: 189807 - DNA, 90 bp, Homo sapiens
cacctcctcgccagcagccgtccggagccagccaacgagcgctgaagagctttgatcagttcacctgcaacctgctgtatgtgagctgga

SEQ ID NO: 189808 - DNA, 100 bp, Homo sapiens
gctgtcagtgagaactccgatttggaacaggaaatatgaagcaacagcatgtcatagaaaccttgattggcaaaaagcaacagatatctcttgcaacaca

SEQ ID NO: 189809 - DNA, 82 bp, Homo sapiens
gggcgggacagcggccccctggagggggcagtcccgggagaacctgcggcggccggagcgatacttgccagaactaatacag

SEQ ID NO: 189810 - DNA, 75 bp, Homo sapiens
tcacggaccttagccaccgccgccgccatcgccaccatggggaggtggggaagacagggctccagctaccacagg

SEQ ID NO: 189811 - DNA, 100 bp, Homo sapiens
gcggacaggcgacagcgacctgcggcaggtagattatgataatcatgcactttataaacacggaaagacaggtcgaaaacagtctcccgtgcgtattttc

SEQ ID NO: 189812 - DNA, 101 bp, Homo sapiens
aattgaaaccaaaatgtcatttatagatccttaccagcacattataatggactagaggcttttaccagatttcttaaaactgaattcagtgaagaaaatat

SEQ ID NO: 189813 - DNA, 74 bp, Homo sapiens
caacccgcaccttgtgttccggaagttccaggtggcagtagagaagagcatcacagaagttgctcaggagctga

SEQ ID NO: 189814 - DNA, 118 bp, Homo sapiens
ggaggagctgtgcagccgcgaggaggcgcgggaggtgttcgagaacgaccccgagacgggggatatgagactttctactcggaatatcctgagtgttgcgtggatgtaaaacccattt

SEQ ID NO: 189815 - DNA, 100 bp, Homo sapiens
ctctacctggcctacttcgtgcgtgagcgagatgctgagccagggaggcggcccttccagcagccatgagggaaggacaggagatggggcccaccccagt

SEQ ID NO: 189816 - DNA, 90 bp, Homo sapiens
agtggaacatggctagcaggaatgcttactgttgcgtggttcgttattaacagtggtagcaactgcccttgctaatcaccgtaacctcgg

SEQ ID NO: 189817 - DNA, 75 bp, Homo sapiens
tgcccagacggctcacctgtgcgggatggaacaaaagtttatacatgaaagcatccatgatgaggttgtaaacag

SEQ ID NO: 189818 - DNA, 75 bp, Homo sapiens
ctgcggaacaggacgccctctgatacacatgcctcactcctgtcagcagttccaccttttcatggttgaggagca

SEQ ID NO: 189819 - DNA, 50 bp, Homo sapiens
gggagactggagtcgaaggccgtgaggagtgagctgagtcgacagaaact

SEQ ID NO: 189820 - DNA, 100 bp, Homo sapiens
aaatgcagcatctgcgatgtgaggaaaggcacctccaccaggccgaggagtcttgtaaatgtaatggctggaaaaaccctaacccctcacccactccccc

SEQ ID NO: 189821 - DNA, 74 bp, Homo sapiens
ccaagtgggtcaacaagcacttaatgaagctgccactgcagagccccgccatggaagacacgccgttggtgata

SEQ ID NO: 189822 - DNA, 74 bp, Homo sapiens
agatgtgatgttggagaactacagaaacctcgtctccctggtgtgggccaaactgaaattgcagaaggcttcag

SEQ ID NO: 189823 - DNA, 82 bp, Homo sapiens
gattcgcggcccggagctcgggaccgcttggtaaaatgcggctgacaattccgtgtcgggcccttacatgttctcatctaca

SEQ ID NO: 189824 - DNA, 95 bp, Homo sapiens
agaaggaatgcagcgcgctcggaggcctcttccagaccatcatcagcgacatgaaggtctcctctgagcctccggcctccataagacccaaaaca

SEQ ID NO: 189825 - DNA, 82 bp, Homo sapiens
tctccccatccttggacaagcgcctcaaactcatatatctcccggggccaattcagcatctctacctggccatcctaacaag

SEQ ID NO: 189826 - DNA, 90 bp, Homo sapiens
atcccggaaactccagcgtgtctccagccgtggtgcaagtgaaagtgtaggaaaacatatgcttgaagcgtgcaacaataatctggaaat

SEQ ID NO: 189827 - DNA, 100 bp, Homo sapiens
ccagctgcagcagccgcaccagcgccgggacgggggtggccgtgcagcccgggttggcgccatgtacgccgtgtacaaacaggcgcatccgcccaccggt

SEQ ID NO: 189828 - DNA, 50 bp, Homo sapiens
caagagtacgttactcttcaagggttgtggcagcactgcctgaaggtatg

SEQ ID NO: 189829 - DNA, 101 bp, Homo sapiens
gtctgaactaggatgtcccgacatgaaggagctgctaagacacatggttgcacagaaggtgaaaccaaatcttcagacttttaataccattctgaaatgtc

SEQ ID NO: 189830 - DNA, 126 bp, Homo sapiens
gacattcccaagaatggcaagttaaacatacagtcgcctctgacaagccagatcctggtggctttgagacaccttcacttcaagaacattgtccactgtgacttgaaaccagaaaacgtgttgctg

SEQ ID NO: 189831 - DNA, 98 bp, Homo sapiens
gattactgcgagaacaactacatacagtgagaaagatcagtctaaagaaaaggagaagaaagtgaaaaaaacaattccttcctgggctaccctttctg

SEQ ID NO: 189832 - DNA, 95 bp, Homo sapiens
cacgatctctccagtttccatatgttgagattctacttattcatcagtttgttgtgcttgtcaagatcagaccttcacggcatggtgcaactccc

SEQ ID NO: 189833 - DNA, 100 bp, Homo sapiens
gctgactgcgcacttggaatagtagcaggcggcggcggcggaacgccaggcagcatacttccacaggctgcactcgaggagatccacaaattctcaggaa

SEQ ID NO: 189834 - DNA, 101 bp, Homo sapiens
cgcggccgggcagggaggagaccggcacccagacaggtggcgacggcagaggaggaacctcttactgattgtttaaaggatgttgatttgatcccgccttt

SEQ ID NO: 189835 - DNA, 82 bp, Homo sapiens
cagcagcacccgctcaccctcaagtgggtggacagcgaaggcattgaagttgatatcgatgtggagcacggagggaaaagaa

SEQ ID NO: 189836 - DNA, 80 bp, Homo sapiens
caagatctcagtcagagtaggaaataattttcacaaccttcaagaaattcgggtgctgactgggttacttttttaaacac

SEQ ID NO: 189837 - DNA, 83 bp, Homo sapiens
gtccgagtcaacaaccgcttcgagctggtctccataacccctcggacaaacgccgccctgggctttgctcagatgctccccag

SEQ ID NO: 189838 - DNA, 75 bp, Homo sapiens
ctggctttaatcctgaaagccatgcagcggaacactgatatttgcatttaatggggaacaaaagatgaagaagga

SEQ ID NO: 189839 - DNA, 83 bp, Homo sapiens
cagaaaccccgttgacaaggcactgctttttcatgacgagggaagtctcaggttgccctgaagatcatccgcaacgtgggcaa

SEQ ID NO: 189840 - DNA, 100 bp, Homo sapiens
ttcggcgcgcggccgggctggcgatggaagatggaaggaaggagcgcagcgattgataggcagcagtttgaagaaacagttcgaactctaaataaccttt

SEQ ID NO: 189841 - DNA, 51 bp, Homo sapiens
tccacgtggattctccagacgagagagctgttccagacaactataaggtga

SEQ ID NO: 189842 - DNA, 51 bp, Homo sapiens
caacagagcagcagctacgggcagcagagtttggacgcccgctccaagcgc

SEQ ID NO: 189843 - DNA, 100 bp, Homo sapiens
tgcaagagcaacggctggatcctgcccactgtgtaccagggaggggaagtatatccctctgcctcaacgagtccgggaaggtccccggggaggagttcga

SEQ ID NO: 189844 - DNA, 82 bp, Homo sapiens
cacaggctcagcaaggacagcagcaggtctcgctctcgaagcagacattcccgtaagagcagaagccgaagtggcagcagca

SEQ ID NO: 189845 - DNA, 80 bp, Homo sapiens
accgcctgagctttctacaccggaacccagcgggtgccgcttctccacccgaggcttccacctccaacgagccatgttcc

SEQ ID NO: 189846 - DNA, 82 bp, Homo sapiens
ttttatttggcagatctgaagggaaagctccagatactagactgatcctttgaaatactccagccatgactaaaagagaagc

SEQ ID NO: 189847 - DNA, 96 bp, Homo sapiens
caatggcggctctgaagagttggctgtcgcgcagcgtaacttcattcttcagacaatgcagatcttcgtgaagactctgactggtaagaccatcac

SEQ ID NO: 189848 - DNA, 100 bp, Homo sapiens
cctccttcaccgccgcagaccccttcaagttctagtcatggttattaatgctgcactggctttagcagcaaaaccacagagtaaactggcccaagagaac

SEQ ID NO: 189849 - DNA, 90 bp, Homo sapiens
agtttattcattgatgcagaaagcaggcagctggtcaccgggtgtgctgacggccagaaaatagttgtgcaagaactgatgcgattttta

SEQ ID NO: 189850 - DNA, 90 bp, Homo sapiens
accttccggagcttctcagaagacagagggttttcttttgaggtcctggcattgatgtgcctgctccagacatgagcacaggtgagcggg

SEQ ID NO: 189851 - DNA, 82 bp, Homo sapiens
ggcagtccacccaccgccgccgcctcccagtaatctcaggggcgatataatcaatgaggtggtcctaaagttgctcaaggct

SEQ ID NO: 189852 - DNA, 75 bp, Homo sapiens
tttagctgaaatacttctgaaggtgaggaaaatagcagctgaatactatgacaacctccctcactacaattcctg

SEQ ID NO: 189853 - DNA, 101 bp, Homo sapiens
cagccttggcctgcaagaaactgaagagcacgaacttccaggagccggtgcagccgctgacacagcagcaggtggcgcagatgcagctgaagtactacaac

SEQ ID NO: 189854 - DNA, 100 bp, Homo sapiens
ccaggctttggcccggcttccggagagtctccgggaccattatggcagtcaagtggacgggtgggcattcttctcctgtcctctgcctgaatgcaagtaa

SEQ ID NO: 189855 - DNA, 101 bp, Homo sapiens
gcgacaccgaggaattctatgatgcccctgaagatgtgcacctagggggcggctaccccgtgggcacctggctgcagtggaagaaagaaagatcaagtccc

SEQ ID NO: 189856 - DNA, 100 bp, Homo sapiens
gggagctgttgctgtatggccgtaagaaggccctggtatgcgtccaccactaggcttaagagaatttgcaccaggcgttccaccaggaagacgggacctg

SEQ ID NO: 189857 - DNA, 75 bp, Homo sapiens
aaagttcatctagaaatctcaaagccatgtctcaggtttctgggtgtctctggggagcccctgggccagattttc

SEQ ID NO: 189858 - DNA, 71 bp, Homo sapiens
tgtggaagacgaccacatccccttcctccgcagaggttacagcacggtcaccttcgacgggacgcccagct

SEQ ID NO: 189859 - DNA, 75 bp, Homo sapiens
gagaaaaagcttggagataaagttgctttttactgttacatggacacagaacagtatgaagaagcagtacgagac

SEQ ID NO: 189860 - DNA, 98 bp, Homo sapiens
ggggcgctgggccgccagcctcggcaccgtcctttcctttctccctcgcgttagggtgaggtggctttgaccccgggttgcccggccagcacgaccga

SEQ ID NO: 189861 - DNA, 92 bp, Homo sapiens
gccgcgcacttcgtcatgttcttcgcgccctgcagcctcccgcgacgatgcccctcaacgttagcttcaccaacaggaactatgacctcgac

SEQ ID NO: 189862 - DNA, 98 bp, Homo sapiens
gctgcaggtgggtgagctccatggcaacttgtcacagacgcagcggctggaggccctccggtgggctggtgtgtctgaccaccaggaccaactcgtcc

SEQ ID NO: 189863 - DNA, 95 bp, Homo sapiens
acagatcgccggggaggcagcgcgggatcccagcctcaggcgtgcgcggacggtgtgcggacatcctgcagtactacctggcctgctcgccccgc

SEQ ID NO: 189864 - DNA, 83 bp, Homo sapiens
ggaaggaggggcgggctcctggcaaggcattcgctcctgagcggaatcctgcaaagacacgatgaggcgagtggtacgacaga

SEQ ID NO: 189865 - DNA, 75 bp, Homo sapiens
ccatggcataaggaactctatcccaggaatacagctttgcattaggatgtacagttacccagcacgtgtacctcc

SEQ ID NO: 189866 - DNA, 100 bp, Homo sapiens
aggcaggcgctgagaaggacgcgcagtccatctctctcagtgtttacaggcattggagtttttacatgctaatcaagtgatccacagagacatcaaaagt

SEQ ID NO: 189867 - DNA, 100 bp, Homo sapiens
tggtgggccgagggctgctcggccgccgcagcctcgccgcgctgggagccgcctgcgcccgccgaggcctcgtcaatgcagaccctgcaggacttgctca

SEQ ID NO: 189868 - DNA, 89 bp, Homo sapiens
gaaactgaccacagtgctcaccacccaccaccactgacaatgcagatcttcgtgaagactctgactggtaagaccatcaccctcgaggt

SEQ ID NO: 189869 - DNA, 50 bp, Homo sapiens
caagtattcaccagttaatagcaccagttggttaccacagagaagcgctt

SEQ ID NO: 189870 - DNA, 92 bp, Homo sapiens
ggggaaaaggcaaaaatcccatctaccgcaactctcagttcgagagtaaagaacatccagtcatggataaaaatgagctggttcagaaggcc

SEQ ID NO: 189871 - DNA, 83 bp, Homo sapiens
agccttggtctgagtggactgtcctgcagtgtggacgaatgtggaacctcgctctgtggctgtgttcccttggcactccttag

SEQ ID NO: 189872 - DNA, 100 bp, Homo sapiens
gaggaggagaggatgatttttggatcctgagaattgatctatgttggatcagttctcagaggcactgtgactgacttccctggatttgatgagcgggctg

SEQ ID NO: 189873 - DNA, 75 bp, Homo sapiens
ccggacggtacttctgccactgctgctccgtggagatcgtcccgcgcctgccgcttgctcacttccgacagagaa

SEQ ID NO: 189874 - DNA, 100 bp, Homo sapiens
caagctctactgtgacttcagagacactgccaagcagccttagccctagtgtagaggtggcaggatcccattttctcactggcgactcccctgcgtgctg

SEQ ID NO: 189875 - DNA, 75 bp, Homo sapiens
tggggtactacggctacagcaagcagcctcccgcgacgatgcccctcaacgttagcttcaccaacaggaactatg

SEQ ID NO: 189876 - DNA, 100 bp, Homo sapiens
cgcagggcgatggacggccgaaccccgcgcccgcaggacgccccagccagatatgccacacttctgcctgctgttggcaaccctcctggactaggctgct

SEQ ID NO: 189877 - DNA, 90 bp, Homo sapiens
ccagatttaaaatatgtccttctggcatatgatgtcaaacagggtgtcaaattgagaaccaggtagatccccaccacctacagtaaaaag

SEQ ID NO: 189878 - DNA, 78 bp, Homo sapiens
tgcaaaagaaatgcgtggacagcactgatgtagcccagcagttccagtatgctgtgcgggtgattggcagcaacttcg

SEQ ID NO: 189879 - DNA, 75 bp, Homo sapiens
cctcgccggtcttggggggatggttccatcatggcgtcaatgcagtgtctgctgcacagagctttacatccccgg

SEQ ID NO: 189880 - DNA, 90 bp, Homo sapiens
tgctgctcaacaacggcttcagggagtcggaccagcttttcaaacaatacaggaatcagtgtcattcaaggacgtaactgtagacttcag

SEQ ID NO: 189881 - DNA, 82 bp, Homo sapiens
tgtgcttctggtagatgcttcacagcaaactggaatggaagttggatacactttgtgacttgtacgagacactgaccattac

SEQ ID NO: 189882 - DNA, 100 bp, Homo sapiens
aatttcgcagaatgacagaactgaaaggaacttttagaggcaatcacttagtcaacctcttgctgttacagtcctgacacagctctccctgaggagcagc

SEQ ID NO: 189883 - DNA, 100 bp, Homo sapiens
atgaatttggaatcttcccttgaagaggatggaggaagccttgtaggagaagtaaatgaagatggggagatgactggagagaagatagcctatgtgtacc

SEQ ID NO: 189884 - DNA, 82 bp, Homo sapiens
aaggattgtcctctttctacaaaagcatttaaatcaaacggtattgagatggattgggttatgaaacataatggtccaaatg

SEQ ID NO: 189885 - DNA, 100 bp, Homo sapiens
aagaaagaggtgggcaagatcctgtgcactgactgcggcattgatcaatatgacagagatagcatcataaatgactttaagaatgggacctgcaaacttc

SEQ ID NO: 189886 - DNA, 83 bp, Homo sapiens
cagacttcagaacaaggtctctgggaaatttaagcggggcaattgaaggaacagactaaaaatcgtgtcctggaaggaaacta

SEQ ID NO: 189887 - DNA, 90 bp, Homo sapiens
tcatgtgtctcttctaagctgaataaagctgttttggaactgtcaggtacctcaaagcaaaacatcggttgtgaagagaaagccaaaaag

SEQ ID NO: 189888 - DNA, 100 bp, Homo sapiens
catccttcttctggataacactgtacaagctttcaaagtcaatcgtttgctgccaattgatggggcaaatgatctcttttttcagccacctccactgact

SEQ ID NO: 189889 - DNA, 82 bp, Homo sapiens
ccacaccttcttcaacccggaccgggagggctggctcctgaagctggacggaaatggagagctggatttctccacttttctg

SEQ ID NO: 189890 - DNA, 82 bp, Homo sapiens
gaagacccacctttgtttcctagtgagaaccgagtcagtgctcttacccaggaacagatggagtcggataactgttcaggag

SEQ ID NO: 189891 - DNA, 82 bp, Homo sapiens
ctctggagtggcccagcctaactgcccagtggcttccagatgtaaccagatgggagcttgcctgattgtcaacccatcggcc

SEQ ID NO: 189892 - DNA, 100 bp, Homo sapiens
ggtgtgtggaagggcagctgcttcgaggactttcaaaatatggaatgaagaatatagtctctgcatttggcataattgatctggatactattgatgtaag

SEQ ID NO: 189893 - DNA, 101 bp, Homo sapiens
gtgaaacccaaacaacatctcctgctattccttgggctgcctttcctgcaggaggacggagtcccagagaactacaactcccatcaagcacttgggggatc

SEQ ID NO: 189894 - DNA, 74 bp, Homo sapiens
gccttcacgtcctcctccatgctgaggcgcaatacaccgcttctgggtcagttatcaggaactgttgccgttat

SEQ ID NO: 189895 - DNA, 100 bp, Homo sapiens
ctggggcacgccaccatttccaagatcggcttcaccaccgaccctcggatggcccgctcctccccctaccccactgacgtggcccgagtggtgaatgccc

SEQ ID NO: 189896 - DNA, 75 bp, Homo sapiens
cttgctcgcccgcagccccgagaccgcagatgcctgctctgtgcctgtatctgagatcatcgccgttgaggaaac

SEQ ID NO: 189897 - DNA, 101 bp, Homo sapiens
gggcgaggcggcggcggcagcagcgatggtcacttttcaataggatggactttgaagacttggggttggtagtagattgggaccaccacctgcctccacca

SEQ ID NO: 189898 - DNA, 80 bp, Homo sapiens
aagcagacagaagagccaagcagctatggaggaaaatcaggagtggagtcaacatatcaatggagcaagtcacagtcgtc

SEQ ID NO: 189899 - DNA, 75 bp, Homo sapiens
ttgggggtcgagcacataacggggttcgggtgtctcgtgtgtgaacatcacagtttcatgatcaacatgggagac

SEQ ID NO: 189900 - DNA, 75 bp, Homo sapiens
gcggagtttcgtgagtttttactgactcgagacctgtcatttactccatcctttatagtgatgctacaggacgaa

SEQ ID NO: 189901 - DNA, 82 bp, Homo sapiens
caatccttggctcactgaggaggtttgcattttgaaagcgaagcagaagccgtagaatcagcggcgagcctgttgaaagaac

SEQ ID NO: 189902 - DNA, 109 bp, Homo sapiens
cggaagaccgcgcgcagggcctgcagcgggagctggacggcgagcgcgagcggcgcgagaaaaagtccattggaatattaagcccaggagttgctttggggatggctgg

SEQ ID NO: 189903 - DNA, 90 bp, Homo sapiens
gggggattctcgacctgctaacagaactggaccttttcgtgttctccgtggcccgatgcccccacagcctatgtgaataacagcccttcc

SEQ ID NO: 189904 - DNA, 100 bp, Homo sapiens
cagattcgcagtggtcgcttcttctccttggaagaagccaatcctgcttgtgcatggtgataagcgagaggctaaggctcacctccatgcccaggccaag

SEQ ID NO: 189905 - DNA, 75 bp, Homo sapiens
ccggagccgctgcacatttcggactctccttcagcaactccagaagcttcagactttggtgatgggcaaggtttc

SEQ ID NO: 189906 - DNA, 75 bp, Homo sapiens
atctgtctgaggagcggtcagtgacgcgatggagcgggcaagatacactctgtgcagttttagagagagacacac

SEQ ID NO: 189907 - DNA, 100 bp, Homo sapiens
gtccatcgtgtgcctgatgatcacgcagctggctggcttcagtggaccatttgctgacctctctgaggctgccaaccggaacaatgacgccctgcgccag

SEQ ID NO: 189908 - DNA, 124 bp, Homo sapiens
aaagcgtagagggagtagtcaggattctcttggaacattattacaaggtagagcagatcctggcagagttccagctgcaggaggaggacctgaagaaggtgatgagacggatgcagaaggagat

SEQ ID NO: 189909 - DNA, 74 bp, Homo sapiens
tggggttctgagactccctgtcccggaccgcagccccaaggaggcccgcctgacgactgaccagttgccatggc

SEQ ID NO: 189910 - DNA, 100 bp, Homo sapiens
tcagcagacagattgaggacactgtattatacggttactatagtcactctgtgagactgctgggtcagaaaaaggataatggaaggcggcttgggggagc

SEQ ID NO: 189911 - DNA, 83 bp, Homo sapiens
ccgggtcttccagagcgtgaagatcaagatcggtcctagaccagaaggagcacaggctggatggccgtgtcattgaccctaaa

SEQ ID NO: 189912 - DNA, 101 bp, Homo sapiens
cttgcaaaaagtaaaccacgatcgttatgctgaagagacaagagagacacctccaacttcgacaaagagttcaccagacagcctgtggaactgacccccac

SEQ ID NO: 189913 - DNA, 83 bp, Homo sapiens
atcaaggaacatcccctgttggcatcatgtgagagtgaagacagtatttgccagctcattgtaatctcaggggcgatataatc

SEQ ID NO: 189914 - DNA, 96 bp, Homo sapiens
gccgcgctcagcgacaaacaagaacttgctactaccagcaccatgccctaccaatatccagcactgaccccggagcagaagaaggagctgtctgac

SEQ ID NO: 189915 - DNA, 82 bp, Homo sapiens
cacggggccgctgctcaagttccagatttgcttctcagatgaccaagatggtgctgcagatggtgctgaggatggagaaccc

SEQ ID NO: 189916 - DNA, 80 bp, Homo sapiens
cttctcagctttaccatccctggaggagacctggcagcaggtgcgagaagatgtactaaattcattgaataacaactttc

SEQ ID NO: 189917 - DNA, 75 bp, Homo sapiens
aagaagatcctgctgcccgagcccaggtagaagatagcaccatgccgattcgtcgaactgtgaattctacccggg

SEQ ID NO: 189918 - DNA, 100 bp, Homo sapiens
gccaccgcgcccggcctgtgctgtgcctctcatgcttgttggaaccagcttggaatgcactccctccacctccaaccagagctccccacaactgaccctg

SEQ ID NO: 189919 - DNA, 100 bp, Homo sapiens
gagagcaggaagtacatcctggtggtgcccctcatcggggctccgcgcgtggccgcctccctcttcctgggcacgttcttcattagctccggcctcatcc

SEQ ID NO: 189920 - DNA, 74 bp, Homo sapiens
cccctgaaccccaaggccaaccgcgagaagatgacccagatcatggccgcgctggaggccaaccccacggcccg

SEQ ID NO: 189921 - DNA, 87 bp, Homo sapiens
gaccggtggatcctgtccttcatgcagtctctcattggcttctttgagactgaaatggcagtgtgaagcctcagtttaggtcatctg

SEQ ID NO: 189922 - DNA, 83 bp, Homo sapiens
cctggttgcagaagtgccgaaagagcactggactccggaagcaagcgatccccctccaagaccatcccaggcctccccagaca

SEQ ID NO: 189923 - DNA, 90 bp, Homo sapiens
ctgcagtggcgcctaaagtctgagagagggaagtcgcctctgtgctcgtgagtgcatggggtataaggacggggaggtttactgcatcga

SEQ ID NO: 189924 - DNA, 98 bp, Homo sapiens
cttaaatgaagccactgattagcaatttaaagatcctctccaagaccccaccaacaactgaacgctttggtcaggctgctacaatggaaggaattggg

SEQ ID NO: 189925 - DNA, 74 bp, Homo sapiens
acttttcgttcagtgggacttgcttcacgacaatgccatccccatcaaatcctggttcagtgaccccagcgaca

SEQ ID NO: 189926 - DNA, 83 bp, Homo sapiens
ctacgcgcgcttctcgccgtccccgctctccatgaagcagttcctggacttcgtatggtttgaagtggtgaacatggattttt

SEQ ID NO: 189927 - DNA, 90 bp, Homo sapiens
aggtgccggtgcctgtccccgggggcgccatggcgaccggagcgaacgccacgccgttgggttgggcccgaaggcatcctgcagaacggg

SEQ ID NO: 189928 - DNA, 75 bp, Homo sapiens
gaaaatcggaagagaagtcaacatgaatctgggagaatatcccatgaagctgaggtcttgaagcagctggctgag

SEQ ID NO: 189929 - DNA, 100 bp, Homo sapiens
ttgaatctgaaggaaaaggttccacctttgctaaggataacagtcttgctgaagacaatctgaaacttaaaatgcgtatcgaagttttagaaaaagagaa

SEQ ID NO: 189930 - DNA, 73 bp, Homo sapiens
tttgccatttatttgtaataagttggcaaacatgaattgactgggcataaagtagctgtgaagatactcaatc

SEQ ID NO: 189931 - DNA, 75 bp, Homo sapiens
atgcctctaacactcatcttcaaaagactgccattgccgaaatctaaaaaaacttgtagcaaaggcagtaaaaag

SEQ ID NO: 189932 - DNA, 50 bp, Homo sapiens
ccgactactgtcagcagctgtgccagaatgaggagaaacctgtgcaaatg

SEQ ID NO: 189933 - DNA, 87 bp, Homo sapiens
cacccggctctatctgaaggcagaacaggagcggcagcacaactacctgaaggacaggcagtgtcgtggcctggagctcattgcctc

SEQ ID NO: 189934 - DNA, 75 bp, Homo sapiens
gagaaggcgctgcgcaagcacgctgaggaggactcgctcagcagcagcctgaaaacttgctacaagtatctcaat

SEQ ID NO: 189935 - DNA, 100 bp, Homo sapiens
gcagcaagccgcacctggagaagctgaccctgggcatcacgcgcatcctagggaaaatactttgaaatccagttcagtccaggtggggaaccagatggtg

SEQ ID NO: 189936 - DNA, 97 bp, Homo sapiens
ggggcagaatacagagatatggaatcagaatttatccagttggcgaaggactttgaggatttccgtaaaaagtggcagaggactgaccatgagctgg

SEQ ID NO: 189937 - DNA, 100 bp, Homo sapiens
ggctgctcgataaatcagacagaacagttaatcctcaatttaagcctgatctaacccctagaaacagatcatgcaacagatgagtgaccaccgctacgac

SEQ ID NO: 189938 - DNA, 80 bp, Homo sapiens
gagtccccaccacagggatcatcgaatacccctttgacttacaaagtgtcattttcagagtgcccaagacaggagcagga

SEQ ID NO: 189939 - DNA, 99 bp, Homo sapiens
cttaaacctcctctggattcaagttaaagtttgtttcgacgccggaccgcgtaagagacgatgatgttgggcacggaaggtggagagggattcgtggtg

SEQ ID NO: 189940 - DNA, 100 bp, Homo sapiens
gcccggagtccggccagggccggcgcggcgatgatgaacaggttccgaaagtggctctacaaacccaagcgccgtgccgtccctgcagtgacaccgaggt

SEQ ID NO: 189941 - DNA, 101 bp, Homo sapiens
tgcacctcccgcgccgcacggtggacgagcgcgagcccagcattgacctgctgcaggccttcgtggagcactggaagggcatcacgcactactacatcgag

SEQ ID NO: 189942 - DNA, 100 bp, Homo sapiens
ctgacagcccccagggcaggtgagccctgcatctggaataaggcttgcttccggcgtcatggctcaaagggccttcccgaatccttatgctgattataac

SEQ ID NO: 189943 - DNA, 100 bp, Homo sapiens
ggaaaaagaatgccaaaatcagcagtctcctggaggagcagttccagcagggcaagcttcttgacaggggcaagtgtccgagtggtgaatcagctactta

SEQ ID NO: 189944 - DNA, 100 bp, Homo sapiens
gattccccactggcaactagacaccgcgaaatgctgaagcgctgtaaaactcagcttaagctctcatttcactcttcagtgttcctgttatttatgaacg

SEQ ID NO: 189945 - DNA, 100 bp, Homo sapiens
cctggactcgccctcctatgtcctgtacaggtatgatgccgggcgggacggcttcatcgacctgatggagctaaaactcatgatggagaaacttggggcc

SEQ ID NO: 189946 - DNA, 101 bp, Homo sapiens
ggacggagcagtgatggaagggccgctttttttgcagagtcagcgctttgggaccaaggactcttcagctccctgcgccttttaacacatgcacatccagc

SEQ ID NO: 189947 - DNA, 101 bp, Homo sapiens
gttgctggtctctggctccctcctcccagggccaggcgccgctcagaacggatgaatattctatctttcctcagacatactccatagatattaatggctat

SEQ ID NO: 189948 - DNA, 75 bp, Homo sapiens
gacatggccggggacacccagtggtccagactctgatgagaaagtcctgcccgtttcggagctgctggacatcgc

SEQ ID NO: 189949 - DNA, 100 bp, Homo sapiens
cgagcaggaggcgccatcatggaggtggacatctataccgtcaaggtggaagacctgaccttcacctccccgttctgcctgcaagtgaagcggaatgact

SEQ ID NO: 189950 - DNA, 83 bp, Homo sapiens
ctaagagtggcatcaaatgtcagccctggagttccatgataccacacgaacacaggaatttttcacagacaacctatgggaca

SEQ ID NO: 189951 - DNA, 51 bp, Homo sapiens
cctcccgagtagctgggaccacagctgaagaaaaggtgactggtctcatga

SEQ ID NO: 189952 - DNA, 74 bp, Homo sapiens
ccaagccactgtggcttctggcatacctgctggctggatggaaccataaatccatggctaaccttgacaaatac

SEQ ID NO: 189953 - DNA, 100 bp, Homo sapiens
gatcctagtaatctctttgtggtttcttctgatttctgccattgggggggacttgatctcatcttcatgccaggccttgggtttgacaaacatggcaacc

SEQ ID NO: 189954 - DNA, 100 bp, Homo sapiens
gaaccttcagtgaaagtaaaagaaccttcagtacaagaggctacttctactagaaaaatctggtccttcatcagaactaggaaagcactgatttaaacat

SEQ ID NO: 189955 - DNA, 74 bp, Homo sapiens
gcggcgcggggaccgctgtgctctcggtcccgagcagccccgcccaacatggacccagacccccaggcgggcgt

SEQ ID NO: 189956 - DNA, 75 bp, Homo sapiens
taatttgaaccatgtttggattgaagccgcctctgtattacttaccagaaagaagcttccggttctgaggtcctg

SEQ ID NO: 189957 - DNA, 100 bp, Homo sapiens
agaggaccccggtacatctgaaagccgggaaatggaatcccgttctgcttccagaagtggaagtgctcacggatcggggaaatctgcaaggcatacccct

SEQ ID NO: 189958 - DNA, 75 bp, Homo sapiens
gacattcaggaagactacctcatgtggttcttgcatcaagcagggatgcccaggaacagcaaagtttgatacaca

SEQ ID NO: 189959 - DNA, 100 bp, Homo sapiens
tggccgtgaccatggaccctctggagacccctatcaaggatggcatcctctaccagcagcatgtcaagtttggcaagccaagaagtatgatgcgtttttg

SEQ ID NO: 189960 - DNA, 101 bp, Homo sapiens
agtcatcttacctctctggatctcagttgtctcatctgtaaaaaggagataaaaattatttacctgcctgaacgaaagtaatggaccagtgaaggtgtggg

SEQ ID NO: 189961 - DNA, 100 bp, Homo sapiens
ccaagaccattcttcaagtttgcaaagagtaaccagagagcacagagaaatgctggtgaaactggccaaacagaacaccaacaaggccaaagactcttta

SEQ ID NO: 189962 - DNA, 100 bp, Homo sapiens
gatcatggcggatggccccaggtgtaagcgcagaaagcaggcgaacccgcggcgcaataacgcgtccagcctgcatgccgtgcggactgcacccaccagc

SEQ ID NO: 189963 - DNA, 87 bp, Homo sapiens
gaagtctataagctttgcaacagaattacagagtatgattcacagactatgcacccgactgctgctgttcagtccagggaaaatgaa

SEQ ID NO: 189964 - DNA, 113 bp, Homo sapiens
agagaatctctgaggtccccaggagagcctgcctgcacggaagagacgcctcctcgcacgtgctctctacggttaatgtcatccttgggaagcccgtcttgaacacctggaag

SEQ ID NO: 189965 - DNA, 96 bp, Homo sapiens
acgaggaagaggaggtttctgaggataccatacttgcagagctccttcagatacataaagaacacattgtaggataccatgaacatgattctcttt

SEQ ID NO: 189966 - DNA, 76 bp, Homo sapiens
gtgattctacatctcaagctcatattttgaagtgtttacggaaatccaatcttttttgacatatgcatatagaagt

SEQ ID NO: 189967 - DNA, 100 bp, Homo sapiens
ctttttggctgttctgaagagtgttactgtgaacattcatgcacaaatttttatgtggaggttgatgataattagaagcatgctttccactgaacttccc

SEQ ID NO: 189968 - DNA, 76 bp, Homo sapiens
ctccattgtgatgaaagcacatggtacagagcccataggcagcatgtcatccatggaagtgaacgtggacatgctg

SEQ ID NO: 189969 - DNA, 74 bp, Homo sapiens
ccggttccccggcccacagtgggggtgtgcaaacccgagagaactgggtgaacctatgggtcgtggaacaaaag

SEQ ID NO: 189970 - DNA, 100 bp, Homo sapiens
tcgtgctcgggcaagctgctggagagggagatcaaggcgggggtccactggacggggcctgagctacaacttcacccacctggacgggtacctggacctt

SEQ ID NO: 189971 - DNA, 100 bp, Homo sapiens
ggcctttatttctcgtcggcggcgccctgcaccgcgcctcgcaaagatttcagatgcatgccaggtttccactgattgccagaactcgagatcactacac

SEQ ID NO: 189972 - DNA, 98 bp, Homo sapiens
catctccgagaggttgtgtttggcaaaagtgaagatgagcattatcccctttgtgagaaagatcagtctaaagaaaaggagaagaaagtgaaaaaaac

SEQ ID NO: 189973 - DNA, 96 bp, Homo sapiens
tcagagtcgggagagctttctggatgatgtaaaccttattctggccaacagtgttaagtataatgccttatacaggatgctgtgttctttgctcct

SEQ ID NO: 189974 - DNA, 96 bp, Homo sapiens
aaacaatagctcaaggaaacctttccaacacagatgtccaagctgccaagttacccatgcagttgttactgtaccagcctattttaatgatgccca

SEQ ID NO: 189975 - DNA, 97 bp, Homo sapiens
cagccgcccgcttcaaccccaggggaccagaggaactcagccctgattgcggtgtctttcctgaagactatcttcccgtctcaaaatggacatgatg

SEQ ID NO: 189976 - DNA, 100 bp, Homo sapiens
gctcaggacagggctgaggaaccatgtctccatccccgaccgccctcttctgtcttgtggctgaaggacccggggccgcggacggagaagcggacactgt

SEQ ID NO: 189977 - DNA, 71 bp, Homo sapiens
ctcttacaacaaaatggttttccactccattgttgttagaagccagaatggcagttcggaaaaccctcatt

SEQ ID NO: 189978 - DNA, 51 bp, Homo sapiens
aagtgcttagattctggatacattttgaagatcatggaagggaagtggttg

SEQ ID NO: 189979 - DNA, 100 bp, Homo sapiens
ggacgaattccaacttgtttcacgctatatcaggatgagataactgaaagggaagcagaaccatactatggagcgcttgtgagtgccttggctgatgaca

SEQ ID NO: 189980 - DNA, 99 bp, Homo sapiens
tcgcactgtgcatagaggacgggtccatccatcgcataagagcaaagaacactgttgttgccacaggtcatccgtccttggctcaggatttggagagct

SEQ ID NO: 189981 - DNA, 100 bp, Homo sapiens
aagagcagcggaaaatgatccagtcacagggatttttgccaagcctgaccatgttaagatgacatatccaaagactcagcttcagcattcactgccttta

SEQ ID NO: 189982 - DNA, 98 bp, Homo sapiens
ttttatggccttgtggaccagttatgacataaggtaccgcttgttcagacttcttgagactgcagaatccgcaacggtgagaatggaatacattttct

SEQ ID NO: 189983 - DNA, 90 bp, Homo sapiens
atcaaagtcatcgacggcacctcgggggccacactgcaggcctccgcgctcagtggtgacaaaacacgacagccttcttcaagcccctcc

SEQ ID NO: 189984 - DNA, 75 bp, Homo sapiens
tttactgatgcagagatccgaagcctcttcagaagaaacttgactccttcccagctcaggacccttgcaccacca

SEQ ID NO: 189985 - DNA, 75 bp, Homo sapiens
aaaggagcagccctggtgtcacctatcagtaaaaggtatctcagcgtttgagtcagccaggagtagcaataggtt

SEQ ID NO: 189986 - DNA, 90 bp, Homo sapiens
cggctgctgctagagctggagcatttgccgggtaaaatctgtaaaaactgggtcagttttttggacaatgtgctgctgcttatcctattt

SEQ ID NO: 189987 - DNA, 75 bp, Homo sapiens
ggaacgggtggccgattactgcgagaacaactacatacagatattgtcagcatgtgctttgtgaaactgttcgaa

SEQ ID NO: 189988 - DNA, 99 bp, Homo sapiens
gcagagacgctgccagaggtggaggctgagctggcccagagaattgcagccctcaccaaggccagaggacgtgcgcatttctaggtatggagtgtgaca

SEQ ID NO: 189989 - DNA, 75 bp, Homo sapiens
tgccttattttttctcatggatgttcttcttcgagtatttgtagaagggttgtcttttggaaatgcaggtttaag

SEQ ID NO: 189990 - DNA, 82 bp, Homo sapiens
ttcggcctgaagtgtgagctctatcaactactacttcatcaacagccagggccaccccatcgaaggccttgccgtcatgtac

SEQ ID NO: 189991 - DNA, 123 bp, Homo sapiens
tgtcactgtccctaatgtgacatgggcagatattggtgccctggaagacattagagaggagctcaccatggcaatattgtggaattctgtcttctgaggtgtcaaggactgaagttgctgcag

SEQ ID NO: 189992 - DNA, 90 bp, Homo sapiens
ggagccggccgtacgcggtgctgcgagggcagaacctgggtgacctgagcatctctgcagaccgcctgagtgagaagcgctctcccaacg

SEQ ID NO: 189993 - DNA, 74 bp, Homo sapiens
ctttgataagaatgattcagattttgaagctaaagttaagcaggcaaaataatcctatggtgaaaaaaatcaac

SEQ ID NO: 189994 - DNA, 83 bp, Homo sapiens
ctaatttgaaccatgtttggattgaagccgcctctgtattacttaccagatacagatcacttggattcagtcgagtttgcttt

SEQ ID NO: 189995 - DNA, 98 bp, Homo sapiens
tggagggagctacctaccaggtgccagatgccctcgagtgggaacagcagaatcaaggcctgggccatggtaggggaggagtgtgtaggtgccatcgt

SEQ ID NO: 189996 - DNA, 75 bp, Homo sapiens
ctgccgcagagtcggcacctgaaggacatggagcactatgtaggaggaaatgcagctttaattggacagaaattt

SEQ ID NO: 189997 - DNA, 75 bp, Homo sapiens
gtgccgttggtcctgtgcggtcacttagccaagggacccgagctgatccagaaagccaacggtctccacggcttc

SEQ ID NO: 189998 - DNA, 90 bp, Homo sapiens
aaggggttcgtgcgctgtggagacgcggagggtcgaggcggcgcggcctgaggtgaagctcgtgtgtggagtgccacggtacaatcagac

SEQ ID NO: 189999 - DNA, 94 bp, Homo sapiens
tgccgtccatgcggaagatcgtcgccacctggatgctggagccttatgccagcctggaccatcttggaggcagtgtaggatcatggaagaactt

SEQ ID NO: 190000 - DNA, 96 bp, Homo sapiens
aggatgaagattcaccaaataagctatatactttggttacctatgtacctgttaccactttcaaaacagttgcaccaccagcaccaccttccagta

SEQ ID NO: 190001 - DNA, 75 bp, Homo sapiens
cacggtgttcgcctttcaggaccccacacaggcaatggatcacttggagtcctttattgctgaatgtgatcggag

SEQ ID NO: 190002 - DNA, 90 bp, Homo sapiens
gttggaatgctcttttaccgatgctttaacatacagccactaggtcagaagacatgtcttcatctacatggcatctttccttacctctat

SEQ ID NO: 190003 - DNA, 75 bp, Homo sapiens
cacgattaagagagtctgttgtacagatggtgttcagctccgaggccgcctggcagtgtgtgagtgaggcgctgc

SEQ ID NO: 190004 - DNA, 75 bp, Homo sapiens
cgggagttacaccgccaccgccagtacctgccatcctggctggacttgaccccagggacattgtggctgtgctga

SEQ ID NO: 190005 - DNA, 100 bp, Homo sapiens
cttggccaagtccatccaccacgctcgcgtgctgatccgccagcgccatatcaggtggaacgtgtgatcaccattatgcagaatccacgccagtacaaga

SEQ ID NO: 190006 - DNA, 100 bp, Homo sapiens
ggagaactacagaaacctggtctccctagtatcaccttttgccatgatagcatttctttcattggacagttccttacaagggctccactcagtgtctgtc

SEQ ID NO: 190007 - DNA, 90 bp, Homo sapiens
agtcgtccgacgtctggccgtgagacgtttcgggagccggagtctctccaccgcagacatgacgaagcttatatagaattggtgatagga

SEQ ID NO: 190008 - DNA, 100 bp, Homo sapiens
ggagaatgggcccattttcttggataccaaggacctactctatactctcagtggcttagacaagttggatggcttgaggactggtactaaaaggaaacgt

SEQ ID NO: 190009 - DNA, 90 bp, Homo sapiens
ggttcctcccagcccggggctacctcctcggtcctggacaccatctgcactctgtcagccaggtgctggagaatctggtaaaagcaccat

SEQ ID NO: 190010 - DNA, 100 bp, Homo sapiens
gaagagggcagagccgtgcatggggctgctccccaggacctgagcaggaacctggagttttcagaacacccaatctgggctacagctttgagactaactc

SEQ ID NO: 190011 - DNA, 74 bp, Homo sapiens
atgagatcgtggacaagatcatgggcaaaggacagatccagcagtcctgcgttaactgcggccgggaggctatg

SEQ ID NO: 190012 - DNA, 80 bp, Homo sapiens
ggaattttacctttgctctctgctgctacatcaccaactaaggcgcttacagctcaatgctaatcaggccttcttcctgt

SEQ ID NO: 190013 - DNA, 100 bp, Homo sapiens
gagaggccgagggtttgatgaaggtggaggcagcgcggctctcagttcccagccccagagccagggtcaccacgctgtccaaccccatggcggcctcggc

SEQ ID NO: 190014 - DNA, 100 bp, Homo sapiens
cgcccggcgaggtagcgccaggcgagatggcagaaacggtggacacaagcgaaatggtcaacggcgctacagaacaaaggacgagctctaaagagtccag

SEQ ID NO: 190015 - DNA, 100 bp, Homo sapiens
tttactgacattttatgttatttctcaagtatttgaaataaaaatggatgcaagtttaggaaatctatttgattattgctcagttgtaactattgtggac

SEQ ID NO: 190016 - DNA, 90 bp, Homo sapiens
ggaagatggcggaacaggctaccaagtccgtgctgtttgtgtgtctggaagggctgaactgatggaaggaatgctgttagcctgagactc

SEQ ID NO: 190017 - DNA, 88 bp, Homo sapiens
gtccgcgctcggcccccgcggagagcctccagggtcgtatagacctccccctcctatgggcaaaccaccaggttcaattgtaagaccc

SEQ ID NO: 190018 - DNA, 100 bp, Homo sapiens
aagcggccaccgactactgtcagcagctgtgccagaaactggcagacctttcacttcgtatccaacaaattgaaacaactctcaatattttagatgcaaa

SEQ ID NO: 190019 - DNA, 82 bp, Homo sapiens
gagggaagtttatgctgagagaacagtttgaagcaaatgggtatttctttaaaagtctcttgcatggcaccaagaatgttac

SEQ ID NO: 190020 - DNA, 100 bp, Homo sapiens
tctcagtcaaggcactcagctcaaatacacacacctgttgccattatagagctggaattaggcaaatatggacagcatcagacaacagtcagcgctttcg

SEQ ID NO: 190021 - DNA, 82 bp, Homo sapiens
aacgtggatgattactacgacaccggcgaggaacttggcagaccatgtctgcaaaggagaagtcgaagtttgaagatatggc

SEQ ID NO: 190022 - DNA, 74 bp, Homo sapiens
gtcaagtggctcaacgagaacgccgtggagaaggtgaacatcaagccgcaggcagaggtggaggagacactgaa

SEQ ID NO: 190023 - DNA, 76 bp, Homo sapiens
gcctctgccctgcacgtggctgctgccaagggctacattgaggtgatgagccctgcagagcccagggagatggaag

SEQ ID NO: 190024 - DNA, 75 bp, Homo sapiens
tatggcagtggcagaagattttaattaggctgagaacatctctaaggacctctacatagaagtatatccagggac

SEQ ID NO: 190025 - DNA, 50 bp, Homo sapiens
gtcaatacaaagatactctccccaaggatggaggtttgcttctgaataac

SEQ ID NO: 190026 - DNA, 88 bp, Homo sapiens
acttgactggtcttacattgctgcatcaagaaacccaagctgctgagccaaaagaatgcaatggtgtaaagattccagttgatgccag

SEQ ID NO: 190027 - DNA, 75 bp, Homo sapiens
ggctgccctgcggacctagtggtgtgtgacggggctcctgatgggctctgtgacctctgccccagcctggagaag

SEQ ID NO: 190028 - DNA, 75 bp, Homo sapiens
gggggcgctggcggcctgcgcagccacctcaaggaggagatgaccgccgggttctgctatggcacatggaacaag

SEQ ID NO: 190029 - DNA, 75 bp, Homo sapiens
gccgatttcatgactaaccagtgtgtgttccagagaacaagccttcagacatttgctatattgacgctgagctgt

SEQ ID NO: 190030 - DNA, 75 bp, Homo sapiens
gcgcaggagcctcccggagctgcctttctgaagggcctgagtgacaagcagcgggaggaacattacttctgcaag

SEQ ID NO: 190031 - DNA, 80 bp, Homo sapiens
gcatcgcctgagcccgggacggcagcggcctggggacccagcaagattctggcaattaaccgtggagaaaatttgaaggt

SEQ ID NO: 190032 - DNA, 90 bp, Homo sapiens
cagacggcagccaattcagcagctgagctgttgaagcagggggcagatgctgcctcgaactctgtcactgagaccccacctatcactcag

SEQ ID NO: 190033 - DNA, 74 bp, Homo sapiens
gtgcttccaactgcgggacaggaagtggccgtagcggcttgttggataaggctgccaagctcctctatgaatct

SEQ ID NO: 190034 - DNA, 74 bp, Homo sapiens
gtttatctggagaactgtggaagcctgtcccgttgtcagagtggaaggccatcagcaagcagtttattgtccca

SEQ ID NO: 190035 - DNA, 100 bp, Homo sapiens
atttcacctctaaaaaatgggatgggccccctcttctctcctggaggtcagccggccccttgtggctctcaggccagctggaccaagtctcagaacccgg

SEQ ID NO: 190036 - DNA, 90 bp, Homo sapiens
ccgggacagcgctggtagggagtcaggatatcatcctaggaactgagccgcccagccttcaccacctttacctcctgcatcctgcgttcc

SEQ ID NO: 190037 - DNA, 83 bp, Homo sapiens
tgaagaagatgaagatgaaagctatcagaactgagtgtacttggtctggtatttgtggcataacttacggaacacataagaat

SEQ ID NO: 190038 - DNA, 100 bp, Homo sapiens
ggcccgaggcccctatggcagatttgaaaattcacccttgtagagtcattcctgcctttgagcggactcccttttaaggattctcaaagttggattggtg

SEQ ID NO: 190039 - DNA, 101 bp, Homo sapiens
ctgggacctccacctccctcatttcatcttgggggaccagcagttggaccaagaggaaatctgggtggcccacatgaagagcaaagacaatcggatcaagc

SEQ ID NO: 190040 - DNA, 101 bp, Homo sapiens
ctttgctctaagcactatgactagttctgttcagatggccctaatggcttccctggatgcagagaaggcccaaggacaaaagaaagtggaggagcttgagg

SEQ ID NO: 190041 - DNA, 100 bp, Homo sapiens
ggacctttgaaggaccatattttaccacccacaacaatctgtccagtggtactggtggaaccgtcccaaaatgtcccttgctcagaagaaggatcgggta

SEQ ID NO: 190042 - DNA, 108 bp, Homo sapiens
caatatctgtcttcggtggactccttcggcagtccacccaccgccgccgcctcccagcgagacggtcatctgttccagccgggccactgtgatgctttatgatgatgg

SEQ ID NO: 190043 - DNA, 50 bp, Homo sapiens
gaatcaggctcctcagccaggacacaggcgagttgaagaatttctcagca

SEQ ID NO: 190044 - DNA, 82 bp, Homo sapiens
agcacaggaatctcactctgttaaagctggtctgttctaactgaggttttaaaatcaaagatgggaaaatcggagaaaattg

SEQ ID NO: 190045 - DNA, 99 bp, Homo sapiens
caggaagctgcggctgagtcggttgaattgctggaaatggaaaagtcacaaatccgttcacagtgtgaagaactcaaaactgaagtagaacagttaaaa

SEQ ID NO: 190046 - DNA, 100 bp, Homo sapiens
gaagagcatatccatatacaacaatgggcacttactgaaggccgtcttaaagttacgttgttagaatgtagcagaaagtcattgggtggtacagattccg

SEQ ID NO: 190047 - DNA, 90 bp, Homo sapiens
ggcgcctcgctggggcggggaccttgccttgcccgggacctgtcgcgaaatcgcctttcagaaattcctatagaagcatgtcactttgtt

SEQ ID NO: 190048 - DNA, 95 bp, Homo sapiens
aagaggtcccaatcccccactctttccgccctaatggaggtctccagtttcggagtgtggccatctggggccgtgtggtatttgccactcaggag

SEQ ID NO: 190049 - DNA, 71 bp, Homo sapiens
aaaaagttggaagaaagggtgtcatcacagtaaaggatgaagtcgtcttcttcggtgaccacttccgagac

SEQ ID NO: 190050 - DNA, 100 bp, Homo sapiens
cactctgcccttccagagcaagcatggagcaacaggatcagagcatgaaggaaggggacagagcgggatgccaccagcttgtccaaagggaagttccagg

SEQ ID NO: 190051 - DNA, 51 bp, Homo sapiens
caggagcccatggtgcgccatgaggcaggaagatgttaccgagtacttcag

SEQ ID NO: 190052 - DNA, 75 bp, Homo sapiens
gctcttgagtacttgcactcgcgggacgtggtataccgcgacatcaaggacttcctgggaaaatcagatccattt

SEQ ID NO: 190053 - DNA, 75 bp, Homo sapiens
ggacaggatcccagtttcctacaagcgaacaggattctttggaaagtgtgatgaatgcagactctgctaccattt

SEQ ID NO: 190054 - DNA, 90 bp, Homo sapiens
tgaccgagaccgcggccgggaccgagggaagacctccgtgtggatggccgtggctgtgaggactaccgatgtgtcgaagtggaaactgat

SEQ ID NO: 190055 - DNA, 82 bp, Homo sapiens
gagagcttcatcaaaaatagtgatagctttgataacttatatagaattggtgataggatcacaacttctgaggtcccagcaa

SEQ ID NO: 190056 - DNA, 100 bp, Homo sapiens
gggaaatctccaagtcagaaagctagagatgatcgctatggaaaatcctgcagacttgaagaagcagttgtatgtggaatttgaaggagaacaaggagtt

SEQ ID NO: 190057 - DNA, 100 bp, Homo sapiens
cctatgcctactgcaccatccccacctaccccagcggccagatcggcttcatgctgtgcagcaagaacccgctggtggaggccattgtcttgccaatgaa

SEQ ID NO: 190058 - DNA, 100 bp, Homo sapiens
tttaagttctacaatgtctggcagattgaggaacaaagataagggagaacaagcagaaactggtcagagactcagcgtaaaccagatcactgacggtggg

SEQ ID NO: 190059 - DNA, 75 bp, Homo sapiens
caccgaagggacattctgtcttcatggacatttttgaacttgtggttgtgtggaggaaacttggagatgctgcag

SEQ ID NO: 190060 - DNA, 90 bp, Homo sapiens
gcaaggcctaaggaccagtagtccttccactccatccccagagcatcaggctcgtgaagaagaaatgactgcaaaagtaagggacctgca

SEQ ID NO: 190061 - DNA, 100 bp, Homo sapiens
tccttagcattggccgaagagttaagcactgctcagcacgcaggcatgtgaggaagctgggcttaaaggagactccagcaaatggagagacagaccacag

SEQ ID NO: 190062 - DNA, 73 bp, Homo sapiens
caggcagcaaagatggcccaagaggagagaattgccaagcggggtcggaaactcgtggactatgacagtgccc

SEQ ID NO: 190063 - DNA, 97 bp, Homo sapiens
ttgagagagttcagcgtcctcacagaactcctgaagaagctctgtagtggccccgaaggaggactgaggaaggacagtcattttgtttactcattca

SEQ ID NO: 190064 - DNA, 100 bp, Homo sapiens
caaaaactgaaggactctgaagctgaggttgacaggactgaggtgattcgcacctgcataaacccagtgtactcaaaactgtttactgtggacttttact

SEQ ID NO: 190065 - DNA, 74 bp, Homo sapiens
tcagggcaagctgtgttccatggcagggaacttttggcagagctcccactactctccttaaggcggcagcaaat

SEQ ID NO: 190066 - DNA, 95 bp, Homo sapiens
ctggggaaggtccggggaatcatcgatgagctccagggcaaggcgctcaaggcgtccgagctgggccacagcctgaacgagaacgtcctcaagcc

SEQ ID NO: 190067 - DNA, 82 bp, Homo sapiens
ttcaatagcatgttattatcataaaaatgaacagttttgtggaatagatgaccaaatctacttgtggagagaagagaatgca

SEQ ID NO: 190068 - DNA, 109 bp, Homo sapiens
aagttacttctgattggcgactcaggggttggaaagtcttgccttcttcttaggtttgcagaattacatgaatgacagtcttcgaaccaatgtgtttgttcgatttcaa

SEQ ID NO: 190069 - DNA, 83 bp, Homo sapiens
ccgcgcaggagcctcccggagctggatgaatttttagatgtgatctactggttccgacagatcattgctgtggtcctgggtgt

SEQ ID NO: 190070 - DNA, 100 bp, Homo sapiens
atcttcagagggaaaaaggagaaagttaactgaattggtgacacttcgggtctctcacagaggaagaaggggaccatctggaccaagatttggacctaga

SEQ ID NO: 190071 - DNA, 74 bp, Homo sapiens
tgacgggacagagccagggcactcaccaggctgcaagaacagtgctgggccggcacagtcttcactaccgtaga

SEQ ID NO: 190072 - DNA, 82 bp, Homo sapiens
aagaataccctccaataccctcgggtattagaaaactactcggatgctccaatgacaccaaaacagattctgcaggtcatag

SEQ ID NO: 190073 - DNA, 50 bp, Homo sapiens
gcagaaactcagtttagacaagtgtcagctgtgatgcatgtttaaaagga

SEQ ID NO: 190074 - DNA, 75 bp, Homo sapiens
caacagtgtaccagcagggcgttggctatgtgcccatcacaggagcggaaagaatgtcggagcgggccgcggatg

SEQ ID NO: 190075 - DNA, 82 bp, Homo sapiens
cccgccgcccgggaggagaaggaaggcatggaaagttccagccggttcgagagctagtgcctccggagccagcgtggtggcc

SEQ ID NO: 190076 - DNA, 88 bp, Homo sapiens
tgctggtggaggggccttcctcgtcatccccctgcaccagggcaagaagaggcagagctggaggagttcctgtgccctgtgaaaacac

SEQ ID NO: 190077 - DNA, 83 bp, Homo sapiens
agaccctggagcctcagttggaagcagccgatccagcctgcggagcctgtggggcaggttactcactataaacaatatccacc

SEQ ID NO: 190078 - DNA, 78 bp, Homo sapiens
acaaacaaaacctgtgaagagtgcctgaagaacgtctccgttggtgttcgaggaagagacattgttgttcttggtgtg

SEQ ID NO: 190079 - DNA, 124 bp, Homo sapiens
tggttctcttcccaaagtggaagccaaattcatcaattatgtgaagaattgcttccggatgactgaccaagagcccagctcctagtggagacagacaccttcggtagtcaagtccggatcaagg

SEQ ID NO: 190080 - DNA, 100 bp, Homo sapiens
cctgaggagctatccagcccagtgatgcagccaacacgaacggttgtcatgtgtaacacaactttcgatcaccgcgaaaacaccgtcctgggaaagcgtc

SEQ ID NO: 190081 - DNA, 74 bp, Homo sapiens
tcgagtatctggtgaagtggaaaggatggcccccaaagagtggcagaagctcaactatgatatccataccctgc

SEQ ID NO: 190082 - DNA, 98 bp, Homo sapiens
gaaaatccaagtccggctagtacgcgaattggagaaaaagttcagtgggaagcatgtcgtctttatcgctcagtttggcctgtcactgctcctcatcc

SEQ ID NO: 190083 - DNA, 100 bp, Homo sapiens
atatattgggattttaaaccggtggagtgtgttactcttggggctggaatgagcatggcatgtgcggagatggcactgaagccaacgtctgggccccaaa

SEQ ID NO: 190084 - DNA, 75 bp, Homo sapiens
acaccggtaaccagttctattttgggacagggacaagtttgacggtcattccaaacctagaggatcaagacataa

SEQ ID NO: 190085 - DNA, 100 bp, Homo sapiens
cccttttgcacctccgggagctgctgctgggccaattcctgtccccccagcagcatggcatcgtgtgctgaaccctctgagccctctgccccactgcccg

SEQ ID NO: 190086 - DNA, 96 bp, Homo sapiens
ctgtggccatggccaactggtaggaccagcaccccataccccgaagccaggtggtacaagctgcactccaagccaggcaagaaggagaaggaacgc

SEQ ID NO: 190087 - DNA, 100 bp, Homo sapiens
tcacacaagctaaagacgggccattttccagacctcatccaggcctccggtgtggctgtctctgatggtgtcatcaaggtgttcaacgacatgaaggtgc

SEQ ID NO: 190088 - DNA, 83 bp, Homo sapiens
tgttcccccaaatgtctgactctgactctcggactgagaaacgcaaggcgaggctgtgagtgtggtgggctttggcgtctttg

SEQ ID NO: 190089 - DNA, 80 bp, Homo sapiens
aggtggacgtgctggtgtctgagtggatggggacctgcctgctgaacccttaggagaaatcttgagagtggacagcaatt

SEQ ID NO: 190090 - DNA, 101 bp, Homo sapiens
ctcatcccaactacatctcaataattaatgaagatggaaatgagggaagaactgctaaagctttgaggtcattacaatttacgaatccaggaaggcaaact

SEQ ID NO: 190091 - DNA, 75 bp, Homo sapiens
ctgggtgcggactcggagaagccctcgagcatccccacaggagatgagtatgatgtatgtgccatttgtttggat

SEQ ID NO: 190092 - DNA, 97 bp, Homo sapiens
ttaatctgggccaaaaggaatgaccctagccagactcagggatcaaagagcaaacagattcagtggcctgcattgggacccagatggaaggatgctc

SEQ ID NO: 190093 - DNA, 75 bp, Homo sapiens
ggaagcacaggggccactcagagtcgcccgagaagagcaggggagagaagacagaagaggttggagaggtcaggg

SEQ ID NO: 190094 - DNA, 96 bp, Homo sapiens
acaaatgctccttctcctggagacgcaactcaaggagacatcaagcaggaaggggtcggtgcatttcgagaggggccgccctaccagcgccggggt

SEQ ID NO: 190095 - DNA, 112 bp, Homo sapiens
gagctgtgcagccgcgaggaggcgcgggaggtgttcgagaacgaccccgagacggagccttcacgtaaatgggtccagtcatgcctcccagtaagaagccagaaagctcagg

SEQ ID NO: 190096 - DNA, 98 bp, Homo sapiens
gcccgcgggtggtataaaatggcggatttcgaagagttgaggaattcagacctaccttcagtcaacaaagccaattattgacttatatgaagaaatgg

SEQ ID NO: 190097 - DNA, 100 bp, Homo sapiens
caattccgtttagcagctgttgggccaactacacagaccttactccccttagaacaggtgtgatgaatgcagactctgctaccattttggctgtttggat

SEQ ID NO: 190098 - DNA, 100 bp, Homo sapiens
tttcgcaggaattggagcccaggccagttctctgagcctatcattagggctaaaggaaatgtgagttcttctcccagatcttctgatttagtcaaattag

SEQ ID NO: 190099 - DNA, 75 bp, Homo sapiens
ccttgtgctcgttgtcgccgcggtcctgctgttgaccagtatgatgtctgtgccatttgcctggatgaatatgag

SEQ ID NO: 190100 - DNA, 75 bp, Homo sapiens
agccccggaggcagagcggctgccatgacaaatttacatgtattggagaccagaccagaagcccttctgaattaa

SEQ ID NO: 190101 - DNA, 100 bp, Homo sapiens
gaccactgcagcctgcggacgaggccgggacttggccgagcggatcctaataaggggaaaatgaccaagatcactccatggatgaaatgacagctgtggt

SEQ ID NO: 190102 - DNA, 90 bp, Homo sapiens
ggaacgtggtgtggccgtcgaggtccgtgtgcagaggaatgagctcagtgaccacttggatgctatggactccaacctggataacctgca

SEQ ID NO: 190103 - DNA, 134 bp, Homo sapiens
ctcagctgcagagcaggctggagcccaagccccagccccctgtggctgaggctacaccccggagccaggagggtattgttgcagcatctggcagtgagactgaggatgaggacagcatggacattcccttggac

SEQ ID NO: 190104 - DNA, 100 bp, Homo sapiens
acgcccagcagctggatgtccagctgccaattcatcaatttgagaatgaaatccggcccaactccaccgtgcagtgggaagaagtgtgccggccctgggt

SEQ ID NO: 190105 - DNA, 98 bp, Homo sapiens
caaggatctactctgaagatccctgtggtagagagaaaaatcctggatctgtatgctttgagcaaggactcagtggcatttgaggatgtggctataaa

SEQ ID NO: 190106 - DNA, 75 bp, Homo sapiens
gactttgggaggcttcagttttccgaggtggagtgcagcaacaaagacctccattctggggtgtacgggggctcg

SEQ ID NO: 190107 - DNA, 83 bp, Homo sapiens
gccttccaccccacgcagccctcccacgtcgcaggaacgtcacagtggcctcgagcaggagcccccggtgccttatcgcccag

SEQ ID NO: 190108 - DNA, 100 bp, Homo sapiens
tgcaaaagaaggtggcactggccaagaagctcctggcaaaactgcgctttctggctgaggaggggttatggttttgtgaaattcacagatgaactggaac

SEQ ID NO: 190109 - DNA, 100 bp, Homo sapiens
cgggacagcggcgagacgcgcgtgtgtgagcgcgccggaccaagcgggcccagaagcgggtgctggagaatctggtaaaagcaccattgtgaagcagatg

SEQ ID NO: 190110 - DNA, 101 bp, Homo sapiens
atggtgtgctttaagagccctgcagaaaaaagagaaaaggaacagttccgtaagctctttattggtggcttaagctttgaaaccacagaagaaagtttgag

SEQ ID NO: 190111 - DNA, 90 bp, Homo sapiens
catggagtcgggcaagatggcgcctcccaagaacgctccgagagatgccttgatggtggagttaccttaggaatggtgcttttatgtgaa

SEQ ID NO: 190112 - DNA, 101 bp, Homo sapiens
agatcaagccgcctcctgccaaggaaacagtagatgctttggagtctgcaatgaagaatggcctgtggggtcacgctctgctacttgcaagtaagatggac

SEQ ID NO: 190113 - DNA, 101 bp, Homo sapiens
cttgatgtctactgttttgaagcgttcgatcttttaacatcacatcacatgctgacagcacaagaaggatcttctccatactgtcttcaagaatggcaagg

SEQ ID NO: 190114 - DNA, 74 bp, Homo sapiens
ttagacagaaagctggaagttgaaatggtggaggcttccattctggtggcaaccggggtcgtggtcggggagga

SEQ ID NO: 190115 - DNA, 90 bp, Homo sapiens
ggataagtagctttagcgatcgggagacagccgggcgctgcaagaaatcctctgcggacaaaatgcaacagttaaacgccgcacaccagg

SEQ ID NO: 190116 - DNA, 51 bp, Homo sapiens
tgtccctgtgggacacaatgcccccaaggctctggatcagtatcattatac

SEQ ID NO: 190117 - DNA, 100 bp, Homo sapiens
ctagaagtcccttctgctaggacaacgaggttccacaaatcaacaagacttttcttcagggaaaagtgaagatttgggaacagttcaggagaagtccacc

SEQ ID NO: 190118 - DNA, 49 bp, Homo sapiens
ccggccgtcagcagcatgcagggtgacaatccttacccttccaaggagg

SEQ ID NO: 190119 - DNA, 100 bp, Homo sapiens
agtcactccagctccacgggcagacacctgcacagagttgctgaacctgtttgcatgagttgctcctgacggccctttaggatacttccatgtctgtagg

SEQ ID NO: 190120 - DNA, 104 bp, Homo sapiens
gctggttcccgtcatcttcgggagccgtggaggtggggctcctgtacgaagagggtgttcgcaaggcccagagcagcgactccagcaagaggactttctccgtg

SEQ ID NO: 190121 - DNA, 98 bp, Homo sapiens
tcatcatgatggacttggagctgccgccgccgggactcccgtcccagcagtttgaaggaagaaagtactgtgaacatgactttcagatgctctttgcc

SEQ ID NO: 190122 - DNA, 83 bp, Homo sapiens
cgccgagccgtctcctgcagcggcccccgccgggtgattgaattactcagatatgaagatcatcatctaggttttgtgtaaaa

SEQ ID NO: 190123 - DNA, 129 bp, Homo sapiens
gcggctgagggctgtggctttggcagctgcgacggggagcggcggagaccgcctctgctcccgcctgggctctctgcgcccttgttgccaccatctggttccctgtgtgcgcccaccgtgagaccacca

SEQ ID NO: 190124 - DNA, 82 bp, Homo sapiens
ggccgtcctgaacctgttatcacctggagacaccttacaccaactggttgcacgttttcaaaaaatacctaatggtgaaaat

SEQ ID NO: 190125 - DNA, 96 bp, Homo sapiens
gaaatgtacaccctcgagagcggcctgattgggaagaaactcttagcgcaatgattattcttggagaaaccctgtctgtttactgtaaccttttgc

SEQ ID NO: 190126 - DNA, 75 bp, Homo sapiens
ggcggcggctgcggtcgaagaaggggacgccgacaagccgctgccatggcccagacactgcagatggagatcccg

SEQ ID NO: 190127 - DNA, 50 bp, Homo sapiens
gcaaacagccacctcgatttggcaattgaaggaacagactaaaaatcgtg

SEQ ID NO: 190128 - DNA, 83 bp, Homo sapiens
cgagcctgccacactactgccttccctgcaagaagtttttgcaagcatctcttccacaggggatgttcgtctaaccccagaag

SEQ ID NO: 190129 - DNA, 90 bp, Homo sapiens
cagagacagcagctaatgtgaaagagctcgtgcagaatttactggcagtgacatcagtgtctggcccaggtgagcacctccgaaatgccc

SEQ ID NO: 190130 - DNA, 74 bp, Homo sapiens
aaggggtggagctgggaacattcctcataaagcgagtcgtcaaggagttgcagcacattggagatatatttcca

SEQ ID NO: 190131 - DNA, 50 bp, Homo sapiens
agcggcctggggacccagcaaggtgttcagtggaatcacacttacaaaat

SEQ ID NO: 190132 - DNA, 108 bp, Homo sapiens
aaacagtacagattccaattacttcagaaaacagtactgtgggtttgtctaatacagattcacaatgacatcctttcaagaagtcccattgcagacttccaactttgc

SEQ ID NO: 190133 - DNA, 89 bp, Homo sapiens
gaggggtttgtactatcctcggtgctgtggtgcagagctagttcctctccagctcagccgcgtagcactggcctgtgtttgtggaggtg

SEQ ID NO: 190134 - DNA, 100 bp, Homo sapiens
agaacagaatgctaaggaagctgtggcaaggaggacatgtatgcccaggactctatagagctactaacaacatctggtatccagtttaaaaaacatgagg

SEQ ID NO: 190135 - DNA, 96 bp, Homo sapiens
ccatcccccatgccgccagaggcccccaaccagggggcagctggcattttatgctatgtgggagcctatgtcttcatcacttatgatgactatgac

SEQ ID NO: 190136 - DNA, 100 bp, Homo sapiens
caccacgctctcagtcagcctggggaatgagacccaaactgctcatacagaattacgcatttccacttctaatggaagagagaagggcacagttacctaa

SEQ ID NO: 190137 - DNA, 97 bp, Homo sapiens
aaagagctagacgccttcaagctaaaatgatgactaatttggttatggccaaggaccgcttacaacttctagggtcttgctacgtacgttgcccagg

SEQ ID NO: 190138 - DNA, 96 bp, Homo sapiens
tcatttctggggtcaacagtccagatggggttatcttatgatgaggcttttgctatggctaatgatcccttggaaggcttccatgaagtaaacctt

SEQ ID NO: 190139 - DNA, 80 bp, Homo sapiens
ttgtagctcgctcaagatggcggcgcagccaccccgcgggatacgcctcagcgcgccctggaagaaagcgggacttttcc

SEQ ID NO: 190140 - DNA, 98 bp, Homo sapiens
acgacaagaagctcatgagcagcctgcccaacttctgcgggatcttcaaccacctcgagcggctgctggacgaagtgtatgtggtagaagaccaaaga

SEQ ID NO: 190141 - DNA, 82 bp, Homo sapiens
acaaggtgtctgcaggaccaacctctcctctggatgctctaggttggtcatcattttatccaagcttgactgtggtacagca

SEQ ID NO: 190142 - DNA, 75 bp, Homo sapiens
gagtctccgccgctgcgggcccgctccgacgcggaagtgctgaagctgctgaaagatggcagaagaagtggtggt

SEQ ID NO: 190143 - DNA, 144 bp, Homo sapiens
tgggagtctccgcgtcccgctcgctgggagagaggtacctctccttttccctctccctttccctaaggatacaagaccctcctgaaaggaatttccgggaagttcaatagtggtgagttggtggccattatgggtccttccggg

SEQ ID NO: 190144 - DNA, 83 bp, Homo sapiens
gaaaagggacgtaggaagaagggcaggacctgggcggaggccgccaagacgacaatgcagatcttcgtgaagactctgactgg

SEQ ID NO: 190145 - DNA, 83 bp, Homo sapiens
cgccgcgggacctctccgggccatgggatgaaacaggcgcctatttaatcgacagagaccccacctactttgggcctgtgctg

SEQ ID NO: 190146 - DNA, 90 bp, Homo sapiens
caagagggtgttcgactgctagagccgagcgaagctctctgctttctatccgtcaagatgataaagtcgtgtgcccgagaaccaaagaag

SEQ ID NO: 190147 - DNA, 98 bp, Homo sapiens
gtttgagaaacctggatctgcgatctgtttgtggttgaaatcacaaagattagacacctttttagataggtgttcttcagcaccactgacaacacggt

SEQ ID NO: 190148 - DNA, 100 bp, Homo sapiens
ctggggcttaggcgggccgcccagaagcacagctttcctcgaatgttgcaccagaattccttgtgtggatatcagatccggatggaatctcgagcttgtg

SEQ ID NO: 190149 - DNA, 111 bp, Homo sapiens
aagaggattggaggtgtcagtgttaaaggaacctctacaacgaaggtgaagccacggaagataagcggttaagaagattgtctaccaaatatagaacagaaaagatatatc

SEQ ID NO: 190150 - DNA, 106 bp, Homo sapiens
gactcagcggtagcaacctcgccccttgcaacaaaggcagactgagcgccagagaggacgtttccaactcaaacacttctcagaacttctggatgagttttcccag

SEQ ID NO: 190151 - DNA, 75 bp, Homo sapiens
gtaccagcagggcgttggctatgtgcccatcacaggtgacattcaggtaggaatgatggacaaaaagggacagct

SEQ ID NO: 190152 - DNA, 75 bp, Homo sapiens
ttggataaaccatgtatcacattgattgtagagcctggagatttgaaaaagagaattgaatctctgatagacaga

SEQ ID NO: 190153 - DNA, 74 bp, Homo sapiens
atgaaagaattccgagagaacgagcacctcctcgaagtcatcccagtgtcactctgtgagactgctgggtcaga

SEQ ID NO: 190154 - DNA, 95 bp, Homo sapiens
ccagttggaagcccgggaccgtttaaaaaactggatcaaaatacttgctggatggtggactcagagaccaataaaaataaactgcttgaacatcc

SEQ ID NO: 190155 - DNA, 75 bp, Homo sapiens
tgccccgctacgagctggctttaatcctgaaagccatgcagcggtcgagcaaaagatgtgataataccagcaaag

SEQ ID NO: 190156 - DNA, 101 bp, Homo sapiens
gcaaagttgtgttggatcattttgaaaaacagtattccaaagaactcggagatgcctggaatacagtaaggtactgtgagaatagagatgtttcgaaatat

SEQ ID NO: 190157 - DNA, 100 bp, Homo sapiens
aacaaaatttgtctgcaaacctggagccagaaacattaccgtcatattccacccattactaagcttggatttacactgggcaacgtggttggaatgtatc

SEQ ID NO: 190158 - DNA, 100 bp, Homo sapiens
aagatcgtagccagacccccaggtggaattgagactggatctatcacagaaatgtttggagaattccgaactgggaagacccagatctgtcatacgctag

SEQ ID NO: 190159 - DNA, 100 bp, Homo sapiens
ggtggaatatgccaaggaaaaactggagagcttcatcaaaaatagtgatagctttgataagccacagttgtaagggatcttgtggctgtcaggatggcag

SEQ ID NO: 190160 - DNA, 50 bp, Homo sapiens
cctccctcagcttccgccccaaaagaacgtactcaggaaaagtggggatt

SEQ ID NO: 190161 - DNA, 83 bp, Homo sapiens
tggaggaggacgacagctacgcatttgacattgtgcagcaaagaaatggttatggagaagcccagtccgctgcttgtagggcg

SEQ ID NO: 190162 - DNA, 60 bp, Homo sapiens
cactgcaccttcaatggcattgagtaggactggggttttaaggggtgtggcaggaggttt

SEQ ID NO: 190163 - DNA, 100 bp, Homo sapiens
caacaagtactgcgccgactgcgaggccaaagaaaaatggctactggacaggatcgagtggttgctctcgtggacatggactgtttttttgttcaagtgg

SEQ ID NO: 190164 - DNA, 50 bp, Homo sapiens
ggcggacgagcacgaacacacggcgacctgggagacccagccagtaccgc

SEQ ID NO: 190165 - DNA, 100 bp, Homo sapiens
gctcgccgcccgcccgcccgacggagacgtgcaccaattccagctggacatcactgtgaaaatgggacgggataaagtccgagaaatgtttatgaagaat

SEQ ID NO: 190166 - DNA, 75 bp, Homo sapiens
aggaaatagtggcaggtgacagtctgcatgtgcagttttcagcttttcatgcaacacccaacacttataagcgga

SEQ ID NO: 190167 - DNA, 100 bp, Homo sapiens
gcagcgccgtgtggcacgacacaaaaatcaggcatgtagaagtccaggtgtttggtgatcaccatggcaatgctgtgtacttgtttgaaagagactgtag

SEQ ID NO: 190168 - DNA, 95 bp, Homo sapiens
cgtccctccctctcaaccacaataacaggcggagggtcggcgtaggtggctgagaacaacctgtgcagccagtatgaggagaaggtgcgcccctg

SEQ ID NO: 190169 - DNA, 92 bp, Homo sapiens
actccttcggcagtccacccaccgccgccgcctcccagtgtctccagaacgctatagctatggcacctccagctcttcaaagaggacagagg

SEQ ID NO: 190170 - DNA, 75 bp, Homo sapiens
agaagatcaaagctgcctttgctgaattacacaactgtaacaaatgtggcaattattttggatctatcacctgtc

SEQ ID NO: 190171 - DNA, 96 bp, Homo sapiens
accacatctgctgtgaagaacctgcagcagctagcccaagatgcggacctggccttgctgcagagatggacagagacgtatgtgcgttggtctcct

SEQ ID NO: 190172 - DNA, 100 bp, Homo sapiens
aaaccaccggcacagagcaagaataaatactgactttgagtaacggccttgagggcttatttcaaaacctttgtccctcagttccaggaggcagcatttg

SEQ ID NO: 190173 - DNA, 83 bp, Homo sapiens
ctggcgtggacacacaagcaccccaataacctcaagagcactacaaacaccactggtttcccgaaaagccgtccaagggctcc

SEQ ID NO: 190174 - DNA, 75 bp, Homo sapiens
cgcgcagcgctgcagtgaattttccccccaaactgcaataagccgccttccaagaatgagtccctggaacgccag

SEQ ID NO: 190175 - DNA, 75 bp, Homo sapiens
taccagatcaacgtcctccgggaccggagtcagaaccctccgcagagtaaagataaaaatgaatgccatttccca

SEQ ID NO: 190176 - DNA, 99 bp, Homo sapiens
gctcggtgcggctctcggactctgctcctcactcaccgcgtggacacgatcggttgcacactgggccacagaggatccagcaaggatgaagaaatggag

SEQ ID NO: 190177 - DNA, 96 bp, Homo sapiens
ggatcacagccttctctaaagaagtattcctctccaaagagctgcaggccttcaacagccttattagggcgccctgcgtccggcagaggaggcgag

SEQ ID NO: 190178 - DNA, 83 bp, Homo sapiens
cgagtgcgggcgcgggcgcgggcgctcccggcgagccacgcttccacagcgcggcacctgtacctccggggtggcgctggggt

SEQ ID NO: 190179 - DNA, 75 bp, Homo sapiens
aacagctggatcttgctcacactctttcaagagaagcttccttgagcatgcaagcggcaagatgtcctacagatg

SEQ ID NO: 190180 - DNA, 97 bp, Homo sapiens
ttcatcatggaggactacctgcagggttgtcgagctgctctgcagagctgcctgagaactggacagacacgcgggagacgctgctggaggggatgct

SEQ ID NO: 190181 - DNA, 100 bp, Homo sapiens
ctcattcacatacgtcaaggaaattgagacagccgctcaggaagcaatcttgcatgcgtctggaaatggcacaaccaaggactactgcatgctttataac

SEQ ID NO: 190182 - DNA, 75 bp, Homo sapiens
ggatctggaggagcagttgtctgatgaagagaaggtctagtgacggagcccgcgcgcggcgccaccatgcggcag

SEQ ID NO: 190183 - DNA, 75 bp, Homo sapiens
ctaaacaccattggccactatgaggtgccacacattgaagcacttctgaaaagaaagctatcagaacaagaagaa

SEQ ID NO: 190184 - DNA, 100 bp, Homo sapiens
tcaaagacagctttcacagtttgcgggactcagtcccatcactccaaggagagaagtgtggcccagagttgctcagaattggagcagagcctgagacgta

SEQ ID NO: 190185 - DNA, 74 bp, Homo sapiens
ctcaactaagaccaagtcctcgctggactgctcagggtgccagacctcatcgtgattgtgtccaggggggggcg

SEQ ID NO: 190186 - DNA, 97 bp, Homo sapiens
tgcaacggaaggaagatagttcgagagaagaaaattttagaagttcatattgacaaaggcatgctcctggccatcctggagaagtgtggggccatcc

SEQ ID NO: 190187 - DNA, 76 bp, Homo sapiens
ggaacccctccaagcactacggttcatagtggcgtcatgcacgcagactcctgcaagttcccctaagttcttagag

SEQ ID NO: 190188 - DNA, 75 bp, Homo sapiens
attttctttccctgcaccaactagcagtctcaaaccatgaattatgtgggacagctggctgggcaggtgattgtc

SEQ ID NO: 190189 - DNA, 82 bp, Homo sapiens
gcgcccctccgagctggggttggacgctgccagtttgcacagcagcagtcttcccgaggctgctgtccatgacactgagtcc

SEQ ID NO: 190190 - DNA, 50 bp, Homo sapiens
tcctggccaccgactcctacaaggctctctatgagaacatgctggtggag

SEQ ID NO: 190191 - DNA, 100 bp, Homo sapiens
tagtgtgaatgagaatggcaatatcacggttattcaggctcaccgaggtgaccagtcatatttttccagcttaaatcttactataaggggagaacttcgg

SEQ ID NO: 190192 - DNA, 100 bp, Homo sapiens
caggtgtaagcgcagaaagcaggcgaacccgcggcgcaataacgtgctgggtcctgccaccaccatggttccagtggttgagctttgctgaagcccaggc

SEQ ID NO: 190193 - DNA, 98 bp, Homo sapiens
ctggtccagcttcccttcctcaaataaggaaattgacacctggcgtggaagaaatgcagagtaacgtggaagtggtccacacctaccgccagcacatt

SEQ ID NO: 190194 - DNA, 100 bp, Homo sapiens
gattgccgattccatggagtttggattcctgcccaatccagtagctgttaaaccctcactccatcactcgatgagataatatgagatttctacttcggag

SEQ ID NO: 190195 - DNA, 83 bp, Homo sapiens
cgcggattcgccgaggcaccgaggcactcagaggagtccacaggcactgaggacccaggccttccaggtccttctccagcccc

SEQ ID NO: 190196 - DNA, 103 bp, Homo sapiens
cctggagcctcagttggaagcagccgatccagcctgcggagcctgtggggcaggggtgagcccctccagactccgaataggagatcaagagtttgattcattg

SEQ ID NO: 190197 - DNA, 80 bp, Homo sapiens
ggattcgccgaggcaccgaggcactcagaggagctggagaagaagcaggcgctccctccattccagccacagatcacaga

SEQ ID NO: 190198 - DNA, 100 bp, Homo sapiens
gttaattaaccaaaaagttccccagtcagtgaccaactcagtgccaaaaccaggtttgtaaaagaatggacttggtctgccagagaatgttgaatcaggg

SEQ ID NO: 190199 - DNA, 100 bp, Homo sapiens
atgaagttagattaccaccaccacctgatataaaaaaagaaattagtgaaggagatgaagtagagtacgacaggacagaaaccgcgatcaacaacctcaa

SEQ ID NO: 190200 - DNA, 100 bp, Homo sapiens
agatccttcaggtgctggaaaggaatgaggagttacagagggccgagaaggacaggatcaggtgtcatggagaaactccagctgggcccagagattctgc

SEQ ID NO: 190201 - DNA, 100 bp, Homo sapiens
caaggacagggcaggagaagaggaacctgcaaaggtttctagagaggaaggatctccccagctgtcttcagcaaggccgtctcctgcccagagaaatagt

SEQ ID NO: 190202 - DNA, 75 bp, Homo sapiens
tgtctccgatccagaggatctgcaagtacccgctcctccttaaggtgctggagaatctggtaaaagcaccattgt

SEQ ID NO: 190203 - DNA, 100 bp, Homo sapiens
ctccgggcgcagaggcctacatcccacagagatacccagacaacaggatcgtctcgtccaagcgtcagcctcgagtttgaccagcagcaggggtcggtgt

SEQ ID NO: 190204 - DNA, 85 bp, Homo sapiens
tttttatttggcagatctgaagggaaagctccagatactaccaccaccaaagatccctgacaagcagttagatgaaagggaacac

SEQ ID NO: 190205 - DNA, 88 bp, Homo sapiens
gaaagaatgcaggcaatgctgaaaactgctgagagaagatggagtttcactcttgtctcccaggctggagtacaatggcatgatctca

SEQ ID NO: 190206 - DNA, 82 bp, Homo sapiens
ccggcccgccgtgacccacggccgcctccggagcccgacgcgctccctgtgctgtcaggaatctacaggacttggctcgtat

SEQ ID NO: 190207 - DNA, 82 bp, Homo sapiens
acagaacaacaaggtgttgatgccgccggacgcaattctgtggtgttcttggtcacacatttatggagtttctgaagggcag

SEQ ID NO: 190208 - DNA, 82 bp, Homo sapiens
actgcaaagacaaggctaaggacttcatgcccgccagcaaaggtctcctctgagcctccggcctccataagacccaaaacag

SEQ ID NO: 190209 - DNA, 100 bp, Homo sapiens
gagggactcaccggcctctccatcggccccgacttccagaagggcctgaaggatggaactatcttatgcacatcttgctgacgtcttgactgtgaacccg

SEQ ID NO: 190210 - DNA, 100 bp, Homo sapiens
ccttcggcagtccacccaccgccgccgcctcccagggactttgaacatgtcggggatcgccctcagcagactcgcccaggagaggaaagcatggaggaaa

SEQ ID NO: 190211 - DNA, 100 bp, Homo sapiens
ggcctctctcctgatacagcaggcgctcaccatgttccctggaggtatggcccgggtccactgccttccccgacttcaccaaccccacagccctggcctg

SEQ ID NO: 190212 - DNA, 97 bp, Homo sapiens
tcatccacagcctagatgaagtcaatttcatacagaaccttgtgttttacattgaagctgcatataaaactgctatcagtgtgcgtgtgaccaccat

SEQ ID NO: 190213 - DNA, 100 bp, Homo sapiens
gccaaaatgacgaacacaaagggaaagaggagaggcacccgatatatgttctctaggccttttagaaaacatgggtgcatctgagaaagacatcgtgcac

SEQ ID NO: 190214 - DNA, 100 bp, Homo sapiens
gtagcgcagaggcggcggtggcgagaggtgcggcgaaggaggcagaggcacttatgcttgtcaggtaagtaaggaggtctctgtaccatggctcgtacaa

SEQ ID NO: 190215 - DNA, 98 bp, Homo sapiens
gggctccagcaacagctaaaatctcaaagacaagaggagacactgagggaacaaacacttctggatgcatccctggtcttggaagaacagggacattg

SEQ ID NO: 190216 - DNA, 98 bp, Homo sapiens
caagaatcgatacataaatatcgttgcctactcaatgatgaggcacggcggctcattgctgatttggggagcacatctattactaatcttggttttag

SEQ ID NO: 190217 - DNA, 80 bp, Homo sapiens
cccaggtgtaagcgcagaaagcaggcgaacccgcggcgcaataacgcactgaagtcagtggatctgcatgaatctggaaa

SEQ ID NO: 190218 - DNA, 83 bp, Homo sapiens
tgagccctgtcctcagtgatgctggcggagccgggatggactgcgaggagcccagacacaagagtccttagccaggatggagg

SEQ ID NO: 190219 - DNA, 100 bp, Homo sapiens
gagagcgagctgagtggttgtgtggtcgcgtctcggaaaccggtagcgcttgcagcatgctgctgatgcaaggaatcccctgggctcccgtccactccac

SEQ ID NO: 190220 - DNA, 83 bp, Homo sapiens
gccactttgcatcccacgccggaggaggcattaacgagaccgggttaaacccatccagagtaatggctgcggccttacccagg

SEQ ID NO: 190221 - DNA, 100 bp, Homo sapiens
gaagatggcggctgggttcaaatttctgctaacagtactcggcctgctcgctggtataccaaacttggattctttcctgaccctagaccttttcctctgc

SEQ ID NO: 190222 - DNA, 90 bp, Homo sapiens
agaaggaatccaccttcttacgctatggcagcaaggaatagtgtctggagccggtccagctgaaggaagggtgagcagagagtgcaagca

SEQ ID NO: 190223 - DNA, 75 bp, Homo sapiens
gagttcaaggaggccttccagctgtttgaccgaacaggggcaacttggtagtacccagagccaaggacttgtacc

SEQ ID NO: 190224 - DNA, 101 bp, Homo sapiens
gcggtccgtcggtcggtcagtcagtcccttcgcgctcctgagccgccggcgcgccgggcgccccggcaccaatgttgttatgaattattcagagatcgagt

SEQ ID NO: 190225 - DNA, 100 bp, Homo sapiens
cggttagaacatcttcaggagaaaactcttaaagaatgcagcagcttggggattgtggtccatcaggagtctgtgtgtgccacctatggaagtggcttaa

SEQ ID NO: 190226 - DNA, 87 bp, Homo sapiens
aagcaattctgccccatcctggagaggccgctcatcagctacaccctacaggccctggagagcgcccgggggctggagaaggccagg

SEQ ID NO: 190227 - DNA, 83 bp, Homo sapiens
caaggagctaaagcagcgtgcgttcagccctggggttggctcaaaaacagaagttgctgagtgcaaggagaaattcgccgcct

SEQ ID NO: 190228 - DNA, 100 bp, Homo sapiens
gcgggtggagtcgcggagtagtcctcatggccgccccgccggagcccggtgagcccgaggagaggaagggaagatgaagggcttctccctgctggccgag

SEQ ID NO: 190229 - DNA, 100 bp, Homo sapiens
agggactgggagaagaagatgaagagattgatcaattcaatgatgatacatttgggtcaggtgcagttgagtcctgtgtatggaaactcacatgagtcag

SEQ ID NO: 190230 - DNA, 98 bp, Homo sapiens
tcctgctgtcacagaagctaatggacatatccattttgataatgtcagtgtggtatctctacaggtcccaaaggcaagcagttagaaggaactgaatg

SEQ ID NO: 190231 - DNA, 75 bp, Homo sapiens
ctttaaccctgatggagcatctcatgggggcccccaggactctgaccgggtgttcattgaggatgtcagcaggga

SEQ ID NO: 190232 - DNA, 99 bp, Homo sapiens
ggcggagggggagactgtgccgtggagggcctcgccatgtcctgctgcccgggtaaccaggagccgacaacaactcctgacgcaatggttcagcctttt

SEQ ID NO: 190233 - DNA, 101 bp, Homo sapiens
ggcggctgcgggctgagcggcgagtttccgatttaaagctgagctgcgaggaaaatggcggcgggagggggtggcccgattctacaggtcacggaaaaagc

SEQ ID NO: 190234 - DNA, 119 bp, Homo sapiens
ggcggcgcgatggagcagcgaaaacgtggttgtagagttccgtgactcccaggttatcaatactctggctgaccatcatcatcgtgggactgactttggtggaagtccttggttacatg

SEQ ID NO: 190235 - DNA, 100 bp, Homo sapiens
agctctgcgccgatctatgcacgcagatgctggagaagtccccttatgaccaggttggagctgaaggagtgcccaggctgcggatggaggaaggacgtgc

SEQ ID NO: 190236 - DNA, 98 bp, Homo sapiens
gctgtatgtgatcgggggcagcaacaacgatgccggatacaggagggacgtgcaccagagctgcggtgcaaccctgggcagtttgcgtgtcgcagcgg

SEQ ID NO: 190237 - DNA, 95 bp, Homo sapiens
ataaaataaatccatcagaatgacaccttctcaggttgcctttgaaataagaggaactcttttaccagatcccaagcaggtctgttccagcctct

SEQ ID NO: 190238 - DNA, 98 bp, Homo sapiens
gcagccatggccctccacagcccgcagtatctgacgaagcaagtggaacttctacggcagatgaacgaacaacatgcaaaggtttatgaacaattaga

SEQ ID NO: 190239 - DNA, 83 bp, Homo sapiens
cgagcagcgccagcggccgagcgggcggcttcctggcctgggcgctccggtggcggcggagggtcggcactcttcaccctccc

SEQ ID NO: 190240 - DNA, 83 bp, Homo sapiens
cctcaggagcggaacaacgtcggcgagcgggacaggtgctctagttcacagctataggggaacaggtggaatatttgaagttt

SEQ ID NO: 190241 - DNA, 90 bp, Homo sapiens
gcttctcgctcctcctgcccgcagcccgggccacctccaggagggaaggccactgcagaacaaattagacttgcacagatgatttcggac

SEQ ID NO: 190242 - DNA, 100 bp, Homo sapiens
gaaaaggaagttttctggaatggggatgccagatgatatgaacttcagtgatgtaaagcaaatccatcaaacagacactggcagtactttagacacaaca

SEQ ID NO: 190243 - DNA, 50 bp, Homo sapiens
ccggacaaagaaacgagcgctcgattaaaaggagcccaagccccatctca

SEQ ID NO: 190244 - DNA, 82 bp, Homo sapiens
gccatcaccgacctcatcagtgagctgtccctgctggaggagcgcttccggggggcaatggcggcttcctgtgttctactgc

SEQ ID NO: 190245 - DNA, 100 bp, Homo sapiens
caaggaggaaattgtgatctgcgatcgagcctcggtcaaggaggatgaatttcacccattcatcgaggcacttcttccacatgtccgtgcaattgcctat

SEQ ID NO: 190246 - DNA, 100 bp, Homo sapiens
cctccccgcggggcgcgcagctcgcgggtctttggacaccaccggtcctgagtccgcgccctgtgtactgtgttgcatctgacagagagacttttccttg

SEQ ID NO: 190247 - DNA, 128 bp, Homo sapiens
agaagcatgtgtcttccccagctctgcagccacatactatccgtttgttcaggaaccaccagtgacagaatgggaaagggctccttcaagtatgcctgggtcttggataaactgaaagctgagcgtga

SEQ ID NO: 190248 - DNA, 100 bp, Homo sapiens
gactcctgcaggagcactggacacaatgtaccagtatcacacaggtctctaattaacagaagatggcaaagcccagccacagcagctatgtccttcagca

SEQ ID NO: 190249 - DNA, 90 bp, Homo sapiens
tggtcggtgctggcggcggcgcttgggctctattcgggaactggagcctctcctctgtcacagtgacaatccatctcagctcatctggac

SEQ ID NO: 190250 - DNA, 100 bp, Homo sapiens
accgggcgccccacgggccgaagccgtacgagctcaactggaggcagtcctgtgcggaaatctgaagaaaaaacagatacaaagcgaactgtgattaaaa

SEQ ID NO: 190251 - DNA, 74 bp, Homo sapiens
ttagaaaatcataacaagcggttctctaccctgtaaaggacagagcgggatgccaccagcttgtccaaagggaa

SEQ ID NO: 190252 - DNA, 50 bp, Homo sapiens
aggtgaagttgctgctgttgggacctgaaggagaagaaggagaaggtgga

SEQ ID NO: 190253 - DNA, 83 bp, Homo sapiens
gccggcgcctcctcggagtccttggggacggagcagcgcgtcgtggggcgagcggcagaggtggggctggtgtccgagcactt

SEQ ID NO: 190254 - DNA, 83 bp, Homo sapiens
aacccgaagcacctcccggcgccgggacgcttcttctacaatgcagatcttcgtgaagactctgactggtaagaccatcaccc

SEQ ID NO: 190255 - DNA, 96 bp, Homo sapiens
gacgcctttcagaaagtggctgacatggccaccaacacacgtgagcagtcattatggcgaaccttggctgctggatgctggttctctttgtggcca

SEQ ID NO: 190256 - DNA, 94 bp, Homo sapiens
ccgctccgcagccccgggcacggcggaggcagcggagccctgggccatcggtgtggacactgccagcggctgcagccgacttggaatgacctgg

SEQ ID NO: 190257 - DNA, 82 bp, Homo sapiens
gcagctgggaaatttcactggcctagtgggaggtcctgactttgcccactgtctgctgcatgtagagcgcatgaagtacagg

SEQ ID NO: 190258 - DNA, 50 bp, Homo sapiens
agggggtgcagcttcgagagcccaagacagagtctcgctctgttgcccag

SEQ ID NO: 190259 - DNA, 104 bp, Homo sapiens
ggctccgcagcaagatggcggacgagaaggacagggaagacaaagaaacagccttggtataatagcacgttagcatcaagacgaaaacgacttactgctcattt

SEQ ID NO: 190260 - DNA, 87 bp, Homo sapiens
tatcaaaggctaccagcggcgatggttcgtgctgagcaacgggctcctgagctactacaggagacatgggggacaaaggacagaaag

SEQ ID NO: 190261 - DNA, 100 bp, Homo sapiens
ttctggccttcgaactgctgggaacctgaaaacactgactatgcttcctgaaatgactcatgttcaaacacaacgaccctggatgatgtttctcctgcaa

SEQ ID NO: 190262 - DNA, 82 bp, Homo sapiens
ccctcatccagctgatgcccttcttcgttgtaggaagaatgatgatggagacacagttgttgtggttgagaaagatcatttc

SEQ ID NO: 190263 - DNA, 74 bp, Homo sapiens
tcaagctcatattttgaagtgtttacggtgctgttccctcgtcacaccaatgccagtgctcgagacaacaccat

SEQ ID NO: 190264 - DNA, 83 bp, Homo sapiens
cagatgaacccatcaaagagtgcgaacctgatgttgttgttaaacgacaagaagctttagcagctgctcgactgaaaatgcaa

SEQ ID NO: 190265 - DNA, 83 bp, Homo sapiens
cgtctctggaggagtactggcaacagcggagctggagtttgttcagatcatcatcatcgtggtggtgatgatggtgatggtgg

SEQ ID NO: 190266 - DNA, 60 bp, Homo sapiens
aaccttcccagaaagtccaagctcgtgattggagctggagggagcatcactgggctgaag

SEQ ID NO: 190267 - DNA, 75 bp, Homo sapiens
atagatgaattggcagataaatttaaccggcttcttgaagattttctgcaagagtctgttatgttctgaacccac

SEQ ID NO: 190268 - DNA, 82 bp, Homo sapiens
ccctctccttttcgtttccggaaacatgcatcagtctccgagagttgaagaccatcttgcccctgatcaactttaaagtgag

SEQ ID NO: 190269 - DNA, 108 bp, Homo sapiens
cagatagcacaagaattttcaggctgcttggatctgacaggtgtggacactgcaagagacttgcacctgagtatgaagctgcagctaccagattaaaaggaatagtcc

SEQ ID NO: 190270 - DNA, 75 bp, Homo sapiens
gatctgtgggactggtttgaatccttccttgatgatgaagagccacccgaaacaatgaaatgtaatacattcata

SEQ ID NO: 190271 - DNA, 75 bp, Homo sapiens
agccacccgggagtttgaggaggttgtggaatatattaaaggaatctgtgaacctgaactagaagaaagagaatg

SEQ ID NO: 190272 - DNA, 82 bp, Homo sapiens
atgggggtccacactgcaatgtttttgtggaacatggactccctggaggaaaagcggaagcggcagcggtctgaacgcctgg

SEQ ID NO: 190273 - DNA, 100 bp, Homo sapiens
accagccggctgggctcggtattccccttcctgctagtcctggtggatctgcagtacgaaggatcacagaagtgaggccaagatgcccatgtcaccagag

SEQ ID NO: 190274 - DNA, 80 bp, Homo sapiens
cggcacaccctacgttaccgtgctcaagatgtacggagcgcaagaggacggcagcgtcggcgaaggtgacctgtcctgca

SEQ ID NO: 190275 - DNA, 97 bp, Homo sapiens
gcgatacgggagctcaaagtgtgccttctcgggctttaccgatttgttacaactcaagcaagggccagcagaaattctcttttgacagatataattg

SEQ ID NO: 190276 - DNA, 73 bp, Homo sapiens
ccgcgtccatactagcaccatgactgtagcaatattaccccagcctactgagcggggatctgatgagcttctt

SEQ ID NO: 190277 - DNA, 100 bp, Homo sapiens
aaggaccctgacctgcctgtcgtcgtggtggccaacaagcagcaggacgaggggcaggaatctctggaggaagagttggatgtgttggttttggatgatg

SEQ ID NO: 190278 - DNA, 90 bp, Homo sapiens
gggacgcacagagaccgtgaagattccaagttcaggagaactcgaccgatcgaaagctgctttgcgtcgcagttggagcagcacccccac

SEQ ID NO: 190279 - DNA, 75 bp, Homo sapiens
caagcagttgttgcacaggtaacagctacatctacatccaccactgggacaagccatcttgtaaaatgtgcggag

SEQ ID NO: 190280 - DNA, 75 bp, Homo sapiens
gggaagtgagaagcccaactaaagccccacatttgcagctcattgaaggaaaggctgatgtggtcatcaagttcc

SEQ ID NO: 190281 - DNA, 51 bp, Homo sapiens
atgaaactggaagacatcctggttttcctttggaatatggataaatacacc

SEQ ID NO: 190282 - DNA, 100 bp, Homo sapiens
aagacggcaggaggaagagagagagaggtttggcctgtcactgctcctcatcctcctgagccgtggtgaagacctacagagttcagaccctgctacagaa

SEQ ID NO: 190283 - DNA, 96 bp, Homo sapiens
cttggggccagcacccaggttgtcccaccagataaggagggttcctgcccccaggtgaacattaactttccccagctcggcctctgtcgggaccag

SEQ ID NO: 190284 - DNA, 99 bp, Homo sapiens
ttatggtgttattaaggaacctatgggactacgcccaagcaaggtttgatgcctatttccaccagaagaggaagcttggggtgtgactgtggggaggac

SEQ ID NO: 190285 - DNA, 100 bp, Homo sapiens
gatgatcggtttcccagacggggtgatgactcaagacctggtccttggagaccattagtcaagccagaccagaaggaaccagagcctactaggcttcccc

SEQ ID NO: 190286 - DNA, 100 bp, Homo sapiens
gcccagccaccggggaggaccctgagggctcagacatcctggaaacttggctgtaacttcaaaagaagatttgattctttatttctggactgcatatata

SEQ ID NO: 190287 - DNA, 82 bp, Homo sapiens
gtcggcgcctcattcgggtggagctgagccggagacaggtggagaagaccaagctttcttcctccgaggagttccctcagac

SEQ ID NO: 190288 - DNA, 100 bp, Homo sapiens
agtggcacctgcgcgaagctggccaaagcctgcccagacggctcacctgtgcgggatggaacaaaagagctgaacaggagaaaatccttgtaagtgggag

SEQ ID NO: 190289 - DNA, 100 bp, Homo sapiens
tgtccacgtatcacagaggagaatctgtgttacacagagcaatggtgagactgctcctggtgccatgaacggagacgacacctttgcaaagagacccagg

SEQ ID NO: 190290 - DNA, 74 bp, Homo sapiens
cacgaggttggcgacgccgccccgccgggccccagatcagggcaccttctctttcatcatcgaaacctggagag

SEQ ID NO: 190291 - DNA, 100 bp, Homo sapiens
aaggaggtggccggcttcgttctgaaccgcctgcaatatgcaatcatcagcgaggcctggcggctagtggaggacccctcgtccagtcattgtggaaccc

SEQ ID NO: 190292 - DNA, 100 bp, Homo sapiens
gaggagcagaatttactacagcatgtgatttcagtcgaggggagctgcagcgggagtcagacttcatggccagtgtagacagcagctggatctcctgggg

SEQ ID NO: 190293 - DNA, 100 bp, Homo sapiens
gaagaattttagagacaacaatgtcaaaggaacgacacttcccaggtaaagattatagttcccaacagcacagcaggtctgataatagggaagggaggtg

SEQ ID NO: 190294 - DNA, 100 bp, Homo sapiens
agagcgccgaggaggctttcctgctggtggcaaccgcctacgagacactcaaggagtcagaaataccatcagaggaggggtactgtgactttaatagtag

SEQ ID NO: 190295 - DNA, 101 bp, Homo sapiens
tgaagtgctccgtcgcccttgcctccaggtcatttaggaaatcgtaaatcatgtgaagatgggactcttggtatttgtgcgcaatctgctgctagccctct

SEQ ID NO: 190296 - DNA, 109 bp, Homo sapiens
cacagctaagacaccgggacctcctggaagccaaaaatggacagtcattttgtttactcattcagccctgttgcaggtcccaataaactcttcataaggttgacagaag

SEQ ID NO: 190297 - DNA, 51 bp, Homo sapiens
aacttcaacagaatgtggcaaccagatgctgtacccctcaaggatttaaac

SEQ ID NO: 190298 - DNA, 83 bp, Homo sapiens
agcgcgcacttcacccgcagttgcgtctgcttctgcgctttgcctgggagaggccctggtggcctcgttcctggcgcccggag

SEQ ID NO: 190299 - DNA, 82 bp, Homo sapiens
tttgcgtgtgttgaaagtacaattctattgcacatcaatgatatcatcccaggttcctgttgcatgtaaatcatgtccttgt

SEQ ID NO: 190300 - DNA, 125 bp, Homo sapiens
gtggaaggcgacccggcggctgtggaggccacgctcagctcgccaggcggcgcaggaagttggtgagatggcaaagcagtatatagagaaaagtcttttggttccagaccatgtgatcacacgcc

SEQ ID NO: 190301 - DNA, 75 bp, Homo sapiens
tgcccagtcagcaaaggttcagccctccaaggaacttgtaatagctggcatcgttgagaatgaatggaaaagaac

SEQ ID NO: 190302 - DNA, 100 bp, Homo sapiens
accttgcagctactgctgctgttactgcagcagtaaaggctgacgtgatggcagacagggttccccgctgcccggtctgcaccggcgttgtgaagcccga

SEQ ID NO: 190303 - DNA, 87 bp, Homo sapiens
agtgccttgatcttggacttcctagcctccagaaccgtgagaagtaaatttctgtttatattgatgatgttaagaagttcaaaccgg

SEQ ID NO: 190304 - DNA, 51 bp, Homo sapiens
accatgccgttgtcgggcgcatgcaggtggggtttttcggctacgtcagct

SEQ ID NO: 190305 - DNA, 80 bp, Homo sapiens
agtgaggggacagcagtgtctggcacggaactgtggctgcaccatctgtcttcatcttcccgccatctgatgagcagttg

SEQ ID NO: 190306 - DNA, 102 bp, Homo sapiens
caaaggcggaaatattggggctaagtggaatgataagagcacttttgaagaaacgtgtccatactgtttccagctgttggttctggataactctcgagtgcg

SEQ ID NO: 190307 - DNA, 75 bp, Homo sapiens
cttcagtgcccttccttgataagctgtttaaaccaggtaacttgggtttttactcctgtaacaactgaaataaca

SEQ ID NO: 190308 - DNA, 82 bp, Homo sapiens
atgaatcctgcggcagaagccgagttcaacatcctcctggccaccgactcctacaaggaaataatgcaaaaggtgtcccaag

SEQ ID NO: 190309 - DNA, 100 bp, Homo sapiens
ccaaagcaactgtgaaggctcggccttcagtgctgtggtgttataagaaagagctggggtttagcaggtggagatacactacgccttgacacacttatag

SEQ ID NO: 190310 - DNA, 100 bp, Homo sapiens
ggaccctgctggcctcgtgcggcggcgaccggagaatccgcatctggggcacggaggaatttacatagtacatgacgaagttaaggataaagcttttgaa

SEQ ID NO: 190311 - DNA, 131 bp, Homo sapiens
gatcaccggcgtgccccaccatgtcagacgcagccgtagacaccagctccgaaatcaccaccaaggagtgcgccggtctcggggaaatgcccggttccttcgtgcccacggtcaccgcgatcacaaccagc

SEQ ID NO: 190312 - DNA, 75 bp, Homo sapiens
acagttcgctacacagcaatgcatcgagtataccaacagatgttttaaagattgtgtattctgtgggtgctcaga

SEQ ID NO: 190313 - DNA, 75 bp, Homo sapiens
ccctcacatccgatgcaccctttttgtcagattatcaggatgagggtttattcttcagtccaaggaagcaattca

SEQ ID NO: 190314 - DNA, 118 bp, Homo sapiens
gtcggctactgcgacgccaaatacgtctgggcagccacggccgggggcgtctttcagagcattacgaatgatatggaacctagcaaagctgttccactgaatgcatctaagcaagatg

SEQ ID NO: 190315 - DNA, 100 bp, Homo sapiens
ccgcagagtcttccactgtgggaaggaagccagcagacctgcagaacttggctcccgggacccacccaccatttataactttcaacagtgaagtcaaaac

SEQ ID NO: 190316 - DNA, 99 bp, Homo sapiens
aatgcctgaacccttcacagagggctttgtacagggaagtgatgttggagaactacaggaacctggaggctgtggctgctggaacccaatgtgaatatt

SEQ ID NO: 190317 - DNA, 100 bp, Homo sapiens
gcggcaccgcggtgcgcaagcgcaaccgtcggtgggtcggggatcggtcgcctgagaggtgctggagaatctggtaaaagcaccattgtgaagcagatga

SEQ ID NO: 190318 - DNA, 74 bp, Homo sapiens
gaggccaaggacggcgttctggatctcaaagcgctgttgcagctaattgcaaaatcccagttaacttcattgag

SEQ ID NO: 190319 - DNA, 87 bp, Homo sapiens
accttgcaagagccacatgacaaggaaagtaatggtccaacagacagttatgcagctatttcacaagtggatcgattgcagtcagag

SEQ ID NO: 190320 - DNA, 98 bp, Homo sapiens
tcgcccctcgttcccttgggaaccgcctgggaactccgccatgtcatccacttcgcccaacctccagtaagactttgaccccgacgcaggcttcagtg

SEQ ID NO: 190321 - DNA, 117 bp, Homo sapiens
cgcggtggcggcgctgccgcctgaagtgcgggcgcagctggcggagctggagctggagctctcggaggttgattatggaagattcccacaagagtaccacgtcagagacagcacctc

SEQ ID NO: 190322 - DNA, 75 bp, Homo sapiens
aaatatgttctttccagcaaatgctcgtacagtctttagaagaatgcaccaaaaaatatttacaccagcagctcc

SEQ ID NO: 190323 - DNA, 83 bp, Homo sapiens
atacctgtggaccaaaccaacaagaaggatttgatgccctggatccctttattcccatcctggtttccaactataacccaaag

SEQ ID NO: 190324 - DNA, 100 bp, Homo sapiens
tttgcgagcaggttctcggagggaccgggatagattggaaccaaccagatggctgtgtgtgccaaagcacagaacaaacctttctatgtggttgcagaaa

SEQ ID NO: 190325 - DNA, 82 bp, Homo sapiens
ggatcatgtctgcgagccaggattcccggacgtggcccagtggaacatcgggagcctccggaccatcctggacatggtggag

SEQ ID NO: 190326 - DNA, 51 bp, Homo sapiens
cccccaggccgctcccggggctcacgttggtcagcatcggctcctcttaca

SEQ ID NO: 190327 - DNA, 75 bp, Homo sapiens
ggctgaggtggcagcggcaggagagtccggccgcgacaggacggatagcagtgagattcacttcaaagtgaaaat

SEQ ID NO: 190328 - DNA, 90 bp, Homo sapiens
ctttgacttggtgttgaaagtgaaatgtcatgcctctgaaaatgaagacccttctcaggtgcagccagagagacactagcccactgatgg

SEQ ID NO: 190329 - DNA, 98 bp, Homo sapiens
cgcaacccccgcctgcaaaccgcagcccaggagctcctggaagatctccgcactctggagcataatgtatattaataaggcagcggaaagaagaaata

SEQ ID NO: 190330 - DNA, 74 bp, Homo sapiens
ggagtgatggagcccagatccgaatccaggtgctgctggtgagtagcagccggtacccagaccagtggattgtc

SEQ ID NO: 190331 - DNA, 80 bp, Homo sapiens
ttcgtgatcttcagaccccaggttctttggtcagaagttgagtagcaggggcctaggagggctcgaagccttcacagcga

SEQ ID NO: 190332 - DNA, 83 bp, Homo sapiens
gtgctcgcgctactctctctttctggcctggaggctatccagcatgcgtctgttactagagtggagagtctaccttcgtctca

SEQ ID NO: 190333 - DNA, 100 bp, Homo sapiens
ctctgaggactccttctatggctggacgcccgtgcactgggccgcgcatttcggcaaggctcgggttatgtatgattttgctgctgaacctggaaataat

SEQ ID NO: 190334 - DNA, 100 bp, Homo sapiens
atccattcctcccattcatgtgcctccaggttatatctcacaggttgtggcatcagctgacacttcaggtgcttgattttgtgcaggatccgtgctttgc

SEQ ID NO: 190335 - DNA, 100 bp, Homo sapiens
gggatcttcttcactgcctctggcatggatgagatggcccactgcgtgaccttggttcagctgtccatttcctgtgaccatctcattgacaaggacatcg

SEQ ID NO: 190336 - DNA, 74 bp, Homo sapiens
cagaactgggttctggactttgggcgtcccattgccatggctgcctgctgtttcccggggagatcatgaaacga

SEQ ID NO: 190337 - DNA, 75 bp, Homo sapiens
gcaggaaacattcaagaacctggcatctataggtttcattgtttgcggaacttttcaacgaaatgcttcaaagag

SEQ ID NO: 190338 - DNA, 88 bp, Homo sapiens
catagagccaatcacattttgcacaagggcagtcaccatgaaaggcttcagcaaccaggagggattgactgagatcttaacaacagca

SEQ ID NO: 190339 - DNA, 102 bp, Homo sapiens
tagatcatcctgatcccattattaaaagagaggtgaagaagctaagtctcagaaagataactcacccaagaggacacaaggataaacctgatacccatggca

SEQ ID NO: 190340 - DNA, 90 bp, Homo sapiens
agaggaccatgtgatgcacctgctccagcagatcaatgacaacagccattggaagcttaggaaaagcgaatgtaacgtgaaaaaatagag

SEQ ID NO: 190341 - DNA, 88 bp, Homo sapiens
tgaagactgtgtaaataatatcaggtattatccatgcagcagaagagaaggactggaaaactgcgtactcatacttctatgaggcatt

SEQ ID NO: 190342 - DNA, 90 bp, Homo sapiens
gccagagttgtgggccgccgtcggcagcaagaacagagagagaggtggacagatctgagagatactgagagcccccctccatgcgcctga

SEQ ID NO: 190343 - DNA, 74 bp, Homo sapiens
ctaccatggaccatcctgctggtcagcactgcggctgacacgatgaggcgagtggtacgacagagcaagtttcg

SEQ ID NO: 190344 - DNA, 90 bp, Homo sapiens
aacccaaagaaccatctcccaaacaggatgagtttattaaccacttaacctctcagaactgaacaaagacaacattgttcctggaacgcc

SEQ ID NO: 190345 - DNA, 51 bp, Homo sapiens
ttcacccagagcaaattgagacgtcccggtgatccgcaggggctggctgac

SEQ ID NO: 190346 - DNA, 75 bp, Homo sapiens
tacgccctcatggggaaaatctccccggtgactttcaggtgccagcgagatttcagattcctgtaaacctctaaa

SEQ ID NO: 190347 - DNA, 83 bp, Homo sapiens
gcttaaggtcttcagcggggcgctccaggaggcactcacagcctcgctcaaggagcacccccggggcaccctcctgtccgatg

SEQ ID NO: 190348 - DNA, 100 bp, Homo sapiens
gcaggagctctagccatctgtgtggagtctttcattttggatcaggatgatttggaaaatccaatgctggaaacagcttccaagttgctcttatcaggta

SEQ ID NO: 190349 - DNA, 90 bp, Homo sapiens
ttactggagcaagggaaggaaccgtggatggtggagagaaagatgtcacagggtcactgtgcagagatggggtctcactatgttgcccag

SEQ ID NO: 190350 - DNA, 100 bp, Homo sapiens
ccccgctcctcccgcctggccgccccggcccgccgtgacccacggccgcctccggagcccgacgcggttctgccggagacttccatttggcctcaatgtg

SEQ ID NO: 190351 - DNA, 99 bp, Homo sapiens
atcaacgtggagagcttgctggtagttaaaccagagagcaatgacaaagaaacagaagctgcgtatgaatcagatatccccgaggagctctgtggacac

SEQ ID NO: 190352 - DNA, 90 bp, Homo sapiens
cggaatctaaaaagccctcagtaccagagacagaagcagatggattcgtccttttagcaaaacaagctatcgatcagggaagatctccag

SEQ ID NO: 190353 - DNA, 50 bp, Homo sapiens
agtctttgctacgtacagcaaaagattgccacactgaaggtcaaaatatt

SEQ ID NO: 190354 - DNA, 74 bp, Homo sapiens
cttgctgtgggagacaggatcgttgcggtgccgtgagcgatgtggagatgcaggaacactatgatgagtttttt

SEQ ID NO: 190355 - DNA, 74 bp, Homo sapiens
gacccgggtgccgaggagcgggaagagttgctggggttttaaaatcaaagatgggaaaatcggagaaaattgcc

SEQ ID NO: 190356 - DNA, 97 bp, Homo sapiens
tctctcaagttttctctcacccatccatgggaagccctgctactgctggattagcgccagcattatctaaaaatgaagtgttatatgacggagaaaa

SEQ ID NO: 190357 - DNA, 100 bp, Homo sapiens
ctaacgccaaggtcagctgctggtacaagtacctccttttcagctacaacatcatcttctgggtacatggactatatcgcacaacaggtgctagttttga

SEQ ID NO: 190358 - DNA, 75 bp, Homo sapiens
accagcatggctacttcatattttggaaagcagtttttaagacaattcatgcgggagatggcaggggctggcaca

SEQ ID NO: 190359 - DNA, 100 bp, Homo sapiens
cgtctcttacgtctgcggaagtgcagctgcctcagttcttagcgcaggtttgcctgcaatgagatttcattctctacatttaaaggacatcctttctgag

SEQ ID NO: 190360 - DNA, 75 bp, Homo sapiens
gtacatggaagatctttattgcagagatcttcaaaccagtgcatttgacctacctcaggatatccaaaggagaac

SEQ ID NO: 190361 - DNA, 83 bp, Homo sapiens
ctacaagaaatcatgatgcatgtgatctgggccgcactggcatttgcagctattcaggcctcattgctacgatttcagagtac

SEQ ID NO: 190362 - DNA, 95 bp, Homo sapiens
tcagacgcagccgtagacaccagctccgaaatcaccaccaagacttcccaagtaagaagcggaagaggagccgctggaaccaagacacaatggaa

SEQ ID NO: 190363 - DNA, 75 bp, Homo sapiens
agcagcagccctgtccggcatctgtcttgagctcccagcaaggctgctgcactgaataatgattccagccagaat

SEQ ID NO: 190364 - DNA, 75 bp, Homo sapiens
tttacttcctcattttggcagaggatgtcctccagttgttttctgggaatggaatggcgactctttgttagctga

SEQ ID NO: 190365 - DNA, 74 bp, Homo sapiens
atggttcccagtttttcatctgcactgccaagactgagtggagtggattagaacaagatgacatgagaatttta

SEQ ID NO: 190366 - DNA, 100 bp, Homo sapiens
cggagccggagccgacgggcggtggccgcactgggaccccggaatcccgcgcgctgcccacgattcgcttctgagctccctgtttcgctgaggcctggag

SEQ ID NO: 190367 - DNA, 98 bp, Homo sapiens
caagggctctgtgtgcccaggatgcgccggcctccagctatcatggtgaacttacttcagattgtgcgggaccactgggttcatgttcttgtccctat

SEQ ID NO: 190368 - DNA, 100 bp, Homo sapiens
cggagcccctcggcggcgccaccatgtactcgggagccggccccggtcagccagagcagcctccccatgctgtcctcgccgtcaccgggccagcaggtgc

SEQ ID NO: 190369 - DNA, 90 bp, Homo sapiens
cactaataatgccacggcccaactcagttgcagtggctgacaagattttgaaaaagaaagaataccctctttatataaatcaaacctgcc

SEQ ID NO: 190370 - DNA, 74 bp, Homo sapiens
atgcagccatggaacccgggttacagcagtgagggggccacggctcaagaattatatccagatcgagagacaga

SEQ ID NO: 190371 - DNA, 123 bp, Homo sapiens
tggccacctctgtattcagcatagctattcctgttgatggtgatgaagacagtgtttcctgaggttataggcgggtgtttgaggagtacatgcgggttattagccagcggtacccagacatcc

SEQ ID NO: 190372 - DNA, 75 bp, Homo sapiens
ctagtcacagtgttgctgcaacatagagctgacattaactgtcaggaagatttcgatgtcgatcattttgtgtct

SEQ ID NO: 190373 - DNA, 51 bp, Homo sapiens
caaccagtcaccagcctcaggacaggccttggacaagattcgctatgagag

SEQ ID NO: 190374 - DNA, 98 bp, Homo sapiens
gcggacacctccacatcgccttttgccacctttccctttatttccggaggtgctggagaatctggtaaaagcaccattgtgaagcagatgaggatcct

SEQ ID NO: 190375 - DNA, 100 bp, Homo sapiens
ggacgaccggctctactgcgtctaccagagcatggtgctcttcttcttcgagaattacaccggggtccagggcgatgccagtccctccactccagaggag

SEQ ID NO: 190376 - DNA, 115 bp, Homo sapiens
agaactgttccttcagccaaagaaacaagccgtggaataggtgtatcaagtaatggtgcaaagcctgaaagacgagttgtactgctgtcacaggaaatggacgctggattacaag

SEQ ID NO: 190377 - DNA, 78 bp, Homo sapiens
gctttctggcgaggacctttcggagatttcttctataaaccaaaccagaatatgacagatacctagcatctagcaaaa

SEQ ID NO: 190378 - DNA, 90 bp, Homo sapiens
ttcgagagctaccgcgccagacaggggtgacagtccaaagattgacttggccggcagttcgctatctggcatcctggacaaagatctctc

SEQ ID NO: 190379 - DNA, 100 bp, Homo sapiens
cacccgcctcatccaaatgagacccttcctggagaaccgggcccagcagcactggggttgcacactgggccacagaggatccagcaaggatgaagaaatg

SEQ ID NO: 190380 - DNA, 80 bp, Homo sapiens
ggcgctgagcctgcagccggccctgccgcgctcctggttgcagccagaatgcatgacttcaggaggactgtgaaggaggt

SEQ ID NO: 190381 - DNA, 75 bp, Homo sapiens
cttaagatgatgtttgagaaaggtgaaccaactcaaactaagcgtgagtgcatctccatccacgttggccaggct

SEQ ID NO: 190382 - DNA, 75 bp, Homo sapiens
ggtgatgatggtgttggtgttgaggaaaatgatgaagttctggttgctggatttggtcgcaaaggtcatgctgtt

SEQ ID NO: 190383 - DNA, 100 bp, Homo sapiens
atagaagatgctaaatgtgacattgtcattgaaaaaccaacatatttcatgaaattagatgcaggtgcaactgccaaaagaactggcgtaagaggcaaca

SEQ ID NO: 190384 - DNA, 75 bp, Homo sapiens
ctcgagtatatatctgggatccacataatggagacattctgatggaatttggttggaggctggcagcgaagaaga

SEQ ID NO: 190385 - DNA, 80 bp, Homo sapiens
gaccgcatcgtgcccgtggacatctacatcccaggaggatacgaagcgttttcggcttcctgcccggagctgtgcagcaa

SEQ ID NO: 190386 - DNA, 51 bp, Homo sapiens
agctatatttgcccatgttattcaagggaagtgttcgccagttactacatg

SEQ ID NO: 190387 - DNA, 75 bp, Homo sapiens
cctgccaccgagccgggcccacctccccaccaaggaagaacaccttccaccatgaccacctcagcaagttcccac

SEQ ID NO: 190388 - DNA, 96 bp, Homo sapiens
ctgaactcaggacttggcaagctcattggtgggcagtattacttatgggaattgctctgatcatgctaatggctggatttattaagatatgcagtg

SEQ ID NO: 190389 - DNA, 100 bp, Homo sapiens
cccctctgctgcaccacttcatgctatgacatggtgcattacggccactccaaccagctgcgccaggcacgggccatgggtgactacctcatcgtaggcg

SEQ ID NO: 190390 - DNA, 100 bp, Homo sapiens
gttaatcaccatcactgccaccaacttctcagagggtgatgtcacccatttcatctgccaggctgctgtgcccaaggaacagatggagtcggataactgt

SEQ ID NO: 190391 - DNA, 100 bp, Homo sapiens
gcagcggcgttggcggcggcggcggcggcagcggcagcgcggcggggccgggtgctggagaatctggtaaaagcaccattgtgaagcagatgaggatcct

SEQ ID NO: 190392 - DNA, 100 bp, Homo sapiens
cagctggagcaaggcgacgaaccttggagagaggagaacgaacatcttctggacctttgtccaggagcttcctggacgatttaacaggtcctcaagcgag

SEQ ID NO: 190393 - DNA, 100 bp, Homo sapiens
aggcccatcttttcccagctgtacctggaagctgagcagcagcttgccgctctagaaggatggatagaatgacagaagatgctcttcgcttgaatctgtt

SEQ ID NO: 190394 - DNA, 101 bp, Homo sapiens
gaaggataagtcgaaggggaaggcgcctgaagaggacgaaggtgagccaccagctgggcagcatcatggacctcttcaccaccagcctggcccttgcgggc

SEQ ID NO: 190395 - DNA, 98 bp, Homo sapiens
gctccggctggtctgtggtgagggtgattctgggggtccacttgtctgtaatggtgtgcttcaaggtatcacatcatggggccctgagccatgtgccc

SEQ ID NO: 190396 - DNA, 75 bp, Homo sapiens
gaagctggggcggcaccggatcaccaagacggaggtgaggtttatacatggggcgacaatgatgagggacaactg

SEQ ID NO: 190397 - DNA, 98 bp, Homo sapiens
acatggacctgcctttctcctcctccccaagtcgcagtgccactgcaagcccacagcacgcttcctgggctgttacagtcaatggacttatcaacact

SEQ ID NO: 190398 - DNA, 100 bp, Homo sapiens
gaattcattatattggcttagtacacagaaattctgcagatgagtttctgaagaccacagcatgttgaaaaaaagaaaatgtactcatttttggctgcca

SEQ ID NO: 190399 - DNA, 82 bp, Homo sapiens
gaaggctggcaaaaatgcagtcgagaggaggtcgaacagatgaaagatgaatgggagggctgattttcgagagccgaatgca

SEQ ID NO: 190400 - DNA, 75 bp, Homo sapiens
tggaagatctccgcactctggagcataatgtaaatgcactcggtgatggaaagagagccactattctgaagaaca

SEQ ID NO: 190401 - DNA, 100 bp, Homo sapiens
gcttcagaaatcagaaaaacatttgggaggtgtctagcccagtggaccttctgaaggtgctgaatcgattctcctcggcccctctcattccacttccaac

SEQ ID NO: 190402 - DNA, 100 bp, Homo sapiens
tgtagaaactctagtcaaccataggaaagggacatcaaagacgtcagactggatggcgagtcccagtgaggcgatgtgggcagaggagctccgagccgcc

SEQ ID NO: 190403 - DNA, 100 bp, Homo sapiens
agaagggcaaggagaaggcggaagcacagcagatggagaaggacattcgtagtgatgtagaagaatcagactccagtgaggaggcggcggcggcccagga

SEQ ID NO: 190404 - DNA, 75 bp, Homo sapiens
attcgcagtggtcgcttcttctccttggtggtagaggacattgaatacctgaagttcgataaagggccgtggctc

SEQ ID NO: 190405 - DNA, 100 bp, Homo sapiens
gccagtgcggcatcacctcctccaagaccgtgctggtctttctcaacctcatcttctggggagagaagaacttttgttttcaaatatgaaataaaaataa

SEQ ID NO: 190406 - DNA, 100 bp, Homo sapiens
cgcggcgcttcgggagccagcgggtgctggtggagccggacgcgggcgcaggccctgggaggagcggggacactgaggacctctctccaaattggcctct

SEQ ID NO: 190407 - DNA, 51 bp, Homo sapiens
gccaatacgcatattcgagactttctacagtctattatcctcccagtccac

SEQ ID NO: 190408 - DNA, 97 bp, Homo sapiens
tggggcgatggatccgtttacggagttgcattaaaatcctcccctactgaaagaaacggaggccaggataactgtagagcagcaaatttcagagaag

SEQ ID NO: 190409 - DNA, 100 bp, Homo sapiens
attatgagagcagagcatgatcctcttaagggactcagcccaggagagtgttattactcgagatattcatcgtacatttcccgcacatgattactttaaa

SEQ ID NO: 190410 - DNA, 72 bp, Homo sapiens
atagtctatgtataaaagtaaatgggaagctatttcctttgcctaatgatatggaacctagcaaagctgttc

SEQ ID NO: 190411 - DNA, 74 bp, Homo sapiens
tcttccttcgtcatgaacgcccccctggcagggacattggttgtagaaggaacgcctcttattgatggaagaag

SEQ ID NO: 190412 - DNA, 95 bp, Homo sapiens
ctgtcattgcagtcagcattggatttctggcttctgtaactggagcgatgattaccagtgaggaaaatagcagctgaatactatgacaacctccc

SEQ ID NO: 190413 - DNA, 100 bp, Homo sapiens
ggctggattggacaagcaggcaaagctgagataacgaaggaggcccaacttcattcaataaggagcctgacggatttatcccagacggtagaacaaaagg

SEQ ID NO: 190414 - DNA, 75 bp, Homo sapiens
ttgcctgtgagaggaacaagcgtccctgatccagaaggtgagttattcccagaacctgtgtcttttggccaagtg

SEQ ID NO: 190415 - DNA, 88 bp, Homo sapiens
acttaatacagcaagaaagaccatcaagtttaccagtgtatcagttcctatccctgtgattggactgagggacgaagaaaaggtgttc

SEQ ID NO: 190416 - DNA, 90 bp, Homo sapiens
cgtggacacacaagcaccccaataacctcaagacaatgcagatcttcgtgaagactctgactggtaagaccatcaccctcgaggttgagc

SEQ ID NO: 190417 - DNA, 109 bp, Homo sapiens
cgccctctcaaggctggttatttcaacttcacctcggcaacaattacttacctggcccaggaggatgggcccgttgtggaggaaatctctgacatcaaagaggagggga

SEQ ID NO: 190418 - DNA, 90 bp, Homo sapiens
ccggagcccaccaagttctgggaaggaactctcagactttgataaagatggtgcattgacactggatgagttttgtgctgcttttcatct

SEQ ID NO: 190419 - DNA, 88 bp, Homo sapiens
tggatagactgcacaaggtgaagactgtctgcagcaagaggttgacggatatattcagacgttacgacacggatcaggacggctggat

SEQ ID NO: 190420 - DNA, 100 bp, Homo sapiens
gccatttacagaacaaggagtaaggcgggcacggggattctctgccttcttaaaggggagcgtgtgctgtagacctgctgcttaatcgtgtccttcccgg

SEQ ID NO: 190421 - DNA, 137 bp, Homo sapiens
gattattgggaaggttcacgaaaagttcacgttgattgatggcatccgcgtggcaacaggctcctacagtaccttgcagaagccggctggacagctgaaggaagagtggtaggagtgacccagcctcgaagagtggc

SEQ ID NO: 190422 - DNA, 82 bp, Homo sapiens
gtggtttttcggatcatgtctggtggctccgcggattataacagagataaggtctcactacgttgcccaggctggcctcaaa

SEQ ID NO: 190423 - DNA, 50 bp, Homo sapiens
aatcgtgttcctgaatgaaagaagtcagataaaaatgaatgccatttccc

SEQ ID NO: 190424 - DNA, 98 bp, Homo sapiens
tgaatttcaagaacagtaaagttggaacacagcagagggtgtgtaataaaatacaggatgaagtcattgctgtttccgaaaaggtgattgtgaagctt

SEQ ID NO: 190425 - DNA, 82 bp, Homo sapiens
accggacccaggccctggatgggactgtctatgatgtcatgtttgtcagcacaggtgacttaagagattaaaattaatttgg

SEQ ID NO: 190426 - DNA, 80 bp, Homo sapiens
aaatgttgacctgacgaaattccacaaaacctcttctggaaacaacacttggagaccagaaagcttctttgacaaagtga

SEQ ID NO: 190427 - DNA, 87 bp, Homo sapiens
ttaaggaggcagaattacgattatgcagtgtatctactaacagtgttataccatgagtcttggcatcagaggctccttgaaatgcta

SEQ ID NO: 190428 - DNA, 51 bp, Homo sapiens
gcttgccagattgttctaccagacccagtaatctatgccagcaattatgac

SEQ ID NO: 190429 - DNA, 75 bp, Homo sapiens
gaaaagtcgcagcgagctggagccgccggaggtcactatcatatgacaaaggctttgccgcagttcatcttcctc

SEQ ID NO: 190430 - DNA, 100 bp, Homo sapiens
gactcggggtgattcacgccggggaccccaaggagattttctggcatccttaaatcttgtgtcaaggattggttataatataaccagaaaccatgacggc

SEQ ID NO: 190431 - DNA, 83 bp, Homo sapiens
cacatctggtgacttccgcaagctgatggttgccctggcaaagatgagatcgcctctgtcccagtctccttacagacactgaa

SEQ ID NO: 190432 - DNA, 75 bp, Homo sapiens
gtccagcccgaggcccaagccaaggccgccccgtccaagactatttgtctttgagctctgttctctcacacgtgt

SEQ ID NO: 190433 - DNA, 83 bp, Homo sapiens
agttgagcctgtgggacacttcggagtgcctggtgaagaatgtgatgggatcactagcatgtctgcggagagcggccctggga

SEQ ID NO: 190434 - DNA, 50 bp, Homo sapiens
ataataaatcaggtcaattggataagttaagtgggcagaccaacatccac

SEQ ID NO: 190435 - DNA, 89 bp, Homo sapiens
ttgtatttgactgagagaaacccactgaagacgtctgcgtgagaatagagaccaccgagttacagaatgtctgaaggggacagtgtggg

SEQ ID NO: 190436 - DNA, 100 bp, Homo sapiens
ggcggctatggcggcggaggaggaggaggtggactctgccgacaccggagagaggtaacatctgccggcacctgctgccccgggtccagtgccccgcctt

SEQ ID NO: 190437 - DNA, 60 bp, Homo sapiens
tgtggagtgttctgcacttacacaggatgagaacaagttgagcagtgccaacggccatga

SEQ ID NO: 190438 - DNA, 100 bp, Homo sapiens
gcgccctgcggggctgtccaacgccttccagctccggctcccgctgcctgcaccatgtccgccagaggtctgtccacgttctctgtgggttcattgccgg

SEQ ID NO: 190439 - DNA, 100 bp, Homo sapiens
gtcaaaacaaataagttatgctatgaggatgacaaactctggagtaattggagccaagaaatgagtataggaaaatatatgcagatgatgaacattctta

SEQ ID NO: 190440 - DNA, 90 bp, Homo sapiens
ggtgcctatgtgaaactgctttctaaaacaccagaactcaacctggaagctgaatatggtgggcatgatcagatagatttgtatgacgat

SEQ ID NO: 190441 - DNA, 95 bp, Homo sapiens
cccggtgcttatgtctttggctaatcagcttaaaatggctcgtttcaccattgtggatgggaagatggggaaaggagtcagcttcaaagacgtgg

SEQ ID NO: 190442 - DNA, 82 bp, Homo sapiens
ttggcaactgcctatgcaacgctgggcatgaggagcggagcggagaatgccaagccagtaatgttaaagtagagactcagag

SEQ ID NO: 190443 - DNA, 59 bp, Homo sapiens
cgaattgtacttggatctccatgaaaaggggaagatagtgatgtactcagtataaatgc

SEQ ID NO: 190444 - DNA, 98 bp, Homo sapiens
ccggcccaaggccatctacctggacatcgatggacgcattcagaaggtttgtgggggagagaaaccttatttgtctccagacattctagaggagaagc

SEQ ID NO: 190445 - DNA, 83 bp, Homo sapiens
tggtcgcagggtcccatgaactgggacaggactatgagcatgtcacgaaactaatctggattcactccctctggttgataccc

SEQ ID NO: 190446 - DNA, 100 bp, Homo sapiens
ctggatcacccgacgctttgtgaaccaattaaataccaagtaccgggattccttgccccagttgaacaacgactatcgtctattccacaagatgagtaac

SEQ ID NO: 190447 - DNA, 94 bp, Homo sapiens
ccgggctaagcgtcggcaagttctgtagagaaactcgggcaacctttggcgtccgacctccgatcatgaacgggcccctgcacccgcggcccct

SEQ ID NO: 190448 - DNA, 99 bp, Homo sapiens
gtcacgctcaagttcattagcacatttaaatggcagttttgtttcctcttctaagagtttacagtaaggaattgaatgatctggcacgggaccctccag

SEQ ID NO: 190449 - DNA, 102 bp, Homo sapiens
agtggcaggaggaggaggaggggctccggctggtctgtggtgaggaagatcccagtgtctgagtgaactaacagtcctgctttcagccaccatttgcacaag

SEQ ID NO: 190450 - DNA, 83 bp, Homo sapiens
gctacgtgggcaaccgggcggccacgttcccgctgcagggtttccaggcctgaggtgcccgccctggccccaggagaatgaac

SEQ ID NO: 190451 - DNA, 82 bp, Homo sapiens
ttgatgctcgtgactgcccacatatatttcctgctctacgaaacgcactcttttgccttgaagcggcattggacagtggtgt

SEQ ID NO: 190452 - DNA, 88 bp, Homo sapiens
gcaggacgcgaacctctgctcacgcgtgttcttctgattagaagcccaggacccaggaaggagacacaggaaatttattcaaagtccc

SEQ ID NO: 190453 - DNA, 100 bp, Homo sapiens
acagctgactattttgccgtcggtaacagatccaactgtttcctggttataaggtcaaaatgcagatcttcgtgaaaacccttaccggcaagaccatcac

SEQ ID NO: 190454 - DNA, 75 bp, Homo sapiens
tacgggctgaatgtggagagggtcttccaggacgggagaccaaattttgaggaaggtggaccaacatcagtaggg

SEQ ID NO: 190455 - DNA, 98 bp, Homo sapiens
ttgattactcagtctctaaaaagctaaggccgtcaccgatgggttgtatatactactgaaatgaatggcaaaaacacattctgggatgtggatggaag

SEQ ID NO: 190456 - DNA, 87 bp, Homo sapiens
agctttccatcacggaagattcatcatgagtctccggaaagcagctatggcagagcccaaattatctgactccagaaaaagaacgcg

SEQ ID NO: 190457 - DNA, 98 bp, Homo sapiens
ctttctgttcaggccagaccctctgggagcttctcagccattttccacagatcagaggaatgtttgctgggggattgaaggagatggaacaggaagag

SEQ ID NO: 190458 - DNA, 51 bp, Homo sapiens
cggacccaaagtgccatgtctttaatgccagaagccaaggagtcctcagtg

SEQ ID NO: 190459 - DNA, 97 bp, Homo sapiens
atatttcaggcaccagaagttttgcagatgagaacaatgttttccatgaccctgttgatgaaatggtggagtcaatgaagaaagtagcagggatgga

SEQ ID NO: 190460 - DNA, 60 bp, Homo sapiens
gaaatctcaaagccatgtctcaggaaatggagttgttttttccttcaagtggaggttgtg

SEQ ID NO: 190461 - DNA, 100 bp, Homo sapiens
ctttactaacatggttacctgcagccaggtgcatttcaagtgaagtgtgctgatgaagtcctctataagggagctgagcacataacgacttacacgttca

SEQ ID NO: 190462 - DNA, 46 bp, Homo sapiens
tggaagatttcgatcagttagggctatggtgaactaaacggtaatg

SEQ ID NO: 190463 - DNA, 101 bp, Homo sapiens
ctcggaagagcgctcccaggagaaacaaactccacaggcaaatactggacggtgggcagtgactccgcggtcaccagcagcggcgacactcctgtggactt

SEQ ID NO: 190464 - DNA, 98 bp, Homo sapiens
tcacctagccccaggattacaaggaaaagcaccaggcaaaccaccatcacatctcattttgcaaagggatatctacgtctgcatgatctcctttgcgc

SEQ ID NO: 190465 - DNA, 80 bp, Homo sapiens
cactctttccgccctaatggaggtctccagtttcgaggctgggaggcggcagaatgcagccagaggagggcacaggctgg

SEQ ID NO: 190466 - DNA, 100 bp, Homo sapiens
ttccaacgcgaggagctcatcgggcagattagcgacatccgagtgcagaacctgcaaggaggagatgaccgccgggttctgctatggcacatggaacaag

SEQ ID NO: 190467 - DNA, 114 bp, Homo sapiens
gacctgaatgggcttgaccatctcacaactgctcgcgtgacgaccgcattcgtggcagcctgggagctcccatcgaccatggcagtcctactttgacttgatcttggtggatgc

SEQ ID NO: 190468 - DNA, 50 bp, Homo sapiens
gggcaactgcgagatgctggtctctttggactacgccatctccaagcccg

SEQ ID NO: 190469 - DNA, 90 bp, Homo sapiens
gtggtgaatcccctgtttgagaaaaggcctaagaattttggcattgcaggaggccactgtctgcagctcccgtgaagatgtccactccag

SEQ ID NO: 190470 - DNA, 75 bp, Homo sapiens
aattatgatctacctaccaatcgtgaaaactatattcacagattccgtcctatttcagtgttccgggaagccaat

SEQ ID NO: 190471 - DNA, 75 bp, Homo sapiens
gaactattccaagtcatgcattttctaatctgcccaatatttccagaatggaaatcctcattgacgattcaattt

SEQ ID NO: 190472 - DNA, 101 bp, Homo sapiens
tccgtccgacagcaggtcgtggtagaagaatacatgttcacttccagtgaacaagagcatgttcccaaactcaattttgggtcgcccacccttcactccaa

SEQ ID NO: 190473 - DNA, 98 bp, Homo sapiens
cacgttcatgtggccaccatgaccccgtcggcatcacaggggtaaccaaggagatggcgttgactttctgtcttggtttctgaatgctctgcactcag

SEQ ID NO: 190474 - DNA, 100 bp, Homo sapiens
ccatggttgccggctcccctctcaggacaacccagatgtgcaacaaagtgcgatggttccctcttacttgaaagtttaaaggatcacatatcaaccaccg

SEQ ID NO: 190475 - DNA, 100 bp, Homo sapiens
ccgaccttgagctccaggagttcgtctcttacgtctgcggaagtgcagctgcctcagttcttagcgcagcttgcctacatgtagcctgtgttgtacagca

SEQ ID NO: 190476 - DNA, 82 bp, Homo sapiens
aacaagtggctgcggccgtcgcccaggagtcatcggacgccagaatctgctgagcgggctttggacaccatgaactttgatg

SEQ ID NO: 190477 - DNA, 82 bp, Homo sapiens
gttgtctcgtcgtcatcgtcatcttcctgtcagtctgcagctactcagctccatcaagtatgatggtgaaggatgaatatgt

SEQ ID NO: 190478 - DNA, 95 bp, Homo sapiens
ccatctccattgcttctaggacctctcagaacacagtggacagtgacaagctgccactgcagagccccgccatggaagacacgccgttggtgata

SEQ ID NO: 190479 - DNA, 50 bp, Homo sapiens
gccaactcgagccaggctgcaaaaagtgctgaggtagggaccatctttgc

SEQ ID NO: 190480 - DNA, 74 bp, Homo sapiens
ccattctgggatcagtttcatgctttgaacttggcctactccagcatttacggcagctaccggaacttcgtggg

SEQ ID NO: 190481 - DNA, 75 bp, Homo sapiens
ccagcctcaggcctgcacggacggtgttggttgggatgtggacgagtgctcactagcagaaaaaacctgtgtgag

SEQ ID NO: 190482 - DNA, 90 bp, Homo sapiens
gaaacctgctcctccaaagccagagcccaagcctaaaaaggcccctgcaaagtggatgatgatgaatcagaaggagaagaattcacagtc

SEQ ID NO: 190483 - DNA, 90 bp, Homo sapiens
tcagcaaatgcagaatcagcccattgcaggaatgggataccaagtctcccaacaacagagacagagactctccaacatgtgccttctgac

SEQ ID NO: 190484 - DNA, 50 bp, Homo sapiens
tattgtggaagaagcatccattaaggaaaatgtttataggaggccttagc

SEQ ID NO: 190485 - DNA, 100 bp, Homo sapiens
ggaaaatcctacctgatgaacaagctagctgggaagaataaggtataagaagccagccctcgggaaccaccaggagccaggagcaccccggccccgcagg

SEQ ID NO: 190486 - DNA, 101 bp, Homo sapiens
gggcggggcgatggcgcgcgggaggggcggggccacgctgcgggcccgggccatggccgccgccgatgccgagtgttttacctcaatcatatatccacaca

SEQ ID NO: 190487 - DNA, 100 bp, Homo sapiens
actagagtcccaggtcaacctaaatgctgctcatggattctcccttattcaggtggacaacacaaaggttaccatgaaggaaatcttactgaaggcagtg

SEQ ID NO: 190488 - DNA, 75 bp, Homo sapiens
aaattccaggatctgggtgctgcttatgagatttttcaagaggtaaaaagtagtgatattgccaagaccttccgc

SEQ ID NO: 190489 - DNA, 90 bp, Homo sapiens
ctgcggacggcgctgcggtacatccaggtcgcctgcgaggccgctggccaggcctgagcctctgccaccatggccattgtgcagactctg

SEQ ID NO: 190490 - DNA, 100 bp, Homo sapiens
gagagaccttgactgaaatcctagaaacaccagccaccagtgaacagtgctacctgggcgatgccttccgctgtgccagctgcccctaccttgggatgcc

SEQ ID NO: 190491 - DNA, 101 bp, Homo sapiens
cgttgctgggcctcgccgctgctgccgtcgcggacttgtgtatgcggatacctgcttcagtaccatcaagttaaaagcagaagatgcttctggtagagagc

SEQ ID NO: 190492 - DNA, 54 bp, Homo sapiens
gactgaacaggatattcagagaagttctgaaactggtcaaagaactcatgcaag

SEQ ID NO: 190493 - DNA, 89 bp, Homo sapiens
gggcaggacgaggtgtcggcgcgggagcagcacttccacagccaagtgcgggagtccacgccccattgacaaaccttcagattctctca

SEQ ID NO: 190494 - DNA, 100 bp, Homo sapiens
tgcacttgaggcccagaatgcactgcacaatattaaaactttacctgggagttgtctcccagagctccgtggaatttcctttctctgctttaacgtactt

SEQ ID NO: 190495 - DNA, 90 bp, Homo sapiens
ccctcctgctgcctccccggagctcccgggccagtagaatgtgaaaacctttgcatcttctgatagtctagccaaggtccaagaagtagc

SEQ ID NO: 190496 - DNA, 80 bp, Homo sapiens
aaaagcaatttgcaatctttgcattaggatttttagactctgaggagcagttggagctaatccacattatggaaatggaa

SEQ ID NO: 190497 - DNA, 114 bp, Homo sapiens
atgtgaactgctggcaggctgccttccctgacccccagttacgcctggaatatgaaggcttccccgtcccggaatgaatctgaagtctgctgcagtaaaacacagaaggcttta

SEQ ID NO: 190498 - DNA, 73 bp, Homo sapiens
tcttggctgccgccctgctccacgcagtctgcttcagtgcagtgaaggccgactgcagcagtggcccagggca

SEQ ID NO: 190499 - DNA, 76 bp, Homo sapiens
cggtcgccgcgggatttggagctgcctagcctcgcggtcggctggagcattggatttgctaaaggagcttaagaat

SEQ ID NO: 190500 - DNA, 83 bp, Homo sapiens
aaccccggttgccgctttctcctctcctaaccgttaagtgcgctaagacaatgcagatcttcgtgaagactctgactggtaag

SEQ ID NO: 190501 - DNA, 83 bp, Homo sapiens
ggaagaagagttggatgaccagaaaattcaggtgactcctccagagtggatgaggatgaggatgacctggaggaagaacacat

SEQ ID NO: 190502 - DNA, 100 bp, Homo sapiens
gacggcctcagcaggcggggaagatgaaagggcacaacgtgtttgattgctctgctatcagataaagacctcactgtggccaacgtgggtgactcgcgcg

SEQ ID NO: 190503 - DNA, 87 bp, Homo sapiens
aggtgccaagaactatgaacaggcagttcgcatggctctgaaaaaggccgaaaaagaatttgaactgagaagcagttggtctgttcc

SEQ ID NO: 190504 - DNA, 100 bp, Homo sapiens
ataatttatgaagctccgttgactaccgtggagagatcataatttggggttcaagattccagacttggaatccagttgtgtgaccaaaaagttatctcca

SEQ ID NO: 190505 - DNA, 100 bp, Homo sapiens
ggggccccagcagcccccgaaggccctatcaggacatggagtatgaaagacggtacaagaaaattccccaggacacagagctggtttggagcctttcttt

SEQ ID NO: 190506 - DNA, 75 bp, Homo sapiens
ccaggatctcgggctcggaacgagactgcacgaatgttgtaccatctttgggtaggcagacttccctgacgacat

SEQ ID NO: 190507 - DNA, 100 bp, Homo sapiens
aacttcagctctgaaatagaagatcttgcaaggatccaaaggggctattctgaacatttcatctggcagtggcatgctccctgtcccactcttgaccatc

SEQ ID NO: 190508 - DNA, 100 bp, Homo sapiens
gcttgtggtgcggcctcaccatacaggaacagggcagacgttagcgtgagtgatcactctcaatcccgggtatggtctctctggcagtgatgtcctggat

SEQ ID NO: 190509 - DNA, 100 bp, Homo sapiens
tagaaatcatcacaaaggagtttattttaatgggcggaaccgtggacacggagatctataaggacaggcagaaattctcagaacaggttttcaaagtggc

SEQ ID NO: 190510 - DNA, 75 bp, Homo sapiens
aatcaagaagaaagtgaggaagttggaagatcagaacgagtatgaatcccgcagcaaactaaacttcaagcctct

SEQ ID NO: 190511 - DNA, 100 bp, Homo sapiens
cacatggctgaccacccctaaaagcacctggccccgctacagcaaaccagacggccgaagccctgcagcccacgctacagccggagatgcagctcgagca

SEQ ID NO: 190512 - DNA, 75 bp, Homo sapiens
tattgttggattgccaaatgttggcagatataatttctacagtagaatttaatcattctggagaattactagcaa

SEQ ID NO: 190513 - DNA, 87 bp, Homo sapiens
gggaggggggagcggcgttggaggccaccgtttccagtctgatcccccaggaaagcagctggaaaacaagagcatgtgaaggaagcg

SEQ ID NO: 190514 - DNA, 73 bp, Homo sapiens
cgagcaggagctgacggccgccaagaagcacggcaccaaaaacaagcgcgttcactgagacttttttgacgga

SEQ ID NO: 190515 - DNA, 50 bp, Homo sapiens
ttgtaaagaagttccaccagagtagaggttccagcaacagatagaaatgc

SEQ ID NO: 190516 - DNA, 100 bp, Homo sapiens
cggcgcccagcggtagccctccttgcgcctccgattcccagaaacattgctgaggctcttgtcagcaaaggtctagccacagtgatcagataccggcagg

SEQ ID NO: 190517 - DNA, 100 bp, Homo sapiens
ttcccattccctctacagtgggattgaggggcttgatgaatcgcccagcagaaatgctgccctcagtaggataatggcatcctccaggacaaatagcaag

SEQ ID NO: 190518 - DNA, 90 bp, Homo sapiens
aagaaaagggggcagaaccagagactggctctgctgtatctgcagcccaatgtcaagtcttggacagtaaagcaccaaaaccagaagaca

SEQ ID NO: 190519 - DNA, 75 bp, Homo sapiens
cccgaagctaagagcccccttcagtcgcagcctcactctagaacacggctctagataaggaggggcagattttct

SEQ ID NO: 190520 - DNA, 75 bp, Homo sapiens
gtccatacggcgttgttctggacaggtgatttggcttctgcacagttaggaggagcaccaaaccgatgggaggtt

SEQ ID NO: 190521 - DNA, 98 bp, Homo sapiens
agagagcaagcagggaaagagagcgccaggtgcttagcagactttgaaatactcgtgggatatgaagtggaggtgcctagagggttgaagataatgag

SEQ ID NO: 190522 - DNA, 98 bp, Homo sapiens
aagcaggaggaggtggcggcggcgggaagattctgcgggccaggcatcgacatccgcaacgactatcagcagctgaagcgcctggagaactgcacggt

SEQ ID NO: 190523 - DNA, 92 bp, Homo sapiens
cttcctggcctgggcgctccggtggcggcggaggatttttagactctgaggagcagttggagctaatccacattatggaaatggaaaccacc

SEQ ID NO: 190524 - DNA, 90 bp, Homo sapiens
attagctgctgtcatcaagccctttgccaccattccttcaaatgagtgtttacgaaaatggggttacagaagatgtgaagatatttgttg

SEQ ID NO: 190525 - DNA, 74 bp, Homo sapiens
ccgcagttcatcttcctccctgtgtactttccatttgccttcctggaagcatcagatggtgaaggagaaggaga

SEQ ID NO: 190526 - DNA, 51 bp, Homo sapiens
caatcaatcatatttcacaacgggctgacgcacgaggcacacaggaaggag

SEQ ID NO: 190527 - DNA, 82 bp, Homo sapiens
gagaggcccgcccaccagttcgcccgtccccctgccccgttcacaatgctctacagattctcccctgcccctggagaaggag

SEQ ID NO: 190528 - DNA, 87 bp, Homo sapiens
ggtgaaggtccggggcttgccctggtcttgctcggccgatgaagtgcagaggtttttttctggttatgatgtgattgctcaagccca

SEQ ID NO: 190529 - DNA, 101 bp, Homo sapiens
attttctccaaaagctgtgaccaaggctcaggccacagggtcaccacatacatcgcccacccatggaggcggccggccaatgcccatgccagtgcgctcca

SEQ ID NO: 190530 - DNA, 82 bp, Homo sapiens
ggcggggttcggcggcgggcgagtgactgcggccacgcctgaaaggcgactctcctgagccttcacgtaaatgggtccagtc

SEQ ID NO: 190531 - DNA, 75 bp, Homo sapiens
ctcgacagtacgcctacttctataaagtcatccagagagaaaaggaacagttccgtaagctctttattggtggct

SEQ ID NO: 190532 - DNA, 100 bp, Homo sapiens
ttggacagatgatgccagttaattactttgaatctcggggagtacagacagtgaggaaagtacagactctgaagaagaagatggagcaaagcaagacttg

SEQ ID NO: 190533 - DNA, 116 bp, Homo sapiens
tggcggatggccccaggtgtaagcgcagaaagcaggcgaacccgcggcgcaataacggtcaccgacgatgagggcgcacctgctgtcctggagcttccgatctctgttcggggacc

SEQ ID NO: 190534 - DNA, 100 bp, Homo sapiens
gagatctcgtgggtcgaaatcaagctccctgtgctgtcaggaatctacaggacttggctcgtatttacattcgacgcacacttagaaatttcataaatga

SEQ ID NO: 190535 - DNA, 100 bp, Homo sapiens
aggcggcagaacattgcttatgaatatctgtgccacttagaggaagccaaaagattacaccaggaagcaaggcggcagctgccaacctgtgtcctggaga

SEQ ID NO: 190536 - DNA, 75 bp, Homo sapiens
ggctggaccctgagccctgggacctctgaagtgaacactgcagggccatttgatttgggatgatgaaattgttgc

SEQ ID NO: 190537 - DNA, 75 bp, Homo sapiens
cgtacctggacaagcacatggaggctcagcgggccgaggagaagcttggttcccagagaactggtccctgcctgg

SEQ ID NO: 190538 - DNA, 98 bp, Homo sapiens
gggctggttctctccaggacatctaccaagggttccgagtctgaggaagacataaccttgtgcctgcctgcccacctctctctctggtcctgttcatc

SEQ ID NO: 190539 - DNA, 113 bp, Homo sapiens
tgcagaacattctgaaaatgtgcatatttcaggagtgtcaactgattcaaccctatgaaaagataaaggccaggggcttgcctgataatatatcttccgtgttgaacaaacta

SEQ ID NO: 190540 - DNA, 87 bp, Homo sapiens
gccagcgaagtattggtggagtgtgatagcctggtgccaggaatttactttgcaaaagatgccatctattcccacaaaaattgcccg

SEQ ID NO: 190541 - DNA, 100 bp, Homo sapiens
tttccgcgctcccgggaccatgtccgcgctggcggggcgagctggagcggcagctgctgcaggccaaccccatcctggaggccttcgggaacgccaagac

SEQ ID NO: 190542 - DNA, 88 bp, Homo sapiens
gattttgacaacttcatcagctgcttggtcaggctggacgccatgttccgtctcacagatttcaagcctggctactggattggtgtcc

SEQ ID NO: 190543 - DNA, 101 bp, Homo sapiens
gaaaccgctgaagttgaacaaaatggtggtctctttataatgcaacagttgggcaagaatatcaagtttgggcagcggtcacccaatgccattcccatgaa

SEQ ID NO: 190544 - DNA, 98 bp, Homo sapiens
gtgaagaagcctgtgcccaagctcatcgagaagtgctggaccgaggacgaagtggtcattacacctactctgagaatcgtgtggaaaaagacggcctg

SEQ ID NO: 190545 - DNA, 100 bp, Homo sapiens
tcctgggctcaagcgatcctcacctcggcctaccgagtagctgggactacaggcacgcgccactacactcggggaaagcgctctagcgagtgctgattta

SEQ ID NO: 190546 - DNA, 100 bp, Homo sapiens
gacggtggtggtgactgagcggagcccggtgacaggatgattaagatgttctacgaggagcatttgcacttggacgatgagatccgctacatcctggatg

SEQ ID NO: 190547 - DNA, 100 bp, Homo sapiens
tgggcttctctgaggcggcgagagatggtcaggtctggagctcgaccgggccagaggatgttaagcaagtttttggacagaccacaattcatcaacatat

SEQ ID NO: 190548 - DNA, 100 bp, Homo sapiens
tggagtgaagtgaatacagctatcaaaatgatcccaggtgtggtggctggaggtggccgaattgacaaacccatcttgaaggctggccgggcgtaccaca

SEQ ID NO: 190549 - DNA, 100 bp, Homo sapiens
gcgacctacggcaggaggacccaggaaagggacatctgctcctccaaggcagagcggctcccccctttcgatgtggaagatgtcaagtttgtgatcaact

SEQ ID NO: 190550 - DNA, 75 bp, Homo sapiens
cgggaatggaccgtaccctttttcaaaaggaactcatgatgtatacaagacctgcgagaggagtgcatcaagctg

SEQ ID NO: 190551 - DNA, 98 bp, Homo sapiens
tgaagagaagatgcccctgctgacactctacctgctcctcttctggctctcagctggccctctcctcctccatctccttgactgggtccggctccatg

SEQ ID NO: 190552 - DNA, 100 bp, Homo sapiens
ggcgtcctcagaatttatcctggttccctcatggacaaagcatttgatcccactaggagacaatggaccaggagctgcattatctattctagacaaattt

SEQ ID NO: 190553 - DNA, 100 bp, Homo sapiens
tggccaacaccaccggcacagtgacggcttcagaggaaaggagaatcacttgaacccaggaggaggaggttgtggtgagccgagattgcgccattgccct

SEQ ID NO: 190554 - DNA, 100 bp, Homo sapiens
taagaacaccaaccaaattgtcgccattaagaaaaaatcatttctaccagttcggagagatccggacgatcactgttgtgcagagacagcagtgtgcttt

SEQ ID NO: 190555 - DNA, 51 bp, Homo sapiens
gttctggtctcctggatcatgtggtgactccgataatataacgcatgtgtg

SEQ ID NO: 190556 - DNA, 83 bp, Homo sapiens
gtttcactacatctatagttgtgacctggatatcaacgtccagcttaagatagccgagactgtctgaagctgggcccacctgc

SEQ ID NO: 190557 - DNA, 97 bp, Homo sapiens
ggccgccccggcccgccgtgacccacggccgcctccggagcccgacgcggagggatttgttcgtgttgaccgagattatgtgctgaagtctgcagag

SEQ ID NO: 190558 - DNA, 82 bp, Homo sapiens
cgggtctggagtgcgtgggggaccggctgttggcggggcagctgcaatgactctccgcacggtattattgtcattgcaagca

SEQ ID NO: 190559 - DNA, 82 bp, Homo sapiens
gcccgctcacctgcgctgtgatgcctgcagagctgtggcttaccaggaggagatgttaaagtaacccatcttgcaggacgac

SEQ ID NO: 190560 - DNA, 101 bp, Homo sapiens
ctcaaagctgcacggcagtctgtttatgaggaatatattaaaggaatctgtgaacctgaactagaagaaagagaatgttaccccaaggacatgcactgcat

SEQ ID NO: 190561 - DNA, 90 bp, Homo sapiens
tgccgattgccagggtgctgaccgtgggagccgaccgagtttgtagttcagaaccagaaaatgttcaggctgacccagagaattatacca

SEQ ID NO: 190562 - DNA, 75 bp, Homo sapiens
gacaaatgcttgctgacctgggccagagctcttcccttacgcaagtcctggatgcctcatcccttagtttcaaca

SEQ ID NO: 190563 - DNA, 90 bp, Homo sapiens
gagggattctggcatcagggaggctttcagccggagaagcgagtttcagctgaaaaagtgtgagcgctactgggctgagccaggagagat

SEQ ID NO: 190564 - DNA, 83 bp, Homo sapiens
ctatcaagacctgtatccaggaaaaggaggagatgaccgccgggttctgctatggcacatggaacaagccatccactccaggg

SEQ ID NO: 190565 - DNA, 100 bp, Homo sapiens
gagggtgttggacccagaggttacccagcagaccatagagctgaaggaagagtgcaaagactttgtggacaccattcgatgaggactatctaaaccatct

SEQ ID NO: 190566 - DNA, 100 bp, Homo sapiens
ttctcatctcagatgatgatgaacagagaacctttcaagatgctgccaaatggtgtcacttaccacactggaacatatcaagaccggttaacaaagctac

SEQ ID NO: 190567 - DNA, 136 bp, Homo sapiens
gggcaataccagaggcggccctcggcgcgcgcaggggaccgagctggtcgccccaaccggacctgtcaccatggcccaccgatttccagccctcacccaggagcagaagaaggagctctcagaaattgcccagagc

SEQ ID NO: 190568 - DNA, 98 bp, Homo sapiens
accacagccgcgtcagtgttgcggcgcgggatggcagttttacagtctccgcacagttctacttgtccaattctgaaaaggaacgttatgaaaaagaa

SEQ ID NO: 190569 - DNA, 82 bp, Homo sapiens
tcaagaagaaagccagaggaagccattgcccactgctgccgcccagtgttgcaaaggaaaacgacaggcccttgccttcccg

SEQ ID NO: 190570 - DNA, 129 bp, Homo sapiens
ggtcttctccaagctcatgtctgtgtgcgtcatgttcaccaactgcatgcagggtgctgttggcccaaaggttgccctgaagccccccatccagaggaagcaaggagccggagctcccacagcacccta

SEQ ID NO: 190571 - DNA, 50 bp, Homo sapiens
ctcgggacggaggacgcgctagtcaattctgtggtgttcttggtcacaca

SEQ ID NO: 190572 - DNA, 98 bp, Homo sapiens
tcgctacgggagcagccagaagtggagactgctgcacggactctggaaccatgaacatatttgatcgaaagatcaactttgatgcgcttttaaaattt

SEQ ID NO: 190573 - DNA, 100 bp, Homo sapiens
taaaattaaaggcagaaaggcatccaaacctatatctgattcaagcatgattccacctttccactgatagactcaagttcccagaaccagattagaaaac

SEQ ID NO: 190574 - DNA, 74 bp, Homo sapiens
ggagtatcagttcagtatcgctacttcaaagggtactttttagaaccaaagcaagaaagtacgactatcagcag

SEQ ID NO: 190575 - DNA, 100 bp, Homo sapiens
tcttcaaggaaagagtcatggaaatagttgatgcagatgaggccttgctgcagcacacgtctgagcaggaggagatgcgggcgttcccgggacccctggc

SEQ ID NO: 190576 - DNA, 135 bp, Homo sapiens
ttttgtgtaagccagagcctgagctgaatgctgccatcccttctgctaatccagcaaagaccatgcagggcagtgagattgcagagggaatggcatacatcgagcggaagaactacattcaccgggacctgcgag

SEQ ID NO: 190577 - DNA, 89 bp, Homo sapiens
agagccctggcggatgatgtggtcgggtctgtgctggactgcttcagtctattatcctcccagtccacaacgctgaaccgtggctggac

SEQ ID NO: 190578 - DNA, 101 bp, Homo sapiens
cagagagagaggaataccgcaagagctggagtaccgccacctccccgctgggtggggagaggcccttcagctgttcaacggttttgtgtatagcatttgag

SEQ ID NO: 190579 - DNA, 73 bp, Homo sapiens
agaaagaagatagtggttgaagccccagcaaaggacccatcagccacaccccgtcttactgtgatgagtcgct

SEQ ID NO: 190580 - DNA, 100 bp, Homo sapiens
ctcagccccgtcctcttgtcctcctcagcctcggtgaacgggaaggagctctccaagctgtctcaggagcaaactctgcaggccctgcgctcctccaagg

SEQ ID NO: 190581 - DNA, 116 bp, Homo sapiens
atgcccccgtggccaccgcctccagcttgccaccaaagacctgcgactttgctcagcttccccgggcgctgcctggacaggcctgcctgcgtgctgggacatgtctggcctccaag

SEQ ID NO: 190582 - DNA, 100 bp, Homo sapiens
cgaaagtcccgtccggaccctccaagtggagaccctggtgatttgaagatattaaagctagaaattggaactagaaaatcaaaagaattcaaggcatctt

SEQ ID NO: 190583 - DNA, 83 bp, Homo sapiens
gattccaagtaactcttatttgttgtcgagatgtccacagaaggaggatttggtggtactagcagcagtgatgcccagcaaag

SEQ ID NO: 190584 - DNA, 88 bp, Homo sapiens
cgccgtggcagcctgaacggagtgtgcgacggattgggaggtaatctgtaagtcagatgctccaacaggggatgttcttcttgatgaa

SEQ ID NO: 190585 - DNA, 100 bp, Homo sapiens
acaaaacttcatcttctgtaggatctgatgaaaattctcttcattctcttggactgaacttaaatactgatagtgatttcctaaataaaaaccaagagct

SEQ ID NO: 190586 - DNA, 97 bp, Homo sapiens
cccgagttgctgcagcagcaggaggaggaccgcagcaaggtgggaagaggagtacacggtgcggatccagctgcaagaccgtgtaaatgagctccag

SEQ ID NO: 190587 - DNA, 75 bp, Homo sapiens
ttcgatctccgccctggggtcattgtcaggtgcacgttcatcgggaaccaggacacttacgagacccacctggag

SEQ ID NO: 190588 - DNA, 101 bp, Homo sapiens
agatcctattcagaggggccggtctctctaaatatgccccaggatcagttcgacagcttagacaagcatacacaatggggaattgacttcttggaaagata

SEQ ID NO: 190589 - DNA, 100 bp, Homo sapiens
atgcagctatcgtggacgtcactggccctggtggggattgacagccacgggaaggaacttgctactaccagcaccatgccctaccaatatccagcactga

SEQ ID NO: 190590 - DNA, 83 bp, Homo sapiens
ggcagccgcggatctcaccgccgctcaggccccgcagcgcctccaccccagagacccggaccaagttcacacaggacaatctg

SEQ ID NO: 190591 - DNA, 75 bp, Homo sapiens
gactggagtccctgatggaattatgcagtttattaagggggtgcactatagccatctggagctgagccctgggga

SEQ ID NO: 190592 - DNA, 80 bp, Homo sapiens
cgcagacccatcaccatgcccttttacttttgggcactgttgctggaatatttccggcttgaagtagaaaatgccatgat

SEQ ID NO: 190593 - DNA, 100 bp, Homo sapiens
cttcaacacctggacaccttgttagatggaacctacaagcagcttaccgtgacaatcagagctttgttgcagaacctgaaggaaaagatcgcccttttga

SEQ ID NO: 190594 - DNA, 83 bp, Homo sapiens
gccctgtaaagcagaagagatatataaagcatttgtgcattcagatgctgctaaacaagcaaagtgtttcatggatttcaaag

SEQ ID NO: 190595 - DNA, 122 bp, Homo sapiens
actggttggcccagctccttggggtttccggctgcagggcggtaaggatttcaacatgcctctgacaatctctagtatcttggcatatacagaagggctgcatggaaaatggctgttcacag

SEQ ID NO: 190596 - DNA, 100 bp, Homo sapiens
tccgtgaagaacttccagatcatccatggcaatgaccgacgctgtgcagagctgcaagtccgtatcactgaggctgtggccacagccactgagcagagag

SEQ ID NO: 190597 - DNA, 99 bp, Homo sapiens
gctgggtcccgccagacacgccgccgccgcaggtgagcatgggtttatgcgtcttaggcattattgtgatggcgagcaccaattctctgatgtggacct

SEQ ID NO: 190598 - DNA, 83 bp, Homo sapiens
gaagaatagagccataaagaaagcaaagcgcagaaatgttggatttgaagaacagcttgagaactatgacttcaccaaattcc

SEQ ID NO: 190599 - DNA, 50 bp, Homo sapiens
caatggtgaaactacatgttcagaaattaccttatcccatatcacacaac

SEQ ID NO: 190600 - DNA, 50 bp, Homo sapiens
cagatgtccaaagctactgggacattcagtcccctgaagctgaatatgta

SEQ ID NO: 190601 - DNA, 101 bp, Homo sapiens
gcgagccggcggcccggagtggggcggcggatataaaccacagtacttcaggatcccattatgaaaattcccagcggggacctgtgtcttctacaagtgat

SEQ ID NO: 190602 - DNA, 100 bp, Homo sapiens
gatcgtgagctccggcccgggcgagcgggtgcgtctgccgcagagtcggcacctgaaggacatggaggccaaagaactgccaactctgaaagataatgat

SEQ ID NO: 190603 - DNA, 88 bp, Homo sapiens
acaagccaatcccaggaggaaaaacgcatcccagccatcactcttccacctgctccttagagaagggaagatgagtgagtcgagctcg

SEQ ID NO: 190604 - DNA, 82 bp, Homo sapiens
caaacaagcaactgtgggcgacataaatacagatacacgataagaatactccatggaagtctttccttgtcattgtagatgg

SEQ ID NO: 190605 - DNA, 50 bp, Homo sapiens
gcaaacttgacactcaccctgaccgggaaaactgaggctgccatcaaaaa

SEQ ID NO: 190606 - DNA, 75 bp, Homo sapiens
ccaaccctatgaatggctttcatataaacagtgattcgcctttgccagtctcatctcgtgtctgctttgttaagt

SEQ ID NO: 190607 - DNA, 100 bp, Homo sapiens
tggtcttcgtgagttttctcaaatccgatatgatgctgtgaagagtaaaggcataattggaatatcatttggagaaagtgtcatggaagttctgcgtcca

SEQ ID NO: 190608 - DNA, 136 bp, Homo sapiens
gtggatgcaaacaaggttattcttaatcctgtaaatacgaatctttccaaaggagatgcccgcccagtggttcccagacacaggtaatcttgggcacctccaagagcaaagtttaggagaagagggaagtcatttg

SEQ ID NO: 190609 - DNA, 96 bp, Homo sapiens
ccggcacccagacaggtggcgacggcagaggactgagctgactgctgcccactttggaggaggcggtgggctccttcacaagaagactcaacagga

SEQ ID NO: 190610 - DNA, 100 bp, Homo sapiens
ccgggagaagcatgggaaggaggccgagccgggatctcaggtcctcgggggcggcggccacgccaaggacggccacagtacacgaacctggggctcctga

SEQ ID NO: 190611 - DNA, 97 bp, Homo sapiens
actcaaaggaacggagagaaccgggacccccctgcggggacccggaactgttccgccatggagtcatagttgcagctgactccagggctacagcggg

SEQ ID NO: 190612 - DNA, 83 bp, Homo sapiens
ctgaaggaagaatatggagagagccctttgcaggatgcagaagaagccaaaaacattctggacgtccttctatggccgcttca

SEQ ID NO: 190613 - DNA, 83 bp, Homo sapiens
gcctggagcaagaccgctgacaagatcgagggcttctaaaaagcttgtggtgaaggggggcaaaaaaaagaagcaagttctga

SEQ ID NO: 190614 - DNA, 75 bp, Homo sapiens
cggcgcccggcgagggcgcgcggctggtgtccgccccgcccgaaaggtaatgaatttgggcatcctgaatggtta

SEQ ID NO: 190615 - DNA, 117 bp, Homo sapiens
gcggggtgcgccggcagaggatccagtgttcaccatcctggccccggaagctgtgagccgtgagctttgaggcggtgggatgtgtcagcagaatgtctcctgcccccgagagcgacc

SEQ ID NO: 190616 - DNA, 75 bp, Homo sapiens
aaacattttgctctgagaactttcttccctgaggctatctgggagaatcagttctattacctctttggcttcctg

SEQ ID NO: 190617 - DNA, 100 bp, Homo sapiens
ggcctgcagcgctcccacccccggcggcggcacgatgccctttgacttcaggagagtgaagacatttccacctggacacctgaccatgtgcctgccctga

SEQ ID NO: 190618 - DNA, 98 bp, Homo sapiens
cttttggtctctccaggggttgtgtcaccagaagcagctgctaaggcagctgcaaaggcagccaaatacgtgggaagtggtggttcaagtggaggatg

SEQ ID NO: 190619 - DNA, 75 bp, Homo sapiens
agctacatcaagtgatgaaaaacacccacctgaaaatatcattgatgggaatgtttacccttgcggaagttgcat

SEQ ID NO: 190620 - DNA, 98 bp, Homo sapiens
tttttccagagcttctcagatgctctaatcgaccaggacccccaggcggcgttagagaaaatgcttggacagaagagatgagtactatttccactaag

SEQ ID NO: 190621 - DNA, 100 bp, Homo sapiens
ggagacctcaccatagctaatcttgggacatcagagggtcgcttcatgcaggatgaagtcattgctgtttccgaaaaggtgattgtgaagcttgaagacc

SEQ ID NO: 190622 - DNA, 90 bp, Homo sapiens
cctgagtacaacacggtggcaagcaagtttaatcagacctgctcacacttcagaatagagaagattctcattcagattgtggatgcctcg

SEQ ID NO: 190623 - DNA, 99 bp, Homo sapiens
gtctatgcttccttagaaggagccacctgacaactgggtggttcaacaaagtggccccaggaaaggtcactgacattgctgatgccatgattctgaaac

SEQ ID NO: 190624 - DNA, 73 bp, Homo sapiens
catcaacatggagaacaagaccacgtgggaacaggagtacagctgtgtagtaaagatgccttctggtgaattt

SEQ ID NO: 190625 - DNA, 75 bp, Homo sapiens
tgtgggccctgcacgagctcaaaggacactatgcaatcacccgaaagttactggggcttccggatgcagatgacg

SEQ ID NO: 190626 - DNA, 109 bp, Homo sapiens
ctcgcgcgccccggctcggtggatgctcccggcgcaccgctcccgtgtgcggcggcttcccaaggacaggttggtcaaagaaaaagtgatgtatgaaaaagaggcaaaa

SEQ ID NO: 190627 - DNA, 50 bp, Homo sapiens
gaagtttctaggaaaggccggacaccaggcagtacgccccgaggtgctcc

SEQ ID NO: 190628 - DNA, 100 bp, Homo sapiens
cttctgtgactgtgaaggtggtcatcatccagccccatgatgacggctcgccccgaaggataaccttttccacccaaaatacactggagaggatttaacc

SEQ ID NO: 190629 - DNA, 100 bp, Homo sapiens
cggagcgcagcacccggcggacaagcggcgggacgccaggacgcggcgagcaaggaacttccactacatcaccatcctccgagacccagtgtcccggtac

SEQ ID NO: 190630 - DNA, 83 bp, Homo sapiens
gtgcactccgcacctcggggacattattgcgcgtggaacggctgcttttggaaggaagccatcttcgacaagagcacagggaa

SEQ ID NO: 190631 - DNA, 90 bp, Homo sapiens
gctgggagccgcagatcagtccaagttgacggacaggaggcgaaatgtgcaaatgtttatggcttggaatccacgaagactccactaacc

SEQ ID NO: 190632 - DNA, 50 bp, Homo sapiens
tttgaaacacgttctgattaaccaagggtgttgacttcaaaatcaaaact

SEQ ID NO: 190633 - DNA, 80 bp, Homo sapiens
ttccagtgtgatcttacccttaaagcttgaaattggagcgatttgaaattccaatcaaggttcgattaagcccagagcca

SEQ ID NO: 190634 - DNA, 82 bp, Homo sapiens
ctttccctctcgcgtctctggctgcaggattatatctgtccaagatgcgagtctggttttatcgaggagcttccggaagaga

SEQ ID NO: 190635 - DNA, 100 bp, Homo sapiens
tgggagccgagagattaggcatcttggctggcttgcagaaaaggctgatgagccctgaaaacacactcctgcagcccagggaggaggaaggggtcaagta

SEQ ID NO: 190636 - DNA, 74 bp, Homo sapiens
aaaagagaagatgaagaaacccagcttgatatgttggatccagtggggatattgtgatgactcagtctccactc

SEQ ID NO: 190637 - DNA, 82 bp, Homo sapiens
ctgggggcgagctgagcacctgtagtcaatcacacgcagggagtaccctgacttctaccggaagctctacggcctcttggac

SEQ ID NO: 190638 - DNA, 73 bp, Homo sapiens
accaatggaaagtgcgtcatcctaaggaacatcgactgctcatctctcagagatctagaacttgcctaccaag

SEQ ID NO: 190639 - DNA, 100 bp, Homo sapiens
cccgctgctgggactacgaccccagtgaccggccccgcttcaccgagctggtgtgcagcctcaggccaggtgtggtgtcttacacctgtaatcccagcac

SEQ ID NO: 190640 - DNA, 100 bp, Homo sapiens
gcaggacctgctttcggagtacatgggcaatactgacatcaatttgccctatcttacaatggattcttctggacccaagcatttgaatatgaagttgacc

SEQ ID NO: 190641 - DNA, 100 bp, Homo sapiens
gcgtcccaagaacatccccatcatagtcctccccctcaagcttgggaaagtcgaggtgacggtgtttgaccctgactccctggaccctgatcgctgtgag

SEQ ID NO: 190642 - DNA, 83 bp, Homo sapiens
attcgggaagcgtcgggattaggtgaaagaaacttcggctgttctcaggaaattctaagcatcgctgccatgatgcagatcca

SEQ ID NO: 190643 - DNA, 82 bp, Homo sapiens
gccttgccaccctcatctccaatatggcagcagcagcggaaccgcttaggcagtgggggaagcggggacggtccgtccgtct

SEQ ID NO: 190644 - DNA, 103 bp, Homo sapiens
aaggatttcaacatgcctctgacaatctctagtagccagccccagtgcctgctgagccgtttgacaacactacctacaagaacctgcagcatcatgactacag

SEQ ID NO: 190645 - DNA, 51 bp, Homo sapiens
gaaagaacctggaagacagaggctggagattccctgcatcaactaagaaaa

SEQ ID NO: 190646 - DNA, 74 bp, Homo sapiens
ccgagagcgtgaccgagagcgcgaatatcgtcatcgttagaagttcagatattttggatggcagtagtagcagc

SEQ ID NO: 190647 - DNA, 90 bp, Homo sapiens
cattcccgggaggggggagcggcgttggaggccaccgtttccagtgcttctctcctaccagaggtgcaaggagtgatcctagaaccacag

SEQ ID NO: 190648 - DNA, 100 bp, Homo sapiens
ggcattttggggcagaatacagagatatggaatcagatatggctcgtggacagcagaaaattcagtctcagcagaaaaatgccaaaaagcaagctggaca

SEQ ID NO: 190649 - DNA, 96 bp, Homo sapiens
tggaaaggaattgttttggcctaggatcatccagggcctctgaaaaatggaaccaaattctctgaggactaaagtcccagctttcttatctgattt

SEQ ID NO: 190650 - DNA, 74 bp, Homo sapiens
gcgggtgtcactggggacgttctgaggaaatgaccatggttgacacagagatgccattctggcccaccaacttt

SEQ ID NO: 190651 - DNA, 96 bp, Homo sapiens
ctggacctggggacctcctctcctaacacctctcagatacactggacccccacagccatgacagtgcagatcctgctgaagctggaccgcctggac

SEQ ID NO: 190652 - DNA, 100 bp, Homo sapiens
ggaaggatccgagcctgtggccgcccatcagggggaagaggcgtcctgttcttcctgggggactggcagatgaagttggagcccttgtttttgacattgg

SEQ ID NO: 190653 - DNA, 98 bp, Homo sapiens
agaaaaagaaaagaaaggcaaagaaaatgatatggaaatggaaattaaatgggttccaggatgtggagagcatcttgtgcgcaccatactggctagag

SEQ ID NO: 190654 - DNA, 83 bp, Homo sapiens
cggcgttctggatctcaaagcgactgcaccttttaattttaatgataatgatttgctgccacctacgggctaatgtggaaaga

SEQ ID NO: 190655 - DNA, 83 bp, Homo sapiens
cctgattcttctgcttcaaaagtcctcaaaagaggaaggtgggagtcaatcattttgacaagtctcctgaaaggaacagctag

SEQ ID NO: 190656 - DNA, 87 bp, Homo sapiens
gggtgcgatggcgcggagcccgggacgcgcgtacgccctgctgcttctcctggtgtaatggataggtaacagagaagacctcgtccc

SEQ ID NO: 190657 - DNA, 100 bp, Homo sapiens
gttggcggcggcgctagcttcggagtctcccgcgcgcacctcagccgcctcctagcggcgcggcgctcgctcctacgaacttgatcttttccctgaatta

SEQ ID NO: 190658 - DNA, 83 bp, Homo sapiens
ccggcagcgcgacaggaacccctccgagacccagtccaaaagggtgttctaaggatacattttattgaagctcaggatcttca

SEQ ID NO: 190659 - DNA, 100 bp, Homo sapiens
gatgctgtctggaataggggctgaaggagagattgaagatctcaaacagacaaatcatggcttggaagaatatgttaggaaactcttggatagtaaggag

SEQ ID NO: 190660 - DNA, 82 bp, Homo sapiens
ccaagttgtcgacgaccgacagggtggtgaaaggattttttatcaagcagaaatgcatcgaacaacgagaatcaagatcact

SEQ ID NO: 190661 - DNA, 96 bp, Homo sapiens
ggatgtccccctggatcttcacacagctgcttccattggccagtatgaagtggtgaaggagtgtgtgcagcggctgaccaactgactgaagagcag

SEQ ID NO: 190662 - DNA, 75 bp, Homo sapiens
tgacggagtcggcgagcccccgcggcgacagttagagatgtttatgattacttccgagctgtcctgcagcgtgat

SEQ ID NO: 190663 - DNA, 101 bp, Homo sapiens
atgaagagacgagctgtggggatctggcactgtggttcctgcatgaagacagtggctggcggtgcctggacgtacaatacaaatggtttacatctagcaac

SEQ ID NO: 190664 - DNA, 98 bp, Homo sapiens
ctagttgcagtcaggcttcatacgctattgtcctgcccgtaagttcccgttttgtgtgtgataccccagaatcttccatgctccgtcacactgcagcc

SEQ ID NO: 190665 - DNA, 101 bp, Homo sapiens
ctcctcgccgccaccgcccaggaccgccggccgggggacgagctcggagcagcagccagcttgccttgcgccatggactggcagccagacgagcagggcct

SEQ ID NO: 190666 - DNA, 50 bp, Homo sapiens
gttaacgtgtatggcgtgtgcgtgccaggcaccagtttgtagaaaataat

SEQ ID NO: 190667 - DNA, 82 bp, Homo sapiens
tgcgctgctcaaggacacggtctacaccgacttcgacggtcagctggccgccggcacctgtgagattgtgaccttggaccgg

SEQ ID NO: 190668 - DNA, 50 bp, Homo sapiens
accttcccagaaagtccaagctcgtgaaaaagttggtgattcaaggaaag

SEQ ID NO: 190669 - DNA, 83 bp, Homo sapiens
gtagggctgagcttgcaagaggatcaacatgccttctcttgcatggcaccaagaatgttaccaattcaagcagtttaagattg

SEQ ID NO: 190670 - DNA, 97 bp, Homo sapiens
aacctgaccgggcacgaggagaagggggccgtggagcccatgcagatcgacgtggacccccaggaagacccgcagaatgcacctgacgtcaactacg

SEQ ID NO: 190671 - DNA, 83 bp, Homo sapiens
agcagttgtatgtgtagaaagtgaaatcagaggagatgtaactatcgatgctgtgggccctgagggaaaggatcacagaggcg

SEQ ID NO: 190672 - DNA, 83 bp, Homo sapiens
cttggactgagtcctgcaggacacaggaaatctaccactgtcgaagacaaataaaatatagcaaagacaagatgtggtatttg

SEQ ID NO: 190673 - DNA, 95 bp, Homo sapiens
ctcccctggaggggcctcctcatgtggttggcacttaccatggttccccagaccagtcccatcaagtgactggtaaccaccagcagcctcctcag

SEQ ID NO: 190674 - DNA, 100 bp, Homo sapiens
attcaaccgtacccgccaagctgtcatcacaaaagagttgattgaaattatctctggtgctgcagctctggtcctgacttgtcctgggcaagccaagtcc

SEQ ID NO: 190675 - DNA, 100 bp, Homo sapiens
aacagcagactttagaagcggaagaggccaagaggcggttgaaggagcagtctatctttgatggccaggccatgttatgggatctcaacgaaggcaaaca

SEQ ID NO: 190676 - DNA, 74 bp, Homo sapiens
tggcggcgccgctcatccccctctcccagcagggagaagaaatgggtgaccgttggtgacacatccctacgaat

SEQ ID NO: 190677 - DNA, 87 bp, Homo sapiens
cggacccgggcggacgagcacgaacacacgactttcttgtctgcacagaaagtcccagtacaacttccattgctgagaaaatcctca

SEQ ID NO: 190678 - DNA, 100 bp, Homo sapiens
agttccagaggctgctcggcttccagctcaatcctgccggttgcgccttcttcctggacatgaccaactgttggatatgtcaagtgaccagatagctgcc

SEQ ID NO: 190679 - DNA, 129 bp, Homo sapiens
atctctctcatctcgctcggctgcgggaaatcgggctgaagcgactgagtccgcgatggaggattcagaatccatggctggaagaggtagtaaggccattgggagggcatgcctctcctcagcccaccc

SEQ ID NO: 190680 - DNA, 74 bp, Homo sapiens
tgtctacacccggcaggcaccaaagcagagctcaggccccggggcctccagcggcaccagcggagaccacggtg

SEQ ID NO: 190681 - DNA, 80 bp, Homo sapiens
gcgctgcggcctggcggcttccaggcgcactaccgcggcgaagttcttctgtgttgtgcaggcggagctgaaccattgca

SEQ ID NO: 190682 - DNA, 74 bp, Homo sapiens
tgacttatgtcggatgatctctcgggtgccagttccatcgagcctctgtaccttacctatggaatcatatttgc

SEQ ID NO: 190683 - DNA, 100 bp, Homo sapiens
agagtgtatgcactttactacaaagatggacttctctgtacaggtcatggcaaaaccccaaaagatgccgcgtcagttcgagccacgcatccaataccag

SEQ ID NO: 190684 - DNA, 90 bp, Homo sapiens
tgccggtccgctatttctacctgcaggcggtcaactcggagggccagaacctcactcgctctcccgcagacttaattcagtgcacaaatg

SEQ ID NO: 190685 - DNA, 83 bp, Homo sapiens
ctcccgcccggaaagctgcccagccaccagcaaccccccagtgaatggtagtgtctagaaagggtatgtcccttcaagagaga

SEQ ID NO: 190686 - DNA, 96 bp, Homo sapiens
cgcggggctgtccaggcacgcgaggcccctcaggtgagcacctgcggatctgtccccagggctacacctgctgcaccagcgagatggaggagaacc

SEQ ID NO: 190687 - DNA, 100 bp, Homo sapiens
gtcaaggagtgggaagtgtacaacttccccgcaggcggcgtgggcatgggcatgtacaacaccgacgaggtggatgagaatggcaaaattagtcgccttc

SEQ ID NO: 190688 - DNA, 75 bp, Homo sapiens
ttctcaaccttgtgggatgtgaaaactctgttactgaagacaaagaaacagccttggtataatagcacgttagca

SEQ ID NO: 190689 - DNA, 100 bp, Homo sapiens
gcgggacggctctgtaggaaggaacttggttccccctccctcagcttccgccccaaaaggatgaatcctccatgttcttccagtttggcccatcaattga

SEQ ID NO: 190690 - DNA, 97 bp, Homo sapiens
agagcaaagaatactattgttgccacaggaactgataaatttcaaacggaagagagtggcagcatttagaaagaatctaattgaaatgtctgaactg

SEQ ID NO: 190691 - DNA, 96 bp, Homo sapiens
gcgcggaaggagctggagacggtcgtagctgcggtcgcgccgagaaaggatcttctatgtctctcatgattcccaagacttgaagatcttcagcta

SEQ ID NO: 190692 - DNA, 100 bp, Homo sapiens
aatcagcggtagcaggtggcgcagaagggagaggggagcgaccctggggaccgactctggggaccctcgccgaagagagccagtggcagccccagctgca

SEQ ID NO: 190693 - DNA, 101 bp, Homo sapiens
agccacagtgaaatcagacatctacagcttttctatgatcatgcaggagattttaacagaaatatggctacacacacctttctgcaggagagctgcttcgt

SEQ ID NO: 190694 - DNA, 90 bp, Homo sapiens
tgaagcctggtgcctctcttttaatcaacatcttggcaagagtcttctggtccctgttgacgttatacattggctcttcaaagacgttca

SEQ ID NO: 190695 - DNA, 100 bp, Homo sapiens
ggacaaacagatatccagatgctaaaatggacccaatgaacatctgggatgacatcatcacaaatcggaagctctatgcagaactgtgccaaggcatcgt

SEQ ID NO: 190696 - DNA, 96 bp, Homo sapiens
ttcttaatcccaatgttgccctgaaatttatgtccaggattcaaaaagtttaggactgctaagcaacatggccaatctttcctaagctgctcagct

SEQ ID NO: 190697 - DNA, 82 bp, Homo sapiens
ccaccacgtcacgcacacgctcggcgctgcgatccgcgcatataacgcctcaaggaataggttctcctagtgtctatcatgc

SEQ ID NO: 190698 - DNA, 90 bp, Homo sapiens
tccggctccggcttctgctgttgctcttctccgccgcggcactgatccccacaggtttcacagatggcagtgttacattgaacaaaggag

SEQ ID NO: 190699 - DNA, 100 bp, Homo sapiens
ctcggctaagtggcttcaaagagtgtaattggagttaagcaaaggcattcattgttaacctttcatcttatcccatgcgtgtgaacagatgcaaggaaat

SEQ ID NO: 190700 - DNA, 75 bp, Homo sapiens
ctgtggaacatcttcatgatgttctgcatgattgtgaactgtggctgcaccatctgtcttcatcttcccgccatc

SEQ ID NO: 190701 - DNA, 50 bp, Homo sapiens
ttgtggaagaagcatccattaagttttcggctttgtgagaaaccttacca

SEQ ID NO: 190702 - DNA, 50 bp, Homo sapiens
gtgcttttggtgaagtgcagttgccgtgctggtatagaggactctaagaa

SEQ ID NO: 190703 - DNA, 83 bp, Homo sapiens
gccggccttggtgcggcgagccgagcgaggcagctctgagccgcgcgcctcccgcgacgatgcccctcaacgttagcttcacc

SEQ ID NO: 190704 - DNA, 85 bp, Homo sapiens
agtaccgcatcgcccagctgtacatgatacaggtgacagattgactgggatcccctcgcacatcctcaacagctccccatcagac

SEQ ID NO: 190705 - DNA, 82 bp, Homo sapiens
ctgcagcgggagctggacggcgagcgcgagcggcgcgagaaagctggcgcccatgcggctctacacgctctccaagcgccac

SEQ ID NO: 190706 - DNA, 100 bp, Homo sapiens
attgatgacgacaaactgaggaaagagttctctccctatggagtaattaccagtgcgaaggctttctgctgcgagaacgacatcgacatagtgcgcgtgg

SEQ ID NO: 190707 - DNA, 75 bp, Homo sapiens
gcctccctagccatgtggaactacatggatttaggtgctattacaaaatactcagcattacacgccaagcccaat

SEQ ID NO: 190708 - DNA, 101 bp, Homo sapiens
gccgcgaaccgcagtatcatgctggccaagaagatcatcattaaggacggaggcacggtaccaaccaagaagctgaagaaatatgagaaagaatatcagac

SEQ ID NO: 190709 - DNA, 83 bp, Homo sapiens
atgttcttctaatactcctcctctaacatgtcagcgttattgtaatgcaaggaaatcctcattgacgattcaatttgttgaag

SEQ ID NO: 190710 - DNA, 83 bp, Homo sapiens
gccctggtcttgctcggccgatgaagtgcagaggtttttttctggtcacagtcgaactgttattggaattgaagagaaaaaaa

SEQ ID NO: 190711 - DNA, 83 bp, Homo sapiens
ccgcgtgctaatggtggaaacccacaacggccagagtggagccgggaataactgggccaagggccactacacagagggagccg

SEQ ID NO: 190712 - DNA, 100 bp, Homo sapiens
aagcttcaggagagcccgtgcatcttcgcattgacgccaagacaggtggagttgatccggaactccaggcaggacaagctgaaggtgcacatgcggaagc

SEQ ID NO: 190713 - DNA, 101 bp, Homo sapiens
ctattgctgcagcatttgccaaggagacatccctcttaggtgacactgatgataaaaatccatccaagaatttatatgtgacatctgcagcaggttcaaat

SEQ ID NO: 190714 - DNA, 100 bp, Homo sapiens
gatctaccatgaaagacttgtgaatccaggaagagagactgactgggcaacatgttattcaggtcagtcttcactgtttccaatggaagatggattcttg

SEQ ID NO: 190715 - DNA, 82 bp, Homo sapiens
ttccatcctcatcctcacagggctcctacccagagattctacccagtgaaactcccacagcaacgcaggtagatggggctga

SEQ ID NO: 190716 - DNA, 50 bp, Homo sapiens
caggcacgcaccaccatgcccagaatctgaaacggtgatgtcatggatgt

SEQ ID NO: 190717 - DNA, 97 bp, Homo sapiens
aaggaatgagaagacagaagtcagagacaagaagaggctaacatgactgataccactataatttagtctccctgcacaagcagcactttcttttgcc

SEQ ID NO: 190718 - DNA, 75 bp, Homo sapiens
aggagacatgaaatggtagccaaacccccagtttgctgaggctaaacactatcatgccaagttggtgaatataag

SEQ ID NO: 190719 - DNA, 101 bp, Homo sapiens
agagagccttatctgtatgaacaccagcacctcgtacatttccaaacaggtcagcaaattaaaacgtcacattcgctctcatactggagagcgtccgtttc

SEQ ID NO: 190720 - DNA, 75 bp, Homo sapiens
gggctgcactgccaccctgggcaacttcggtggtgatcgtggcagaggtggccctggtggcatgcggggaggaag

SEQ ID NO: 190721 - DNA, 75 bp, Homo sapiens
agacagaacagttaatcctcaatttaagcctgatctaacccctagaaacagggggacttgatctcatcttcatgc

SEQ ID NO: 190722 - DNA, 83 bp, Homo sapiens
acgaagttgatggcctggagaagaaagatgttttgcctactgttgatccggagccttcacgtaaatgggtccagtcatgcctc

SEQ ID NO: 190723 - DNA, 99 bp, Homo sapiens
agcctgcatcagagctcccattgaccacgggttggaacagctggagacatgggactgctgagatgtcctctattcttgaagagcgtattcttggagctg

SEQ ID NO: 190724 - DNA, 87 bp, Homo sapiens
ggctgggagcgtgctttccacgacggtgacacgcttccctggattggggtgtgattactttagagtcccttggtaaaaggggttatc

SEQ ID NO: 190725 - DNA, 83 bp, Homo sapiens
catgcccatccgaaaggatgatgaagttcagtggtggacttgctttgtgaagagacagttcatgaacaagagtctttcaggac

SEQ ID NO: 190726 - DNA, 82 bp, Homo sapiens
ttcttgctggcgttggtgggagccgtgctctacctctatccgcttccgccctgcgctgccagtctcctacctgcaggccgag

SEQ ID NO: 190727 - DNA, 90 bp, Homo sapiens
aaggcaacgacgttccatctgtggaaggacctaccaaccagttgtggacatcggatacccaaggagacgaagctgaagcaggagaaggag

SEQ ID NO: 190728 - DNA, 75 bp, Homo sapiens
caaacgtcagtcgaatcacaggcaggagtgggtgggaggacgctactcgctgtggtcggccatcggactctccat

SEQ ID NO: 190729 - DNA, 95 bp, Homo sapiens
gactcgtcggcgaatgcaattaggaactgttctgccggaatttgaaaagtgcctggatggttttagattgtcatctcaagaagctgcttctagtt

SEQ ID NO: 190730 - DNA, 83 bp, Homo sapiens
ccgctctgctgtgggcgctgctggcgctctggctgtgctgcgcgacccccgcgcatggacggagagagatgcttcaaattggt

SEQ ID NO: 190731 - DNA, 83 bp, Homo sapiens
ctttcatttgcagatggaaagtttttaagctgccaggatatcgcagatgaattcagagcacaggagattgatggacaggccct

SEQ ID NO: 190732 - DNA, 90 bp, Homo sapiens
gtcttcgagaataaccgtttggggaggagccccagccccgcgacgaggaggaagcggagctggagctgctgaggcagtttgacctggcct

SEQ ID NO: 190733 - DNA, 98 bp, Homo sapiens
cggggagccggtctatggactttccgaagacgaggctgctctttggcgtaaattgcaatcgattagggatcgtttctcagaatcaagttagaagtgag

SEQ ID NO: 190734 - DNA, 130 bp, Homo sapiens
ggccaaggttccgcgccgggcgtggacggtgtggggcggtcccggccccgcagagagaagaagaaggaggttcctgctgtgccagaaacccttaagaaaaagcgaaggaatttcgcagagctgaagatca

SEQ ID NO: 190735 - DNA, 75 bp, Homo sapiens
agacggattcatttagagctgcggaacaggacgccctctgattgcagagcagagcgggcggaggaccccgggcgc

SEQ ID NO: 190736 - DNA, 74 bp, Homo sapiens
agcctgcggagcctgtggggcagatctcacattcttgaaggtggcattgaagagcactaagatcggaagatgag

SEQ ID NO: 190737 - DNA, 96 bp, Homo sapiens
tgcctcatatttacattcaagttaaagaatttatttatgccagccttaaattttcagagtcactacaccggaggcaccttttgatgtcccagcaga

SEQ ID NO: 190738 - DNA, 100 bp, Homo sapiens
ctactgccgcttcagttctcccggtgtggccacgagtcggatacagatccacgggttttagaaaaacaagaattacagcagccaacctatgttgccctga

SEQ ID NO: 190739 - DNA, 82 bp, Homo sapiens
aggtactgacagatccgtagggaggacaccgtgacttcccggacgctgggaaatggtgagaagccctaccactgcaactggg

SEQ ID NO: 190740 - DNA, 100 bp, Homo sapiens
attgacgccatgtcgggttattcgagtgaccgagaccgcggccgggaccgagggagcgcagctcagctgggctggaactgccctcctggaactcccccag

SEQ ID NO: 190741 - DNA, 75 bp, Homo sapiens
ggaagcgagatgtcgaagccgccacccaaaccagtcaaaccaggttttgagcaaaattttggactgtgaagcaag

SEQ ID NO: 190742 - DNA, 100 bp, Homo sapiens
gcgatatgatgatcctgaagtacagaaagacatgtagctttgcagtttggggagggctgttttccatgattgactgtagtatggttcaagtcagaggaaa

SEQ ID NO: 190743 - DNA, 90 bp, Homo sapiens
gcgggcgacacgctgcagggcatcgcgctcaagtacggtgtcacgatactctggatgaatattttgaatatgatgcagaggagttcttgg

SEQ ID NO: 190744 - DNA, 83 bp, Homo sapiens
tcttttcaaatagctggattaggtcctcatgctgctgtggtcattgctggtcatctttggtacggacattgctgcaggagaag

SEQ ID NO: 190745 - DNA, 98 bp, Homo sapiens
gcggccaagccatgctcggccccaggaatactcccccagttgcaagaggcgcaggaccgtggaagacttcaacaaattctgcacctttgtcttggcct

SEQ ID NO: 190746 - DNA, 82 bp, Homo sapiens
tcccagcccactgagtggcttcagcctcgctggatacatgatcccttaattcaggctcaggctgaagaactgacccacttac

SEQ ID NO: 190747 - DNA, 82 bp, Homo sapiens
gaagatgctagtgcaatgctgaaagaagttcaacctaggggtgtgggccgaagatatgctcatgtggtgttgaggaaagcag

SEQ ID NO: 190748 - DNA, 100 bp, Homo sapiens
ctctgggatccccgccgctctgtctacaacccgagatacaagtccaattctgctcaactgcttgttgaggctcgagttcagcctaatccatcaaaacatg

SEQ ID NO: 190749 - DNA, 103 bp, Homo sapiens
gtgctgattaacgatgccgactgggagctactggttgcagagcctgaggcctgtgatcagatgtacgagagcttagcgcgactccattcaaactactacaaac

SEQ ID NO: 190750 - DNA, 105 bp, Homo sapiens
ctcctccgaaccccttcatgcccaaatcccggaaactccagcgtgtctccagccgtggtttggtgcacctcgatttggaggaagtagggcagggcccttatctgg

SEQ ID NO: 190751 - DNA, 50 bp, Homo sapiens
agttctcccggtgtggccacgagtcggggtcagtatagaccttctgattt

SEQ ID NO: 190752 - DNA, 75 bp, Homo sapiens
gacggtggtggtgactgagcggagcccggtgacaggatgtaagcactatcctttgtactccctcaacgtggcctc

SEQ ID NO: 190753 - DNA, 100 bp, Homo sapiens
ggacgaagagctgcagctcctcctgtgcggggcaaacttgaagataaatcttttgactccagctctttagaggatctaaagtgaccttgatggacagtgg

SEQ ID NO: 190754 - DNA, 122 bp, Homo sapiens
cccatggtgacggtggccctgtcagtggctctcttggccctcctgaaatggacattggctccctggattatcaagagtttgtagttgacattgaatccaggctgaggatggaaggtgtggaa

SEQ ID NO: 190755 - DNA, 98 bp, Homo sapiens
cgctcttgtgccctagcaccccgagaaccgtcagtttgagccagatggagagagctctgttagcagaatgaaaaaattggaagccagattcagggagg

SEQ ID NO: 190756 - DNA, 99 bp, Homo sapiens
gaagtgcggtttggtttccttgtcaacggaggatgaagtgaacagctgagcagctcgcagagagcagtgaggatgaggatgatgaccttcagtatgccg

SEQ ID NO: 190757 - DNA, 75 bp, Homo sapiens
caagaaccagcctccacatccttccacccacccaggattcaggtgttcagcacttactccaacgaggattacgat

SEQ ID NO: 190758 - DNA, 75 bp, Homo sapiens
tgcaactgtcggaaatagaggcttcgtgtttggaggcagatatcgaatcaagacacagccatccgggtcttcgcc

SEQ ID NO: 190759 - DNA, 76 bp, Homo sapiens
ggaacacatttatgatgagcagccccccaatgtcgaggagtgggctcgtttctggcgctggagacatcaaacttac

SEQ ID NO: 190760 - DNA, 50 bp, Homo sapiens
gtttgaagattggctttgtaacaaggcagcctggcatcctcgctacaacc

SEQ ID NO: 190761 - DNA, 100 bp, Homo sapiens
cccatcttttcccagctgtacctggaagctgagcagcagcttgccgctctagaagagccgagactgtctgaagctgggcccacctgctgagggagaagtc

SEQ ID NO: 190762 - DNA, 100 bp, Homo sapiens
cggccggcgtgggagcgccaaggccgcaggcgtcgggtttggagttcaagtcggtagccgacagcgttctgtttttacgtgacaaaagatgggaagaggt

SEQ ID NO: 190763 - DNA, 82 bp, Homo sapiens
cgagcgcgagcggcgcgagaaatgatgaacggcagcagccactcaccaacagccatcaatggtgcaccgtgcacacccaacg

SEQ ID NO: 190764 - DNA, 50 bp, Homo sapiens
gaggccacgtcagagctgcccaggaggatttgttggtattgaggaaaacg

SEQ ID NO: 190765 - DNA, 98 bp, Homo sapiens
attgcgtgttttgctataggaattctctgctcactgctgccttatgtttgatcatcggccaaggtcctggcgagaactgcctctgcggctagctgatt

SEQ ID NO: 190766 - DNA, 100 bp, Homo sapiens
ccactggctacaatgatcgtgctgtattggagagagaagtccactctgtgacacccaggatgaagtttctcagactctggctggtggggtaacaaatggc

SEQ ID NO: 190767 - DNA, 83 bp, Homo sapiens
gtgctatctgtctgctctagtaataagccggctattgtagaagctgatatgtgtcacaaagatgtctacacggaactgccagg

SEQ ID NO: 190768 - DNA, 100 bp, Homo sapiens
gaaaattccacagttccgtggtttgtaaagcaatgcattgaagctgttgagaaaagagctgctctgttaaaagcgaaaatgaaacaattgcctgcggcaa

SEQ ID NO: 190769 - DNA, 100 bp, Homo sapiens
gtaagcctgtgaaggaccagcatgggaatcctatactctgagccctgtatgatgagattcgtcagtttcgcaaggcctgtggggaggctcatcttaaaac

SEQ ID NO: 190770 - DNA, 98 bp, Homo sapiens
atttgtcttctgagctgctggcagttttgagatggacttcagcagaaatctttatgatattggggaacaactggacagtgaagatctggcctccctca

SEQ ID NO: 190771 - DNA, 100 bp, Homo sapiens
tggctatccagacgctctggtcatactaaagaacacatctggaaggtgccagtcacgaattgcccgaacattacctgctgatcagaagccagaatgtcgg

SEQ ID NO: 190772 - DNA, 89 bp, Homo sapiens
gcggtccgggccggggggatgtctcggcggacgcgctgctgaggagtacctgtcatttgcctttgagcattgtcaccgttctagtcaga

SEQ ID NO: 190773 - DNA, 73 bp, Homo sapiens
ggtatcaaggttgtcgatctgctagctccctatgccaagggtggcaaaattgagttctaaatgtcgcacagtg

SEQ ID NO: 190774 - DNA, 75 bp, Homo sapiens
aaaagaggaaagtggactgtccggggccgggctcaggagcagaggagctggccaagaggactcccggcaagcacc

SEQ ID NO: 190775 - DNA, 98 bp, Homo sapiens
gagaatccaattacaccttccaaaggtgtcgtgaaaactacccctaaaagccaaaatgggaaaggaaaagactcatatcaacattgtcgtcattggac

SEQ ID NO: 190776 - DNA, 90 bp, Homo sapiens
gaacccatggtccggcctggagataggaagggcaaaaagtgcatccgtactcccaaaatctccaagcctatcaagtttgagctttctggc

SEQ ID NO: 190777 - DNA, 100 bp, Homo sapiens
cgaggaggacccggccgtgggggccattgtcctcaccggcggggataaggcctttgcagctggaggatgacatcgtggccaagcccaactacctgagcac

SEQ ID NO: 190778 - DNA, 49 bp, Homo sapiens
cctggacgccggaagccgggaaatgatcgagaagaagctggaaccactg

SEQ ID NO: 190779 - DNA, 76 bp, Homo sapiens
atgctggagacaggaaggagtttgagacactctgctcagagctgaccagggaacgccacagaagtatgatcccact

SEQ ID NO: 190780 - DNA, 75 bp, Homo sapiens
cgacagtggggacacagccattggtacatcatgctcagatattgcggaggctcaagagcaagatgacgttctcat

SEQ ID NO: 190781 - DNA, 75 bp, Homo sapiens
ggaatacctcgtatgcaacctcaggcttcagccaaaatgtttgacctagaaacaaatgaacatgtcaagaaggcc

SEQ ID NO: 190782 - DNA, 51 bp, Homo sapiens
gctggttccgcaacaaatcaaagatattgatgatgttaagaagttcaaacc

SEQ ID NO: 190783 - DNA, 87 bp, Homo sapiens
gaaggaacgaggcaaggagctaaagcagcgtgcgttcagccctgggggtaacaagatgctcaactatagtgctcccagtgcaggggg

SEQ ID NO: 190784 - DNA, 75 bp, Homo sapiens
agaagattagcaaaggtgctaatccagtggaaatcaggagagcaatgaagcttggagatacatgggtggctttgc

SEQ ID NO: 190785 - DNA, 90 bp, Homo sapiens
ccgccatacgcgctctccctgtttagaaagacccaaatgggaccagtagtttgccaactggaagttctcttcttcaagaagttgaagtac

SEQ ID NO: 190786 - DNA, 100 bp, Homo sapiens
caaaacgccaggcggatctcagaaggccagttcaaaggccgactccggagggcccctggtgtgcaggaaccgggctcacggcctcgtttccttctcgggc

SEQ ID NO: 190787 - DNA, 90 bp, Homo sapiens
cggccttgcgctcggggcctgagaggggcggcggcggggtcaggggccggtcctcgatgggcttcctggaatattggtgtgtttatttgc

SEQ ID NO: 190788 - DNA, 98 bp, Homo sapiens
ggccaacggcctggacgccccaagggcgggcgcagatcgcggagccatggattgcactttcgaagtaagactttgaccccgacgcaggcttcagtgat

SEQ ID NO: 190789 - DNA, 100 bp, Homo sapiens
ggaaaaacctgtatgtggaaccacctttcctaatgtggatctaccacccctgtgttcatcgagattccggtctggacctcctggagaagaggcccaagtg

SEQ ID NO: 190790 - DNA, 100 bp, Homo sapiens
ggaagctcatcacgctgcgagacgagatctccattgacctctacgagctggaggaggagtattactcgtccagagtccggcagcgtcttctcttgaggga

SEQ ID NO: 190791 - DNA, 100 bp, Homo sapiens
cggacccgcaagcatgcccaccactgccacaaacgccgcaccaggtcttgtagcagcgcctcctcggaatactcccccagttgcaagaggcgcaggaccg

SEQ ID NO: 190792 - DNA, 98 bp, Homo sapiens
tgacatgtccatggagaacaagcccctgtatcagatgcggctgctgtcggaggcttttgtcatcaaaggctccccttccctgcgggcatatccgctcc

SEQ ID NO: 190793 - DNA, 100 bp, Homo sapiens
tggacaggaacacacctgtgttcagggatgacgtttgctttttcatcagccagtcaggacaggtcccagaagaggaggccagtcacaatggacagcgccg

SEQ ID NO: 190794 - DNA, 100 bp, Homo sapiens
gttgggaaggatgttttcaaacagtctcagttgtgttggtgttgaagaggagaaggctgctgacattgacctctaccactgccccaactgtgaagtcttg

SEQ ID NO: 190795 - DNA, 100 bp, Homo sapiens
tgagccaggccagcgccgacctggagggaaaggtgagaaggagcccccgagcccgggcatggagaggaagaggagcaggaggaggggtgtaggggccgac

SEQ ID NO: 190796 - DNA, 90 bp, Homo sapiens
ccagaaaggagcaaatcatactctttccatcagtctcaacatagaatcaatgatgaatctggtcgagattctgaagtcagtgccagggag

SEQ ID NO: 190797 - DNA, 76 bp, Homo sapiens
cgacgcgcccggcccggagcccccagcgcagcggccgcgcttggattccttagcaccaccacagctcagccagaac

SEQ ID NO: 190798 - DNA, 100 bp, Homo sapiens
gactggaagggaaagtccctaaaaatcacgagttcaggcgtctgagacttggtgggaacggaccttcctcttagttggccacggacagagcgaaggggag

SEQ ID NO: 190799 - DNA, 97 bp, Homo sapiens
acatttagcctcagtacaacatgtgaaaaatctgttacttgatgaacttcagaagaggccttcaccacggagaagcaacagtcctgacaaattcaaa

SEQ ID NO: 190800 - DNA, 49 bp, Homo sapiens
cagaagctcctcacagagtatgtgtcagttactccacaggatccgctga

SEQ ID NO: 190801 - DNA, 50 bp, Homo sapiens
aaacagtgtatcaaagtgtggactgagcagtgccccccagagacattgaa

SEQ ID NO: 190802 - DNA, 96 bp, Homo sapiens
tcccatccgtgactcctggaatgcagattcgacctcacattactactttgcgcaaatacacatacgggaagcatatactggccaagttggaaaagt

SEQ ID NO: 190803 - DNA, 75 bp, Homo sapiens
gcgagctcctgaggtacggcgtcgggcacacagagccgctgaaaacgactgaagagagcaagggatttcctggga

SEQ ID NO: 190804 - DNA, 75 bp, Homo sapiens
gttcggggccaggacgtcgggaggacctggtgcagtagacattgttgcaatcatgatcggcaatctgaaaggcac

SEQ ID NO: 190805 - DNA, 100 bp, Homo sapiens
ccatctcgctgcccgacgatgtccgcaggcggaggctactcacagtcgaactacaactccccggggtccggccagaactacagtggccctcccagctcct

SEQ ID NO: 190806 - DNA, 100 bp, Homo sapiens
ggaaagcaaccattgtactcagtagaggagtatcagttcagtatcgctacttcaaagggtactttttagaaccaaagctgcaggtggagctggagcaaga

SEQ ID NO: 190807 - DNA, 100 bp, Homo sapiens
aaacagtgtagcagcattggttttccaaaaaatgtgagactttttcttggacgaattcagattctgcttctcagaagatgcactattatagatactctaa

SEQ ID NO: 190808 - DNA, 80 bp, Homo sapiens
gccggcggccaagcagccaaccatgctcaacttcggtgcctctctccagcagactgcgatctgctacaacatcctggttc

SEQ ID NO: 190809 - DNA, 83 bp, Homo sapiens
gcgtcgtcggcctctgggcagcagcaatggctgccatccggaagaaactggtgattgttggtgatggagcctgtggaaagaca

SEQ ID NO: 190810 - DNA, 101 bp, Homo sapiens
gagctgctccacatcaccgacatgaagggaacaggcatcatggactgtgcgcccaaggtctctgctgctgatgaagctgtgaccaaacgcacccaaccctt

SEQ ID NO: 190811 - DNA, 100 bp, Homo sapiens
gtaaatttgcacatccttcgaaaagctgccaagttgaaaatggacgagtaatcgcctgctttgattcattgaaagtgattttacaacgagatgctgctct

SEQ ID NO: 190812 - DNA, 100 bp, Homo sapiens
agtccttttacgctgatgtgcacgtggaagatggcttgataaatttccaggagactgacaaggcgtggcatgggggatgtctggcgctggcagagctggg

SEQ ID NO: 190813 - DNA, 99 bp, Homo sapiens
cccacagccaccgcccggcgcccgagaggccacctgcgtgctagaggcaaacttttgtctctctcggtcccagaacagttttcttctgggctccaatta

SEQ ID NO: 190814 - DNA, 82 bp, Homo sapiens
agagattcagccagcacactcctcgcgagcaagcatcaagatggtgctcatgtggaccagtggtgacgccttcaagacggcc

SEQ ID NO: 190815 - DNA, 99 bp, Homo sapiens
ctctcatctcgctcggctgcgggaaatcgggctgaagcgactgagtccgcgatggaggaccctaaagtaaattggttgaagaaattagatcccaaagat

SEQ ID NO: 190816 - DNA, 95 bp, Homo sapiens
ggctggccaacttctgctacagacgactcagtgatttgaagatattaaagctagaaattggaactagaaaatcaaaagaattcaaggcatcttaa

SEQ ID NO: 190817 - DNA, 74 bp, Homo sapiens
ttagaccctccacctaattgcagccattatttggaaagcaggtctataaatgagaaagattatcatagtcgacg

SEQ ID NO: 190818 - DNA, 50 bp, Homo sapiens
gccgaatcttccttcaggatatcaaggacgggctctacgagtgcattctc

SEQ ID NO: 190819 - DNA, 101 bp, Homo sapiens
ggcccggtgcgggtcgggggtcccgtgtgcatttggggaatggcggtcaatgtgtattctacctcgataacccaagagactatgagcagacatgacatcat

SEQ ID NO: 190820 - DNA, 75 bp, Homo sapiens
cctacatcctgagctacatggccccctggtttagggaggatttgataatgggctgcattaaaagtaaagaaaaca

SEQ ID NO: 190821 - DNA, 74 bp, Homo sapiens
gaactcctgaatcgtttgtgttagcaagtgaacatagccgggtgctcgtccactgccgggaaggttatagccgc

SEQ ID NO: 190822 - DNA, 100 bp, Homo sapiens
gaggatcctgaactccaaccctgtcatggaagcttttgtgtctgagcagcaggagagagccttcacgctggggctagcaggacttctcggcgagggagtt

SEQ ID NO: 190823 - DNA, 50 bp, Homo sapiens
gtccgggagagaatacacagagccaggactggtttggctgaaagacaaag

SEQ ID NO: 190824 - DNA, 75 bp, Homo sapiens
gctttccccaagtagtccgatggctgcggctgcgccgaggcgccctactcagaaattgcatctgatggtctcaag

SEQ ID NO: 190825 - DNA, 90 bp, Homo sapiens
gtttagtctgtgaggaaactggcggctgctggtagttccatgctgtctgttcagacttcagcttggtgattacggggcgctgaaagacat

SEQ ID NO: 190826 - DNA, 51 bp, Homo sapiens
aaataccgtgaggcaaattattgaacaggtcaaggtcagcatctcctcgac

SEQ ID NO: 190827 - DNA, 89 bp, Homo sapiens
tctgccttccagcctgcttgactttgaaaatgatttaattgaatcaagctgcaaagtaactaggagtcagagtattcatcgaaaagaaa

SEQ ID NO: 190828 - DNA, 100 bp, Homo sapiens
gatgcatatctacaaatgaagggtaaccgagagatggtatatgactgcactagctcttcctttgatgggccgccatggcatcagatgaaggcaaactttt

SEQ ID NO: 190829 - DNA, 98 bp, Homo sapiens
cttattagtcatcaccgttattcctactaacgtcctgtgtcactgaggtcgccactgggacactgtgaaccaggagtgagtcggagctgccgcgctgc

SEQ ID NO: 190830 - DNA, 107 bp, Homo sapiens
tggtcccgtcagccggaccccacctggacggctggggccacttgtggtcgccgggagtctttactcctcctgtgaagaagggagaggaccccttccgaacagacaac

SEQ ID NO: 190831 - DNA, 80 bp, Homo sapiens
cttggtttaatgaacacacacattccagagaactgtgctcgccctcccctacctgcggaagagtcaagggaatgtcatca

SEQ ID NO: 190832 - DNA, 100 bp, Homo sapiens
tccttgaccagcatcttggctgaccttgagtgcagctccccctataagcctcggcctccacagggctcattgtcatccccaagccaggccagttctccag

SEQ ID NO: 190833 - DNA, 100 bp, Homo sapiens
cgcgggccgaggcctgggacagctaccgcagcatgagcgaaagctacacgctggaggaatgtgttccagaagatctagaactgaagaagaagatttttgc

SEQ ID NO: 190834 - DNA, 75 bp, Homo sapiens
tgcttcctgctgctctgtctcagcgccgcctccctgcttcttaacaggaaaaacgtggtcttcgagaaatgcgag

SEQ ID NO: 190835 - DNA, 98 bp, Homo sapiens
agaacaattttccaagagaaaaaatgacacactggatcctgaactatggaaggactggagctttgtggacaaagatgagaaggcccgtctgcagcacc

SEQ ID NO: 190836 - DNA, 100 bp, Homo sapiens
aaacagcaagaaaccccacatgtcctaagcttcttggacacttaatgattgttggcaagaaatgtgctgctgatctgggcctgaataagggttatcgaat

SEQ ID NO: 190837 - DNA, 101 bp, Homo sapiens
gtcccttggcattacttctatagaaatggctgaaggaaaacctccttatgctgatatacatccaatgagggaaagtatgcctcagactcctcccttttcag

SEQ ID NO: 190838 - DNA, 103 bp, Homo sapiens
gcggcgggtcttagaagaaaatcatgtggagcaccagcctcggtttttcagctccaaagacaacaggccctccctctgccctcccgtctgtgagctccctgcc

SEQ ID NO: 190839 - DNA, 100 bp, Homo sapiens
ctcctgataatgtaaattgccgcgatacccaaggcagacattcaacacctttacatttagcagataatcgttatgtaccttcaggtgttagagtgtgagc

SEQ ID NO: 190840 - DNA, 100 bp, Homo sapiens
tacacctctcatttctccagatgccaacattgacctcacaaccgagcaaattgaagagacgttaaaatacttccatgatgtctttctacctaaagatatt

SEQ ID NO: 190841 - DNA, 75 bp, Homo sapiens
tagcatacattatgctgccgcctatgggcacaggcagtgtctggaattgtcagagcaccataacatggtgtggga

SEQ ID NO: 190842 - DNA, 50 bp, Homo sapiens
cgtgcgctctcgggccactcggccgcagacaaaactgtgtggagttttat

SEQ ID NO: 190843 - DNA, 50 bp, Homo sapiens
ggagacatggaccgcggcgagcaaggcataatcaccagcaacacccggga

SEQ ID NO: 190844 - DNA, 75 bp, Homo sapiens
ccaagctcatcgagaagtgctggaccgaggacgaagtgggcaactccaacaacattgccaccgtggacatctccg

SEQ ID NO: 190845 - DNA, 80 bp, Homo sapiens
cacagttcccatccctgcagtcaactgccaagcatgtagaaagccggaatgatgctattgctgagattagagccatttgt

SEQ ID NO: 190846 - DNA, 101 bp, Homo sapiens
aagaaggcggaacatccggaggctgggaaatggatgctgtatgattatgttgaaaggaaacgaaaagaaaattcaggagcccaactgcatgttacctactt

SEQ ID NO: 190847 - DNA, 82 bp, Homo sapiens
ccagtttcaaagaagtttcatcaaagcagcaaaataactgtgtagaatacattgaggatgatgaggagcacgtggacattga

SEQ ID NO: 190848 - DNA, 90 bp, Homo sapiens
atggcggatggccccaggtgtaagcgcagaaagcaggcgaacccgcggcgcaataacggtagacgttacatccaagaggaaataatccag

SEQ ID NO: 190849 - DNA, 100 bp, Homo sapiens
tccgcgaagatggcgggccggcagatataatttctacagtagaatttaatcattctggagaattactagcaacaggagataaaggtggtagagttgtcat

SEQ ID NO: 190850 - DNA, 51 bp, Homo sapiens
ggaacgtactgggacaactgtaaccgttgggcccgtcacagctggagctga

SEQ ID NO: 190851 - DNA, 75 bp, Homo sapiens
agtttctcacgacgggccgagcctgccactgctctgacgcccgctctgcggcttcggtgtttgaacaggccacag

SEQ ID NO: 190852 - DNA, 100 bp, Homo sapiens
ggctcctgggtggcatggcgctcctgctcctccaggcgctgcccagccccttgtcagccagggctgaacccccgcaggacactttcttcatgagcaacaa

SEQ ID NO: 190853 - DNA, 88 bp, Homo sapiens
aaagagggttgtccgtgatccacaaggcattagagcatgtgagggccccaaggctgttgcagctcctcgacctgatcggttggtcaat

SEQ ID NO: 190854 - DNA, 100 bp, Homo sapiens
aggacatgtaccgtgctgcagatgaaatagaaaaggagaaagaattgcttatacatgaaagaggggcatcaggtatattgagatcttcagaagtagcagg

SEQ ID NO: 190855 - DNA, 50 bp, Homo sapiens
agaagatcatcgagcatttcaaacgattctgcttctcagaagatgcacta

SEQ ID NO: 190856 - DNA, 83 bp, Homo sapiens
gaaggagttcacccctgaatacaaagggtgtccgcaatgttgccagtgtctgtctgcagattggctacccaactgttgcatca

SEQ ID NO: 190857 - DNA, 100 bp, Homo sapiens
agctcaattagccaagataaaatgggtgataagtgtcgctttctacgtattgcaggaccatggccaacctggagcgcaccttcatcgccatcaagccgga

SEQ ID NO: 190858 - DNA, 87 bp, Homo sapiens
actaagtaacgatctggatgcccagcttcgccgacacgaggtgaccatctgcaattacgaagcatctgccaacccagcagaccatag

SEQ ID NO: 190859 - DNA, 97 bp, Homo sapiens
gatctgtgagtcttctggcaaacagtgtttgcctctggttcagctcatacaacagcttcttagtacataccgagcatcaaatattaaggcacccgga

SEQ ID NO: 190860 - DNA, 97 bp, Homo sapiens
cagcctccgcaggcccaaccgccgccagcaccatggccagcaccatttccgattcttggtgccaccattgagaactccaggattgtcctgcagatcg

SEQ ID NO: 190861 - DNA, 50 bp, Homo sapiens
ctgtcctccacatattgagaatgtggtcgtcggttttctgagggtacttc

SEQ ID NO: 190862 - DNA, 73 bp, Homo sapiens
aggaagttttctactgtaaagtcaccaacgagatcttccgccactacgagagaggagctgcctttctcttcga

SEQ ID NO: 190863 - DNA, 74 bp, Homo sapiens
tgaaccccaaggccaacagagagaagatgactcaggtgccagctgacgaggtatgcgggtgcccccttgtacgt

SEQ ID NO: 190864 - DNA, 50 bp, Homo sapiens
ctgaccctgggagacatcgacggggacagagcacaggaaagggaccccca

SEQ ID NO: 190865 - DNA, 50 bp, Homo sapiens
agaagacagagggttttcttttgaggttttgattcccaccatggccatca

SEQ ID NO: 190866 - DNA, 83 bp, Homo sapiens
acagtgccctgagggccttcgagagctaccgcgccagacagaatagcctaacatggcagaccagagacagcgctcactgtcta

SEQ ID NO: 190867 - DNA, 51 bp, Homo sapiens
aatgctcgcagataagcatgctagaaccctaaggactctgcaatatgaata

SEQ ID NO: 190868 - DNA, 100 bp, Homo sapiens
gaaaagtgttgcctcatcttattcccctgagtattgaaaacaatcttaatcttaatcagatgcagtgagtgaggggggggccatggcggaggagcggccc

SEQ ID NO: 190869 - DNA, 100 bp, Homo sapiens
ggagctgtcctgaggctctggatgactttattcttcaaatggctttaccctcccagtagctccagcttcatccaccgccacgacgaggccttctccacag

SEQ ID NO: 190870 - DNA, 82 bp, Homo sapiens
ctctgctcttcctcccttcgctcgcaccatgtaccatggggcgcaagttggaccctacgaaggagaagcgggggccaggccg

SEQ ID NO: 190871 - DNA, 101 bp, Homo sapiens
catgaatggagcaaaatggcggatcatgtgcaggaacgagcatccggcacccttgtgcatgtaccctacaatgactgccaggcttggatggatgtccccac

SEQ ID NO: 190872 - DNA, 83 bp, Homo sapiens
ggactgagtcctgcaggacacaggttttaaaatcaaagatgggaaaatcggagaaaattgcccttccccatggccagcttgtt

SEQ ID NO: 190873 - DNA, 100 bp, Homo sapiens
cacaggcacattgcagagagaagctgccgctcccaatgatctttgggtggtttcaaaaaccctagactttgagctggatacttttatcgcatgtagtgct

SEQ ID NO: 190874 - DNA, 90 bp, Homo sapiens
aaaatcttggagcccacagccttccaggaacccccacccaagcccagcctaaccatgacccaaatactcatcattgtttatgtggagcag

SEQ ID NO: 190875 - DNA, 90 bp, Homo sapiens
gcttgatttgtttttggcatactacgtgcaggagcaaggtcctgaaggactctttcatcggcaatgccaaaacctgcatgatcgccaaca

SEQ ID NO: 190876 - DNA, 80 bp, Homo sapiens
ctgagagtttacctctggagttcagtgatccgtggtccttcagcatatctctgtgctgcagacaacacaccttcctgatg

SEQ ID NO: 190877 - DNA, 50 bp, Homo sapiens
gcacagcttcatagacatctacacaggtgccaatgttaacagggctacag

SEQ ID NO: 190878 - DNA, 95 bp, Homo sapiens
ccctcattcgatatctgccaaaaataccagccaccctggttcaggaacaaaggcaaaattgaagaagtagttcttgaagctagaactattgagag

SEQ ID NO: 190879 - DNA, 75 bp, Homo sapiens
cagacccaaggcccccgagtgagcgcgggcgccgaggctccaacccggcgcggcccggaggcttcccgggggcca

SEQ ID NO: 190880 - DNA, 89 bp, Homo sapiens
cgaccccacactcacacgcctcttcgagtgcttgagcctggcctacagaggtcctgggcctatgtcaagaagtgcaaaaacaacatgtg

SEQ ID NO: 190881 - DNA, 50 bp, Homo sapiens
ttctattattatggaagtgataaagactgtggatattcataaggagaaag

SEQ ID NO: 190882 - DNA, 100 bp, Homo sapiens
gccgtgagttcgccgctggtggctccgggaggtgctcctgtaccctggccacagcccaatcctgccactgctgacatctggggagactttaccaaatcta

SEQ ID NO: 190883 - DNA, 100 bp, Homo sapiens
tcaaagttgtgtcagtgaatacaaacagttttcggctttgtgagaaaccttaccatcaaacacgatggccagcaacgttaccaacaagacagatcctcgc

SEQ ID NO: 190884 - DNA, 89 bp, Homo sapiens
tgaagagcgacaagccgctggcagccgcggatctcaccgccgctcagggccctgggctgcatcttgtacctgctgtgcttccggcagca

SEQ ID NO: 190885 - DNA, 50 bp, Homo sapiens
ccagagccttctcaaagccacaggctattcaagatctctggcagtggagg

SEQ ID NO: 190886 - DNA, 100 bp, Homo sapiens
cgccattttagcaacgcagaagcccggcgccgggaagcctcagctcgcctgaagacttaattcagtgcacaaatgagatgaatgtgaacatcccacagtt

SEQ ID NO: 190887 - DNA, 97 bp, Homo sapiens
agaccagagaccctggacagtgtcctcaaaaaggtcaaaatgcagatcttcgtgaaaacccttaccggcaagaccatcacccttgaggtggagccca

SEQ ID NO: 190888 - DNA, 82 bp, Homo sapiens
aggattctcgctgtgacagagacaacaccgagtatgagaaattttaccaaatgttgcaagaactctggagttcttatggtag

SEQ ID NO: 190889 - DNA, 75 bp, Homo sapiens
accttttaaaggctgggacttttgagacacattccttaacccagcgcagggctgtccagggtagaagaaaacgat

SEQ ID NO: 190890 - DNA, 50 bp, Homo sapiens
ggctactcacagttgaagcctgattgcagattagcctgaggcctgctcag

SEQ ID NO: 190891 - DNA, 90 bp, Homo sapiens
ggggaagaaaaatattccacgcatcacgtgttgtcatgactggatcttacaataatttcttcagaatgtttgacagaaacacaaagcgag

SEQ ID NO: 190892 - DNA, 83 bp, Homo sapiens
tgaagttgccaggcttcccaacattcttgtctgtggaactgtggctgcaccatctgtcttcatcttcccgccatctgatgagc

SEQ ID NO: 190893 - DNA, 100 bp, Homo sapiens
aggaaaacaagtgtctgcttatgtcggaacattatgatccagaaacacgatggcatcacggtggcagtgcacaaaatggcctcttgatgctcatatctgt

SEQ ID NO: 190894 - DNA, 101 bp, Homo sapiens
agggcaagctgtgcgacgtgaccctcaagggttaaagcacgaattgggagctctcagcgacatcaccagtcagcagccaaagacctaactcagtcccctga

SEQ ID NO: 190895 - DNA, 74 bp, Homo sapiens
gtttggacgccggcggagacgcgggcgagatctctggaaacatggctacagaacatgttaatggaaatggtact

SEQ ID NO: 190896 - DNA, 50 bp, Homo sapiens
ctcgcgcgtgaggatctatctcaggaagggaaaaggccgaggcatcagcg

SEQ ID NO: 190897 - DNA, 80 bp, Homo sapiens
ggagctgggtcagtccgccgctcaccccgcggccgcaccttcccgccttctcaggacactcccagttgccgggatgacct

SEQ ID NO: 190898 - DNA, 51 bp, Homo sapiens
agcgcgtgcgggacatccagaagcagacggttactcatcggaggacatcgt

SEQ ID NO: 190899 - DNA, 96 bp, Homo sapiens
aatgtttcggatattgtaccacctttcagtgctttctctcctcaaggaatgccagagggtcttgccctgtcaaccaggagtgcagtggcacgaaca

SEQ ID NO: 190900 - DNA, 88 bp, Homo sapiens
tggagtaaccctcactggagaatccagagcatcatggcagaacaggatgtggaaaacgatcttttggattacgatgaagaggaagagc

SEQ ID NO: 190901 - DNA, 75 bp, Homo sapiens
aagccaacaacagtgacggaatgcctccatacatttcaaggagcagggacaagttacaggaatgttctccaagca

SEQ ID NO: 190902 - DNA, 90 bp, Homo sapiens
gaaataaggacaaaagccaagaggaggacagttcgctacacagcaatgcatcgaggtaaaacctgtttcccagcctggtggcatcctgtg

SEQ ID NO: 190903 - DNA, 90 bp, Homo sapiens
cgaagagaaggtggtgatcaaagggctcagtcggggaatattcagagcacagtgatgttagacaaacagaaagagcttgacagtaaagtc

SEQ ID NO: 190904 - DNA, 100 bp, Homo sapiens
ctgtgcttctccccaggtccagccaatgcattcagaagccaaaatgacatgaagacatcttatccatcctcactgctgtcaacgatgatgtgagtcgaag

SEQ ID NO: 190905 - DNA, 100 bp, Homo sapiens
ttctcctacctctggctcaagttttcacttatcatctattccaccgtgttctgggtttgagaagatggtcagtggcatgtacttgggagagctggttcga

SEQ ID NO: 190906 - DNA, 90 bp, Homo sapiens
cctgttttgaatatactgctaaccccgctggttataatccttcaatatgtgtatgcaacagcgttattgcaacaggctaacgaaaacaga

SEQ ID NO: 190907 - DNA, 90 bp, Homo sapiens
catgaacaactcgggcgccgacgagatcggctgtggcggggccttcgtgggcccgcgatgccaggaccccaacccgtgcctcagcacccc

SEQ ID NO: 190908 - DNA, 75 bp, Homo sapiens
gaaaaatggcgactgtggcagagttgaaggctggtctgctggagtttgttggagttccactccagaccctgtttg

SEQ ID NO: 190909 - DNA, 85 bp, Homo sapiens
cttgtctggggaaaccgcagcagccgtcggagcacttactggagtccaagatgctaatgaaaaccaaatatggcatcttccatga

SEQ ID NO: 190910 - DNA, 101 bp, Homo sapiens
cttacagaaccttgatccgccatttagcattgatgggaagatggtagctgtaaacctggccactggaaaacgaagctgactggaaataccggcatgcagga

SEQ ID NO: 190911 - DNA, 100 bp, Homo sapiens
cgactccctatgttactgacgagaccggcgtttttccagaaaggaggagtcaaggaagcccttagtgaacgagaactcttcaatgctgtttcaggcttaa

SEQ ID NO: 190912 - DNA, 100 bp, Homo sapiens
atatttttggtcgcaccaccactccacagcagaccaagtttctctggaaacccccctggtaagtgtggaggaggcgggacactctgacccaagacgaaag

SEQ ID NO: 190913 - DNA, 75 bp, Homo sapiens
ttcattgtcttttccgcccgcttcgatcgcctcgcgccggctgctctttccggagtaatcaagtcagaggattat

SEQ ID NO: 190914 - DNA, 83 bp, Homo sapiens
ggacaagaagattcacgtgtacggctattccatgacctgatggccaaaagaaaggaagaaaatttttcctctcctaaaaatgc

SEQ ID NO: 190915 - DNA, 50 bp, Homo sapiens
tggacaaaggaacaggtatctcagattgaagatggaggcaaggcagcttt

SEQ ID NO: 190916 - DNA, 100 bp, Homo sapiens
aaagaatagatacgcgaatgtaatcgcatatgatcattcccgggttctcctatcagctatagaaggtgtgataaagcggaattgggaatatatatgtagc

SEQ ID NO: 190917 - DNA, 100 bp, Homo sapiens
tgaacatgtgctatcgaaccctctacatcgggacaggtgttggagagcacaatggctgaacaagtccttcctcaggctttgtatttgagcaatatgcgga

SEQ ID NO: 190918 - DNA, 100 bp, Homo sapiens
acgatctgcacttcgcattttggcattgacatttaattttagggtcctttatatagaagggagagtagtcctgacttcctgggcgccccggggctggcgc

SEQ ID NO: 190919 - DNA, 100 bp, Homo sapiens
cagcctgtttggaggcggtaccacaccagatgccaaggagaatggtactgatactgtccagtctaagaaggccaccagctgtttcccacgccccatgact

SEQ ID NO: 190920 - DNA, 48 bp, Homo sapiens
ccggacagagcccgtggtcgcgcaggatgaggaagatggagagaatgc

SEQ ID NO: 190921 - DNA, 97 bp, Homo sapiens
gtcccgcgctgacctcaaaaataatgtgaggaagttccgtacattgacagaattgatcctcgatgctcaggaacatgttaaaaatccttacaaaggc

SEQ ID NO: 190922 - DNA, 76 bp, Homo sapiens
tgattgcttgccatgcaactgtgaaaccagggcagacagaaagacgagttgtactgctgtcacaggaaatggacgc

SEQ ID NO: 190923 - DNA, 100 bp, Homo sapiens
agaagggaaggcgcgagtgaggaaaggaggtactgtaggaggcaaaaccttcaactgaggacttgggggataagaaggaaggtgaatatattaaactcaa

SEQ ID NO: 190924 - DNA, 111 bp, Homo sapiens
gatggtgttgtgagagatttctgcagtgaagattgctgtaaaaaatttcaggattggtactacaagggacaccatgtggcggatctttactggatcgctgctggtagagga

SEQ ID NO: 190925 - DNA, 75 bp, Homo sapiens
cagatatccgctgtccaattcccaggaggcgggcacaggattcccaaagaacagtggtggctcaagctacggccc

SEQ ID NO: 190926 - DNA, 97 bp, Homo sapiens
tgatgtgatgctggagaacttggctcttttaacctctctagaattcatctgtgccttattccagttcactcttgtaagggtgatgcttgtgatcccc

SEQ ID NO: 190927 - DNA, 100 bp, Homo sapiens
aaccagccgactggagcaggcagcagcccaggagacatatactgcctggactgcctggctgatgtgagctagtttgtctggttgagttggatgtttaaat

SEQ ID NO: 190928 - DNA, 83 bp, Homo sapiens
cagaaaagcgtaagcttgctcaggaaatgggtcctgatgaatatgaagagatggaagaagaggaggaggaggaagaggaggaa

SEQ ID NO: 190929 - DNA, 100 bp, Homo sapiens
ggttaacccccgccggtcccggtcctgagctggaccagagccctcctccagaaacccctgcgtccgccacggcccagtcttattgccagcagttttgaag

SEQ ID NO: 190930 - DNA, 100 bp, Homo sapiens
tcaccaagtgtccctgttttataatgagcttcattatgtggaaaaagctgctgcagactaagatgcttggtgaagcagctggaaagaggtgatgttaacg

SEQ ID NO: 190931 - DNA, 83 bp, Homo sapiens
gggccccgggacctgggctgggaacccgcggtggagcgggacacgaacgtggtaaggggcctggataccaagaagtgactgct

SEQ ID NO: 190932 - DNA, 75 bp, Homo sapiens
ctggagcctcagttggaagcagccgatccagcctgcggagcctgtggggcagaaagtcccattacagaatcctcc

SEQ ID NO: 190933 - DNA, 75 bp, Homo sapiens
caggattccacagtgtcctctggaaaatgcaccctggaggagaagaggttctgctggaacaagctggtgtagatg

SEQ ID NO: 190934 - DNA, 82 bp, Homo sapiens
tagtcctcgagtggaaagctctatgcggagtacgtctgggtcacctaggcctgcaggattaagatgttctacgaggagcatt

SEQ ID NO: 190935 - DNA, 98 bp, Homo sapiens
gtgaatttccatgtcaacatagtcctgagtctccacagcctattggctcacttggacatgatgctgacttgaggcggcagcagcaggatacctgtaac

SEQ ID NO: 190936 - DNA, 100 bp, Homo sapiens
tggagcagctgaacgtcattaacggcatcctcttcattcctctcaggctcctctgcacccgagcactctccccgcacttccgggctgggctgccgcctgc

SEQ ID NO: 190937 - DNA, 100 bp, Homo sapiens
gtccatgacaatgagcatccagtggaaaacacgccagcttcaaagcaagggagttcccattagacttgaagttgggccacgtgatatgaagagctgtcag

SEQ ID NO: 190938 - DNA, 82 bp, Homo sapiens
tcatgtctgcgagccaggattcccggttcatgatcaagagggcccaaggacggaagcgctttgggatgaagaattttaagaa

SEQ ID NO: 190939 - DNA, 100 bp, Homo sapiens
catagtggcaattgccttttcaaaaggaaaacccttcaggcaaccttgctacaaaaattgaaccgcggggaaaggcgaatgggtgcttttgaatgtgttc

SEQ ID NO: 190940 - DNA, 101 bp, Homo sapiens
aacagatacaaggacatactgccatcaatctgcacatcgtgctgccacacgaggcttcattcgttatggctggcgctggggttggagaactgcagtgtttg

SEQ ID NO: 190941 - DNA, 97 bp, Homo sapiens
aagcgatgaaatccaaaggtgaatcttttggttggtgattttgatgatagccacaaagcaagcaggcctgatcctgcctgaagatggtgccactggt

SEQ ID NO: 190942 - DNA, 75 bp, Homo sapiens
cgcggcctggcccttggcctcctcctgctgctactgtgtccagcgcagtgtcaaatcaacagtgccttgacatct

SEQ ID NO: 190943 - DNA, 100 bp, Homo sapiens
ggaatctatgatgctgatggtgatggagattttgatgtggatgatgccaaagttttattagattctgaaggaagatttccattaggtaatttgtttaatc

SEQ ID NO: 190944 - DNA, 74 bp, Homo sapiens
cccactgagctcttggaagagagagacaatggacctcagatagcctatgttcgggacttcaaagcaaaggttca

SEQ ID NO: 190945 - DNA, 98 bp, Homo sapiens
ctgactttgtaggctccgccaagaggcgccgcaggaggcctgtatccggtgtccgaggcgaactcagtaagatgatgttaagaggaaacctgaagcaa

SEQ ID NO: 190946 - DNA, 100 bp, Homo sapiens
gatgaatcagatgtcaaagacttagcttttaaattaaaaaggaagctattcaccattgaggttagcatggcctcattgaaagaactagatcaaagactct

SEQ ID NO: 190947 - DNA, 75 bp, Homo sapiens
agatgtggggggattctcgacctgctaacagaactggaccttttcggctatgtcttgcccagccacgtgactgag

SEQ ID NO: 190948 - DNA, 80 bp, Homo sapiens
tgcagagccccaattcctacttcatggatgtgaaatgcccagagagcgcctgctcgctgtgcccccgggttatgacgacc

SEQ ID NO: 190949 - DNA, 82 bp, Homo sapiens
gattcgccgaggcaccgaggcactcagaggaggtgccatcgcctgcaggattctttattcagctctgacagtggcttcagca

SEQ ID NO: 190950 - DNA, 100 bp, Homo sapiens
tcacctgatgcagtcgtctctccgtcttccgctttcttaaggtctggtgcaatggatgagcttcatagtctggatccaagaaggcaagagttattggaag

SEQ ID NO: 190951 - DNA, 100 bp, Homo sapiens
tggaagcgccgcgatgttcgccccccggctgctggatttccagaagacgaaatacgcgagggaggtggggaagacagggctccagctaccacaggacggg

SEQ ID NO: 190952 - DNA, 100 bp, Homo sapiens
ctcagcctcctgagtagcaattacaggaatgtatcctgtcaggtataatgtcagtgaatggcaagaaagttcttcatatggatcgaaacccttactacgg

SEQ ID NO: 190953 - DNA, 95 bp, Homo sapiens
accttgagttatcattaactagtacatatacaaataccccagcaggatctccattaagtgctactgtggactggccgtttgacgatggggcgccc

SEQ ID NO: 190954 - DNA, 90 bp, Homo sapiens
caggacgcggaaacactccctggaggttctgacccactccctctcagcctccgcctggtctctgatgaaggatttgggggcagagcactt

SEQ ID NO: 190955 - DNA, 73 bp, Homo sapiens
gtgttctatgccgggggctttgccattgtgtattacctcattcaaatcgtcctcttgagttctggcgccttga

SEQ ID NO: 190956 - DNA, 90 bp, Homo sapiens
gaaacaaacagcattccatatgggatggcggtggagggccgctgcccacacagctaggagggtgagccctattcccagaggcaggtggtg

SEQ ID NO: 190957 - DNA, 83 bp, Homo sapiens
ctggagaccttgacacttatatcctccctggagttcattgtcgaaatgctggacctgtagctgtagctgagaagagcattacc

SEQ ID NO: 190958 - DNA, 78 bp, Homo sapiens
tggcctgctgctggcccgcagggttcaatacttcttcaagatcttggataattagtggtgtggaaagtaaagaagtca

SEQ ID NO: 190959 - DNA, 110 bp, Homo sapiens
cgtccttctccactttcgccagcccgtgccgcgagcgcggcctgcaggagttggaatcgaagcctcttaaaatggcagatgacttggacttcgagacaggagatgcaggg

SEQ ID NO: 190960 - DNA, 83 bp, Homo sapiens
ggccctacagaggatgtcaatgtggcccaggaacagatagaaggcatggtcaaagatttggccatgcggaccctcagttggaa

SEQ ID NO: 190961 - DNA, 75 bp, Homo sapiens
ggaggggggcagcttgagcaagcggcaaggcctctttgagagacgagttgtactgctgtcacaggaaatggacgc

SEQ ID NO: 190962 - DNA, 83 bp, Homo sapiens
cgctgctcaaggacacggtctacaccgacttcgacgatctgggcggaccccggcaaatacgccctgatgggagctgctgccca

SEQ ID NO: 190963 - DNA, 100 bp, Homo sapiens
cgttcattccagccagcaacctcttcttcagggtgggttttgtggtggcggagagagtcctttacatgcctagcataagcagtactataatggatgtaga

SEQ ID NO: 190964 - DNA, 82 bp, Homo sapiens
tcctcaactgccaaaaggcaatggatcagtcgcatcgaatacattcattcaaagaacttcatccaccgggatgtgaagccag

SEQ ID NO: 190965 - DNA, 96 bp, Homo sapiens
cgggtgatgacagcactatagtgcaggtgttggaagtgaaagtggatatcaaagtattgcagagtgccttagcagccatccgacatgcccgctggt

SEQ ID NO: 190966 - DNA, 98 bp, Homo sapiens
aggaggttcgaagctgagtatgtgacagtttatgtgaagaaccagctcagtgggactctacagattaaaccaggggttttcaatgaatacagaaccat

SEQ ID NO: 190967 - DNA, 90 bp, Homo sapiens
agcctctggaagaggtgaagttgggaaactgcggattgccaaaatcgcctaccatttggtgcaagcaaaaagcaatcagcaattggacag

SEQ ID NO: 190968 - DNA, 100 bp, Homo sapiens
ttcagacagccacagaaaacacacaggcaagagtattgcatgctgaacaagagaaggctgctcttttgtactgccccccgctcattaaacagcctccccc

SEQ ID NO: 190969 - DNA, 75 bp, Homo sapiens
tagctgcccagatgctgcctgccctaaacagggccacctacaggagaacgaggctcttctggagctggagatgaa

SEQ ID NO: 190970 - DNA, 87 bp, Homo sapiens
cgaatgcagcagccacagatctctgtctacagtggttcagaccgacatgctgtacaggtgacttggcatgaaattgcaaggcctcag

SEQ ID NO: 190971 - DNA, 98 bp, Homo sapiens
gtgcgtgcagccgcaccacattggcgtggccgtcaaggagctggacctctacctggcctacttcgtgcgtgagcgagagttcccgattttgaaatgct

SEQ ID NO: 190972 - DNA, 76 bp, Homo sapiens
tgcatacaataacctgaaaggaaatcttcagaatttggaacgaaagaatgcgtggtgtattcgaaggctgccagtg

SEQ ID NO: 190973 - DNA, 75 bp, Homo sapiens
ccctcatggggaaaatctccccggtgactttcaggacttggctccgtacctgcccagcgtgacgcctggcctgaa

SEQ ID NO: 190974 - DNA, 51 bp, Homo sapiens
catttaccacacaatggcctgtggatactttaatactgataagccacaccc

SEQ ID NO: 190975 - DNA, 98 bp, Homo sapiens
gatatttccgggtacgcgggagccccggcgacccgggcttctgtgaaacatggcggtaggctgggaccataacacaagttctggaggctagaagtctg

SEQ ID NO: 190976 - DNA, 97 bp, Homo sapiens
ttgtgaccggagttagatgccagcgcagaagggacgtgagcccagccgaggtaccgctgaagaggaatcaattttgacctaatctgggagcctgcaa

SEQ ID NO: 190977 - DNA, 90 bp, Homo sapiens
gtcagagccaccagccaatgatcttttcaatgctgcgaaagctgccaaaagtgacatgcagggaagacatgtaaggaatttgcataagac

SEQ ID NO: 190978 - DNA, 75 bp, Homo sapiens
gctatattcctcctcatttaaggaaccgagaagctactaaagaatgtttccattggaattgttggtaaagacttg

SEQ ID NO: 190979 - DNA, 95 bp, Homo sapiens
agaagatggtgcagaagaaaccagccgaacttcagggtttccaccgttcgttcaaggtcaaaatgcagatcttcgtgaaaacccttaccggcaag

SEQ ID NO: 190980 - DNA, 74 bp, Homo sapiens
cgggatcggttgccttgagcctgaaaacctcggatcaattctcagctggtggcacaacaagtggcacaacagta

SEQ ID NO: 190981 - DNA, 75 bp, Homo sapiens
aggttctacagaaagtcaccagaggaagaggttggagcaatcactgaagaaactgaagcctgtgattggtggagt

SEQ ID NO: 190982 - DNA, 82 bp, Homo sapiens
aggcagagtgctgatgtgaaaaataccacgacaaaaccaccctacatattgtttgcagacagtgactgaggataacccagag

SEQ ID NO: 190983 - DNA, 83 bp, Homo sapiens
tgttttgccacgtggatgtgaagatttcctctaaaaggtttatttgacatggcctgtgccaaactgtgccgagggctgcccag

SEQ ID NO: 190984 - DNA, 82 bp, Homo sapiens
cagggaaccctggtcaccgtctcctcagaagaaagccagcttccctctacaagtgctctgggaaaaggagagcaggttgaag

SEQ ID NO: 190985 - DNA, 98 bp, Homo sapiens
ccccacgggtgtgcagctgcaggacaacggcaggacgtgtaaggcaggcttgacacaactctcatagactttactgacatgaagtgccaacgagggga

SEQ ID NO: 190986 - DNA, 76 bp, Homo sapiens
ccatggtgttgctgctgtactccttctccggtaccaaccaagaagctgaagaaatatgagaaagaatatcagacaa

SEQ ID NO: 190987 - DNA, 100 bp, Homo sapiens
agacaatgtcatgtgattcagcctaatatctcagaatcacactgtcagagtacttccgtgacatgggctatcatgtcagtatgatggctgactctacctc

SEQ ID NO: 190988 - DNA, 87 bp, Homo sapiens
ccctccggaccaataccttgaaaacccgacgccgagaccttgcacaggatcccttggttccagtaccccattatctatgacattcgg

SEQ ID NO: 190989 - DNA, 80 bp, Homo sapiens
ccccggcggcagcacgaaagtaccatgtatggtttaggaatgatttattacaagcaagaaaaattcagccttgcagaaat

SEQ ID NO: 190990 - DNA, 100 bp, Homo sapiens
tggtgatggactcaaagaccttgccgatggcgcaggagattttccgcctgtctcgtcaccacatccagggacacggccaacacggtgaaggaaaagttcg

SEQ ID NO: 190991 - DNA, 80 bp, Homo sapiens
cggggaagtaatggtatccggccaattgagattcggagttaaaacaggttttaaaatcaaagatgggaaaatcggagaaa

SEQ ID NO: 190992 - DNA, 73 bp, Homo sapiens
tttttgcagggaatgggctacagccagagatcctcagcaggagcctatggaagagatagaaaatttgaagaaa

SEQ ID NO: 190993 - DNA, 99 bp, Homo sapiens
agggagagcaggagccactgagatgaggaggcgtcgcgcgcgcctgtagctcgcgggcctcgcagatccactgtgtgtggagagtaatgcagcatcatg

SEQ ID NO: 190994 - DNA, 87 bp, Homo sapiens
cagggacacggctcaccgtgctagggtttccaggcctgaggtgcccgccctggccccaggagaatgaaccagccgcagaggatggcg

SEQ ID NO: 190995 - DNA, 100 bp, Homo sapiens
caacatcaccgtgaggcagggggacacagccatcctcagttggtcctgagaaaagggtgccagcgatgcctggatcgcctgtggaagtgaagatacagtc

SEQ ID NO: 190996 - DNA, 120 bp, Homo sapiens
ccggcagcagcccgacgcaaaccaaggatctggggatcttcgcactatcccaaggacccatgagcttcctggctggcctgggccttgctgtgggactggccctgctcctgtactgctatc

SEQ ID NO: 190997 - DNA, 83 bp, Homo sapiens
cgctccgtggccttagctgtgctcgcgctactctctctttctggcctggaggctatccagccttcatggcggctgaagagatg

SEQ ID NO: 190998 - DNA, 127 bp, Homo sapiens
gaggttcggaagtgccaaggtcatccggtccctccacgggcggctgcagggtggaggtgtcatggagaaactccagctgggcccagagattctgcagcgggaaaatccaaggcttatttatgccagg

SEQ ID NO: 190999 - DNA, 82 bp, Homo sapiens
agaaggaggaggtgaccacgcgcgagacttcccaagtaagaagcggaagaggagccgctggaaccaagacacaatggaacag

SEQ ID NO: 191000 - DNA, 75 bp, Homo sapiens
gtatttcgcagattggagctgagctgtggctgccagaagatagcgaacggcaattgaaggaacagactaaaaatc

SEQ ID NO: 191001 - DNA, 90 bp, Homo sapiens
cagccccccaatgcggccgcgagaagcagcgggggggcaggcgatcgaagggctgatgcaaatcgtactgcccctagtggaagtgaatac

SEQ ID NO: 191002 - DNA, 75 bp, Homo sapiens
tgcccgctcacctgcgctgtgatgcctgcagagctgtggcttaccaggctgaccaactgactgaagagcagattg

SEQ ID NO: 191003 - DNA, 98 bp, Homo sapiens
gcacccagggggcagccgcctcatcggccaccacggcgctgaggacgccacggggtgagcccctccagactccgaataggagatcaagagtttgattc

SEQ ID NO: 191004 - DNA, 75 bp, Homo sapiens
ccgagacagcagctgagacggcagcggcagcttctcagggaactctaatgatccaggacaaagaagttaccctgg

SEQ ID NO: 191005 - DNA, 75 bp, Homo sapiens
tcttcaagataacttgccaaaatcaactgaacgaggaagggatgctgttggcttcagagatcaaacacctgcccc

SEQ ID NO: 191006 - DNA, 75 bp, Homo sapiens
ggaagaggaagaggaaagcaaaggagtcagggatggctcttcctcagcttcgcctcaacagcatcaagaagctgt

SEQ ID NO: 191007 - DNA, 97 bp, Homo sapiens
tccccgacgaggagcgcggcgagatctacgtgccaggatgtggagaaagtttgggacctcaagagaaagagtggatgtctacagctgcacaaggaag

SEQ ID NO: 191008 - DNA, 75 bp, Homo sapiens
ccagaggccaggctttatgggagcatgggttaccagcgacgcaccctttcctggcagacatggaaaataatgtac

SEQ ID NO: 191009 - DNA, 96 bp, Homo sapiens
gggacttgcttactccaccggctgataaaccaggttctgtgtgcaccacccgcaccaagacgggagtggggtacccccagctgagtgccgtcattg

SEQ ID NO: 191010 - DNA, 76 bp, Homo sapiens
gcagacagaagagctatgaccactcaagccctactgccaataaagggaaaataagagatgctcatcgacgaattat

SEQ ID NO: 191011 - DNA, 100 bp, Homo sapiens
caacaggcagtggaaagacgacattcatcatactatactggcaattgctggagaagattttgcaattgttgcttctgatactcgattgagtgaagggttt

SEQ ID NO: 191012 - DNA, 88 bp, Homo sapiens
aagctgaataaagctgttttggaactgtcaggtacctcaaagcgtaatggaagaagttgttccgaatgtaattgaaccttccttcggc

SEQ ID NO: 191013 - DNA, 116 bp, Homo sapiens
ggaggagctgtgcagccgcgaggaggcgcgggaggtgttcgagaacgaccccgagacgatgatcaagcggtgctgattcacgagagtggaagcctccagagcttggggctttctgg

SEQ ID NO: 191014 - DNA, 75 bp, Homo sapiens
tgcctggagatgaagctggaaaggttgctacaagcctcaggaaaaatcagattacttgatgttggcagctgcttt

SEQ ID NO: 191015 - DNA, 100 bp, Homo sapiens
ctccttgcagtcccccggagcctggctcccggctcgggccgcaccgccagggactggggtgagcggcccagcctgtggtagctgttcctcttgttatgcc

SEQ ID NO: 191016 - DNA, 102 bp, Homo sapiens
ctccgtcccccgcgggtctgctctgtgtgccatggacgggaccatggccaacctggagcgcaccttcatcgccatcaagccggacggcgtgcagcgcggcct

SEQ ID NO: 191017 - DNA, 80 bp, Homo sapiens
caacattgttcctggaacgccctctttttaaaaaaggtacctgcacatgttgttctttgtcagtgctgtcaagtgtgtgc

SEQ ID NO: 191018 - DNA, 76 bp, Homo sapiens
tttctggacacagaagtatttgtgacaggaaaatatgagagccacacccgtgttcacacaggtgagaagccctttg

SEQ ID NO: 191019 - DNA, 51 bp, Homo sapiens
cattgtcttacgcccttcaagaggggacatcacccagaagggctatgaaaa

SEQ ID NO: 191020 - DNA, 100 bp, Homo sapiens
acctttggataaagtctgccttctaggttgtggcatttcaaccggttatggtgctgctgtgaacactgccaaggtggtgaagcagtattttccaatttga

SEQ ID NO: 191021 - DNA, 100 bp, Homo sapiens
aggatgcagccctgaatgccatccagacagggcaacataggagcccgactcccaggtttgctataactggcctgagtgtttcctgtagccttcgttgtgc

SEQ ID NO: 191022 - DNA, 76 bp, Homo sapiens
ggttcacacccttcaagcagggtccctggtgctgaaccgcctgcgtccagttgccagcgggggtgggaaagcccaa

SEQ ID NO: 191023 - DNA, 96 bp, Homo sapiens
gacattcacagacaccacctccttccctctcttcacatggatcctcttcaagcttaaacctggggtaccaacacaccaaacctgatatcatcttca

SEQ ID NO: 191024 - DNA, 83 bp, Homo sapiens
ccgccgcgcgcccgcgccctccgcgcgacgccaggagacagaagaaattctggcagatgtgctcaaggtggaagtcttcagac

SEQ ID NO: 191025 - DNA, 50 bp, Homo sapiens
accatggaaaaagtgacttgagcagcttccttggaaatcattgactagca

SEQ ID NO: 191026 - DNA, 75 bp, Homo sapiens
atttgttaaggattccaagtaactcttatttgtgtgcttctaaaattggggataaaaccatccatcaattactac

SEQ ID NO: 191027 - DNA, 97 bp, Homo sapiens
acctactattacccccagtatctgcaagccaaggtgtcagctgtgatgcatgtttaaaaggaaattttcgaggtcgcagatataagtgtttaatttg

SEQ ID NO: 191028 - DNA, 75 bp, Homo sapiens
gcggcgcggcccagctcgttccagattttgcaagaacgaggctcaaggatgtgagggacacagtattgacagctg

SEQ ID NO: 191029 - DNA, 75 bp, Homo sapiens
ggccttggtcctagcacccactcgagaattggctcagcaggcattccctcctcgtcccgggctggcccttgcccc

SEQ ID NO: 191030 - DNA, 80 bp, Homo sapiens
aagctttacgttcatgtaaacagcatgacgtgaggccgtggatgcaggcattaagatgtaaggctacgaaaacttgctgg

SEQ ID NO: 191031 - DNA, 74 bp, Homo sapiens
tgttaaggattccaagtaactcttatttggaacctacaagcagcaattggcgcctattatgactttgagagccc

SEQ ID NO: 191032 - DNA, 50 bp, Homo sapiens
ctagtgcgccagggcctcaagtgcgatgggccgcctgggcagaatgtcac

SEQ ID NO: 191033 - DNA, 74 bp, Homo sapiens
ctgaaactcatctgtacctcacttagaaaggccataaaattttgagtagaaaaatccagaaatttgaaaatcag

SEQ ID NO: 191034 - DNA, 75 bp, Homo sapiens
gggtggagacacagccaaacgatatcagtcttcaaagcttcacctttctccaaaggcagatgtgaagaacttgat

SEQ ID NO: 191035 - DNA, 75 bp, Homo sapiens
ccagggttgaaccacctttaaaagcagtaatggaacaagctagtcagcttttgccaactgttttcaaatcacatg

SEQ ID NO: 191036 - DNA, 100 bp, Homo sapiens
gcggtatctcagccctggatggtgaatttcagtcagcctcagaggttgacttctacattgataagccaccaaaaccctcaacaggggcatctctgagttc

SEQ ID NO: 191037 - DNA, 73 bp, Homo sapiens
gatgatcacgcagctggctggcttcagtggaccaatccaggtagggaacttcaaccagaccatcgccacactg

SEQ ID NO: 191038 - DNA, 100 bp, Homo sapiens
ccggcagccgacggcaaaggtgtcgtggtggtcattaagcggagatccgccatccgggtgacctgcataggttcctgcggggtctccaacaaggctaatg

SEQ ID NO: 191039 - DNA, 82 bp, Homo sapiens
cctgcagtacctgcagaaggtctctggagacatcttcagcagcaaggacacccaggcccattattttcctccagcctccatg

SEQ ID NO: 191040 - DNA, 100 bp, Homo sapiens
cacaagtccatgctgctgccgttaatggagataagggtgctctacagaggctcatcgtagtttaaggaagaaatctctaaacgttttaaatcacatactg

SEQ ID NO: 191041 - DNA, 74 bp, Homo sapiens
gtactccaggcagccgtctgcaaggttggaactcagtttatccgtggtgtgtctggaggagaaagaaaaaggac

SEQ ID NO: 191042 - DNA, 75 bp, Homo sapiens
ccactgataaagaaggaaaggatgagttattagaggctattcctgcaccaactgacctgaagttcactcaggtca

SEQ ID NO: 191043 - DNA, 82 bp, Homo sapiens
aaagcctacgggatccgctttgacgtgatggtgaacggcaagcttgccttgcgccatggactggcagccagacgagcagggc

SEQ ID NO: 191044 - DNA, 97 bp, Homo sapiens
tgcggaagctggtgggcactcagcaccctctgcttaccacagccagaaactatgttccaacttcctgtcaacaatcttggcagtttaagaaaagccc

SEQ ID NO: 191045 - DNA, 139 bp, Homo sapiens
tggatatgttcgtggagacactgtggaaagtctggaccgagctcttggatgttcttggacttgacgagagttatgatgacttgtaccattggtccgttgagtcatattcagacttctgggcagagttctggaaattcag

SEQ ID NO: 191046 - DNA, 82 bp, Homo sapiens
cacgcccatccttggacttcctgaaaatgacccagtgtgtcccggcatggatatccggaacaacctcactaggttgcatgag

SEQ ID NO: 191047 - DNA, 100 bp, Homo sapiens
taggaagggagttgatttactcctagaaggtgttcaagttgaaacattgtagtcggtatatacatgacttatttccttcactcatcaagaatttggatcc

SEQ ID NO: 191048 - DNA, 98 bp, Homo sapiens
atggtctggtctgtgctcgacacctcaaactctttatatatttttgccatcatggatcagtttggagatatattagaaggtgaagtggaccattcttt

SEQ ID NO: 191049 - DNA, 102 bp, Homo sapiens
tttctacaggaacacgaggaaactccacatgcttgggatggaagaagtttgagtgacctatcctgtgtttatcctccttgccgtagctgagttgatcttttt

SEQ ID NO: 191050 - DNA, 80 bp, Homo sapiens
ctgtcttcggtggactccttcggcagtccacccaccgccgccgcctcccagatatgaggccccaggattcctggcgaggt

SEQ ID NO: 191051 - DNA, 76 bp, Homo sapiens
ggtagcgctgctgcggaggttcaaagtgtccgacgaggagctgcagaggctggagacagagttgggccaacccgct

SEQ ID NO: 191052 - DNA, 90 bp, Homo sapiens
cagagggagaaatccaacgacctttctatccagctcctgggctataacgaaaagccaataaatctacaaatgtttattgggacagcagat

SEQ ID NO: 191053 - DNA, 88 bp, Homo sapiens
gagctctgccaggcagaaggcctctctcctgatacagcaggcgctcaccatgttccctggagacaatgcagatcttcgtgaagactct

SEQ ID NO: 191054 - DNA, 80 bp, Homo sapiens
ggatctcgggctcggaacgagactgcacgttgctctaggtcgtaaccagcctttgaaaaaggagaaaccaaaatggaaaa

SEQ ID NO: 191055 - DNA, 101 bp, Homo sapiens
aaaattatttatccaacagctcctcccagttggagtcattcgttgcccagtttgcagccaagaatgtgcagagagacacatcatagataacttttttgtga

SEQ ID NO: 191056 - DNA, 98 bp, Homo sapiens
aaagctggctgggggggccggctctgcgacaaagccggcccaggcctttgtggtgaagcggggcgtccacgtgtcaggagcgtctcccgagagcatca

SEQ ID NO: 191057 - DNA, 100 bp, Homo sapiens
gcgggagccctcgcgacgcgcccggcccggagcccccagcgcagcggccgcggctgtggagcctggctgatcatgccttgatcgcccgctgtaacatgga

SEQ ID NO: 191058 - DNA, 75 bp, Homo sapiens
aaacaggcctccttggagaccagctactacttttcagcatccttatgtgagattgttctctggggccggactgag

SEQ ID NO: 191059 - DNA, 75 bp, Homo sapiens
cccattgcaggaatgggataccaagtctcccaacaacagagacagggttcccttctggagaagagtcaccgggtt

SEQ ID NO: 191060 - DNA, 75 bp, Homo sapiens
atccaccgccatccgccaccatggaccatggccaacctggagcgcaccttcatcgccatcaagccggacggcgtg

SEQ ID NO: 191061 - DNA, 88 bp, Homo sapiens
cggcatctattccagctttactgtgcaacttgggtagcaatgtacagataaagagtactttaacgcccatgcgtgttcaagactgttc

SEQ ID NO: 191062 - DNA, 97 bp, Homo sapiens
cgccatcacccacgctctgacctctgggtcagagcacttactctaggcagatcaagcaagttgaagatgacattcagcaacttctcaagaaaattaa

SEQ ID NO: 191063 - DNA, 100 bp, Homo sapiens
tacctgcttcagtacaacgatcccaaccgccgagggctcatcgaaaaatgccagctgtgggacaaggagtgcaggccgcacaacctcggcaggcaccggg

SEQ ID NO: 191064 - DNA, 90 bp, Homo sapiens
taaaggtgctaagaaagagaatgtaagacaggaaaataattaaatattcttaccgaggactggaatgtcacgtggaataccagcaacccc

SEQ ID NO: 191065 - DNA, 74 bp, Homo sapiens
gacggctcagaagagtcagctgcaccactgcgatccctacgatggcagatgatcagggctgtattgaagagcag

SEQ ID NO: 191066 - DNA, 119 bp, Homo sapiens
ttggaggtgtcagtgttaaaggaacctctacaacgaaggtgaagccacggaagataagatctttaatctcatgaagtacgacagctacagccgcttcttaaagtctgacttgtttttaa

SEQ ID NO: 191067 - DNA, 100 bp, Homo sapiens
atctctgcttttcggaattttgtcctggataacacagatcgcaagggtgtccattttctgatggctgatgggacgctgaccggaaaggagattgagattg

SEQ ID NO: 191068 - DNA, 75 bp, Homo sapiens
ggcccgtgcacgcctacaaattcttctttaagtccatggaccaggacttcgggtgaccagaagtcagcagcttcc

SEQ ID NO: 191069 - DNA, 100 bp, Homo sapiens
ggaaggcacatgaactgaagcttctgtcagaatgccaatacaagcagttgttgcttttggaggaagtcatgaattcaagcactctgagccaagaggtgag

SEQ ID NO: 191070 - DNA, 100 bp, Homo sapiens
gcggattaaagctaaagacatagttcctggtgatattgtagaaattgctgatcgagttttggttcgggttagagacttgacaatacaaaaagctgatgaa

SEQ ID NO: 191071 - DNA, 98 bp, Homo sapiens
gcgcagtcatgagtcgcttcaagtttatcgggaggcttgtggatcagaatctgaacaaaattgggaaagatgaaatgcttcaaatgattagacatgga

SEQ ID NO: 191072 - DNA, 75 bp, Homo sapiens
gtgcccttgtggcgaatggggctcacgtcgatgacatcaccgaggagacagaggtggaggtccctgagcttccat

SEQ ID NO: 191073 - DNA, 75 bp, Homo sapiens
cttcgtgggcggtcttgactggagcacgacccaagtgcccatgacgcttccggagacaaccctggaaacactgaa

SEQ ID NO: 191074 - DNA, 86 bp, Homo sapiens
gggagcaacgggagtgtcctggacccagctgagcgggcggtcattcgcatcgcagaaatgcttcggttacccacagtctttcgcca

SEQ ID NO: 191075 - DNA, 75 bp, Homo sapiens
cgacagcgaacatgtcgcggcctgtcagtgggtaaacctcacaagtgcaactactgtggacgaagctacaagcag

SEQ ID NO: 191076 - DNA, 74 bp, Homo sapiens
gtgacaatagaaagaaccagcttaaagatatggctattgctactggtggtgcaagatggacagagacgtatgtg

SEQ ID NO: 191077 - DNA, 75 bp, Homo sapiens
cgctggcggcggtcgagccggcctgcggcagccggtaccagcagaacattctagtatgccagtagaaaaaaatat

SEQ ID NO: 191078 - DNA, 73 bp, Homo sapiens
gaagatgactgtcaagttttagaagaggtcccagcgactccagtttgatgtctcttcccccaatggcatctta

SEQ ID NO: 191079 - DNA, 100 bp, Homo sapiens
gaaacctctctgaaatctgacacctgctctcccggcaaggaaacttcgcaggctggttgacaggactgaggtgattcgcacctgcataaacccagtgtac

SEQ ID NO: 191080 - DNA, 103 bp, Homo sapiens
caagtgcactgtgtgtggccagtcatttaccaccaatgggaacatgcacagataagctaaatgttactgattccgtcataaataaagtcaccgaaaagtctag

SEQ ID NO: 191081 - DNA, 83 bp, Homo sapiens
gacctcggggccggcctcgcaaggcgcttcccctttccagagagccagaaagaagtttttagaacttcagccataaaaatggg

SEQ ID NO: 191082 - DNA, 90 bp, Homo sapiens
gggtatctgatcaagccaacaacagtgacggaatgcctccatacatgataaggaagcctgtgtgggtaccaacaatcaaagctacatctg

SEQ ID NO: 191083 - DNA, 100 bp, Homo sapiens
actttaaggctaaaaacaaagcaaaaccagttaccactaatcttaagaagttaaaacagagccaatgagcagcagtgaaacagcttcaacgacagccgac

SEQ ID NO: 191084 - DNA, 97 bp, Homo sapiens
gcggcggctccagcgtcctaagagccacccacacagaatatgcctatgggtcctggagggatgaatcagagcggccctcccccacctccacgctctc

SEQ ID NO: 191085 - DNA, 74 bp, Homo sapiens
tttatggaaaccgagcagcagcctacatgaagcgcaagtgcccctctcatgacagccgtgtgatgagcagccag

SEQ ID NO: 191086 - DNA, 100 bp, Homo sapiens
agggtgttcccgaactagagtgggtcctctggtgatgttcttgagacgttcaatttcttagaaaatgccgatgacagtgatgaagatgaggaaaatgaca

SEQ ID NO: 191087 - DNA, 87 bp, Homo sapiens
ggcctttggttctgcatcaaaaatatcaacgatgaaagagtatttggttggatggcaagcatgtggtgtttggcaaagtgaaagaag

SEQ ID NO: 191088 - DNA, 85 bp, Homo sapiens
ttcatggacatttttgaacttgtgaatgagtccctggaacgccagatgcgtgaaatggaagagaactttgccgttgaagctgcta

SEQ ID NO: 191089 - DNA, 80 bp, Homo sapiens
gaaagatggatttttgcatgagacgcttctggacagtgtgtcccggcatggatatccggaacaacctcactaggttgcat

SEQ ID NO: 191090 - DNA, 90 bp, Homo sapiens
cgccgaagaagcatcgttaaagtctctcttcaccctgccgtcatgtctaagtcagagtttttcagaagaagtgaagtcaagatgaagaac

SEQ ID NO: 191091 - DNA, 76 bp, Homo sapiens
ggtaaagatggcggagcgcgggtacagcttttcgctgactacattcagatggcttgttcaatcagtatatcagtca

SEQ ID NO: 191092 - DNA, 95 bp, Homo sapiens
gaagcaccccggcggccgcggtaatgctggtggtctgcatcaccaccggatcaacttcgacaaatagtctatcagccacagtctctgcaagtttc

SEQ ID NO: 191093 - DNA, 118 bp, Homo sapiens
gctgaaaaagttggatgaagatagtttaaccaaacaaccagaagaagtatttgatgtcttagagaaacttggagaaggatttgcctactggctgggaagaagcatatacttttgaagg

SEQ ID NO: 191094 - DNA, 100 bp, Homo sapiens
tgatgttctctcaaggcccaagagctcttcagtcagcaggaaggcgcaatggcgaggaagttatctgtaatcttgatcctgacctttgccctctctgtca

SEQ ID NO: 191095 - DNA, 100 bp, Homo sapiens
aagtgaaagataaagctgaagaagaaacagaagaaaagccttcagtttggctgtgtcttaaatgtggccatcagggcagccccgagaaccacaggtgtac

SEQ ID NO: 191096 - DNA, 87 bp, Homo sapiens
tgtgtatcctggacccattgataactctggacttctcaaagtggtggacttgctttgtgaagagacagttcatgaacaagagtcttt

SEQ ID NO: 191097 - DNA, 100 bp, Homo sapiens
gtgggcgtggagccggcagccgacggcaaaggtgtcgtggtggtcattaagcggagatccggcaccacactgtaactcgaggcatcaccaaaggcgtgaa

SEQ ID NO: 191098 - DNA, 100 bp, Homo sapiens
tgtcaggctaggaggagggggaggagagctggaatgaccatacctgaagaagacgctgatgtgggacaaggcagtaaatattgcctcgtggcaattggga

SEQ ID NO: 191099 - DNA, 83 bp, Homo sapiens
gtaaatgggaaggacaggcagagctaaacaagtaaatacctgggcacaggacttcaaagcaaacacagattccccctccccct

SEQ ID NO: 191100 - DNA, 100 bp, Homo sapiens
gctcagcgccgagggcgagatcgtgcagggtctgcggaagagggagctgctgaaggagctgctaccagtcatcgggcagaacctccgattccagcgcctc

SEQ ID NO: 191101 - DNA, 100 bp, Homo sapiens
ctcctgactgcatggaagccaggtgcaaggagaaaggattttgaggaggggcagaggtggaggagacactgaagcgactgcagagccagaagggagtgca

SEQ ID NO: 191102 - DNA, 50 bp, Homo sapiens
gcaatattaccccagcctactgagtgagggtcgctgtctgcccattgata

SEQ ID NO: 191103 - DNA, 120 bp, Homo sapiens
attctttactcagctgagtgtgccacacaggtagccctggacggcattcagtgttttggtgaaaggtgtagcagtcactcggcctacacccacagcatcgaccttgtgaacccagcgacc

SEQ ID NO: 191104 - DNA, 113 bp, Homo sapiens
ggacagcccatcgtgtgaactatagagtttgtggacagatttatattgatgccttcaattaagttgcagagttctgatggagagatatttgaagttgatgtggaaattgccaa

SEQ ID NO: 191105 - DNA, 100 bp, Homo sapiens
caaagactggacagtgacacctgagcacgtcttgcctgagtcccaggaaccttccctgtatactgtcaaagccatcctgattctggacaatgatggagat

SEQ ID NO: 191106 - DNA, 75 bp, Homo sapiens
gggactgtgtattttaaatgcaggacccaaagcagcagaagatctacgacctattccagaagtcctttgagaaag

SEQ ID NO: 191107 - DNA, 51 bp, Homo sapiens
tcacagactcacctgccaggaaggttggatggcaagcatgtggtgtttggc

SEQ ID NO: 191108 - DNA, 100 bp, Homo sapiens
cctgggagcacagcagaagtgtctaacttcaaacttgtggctgttaattcaaaactctatgccatcggagggcaggccgtttctaacgttgagtgttaca

SEQ ID NO: 191109 - DNA, 90 bp, Homo sapiens
attctcagtctttttattgcacttattacagattcttatgacaccattaaggtttttgatgagaagtactttctggtggaaatggatgac

SEQ ID NO: 191110 - DNA, 49 bp, Homo sapiens
agacaacaggatcgtctcgtccaaggttacaggaaatacaggaggcaga

SEQ ID NO: 191111 - DNA, 100 bp, Homo sapiens
caggataccctgggattctacgcagataacgtgaaggactggagcaaggtcgtcctggcctatgagcctgtgtgggccattggtactggcaagactgcaa

SEQ ID NO: 191112 - DNA, 50 bp, Homo sapiens
aagtgatttccagaggatttacactctgtccaatgtgaaagaaaacccat

SEQ ID NO: 191113 - DNA, 75 bp, Homo sapiens
aacctggacgccgctctggcgctgctccgcaaagagatggccatggttgcttgttatccgggcaatggaacgggt

SEQ ID NO: 191114 - DNA, 82 bp, Homo sapiens
gacgcggacatggtcatgagctttgtgaacctggagacagggcagggcattgttcatgcactgaccgacctcagcagccccg

SEQ ID NO: 191115 - DNA, 98 bp, Homo sapiens
caagaccatcatcactttcattgtctcggacgtgcggggcctgggcctcccggtccgcaagcagcaggtcaatggccagcaaggaggggggtccgagc

SEQ ID NO: 191116 - DNA, 88 bp, Homo sapiens
ttgatgtgcgcggagagcaatcgccgggacagctgcaagcctgggccgagccagtggcccccagaggatgagaaggaggtgatccgcc

SEQ ID NO: 191117 - DNA, 98 bp, Homo sapiens
gccagggccgcactccggagactcgcggttgctacgcgcaccatggctggagtttgtttcgacgccggaccgcgtaagagacgatgatgttgggcacg

SEQ ID NO: 191118 - DNA, 74 bp, Homo sapiens
tgtggtgcagcacagtgagggggagctgcagaggctggagacagagttgggccaacccgctgagcgctggaagg

SEQ ID NO: 191119 - DNA, 75 bp, Homo sapiens
ctggtatttatgcttaaaagaaacagtgagcctcagaaggggaagtttactcccagtcccgtggacttcacgatt

SEQ ID NO: 191120 - DNA, 100 bp, Homo sapiens
tagaaaataagacctactcatctgtgagaacagaagctttatctgtgatagaattgctgcttaaaaaacttgaagtggtggatctgaaccttctaacaga

SEQ ID NO: 191121 - DNA, 73 bp, Homo sapiens
cctcatcccaggttgccttggaaaatgccaacgccgtgtctgaaggtaagctgtgcttacagcacgaggatct

SEQ ID NO: 191122 - DNA, 75 bp, Homo sapiens
gaactgctgtgcgtctgaagtgatggcggaggttggtgttcgaggaagagacattgttgttcttggtgtggagaa

SEQ ID NO: 191123 - DNA, 75 bp, Homo sapiens
gaaaaatgaagatgatgtagacactggactattaggagtgaaacctcggtccggctgggctattgatccctttgg

SEQ ID NO: 191124 - DNA, 100 bp, Homo sapiens
tgggcgacttgcgaggatgagagcgacgaagccaactgtccaggctctgtgtgctccgggatggagcaggtgtgcagagggtgagaacccagctctggga

SEQ ID NO: 191125 - DNA, 97 bp, Homo sapiens
aaattgtatctgtttttctcagaagagaattccacaagcaaagaacagtctgaacttgatcaagatttggatgatgttgaagaagtagaagaagagg

SEQ ID NO: 191126 - DNA, 74 bp, Homo sapiens
tgtcctgtcctggatcagtttctttgtcatgtagccaagactggagaaacaatatggagtctcgctttgtcacc

SEQ ID NO: 191127 - DNA, 82 bp, Homo sapiens
gtaaggagcagcttccaggatcctgagatccggagcagccggggtcggagcgggaatacatgcaccacctgctcgccctgga

SEQ ID NO: 191128 - DNA, 82 bp, Homo sapiens
gaagaataagagatgtgattaatgtattccaccacctccgccagttaagaggaaaaagatgtacagtgggagaaatcacaga

SEQ ID NO: 191129 - DNA, 100 bp, Homo sapiens
ccccagaacgcagatcagaggtagtcggacctttcccgctggcgcgcagcctcagctaggaagcccagaacctcatggccctcaccaatgtggacacccc

SEQ ID NO: 191130 - DNA, 75 bp, Homo sapiens
acctttccccagtggcccagagccaggagttctctggccgctctctggacagtataccaacagatgttttaaaga

SEQ ID NO: 191131 - DNA, 100 bp, Homo sapiens
tcctcggtggaggcgtacatcactgtcgtctcatgggagaaagacactgtttcacttgtctcagctaccaagtcaggattgttacccccaccacctgcgc

SEQ ID NO: 191132 - DNA, 74 bp, Homo sapiens
ccctgactaccctggaagtagcaggccgcatgcttggagatcatgtttgagaccttcaacaccccagccatgta

SEQ ID NO: 191133 - DNA, 76 bp, Homo sapiens
gcatctccttaatgaaagaaacaggagatggaataaactgagactgcaggacaaagagaaacgtctgaagctggag

SEQ ID NO: 191134 - DNA, 75 bp, Homo sapiens
gtggtggtcggatttcaccacaagaagggctgccaggatagagggaggaatcagcagcttggaaattcaagcacg

SEQ ID NO: 191135 - DNA, 83 bp, Homo sapiens
ccaagtaaaccaagactactttgcatctgtaaatgcaccttcaaacccaccaagaaaaaggtagcagcactgcctaaacaaga

SEQ ID NO: 191136 - DNA, 97 bp, Homo sapiens
ggccagaagatacaaagacagaccatcccagttgaatgctgtcttccaagaacagaagaaaatgatccaggcccagctatcttccagagggccacac

SEQ ID NO: 191137 - DNA, 74 bp, Homo sapiens
gggagagctcctgggccacccctcctttcaggtcaagttcaaggagcagggacaagttacaggaatgttctcca

SEQ ID NO: 191138 - DNA, 83 bp, Homo sapiens
cggggaggtgggtactacacaaccgtctccagccttggtctgagtggactgtcctgcaggacttagcactcaggcctgtgaat

SEQ ID NO: 191139 - DNA, 99 bp, Homo sapiens
acagaaaaggaatgctacaactaaaaatagcaggtgcacccgaggacctagatgtgaaggctggtggaggctgtgtaatgaccattggagaaatgctac

SEQ ID NO: 191140 - DNA, 101 bp, Homo sapiens
cgaagaatttgatgaactatgttttgaatttggtctggagcttgatgaaattctcagaagagcccacagagaaggaacctccagggcagttacaggtgaag

SEQ ID NO: 191141 - DNA, 86 bp, Homo sapiens
aaaactccaatcagataaattacaacacggatgtgtcagaaattggctttggaaaaatggaaacctacatcaaattggaaaagctt

SEQ ID NO: 191142 - DNA, 87 bp, Homo sapiens
ctgcgcatcactggctactatggctaccagccctgggcagcgagctgcaaaagaccaagaagctgataattgatgtgatccggaacc

SEQ ID NO: 191143 - DNA, 106 bp, Homo sapiens
gagttgagtgatattgaccatgatggaatgcttgacagagatgagtttgcagtttcagaaattggctttggaaaaatggaaacctacatcaaattggaaaagcttg

SEQ ID NO: 191144 - DNA, 100 bp, Homo sapiens
ttatgtgcgaacatgtaacaagaatccaaagaaaacaaaatggtggtatcatgggagagatttaaagcaattatatttcaatctctatataactgtcaac

SEQ ID NO: 191145 - DNA, 90 bp, Homo sapiens
ccagtatgaatctctgcccgcaacacatatcaggccaaccaagccctcgagcagttattcccatgtcctgtataaccaatggaagtggtg

SEQ ID NO: 191146 - DNA, 75 bp, Homo sapiens
gaagcctcaggttatgtctgtatctgtcagcctggattcacaggtgtgatgaatgcagactctgctaccattttg

SEQ ID NO: 191147 - DNA, 100 bp, Homo sapiens
gagaatcgaggagctcaacaaggtcatcaagagagagggcacaggtacagagatgcccatgattggggaccgagtctttgtccactacactggctggcta

SEQ ID NO: 191148 - DNA, 90 bp, Homo sapiens
gcagcagtgatggtggcagcaacaaggagggaaaaaagagcaggtggaaaaggaaagagggtgtttgtgagatatggttgaccagtgaag

SEQ ID NO: 191149 - DNA, 102 bp, Homo sapiens
aatacgtggttggagagctcatctggaattttgccgatttcatgactaaccagtacatatctgaagagatggattaagaatgctttggattaaggattgtgg

SEQ ID NO: 191150 - DNA, 101 bp, Homo sapiens
aagaagatggacaagatggtgcagaagaagaacgcgccaatggagatcttcgtggatgatgagacgaagttgacgctgcatgggttgcagcagtactacgt

SEQ ID NO: 191151 - DNA, 90 bp, Homo sapiens
gcatcgtcatcgagccggcccagcttctgaagggagatgtcatggttgactatagtcaatggggccaatggagccaagtgtatggaaacc

SEQ ID NO: 191152 - DNA, 100 bp, Homo sapiens
gccttgatagcatggatttctgtgagctcacttaccttaaggcaggttctatgaaagatcctctgctagatgaccatggtgattttattagaatgtgcac

SEQ ID NO: 191153 - DNA, 75 bp, Homo sapiens
tggcccaggaggatgggcccgttgtgcagacaactaaactggtaggtggcagcagaggaaggaattcttcagatt

SEQ ID NO: 191154 - DNA, 75 bp, Homo sapiens
gtctccggctgcacagcgctcagatccctaaagaagtggctgacatctttaacgcccccagtgatgatgaagagt

SEQ ID NO: 191155 - DNA, 97 bp, Homo sapiens
ggcgcctgcagatcccggctagggcacggaccgcctaggccgagacccgctacgacttcacctcatgcatgggcgtgctcctggtgagcatggtggt

SEQ ID NO: 191156 - DNA, 100 bp, Homo sapiens
cccctgctggaggcctttgggaacgccaagactgtgaggaatgacaactcctcccgttttgtggaagagaaacctgatgtcacatacagtgatgttggtg

SEQ ID NO: 191157 - DNA, 98 bp, Homo sapiens
aacagggcggagtagcggccgagctgcgaaagagcaagagtgagccatggagctacgtgtggggaacaagtaccgcctgggacggaagatcgggagcg

SEQ ID NO: 191158 - DNA, 100 bp, Homo sapiens
tgttggatgtttggccggctatggagcttaccgtgtctccaatgacaaacgagatgtaaaagtgtcactgtacattactggttatagaattaccacaacc

SEQ ID NO: 191159 - DNA, 82 bp, Homo sapiens
gcaaggtcgccctcaaggccatgatcaaaacgaattcctggtgactggaagggggagtgactcaggccctcaacctctagca

SEQ ID NO: 191160 - DNA, 75 bp, Homo sapiens
agccacacagtgtccagatacgagggtggacccaagtggagagattgtggaactggcgaaaggtgcatgtccctg

SEQ ID NO: 191161 - DNA, 90 bp, Homo sapiens
agagaagaagaagcaggatgaactgaaacggattgccagagaattggcagaagaaactcctgattggtccgaagggccacgtgatctccc

SEQ ID NO: 191162 - DNA, 83 bp, Homo sapiens
ctcgcttgcagttcagcgaccacggtcactctgtgcggtgtgcactgaccccagccagtggatgttccccgtccaagagcaaa

SEQ ID NO: 191163 - DNA, 100 bp, Homo sapiens
gcgggaggagaaaaaaagagcagagaaggagcgaatcatgaatgaggaagatcctgagaaacagcgcaggctggaggaggaagaggaagaggaggaatta

SEQ ID NO: 191164 - DNA, 90 bp, Homo sapiens
ccaccatcaagctgtctaagtccaaagatttttacccagtgagcatgtttttgaacacattaacaccgaagttctacgtggccctaacag

SEQ ID NO: 191165 - DNA, 75 bp, Homo sapiens
taagacttttgaagaaatctggaagttttccacctaccatgctctcgaattgccagcacaacacggaggggccac

SEQ ID NO: 191166 - DNA, 74 bp, Homo sapiens
gaagattcttccaaggaaccagtgcgaaggatttgagcctccttgattttaatagagaacttctagtgtatgga

SEQ ID NO: 191167 - DNA, 75 bp, Homo sapiens
aaggattccaagtaactcttatttggaagcaattttggaggtggtggaagctacaatgattttgggaattacaac

SEQ ID NO: 191168 - DNA, 98 bp, Homo sapiens
cggacacctaccaggtggacggcacggacgacagaagcgactttggtgagactctgaaattccttgagctcataggcattgctcagggtcagatgaca

SEQ ID NO: 191169 - DNA, 100 bp, Homo sapiens
gtgtcctttggcagtttccaaagcatttgggcaagaaggagcttgggcagcttcacaacaggaccttgcctcatagtattcgatcagattcagaagatat

SEQ ID NO: 191170 - DNA, 75 bp, Homo sapiens
cttttctactttgccagcaaactggtgctcaagggacgtccagatcggtgacatcgtcacagtgggcgagtgccg

SEQ ID NO: 191171 - DNA, 75 bp, Homo sapiens
tgaatatcaagaggaggagttgttgaccccatgccacagctggatgtgactgaggccaacaaggagttcatggaa

SEQ ID NO: 191172 - DNA, 96 bp, Homo sapiens
atggatgatgtactggatcgtctttgccttcttcaccacggccgagacgctcacggatatagtgctctcctgattcgacttccacctgaagtaaat

SEQ ID NO: 191173 - DNA, 98 bp, Homo sapiens
cctcagacagatcgccggggaggcagcgcgggatcccagcctcaggcgtgcgcggacggtgtgcgggctaaagaattacctccaaagccattgtcaag

SEQ ID NO: 191174 - DNA, 76 bp, Homo sapiens
gaattggctctgctgacaggaattataagtaaagcagcacttcctgtgccggtggtggtgtgcacattgagccccg

SEQ ID NO: 191175 - DNA, 100 bp, Homo sapiens
tgctactctgccatggatcccttcagcacactttccagcagcatcacctgcacagaccaggtggtacatgccagagtcctgctctcccggcccttgtccg

SEQ ID NO: 191176 - DNA, 98 bp, Homo sapiens
gacaacatctatcaacagaagatcaagatcctgagagtgagaagcctgactgaccccgcctagacgccaggcccacttcacgccgtctaagtggagaa

SEQ ID NO: 191177 - DNA, 74 bp, Homo sapiens
aaactcttggcatttggctttgcctttctggacacagaagtatttgtgacaggctcttgggaaagctggtgctg

SEQ ID NO: 191178 - DNA, 75 bp, Homo sapiens
cccacctgagaaccatgctcaccgaccctactattgggaagaagttacctgcaactacagcaactccagactcat

SEQ ID NO: 191179 - DNA, 50 bp, Homo sapiens
tgaagctgggaactgatctagaataatttcttcctgaccactatgcccac

SEQ ID NO: 191180 - DNA, 75 bp, Homo sapiens
tgcaagccggtgcagcagccttcagcttttggcagcatgaaagttagcagtgacagccgtgagggtgtatgtgaa

SEQ ID NO: 191181 - DNA, 99 bp, Homo sapiens
gaagccgcggaattccaaaccctcacctgtagacagtccaagccttatgcatttgatcgggtgttccagtcaagcacatctcaagagcaagtgtataat

SEQ ID NO: 191182 - DNA, 82 bp, Homo sapiens
atctccgccaccgtcttcaggccagaccatggtgaatccgggcagcagctcgcagccgcccccggtgacggccggctccctc

SEQ ID NO: 191183 - DNA, 90 bp, Homo sapiens
aaccggcttgttgtcttcaattaaaaaatttattaaaggaagcacacctaaggaaatttgcgagaatccccgatttatcattgatggagc

SEQ ID NO: 191184 - DNA, 82 bp, Homo sapiens
attccaacaaaagaaaaccaagattgctcagagcacgaacttccaggagccggtgcagccgctgacacagcagcaggtggcg

SEQ ID NO: 191185 - DNA, 98 bp, Homo sapiens
ctcagctcttactgcgggccgctccgacggcggtccatcctgaccggtaccgggagtaccagtggatcggactcaacgacaggaccatcgaaggcgac

SEQ ID NO: 191186 - DNA, 90 bp, Homo sapiens
gaggaggagatcctgggatcagatgatgaggagcaagaggaccctgcggactactgcaaaggcatttcagaagatggacacaaagaagaa

SEQ ID NO: 191187 - DNA, 85 bp, Homo sapiens
gatccagcctgcggagcctgtggggcagggtcacctgtctgtgtgcccagtttgaagccgtcctgcagcatggcttgaagaggag

SEQ ID NO: 191188 - DNA, 87 bp, Homo sapiens
tgtttggaaagacccaggagaagccgcccaaagaactggaatcattgcaatttagagatgtggctgtagaattctctctggaggagt

SEQ ID NO: 191189 - DNA, 100 bp, Homo sapiens
ccagagcctggaactgtgcccacaccagaagccatcagcagcaagggttcccagcaccatgagggcctggatcttctttctcctttgcctggccgggagg

SEQ ID NO: 191190 - DNA, 90 bp, Homo sapiens
ccaagatgctatgtgagatcttgaaagtgggcgagttgcatccctgcatgtcactgagtccaccatgctttacagaagaagacagattta

SEQ ID NO: 191191 - DNA, 75 bp, Homo sapiens
aggagcagttgctagtggccatttacaggaatcagccacttcagttcaggatcttatggttggtgatgaggcaag

SEQ ID NO: 191192 - DNA, 95 bp, Homo sapiens
gatggcccacaagcagatctactactcggacaagtacttcgacgaacactacgagtaccggatattagaaatggctactccccagtcaattttca

SEQ ID NO: 191193 - DNA, 82 bp, Homo sapiens
cttggcctcctcctgctgctactgtgtccagcgcaggacttaaccaccaccatgtcgagcaaaagaacaaagaccaagacca

SEQ ID NO: 191194 - DNA, 100 bp, Homo sapiens
ctcagaggcatttctctttgctgattggactaaatgctcttccttcagaggattatccggggcatctactcaatgaaaaaccatgataattctttgtata

SEQ ID NO: 191195 - DNA, 100 bp, Homo sapiens
ccgacatgttcacgcacgggatccagagcgccgcgcacttcgtcatgttcttcgcgccctgggggtgagaacatcaaaagcatcaaccagcagtcagggg

SEQ ID NO: 191196 - DNA, 75 bp, Homo sapiens
ttcagttctttggaattccattcttttccttattcttctgatgtggatccagattcatgttacatgtaaagctgt

SEQ ID NO: 191197 - DNA, 52 bp, Homo sapiens
ttggagaactgccccaaggatttgcaagagtggattcaactgcacataagaa

SEQ ID NO: 191198 - DNA, 100 bp, Homo sapiens
gccggggccgccatggagcccgactcggtgattgaggacaagaccatcgagctcatggaaaaaccatatggcatagttgaaaagaagtccagaatattcc

SEQ ID NO: 191199 - DNA, 100 bp, Homo sapiens
ccgcgacaccatcttcgacaacatcctcaaggttaaacccatccagagtaatggctgcggccttacccaggaccctgggggagttgcagctgtatagaat

SEQ ID NO: 191200 - DNA, 100 bp, Homo sapiens
gaggcaccgggatcgtgaccgagaccgtgaccgagagcgtgaccgagagcgcgaatatcgtcatcgttagaaggaatggctttctaaaggacatggggaa

SEQ ID NO: 191201 - DNA, 75 bp, Homo sapiens
gaatttcctacagttcttgatattacagctttgacagatccaaatgcttctgctgcccagcaggctgttctccag

SEQ ID NO: 191202 - DNA, 100 bp, Homo sapiens
ttggtatatcctactttctggatctgtgcttgtgaaaggctccatggtcttgcctccttgcagaactggtccctaggaaagaccttcttgtagaaaatgt

SEQ ID NO: 191203 - DNA, 50 bp, Homo sapiens
gaataagactgcatctgttcatatgagagttgctacgatggaagttaaag

SEQ ID NO: 191204 - DNA, 83 bp, Homo sapiens
caaactgtcggcttcaaagagaaaaggcaacatcctgtcacaggccatgctctggcaaaaaccttataggctttatactgtgg

SEQ ID NO: 191205 - DNA, 74 bp, Homo sapiens
ccttctgccagcccagcaagataacctacaaggcagagaatctgggtgagagctgccacacagatgggacgtat

SEQ ID NO: 191206 - DNA, 97 bp, Homo sapiens
tggaaagcagtttttaagacaagagttttttgagaaccctgcttttcgtcccgatgggctgaaactctatcctaccctggtgattcgtgggaccggg

SEQ ID NO: 191207 - DNA, 98 bp, Homo sapiens
atgttcctgaaatgccctcccctaggagcttcctccaatttatctactctttcacattcaagaaggcatttgcaagtaaaatcactggcatgttgttg

SEQ ID NO: 191208 - DNA, 90 bp, Homo sapiens
gaagcgcccttcctagttggcattgaaggttcactcaaaggcaggagctcttgtccctggcaaagcgaaagcgcagtgactctgaggaga

SEQ ID NO: 191209 - DNA, 75 bp, Homo sapiens
acgggtttgccgccagaacacaggggccatggcacctgcaaggtgtttctcagcaagattgaggaccgtgtttca

SEQ ID NO: 191210 - DNA, 89 bp, Homo sapiens
gttggtgggagccgtgctctacctctatccgacctgcctagagctggaacgttacctccagagcgagccctgctatgtttcagcctcag

SEQ ID NO: 191211 - DNA, 76 bp, Homo sapiens
gggaagtccttattattggccctccagatacactttagtttgttggcatccaaagctgttggggttgatggtgctg

SEQ ID NO: 191212 - DNA, 89 bp, Homo sapiens
gctgtttcagagcgtttgggtcctctgaggccccttgaccaggtgctggagaatctggtaaaagcaccattgtgaagcagatgaggatc

SEQ ID NO: 191213 - DNA, 82 bp, Homo sapiens
gttggagttggaatttgtgcaatgtttagccaacccaaattaccttaatttttcgagaggcccgtgccatgagaccgcctgg

SEQ ID NO: 191214 - DNA, 100 bp, Homo sapiens
agaaaaatacaaagttggaagcaataccaaacagtggcatggaccacacccagcggaatttaaggaagaaatctctaaacgttttaaatcacatactgac

SEQ ID NO: 191215 - DNA, 90 bp, Homo sapiens
gctgaatgaactcattcaggttggcctgagaggatcaacccagagctgaaccagaagggctacaatgtcaagtccgacgtctggagcctg

SEQ ID NO: 191216 - DNA, 88 bp, Homo sapiens
accgcaaacactgtgtcatattcttgggttcaaattcaagttttaccagaataacatagctgatccagaagaactgttcacaaaatta

SEQ ID NO: 191217 - DNA, 100 bp, Homo sapiens
ttgaccaactggcatcccacagcctcctcttccagaatgcctttgcgcaggtgagtgtggctgtgaagtgcctgaagcccgatgtcctgagccagccaga

SEQ ID NO: 191218 - DNA, 80 bp, Homo sapiens
tcgacaattgcaggatgcacagattctggtcctactgctctgttggctcatgaaataggttttggaagtaaagttacaac

SEQ ID NO: 191219 - DNA, 76 bp, Homo sapiens
gaatggcaccctcacctcccagcccaacaacagtgattacagtggcgagatcttgaacaactgctgcgtcatggag

SEQ ID NO: 191220 - DNA, 83 bp, Homo sapiens
ggcatctgccggctgctccgcaccccggggtcccaggaagggcggcccaggtgaccccagggtttgaagaaaaggagggggag

SEQ ID NO: 191221 - DNA, 82 bp, Homo sapiens
ggatgaacagacaaaccccacaagcactgcatacggaagatgatccctatgatcttgaagatgtttctgcacagaaatgagg

SEQ ID NO: 191222 - DNA, 74 bp, Homo sapiens
caagccaaaatcacagctttgagtgagaaacaggtatggcctcacaagtcttggtctacccaccatatgtttat

SEQ ID NO: 191223 - DNA, 51 bp, Homo sapiens
cctgcctggagtgggaccagtcagatgctgaggtgctgctggacagtgacg

SEQ ID NO: 191224 - DNA, 75 bp, Homo sapiens
ggaggaggaggaagaggaagaggaggatgacccacttgatgccaacgtccggcggtacctccagctgacacagtc

SEQ ID NO: 191225 - DNA, 100 bp, Homo sapiens
caccaactaccttttagagtgggatgagactctttttgatcagaacaatgctgcaaaaaaagaagagtcagaaactgccaacaaaaatgattcttcaaag

SEQ ID NO: 191226 - DNA, 100 bp, Homo sapiens
agatgactcggatacaaaaaggctttccaaagaggaaaaggtgtcacccgcaactacctagactggctcacgtccatcccttggggcaagtacagcaacg

SEQ ID NO: 191227 - DNA, 75 bp, Homo sapiens
gcctcagggtcttcagtggtaacagccagtgtgcagtggaagatagatgataagcctgtaaaaattgacaagtgg

SEQ ID NO: 191228 - DNA, 90 bp, Homo sapiens
gggccacgccggcgatggaggcggcggcggcggactggcgggtctatgctccatcagcaagcactgccgactacaatagggactcgccag

SEQ ID NO: 191229 - DNA, 75 bp, Homo sapiens
aagcgcacgacctccgactactttctccttcaagatcttccagagggagcagtgaaggggctctgcaaattgttc

SEQ ID NO: 191230 - DNA, 51 bp, Homo sapiens
ggccacgcctgaaaggcgactctcctgctgaccccgcactacatctaccca

SEQ ID NO: 191231 - DNA, 100 bp, Homo sapiens
ctggcgtgcgggcggcgacatggaggacggcgtgctcaaggagggcttcctggtcaagaggatgggtcagagaatttctgaatgaagaaaacaaaggtct

SEQ ID NO: 191232 - DNA, 90 bp, Homo sapiens
ccagagaactactgctcatttcccccatcccccacagtgcaccctgctggtgaaggacaaggccttgtacctaatagcaactaatggaac

SEQ ID NO: 191233 - DNA, 83 bp, Homo sapiens
ttgcgaagcaacagagaatcaatttggatcggcttatcataaccaggatcataaaaggattcctctgtactagcacactcccc

SEQ ID NO: 191234 - DNA, 82 bp, Homo sapiens
gaattcgccgtgcccgagaatagctccgtccagcagacccaagaaactcgagagatcttacatttccactataccacatggc

SEQ ID NO: 191235 - DNA, 100 bp, Homo sapiens
cttttctctctcgtcctcgctgctgtacttcgtctatgtggcgcccggcatagattataccgaaaagaagttctagagaaattaatagaaaaatgtgttt

SEQ ID NO: 191236 - DNA, 96 bp, Homo sapiens
cggacacactgtttgcagggaggtgtagacgctgatcaccgtttccagtcattttaaaaattcaggaagctcttcgtgggcggtcttgactggagc

SEQ ID NO: 191237 - DNA, 119 bp, Homo sapiens
gacgccgagcggtgactccccgccgctcccgggggccgtgacggtatttactaccagggagcacccaattcttcttgagaacaccaacctacaacttgaagtacaattcacctggaatg

SEQ ID NO: 191238 - DNA, 101 bp, Homo sapiens
caacacataaaaattatttatccaacagctcctcccaggtactttttgatcatatgggatgtctgaagaaatatgaaactgtgcaagacattctgaaagaa

SEQ ID NO: 191239 - DNA, 51 bp, Homo sapiens
caccgggtgggatgccccatccaggttttcctcctccaccaggcgctccac

SEQ ID NO: 191240 - DNA, 98 bp, Homo sapiens
ataatgcatcattgtgcgtccctgtatgcatactaccttgtactgatccagctccaggtcccacaggggctcttcttccccacgaaaaagatcttatt

SEQ ID NO: 191241 - DNA, 75 bp, Homo sapiens
ggaactgggttgatgttgtgaaggtgaccaagaatatggcccaggtgaccaaagccctggacaaggccctgagca

SEQ ID NO: 191242 - DNA, 50 bp, Homo sapiens
tctagcagacaagatcagatccacagggaaagtgtggagagcctgattca

SEQ ID NO: 191243 - DNA, 82 bp, Homo sapiens
cagtactgatgcccagtggggcattcgtcttggtaaacttggtgtgacttaagagattaaaattaatttggttgctgttggt

SEQ ID NO: 191244 - DNA, 101 bp, Homo sapiens
tgaagacccgcagcccgaagcccctcctcaccgaaatgactgctgtccatgcaggcaacataaacttcaagtgggatcctaaaagtctagagatcaggact

SEQ ID NO: 191245 - DNA, 113 bp, Homo sapiens
tgtggagatccgcggaggccgacaggattcgttggctgccgtccccgctgctgtgcattgggagtggagtcaacatatcaatggagcaagtcacagtcgtcgatgccagcttc

SEQ ID NO: 191246 - DNA, 75 bp, Homo sapiens
ctgaaagaagtacagctcatgaatagactctcccatcccaacatccttagaaaggcctaaagaatgtatttgacg

SEQ ID NO: 191247 - DNA, 90 bp, Homo sapiens
ggagttttccggggccctctcagcaagaacgggaacaaaactctgctctttgccgagggcgtgtggtgagagtccccacagcgaccctgg

SEQ ID NO: 191248 - DNA, 100 bp, Homo sapiens
tgatgaagtaatttgcagtgaaattttaagcgactgtgactctgctgcaagttccccagatcttgaggaggataagatcaatgccctcattaaagcagcc

SEQ ID NO: 191249 - DNA, 98 bp, Homo sapiens
cggtgccccatagatggccagctttcccccgagggtcaacgagaaagagatcgtcttgtgaaaatgccattgtgtgctggaaacctggcaagatggaa

SEQ ID NO: 191250 - DNA, 100 bp, Homo sapiens
tggacctccaaggaagccacgtgcagacatctacaaccttcgatctcctgacgaaaccttattttggggagtaaagtcaattgggcagaggatcctgccc

SEQ ID NO: 191251 - DNA, 75 bp, Homo sapiens
cggaacccgtggtcctccgcttcatagtatctgactgtcttctctcagatgattgcatttcatgatccagagctg

SEQ ID NO: 191252 - DNA, 51 bp, Homo sapiens
tggctcactgcaacctctacctcccaggttcaagcaattctcctgcctcag

SEQ ID NO: 191253 - DNA, 100 bp, Homo sapiens
tgagagccacgtgtgccgcgctctgggcacagccttggaaagtcaggaccgcgacggcagcagagcaatgatgattattctccaccgtctaagagaccaa

SEQ ID NO: 191254 - DNA, 100 bp, Homo sapiens
cctgcgagggctgcaagggctttttcaagcatcctaatgtcctatgatcacgtggaactcacattcaatgacatgaagaacgtgccagaagccttcaaag

SEQ ID NO: 191255 - DNA, 80 bp, Homo sapiens
agcgggtcttgggtcctccgagagcagcagcgatagtggccagaactatagtgccagtagtaaaggtgaacgactaagtg

SEQ ID NO: 191256 - DNA, 100 bp, Homo sapiens
atggggaacaggctccgtgcagagctgggccgacccgaaaagtttatgtggccgaggcagacaagtggaattaggccttgctgcaggggacttcatttcc

SEQ ID NO: 191257 - DNA, 83 bp, Homo sapiens
gtgttgtcgtggccggagcggcccgcgcctgggctgccggcacttcgcggcaggtctattctggataagcaggttttgtgaag

SEQ ID NO: 191258 - DNA, 83 bp, Homo sapiens
ggaggaagaggcattgaggactttccttacctgtttttccagctcacccactgccagcagagttcccagaggtccacttgggc

SEQ ID NO: 191259 - DNA, 83 bp, Homo sapiens
caggtgatcgacggcaggaacgtgaccgtcactgacgtggacatcgtcttcagcaagatcaatgcctccggagccagcgtggt

SEQ ID NO: 191260 - DNA, 100 bp, Homo sapiens
gcgaacgctttactatgccaaaacggcaaaggcagctgttgtgctgtgtatggacgtgggctttaccatgagtaactccattcctggtatagaatcccca

SEQ ID NO: 191261 - DNA, 88 bp, Homo sapiens
ggaaggtgctcttctggcaggaccttgaccagccgagggccatcgccttggaccccgctcacgggtcttatcgaatgttacttagcct

SEQ ID NO: 191262 - DNA, 89 bp, Homo sapiens
gaatatgccaaggaaaaactggagagcttcatcaaaaatagtgatagctttgataagaggaaatgaacacatggatccaggctatctct

SEQ ID NO: 191263 - DNA, 75 bp, Homo sapiens
tgcacaaaatggcgccctacagcctactggtgactcggctgcagtagacccaaatgatttgtacattgtagaacc

SEQ ID NO: 191264 - DNA, 100 bp, Homo sapiens
ggcagcagtagaatcacttgggttcattctattcagcccaatagaatcctgccagaatttctacaaagatttcacattacagatcgacatggctttcaac

SEQ ID NO: 191265 - DNA, 71 bp, Homo sapiens
aggaggtcatgaaggacctgagcctgacgcgggccgcgcgggagcagagcagaggacaacttgtagaagac

SEQ ID NO: 191266 - DNA, 100 bp, Homo sapiens
caacttcgctgtggtgaagctggggcggcaccggatcaccaagacggagatgtcatccgtgggtctttaagcctcaccaacctttcgtcttccatggctg

SEQ ID NO: 191267 - DNA, 97 bp, Homo sapiens
ctacatctcccacaggaagtgtcacacagcagtcaagtatgtcccaaacgtctgtccgcccgtctgcgcccctcacaggaagccggagggtcgctct

SEQ ID NO: 191268 - DNA, 95 bp, Homo sapiens
ctgggggaccctgtcggaagcaactgccgccgccgcctctttcatctcttctggggcaggggccagggccaggaatgtatcctgtcaggtataat

SEQ ID NO: 191269 - DNA, 100 bp, Homo sapiens
cgcggggcgcgggccccgaaggctctccatcgaaggcaacattgcttccacttcaccatcggatgtttgccactcagactgagggggagctcagagtgac

SEQ ID NO: 191270 - DNA, 51 bp, Homo sapiens
cagaagatttaactacgtggtccgggttcagcagactgtacaggatctttt

SEQ ID NO: 191271 - DNA, 100 bp, Homo sapiens
cggcaacatggtgcggtcggggaataagacaatggcgatgaccactcagaaggaggcctggtggagaaccacgtggacagcaccatgaacatgttgggcg

SEQ ID NO: 191272 - DNA, 100 bp, Homo sapiens
tccgcgggagcacactctgtgcggagactgggcggccggccgacccttcctgtcgctgacggcgactgcgggaggccagagacggggtttcaccttgtta

SEQ ID NO: 191273 - DNA, 50 bp, Homo sapiens
cccaacctggtgcccggcccgcagccccttggatctcccttcgtggagac

SEQ ID NO: 191274 - DNA, 75 bp, Homo sapiens
cagagatgccggggctagccttccccaccagaaagctgatgtcctgaccactggagctggtaacccagtaggaga

SEQ ID NO: 191275 - DNA, 75 bp, Homo sapiens
tgagaacttgatcagtttgtgtcagccaccttgttctctaaaggcactgggacgttcgggcgggtgcacctggtg

SEQ ID NO: 191276 - DNA, 75 bp, Homo sapiens
ctgaagggaggcaaggaggcggactgagcgctcccaattgggctggtaggtgagtgctgtcctcggctcactttc

SEQ ID NO: 191277 - DNA, 75 bp, Homo sapiens
gaaatcgacagcctcaaccttcataaacaggtggccagtgcagcttctgacggtcttctgcgcctggatcttgat

SEQ ID NO: 191278 - DNA, 75 bp, Homo sapiens
aagaagagttgagcacaatcaggtatttcagagagatgggaatgatttgcacatgacatataaaataggacttgt

SEQ ID NO: 191279 - DNA, 96 bp, Homo sapiens
atccggctcctccagctaccggcccaaggccatctacctggacatcgatggacgcattcagaagatggaaaaattgtacctgcattacttgagagc

SEQ ID NO: 191280 - DNA, 100 bp, Homo sapiens
gctggtctgcgatcctgaatgggggcggcgtgcccgccggggggctagtggccacgctgcagagcctcggtccttgattctcaagtgcagcagctaccgg

SEQ ID NO: 191281 - DNA, 74 bp, Homo sapiens
tatgacatattccaaaagctcaacagcaacacccagatgcgcctgcttcctctgcgccagaagaaggcccacct

SEQ ID NO: 191282 - DNA, 100 bp, Homo sapiens
gccgtgcccgagaatagctccgtccagcagaaattattcttgacagaagtattttaaaagaaaaatctttacgatggcctcagcagtacttagttctgtt

SEQ ID NO: 191283 - DNA, 90 bp, Homo sapiens
aaagatgagatttacctgtgagatgtttcatcccaacagggtgagcccctccagactccgaataggagatcaagagtttgattcattgcc

SEQ ID NO: 191284 - DNA, 75 bp, Homo sapiens
gttttatcttagtgattatgataactccttgttgtcactcagcccagtccatcagtttctcagcccagtacttct

SEQ ID NO: 191285 - DNA, 82 bp, Homo sapiens
ggcacggaaggtggggcggcctgggaggaagcgcaagcaccccccggattttttatcaagcagaaatgcatcgaacaacgag

SEQ ID NO: 191286 - DNA, 98 bp, Homo sapiens
caacttcgtatgcagggtacattgaagaccttaagaagtttctaaaaccccgaggagttgcagaaagaacaccaagcttcatgtatccccagggcacc

SEQ ID NO: 191287 - DNA, 83 bp, Homo sapiens
ctccgcttcctctcctaggcgacgagacccagtggctaggtgatagtagaaaaggctcccaaagctcggataggagacctgga

SEQ ID NO: 191288 - DNA, 100 bp, Homo sapiens
gagaacttcctgatctctctcgctgtgagacatgtctgagactcctgctcagtgtagcattaagagctctgaggaacatgaatacagtgatgaagctcct

SEQ ID NO: 191289 - DNA, 100 bp, Homo sapiens
gacactgccagctggaaccagaccataatggatgatgaacttgttgttggacatagtgcaagatcagacatctccagcttcccttgtacatctggctttt

SEQ ID NO: 191290 - DNA, 97 bp, Homo sapiens
cgacccgtactgggcctactctgataaataggatttaccaatccttggatgaagtgcttgggaagtctttaagtgccataatcaactgccatttcaa

SEQ ID NO: 191291 - DNA, 101 bp, Homo sapiens
ccagcccctccccacgcatccagataatctccaccgactctgctgtagcctcacctcagcgcattcaggtggtctatctgcactccaacaacatcaccaaa

SEQ ID NO: 191292 - DNA, 75 bp, Homo sapiens
gctgttttcgtgatcttcagaccccaggttctttgacaaatttacatgtattggagaccagaccagaagcccttc

SEQ ID NO: 191293 - DNA, 99 bp, Homo sapiens
gtcggagaccccgcgccggaccctgaggcagcgaagctctcaacgaaatgtggaagtgtcagaacatgcttcggagccatgtacgcgaactattggatt

SEQ ID NO: 191294 - DNA, 100 bp, Homo sapiens
atgctgtttaatctgaggatcctgttaaacaatgcagcttttagaaatggtcacaacttcatggttcgaaattttcgcttcccatcgacggtcagtgcgc

SEQ ID NO: 191295 - DNA, 100 bp, Homo sapiens
tgttagaaaggagacccgactgcaactgctggattgctgcaaggctgagggacgagaacgagattacaccaggaagcaaggcggcagctgccaacctgtg

SEQ ID NO: 191296 - DNA, 107 bp, Homo sapiens
ccggctgcgaagacgcggtgggccgcccctccgtgcccttaaagatagccgttttcccccaatgacaagggatgagctgccacggcttttctgctcagtgtctctgc

SEQ ID NO: 191297 - DNA, 83 bp, Homo sapiens
atcagtcaggcagatgtttgtcgactggaatggcaaaatgatgcttcaacacccaggccaggtctctgcctcggaagtgagtg

SEQ ID NO: 191298 - DNA, 90 bp, Homo sapiens
cgcatccactcattcactcaagatgccacctcagtatggacagcaaggtgtgagtggttactgccagcagggccaacagccatattacag

SEQ ID NO: 191299 - DNA, 100 bp, Homo sapiens
gagaagctgaagctgctggctctgcagcggggagaggacccaggtttgaagatgccgcatttggattggatgaattccaaattctgcttgcttgcttttt

SEQ ID NO: 191300 - DNA, 75 bp, Homo sapiens
gctccacaagcggcgccgcgccctcggcctgcacggggaaaagaagatctcccggagcagtgccctgaaagtgct

SEQ ID NO: 191301 - DNA, 100 bp, Homo sapiens
tactctcctggtccaaggacacctacagccccgacgaacatttctgggtgacactcaacaggattcccgataatgctgtagatccagatgtatctgccag

SEQ ID NO: 191302 - DNA, 100 bp, Homo sapiens
ggtcacagccacactctgcaccgctaggccgtccccgaccttgcctgaacaagaacaatcaaccatgacgaccgaatctggatcagactcggaatccaag

SEQ ID NO: 191303 - DNA, 75 bp, Homo sapiens
aatcaccctgcttgagcaaaggaatggctttcctggagatggcatgcagcagccagcatacacacagcatcaaaa

SEQ ID NO: 191304 - DNA, 153 bp, Homo sapiens
ctcctccaagacaaacagcggaaaatctactgcgtggcttgtcaggaactcgactcagacgtggataaagataatcccgacaatgcagatcttcgtgaagactctgactggtaagaccatcaccctcgaggttgagcccagtgacaccatcga

SEQ ID NO: 191305 - DNA, 100 bp, Homo sapiens
aaatgcagcatcacagtgtcacagaaattcggaactatccgggcagatttgattgaacagatgagattcaaacagagactgaaagtgatccagacgctgg

SEQ ID NO: 191306 - DNA, 82 bp, Homo sapiens
ctgcgtcccgccaccggccgcttctgtcctcgctgaataccactagaaacatacctgtaaccagagacagctgattatagct

SEQ ID NO: 191307 - DNA, 75 bp, Homo sapiens
tgacatccgaggtgcctttctccaaaagattgtcttcgcagttttaccgacttagaagaacttgatgagacagag

SEQ ID NO: 191308 - DNA, 80 bp, Homo sapiens
cgcggaacagcttgtccacccgccggccggaccaggtttggtgcacctcgatttggaggaagtagggcagggcccttatc

SEQ ID NO: 191309 - DNA, 82 bp, Homo sapiens
aaaaagggcaagacaaggtgaagaggataatgagttcaacttttagatacaaagagacaactggatacagagacaaatcttc

SEQ ID NO: 191310 - DNA, 87 bp, Homo sapiens
tcacttcaggattctgggagaagagcaggtcttcaaacatgaactagcttacttattggctggaattcttggagcagcaatagatta

SEQ ID NO: 191311 - DNA, 100 bp, Homo sapiens
accctctgaagatttcctggttggagggacagccccaggatgccgtgggccgcagccactcaggactgtcaaaggaagggaaaaggccgaggcatcagcg

SEQ ID NO: 191312 - DNA, 100 bp, Homo sapiens
cacgctgatggtgcagcaccgcatgatggtacccaaagtcagacctcgaagtagggggaaaactgcagtggaagatgaggacagcatggatgggctggag

SEQ ID NO: 191313 - DNA, 100 bp, Homo sapiens
ctgacatgctgggttctgctgagttagctgaggaggtcaatttaaatggttctggcaaactgctcaagagcacgaacttccaggagccggtgcagccgct

SEQ ID NO: 191314 - DNA, 145 bp, Homo sapiens
tggctggaagatccaagaacgtagggatgcctattgccatgcttttacacactgatggagagcatgaacggccaggagaggggccgtatggggtctttgctggaagagatgcatccaggggccttgccacattttgcctggataa

SEQ ID NO: 191315 - DNA, 50 bp, Homo sapiens
gttggggtgagaccctcacttcatccggatcacagaagaactgcagcttc

SEQ ID NO: 191316 - DNA, 90 bp, Homo sapiens
ctttcgggaaagctctctggggcaggcttatgttcctgaggaagaattgaaggcagcagaaatagatgaagagcacgtggaggatgacgg

SEQ ID NO: 191317 - DNA, 75 bp, Homo sapiens
tggccgggctgagtactaccagtctgcagtgttctgaatagcagtccagctatgaggggaggtgcccgtggcagg

SEQ ID NO: 191318 - DNA, 100 bp, Homo sapiens
cgggcagcccgggcagagaccatgtttgacaagacgcggctgccgtacgtggccctcgatgtgctctgcgtgttgctggaccatggcaaaagttataacc

SEQ ID NO: 191319 - DNA, 72 bp, Homo sapiens
gaaccatgtttcatgttgattggggagatttttgaacttcgaggaattggccagtcagtgctgaaagatgta

SEQ ID NO: 191320 - DNA, 98 bp, Homo sapiens
tgatagtatcatctgtgaaagacagcttgaccggaaagatgcatgttctgccactaattggtggaaaagaagggaaaaggccgaggcatcagcgtgtg

SEQ ID NO: 191321 - DNA, 74 bp, Homo sapiens
cgacaagcacacactatggcgctgaaacggattaataaggttttcctcctccaccaggcgctccacctccatct

SEQ ID NO: 191322 - DNA, 51 bp, Homo sapiens
catgtatgaaggtgtaggaagaatgttgttggaggaagagtcttccaagag

SEQ ID NO: 191323 - DNA, 112 bp, Homo sapiens
cgagcacagagcctcgcctttgccgatccgccgcccgtccacacccgccgccagaacccagcgggtgccgcttctccacccgaggcttccacctccaacgagccatgttcca

SEQ ID NO: 191324 - DNA, 130 bp, Homo sapiens
gcaaaatacactttcaaattaagaatgggtctgtgatgtcacatctaggagcatctacccatggacagacatgtcttcccatggaggtggatcttcttgttccaaccaaagtgactggcatcattacaca

SEQ ID NO: 191325 - DNA, 75 bp, Homo sapiens
aaatgcgtggcatctatgccaaagtggaccggctagagaactcatcccaagaacagtatccataaggaagatgga

SEQ ID NO: 191326 - DNA, 88 bp, Homo sapiens
gactgatctccatgtcctgttgtggggcttttacagcctttgggggccggccaggacgtgggccgaagctgcatcctggtctccattg

SEQ ID NO: 191327 - DNA, 121 bp, Homo sapiens
cacaacagtcgcttgaacagattggcacccgaattgccaaagttttggaaaagagcagagaggagccttcaggggaagtagaggtggccgaggttggggcacacgaggaaatcgtagtcgg

SEQ ID NO: 191328 - DNA, 76 bp, Homo sapiens
ctggagtgaactggattccatgtagagacccctggagtttgcctgagaatacagatcaacccacagaacaaagcgg

SEQ ID NO: 191329 - DNA, 83 bp, Homo sapiens
gtaaggacaggcttcgatgggctcggtggccggacaaaattcatccagccttcaggcgggccccagcccaggctcagtgctgt

SEQ ID NO: 191330 - DNA, 100 bp, Homo sapiens
gccgggtggtggttaaaccatgttaaggaggattttacagaggccatttaaagttttggcaactgaaactgtaagtcacaaggcattagatgcagatata

SEQ ID NO: 191331 - DNA, 100 bp, Homo sapiens
gcaggcggcggcagcggggaccattcccaccaggtccgggtgaaagcctactaccgcggggttatatcctgtgttgtgacctcatggtttaagtgggaat

SEQ ID NO: 191332 - DNA, 82 bp, Homo sapiens
ctgccgcaagttcatgcaagatgaactcctggaagcaggacatggagcgggggaacccagagtgggcatgtgccagtggccc

SEQ ID NO: 191333 - DNA, 100 bp, Homo sapiens
aagttcaagctctacctgaccatcatcctgctcctgggtgccgtggcatgtcgatttgtccttcactacagcaggagagcctgtcctgcctccagtccac

SEQ ID NO: 191334 - DNA, 100 bp, Homo sapiens
ggggactccggcgggggatgcgcgcccggcccctcagcgcccccagcacgccgccgagtcccgctcgccatggaatcctcactatggatgggctcattga

SEQ ID NO: 191335 - DNA, 80 bp, Homo sapiens
agattgagctgcagtcccagctgagcatgaaagctgccttggaagacacactggcagaaacggaggcgcgctttggagcc

SEQ ID NO: 191336 - DNA, 73 bp, Homo sapiens
ggatattacattaggaagtgttcatggactcctagaagtaccccaccccacccctgctccttggaggacaacg

SEQ ID NO: 191337 - DNA, 50 bp, Homo sapiens
aactacagaaacctggtcttccttggtattattgtctctaagccagacct

SEQ ID NO: 191338 - DNA, 100 bp, Homo sapiens
ctccacagagaatgctctgcacccgttgatggacttgcacttaggaatctgttacagtgagcacagaagcagacctgtgggctcatagtcttcacccccc

SEQ ID NO: 191339 - DNA, 74 bp, Homo sapiens
ctcgctctaaagacggaaccgccacagcactcaagattttttatcaagcagaaatgcatcgaacaacgagaatc

SEQ ID NO: 191340 - DNA, 100 bp, Homo sapiens
caacgcagatatagaacatttcttttatcacagaactcttggtgtaataacagaagctacaataaaaatcagaccagtccctgaataccaaaagtatggc

SEQ ID NO: 191341 - DNA, 100 bp, Homo sapiens
gataaaaagtcctttgaaatggtgctggatgaaattagaaagagttgtctgctggttctcagcttgaagaagattctgcagtccttattgatcctttttc

SEQ ID NO: 191342 - DNA, 100 bp, Homo sapiens
tcattgtgtccatcttggccatctatgctggagccatcaagtcttcttttgctcctccacacttccccatgattatgatatgagggtggatgatttcctt

SEQ ID NO: 191343 - DNA, 89 bp, Homo sapiens
cgagcgcggcgcggggccaccatgggggcccagctcagcacggaggatctcctgatgcagtccagcaaagaactttcacatgtggacct

SEQ ID NO: 191344 - DNA, 75 bp, Homo sapiens
tttcctgtgcctgtagctccctggttggtctgctaaaaggtcagagtaatgcagaatgcgtgccttcatctcaga

SEQ ID NO: 191345 - DNA, 75 bp, Homo sapiens
caaaagctggaacaaaagagcctctattaaggtatctcgggggagctttgtgccttgatggatcaagttcatcat

SEQ ID NO: 191346 - DNA, 100 bp, Homo sapiens
gcaggctgggcacgaggaccatgctgggccggagcctccgagaaagtgcctggtgaagaatgtgatgggatcactagcatgtctgcggagagcggccctg

SEQ ID NO: 191347 - DNA, 75 bp, Homo sapiens
caagataactcctcttatggcagcatttagaaagcatgtgcagtctttgccaacaaaaaaaattaccaagaaacc

SEQ ID NO: 191348 - DNA, 82 bp, Homo sapiens
aaggccctcagaccacaggattaatgtaatctcaggggcgatataatcaatgaggtggtcctaaagttgctcaaggctggat

SEQ ID NO: 191349 - DNA, 75 bp, Homo sapiens
ctgagctgcctgtgtctctgcctccttccgcatgtggtcccagcctcattgatgctactcacagagacgtggatg

SEQ ID NO: 191350 - DNA, 96 bp, Homo sapiens
tctgccaaaatttgccatccgagggatgctgaaaacctttgggcttcatggagtcgtcttagatgttgattcagatgtgctaggtgtgggccggcc

SEQ ID NO: 191351 - DNA, 96 bp, Homo sapiens
cagtgatcgctaagaactttgccgataccttaggatacaacatagaacctattatgctctatcagagcaagctaggaattgtttcccttctactgg

SEQ ID NO: 191352 - DNA, 74 bp, Homo sapiens
ggagaggacgaggaagagctgagtgggacaaaggctgaaggggatgctaagggagataaagcaaaggtgaagga

SEQ ID NO: 191353 - DNA, 100 bp, Homo sapiens
atcgagggacgcccggcccaagtgatgtgtcttgctgaatcagggctctcttatccctgccatcgacttacagtgggaagaagatcttcacctgcacaga

SEQ ID NO: 191354 - DNA, 74 bp, Homo sapiens
ccctggccaggaagcggagggcgcgcgagggaaaacggacgatgtattactaagctggaaaacatggggtttcg

SEQ ID NO: 191355 - DNA, 99 bp, Homo sapiens
tggccggatggaaatcctaatgacagtctccaaattcgcctccatctgtaccatggtataatacttctccacgtctgcttcaggaagaaagtgcctgcc

SEQ ID NO: 191356 - DNA, 100 bp, Homo sapiens
ctgaagatgggaaaagccctttggacaagtgctgaagctgctgaaagatggcagaagaagtggtggtagtagccaaatttgattatgtggcccaacaaga

SEQ ID NO: 191357 - DNA, 75 bp, Homo sapiens
ccgtctacaggattggaaatgcctttggtgtaagacaatggttttgatgatgatggttcagaatttcatgaacat

SEQ ID NO: 191358 - DNA, 100 bp, Homo sapiens
atgaaatggagatgtgggaactggccagaagagttgctggagaatgtaaccctaatccataaaccagtgtcgttgcaaccccgtgggctgatcaataaag

SEQ ID NO: 191359 - DNA, 82 bp, Homo sapiens
gtatatttgcagccagtactctatatgaacaatccgtctggatcacggatgtaggaagtgtaccttaccagtaacaaatgtg

SEQ ID NO: 191360 - DNA, 98 bp, Homo sapiens
atgatagtcaggatgaagaggaggaggaggaggaagatgaggaagatgatcaggaggatgattctggagaaggagaggatgatgcggaggttcagcaa

SEQ ID NO: 191361 - DNA, 75 bp, Homo sapiens
gcacggacgcaacacttttggaacttagacgctaggtgagaactctgtctcagtcgacgggaagtgcagtgactc

SEQ ID NO: 191362 - DNA, 74 bp, Homo sapiens
ccgaggtggagggcaagtgcttacagtcaggcttcgagatgcttaaggtgacaatctccaatagacttgtgtct

SEQ ID NO: 191363 - DNA, 100 bp, Homo sapiens
tcttagtccagcaagtcctcatagccaggcctgcctagggtagttaaaagacgagtgaatgctctcaaaaacctgcaagttaaatgtgcacagatagaag

SEQ ID NO: 191364 - DNA, 98 bp, Homo sapiens
aagcaggaacgagagcggagcggagcacagtccgccgagcacaagctccagcatcccgtcaggggttgcagctgaagaaatcaggggagaaacccctg

SEQ ID NO: 191365 - DNA, 74 bp, Homo sapiens
ccaacactgcatggagcggatccaggaatttgtgaccctcaaggatgtcggcatggacttcaccttgggagact

SEQ ID NO: 191366 - DNA, 75 bp, Homo sapiens
cgttgatatcggtggtaacgacggcctcagcaggcggggaagatgaaagggttgactatagtcaatggggccaat

SEQ ID NO: 191367 - DNA, 98 bp, Homo sapiens
ggaaaatctccccggtgactttcagaatttgcggaggatgactccagcagagcttgcaaatatggagcatttatatgaatttcaccctccagtttgga

SEQ ID NO: 191368 - DNA, 100 bp, Homo sapiens
actccaggaccctttccttctctacagaaatgccagattggttagcaggaagaagatgagccttaagtctgaacgccgaggaattcatgtggatcaatcg

SEQ ID NO: 191369 - DNA, 90 bp, Homo sapiens
ctgaataacaagcaacagctcatgagagctgtggatcggtccgtttcatcaagtctgtcagatgcaagagatgccttagtgaatgctgta

SEQ ID NO: 191370 - DNA, 75 bp, Homo sapiens
tcaaacttagactaggacatctcaaaaagcatttcaaaaggtttgaactacctaaccattatggcaccaggaaac

SEQ ID NO: 191371 - DNA, 96 bp, Homo sapiens
aacttcagacttgcagaaaaccagtgaaggggtgcccagggtggctccgtggcccgcacactcctggaagatgggacattcaaggttcgagtggtg

SEQ ID NO: 191372 - DNA, 101 bp, Homo sapiens
gaagacttccagtagctccaaggaggttaaggaaacagagcaaatgcagcgttacaatcaaagacttattgaggaattgaaaaacagacagactcaagaaa

SEQ ID NO: 191373 - DNA, 90 bp, Homo sapiens
caggatcagtaaagaaggaaaaagcagtaaagccagaggaagggagcatttcctgaagacgtagtcatgcagcacgtcagcagctcccag

SEQ ID NO: 191374 - DNA, 75 bp, Homo sapiens
caggatggagactacgagtttgtggcgtgtgacgagcatggctcccggggtttcggctttgtccattttgagacc

SEQ ID NO: 191375 - DNA, 100 bp, Homo sapiens
gccagaacagaaccctgggaggggaattccagcaccgcagcaaccactccagaaactttccctccttcagcccattttccttctttcgcaggtaaaaaac

SEQ ID NO: 191376 - DNA, 96 bp, Homo sapiens
caccccggaagctgggaaatggccatttcataattctgaatcatgtctgataacggagaactggaagataagcctccagcacctcctgtgcgaatg

SEQ ID NO: 191377 - DNA, 98 bp, Homo sapiens
ggaagtctatgatgagtacaattgctgccaaacaaggtgaatccgacccagagaggaaagaaacaaggcagaaagtagacgacgacagaaaacatgag

SEQ ID NO: 191378 - DNA, 90 bp, Homo sapiens
actccatcgtgggactcagcagccttggtgctcaggtgccagatgcaaagggcgcccccgtgaggcgcttcgccccccaccatgttccag

SEQ ID NO: 191379 - DNA, 100 bp, Homo sapiens
cttcagaaagcctccggaatctaaaaagccctcagtaccagagacagaagcagatggattcgtccttttaggtctccctgacttggtcccagaccccaac

SEQ ID NO: 191380 - DNA, 100 bp, Homo sapiens
caacgcaatgttcggtgcgggggacgaggacgacaccgatttcctctcgccgagcggcggtgaccatgcagcaggtggccaggacagtggctaaagtgga

SEQ ID NO: 191381 - DNA, 73 bp, Homo sapiens
ccgcctggcggccatcgtggctaaacaggtactgctggggctggtctacaacgcctcgggctccgagcactgc

SEQ ID NO: 191382 - DNA, 95 bp, Homo sapiens
agaaatttgtgtggagcgaggaaaggtgtgctgtgcctgaggccagctttgatgaccatgacccagctgtgatccatgagaacgcatctcagccc

SEQ ID NO: 191383 - DNA, 90 bp, Homo sapiens
gacgtgaagcgcttgcagacgcactgctacaaggtccatgacccccttcagcatgccggcaaacacatggaggattgcattgtggcctcc

SEQ ID NO: 191384 - DNA, 130 bp, Homo sapiens
caactttcccagaagttgttctaacgctgcctttgctttaaaacagtattacttgcgcctgcctagggtagttaaaagacgagtgaatgctctcaaaaacctgcaagttaaatgtgcacagatagaagcc

SEQ ID NO: 191385 - DNA, 83 bp, Homo sapiens
cgctgctgctgcccggcctcgggggcgtctctggccgagcctctttttgtggaaaacgacagcagcagcagtggcctggaaga

SEQ ID NO: 191386 - DNA, 98 bp, Homo sapiens
aggaaaatcatattatagatggagtaaaggtaaaataccatgaagattttgaaaaaacaaaggggagaggctttactcccgtcgtggacgatcctgtg

SEQ ID NO: 191387 - DNA, 100 bp, Homo sapiens
tttcagctaccagttacttttacgtgtgatgttttgagtatccgaggagcccaggaggaggaacccacagacccccagctgatgcggctggacaacatgc

SEQ ID NO: 191388 - DNA, 50 bp, Homo sapiens
tgcgaggaaaatggcggcgggagattccaactccacagagtgaccagaga

SEQ ID NO: 191389 - DNA, 74 bp, Homo sapiens
ggctaacggtggaggcggcccagttcatacagcgtgccttgtctttgaagatgctcccaatggggtggaggcgg

SEQ ID NO: 191390 - DNA, 97 bp, Homo sapiens
cgctctcatgaagcaaccgcccattcagtctacggctggggccgtcccagttcgcaatgagaaagtcccttaagctcctaggatttttagatgttga

SEQ ID NO: 191391 - DNA, 80 bp, Homo sapiens
agaggctgcctccgagcgccgtccgccaggaagactccctgcctcctgagtcccagtatgtacaaagtacttagaacagc

SEQ ID NO: 191392 - DNA, 82 bp, Homo sapiens
cggcgagtttccgatttaaagctgagctgcgaggaaaatggcggcgggaggggagcttttggaagagtcccagatggaagcg

SEQ ID NO: 191393 - DNA, 80 bp, Homo sapiens
acgctcctcggaccaagcctcgggagctaaggccgaatacatcaagcaatggtaacatctttaaatgaagataatgaaag

SEQ ID NO: 191394 - DNA, 108 bp, Homo sapiens
tttacgaccaggttgagtttgatgttcctgttggttctcgaggggactgctatgatagtccaagtggtaagaagttcagaagcaagcctcagttggcaaggtacctgg

SEQ ID NO: 191395 - DNA, 75 bp, Homo sapiens
ttgtagcctattggaggaaaacacaccaagattttatcatgtgggcaacctgctgcaactggttctgcctggatg

SEQ ID NO: 191396 - DNA, 100 bp, Homo sapiens
aagaaggacgagcccaagagcggcgaggaggcgctcatcatcccccccgacgccgtcgcggtggactgcaagggacagagcagaatgggctgatatagat

SEQ ID NO: 191397 - DNA, 100 bp, Homo sapiens
tcgtacgggctgtcggccgaggtcaagaaccggcccagctcaacattggcaatgtgctccctgtgggcaccatgcctgagggtacaatcgtgtgctgcct

SEQ ID NO: 191398 - DNA, 119 bp, Homo sapiens
ctcgcaacaagatcccctatgagagtcccatcttcagcagagtctgcccagtcaagcccgtccaactccagctccagctcagactccagctcagactcagacttcgagccatcccagaa

SEQ ID NO: 191399 - DNA, 83 bp, Homo sapiens
atgagcaaacctctcggattgggtgtcaagacgctgggtcgggccggcagcccgcgttgcgcccgcacgtgcacaagcagacg

SEQ ID NO: 191400 - DNA, 51 bp, Homo sapiens
gcgcctcgctcagctccaacatggatctgagtgatgagacgtgtccccact

SEQ ID NO: 191401 - DNA, 75 bp, Homo sapiens
tacaaccatcaatgagatcgaagacactttccggccccagaggtgatccgaatgcaggataacaacccattcagt

SEQ ID NO: 191402 - DNA, 75 bp, Homo sapiens
cggccatgtgtgccacctgtgccatccaaactgcacctacggaccatatactccttgacgacagggactaccacc

SEQ ID NO: 191403 - DNA, 51 bp, Homo sapiens
ggcgctcatccacagagccacatctgttagataacggagggcagactttgg

SEQ ID NO: 191404 - DNA, 100 bp, Homo sapiens
atgaaatttcatgagttcgttgagaaactgcaggatatacagcagcgaggaggggaagagagacacgatgaggcgagtggtacgacagagcaagtttcgg

SEQ ID NO: 191405 - DNA, 98 bp, Homo sapiens
aaagagagagcttgtgaaactgagggaatagcggagctggagtttgttcagatcatcatcatcgtggtggtgatgatggtgatggtggtggtgatcac

SEQ ID NO: 191406 - DNA, 83 bp, Homo sapiens
ctccctgcgacccagcggaagttatgtgccttcgtgcatcgctgcggtcgcacagctcgcattggccacgggggcagcgctct

SEQ ID NO: 191407 - DNA, 100 bp, Homo sapiens
tgagtgtgccacacaggtagccctggacggcattcagtgttttgccatattttctgctcttaagaatcttcaagataagattcgacgcttggaacttgag

SEQ ID NO: 191408 - DNA, 100 bp, Homo sapiens
cggaaagaaggaggccagtatggcttagtggctgcgtgtgcagctggagggcagaaagctgacttcatgagaccgaggatctcgttcgttgatcgatgct

SEQ ID NO: 191409 - DNA, 75 bp, Homo sapiens
accaccccctgcaccagagatatcacaggagaaccaggatggtcatccagaggataagccaacgcacatcatctt

SEQ ID NO: 191410 - DNA, 90 bp, Homo sapiens
actcacaaatcagcaacacagaatttctgcaagtaattgaaaatgacagatggcgagacctggacaggaaatgccctcttcagattgacc

SEQ ID NO: 191411 - DNA, 100 bp, Homo sapiens
tccaaacagggccagaagctggagatgatgctggagcagaagttagcgcttctctctcgatcttctcactcagatatggcaacaagcagccttcactttg

SEQ ID NO: 191412 - DNA, 73 bp, Homo sapiens
cgaagatttattttgtcagtggtggttgtgtcaaaccgattggtgacatctccatgctgtattgtcacaagca

SEQ ID NO: 191413 - DNA, 75 bp, Homo sapiens
aattcattcacaaacctggcaggaaggtgcttcaatattggatattcacacagagcccagtttttcaagtttgct

SEQ ID NO: 191414 - DNA, 82 bp, Homo sapiens
gcacactggataccattttcctcttctcctatgctgtggttttaaaatcaaagatgggaaaatcggagaaaattgcccttcc

SEQ ID NO: 191415 - DNA, 96 bp, Homo sapiens
cagaaatgaaaactgaagatggcaaagtagaaaaacactatctcttctatgacggagaatccgtttcaggaaagggtgtgccatgtgacttggtga

SEQ ID NO: 191416 - DNA, 98 bp, Homo sapiens
aaagggagaaatgcctactgagtttagggaattgcttgctggaagaaatgatgttctgacccagtgggtgatatatgccatccgaaaccttaccgaag

SEQ ID NO: 191417 - DNA, 75 bp, Homo sapiens
gccagattaattattcggaacctgagctttaagatactggatgatgaagctgcgcaagagttaatgcctgtggtc

SEQ ID NO: 191418 - DNA, 100 bp, Homo sapiens
gaagcagaggtgggggtgtttgtccagcgactccggggcctgatgaatgacatcgatgttggtgcatgtagacaatgaagcatcaatcaaccaaacaacc

SEQ ID NO: 191419 - DNA, 100 bp, Homo sapiens
gttgaaagcgacaagtggaggcgccgctctagcggccgggactctgaactatggcgaatcagcatgattcttcagaggctcttcaggttctcctctgtca

SEQ ID NO: 191420 - DNA, 80 bp, Homo sapiens
cttagaaacctctgcacagaaccatccaacatattctttacaatggatgatgtggtcaaggttggagactttgggttagt

SEQ ID NO: 191421 - DNA, 90 bp, Homo sapiens
gacgtccgtggggcaccgatgtctgggattactgcacggggtcgcgccgtggcggagcagtcgtatgactggagaagaaggaaaagaagt

SEQ ID NO: 191422 - DNA, 116 bp, Homo sapiens
cggctcagaagataaacgaggggctggaacacctcgccaaagcagagaaatagtactccaaagattcaggtttactcacgtcatccagcagagaatggaaagtcaaatttcctgaa

SEQ ID NO: 191423 - DNA, 100 bp, Homo sapiens
tcttgatgctctctgggctttgttgaggcggcagtatgaccgggtttctttgatgcgacctcaggaaggagatgaggggggacacagcgattgccacgcg

SEQ ID NO: 191424 - DNA, 75 bp, Homo sapiens
ggcctcggcgtgctgcgcctccgcggctgccctgcgccagagatgccatcttttctgaaaacgccaatggatctg

SEQ ID NO: 191425 - DNA, 90 bp, Homo sapiens
tgcacatcgcacccaggtggttcagctcgcatagtggtggttctaactttgatggtttgagaccaaatgggaagggagtgcctatggacc

SEQ ID NO: 191426 - DNA, 75 bp, Homo sapiens
tgggagcctcatcattggttatgccaggaaggatttgatgccctggatccctttattcccatcctggtttccaac

SEQ ID NO: 191427 - DNA, 100 bp, Homo sapiens
gtgaccgagagcgtgaccgagagcgcgaatatcgtcatcgttagaagggatctgctggaggaaggaaaggccacggttccctgcctggcagaaaaactta

SEQ ID NO: 191428 - DNA, 87 bp, Homo sapiens
tacgccagcggcgtcgagaggaccatcctgggtgctggccctgtgctggaggagatacaactcgtcaacgaatcaaattcagtgatg

SEQ ID NO: 191429 - DNA, 74 bp, Homo sapiens
agcaagcatgcagcttactgcttgaaagatttatgacctgtgtgttgatgccttgagtccaaccttctattttc

SEQ ID NO: 191430 - DNA, 101 bp, Homo sapiens
ccgagacgctgaggaaatacggcacgctcaccaatcgccggtgtgccttgaatgaagaagaacacctgttcccagcgctgaagcattccgatggttctttt

SEQ ID NO: 191431 - DNA, 113 bp, Homo sapiens
aacagggccgtgccgcagatgcccaccggaatggagaaggaagaggagtcggtgtaccttgaaagacttttaacatacgcagagatagatatctgtccggccaactggaagcg

SEQ ID NO: 191432 - DNA, 88 bp, Homo sapiens
tctgtggctgctcctggctctgcgcaccggccaggtcagagcagcccaccatgggatggggagggggtggaggctgcaccccgcgccc

SEQ ID NO: 191433 - DNA, 74 bp, Homo sapiens
aaagacctgttcttaaaaaaaggttcacaactacatgatgccacccctcgaccgaagctggagggactacgtcc

SEQ ID NO: 191434 - DNA, 90 bp, Homo sapiens
ctctcccagagtgctccaacgggactgaaccacatgggctggccagagcacacaccaggcactgttgttacattatatgccactctagga

SEQ ID NO: 191435 - DNA, 100 bp, Homo sapiens
aacacggtgttcatcttttctacagcgtctcgctcgaaccgggatcatagtgaccacgagtgaggctgttctgcttcagctggtagctgataaggaccat

SEQ ID NO: 191436 - DNA, 74 bp, Homo sapiens
ccttcgttccccccgagttcgacgtgaccgggaacacctttgagaacgtcaagtctgagttggagatggcccag

SEQ ID NO: 191437 - DNA, 80 bp, Homo sapiens
agaagatcctgctgcccgagcccagattcttctgatgtagagcgactggaaagattcttcgactcagaagatgaagactt

SEQ ID NO: 191438 - DNA, 100 bp, Homo sapiens
ttctggctcgaaaggtggagcccccctttaaacctctgttgggccgagatggacgaaaaaatgtggttccttgtgttctctctgtaaatggggacctaga

SEQ ID NO: 191439 - DNA, 82 bp, Homo sapiens
aggattccagggggataccctgcagctagcattcattgacctcagacaagcactaaagcaatcttcaaccgaactcctcttt

SEQ ID NO: 191440 - DNA, 75 bp, Homo sapiens
tggcttccgtgctgtcctacgaaagcctggtccacgccgtggccggagccgtggatatgtgatggcgtccagttt

SEQ ID NO: 191441 - DNA, 75 bp, Homo sapiens
cgatccagcctgcggagcctgtggggcagtgctgcttttgacacaaaaacggggttacgtgtggcagtgaagaag

SEQ ID NO: 191442 - DNA, 75 bp, Homo sapiens
gtggttgtgtggtcgcgtctcggaaaccggtagcgcttgcagcatgggccatttctgagcagtggaggtttcaag

SEQ ID NO: 191443 - DNA, 50 bp, Homo sapiens
aggaacaagggagtcctctgctcagatattgaagcacagattcgagaaat

SEQ ID NO: 191444 - DNA, 100 bp, Homo sapiens
taatggatcacattttgaatttgaagggaggctgagaagacaaaactccttatagctgcacagaaacaaaaggttgtggaaaaagaagctgagacagaga

SEQ ID NO: 191445 - DNA, 80 bp, Homo sapiens
gattgtgcctgccaccctacgccgtagccgtccagagactggcaggcctcggcctaaagagcccccagaactgcagcatc

SEQ ID NO: 191446 - DNA, 101 bp, Homo sapiens
gacagaagccaaagtaattatggaaaatgtttataggaggccttagctgggacactacaaagaaagatctgaaggactacttttccaaatttggtgaagtt

SEQ ID NO: 191447 - DNA, 100 bp, Homo sapiens
ggtgcatcaagtacctgctgcttggcttcaacctgctcttctgggaaaatctctaacttccaaggtcccaccaacagttcagaaacctaccacagtaaat

SEQ ID NO: 191448 - DNA, 88 bp, Homo sapiens
cgcgctcaagttcgagaacgcggccgccgggtgaaaggtgtagcagtcactcggcctacacccacagcatcgaccttgtgaacccagc

SEQ ID NO: 191449 - DNA, 102 bp, Homo sapiens
atcattgatatctgccctgtaggtgccctaacctctaagccctatgcctttactgcccggccttgggaaacaagatttctcgaatgctggcagccaaaaccg

SEQ ID NO: 191450 - DNA, 101 bp, Homo sapiens
agaatccccccgaaaggaccccccagaaaagaggcacagttagatgaagaaggacagtttcttgtcagaataatatatgatgactccaaaacttatgattt

SEQ ID NO: 191451 - DNA, 100 bp, Homo sapiens
aaatgctgacacgtgtacgccaaaatatgttaccttcaattcaaaggttaaagccgagccagccaaaatagaagctttccgagcttcactttccaagcta

SEQ ID NO: 191452 - DNA, 82 bp, Homo sapiens
gagaacacagacgtctcgaagggacagagaaggacgcaccattcccagtgagtgcaaaaacaaaacctttaggatcaagaga

SEQ ID NO: 191453 - DNA, 101 bp, Homo sapiens
agccgccccgctccgcctcggcggggccagccggcgagtctaaacccaagagcgaaagtgaaattcgttattctacatggaagaaagctgtgatgaagtca

SEQ ID NO: 191454 - DNA, 100 bp, Homo sapiens
agctcactacagaaaggatgagagaagaagagaatgaaggaatagttcaactacgaatactaagaacccagtctccagagaatacagagggcaaagatgg

SEQ ID NO: 191455 - DNA, 100 bp, Homo sapiens
gccaatgcgctcaaaggcaaaaaggataacaacgaacttgatgcaagtgataggtttgccaaggtcagacctctcatcatccggatgaactgcaatttcc

SEQ ID NO: 191456 - DNA, 50 bp, Homo sapiens
ggccgagcaggctgagcgatacgacgatgaaggatttgggggcagagcac

SEQ ID NO: 191457 - DNA, 98 bp, Homo sapiens
gttgccgtcccttcgcctccttcaccgccgcagaccccttcaagttctagtcatgaaatcatgaccaccccaggaaaagagaactttcgcctgaaaag

SEQ ID NO: 191458 - DNA, 100 bp, Homo sapiens
tatgctgcagcatattgtactggcctgctgctggcccgcagggaaggatttgatgccctggatccctttattcccatcctggtttccaactataacccaa

SEQ ID NO: 191459 - DNA, 88 bp, Homo sapiens
tctacttctctgtggaagtattacactagccctgggaaatgcacagaaattgccaaaagctctcggaagaactggttgttaaagagca

SEQ ID NO: 191460 - DNA, 90 bp, Homo sapiens
gcctatttacccagaagtagtccatatggaacgactgaagctggtgactgttttgggtgctggccttctctgtggaactgctctggcagt

SEQ ID NO: 191461 - DNA, 82 bp, Homo sapiens
cagggatgagtcatgtggcagtggaaaatgcgctcgggctggaccagcagccgaggaggagctggtggaggctgacgaggcg

SEQ ID NO: 191462 - DNA, 73 bp, Homo sapiens
gatgacctgctgctcgtgctgatctcagacagtctccattctggagcagcggttgacactgacagaagacaag

SEQ ID NO: 191463 - DNA, 100 bp, Homo sapiens
tgtggacatcaaatgctgaaatatgtttcaacatctgaatcagatggtacagattgctgcagtggaaaatcaggaaaatctctaacttccaaggtcccac

SEQ ID NO: 191464 - DNA, 100 bp, Homo sapiens
gccgcctctgccgcagctggagagatgcagaggatgctatttatggaagaaatggttatgattatggccagtgtcggcttcgtgtggagttccccaggac

SEQ ID NO: 191465 - DNA, 90 bp, Homo sapiens
gctggaagggatgtcgtctcagcagtgctcgggcgcaggacggggaggtttactgcatcgacgcgcggttctacgggaacgtcagccggt

SEQ ID NO: 191466 - DNA, 101 bp, Homo sapiens
gaaaacatcgtggccaacacggtcttgctgaaagccagggaagatacgtaggtaacctttccagagatgtgacagaagtccttatacttcagttgttcagt

SEQ ID NO: 191467 - DNA, 100 bp, Homo sapiens
ttatgggactgtggagagcgctcatcttgctgccagcacccctgtcactgcagctagcgaccagaagcaaggactgatcctttgaaatactccagccatg

SEQ ID NO: 191468 - DNA, 80 bp, Homo sapiens
gggtttccggctgcagggcggtaaggatttcaacatgcctctgacaatctctagtcggggatctgatgagcttctttctt

SEQ ID NO: 191469 - DNA, 100 bp, Homo sapiens
gcaggacagcgccttcctcaacgacgcggacatggtcatgagctttgtgaacctggtgcaagcatctcttggcagtttacctgagtcaggttatgaggac

SEQ ID NO: 191470 - DNA, 100 bp, Homo sapiens
gaacaaatccgggggcaaggccaaaaagaagagtaagcgcctaggatcccttaataagtttaaggccaaggcccgttccattcttctagcaactgacgtt

SEQ ID NO: 191471 - DNA, 90 bp, Homo sapiens
tataaaaagtacctggatgccgagcagagttatgcgatggcatgttatttgaaagcaattgagacgcaaccgaactttgcagtagcttgg

SEQ ID NO: 191472 - DNA, 101 bp, Homo sapiens
cccagacagcccggtagagcccagctcagcgcccggcagccttcgacgcgatgttccgccggagcttgaatcgttttatcagtgtgcgtgtgaccaccatg

SEQ ID NO: 191473 - DNA, 75 bp, Homo sapiens
caaacctgccaacgtccagccttattacctctatggatccaagttgatattcactgatggactccaaagaatcat

SEQ ID NO: 191474 - DNA, 83 bp, Homo sapiens
ggtttgcatttgtgtatgaagctcaagatgtggggagtggcagagagtatgcattaaagacagaagccctgggggatgcggag

SEQ ID NO: 191475 - DNA, 82 bp, Homo sapiens
gcgggctctgccaggagagaagactggacttgatcatcttccctgacgactgtgagttcaagcgggtgccgcagtgccccag

SEQ ID NO: 191476 - DNA, 96 bp, Homo sapiens
ggacgaggggctccgggtcttccagagcgtgaagatcaagatcggttaatttggagtggcccctggagtcagtttcctacaccatccgaggcccca

SEQ ID NO: 191477 - DNA, 100 bp, Homo sapiens
cccgaagcgcggacgcggtttacggcagtgctcggaatgtgaccaggcagggagcagtgacatggaagcagatatggccatggaaaccctaccagatgga

SEQ ID NO: 191478 - DNA, 76 bp, Homo sapiens
tgggtctacaccgaccagccgcacgccgaccggcgccgggagatcctggctcttagaacaagctctggtgattgag

SEQ ID NO: 191479 - DNA, 122 bp, Homo sapiens
cctcagccaccgagaaggctacggcaccatgtacatgaagacacggcttttccagacttaattcagtgcacaaatgagatgaatgtgaacatcccacagttggcagacagtttatttgaaag

SEQ ID NO: 191480 - DNA, 97 bp, Homo sapiens
ggagcgtccggagctagctggatcctctaggcagacctggagtggaagatcatttatgttggctcggctgagagtgaggaatttgatcagatcctag

SEQ ID NO: 191481 - DNA, 73 bp, Homo sapiens
tgtccttgggtgctgatgtcaatgctcaggttgatgggaaaacaaatcctaaaattcagagcatctatttgga

SEQ ID NO: 191482 - DNA, 82 bp, Homo sapiens
gctacccaacagacaacggtatcttccatcccatctcatccatctactgctggattgagagaatatcagcagaggaatagcc

SEQ ID NO: 191483 - DNA, 50 bp, Homo sapiens
tcaccaatatccgacctagctttgttgcctgacctggtaccccagctggg

SEQ ID NO: 191484 - DNA, 96 bp, Homo sapiens
ttacctatgtacctgttaccactttcaaaaaagactggagcgctcagcctgccacggaagactggtctgcagctcccactgctcaggccactgaat

SEQ ID NO: 191485 - DNA, 90 bp, Homo sapiens
ctcaacacattcactgacaaactctcacgctcacaccgggtcatctgattgggagtaggttgcatctttgttgaaatgatccaaggagtt

SEQ ID NO: 191486 - DNA, 101 bp, Homo sapiens
gacccggcggctgtggaggccacgctcagctcgccaggcggcgcagggccgccagatcccacccttggacccccatgaaaatggaaacaatggaacaatca

SEQ ID NO: 191487 - DNA, 75 bp, Homo sapiens
ctgggcctctgctgcgtcctgctgaccttcgattttcgacaatgaagccaaagacgtggagagagaagtttgctt

SEQ ID NO: 191488 - DNA, 90 bp, Homo sapiens
gctgatgataggggggttccatctcccaacttgtccatgaatcccagtcagaagttccagcctgccactgttctctgatgccatgccagc

SEQ ID NO: 191489 - DNA, 100 bp, Homo sapiens
gctgatggcatcttcaaagctgaactgaatgagtttcttactcgggagctggctgaagatggctactctggagttgagaaaccccgagactcttcagttg

SEQ ID NO: 191490 - DNA, 100 bp, Homo sapiens
aagaagctcatgagcagcctgcccaacttctgcgggatcttcaaccacctcgagcggctgctggacgaaggtgaagacactggtggaattcctcattgat

SEQ ID NO: 191491 - DNA, 75 bp, Homo sapiens
cagaaactcagccactggttgccttggtaggcaataaaagcggctgagccagaggccaactgcagaggaactgga

SEQ ID NO: 191492 - DNA, 100 bp, Homo sapiens
gatgctcgctgggtaacatacttcaacaagccagatatagatgcctgggaattgcgtaaagggtcggcactcttcaccctcccgagccctgcccgtctcg

SEQ ID NO: 191493 - DNA, 82 bp, Homo sapiens
aagaagatgagaccgggggaggcgacgctaagttgctgatcgtggcggtcaaaatgcagatcttcgtgaaaacccttaccgg

SEQ ID NO: 191494 - DNA, 73 bp, Homo sapiens
cgtctgctgcaggtcatgaagaaggagccagcagagtcgtctttcagactgatgggaagaagagttactataa

SEQ ID NO: 191495 - DNA, 100 bp, Homo sapiens
aaggagatgaggtcagagaagtcgaaggggtgctggcgagacgggggtgatgcccacccgggcgagaaaggttctgcggggagtgtctccagccctgcct

SEQ ID NO: 191496 - DNA, 50 bp, Homo sapiens
ctctcacgtctggtctcctgacaggtttgctcctaaatcttaaaatatgg

SEQ ID NO: 191497 - DNA, 82 bp, Homo sapiens
agagggaggtgaccaaggaggagtacaaggacatcctgcgcaaggccgtgcagaaggtgagaagccctaccactgcaactgg

SEQ ID NO: 191498 - DNA, 98 bp, Homo sapiens
gaaaacacagagccaccctggaaagtactgtaagattgatgttaaaggcatggtgttcaccccacttcatcagcgtacataagttatctcttcttttg

SEQ ID NO: 191499 - DNA, 85 bp, Homo sapiens
gaaagccactgttcggttaaaggagcctcctgtggatatctgtctaagtaagttgcaagaatgtagtaactctgatcagctacaa

SEQ ID NO: 191500 - DNA, 100 bp, Homo sapiens
caccgacatggaacagggactcactggggaaggacagaataacgggctcccagattcacaagccccaccaagaggatcaccccaggaacgcttggaggct

SEQ ID NO: 191501 - DNA, 90 bp, Homo sapiens
tacgcctctacttggtcagtttctagaagacatggaagcatatgctgagaggatgccagcccccatcagattgcgggagctgatccggac

SEQ ID NO: 191502 - DNA, 109 bp, Homo sapiens
caggaacccgcgccgcgagggctccttccctcagatgaccggttctaacgagttcaagctgaaccagccacccgaggatggcatctcctccgtgaagttcagccccaac

SEQ ID NO: 191503 - DNA, 100 bp, Homo sapiens
ggtggtgcagcttcttcagttccaggaagatgcctttgggaagcatgtcaccaacccggccttcaccaaactccctcttcctgcctgacacagctcactt

SEQ ID NO: 191504 - DNA, 100 bp, Homo sapiens
cttagctgtgctcgcgctactctctctttctggcctggaggctatccagcaaccacgaagctgccctgagacgctcactcacgctgtggggatgtcagag

SEQ ID NO: 191505 - DNA, 98 bp, Homo sapiens
cgcgaccccggccccggcctcggccgtggcgagcggtgcaagagaagcctgagccagtgccgctggagagccgctcctgcgtcctcatccgccgcgac

SEQ ID NO: 191506 - DNA, 82 bp, Homo sapiens
gccaattcggtggaacgaggacgcggactgcgaaggcaggaattgaatgatctggcacgggaccctccagcacagtgttcag

SEQ ID NO: 191507 - DNA, 90 bp, Homo sapiens
ttgctaagtgtgggaattttagctaagaaatgcttccagactgcacacttttacttagaggacagtacatcccctagagttatatccaca

SEQ ID NO: 191508 - DNA, 100 bp, Homo sapiens
cagcttcacattctcaggaactctccttctttggagctgtaggtaaaacttgcctactgatcagttacacaaccaatgcatttcctggagaatatatccc

SEQ ID NO: 191509 - DNA, 98 bp, Homo sapiens
ccaattaccgtcaagattactgagatacggaaacgctggggccagaacactcaggttttcaaatggaacattttgatgcatcacttagtacctatttc

SEQ ID NO: 191510 - DNA, 75 bp, Homo sapiens
cctggccgccccgagcggagcctggaggctgaaggtgatgtggccgccctcaaccgacgcatccagctcgttgag

SEQ ID NO: 191511 - DNA, 100 bp, Homo sapiens
cttcctcagtcatgaggagaaatgaacagctgaccctacatgatgagaggtttgagaagctggcagagatggaggaggagctacgttatgcacccctgtc

SEQ ID NO: 191512 - DNA, 98 bp, Homo sapiens
aaaggagacccaaggaacagtgccaagttagatgccgattacccacttcgagtcctttattgtggagttttagaaagagcgttttcgctacgtaaagc

SEQ ID NO: 191513 - DNA, 50 bp, Homo sapiens
ccgcgatggagctgggggagccgggcggttcagcagctggacatggagaa

SEQ ID NO: 191514 - DNA, 100 bp, Homo sapiens
cattcgtgaaattctgcagcacatcggcgaaaggttgcatctgcactggagaaatggaagacagcaatccgggaagctcagactttctccaggatgcacg

SEQ ID NO: 191515 - DNA, 98 bp, Homo sapiens
ccgcccgctttcggctcgggcctcagggtgttcctgaaaagaaggtacttccaatcaccgtccccaagtcaccagcctttgcattgaagaacagaatt

SEQ ID NO: 191516 - DNA, 100 bp, Homo sapiens
gtttgtttctctgtatggcacagaagaatatttgtctctgctggatgaaccgaatcctaacagtccagccaatagccaggcagcacagctttatcaggaa

SEQ ID NO: 191517 - DNA, 83 bp, Homo sapiens
ctggtccgcagcggcaacagtaacgaaaaacagggctgtcaaaatgcagatcttcgtgaaaacccttaccggcaagaccatca

SEQ ID NO: 191518 - DNA, 99 bp, Homo sapiens
gcagcggatattcaactcctttgtttacactgagaaaatctcaaatggagaaagtgaagtacagcagacaagcagaatgatgtggagatcccatctcct

SEQ ID NO: 191519 - DNA, 75 bp, Homo sapiens
caagtttaatcagacctgctcacacttcagaatagagaagcaacacagtcactcctggcggcaaaccaaacaaaa

SEQ ID NO: 191520 - DNA, 85 bp, Homo sapiens
tgagagcgagaacacctgtcaagacggaaatggagagctggatttctccacttttctgaccattatgcacatgcaaataaaacaa

SEQ ID NO: 191521 - DNA, 101 bp, Homo sapiens
ctcctttacacacagacaactatgatagcacaaacatgccattgatgcaaacgcagcagagagcagagtcccaatgtgtcattgatgcagagaatgtctga

SEQ ID NO: 191522 - DNA, 75 bp, Homo sapiens
gcaggacttaccgagaaggcaaattggccaggattccagacagcattggaaaagacatagaaaaggcttgccaat

SEQ ID NO: 191523 - DNA, 100 bp, Homo sapiens
atagaagctgcatataaagtcgctaatttctctgcaaagaatgtccaaaaattcatattcacattgatcgtatcgacaaaaaagatgtcccagaagaaca

SEQ ID NO: 191524 - DNA, 90 bp, Homo sapiens
ccgagcacgagcggatcttgcaggagatcgagagcaccgacaccgcctgtgtggggcccaccctccggaaccacgtgaatgttgaggggg

SEQ ID NO: 191525 - DNA, 75 bp, Homo sapiens
cggccggtcagggcaagagccaggtgactagttgtgcttgggtgcctgacagttgccagctgtttactggaagca

SEQ ID NO: 191526 - DNA, 74 bp, Homo sapiens
tgctatgttactgcaatggcatgaaaaggagatttcttctatcttacaggaactgaaaagagtagaaaagcagc

SEQ ID NO: 191527 - DNA, 100 bp, Homo sapiens
acaccgtgcacattctctgttctaagtgccttaagagaggatcgcccaatccacatgcttttccaggctgctgatactttggctgtgaggcaaaaaagga

SEQ ID NO: 191528 - DNA, 83 bp, Homo sapiens
tatttattttacctcagtataacattagcgtgcctacagcagacaatgcagatcttcgtgaagactctgactggtaagaccat

SEQ ID NO: 191529 - DNA, 88 bp, Homo sapiens
ttcacggctccatcgctgttagtcattgaatctttgggaattattatttataaagcactggactatggtttgaaggagaatgaagaaa

SEQ ID NO: 191530 - DNA, 75 bp, Homo sapiens
cccccagcggcagccgagcccgcccgcgcgccggtggccggaaacttccactttgcccctgggaagagcttccag

SEQ ID NO: 191531 - DNA, 82 bp, Homo sapiens
tcagattttgtggaaagctattaactgtcctgaagcacatacccccggcctcatgagtacctgtccccagcggatctgccca

SEQ ID NO: 191532 - DNA, 51 bp, Homo sapiens
caggctttgacccttctttaaaaggtcagccatgtcatctgagcctccccc

SEQ ID NO: 191533 - DNA, 97 bp, Homo sapiens
tctcgtagtccgacgcctggggcgatggatccgtttacggaggaagatgtctcaggagccatatcacatctgtcccttggggagatcccagctatgg

SEQ ID NO: 191534 - DNA, 101 bp, Homo sapiens
agaggctcagggaataaatgggaacaggccagcaaaacactcagctgcaagtccaaagccacaagatatctccggagcatttggataatgtgacagttgga

SEQ ID NO: 191535 - DNA, 98 bp, Homo sapiens
tgggatcttaaaccctcacgctgcctcttgcacctgtgctgcctgctgcgacgacatgaccttaaaaaatggctacaaacttcctagcacatgagaag

SEQ ID NO: 191536 - DNA, 50 bp, Homo sapiens
aatcatccagtctctgaagctttgcccagaaggacttcacggtgcgcgag

SEQ ID NO: 191537 - DNA, 80 bp, Homo sapiens
tggcccccgatggccacgatgtggatgatcctcactccttccaccatttcagaatggcttcggttattgcctttccttgg

SEQ ID NO: 191538 - DNA, 100 bp, Homo sapiens
gccagagcccaggtgcccagaggactttcttccagcttctgctgtccttctttgtggagagcaaggtgacgatgcctggggagcctgtggacgtggcatg

SEQ ID NO: 191539 - DNA, 82 bp, Homo sapiens
gccagccccaagaaggagaccctcatccagctgatgcccttcttcgtagtttaccttccagcagccctacgaccaggcccac

SEQ ID NO: 191540 - DNA, 100 bp, Homo sapiens
gcggatccgggcccgctcggcccctcccatgagaggagctctaaattgggaagtaatgcaggaaacaagccttgtaaaaatcaacttggattcacttttc

SEQ ID NO: 191541 - DNA, 74 bp, Homo sapiens
ccgaggcccacctgctgacatctacctgccaggccgagacgcatccagagctttcgtgaccggggactgttctg

SEQ ID NO: 191542 - DNA, 75 bp, Homo sapiens
gtgaacgaaagcagtgacggaggagcttgtaccaccgatgatgctggagggtcttgaaatctttacagtaaaacc

SEQ ID NO: 191543 - DNA, 83 bp, Homo sapiens
cgtctgtgcggctgcgtggggctcggccgcgcggactgaaggagactgaaggttttgggatttgagattgacgcggtgaactc

SEQ ID NO: 191544 - DNA, 95 bp, Homo sapiens
ggtcagctcgctgcagcttcaacggagacttcgtgtgcggacagtgtgtgtgcagcgagggctgccgaagccaaggccgcagaagcagccgccag

SEQ ID NO: 191545 - DNA, 102 bp, Homo sapiens
cccagccctgcctctccctgggctctgcaactgaccaaccacatccgggagtcgctgccggccctacgtagcaaactacagagccagctgctgtccctggag

SEQ ID NO: 191546 - DNA, 98 bp, Homo sapiens
aaatctttcttcaggaatatgtggctaatctccttaagtcggccttccctcacctacaagaggtggtatttccaacattttggaggaactggttgtcc

SEQ ID NO: 191547 - DNA, 96 bp, Homo sapiens
cctgcctctgctctggctctttgtgctgttcaaggcttgcagccaatttactggagcagggatgacgtagcccagtggctcaagtgggctgaaaat

SEQ ID NO: 191548 - DNA, 49 bp, Homo sapiens
gtcctggtggatctgcagtacgaaggccatttcataattctgaatcatg

SEQ ID NO: 191549 - DNA, 50 bp, Homo sapiens
gtccactttggaaagaagatttctcagttacagaaaccccagaaccagcg

SEQ ID NO: 191550 - DNA, 98 bp, Homo sapiens
cactgggattgctgtagcggccattgttgctgctgtagtggccttgatctactgcaggaaaaagcggatttcaggtgcttccagctctgctgcacctc

SEQ ID NO: 191551 - DNA, 75 bp, Homo sapiens
taccactatttgttgagaaatgtgtggaatttattgaagatacaggaaatctgaaatagagtactatgctatgtt

SEQ ID NO: 191552 - DNA, 83 bp, Homo sapiens
cgcggtgcagctgccgacaccccagcctgttgctgacactagtgttttaaaatcaaagatgggaaaatcggagaaaattgccc

SEQ ID NO: 191553 - DNA, 99 bp, Homo sapiens
tatggggcggtggaggagacggcttggaaaacggagagactggggagaagaaacaaggtatcgccagagatacttggacttgatcctgaatgactttgt

SEQ ID NO: 191554 - DNA, 100 bp, Homo sapiens
tgaagcgtgaggccggcatcgtctttccgtcctctgaggcgacggccgcggctgcacagcaaagatctggacagcatggacttactcctcagaagtcatt

SEQ ID NO: 191555 - DNA, 95 bp, Homo sapiens
cgatgtagatcagcgattttctgctgttcaagtacttgagcatccctgggttaatattgggaaaatgaggtacgttagtgttcgcgattttaaag

SEQ ID NO: 191556 - DNA, 100 bp, Homo sapiens
cttctggaactcatgccactctcagaggtagttgatgtcacttggcgatattcctgcaaacatgaagaggtgattgccagaagaactaaggttaaagaag

SEQ ID NO: 191557 - DNA, 100 bp, Homo sapiens
ttgtctcgtcgtcatcgtcatcttcctgtcagtctgcagctactcagctgatatgcattcaagatggttacctttccctgctgacagaaactggtgaagt

SEQ ID NO: 191558 - DNA, 83 bp, Homo sapiens
gatgaggaagctgagtcagctacgggcaagcgggcagctgaagatgatgaggctattgagggcacctacattgacaagaaatg

SEQ ID NO: 191559 - DNA, 96 bp, Homo sapiens
gctgtggtgtctccttccgcagacgggctatgtgcacccagatgagttcttccagtcccctgaggtgatggcagctgaatgccaagggaacagaag

SEQ ID NO: 191560 - DNA, 98 bp, Homo sapiens
tggatcgtgcggacgcctggctcctccgaaaagcgcacgagacagattttgagaagagggggaaaaaggaagtttgtcctgtcctggatcagtttctt

SEQ ID NO: 191561 - DNA, 98 bp, Homo sapiens
actggcctggcgtgcactccgcacctcggggacattattgcgcgtggaacggctgcttttggaagttacagaatgtctgaaggggacagtgtgggaga

SEQ ID NO: 191562 - DNA, 75 bp, Homo sapiens
tgaagatcggccgcccgggctacaaaggtcagtctggggcaggtaacaactgggccaaaggccactacacagagg

SEQ ID NO: 191563 - DNA, 100 bp, Homo sapiens
cagcttcagcagaggctgcagggccagcaggaccctgatgctcccataagacagaaaatgccccttgatgatctggatagagaagatgaagttagattac

SEQ ID NO: 191564 - DNA, 75 bp, Homo sapiens
ggaacacatttatgatgagcagccccccaatgtcgaggagtggattgagaggatccagaatccagatctctggaa

SEQ ID NO: 191565 - DNA, 75 bp, Homo sapiens
ccgcgcccttctctcgcttcggactgcgcaacgctgcgctctgggctgacaggacagaatgctttgacctccaag

SEQ ID NO: 191566 - DNA, 100 bp, Homo sapiens
cccaaacccaaattcttcgttctgtgcggcgacctcatccacgccatgccaggtgaaggaaatacaggtgctgcagaatcttctttttctcaggaggttt

SEQ ID NO: 191567 - DNA, 98 bp, Homo sapiens
gttttacttcaggttatgtacgcttctacactgagattactttctatgaagacaaaaattttcaaggccgtcgctatgactgtgattgcgactgtgca

SEQ ID NO: 191568 - DNA, 100 bp, Homo sapiens
cacagtgggggtgtgcaaacccgagagaactgggtttaagtttttgaaactgaagtaggcctacacagtaggaactcatgtcatttcttgtaagtaaacc

SEQ ID NO: 191569 - DNA, 100 bp, Homo sapiens
agtcgtaagaagaggtcccaatcccccactctttccgccctaatggaggtctccagtttcgatgaagactggcccatttgcagagcactccaaccagctg

SEQ ID NO: 191570 - DNA, 75 bp, Homo sapiens
gtgcagctgcctcagttcttagcgcaggagctcatgggacacatgtagctagtatagctgctggacactttccag

SEQ ID NO: 191571 - DNA, 90 bp, Homo sapiens
ggagaatacagccgccaggcagtggaagaggcattcatgaaggagaacaagggcaattgaaggaacagactaaaaatcgtgtcctggaag

SEQ ID NO: 191572 - DNA, 74 bp, Homo sapiens
catggtggacagaaagtcagcctcttgtggccaagtcctgtatctgccatgtctgtggcgtccacctcaacagg

SEQ ID NO: 191573 - DNA, 83 bp, Homo sapiens
tggcggcttccaggcgcactaccgcggctctacagattctcccctgcccctggagaaggaggagcaggtccgacttcaggctc

SEQ ID NO: 191574 - DNA, 96 bp, Homo sapiens
gaacgtgccgctgatgacacctggcagaaggcagccatggagggcgatggctcagattcgccgtgacactccattcagggtaatggacaagatgga

SEQ ID NO: 191575 - DNA, 96 bp, Homo sapiens
tggcctattcagctgtaccagtccgccattttgctaccaagaaagccaaagtctatgcatggaacattgaaaagtattgaagggcctccaaacttg

SEQ ID NO: 191576 - DNA, 75 bp, Homo sapiens
gcacctggatgagacatttgctacagcatcccacattaagtcaacggaggttgtgcccagacatttccttcttcc

SEQ ID NO: 191577 - DNA, 101 bp, Homo sapiens
actgccgccgccgcctctttcatctcttctggggcaggggccagggccagaaataacatctgctttgctgccgagctcagaggagaccccagacccctccc

SEQ ID NO: 191578 - DNA, 73 bp, Homo sapiens
gacaacgccttcatgctgctcacgcaggctgcctctaagaatcaaacttcactcttgggagaaccaccaaaag

SEQ ID NO: 191579 - DNA, 100 bp, Homo sapiens
ctcacatcaacttccagtgagagtgacacaggtcaggaagcagaatattccttatatggagccaaaaacctgtatatcatctccgtgaaggggatcaagg

SEQ ID NO: 191580 - DNA, 98 bp, Homo sapiens
tccaaaccttcatgctattgaaatggatagtgaaatccagaaacagtttgaagagctctataataacaagcctttgtattcatttgaagataatgcag

SEQ ID NO: 191581 - DNA, 96 bp, Homo sapiens
tggccaagatccgcaaggccgcccgggaactgctgacgcttgatgagaaggacccacggcgtctgttcgaaggaatccctttgcccacgtccagct

SEQ ID NO: 191582 - DNA, 76 bp, Homo sapiens
aaaaacatgtcggatgaagagaaacaggacattctgagcatgtgagacctgaggactgcaaacagctataagaggc

SEQ ID NO: 191583 - DNA, 98 bp, Homo sapiens
tgtgcaccgggtgaatgagagtggcagacagaaggaaacagcaaggcctctgaggtcttgtccaataagcatgtggctcctgatcatcttttgcaaat

SEQ ID NO: 191584 - DNA, 76 bp, Homo sapiens
cgcagcgcgaacatggacgccgtcaacgccttcaaccaggagagcttgtggacaaatgtataggatcaagaattca

SEQ ID NO: 191585 - DNA, 88 bp, Homo sapiens
gctctgcccctatgccagccgcaactccagccagctcaccgtccacctgcgatctcacacgggactatcggacaaaacctttctgctg

SEQ ID NO: 191586 - DNA, 100 bp, Homo sapiens
attagctgaaaacatcatcgttttgaagagttctgcgttttgccagtcacctctcaactgtgtgccaaagatgagaactggactgatgaccaactgcttg

SEQ ID NO: 191587 - DNA, 74 bp, Homo sapiens
cgagcggagaggagatgcacacggcactcgagtgtgaggctccatgttggctcaggcagacaagcttccaatga

SEQ ID NO: 191588 - DNA, 83 bp, Homo sapiens
cgccgccgcccagagactgctgagcccgtccgtccgccgccaccacccactccggacacagagacaagaggagcagcagcggc

SEQ ID NO: 191589 - DNA, 100 bp, Homo sapiens
aaggattccaagtaactcttatttggtttttcgttggaatatacgttgcacatttatggcgattctgagtgtgagggcagacttctgccaggctcagcac

SEQ ID NO: 191590 - DNA, 102 bp, Homo sapiens
cgccactgccgcaggaggcgtgagagttgctttaatgtgaagtattttcctggagtcacttcctttgggacgttgccattctttccatcacaaccagtttcc

SEQ ID NO: 191591 - DNA, 100 bp, Homo sapiens
gaggaagccgactgctgcctggtctgcaaagaagtcctttcaagtctctaggactggactcttcctaagcaagtccgagagaagaagaaggaggttcctg

SEQ ID NO: 191592 - DNA, 83 bp, Homo sapiens
caccgagcgcttgatgtgcgcggagagcaatcgccgggacagctgcaagatcatggaagggaagtggttgctgtgtatgttac

SEQ ID NO: 191593 - DNA, 76 bp, Homo sapiens
aacacagatgatgtcaacgccatcatcctggcccagaagaacatggagccatttgtgcaggccaagctgcggcccg

SEQ ID NO: 191594 - DNA, 145 bp, Homo sapiens
gccggcccctgcggccgcaggtcgtcacagacgatgatggccaggccccggaggctaaggacggcagtgtcgtgtgggagccaatgggagatgggaagaaaatcatttccttggctgataaccatatcctgctgtgggatttaca

SEQ ID NO: 191595 - DNA, 74 bp, Homo sapiens
ttaatctaaaagaatatgatccagatgatcatctgatagaagagatattggcaaaacacttgaatgatggtaaa

SEQ ID NO: 191596 - DNA, 90 bp, Homo sapiens
cggatattcaccagaacatgatgtttctggtatcagtgacccctttttgcagatctccagatcacactaagtttgtgggaagcttcaaaa

SEQ ID NO: 191597 - DNA, 96 bp, Homo sapiens
cttttcctgagttaagcaataaacttagcagtgtctgcaaaaacgaatcttttcctacaacctgttaactgactggactgttggtaacaaagtaat

SEQ ID NO: 191598 - DNA, 100 bp, Homo sapiens
cagtccacggacacttcaggctatggccagagcagctattcttcttatggccagagccagaacaatatagcaggttctggtgatggtacacaagaagtat

SEQ ID NO: 191599 - DNA, 51 bp, Homo sapiens
tgagcaccttttggcccaatgaatatcagtggggttgcccagactctcaag

SEQ ID NO: 191600 - DNA, 100 bp, Homo sapiens
tgcttctcgcttcagaacattttctccaaaaaggatatgtttgccttcatgggcagcctggataccaagggtaccagctacaagtatgaggtggcactgg

SEQ ID NO: 191601 - DNA, 75 bp, Homo sapiens
gtcgtggtggtcattaagcggagatccgcggagctggagtttgttcagatcatcatcatcgtggtggtgatgatg

SEQ ID NO: 191602 - DNA, 100 bp, Homo sapiens
cccacgcagattttaattcccactctagattctgaaagtccagtatcccccctggagtcacattcgaaagctgcttcaaactcaaaggaaacaaccccat

SEQ ID NO: 191603 - DNA, 83 bp, Homo sapiens
ctgaggactgacctttttccgatcgacgagaacgtgctaggagcccagctggacgttgaggccgcccattcagagatcctcaa

SEQ ID NO: 191604 - DNA, 90 bp, Homo sapiens
acccaatgcctgtttattcaccatcaacaaagaagaccacacactgggaaacatcattaaatcagccgagagtgtgtggagcagttacag

SEQ ID NO: 191605 - DNA, 50 bp, Homo sapiens
ggcggcgccatggcagggcttgcaggttcatggaatccgagctggaccta

SEQ ID NO: 191606 - DNA, 50 bp, Homo sapiens
agtaaatcagaaagaacccctcgtcagcttgttgcagatccttgtgccag

SEQ ID NO: 191607 - DNA, 100 bp, Homo sapiens
gccaggcgggacgcgcacagtccctccacgcggaaagaagtaccttcgccggtcaccggctcctgcagggattggcttccaggtcctcctcagcattggg

SEQ ID NO: 191608 - DNA, 82 bp, Homo sapiens
cgccgcccgtccccggcacacgcgcagccccggcctctcggcctctgccggagaaacaggaaagaccacagcaagattcttt

SEQ ID NO: 191609 - DNA, 100 bp, Homo sapiens
atgatatagcaacagagttgccctgtcaccatttctttcacaaaccttgtgtctcaatttggctacaaaaggccagaaggaaatatcagttgaaaaaaag

SEQ ID NO: 191610 - DNA, 100 bp, Homo sapiens
tccatcctcctgactccataaactattggattcataacctgctccatgcttgaaaacatggggattggaattcgtgcatactccttccacgttactgcag

SEQ ID NO: 191611 - DNA, 74 bp, Homo sapiens
gagatcgtggacaagatcatgggcaaaggacagatccagatccagagacaatggccccgatgggatggagcccg

SEQ ID NO: 191612 - DNA, 95 bp, Homo sapiens
agctcctgccgcccgccgctggcttcaagtgcaaggcaccatgactcctgtgaggatgcagcactccctggcaggtcagacctatgccgtgcccc

SEQ ID NO: 191613 - DNA, 75 bp, Homo sapiens
gcgacgcaagatggcagccaccacgggctcggttcttcctgtccaagatccggtcccacgtggctacttgttcca

SEQ ID NO: 191614 - DNA, 109 bp, Homo sapiens
ggatttgttaaggattccaagtaactcttatttggttttcctttggaatatggataaatacaccatgatacggaaactagaaggacatcaccatgatgtggtagcttgt

SEQ ID NO: 191615 - DNA, 98 bp, Homo sapiens
tcgccggcctctcagttggcctcactgccattccccaggcgctggcctatgctgaagtggctggactcccgccccagattgatgctttgacagaagtg

SEQ ID NO: 191616 - DNA, 100 bp, Homo sapiens
gtcttttcctgctggtaaataacactgaaatgttagcattgaagaacgtctgggagcaatggatatagacacacacaaaaaaggaaaggaagacctccag

SEQ ID NO: 191617 - DNA, 97 bp, Homo sapiens
aggcttctggccaagctgtggatgattttaagcatgcagccagtaaagatcccagagaagttcgagaagctagagatcataaggaaccaaaagagga

SEQ ID NO: 191618 - DNA, 51 bp, Homo sapiens
aacaccactgaagcattgccaaggtcgccactgggacactgtgaaccagga

SEQ ID NO: 191619 - DNA, 100 bp, Homo sapiens
cacagtgatgagcaagcagtaataaagtctcccttaaaatgcaccctccttccacctggccaggaatcagaataatccagaatggctactctgatctatg

SEQ ID NO: 191620 - DNA, 144 bp, Homo sapiens
gcaggagccgtgagagcctcaacgtggacgtggtcaagtacgagagtggccctgacggaggggaggaagaagggaaaaggccgaggcatcagcgtgtgaagaccgcaaagacgatcccgagtacagttgtgaacagcattgctg

SEQ ID NO: 191621 - DNA, 140 bp, Homo sapiens
gtattttttggtttgactgtgtatactctacaatctaagaaggatttcagcaaatttggagcagggcaccacaccaaccccgtgggcactgagtggcggtggaagatggaccagcctgaaatgatcttgaaggaagccat

SEQ ID NO: 191622 - DNA, 75 bp, Homo sapiens
ccgtacgcggtgctgcgagggcagaacctggcatcactgtcctggtaactggggccaagtggctgtcagtgctgg

SEQ ID NO: 191623 - DNA, 90 bp, Homo sapiens
gcgagaagtaaaggttgcccaattagctggatcagtggctgaaatgtcttcttatcatcatggtgagaggtccagttccggccgtaccgc

SEQ ID NO: 191624 - DNA, 74 bp, Homo sapiens
cgggagatccgagagctcttcaggagtctaccatggctcaagaatctcccaaaaattcagcagcagaaattcca

SEQ ID NO: 191625 - DNA, 88 bp, Homo sapiens
acaccgcctacaggagtatgatgcaaggttcatgttgctgaggaggcagagggctgagttcttccatccatcgccttcaagtgtcagg

SEQ ID NO: 191626 - DNA, 90 bp, Homo sapiens
ctccgcagcaaacaactccgcaaacgaaaaagaacgacatgatgcaatcttcaggaaagtaagagggacagagcgggatgccaccagctt

SEQ ID NO: 191627 - DNA, 87 bp, Homo sapiens
ggagaaaaactggatgttggtagaaaaagcaagagtttgttatatagcactaggtcttgactccactaacggggacttctcatacgg

SEQ ID NO: 191628 - DNA, 75 bp, Homo sapiens
ttattgacctgattgatagagaacaggaactggaagaggaggcaacagtatttggggcaagaagtttgaggatga

SEQ ID NO: 191629 - DNA, 98 bp, Homo sapiens
gaccttgagctccaggagttcgtctcttacgtctgcggaagtgcagctgcctcagttcttagcgcaggcaccaccttccatggtcaataatgaacaac

SEQ ID NO: 191630 - DNA, 74 bp, Homo sapiens
gcacagccaatttcatgctccactatagacctggaatggccaaatatcaaggtgaagttcaaagtttgaaactg

SEQ ID NO: 191631 - DNA, 51 bp, Homo sapiens
ggttctgaagatcgtgatcttctttacagattcgtcttctggatgtctaaa

SEQ ID NO: 191632 - DNA, 75 bp, Homo sapiens
ataaaaaacatatccgagggtgtcctgttacttccaagtcatcaccagaaaggaagtcctgagttgaggcttgcg

SEQ ID NO: 191633 - DNA, 75 bp, Homo sapiens
tcctgcccaacaaacagaggacagtggtgctggagaatctggtaaaagcaccattgtgaagcagatgaggatcct

SEQ ID NO: 191634 - DNA, 100 bp, Homo sapiens
gttggattttcacgtgctcttgctaaagaggtagcaagaaagaaaattagagtgaatgtagttgcaccagggtttggaaatcccttgtctccaggttgct

SEQ ID NO: 191635 - DNA, 75 bp, Homo sapiens
caacgtggtggccgtgattgtggccttcacaggcgcctgcatcacgcagtcactgattgtccctgggaagagccc

SEQ ID NO: 191636 - DNA, 90 bp, Homo sapiens
ggagtttttgcagaaggagcaggatctgaaagctgaaattgagaagctttgtgagaagggcagaagagtttcgctcttgttgtccaggct

SEQ ID NO: 191637 - DNA, 75 bp, Homo sapiens
gaggcgccagcctgcgaaggtggcggcgctgctgctcgggctgctcttggagagaacaccttctgcagtggggac

SEQ ID NO: 191638 - DNA, 75 bp, Homo sapiens
gccatcaagaaagtattgcaggacaagagatttaaggcgtcctgcctctgcggctctgccccctgcatcctgtgc

SEQ ID NO: 191639 - DNA, 75 bp, Homo sapiens
tccttgcaaagggcacgtatagcattggtaaagaacgatcgtccagtggaggattttgtgtcatgtatagagaac

SEQ ID NO: 191640 - DNA, 90 bp, Homo sapiens
cgtcggccgccaggccggccaccgcctcgacattcactactttcactgcctaagaatcctggaccttctcaaaggcacagaggcctccac

SEQ ID NO: 191641 - DNA, 83 bp, Homo sapiens
ctacgaatgatgccataaaaaccactctgctggtagaattggacatttcatgtgcaacttgctttggtgtttgctgttttatt

SEQ ID NO: 191642 - DNA, 50 bp, Homo sapiens
agtcatccttttagctgtcacagcccacagggaacccagactggttggag

SEQ ID NO: 191643 - DNA, 96 bp, Homo sapiens
tctcagcctcccgagtagcttggactacaggcgtgcccttccatgcccagacactctcgaaagcgatgggaacgctttgtccacagtgaaaatcag

SEQ ID NO: 191644 - DNA, 100 bp, Homo sapiens
atgagaaccctacttgcctaaatgaggaatgtctttcctaccatctaaaatacgaaggtttctggctggatgcttcctgaaacttggagagtggcagctg

SEQ ID NO: 191645 - DNA, 71 bp, Homo sapiens
ataccaagctcggatccctgaatttgatccagatcaggatcctcatgaccagccaaagagaagaagaatta

SEQ ID NO: 191646 - DNA, 49 bp, Homo sapiens
ccgagctccagccgaaggagaagggggctccttgaggagaatgaccagc

SEQ ID NO: 191647 - DNA, 82 bp, Homo sapiens
cagtgcggcatcacctcctccaagaccgtgctggtctttctcaacctcatcttctgggaacaagatcactcaaggtgaagga

SEQ ID NO: 191648 - DNA, 100 bp, Homo sapiens
ggggattctcgacctgctaacagaactggaccttttcggtatcctacagcttcttcagtcaagaacatcccgaaaattcctagcatgtcgtctaaccccg

SEQ ID NO: 191649 - DNA, 75 bp, Homo sapiens
ccccgaaggccctatcaggacatggagtatgaaagacgtgtgtactgtaagcacggtcacctgtgtcccatcgac

SEQ ID NO: 191650 - DNA, 100 bp, Homo sapiens
caacttcgcttctctgctgaccctctctcgtcgccgctgccgccgccgcagctgccaaaatgaaattggccttgcctctctgggtgcacctgatgaatac

SEQ ID NO: 191651 - DNA, 83 bp, Homo sapiens
aaaatgcccaggaggaagcaggagcagcccaagcgccttccctcacgtccagtggcattgcagagcacggatggttgcaggag

SEQ ID NO: 191652 - DNA, 50 bp, Homo sapiens
acacctactacgagggcggctacttcaagacccaacatgagtgaagtttc

SEQ ID NO: 191653 - DNA, 97 bp, Homo sapiens
aacccacaacgccttcccagtcatcagctgcctccaccccagcccccaaccttcccagaggtaccaatcttgggaaaaagaagcaacacatttgtca

SEQ ID NO: 191654 - DNA, 100 bp, Homo sapiens
ccagatggtgttacctggagcttaaaaagctgcacgcaagtgttaaacttctgaatacagattctgttcatcttgctctgaaattaaataattctgaact

SEQ ID NO: 191655 - DNA, 90 bp, Homo sapiens
gtttttctgttttgcctgaatacatgatttaaacaagagatttccacagaagttccagaaagctgagtctgatctggattacattcaata

SEQ ID NO: 191656 - DNA, 101 bp, Homo sapiens
gtcgccagaaggaagatggcggatctggaggagcagttgtctgatgaagagaaggatctagtgaaaagccatttgatgtatgcggtcagagaagaagtgga

SEQ ID NO: 191657 - DNA, 120 bp, Homo sapiens
aactctgcctgtgtgagcagtctctggacaagatgaccacactccaggaatgccagtgcatcttttgcacagcttgtgaagaaggtccttgcttccccttcaccttctgccatgattcta

SEQ ID NO: 191658 - DNA, 75 bp, Homo sapiens
gtagacttacagaaaaagaagaagcggaaacaacgttctcccgcaaaagtaaaaatccaggggcagaacaaggag

SEQ ID NO: 191659 - DNA, 90 bp, Homo sapiens
gtggagagtatcatctcaccaaagaatgccacccagaggatgtttgaaattgactatagccgggactccttcctcaaggatggccagcca

SEQ ID NO: 191660 - DNA, 50 bp, Homo sapiens
gccaaccggccagaggacgagtgtggagcactacggcgggactgccacct

SEQ ID NO: 191661 - DNA, 75 bp, Homo sapiens
gtattctgttacatcaatcaaaagggaaaccatctgccgtgtgactggtgggatgaaggtaaaggcagaccgaga

SEQ ID NO: 191662 - DNA, 75 bp, Homo sapiens
gttgtgtggtcgcgtctcggaaaccggtagcgcttgcagcatgtgaggagctggtttcacctgaggacctgctgg

SEQ ID NO: 191663 - DNA, 100 bp, Homo sapiens
catgttgaaaaatctatccaggattcatcccgtgtcaacaatggtaaaggggaactgtgtcaatctgacagaagcactgtcgctctatgaagaacagctg

SEQ ID NO: 191664 - DNA, 74 bp, Homo sapiens
gtgaaaaataccacgacaaaaccaccctaaaatggactcagaactcaaggaagaaattcctgtgcatgaggaat

SEQ ID NO: 191665 - DNA, 100 bp, Homo sapiens
gcggttggcaccactgaagtgaccgaatgagatctgccttctggagactgcgccgtcctcccgggagagccagaaagaggacatggctgctgggcagcgg

SEQ ID NO: 191666 - DNA, 113 bp, Homo sapiens
cccgcgcacaacacttcaccctctcgcctcgggtctcgggggccgctctgggatcccggccaccagcaattgtccgggtatgttagagcccaccaaggaaccactgaaaccac

SEQ ID NO: 191667 - DNA, 75 bp, Homo sapiens
actggtcacgcgggactgaacaccgcacaggcaggaggcatggccaaggggtcttcacggcttctctgcccaggg

SEQ ID NO: 191668 - DNA, 74 bp, Homo sapiens
aagagatcgaggttgaggaggaactctgcaagcaggtgagaccaaggaccaggtagctaactcagcctttgtgg

SEQ ID NO: 191669 - DNA, 74 bp, Homo sapiens
ctcaggccttacctcgtgcacatacctaggtgatgtgtccaatctagatcccaacttctcatttgaaggcacca

SEQ ID NO: 191670 - DNA, 100 bp, Homo sapiens
caaggccaagtatccgccagtcaataggaagtacgagtgtcttacagaagaagcaacaagatagtaagaaactggcatcactgtcaatccaaaatgagaa

SEQ ID NO: 191671 - DNA, 90 bp, Homo sapiens
aaggtcttctttaagagggcaatggaagaacacaccacagccatcagcactggaatgcaaagaccagaacaaacagaaggaagccagcag

SEQ ID NO: 191672 - DNA, 130 bp, Homo sapiens
gcgtccagcacctacgtcccgctgccgtcgccgccgccaccatgcccaagagaaagctgtgagccgtgagctttgaggcggtgggatgtgtcagcagaatgtctcctgcccccgagagcgaccccgaggc

SEQ ID NO: 191673 - DNA, 100 bp, Homo sapiens
agcagcgaggcggcggcggcggctgcggaggcgcaggcagcaactgaggcagcggcaggctcaggtgcagccgctggggctggggagaacaccaaaacaa

SEQ ID NO: 191674 - DNA, 114 bp, Homo sapiens
agaacccgaggctggggacagcgacaccgagggggaggacattttcaccggcgccgcggtggtcgctcagaaatcctggatagaaagagcattttataaaagagaatgtgtcca

SEQ ID NO: 191675 - DNA, 100 bp, Homo sapiens
tgatacagcaataccaccttcagtacttggcaagatttgatgctcttgtgctcagtgacatcattcagttgaccaagctgcaccagttggcaatgcaaca

SEQ ID NO: 191676 - DNA, 51 bp, Homo sapiens
atgcagacacacaagagattaatttgaagagggagcactatgtctgcggaa

SEQ ID NO: 191677 - DNA, 97 bp, Homo sapiens
ctgggccagccctgatgctgcgagggatggagggcgccgtgctgcccgtgtggagtgcgcacggggaagccattcgatgaggactatctaaaccatc

SEQ ID NO: 191678 - DNA, 111 bp, Homo sapiens
cggcgacggtggtggtgactgagcggagcccggtgacaggatggagccaaaaacctgtatatcatctccgtgaaggggatcaagggacggctgaacagacttcccgctgct

SEQ ID NO: 191679 - DNA, 75 bp, Homo sapiens
tgacgggcagccagctagctgggtctggagggcagtatgagctttttgctgtgattgcgcacgtgggaatggcag

SEQ ID NO: 191680 - DNA, 100 bp, Homo sapiens
ctcctgctgcctccccggagctcccgggccagtaggtatgatctcgtgaaatcttgagagaaactgaatgacgaatgaaactattgttcctgtttcacac

SEQ ID NO: 191681 - DNA, 96 bp, Homo sapiens
agaagcaagaaggccctggacacagcaatatctctgggctttcacaggaattacatgaacgacagccttcgcaccgacgtcttcgtgcggttccag

SEQ ID NO: 191682 - DNA, 74 bp, Homo sapiens
cgtcggttgagcggcggcgaacatgcgcttttgacacattggagcatctgacagatacgtctcatggtgtaaga

SEQ ID NO: 191683 - DNA, 51 bp, Homo sapiens
tggagggggacacctatgaccggctgtgtggtgcagccctgttggcagtgg

SEQ ID NO: 191684 - DNA, 97 bp, Homo sapiens
ggaagtgcagctgcctcagttcttagcgcagtttcgccgtgaggaagatgcggaaaaggctgtgattgacttgaataaccgttggtttaatggacag

SEQ ID NO: 191685 - DNA, 99 bp, Homo sapiens
tccacattgcacataaagttggcctcccagaagttcctgccgaatcgtcttcgtcacccccggggtccgaggtagcctcccttacacagcctgagaaga

SEQ ID NO: 191686 - DNA, 100 bp, Homo sapiens
cagctcaggaccaggcaccttctgtggaaggtaccaaccaagaagctgaagaaatatgagaaagaatatcagacaatgcgagagagtcagctgcaacagg

SEQ ID NO: 191687 - DNA, 97 bp, Homo sapiens
agcccggagccgcggagcctcagcttccgcctggacccagcctcgtgggagccccgcgggtcctgcccagaactgccattggatgtccagaatcccc

SEQ ID NO: 191688 - DNA, 75 bp, Homo sapiens
tcagatggactttgccgtcctgggcctcggggactcctcatacgccaagctccccacaggtgcaggaagccgccg

SEQ ID NO: 191689 - DNA, 87 bp, Homo sapiens
aagagaagggcacattaaaaaggaatgcccacagtttaaaggctcttcaggcacaattctgctttcccaggaactgcatcactcagg

SEQ ID NO: 191690 - DNA, 100 bp, Homo sapiens
gctcagggtatccaagtatttgatcctggggagtctgattcagatgacaactgtacagatgtcactgtactgccaaatctgtcgaaagggagataatgaa

SEQ ID NO: 191691 - DNA, 74 bp, Homo sapiens
ggctactcacagttgaagcctgattgcaggagtggacgcttctcttgtgagccagctggaggtcttacctcttt

SEQ ID NO: 191692 - DNA, 100 bp, Homo sapiens
ggcagccgtcacctaagcagcagccattggaaccgggagaagccgcactccactctgactcccaggacgggcaccagaattggcttggaaacgaaattga

SEQ ID NO: 191693 - DNA, 100 bp, Homo sapiens
gagaacctagctcatagcaggaggggctacttctacaagtccgaacagccagtccagcaaaatgaacagcattgtctaccagaagcagttccagtcagcc

SEQ ID NO: 191694 - DNA, 75 bp, Homo sapiens
gctgggagtatggccaccctgctccacgatgcggtaatgaatccagcagaagttttaacaacctgggcatccagt

SEQ ID NO: 191695 - DNA, 105 bp, Homo sapiens
taggcataaggaagaatgtctcatgttcgagtctggggctgtcgctgtgctctctccaaatgagaagatgaagcaagtgttaaagaagactatagaagaagccaa

SEQ ID NO: 191696 - DNA, 100 bp, Homo sapiens
gcagtatcaacggagtctccgggaccccagttattaaagcttttggcatcttgaagcgagcggccgctgaagtaaaccaggattatggtcttgatccaaa

SEQ ID NO: 191697 - DNA, 90 bp, Homo sapiens
ccgcggggtctgtgctgagaataatggcccggttggcccgggacgagtggaatgccctgggcgctgcctatggcacagccaagagcggta

SEQ ID NO: 191698 - DNA, 113 bp, Homo sapiens
cggcgcggagaatctgctgtcgcctgcagctgctcgcctgtctccgtcggaagggagcccaagctttgcagagtgtggcccaggcctacatgaaccagagaaagctggaccat

SEQ ID NO: 191699 - DNA, 51 bp, Homo sapiens
gtagctccacattcctgtgcattgaggggccccacatcaagaccatcttcc

SEQ ID NO: 191700 - DNA, 71 bp, Homo sapiens
gaaagaggagacgcagccgcccgtggcgcttaagaaagaagacatgttttagacaaatactcatgtgtatg

SEQ ID NO: 191701 - DNA, 50 bp, Homo sapiens
tgctgttgtcccaggacagaaaccataaatccaaggacacttatttgctg

SEQ ID NO: 191702 - DNA, 82 bp, Homo sapiens
cgtcagggtcgccagcgcctcagctctgtggaggagcagcagtagtcggagggtgcaggagttgtaagacgttcatcgccgt

SEQ ID NO: 191703 - DNA, 74 bp, Homo sapiens
acggaggtagtcatgatctatgacgccgagaagcagaggccccgagataagtacatgcagatgaatcacgcatt

SEQ ID NO: 191704 - DNA, 82 bp, Homo sapiens
tgaagaagatcccgacatggaaggagatggcgaaagatcgcaccccctccctccctggcggagcccctgaaggagctgttca

SEQ ID NO: 191705 - DNA, 98 bp, Homo sapiens
ctggatttccagaagacgaaatacgcgagaattcctccacgtactgggaaggcaaagcagatatggagactctccagagaatttatggcatttcattc

SEQ ID NO: 191706 - DNA, 101 bp, Homo sapiens
gcggtccgtgcgagaggaccaacggagcgctgaggcgggcgttttcttggatgaattgcttgctttggaggttttgagcaaaattttggactgtgaagcaa

SEQ ID NO: 191707 - DNA, 98 bp, Homo sapiens
ctacccccgcttcagcgactggctgtacactttcaacgtgaggccggaggtggtgcagtttgcagctcaccttgtgaagatgaaatatccaagaatct

SEQ ID NO: 191708 - DNA, 100 bp, Homo sapiens
gggagggccggggccgcgctcaggagtgtacctcacagccttctaggatctccagagtggacaggaatctcacttggagggaccatggagcagtatacag

SEQ ID NO: 191709 - DNA, 75 bp, Homo sapiens
cattgatggaaaacaaatcaaactgcaaatctgggatacggcctcaggagtgcaagtagctgatgaagtatgtcg

SEQ ID NO: 191710 - DNA, 51 bp, Homo sapiens
gctcagcttacgctgtcatccctgcttttggacaaactcttctgaaaggtg

SEQ ID NO: 191711 - DNA, 98 bp, Homo sapiens
ggaactcttggttgggataagttcgagaacttgtcttggacaattgcaaatcaaatgatggaaaaattgagggcttaacagctgaatttgtgaactta

SEQ ID NO: 191712 - DNA, 99 bp, Homo sapiens
gcgcctgatgagcattttcccaacagagccgaatgtggacgagtgctcactagcagaaaaaacctgtgtgaggaaaaacgaaaactgctacaatactcc

SEQ ID NO: 191713 - DNA, 97 bp, Homo sapiens
gtgattgcaggacgcatgcttaagttttctgttttttatcgtaatcagcacaaagaatattttgactatgttcgaaaaggcaacagatggctccctg

SEQ ID NO: 191714 - DNA, 100 bp, Homo sapiens
ggagttccgctcctgcgggcttagcaggaaagggtgcctaagttaccttccacgctgtatgtccgtgagaaatacaatgaagacggtctgaataatgaac

SEQ ID NO: 191715 - DNA, 75 bp, Homo sapiens
ctgggagctggaggaaccgcggttgaatcgctcctagctgacccctcacgtctcttatgatacgtacagaaagca

SEQ ID NO: 191716 - DNA, 80 bp, Homo sapiens
agccgatccagcctgcggagcctgtggggcaggtgaaagaactcttttcttctttgggagtcgaatgtaatgtcttggaa

SEQ ID NO: 191717 - DNA, 89 bp, Homo sapiens
tacgacttccactcatcctctgagtttgagattgtcaaggccataaaagaaaaagtgactgagaccgaagatgatagtgatagtgacag

SEQ ID NO: 191718 - DNA, 100 bp, Homo sapiens
cagttgacacacctcatggtatatttgcagccagtactctatatgaacaatccgtctggatcacggatgtaggaagtggccctggccaacgtcaacattg

SEQ ID NO: 191719 - DNA, 106 bp, Homo sapiens
tgaaaatacagccaagatcttggcaaagcttctccctcagtatttagaccaggcctgattcagcaggaagcatctcagacaccaaccactatgctgtcagcagttg

SEQ ID NO: 191720 - DNA, 75 bp, Homo sapiens
aatatattccatgctatcagctttttagtttaagtgctgtggggctgctaactacacagattgggagaaaatccc

SEQ ID NO: 191721 - DNA, 90 bp, Homo sapiens
agtggagaatgaggacatgaataaagaccagatcttgctggaaaaagaagctgaggccctagactggagctggttacagacggaagaaga

SEQ ID NO: 191722 - DNA, 90 bp, Homo sapiens
agcctgcaatatgacctatggatcatttggtggtgtaaaaggtttggaaatatcttgggatggagacagttttgtagaagtcatggctgc

SEQ ID NO: 191723 - DNA, 98 bp, Homo sapiens
gtggaatttgactcctgattctgtgaccttgagcttcatagaggaaatgaaagactcctctatggaaaggtgccagcgagatttcagattcctgtaaa

SEQ ID NO: 191724 - DNA, 88 bp, Homo sapiens
caccatcccatttgatcaggtcaacgatgactattgcgactgcaaagatggctctgacgagccagaaggtgcttcctggaggggcctg

SEQ ID NO: 191725 - DNA, 75 bp, Homo sapiens
cgcctggcaggccctgcgcaccagacacttctacaagcccatgcttcgacggggcagcagcaagtggatggccag

SEQ ID NO: 191726 - DNA, 50 bp, Homo sapiens
tcacccaacataactttcaagagacaatgcagatcttcgtgaagactctg

SEQ ID NO: 191727 - DNA, 108 bp, Homo sapiens
tccggacgccgcccgaacatggactccgccggccaagtgaactttgaggcgctgatcatcaccatgtcggtagtcgggggaaccctcctcctgggcattgccatctgc

SEQ ID NO: 191728 - DNA, 78 bp, Homo sapiens
agaacctcaagcttttcaggcatcctcatataattaaactctactccctgtatcaaagccatcagcccgagtgaagga

SEQ ID NO: 191729 - DNA, 76 bp, Homo sapiens
tggcgacctatccagaatgatcaagggcaaagcccaacaccttcccccactggtaagaattaatatttatattttt

SEQ ID NO: 191730 - DNA, 75 bp, Homo sapiens
cggccggcagggtggacggtgggctctccacaagaatcggaatgtcagttaatgctattcgcaagcagagtacag

SEQ ID NO: 191731 - DNA, 104 bp, Homo sapiens
tcgagcctgtgtgcgtgcggggcggcctctacgaggtggatgtgacccaaggagagtgctacccggtgtactggaaccacaatgcagatcttcgtgaagactct

SEQ ID NO: 191732 - DNA, 74 bp, Homo sapiens
gcggggtcggcgggagccagcgagccacgggagcgagccagtgggcgacagatgcgaaagaaacgagttccagt

SEQ ID NO: 191733 - DNA, 100 bp, Homo sapiens
tcattggaggagaagaagggatggcagagaagcctcccctggtgaagacacaaactgtcaccatctcagataatgccaatgctgtgaaaagtgaaatccc

SEQ ID NO: 191734 - DNA, 100 bp, Homo sapiens
ctgaagttcttcagcttctcagccccccagctcttgaggctagtgcgcctctaggcaagatgtccctgcccatcgggatataccgccgggcagtcagcta

SEQ ID NO: 191735 - DNA, 74 bp, Homo sapiens
atctcagcctccaaaagtgctggcattacagatggtcatcatgggccagtgctactacaacgagaccatcggct

SEQ ID NO: 191736 - DNA, 100 bp, Homo sapiens
tcgtcatcacagtcaactatcgacttggagtactcgtgaagctgtggtctaccaatctagacaactcagtggcaagcattgaggcaaaggctaatgtgtg

SEQ ID NO: 191737 - DNA, 75 bp, Homo sapiens
aagcaagatatactactaactttgaaatggaataagcagcacaagccagcgaggaggcagtgtcatttcgccgtg

SEQ ID NO: 191738 - DNA, 82 bp, Homo sapiens
acgggcagtttgtcgaacgatgttggactcatagtcactgccagaaagggcaaactctttgattctacaatagctgatgagg

SEQ ID NO: 191739 - DNA, 75 bp, Homo sapiens
agagactaccacgtggcatgttaccactgtgaggtgtctttcctgaagactatcttcccgtctcaaaatggacat

SEQ ID NO: 191740 - DNA, 100 bp, Homo sapiens
ctataaatgcagcactggctcagagggtcaggaacagagtcaatttcagggccctggccaacgtcaacattgggagcctcatctgcaatgtaggggccgg

SEQ ID NO: 191741 - DNA, 73 bp, Homo sapiens
aatttcctgcgctgttccacctcattcaacttcaggaatgtcgttgtctgctgggtcttcccctcttcattcc

SEQ ID NO: 191742 - DNA, 100 bp, Homo sapiens
ctgccccccgcccccaagccgcggccatggacctggcggatccggcctgccctggcccagctcaacacctgatttcggtatgattatcgggaaatgctgc

SEQ ID NO: 191743 - DNA, 100 bp, Homo sapiens
ttccttactgaaaccctctacaaaggcattagtcctatcttgtaagatggacaatctaaaatatgtaaatcagttgaagaaggaaaatgaacgtgcccag

SEQ ID NO: 191744 - DNA, 89 bp, Homo sapiens
tccgaccagtctgggggcgctggcggcctgcgcagccacctcaaggcttatcaggagggcagacttcaaaagctactaaaaatgaacgg

SEQ ID NO: 191745 - DNA, 75 bp, Homo sapiens
aagatatagagacaacgactatgtccaattttcatgctcagacgcaggaggagggagacgcactgatgacatcgg

SEQ ID NO: 191746 - DNA, 75 bp, Homo sapiens
ccctactgcacagcagaagctctgaatcgtgttcctgaatgaaagaagtcagtactatactggcaattgctggag

SEQ ID NO: 191747 - DNA, 87 bp, Homo sapiens
atgatggagctcagccctccacctccacaggaagaaggtagataatgactataatgcccttcgagaaagactcagcaccttgcctga

SEQ ID NO: 191748 - DNA, 51 bp, Homo sapiens
gatgcagcccgcaccctggggccccgggtggacatgttgagtgaaattaac

SEQ ID NO: 191749 - DNA, 100 bp, Homo sapiens
ttttgtaacttttgatgatcatgatacagttgataaaattgttgagactgtatcgggaattgtaccacaaactgaaagacaagatccatacaactcccga

SEQ ID NO: 191750 - DNA, 100 bp, Homo sapiens
ggggaatttaagatgccaaagcagctcattcacatacagcatcagtgtactgttacccggacatacctattccttcacaagttctggttcttcagtgctg

SEQ ID NO: 191751 - DNA, 98 bp, Homo sapiens
tttggcgagagatgtattcagtggaggaagctgattctcctgggcttctccaatttgaagtgtgtcctctctcagagtctcgtttcagcgtatctttt

SEQ ID NO: 191752 - DNA, 100 bp, Homo sapiens
acctatttgatgaagatgtcttttgaaaggtgtactgcaaggaacaaaatgtttgtaaattctccttttaccaaggccctcgggaccaaggatcacgtca

SEQ ID NO: 191753 - DNA, 100 bp, Homo sapiens
cattcatttcaatcttttggatcctttgaaaaatcacatgaagaccatcttgattcaaaacatctatcgtaatccccaaaacagtgcacagacggctgac

SEQ ID NO: 191754 - DNA, 95 bp, Homo sapiens
catcacggagctgaatctgccgcagctagaaatgctcaagaaccagctggaccaggtccagcaagactatgaatctctgttccaaatgctttgct

SEQ ID NO: 191755 - DNA, 100 bp, Homo sapiens
gggaacctcttccagttggaattgaagaatattcccaagtccttcacccggagctgaagaagcaggtggagagtgccgagctgaagaaccagcggctcaa

SEQ ID NO: 191756 - DNA, 101 bp, Homo sapiens
gaaaggttaaaggatcaagcagatggaaaatacgtcttagttgctgggatttattggctatgctccatatgtcaaccgtatagttcaacaatggaatctcc

SEQ ID NO: 191757 - DNA, 90 bp, Homo sapiens
gaagattgtcatgattgtttatcctaatcccaatgctgaagtaagattgtcttggaaatactaagttggattctctcgggcctagccgtc

SEQ ID NO: 191758 - DNA, 75 bp, Homo sapiens
agatgaccttcacggccactggccagaggtacttcctcaagtttaactatagatcaacacatcatcttgcatctc

SEQ ID NO: 191759 - DNA, 100 bp, Homo sapiens
gatcggaagatgagtgagcttgaccagttacggcaggaggccgagcaacttaagaaccagattcgagagtttggatcataatacaagagaagcacagggc

SEQ ID NO: 191760 - DNA, 100 bp, Homo sapiens
taacaacggctgtgctagacgaagtggtgaagcccaaaacacacatgcaggacttgaaagatgttactaataatgtccactatgagaactacagaagcag

SEQ ID NO: 191761 - DNA, 96 bp, Homo sapiens
aactgaaccagatgagagccttcaaaagcagtgcaactggctcagtattcacagggaaagctgtgaggaagaagctcattcacacagaagacccat

SEQ ID NO: 191762 - DNA, 100 bp, Homo sapiens
agaaaggagcaaagcaacagaagtttatcaaggctgtcacacatcaagttaaatttggtcaacaaaatccacgtcaggatgaagatttgataaagtggaa

SEQ ID NO: 191763 - DNA, 90 bp, Homo sapiens
accgggatcgtgaccgagaccgtgaccgagagcgtgaccgagagcgcgaatatcgtcatcgttagaagcctgagttctaccaagtatgcc

SEQ ID NO: 191764 - DNA, 76 bp, Homo sapiens
taaagcaattgagcaggctgatctactgcaggagagagacaagagagacacctccaacttcgacaaagagttcacc

SEQ ID NO: 191765 - DNA, 82 bp, Homo sapiens
ccgactctgcccatggcctgaagggccacatcatctctgttttaaaatcaaagatgggaaaatcggagaaaattgcccttcc

SEQ ID NO: 191766 - DNA, 100 bp, Homo sapiens
tgagtttccgattggacagatctggtcgcctggtgacccctgtgagttatgcatctgccaggccaagctgatcgtccccaacagcacggcgggcctgatc

SEQ ID NO: 191767 - DNA, 90 bp, Homo sapiens
gcagagtggaccaccccatgaacctcggtcaccaaggaagaaggattggccttggcccgagaattcagctgtcccttttttgagacatct

SEQ ID NO: 191768 - DNA, 100 bp, Homo sapiens
gagatggtggatgaacccacaggccaggagtggtggctcacacctgtaatcccagctctgggaggccaaggccagtggattgcttgagcccaggagtttg

SEQ ID NO: 191769 - DNA, 82 bp, Homo sapiens
ctggagcctcagttggaagcagccgatccagcctgcggagcctgtggggcagttcatcagagaagatatgaaatataaagat

SEQ ID NO: 191770 - DNA, 82 bp, Homo sapiens
ggagcagcatggcatttcagtcactggtttgcagagtccaggtgggaacattctccatggccagtgaggaagtcttgaagaa

SEQ ID NO: 191771 - DNA, 80 bp, Homo sapiens
cccgggcagcgcttccattccgcggagctggtgcatgtccgttccgaggaatgggatttaatgacctttgatgccaaccc

SEQ ID NO: 191772 - DNA, 100 bp, Homo sapiens
cactttgcagaaaggaaggattatgtcaaatagttagaagattcccaggcacattgcaagcaacccgtgccttgatggtggttggcatcctcctgggagt

SEQ ID NO: 191773 - DNA, 100 bp, Homo sapiens
aaaatcaaagaacaaagggagagagagcgccagaggcagcgggaacgggagatccgcgaaacggagaggcggcggtggagaaatccctgcagcgcatcca

SEQ ID NO: 191774 - DNA, 100 bp, Homo sapiens
tcaagccgatcttgcagaaattgcaggttcattgtagggaaggaagaaattcccacacattctttttcaccagaggcagcatatgcaaaagtggaacaaa

SEQ ID NO: 191775 - DNA, 89 bp, Homo sapiens
agcgggtagtgccagctacggtccgcggctggggttccctcctccgtttctgtatccccacgagccttggaccgcagttgccggccagg

SEQ ID NO: 191776 - DNA, 91 bp, Homo sapiens
ggtggtggagaagatgcggcacgtgcccagcgggcagatcatggcagtgaagacgtgcactgctgcctttgccaccaaagacagactgcgg

SEQ ID NO: 191777 - DNA, 100 bp, Homo sapiens
cggggaggtgggtactacacaaccgtctccagccttggtctgagtggactgtcctgcagttcatagccctgatgaagcaagttactctgctctcctaata

SEQ ID NO: 191778 - DNA, 100 bp, Homo sapiens
atggaatcccagaggaaactgacggagacgcagatgtggacttgaaagaagctgcagcggaggaaggcgaggttgtggcagcactgcctgaaggtatgag

SEQ ID NO: 191779 - DNA, 101 bp, Homo sapiens
agaagaataccatgaggtcaaaaaggaaatcaccctgcttgagcaaaggaaggccggtgcataaacttctcccgagttccatctcagtaaaagggaagcag

SEQ ID NO: 191780 - DNA, 74 bp, Homo sapiens
gctacagcttcagaagaccgaagcgttcgtatctggaaggtgacttaagagattaaaattaatttggttgctgt

SEQ ID NO: 191781 - DNA, 98 bp, Homo sapiens
ctccttttccctctccctttccctaaggtggtccattatggctgacatgcaaaatctggtagaaagattggagagggcagtgggccgcctggaggcag

SEQ ID NO: 191782 - DNA, 90 bp, Homo sapiens
cccgcgtccgccgattcctcctccttggtcgccgcgtccttggctggcgtgatgaccgagtgggagacagcagcaccagcggtggcagag

SEQ ID NO: 191783 - DNA, 96 bp, Homo sapiens
cattaacggaccttttaccatgaatagttctactccttctacaggcagtggcttgcaatccagaagttacgaagcaaaatccacaaaaaagtagat

SEQ ID NO: 191784 - DNA, 100 bp, Homo sapiens
gttccatgctgacctgtaaagctgccatgaggactatgattcaacaacagggagggtctattgttaatgtagctccagtcagcccggtcaagcatgacag

SEQ ID NO: 191785 - DNA, 100 bp, Homo sapiens
attacaacacaaagaattggagtcacaggaacaggatgagctttctgatgttagccaaggcggatctaaagctaccactccagcatcaacagctaattca

SEQ ID NO: 191786 - DNA, 98 bp, Homo sapiens
ttgactcacgccttcgccgtagcatctttcgcagcggaccgaagagaagaaaagtaggccagagccggtggtcctgccatcatggctgtcctctgcaa

SEQ ID NO: 191787 - DNA, 50 bp, Homo sapiens
caggagccaaggggataacaatgtgactaatggctgaaggataaatcaac

SEQ ID NO: 191788 - DNA, 100 bp, Homo sapiens
gagaccgtgaccgagagcgtgaccgagagcgcgaatatcgtcatcgttagaagagccttagagaggaggtgacccaccttacccgctcacttcggcgtgc

SEQ ID NO: 191789 - DNA, 50 bp, Homo sapiens
agggaggcgtcgacggcgtgcgatgatgactttgaccagtttgataagcc

SEQ ID NO: 191790 - DNA, 97 bp, Homo sapiens
cttgaatggcgactagatgtacagatcacaaaatttgtccaggatagacatagagctagaagaaacagacttcgtaaagatcaacttaagaaacttc

SEQ ID NO: 191791 - DNA, 76 bp, Homo sapiens
gagctgcggctctaccccccggaatgtgtatatctcatgattgatatggagaaactagtcatgggccaaaggtcaa

SEQ ID NO: 191792 - DNA, 100 bp, Homo sapiens
acatgatcctctccgcctctcgaggttctttcagagcacggcttcggccccatcactaccgacatccgggagggacagactttctactatgcggaagact

SEQ ID NO: 191793 - DNA, 96 bp, Homo sapiens
tttggcatctgtggccgagttgctgttgccgggtgatagttggagcggagactctagtgtcagcagtgggatacctgcgcttgaaggacatcatcc

SEQ ID NO: 191794 - DNA, 75 bp, Homo sapiens
ctgagggggatgggggacccagtgcagtcttggaaggggccgggtgtccgcaatgttgccagtgtctgtctgcag

SEQ ID NO: 191795 - DNA, 96 bp, Homo sapiens
ctgtgagtcttctggcaaacagtgtttgcctctggttcagctcatacaacagcttcttagatattcaagagaagcttatgtggagttagttcacca

SEQ ID NO: 191796 - DNA, 90 bp, Homo sapiens
gtggtggaaactgggacaatatttcagacggagcaaagcatgccaatgaagatgtggaaagaatgttactaggaaacaagtgtgatatgg

SEQ ID NO: 191797 - DNA, 75 bp, Homo sapiens
taaaaggtgtcgaagctcagaatgcatatgtaagtggaactcagaaggcaacattccctgaacatactcttccac

SEQ ID NO: 191798 - DNA, 101 bp, Homo sapiens
gtctccgcggtggaggtctgcgttgctcttgcttttcctcgctggggtgtacgtaccaaatatgccccaacagcggcaagaccagcatcatcagagtgcca

SEQ ID NO: 191799 - DNA, 50 bp, Homo sapiens
tgaagtgttagcaccttcactccgcaacatggctgacaaggccaagcctg

SEQ ID NO: 191800 - DNA, 100 bp, Homo sapiens
aagcagtttgatgcagtgttgcctggctataccctgaagagccaactagacatcttgagcctcctgaaacaggtttgtgggggagagaaaccttatttgt

SEQ ID NO: 191801 - DNA, 75 bp, Homo sapiens
aagcagctaccatggcccaggtggccggcgcggcgttgtcccaggcgggttgtccaggcaactcctagtagtaca

SEQ ID NO: 191802 - DNA, 88 bp, Homo sapiens
gaggaagtactgagcctgttggaggaactggcccggaaacaggaggaccgccgtgccgtccctgcagtgacaccgaggtgctcctagc

SEQ ID NO: 191803 - DNA, 75 bp, Homo sapiens
cgactctgtgattaccggctggatgcagacgatgtcttcgatcttctaaaggtaatcaaatgcaaagcagctgtg

SEQ ID NO: 191804 - DNA, 50 bp, Homo sapiens
attaccctgaagtactttatcaccagggcttggtgactatcaaaaacctg

SEQ ID NO: 191805 - DNA, 100 bp, Homo sapiens
cctcgctgcggcggcgactgagccaggctgggccgcgtccctgagtcccagagtcggcgcggcgcgcaagaattcccttctgaaggatgccatggctcca

SEQ ID NO: 191806 - DNA, 100 bp, Homo sapiens
ccgatattataaaatgcagatctctatgctacagcccattgcagatgcaaaggctcctgagaagcgggcctcaccatccaagccagcttctgccccagcc

SEQ ID NO: 191807 - DNA, 123 bp, Homo sapiens
cacagaggccggcttggtcactatggaggagataggcatcttggtggagaaggctcagccccggtttctctggattctgtgcttctccatggaggaaactcaaggagaactgacaagttcttg

SEQ ID NO: 191808 - DNA, 74 bp, Homo sapiens
acgcccagctagccatcttctaattttcattccttcaaaggcatgggttggaattggagcctatcccccaaccc

SEQ ID NO: 191809 - DNA, 75 bp, Homo sapiens
ttctaatccctgctctgtcactaacaagctgcgtgatcttcgatgttcaagacagagttccttcatattcacaag

SEQ ID NO: 191810 - DNA, 82 bp, Homo sapiens
ttcacaatatctgtgtcgttcttggcagaaattatattttccagcccgtgtctgcagggaggtggggaagacagggctccag

SEQ ID NO: 191811 - DNA, 100 bp, Homo sapiens
ttcagaaccagtcccgctcctctgcttgccactccttaattgctcaaggtgtcatggagaaactccagctgggcccagagattctgcagcgggaaaatcc

SEQ ID NO: 191812 - DNA, 75 bp, Homo sapiens
gcgcgaatatcgtcatcgttagaagatttttgatgaaattgagtcatgaaactgtaaccattgaattgaagaacg

SEQ ID NO: 191813 - DNA, 100 bp, Homo sapiens
ttgccgccgcgctgcgcaagctcgccaaacaggcggaggagcccagagggaagaaggagaaagggccaacccctgaagaagcaatacagaaactgaagga

SEQ ID NO: 191814 - DNA, 75 bp, Homo sapiens
gcatgaggcaatgatcactgacttggaagaacctaacagtttccttaagaaggctgatattttcatcaatgggtc

SEQ ID NO: 191815 - DNA, 82 bp, Homo sapiens
gtgattgtcttgtattagagccttcagaaatgattgtggttcgagaacttgtcttggacaattgcaaatcaaatgatggaaa

SEQ ID NO: 191816 - DNA, 74 bp, Homo sapiens
aaaagtagaaggaaaaacagaacgttgcaaactctggaaaaaaacttggatgttagtaggcaggaagaggcgga

SEQ ID NO: 191817 - DNA, 97 bp, Homo sapiens
aaatggtgcaggtcgtgtttcgacacggggctcggagtcctctcaagccgctcccgctggaggagcaggatgtaatccctgttcattactacttaat

SEQ ID NO: 191818 - DNA, 50 bp, Homo sapiens
ctttggaccacattgtcaattcacaccgatatggaatgtgcagatgtccc

SEQ ID NO: 191819 - DNA, 97 bp, Homo sapiens
cccagctccatgaatggaaatcggctccgcaggacggaaccactgcactccaggttccttgctgggtgctgagcgtggcctgagggacaggccctgg

SEQ ID NO: 191820 - DNA, 75 bp, Homo sapiens
ttggttgttttttcctgtatgaagcggttggcaccactgaagtgaccgaatgagctacagcctccgcttggcgtc

SEQ ID NO: 191821 - DNA, 100 bp, Homo sapiens
ggaactgctcaaggtcttctgggagaatcacgacccgacccaaggttttggaaggaaggatgttgtagaacacttactacagatgggtgctaatgtccac

SEQ ID NO: 191822 - DNA, 96 bp, Homo sapiens
acccaggacacactatggtgcttcagccaagtgaaaggcactatcgagattggaaccacagaagatatcaacatggcaggagagcccaaaccatac

SEQ ID NO: 191823 - DNA, 75 bp, Homo sapiens
attttctggacaaacctcagccctaacggtggtggagaacccaaagataaagcttcaccaagaaggttgcccagg

SEQ ID NO: 191824 - DNA, 90 bp, Homo sapiens
atcctgtcgcacggcgtcacctccttctgccccaccctggtcacttccccaccggaggtttatcacaagctgctggagtacttagggaag

SEQ ID NO: 191825 - DNA, 75 bp, Homo sapiens
agatctgaagggaaagctccagatactagttcagtgaacagcattttggacaggacatttggtgccaggtctgag

SEQ ID NO: 191826 - DNA, 75 bp, Homo sapiens
agtgaaatgggctaataatgctggcaaagtggaaaaatgtgcgggtgaaggcaaatgtttgtcccaggagaaacc

SEQ ID NO: 191827 - DNA, 75 bp, Homo sapiens
gaggcggccatgtccccgagcggccgaagcaggagatgctgtttatcagtaaagagatcctgaccatccgggagg

SEQ ID NO: 191828 - DNA, 100 bp, Homo sapiens
ctgcctttcaggatattgagcatcatgacctagtgtccactgagatatggccccttcacagatgtagtcactacaaatcttaaattgcgaaatccatcgg

SEQ ID NO: 191829 - DNA, 75 bp, Homo sapiens
ggctcttgccctcatcctggttctggaatcctcagttcaagaattggatttgcaactcaaaaccaaaggctcccc

SEQ ID NO: 191830 - DNA, 51 bp, Homo sapiens
acagatgtccaagctgccaagtgaccacccgccggcggaagaaggaaggag

SEQ ID NO: 191831 - DNA, 98 bp, Homo sapiens
cgggcacaagtgcccttcgagcagattctcagccttccagagctcaaggccaacgtgcagcggctgaaggagtaccgctccaaactcatcctcttccc

SEQ ID NO: 191832 - DNA, 50 bp, Homo sapiens
cgaggccctcatgtaccacacgctgatgttctaatcatgtcagataaaga

SEQ ID NO: 191833 - DNA, 121 bp, Homo sapiens
gcctgtcctctccaagatgcagttttttgatgctgaggagctcctggtcgatgaagaggatgatgtttttggtgaagaatgatatggaacctagcaaagctgttccactgaatgcatctaa

SEQ ID NO: 191834 - DNA, 100 bp, Homo sapiens
ctgtttcaatcacaatggaaacatatttgcatacgcttccagctacgactggtcaaagattttgcctgcctgagctcctctagtagtggccacaattgcc

SEQ ID NO: 191835 - DNA, 98 bp, Homo sapiens
cccgggccgccatcgccttctcctttttctccatcttcacctgggcctggaagaaacgctggtttatcctgcggagtggccggatgagcggtgaccca

SEQ ID NO: 191836 - DNA, 82 bp, Homo sapiens
aggagcagacgctgcagttggagcaacagtccaagctcaaaacattaaagtgacgattcccactcccctcctctcagcctcc

SEQ ID NO: 191837 - DNA, 75 bp, Homo sapiens
cttgatgatgcagtgtgtgtttggaggtttccaatacttatctacaggaatcgccatgaccccagctctgaggga

SEQ ID NO: 191838 - DNA, 90 bp, Homo sapiens
gtgagttcaagtacagatcacacgcccactaaagcccagaagaatgtggctaccagcgaaggggtccagattttatggaaatgagctcaa

SEQ ID NO: 191839 - DNA, 75 bp, Homo sapiens
gcgtgagccaccgcgcccggcagatttttacaacctattctgaagaaagtatccaaatatatcttgtgagttgct

SEQ ID NO: 191840 - DNA, 74 bp, Homo sapiens
gctatgagaaggacgttgccaagattaaccaggacccccagggtggagagattcaaccagttagcgtgaaagtt

SEQ ID NO: 191841 - DNA, 96 bp, Homo sapiens
ggccagttcgtctttgcccgggacgctaaggcagccatgattatggattggatatgtctacttctggatgcaaattttactgttgttgtaatgatg

SEQ ID NO: 191842 - DNA, 98 bp, Homo sapiens
aagtttatagagcagcctgtctcttggatggagtaccagtagctttaaaaaaagtgcaggacatatttgacagtgattggtacacttctcgaaatcta

SEQ ID NO: 191843 - DNA, 97 bp, Homo sapiens
aggagggcagcagtagaatcacttgggttcattctattcaggtatgagttaatacagaaaggagtgactgaacttagaactgttgggaatgttccag

SEQ ID NO: 191844 - DNA, 101 bp, Homo sapiens
cttatcagcactatttgaaacttttatctcatctggcttggcgcctgaggttctcccattaggtgacacttggacagaaacactggcctatgtgctcttct

SEQ ID NO: 191845 - DNA, 83 bp, Homo sapiens
gggctcacgttgttattctgcattgcacttgcagccagatccggccccacatcgcaactcttcgtaagtacacctatggcaag

SEQ ID NO: 191846 - DNA, 100 bp, Homo sapiens
atgagaaagaagatgatgaatggattcttgttgacttcataggtgggtcctacgtgtatgaactcagcgcagtcctcatacacagaggagtgagtgctta

SEQ ID NO: 191847 - DNA, 100 bp, Homo sapiens
ccagatcaacctggagctctacgcctcctacgtttacctgtccatgggaaaacaaagtgcatgatgaagtcttcagactgtgtcataaagcatgctggtg

SEQ ID NO: 191848 - DNA, 88 bp, Homo sapiens
cttgaacaaggcaaatatggttttgctgtgctgactccttagttgctgagatgagcttgtaaaaagcagctctgttgatcccagcagc

SEQ ID NO: 191849 - DNA, 74 bp, Homo sapiens
ctcaactttggtctcctgggaccactcgttgctgacagtcagaaagtcctggatgcctcatcccttagtttcaa

SEQ ID NO: 191850 - DNA, 98 bp, Homo sapiens
cggcatctgtcttgagctcccagcaagggccggtgcataaacttctcccgagttccatctcagtaaaagggaagcaggaagaccaagaaggtacgaag

SEQ ID NO: 191851 - DNA, 51 bp, Homo sapiens
gcaccaaggaccagcaattcaacacagaagagatccccttgaagattttag

SEQ ID NO: 191852 - DNA, 88 bp, Homo sapiens
cggcgaacgcggagagcacgccatgaaggcctcgggcacgcactggccccctcaccttttcctttccagctgtttggggctcagctaa

SEQ ID NO: 191853 - DNA, 74 bp, Homo sapiens
agataaaatgacgacgtccttctggaagaggcgaaactgctctggattaatcgaattacagctgctagccagga

SEQ ID NO: 191854 - DNA, 90 bp, Homo sapiens
ctgaaaggccacagcataacccacctaggcacaaagccgttcgagtgtcctgtggaagggcaggagcgcttcacctctatgacacgattg

SEQ ID NO: 191855 - DNA, 90 bp, Homo sapiens
gcctgcaggtggagaactgcacccagctgggggagcagtgctggaccgcgcgcatccgagaccagtatgatgtctgtgccatttgcctgg

SEQ ID NO: 191856 - DNA, 75 bp, Homo sapiens
gattcgcagtggtcgcttcttctccttgtgtctgcgagattaatctctcatggccgctgcacaagaacctggctt

SEQ ID NO: 191857 - DNA, 100 bp, Homo sapiens
aagaccttgctaccccttttgggatgagatggcaactcaggaagttcctactggtcttgaacactgtgtctcaggtgtttcagtcacctccagtaacacg

SEQ ID NO: 191858 - DNA, 75 bp, Homo sapiens
acctggttgtccgagatcgctgtggtgaactactgagttcttcattatgtctgatggagattatgattacctcat

SEQ ID NO: 191859 - DNA, 74 bp, Homo sapiens
cacctttcggcttctgagacggcggcagcagcggcattcagggtctggaacagaatctgacagtgatgaatcag

SEQ ID NO: 191860 - DNA, 74 bp, Homo sapiens
gaagagatgtgagacttcccttggaagttgaaaaacagcctgcagcacaaaactgtgatcttcatgtttgccca

SEQ ID NO: 191861 - DNA, 83 bp, Homo sapiens
cgacgacttactggcttcatgtaagactttgaccccgacgcaggcttcagtgattgccgcggatcagaagcctgagcactttg

SEQ ID NO: 191862 - DNA, 101 bp, Homo sapiens
aagagaacagcaagtgcaccaaacttaggatcagttcttaagagcagccccggtaactggaggaatgggagccgttttgatgagaaaaatgggctggagag

SEQ ID NO: 191863 - DNA, 100 bp, Homo sapiens
aaaacatcctggaatcaaatagtgttacggcaacaaggtgtgactgcacagaaaagttacaaaacaaatttgactttttgcgctcacagttgaatgatat

SEQ ID NO: 191864 - DNA, 100 bp, Homo sapiens
tgcttatgcagcgactcaacaataaaatcaactcatactgcaaggcaggagctggttttccatccatcccagtcggcaagagccccatggtggagcaggc

SEQ ID NO: 191865 - DNA, 76 bp, Homo sapiens
cgctgcacgagcagaagactctgcccgggggtaaatggatccttctatgagatcttgcaagtggactttggaattg

SEQ ID NO: 191866 - DNA, 83 bp, Homo sapiens
ccgtctgcaaagtgtccccggcaagaagacccgctacgacttcacctcatgcatgggcgtgctcctggtgagcatggtggtgc

SEQ ID NO: 191867 - DNA, 100 bp, Homo sapiens
agccaaacagagagaccttgaaggggcagtcagtaggaagctgaaaccccacgtagtgttcttgaagaaattggactgacataactctcctcccttgttg

SEQ ID NO: 191868 - DNA, 100 bp, Homo sapiens
ataagagaattcagcaaaaaattaaacgatttaaggcaaagcagggccagaacaagttcctttcagagctatgacttcacacctatggattcttctgcag

SEQ ID NO: 191869 - DNA, 76 bp, Homo sapiens
aggagttggcggaagcacttggaactcctttataagtgtcagctgtgaggtacagtgaaggtgaaattcgatttaa

SEQ ID NO: 191870 - DNA, 75 bp, Homo sapiens
attcctcctccttggtcgccgcgtccttggctggcgtagtggagactgctgcacggactctggaaccatgaacat

SEQ ID NO: 191871 - DNA, 90 bp, Homo sapiens
gcagttggagcttgctgcctggaagaatgacggtgaagtggatcctaaagagaggatagcacgccaacgaaaattattacagaagaaact

SEQ ID NO: 191872 - DNA, 50 bp, Homo sapiens
caagagtcctcagaaaacattcaggtctgatgcccgtcttcataaagacg

SEQ ID NO: 191873 - DNA, 104 bp, Homo sapiens
aacatccagaagatcacacagtgttccctcttggaacagagatcatgatgacacggcatctactcgttcaggaggaaccccaggcccttccagcggtggccaca

SEQ ID NO: 191874 - DNA, 96 bp, Homo sapiens
tttgaagcactacaaacaagcagctgagcagaactcacagtttggagatgaaaaaacatttagtgattcatcattgctggaaaatctccaaaataa

SEQ ID NO: 191875 - DNA, 100 bp, Homo sapiens
gcctatattctagagaagttttccacctggaccaatacggaattccgatacctggaggatggaggcctggaaagaaaaagcttgtggtgaaggggggcaa

SEQ ID NO: 191876 - DNA, 82 bp, Homo sapiens
gcctcagttggaagcagccgatccagcctgcggagcctgtggggcagactaatagggatgccaaaggaaaaatatgatcctc

SEQ ID NO: 191877 - DNA, 97 bp, Homo sapiens
cagctctttctccaagtttgatggctgatcttgaaggtttacacttgtcaacttcctcttcagtcatcagtagagcagtcatgatggcctgcactcc

SEQ ID NO: 191878 - DNA, 97 bp, Homo sapiens
tggattacatgagtaagcaaaatggaggtgaaggcggcatcattatcaatatgtcatctttagcaggtgaccaagaatatggcccaggtgaccaaag

SEQ ID NO: 191879 - DNA, 90 bp, Homo sapiens
gtggcgggggtcgcggaggtggcagggggcctggctccgggcagtgcgggtgacagaccatgccaccactgccctgctccactatcagct

SEQ ID NO: 191880 - DNA, 50 bp, Homo sapiens
tgcaaattcatgacaggattattgaggtttttggattcaaagcataaaaa

SEQ ID NO: 191881 - DNA, 74 bp, Homo sapiens
atgccatcaacctgcgtgaggtcaacctgcgcccccagatgtcccaggaagctcttcgtgggcggtcttgactg

SEQ ID NO: 191882 - DNA, 75 bp, Homo sapiens
ccgttcccgcgagagagatgaaagacgtcgaggggacgattggaatgacagatcactttgggaagcagtgacatc

SEQ ID NO: 191883 - DNA, 73 bp, Homo sapiens
cagatttacaaactggccaagaagggccttactccttcacagatcgttacttgaagaaatctgtaatcttgga

SEQ ID NO: 191884 - DNA, 105 bp, Homo sapiens
aagatcctggtgcggaacatccccttccaggcccacagccgggagatccgagagctcttcagacaatgcagatcttcgtgaagactctgactggtaagaccatca

SEQ ID NO: 191885 - DNA, 74 bp, Homo sapiens
tagccgcgtcccctccagtccgctccgggcaggtccgcgggagagctgtggggcttggtgagtgtttcgtggcc

SEQ ID NO: 191886 - DNA, 97 bp, Homo sapiens
ttatgagcaggtgcttcggagtgcttatgccaagaggaacagcagtgtaaatgactcaggattcttacagaagcagagattgatgctcaccttgttg

SEQ ID NO: 191887 - DNA, 134 bp, Homo sapiens
aaggcagaaggaacccatggctttagccggctgcccagattcctttttgcaccatccgtactaccaggtgcccttgctcgtgtgaatgaacagaggccagagaattgcagaaacccacctgtaatatgcccaca

SEQ ID NO: 191888 - DNA, 97 bp, Homo sapiens
aactgtgaacattttgtgacattgcttcgctatggagaaggagtttcagagcaggttggcctggcagtggtcaatggacagctcatggcagtaggag

SEQ ID NO: 191889 - DNA, 97 bp, Homo sapiens
gccacttcatgttccagtgcctcgagcgctcaggatggaggaagactcgatccgcctgcctgcgcacctgcaaatgttcccactgccaggaggcagg

SEQ ID NO: 191890 - DNA, 83 bp, Homo sapiens
cttccacaccccctccgtgggtgtgtgggtggcccagttgaaatccttcccttcctctaccttggaagtgcctaccatgcatc

SEQ ID NO: 191891 - DNA, 75 bp, Homo sapiens
gggaacccgcggtggagcgggacacgaacgtggtcttgccccagaagctgcgggcacatccacgcctgaaatgcg

SEQ ID NO: 191892 - DNA, 100 bp, Homo sapiens
tcaaagagcagagcatcctggaactgggatctctcctggcaaagactggacaagctgcaggggatcccaacaagccctcaggattcagaagtgttaaagc

SEQ ID NO: 191893 - DNA, 134 bp, Homo sapiens
ggcaggtgctgcaggccctcatcatctgccccttcctgctcatgctgctctactggtcttttgggaggtcatcagtgatgagcatgggattgaccccactggcagttaccatggagacagtgatttgcagctgg

SEQ ID NO: 191894 - DNA, 82 bp, Homo sapiens
tgacaacagtgttaaatatcagcaaagaaaacatgaccctcacagaaaatgttgatggaagtagttccacattaagcatgag

SEQ ID NO: 191895 - DNA, 119 bp, Homo sapiens
gcgagctcggactcgggccaatccctatgagatgatccgaggagtcttctttctaaacagggcgaatcaaagccatccagctggagtactcagaggcccggagaacgatgaccaacgcc

SEQ ID NO: 191896 - DNA, 75 bp, Homo sapiens
agaaagtaaagttggaagttaagggagacaaagttgaaaacaaagtgctgaaagtgaatggcttggaggaaggcg

SEQ ID NO: 191897 - DNA, 51 bp, Homo sapiens
aggacaaacccaccttcatcaaaggggagctctttgttcaatgcctagcca

SEQ ID NO: 191898 - DNA, 50 bp, Homo sapiens
tagtccttctcctccatcctcaggaaagcaatacgagaattggagaccca

SEQ ID NO: 191899 - DNA, 140 bp, Homo sapiens
tgaaaaggctttgagaaattttgagtcctcgagtgaatgggcggatctcatatcttcacttggcaaactcaacaagattgatctggatactattgatgtaagcaacctcaacagacagtttttgtttcaaaagaaacatg

SEQ ID NO: 191900 - DNA, 74 bp, Homo sapiens
gcatctcctcggcccctggctcctgctcctggacgaaggggaggaccaggctggcgatgaagatgaagatgatg

SEQ ID NO: 191901 - DNA, 74 bp, Homo sapiens
tgcgggttcaggaggtacccaaactgaaggtcagttctacagcaacggagggcattctgggaatgccagtggcg

SEQ ID NO: 191902 - DNA, 100 bp, Homo sapiens
caccgtggcctcagcgtgctgcttgcacggatacctcagcgggcgccacggtggctcccagaatttctacagacagttcaaggaaattgctgcagttatt

SEQ ID NO: 191903 - DNA, 87 bp, Homo sapiens
tgagagccagccctgacgtgaactcattttatctgccacgacccagaaggtatagctgtggaccaactgtatatgatcatgcgcacc

SEQ ID NO: 191904 - DNA, 75 bp, Homo sapiens
caagagcaagatcaccgtgacatccgaggtgcctttctccaaaaggtcagctccgccgaaggcgccgccaaggaa

SEQ ID NO: 191905 - DNA, 119 bp, Homo sapiens
cagagctgtgcctcccagcaccacagtccttctgcagtccctcgtccagccacccccagagcactgcagtttcctcctgaaggctggctccggctctccctcaataatggcagcatcac

SEQ ID NO: 191906 - DNA, 75 bp, Homo sapiens
caaagatgaagatgaaaccaagcccttggaagtctgcggtcttgcagttcttcagactgctttaataaagtgatg

SEQ ID NO: 191907 - DNA, 85 bp, Homo sapiens
catccctggcttcccgactgtgaggaaactggcgatggaatatgagaggagccctctggaaagaaaaggacagaccctgtgcttt

SEQ ID NO: 191908 - DNA, 100 bp, Homo sapiens
cttcaagacaaagggccccttacacaccagacagctatgcaaaagcagccttttgtttagaggaactaatgatgactaatccacacaaccacttatactg

SEQ ID NO: 191909 - DNA, 83 bp, Homo sapiens
ctcagggcctggaggacgggcaaaacggtggagaccatcctgggcctcacaggagcgaccatgggaagcctcatctgcttcat

SEQ ID NO: 191910 - DNA, 82 bp, Homo sapiens
cacaactatatagcaagcttacagtaagagagttattgaactaacaggggatgtgactcctgatatgaaatccattgccaag

SEQ ID NO: 191911 - DNA, 95 bp, Homo sapiens
aacttcagggaccggttcatcgaaatccaacttaccgcccaaggtaccgtaggtgaaatgacaatggatgctctgttggctcgattgaaacttct

SEQ ID NO: 191912 - DNA, 100 bp, Homo sapiens
cgacgccatcaggctcaacgaggaactcaaagtggatgaggaaagggaacgcccttttgcttgtgactggcagggctgcgacaagaagttcgcccgctcc

SEQ ID NO: 191913 - DNA, 90 bp, Homo sapiens
taccttgagcaaagagatccgtccagtctgccgcaagttcatgcaagatctatggcctgctgtgcagttagccaacttctacctggtccc

SEQ ID NO: 191914 - DNA, 100 bp, Homo sapiens
ctccatgtcctgttgtggggcttttacagcctttgggaacgtcaaggtcgtgggaaataaaaggcagttctacacagactgcagcaacggttgcatctgc

SEQ ID NO: 191915 - DNA, 75 bp, Homo sapiens
catgtctgatcccttgctcccatccctgcagcatgaacaaggtgtatgcaacagcgttattgcaacaggctaacg

SEQ ID NO: 191916 - DNA, 103 bp, Homo sapiens
gcatctaattatcctcattcatgttccccgagggtagggggaaattcacaggcccaacagacttttatagcctgacagaaatgttcgcttacgcagctagccc

SEQ ID NO: 191917 - DNA, 100 bp, Homo sapiens
tgataacgaagcagctattgtccaggtctgaatttcctgctgctgttcacaaagatgctttttatctttaactttttgttttccccacttccgaccccgg

SEQ ID NO: 191918 - DNA, 75 bp, Homo sapiens
tgactcttgcgccgccgccttccacccggaggccctgcatcatggaaactctttctaatgcaagtggtacttttg

SEQ ID NO: 191919 - DNA, 100 bp, Homo sapiens
aaggtgatacaatgatggggcagcaagtggccaatcatggccagtccaggaggtcttagtgctgtgcgaaccagcaacttcgcccttgttggatcttaca

SEQ ID NO: 191920 - DNA, 75 bp, Homo sapiens
tcgtcatgttcttcgcgccctggtttctgaaggattgtcattcttgcatagcagtgtgaaaatggtgcatggaaa

SEQ ID NO: 191921 - DNA, 106 bp, Homo sapiens
gctggtgcccttgccaaaacagcggtagctcccctggaccgaaccaaaatcatcttccaagctgcaccaccaccgcctgtgctgatgcaccatggagagtcctccc

SEQ ID NO: 191922 - DNA, 100 bp, Homo sapiens
taaccatggccatattgtcactgtggcttcggcagctggacatgtctcggtccccttcttactggcttactgctgtgcctactcaacagattctagcttt

SEQ ID NO: 191923 - DNA, 100 bp, Homo sapiens
tgccatgtgagacgtgcctttgaccttctgccatgattgtgaggcctccccagccacgtgaaactactataatgtaactgcaaactccaagctggtcatt

SEQ ID NO: 191924 - DNA, 100 bp, Homo sapiens
gaagaaatggcggacttctacaaggaatttttaagtaaaaattttcagaagcacatgtattataacagcgttgtagaatgaatgaagacactggcactga

SEQ ID NO: 191925 - DNA, 75 bp, Homo sapiens
aagcaagcatctaaaaagactgcaatggctgctgctaaggcccctacaaaggcttcagagtagatatctctgcca

SEQ ID NO: 191926 - DNA, 76 bp, Homo sapiens
tccccacgccagccttgctgcaggttcatgtcaagtgccagcattcagaataactgaagtgaagtgatggactccg

SEQ ID NO: 191927 - DNA, 96 bp, Homo sapiens
ttggaaacacctactttatagtcctgattcaagtgttggcggatggaagggaggagactcctgaccctcagaatgcaaattgtggctactaatttg

SEQ ID NO: 191928 - DNA, 100 bp, Homo sapiens
cgcaaataccctcagagtccacgagcaagatatgggaaggcgcaggttcgtaatgttcttaatgatgcagtggatttactggaattccgtgatagagtca

SEQ ID NO: 191929 - DNA, 76 bp, Homo sapiens
ctgagcttcctggagaagaggaaggtggtctatgttgcccgaaacccaaaggacgtggcggtctcctactaccatt

SEQ ID NO: 191930 - DNA, 100 bp, Homo sapiens
tcttcacttggcaaactcaacaaggaacaagcacatcatgattgacttggggactggcaacaacaacaagattaactgggccatggaggacaagcaggag

SEQ ID NO: 191931 - DNA, 100 bp, Homo sapiens
ccaatgaagatgaagacataggagccactgaggcggctcccagctgcgttggcgacatggccgacacccccagagatgccgggctcaagcaggcgcctgc

SEQ ID NO: 191932 - DNA, 108 bp, Homo sapiens
gaaagccctgacttggggaaggctgcgggctcggagccggagacgccgagctggggccgggttggtcaaagaaaaagtgatgtatgaaaaagaggcaaaacaacaaga

SEQ ID NO: 191933 - DNA, 75 bp, Homo sapiens
ctcggcgggctgtggggcctccgcgccgcggccgttagtcatgtcggatgttgaaatgcttcaggccagtacatc

SEQ ID NO: 191934 - DNA, 90 bp, Homo sapiens
caattaaacacagaaggaaatacccagactgttactacaacctcgggcgtctgccggcagcaaaagtggaccaagaaaccttgacagaaa

SEQ ID NO: 191935 - DNA, 98 bp, Homo sapiens
tcgatgcagccagtagcttggatccttgtgggcatgatccataatcggtttcaagtcaagctgcagtttcagctcaggccacatcaaatgtcaaccca

SEQ ID NO: 191936 - DNA, 75 bp, Homo sapiens
gaacgtgctcttcgctcacctggatgacaacgagaggaggaaacatttactagggacaacttttgagtgtcagac

SEQ ID NO: 191937 - DNA, 96 bp, Homo sapiens
accgtagtagcatcaaacaatgggtcagtgttctcggtcgaacaagtaaaattacttgaccgattcagtaccagcaacaagtcattaacaggaaca

SEQ ID NO: 191938 - DNA, 83 bp, Homo sapiens
catggacctgtacagcatcaactacctgcactttggggagcctaagtcctgatcgacgacatcgcggatggcgccgtgaagcc

SEQ ID NO: 191939 - DNA, 104 bp, Homo sapiens
accagcaccggctccagtgggctctgcagacatctggtccctgggcataacagctattgaacttgcaagaggggaaccacctcattccgagctgcaccccatga

SEQ ID NO: 191940 - DNA, 75 bp, Homo sapiens
gccgctcctaagcctgcacagccgcggcggcagcagcagtgagagggtgaaaagttcggaccctttgctggagag

SEQ ID NO: 191941 - DNA, 99 bp, Homo sapiens
tgcacttcttttttgagaaaggaaggaatatatcctgactgattagtaattccctcctggtcccagacagtctaagaggcacagataaacgcagaaatg

SEQ ID NO: 191942 - DNA, 75 bp, Homo sapiens
tttcacagcaatgctggactgcagtgactatgttctagataacgaaggaggcccaacttcattcaataaggagcc

SEQ ID NO: 191943 - DNA, 100 bp, Homo sapiens
tccggaccttcaagactgtctttgctgagcacatcagtgatgaatgcaagaggcgtttctataagaattggctggatccagacccctttgtgcggcacac

SEQ ID NO: 191944 - DNA, 48 bp, Homo sapiens
caggacacccctgaagccgagaaatgggtaaaatggtgcagaagggga

SEQ ID NO: 191945 - DNA, 100 bp, Homo sapiens
aattcctagaggacctgtgcaacaacctcttgaggatcgaatcttcactcccgctgtctcagcagtctacagcacggctggagcattggatttgctaaag

SEQ ID NO: 191946 - DNA, 75 bp, Homo sapiens
atgtattttgtgatcgcagcgatgaaaggtaaggggcctggataccaagaagtgactgctcatctaatccataaa

SEQ ID NO: 191947 - DNA, 90 bp, Homo sapiens
cagtgcaccaatattctttcacaggttactttgacgcgcacgcccttgctatggactatcggagtttgggatttcgggaatgcctggcag

SEQ ID NO: 191948 - DNA, 100 bp, Homo sapiens
gttaccttagagcagttctccctagcagtgaagagctgtcctgaccaagaggaccagactttgttaatgaagtgcttacttttctggtgcagaaagattg

SEQ ID NO: 191949 - DNA, 74 bp, Homo sapiens
gtgcgcaaacttgacactcaccctgaccggtcgaattgacataaaacagttgatagcaaagaagataaagttga

SEQ ID NO: 191950 - DNA, 83 bp, Homo sapiens
gcccatcgaaacatccgaaaatttctcaaagatcaggcatttattaatacagcaaaagaaatttatgaaaaaattcaagaagg

SEQ ID NO: 191951 - DNA, 100 bp, Homo sapiens
caggagccggggcccgagccccgcccggcccgggccatgtcggtgggcgagctctacagccagatggcccactgcgtgaccttggttcagctgtccattt

SEQ ID NO: 191952 - DNA, 83 bp, Homo sapiens
gctgaagagcgacaagccgctggcagccgcggatctcaccgccgctcaggttacccagcatgccacaatctgattgctgacct

SEQ ID NO: 191953 - DNA, 100 bp, Homo sapiens
ggcgccgctcatccccctctcccagcaggtgaaaggtgtagcagtcactcggcctacacccacagcatcgaccttgtgaacccagcgacctgactgcctt

SEQ ID NO: 191954 - DNA, 100 bp, Homo sapiens
aatgcaatgctgtttgccctgaacatcatgaattcccaagaaggaggaatgaattcttccaaaacaaaactagaactgcaaaagcacctgacgacattaa

SEQ ID NO: 191955 - DNA, 98 bp, Homo sapiens
gtgtcctgcaggtattgggagatccacagctaagacaccgggacctcctggaagccaaaaatggactcacaccacccggcaagaactgctcactacgg

SEQ ID NO: 191956 - DNA, 75 bp, Homo sapiens
gttgtggtcactggagctaattcaggaataggtatgagttaatacagaaaggagtgactgaacttagaactgttg

SEQ ID NO: 191957 - DNA, 100 bp, Homo sapiens
aagatgcagaagtcagcaagagtgacataggagaagtgattcttgtgggtggcatgactaggatgcccaaggtctcggcgcggaagatggccggcggcgt

SEQ ID NO: 191958 - DNA, 90 bp, Homo sapiens
ttcgagtcgttcttgctcttcgagggcgagaattcttcaccaaaggacatggatgaaaatgaaagcaaccagtctctgatgacaagcagc

SEQ ID NO: 191959 - DNA, 100 bp, Homo sapiens
cctctctcaggaatctctatactcccaacgtgaagcaataagagctaactgccatcaagagccatcagtatgtcttcaagctgcatgcccagaaagctgg

SEQ ID NO: 191960 - DNA, 98 bp, Homo sapiens
tactattgaacctgcagaagcccagagtgcctcttcagaccttcctcagttgttctacgctgctgcgtatcattcaatgttgatgtgaaaaattcaat

SEQ ID NO: 191961 - DNA, 80 bp, Homo sapiens
cgcgcggctggtgtccgccccgcccgaaagggacctaatacctatcattgctgctctggaatataatcagtggttcacaa

SEQ ID NO: 191962 - DNA, 80 bp, Homo sapiens
gtttcttgggactgcgaagctatacaggcttacttcgggatgacttcagacaaaacccttcggatgtcatggttgcagta

SEQ ID NO: 191963 - DNA, 100 bp, Homo sapiens
cctggtcttgctcggccgatgaagtgcagaggtttttttctggaagcgatgaatgagatgaacgatgagctgcaggagaatgcacgtgagacagaactgg

SEQ ID NO: 191964 - DNA, 50 bp, Homo sapiens
gatacaccttgcgaaaagtgatgggaagacatgtaaggaatttgcataag

SEQ ID NO: 191965 - DNA, 95 bp, Homo sapiens
ctcaactgccgcctcgcctactcactctggagccttgtcgacaacagtagcaactgggcagtgtgtgggaaaagctgcggtgtcatctccatgcc

SEQ ID NO: 191966 - DNA, 132 bp, Homo sapiens
ctcacctcgatgcagccagtagcttggatccttgtgggcatgatccataatcggtttcaagtgatccccccaggggtgcccgatgcccaccccagggaaggagacctgccagtgttccaggaccagatccag

SEQ ID NO: 191967 - DNA, 100 bp, Homo sapiens
catatgtttccttcacaaccaaactggatattcctactgctgctaaatatgagctactggtcagaagttatatgtaaggctctttcaacgtaaattaagc

SEQ ID NO: 191968 - DNA, 90 bp, Homo sapiens
tccgtgcgggccatcccctatctccccgggcggggtttcatcaccttaaatggttttgaaccaatgaaggtgtattcccttaaaaagacg

SEQ ID NO: 191969 - DNA, 98 bp, Homo sapiens
gcccacccggccaaagcctctgccagacccgccctcttgacttactgtaggtgtgatcagcactggaaaagatgcctgcccctgctgccacatatgaa

SEQ ID NO: 191970 - DNA, 97 bp, Homo sapiens
gcggctcttcccgcccgccttccgccgtctcttcgagttcttcgtgctgctcaagcttccccgggcgctgcctggacaggcctgcctgcgtgctggg

SEQ ID NO: 191971 - DNA, 90 bp, Homo sapiens
gtgggcgcggccaggctggaggactagggcggtggcagtggccaggcaagtatatcgcgtcaacacagcgacctgacgggacctggcgca

SEQ ID NO: 191972 - DNA, 97 bp, Homo sapiens
ccgagtggccgccgctgcggggcccaagtccttggctgctgagtggtgacagtagcccagcccgccggccagtcctctttgatacgcaacctacggc

SEQ ID NO: 191973 - DNA, 75 bp, Homo sapiens
aacggcgagagtgggcgagaacgtccactgcgggccggcgaaagctggtatggcgtcatcattgtgggcaacccg

SEQ ID NO: 191974 - DNA, 90 bp, Homo sapiens
aggcacccgatatatgttctctaggccttttagaaaacatggtacctgtggaaaagtgaaaagccactctactactcatttgtcgacaaa

SEQ ID NO: 191975 - DNA, 75 bp, Homo sapiens
gcaagcctcgagaccgaataccagaatggcattgtgcccatcgtggagcctgagatcctccctgatggggaccat

SEQ ID NO: 191976 - DNA, 80 bp, Homo sapiens
ctgtggaaaccactttggaaaataatgaagccaaatgggcggactgttgaagtggctgagggtgaagctgttcgaacacc

SEQ ID NO: 191977 - DNA, 100 bp, Homo sapiens
aagaagttaaaacatttcagggcaagccaattatgagcccacccacctttgggttcctgttggacatcgatggagtgcttgtgcggggccacagagtgat

SEQ ID NO: 191978 - DNA, 80 bp, Homo sapiens
cagcagcaaccttggagcaggcagaagccccatgtgccactcccctgatctgcagcttcggtaggccggtggacctggag

SEQ ID NO: 191979 - DNA, 75 bp, Homo sapiens
catgagagagccaatcttggacctaccacttgaaaccattagtgagctggtgagacagctagtgttttggtgaat

SEQ ID NO: 191980 - DNA, 75 bp, Homo sapiens
tcctggctcttgccctcatcctggttctggaatcctcagttcaagaacttcagaggacgaggaaacaatcgtggc

SEQ ID NO: 191981 - DNA, 99 bp, Homo sapiens
atgactgcctggatgaagaaggatttgagactaagtttattcctccaaagcaaaccaactgagaatgcaggttcttcagaagagtgtgatcattggagt

SEQ ID NO: 191982 - DNA, 83 bp, Homo sapiens
atctttgggaagatcatccgcaaggaaataccagccaaaatcatttttgaggatgaccgggctgaagggtatgtgattggcag

SEQ ID NO: 191983 - DNA, 82 bp, Homo sapiens
agcgcctatggcgaggtcggacgcgtcttctttcaggctgagggacagtaataccccacttttattcgctataatttgcaag

SEQ ID NO: 191984 - DNA, 82 bp, Homo sapiens
cgacgttccatctgtggaaggacctaccaaccaggtcgatggccaggtggtcttcataaactatactgccttgtgatgcctc

SEQ ID NO: 191985 - DNA, 100 bp, Homo sapiens
cgcagccgctgttcccaggatggtgatccgtgtatatattgcatcttcctctggctctacagcgaggagagtacaggtcgtgctgcagttagttcattga

SEQ ID NO: 191986 - DNA, 74 bp, Homo sapiens
aaaggagcaagagcaagatcaccgtgacatccgaggtgcctttctccaaaaggaattgactttaaaattaggac

SEQ ID NO: 191987 - DNA, 115 bp, Homo sapiens
aagcggaggaaggtgaagtaggaccgaattcctgtgccgaagaggcctgcagtgggagagcaggggggggccctcagcctcttggccttgaacgggctgttcatcttgattcaca

SEQ ID NO: 191988 - DNA, 128 bp, Homo sapiens
cgctgagtgaacccatcctgccgtccttctccactttcgccagcccgtgccgcgagcgcggcctgcaggaggattatatctgtccaagatgcgagtctggttttatcgaggagcttccggaagagacc

SEQ ID NO: 191989 - DNA, 75 bp, Homo sapiens
cactggttatggtgcatacttggctcaggcttcctcaaatcccgggaacgctccagccacaaactttactctcag

SEQ ID NO: 191990 - DNA, 50 bp, Homo sapiens
ctggagtccaagatgctaatggaaaatgtctaatcaacaggagaagtatg

SEQ ID NO: 191991 - DNA, 101 bp, Homo sapiens
gaatatagatggttttgaaaagttcatgctgtcccttcattgaattttaggttcgatacaagaggctgttttcctagcgtggcttgctgcctttggtaaga

SEQ ID NO: 191992 - DNA, 74 bp, Homo sapiens
aacaagaggaacctgtcgtggaggctcggcatggctgcccggggccacagctggccctgcctgcagcagacgcc

SEQ ID NO: 191993 - DNA, 75 bp, Homo sapiens
tttcccacaggacacgaagtttgtcggcccttgccttggcagagctgaggtggtattaaagataatcaaacatta

SEQ ID NO: 191994 - DNA, 90 bp, Homo sapiens
tattgctgtgggtgctgggacttcccgtccgcggcgtggagggaactgtggctgcaccatctgtcttcatcttcccgccatctgatgagc

SEQ ID NO: 191995 - DNA, 94 bp, Homo sapiens
ccttgcagctgcttagacgctggatttttttcgggtagtggaaaaccaggtcaaaatgcagatcttcgtgaaaacccttaccggcaagaccatc

SEQ ID NO: 191996 - DNA, 90 bp, Homo sapiens
gcattcacacaggaacgatgtcggttattgtccttcctcagccagatgagatggctcccgcaaagaagggtggcgagaagaaaaagggcc

SEQ ID NO: 191997 - DNA, 50 bp, Homo sapiens
catcatcttgaatttagtgaagacaaatcttcctattttcaagctgaaag

SEQ ID NO: 191998 - DNA, 75 bp, Homo sapiens
tgctgcaggctctggggagtcgccatggtttcaagtgccccatttgctccaagtctgtggcttctgacgagatgg

SEQ ID NO: 191999 - DNA, 75 bp, Homo sapiens
cacaatcgcagtttggagagatgggaggcaagtttatgaaaagccagaaatattattcatctgtgccagaggaag

SEQ ID NO: 192000 - DNA, 100 bp, Homo sapiens
cgtggccgcaacccagcctgtggcgagggcatttgaagccaccggcgttgagtacttcaacacgacagctttctctgacttcctgatgggcagctccaag

SEQ ID NO: 192001 - DNA, 89 bp, Homo sapiens
gcggcatcctgggcatcacgtcccccagcgccgacaccaacaagcgcaagagagacgaaggtgaaaggtgtagcagtcactcggcctac

SEQ ID NO: 192002 - DNA, 75 bp, Homo sapiens
caacgactagataaagatggcatccccgtgagctcagaggctgagcggcatgggtatacagggagctaccctgtg

SEQ ID NO: 192003 - DNA, 89 bp, Homo sapiens
ctattacaatcgcttgtacaaaggagagtttaaacagccaaaacagttcattcatattcagcattcttcagaaaagtgtgggcctcctc

SEQ ID NO: 192004 - DNA, 98 bp, Homo sapiens
cttcctggcgctttcctgggttgcttctggcggccatggtgttgctgctgtactccttctccgcttaagagttggacagtggaggaccttcagaagag

SEQ ID NO: 192005 - DNA, 100 bp, Homo sapiens
tcaggattggccagccacctctctcaactgtatagctatcctctttttaagggctgggagaactcaggaagcctggtgcaggaagctgtttggagactct

SEQ ID NO: 192006 - DNA, 90 bp, Homo sapiens
gttaaggattccaagtaactcttatttgaatctccctggaaaaggagacatgaatgtctgcaatgatacttcctgacaagaagttgatac

SEQ ID NO: 192007 - DNA, 75 bp, Homo sapiens
catgtcagccttcccagtagctgggaccacaggaaagtggagaatgaggacatgaataaagaccagatcttgctg

SEQ ID NO: 192008 - DNA, 90 bp, Homo sapiens
cgctacggaccttaaaatacccgcaacagccccttcgtcccaaggatgaacacattgctttctgctcccattcatacccagatgcaacag

SEQ ID NO: 192009 - DNA, 75 bp, Homo sapiens
cgtcaccatgggggctgtgctgggtgtcttctccctcgccagctgggtatagtagttgaagattgtttgattttg

SEQ ID NO: 192010 - DNA, 100 bp, Homo sapiens
gtgagcctgagtttgctgcaggcgtgctctgtgtggtggctggactctcctttccaattcctcggaaacaggcactgccagtggactggttttcatcctt

SEQ ID NO: 192011 - DNA, 75 bp, Homo sapiens
ccagttcaaggagctgctgaccaaaaagggcagctacaggcgaacctcttcccggccgctctggtgcacttggga

SEQ ID NO: 192012 - DNA, 82 bp, Homo sapiens
gcctatgataactttggcgtgctgggcctggacctctggcaggtgatgctgggaggttcctggttacagacactggaggcta

SEQ ID NO: 192013 - DNA, 98 bp, Homo sapiens
aagaaaagcctctgggagcagaagggaggctccaagacctcatcaacaattaagtctattgaagacaatgaagtatatttgcctaatgatgaaatttg

SEQ ID NO: 192014 - DNA, 74 bp, Homo sapiens
catgaaccatttcttctgtatagaaatgcaagctcatgcttttcacttccactgcatctctcgctggctcaaaa

SEQ ID NO: 192015 - DNA, 83 bp, Homo sapiens
cagaaagcaggcgaacccgcggcgcaataacgggttttggccaaattgggcgagggcacaaaataaccacttaccccttctca

SEQ ID NO: 192016 - DNA, 75 bp, Homo sapiens
acgagggcatatatgaagaaggcatttctattttagaaagcagttcgggaaatttacctaaatattctcataact

SEQ ID NO: 192017 - DNA, 50 bp, Homo sapiens
cctctgtacgcccgttcactgtccagaacacatattacataatggagccg

SEQ ID NO: 192018 - DNA, 51 bp, Homo sapiens
agcatttaagacctcctatggcaagtgtctcactatgttgctcaggctgat

SEQ ID NO: 192019 - DNA, 90 bp, Homo sapiens
gtcttcggcatcgggcgacagcaggtcacagtggacgaggtgttggcggaagcctgtggatgtggacaaagattcatccctagtgactct

SEQ ID NO: 192020 - DNA, 82 bp, Homo sapiens
ttcacaaggaatggttttcggcaggatgtgaaggtcttccgggccctgatcctgggggagctggagaaggggcagagtcagt

SEQ ID NO: 192021 - DNA, 96 bp, Homo sapiens
caggaggccaaggacggcgttctggatctcaaagcggctcaaactgtccaggttgctgaagttgaaccacagtcacagccacagccttccccagaa

SEQ ID NO: 192022 - DNA, 82 bp, Homo sapiens
ttcaactctacttcaacccgcaccttgtgttccggaagttccagagacaagaggagcagcagcggcaccgcccctcaccctg

SEQ ID NO: 192023 - DNA, 97 bp, Homo sapiens
tcggaacaggattggtcagctatccagaatttctgtgagcaggtgaacactgaccccaatgggtgtgattgaccgatgggagcttctccaggcccag

SEQ ID NO: 192024 - DNA, 95 bp, Homo sapiens
aggatccgttttacctctccccaccccaaggattttcctgatgagtttcttatcaccacaggagaaaatctagattatcttgatggtgtccatac

SEQ ID NO: 192025 - DNA, 100 bp, Homo sapiens
aaatgaacatttttggaccctaggttttggctcattgatcatcttgctcacagggaaccaaagtcacaaaagcccttcagaaaaatgcaggaagaggagg

SEQ ID NO: 192026 - DNA, 82 bp, Homo sapiens
aactattgaagaacaagaatctccagtgaactgctttagaaaattatttgatgagacgtgcaggtaccatcaggaagcagcg

SEQ ID NO: 192027 - DNA, 97 bp, Homo sapiens
ttacaaagcctgaagaccccggagcccctttagccatgtggatacctacggagcacgagaaatacggcgtggcttctcttttaaaaggactaaaaca

SEQ ID NO: 192028 - DNA, 100 bp, Homo sapiens
gcgtgagcctccgcgcccggccggtttcaagtgccccatttgctccaagtctgtggcttctgacgagatggaaatgcactttataatgtgtttgagcaaa

SEQ ID NO: 192029 - DNA, 73 bp, Homo sapiens
ccagatgtctgacagccctgtgtgacaccaagataagtaacattatttatgtaaacccgaagacaacatctac

SEQ ID NO: 192030 - DNA, 100 bp, Homo sapiens
tgggtgtcgcgggccggccccgcggggagcgcccccggcgcgatgcccttcaggaaaggtgaagctcgtgtgtggagtgccacggtacaatcagacgaca

SEQ ID NO: 192031 - DNA, 75 bp, Homo sapiens
aactcattaatgctgcaaactagcaaggagaatcatgctttagatgtcatttgtcagagtgaaccgctgtggtcc

SEQ ID NO: 192032 - DNA, 78 bp, Homo sapiens
aacccctggaagcctagaaatgacatatgtagagtgtgtcggtcagaaggaacacctgagaaaccgctttatcatcct

SEQ ID NO: 192033 - DNA, 100 bp, Homo sapiens
tggacttcttggctggatgcgcgggggcctgaactctttgcttccggaatccgggattgttgctgacatagaattagaaaacgtccttgatcctgacagc

SEQ ID NO: 192034 - DNA, 102 bp, Homo sapiens
ctctcctgccagccaagtgaagacatgcttacttccccttcaccttccttcatgatggaatgtatcctgtcaggtataatgtcagtgaatggcaagaaagtt

SEQ ID NO: 192035 - DNA, 99 bp, Homo sapiens
ggaggatgagagcgttattgttgcacacttaagtcaagggatggtctagtctatgcagtcgagttctcccaccgctctggccgtgacctcattaacttg

SEQ ID NO: 192036 - DNA, 100 bp, Homo sapiens
cgggtcatggagtcccgaaccctcctcctgctgttctcgggagccgtggccctgatccagacctgggcagattgctggactcgctgaagagagactacgc

SEQ ID NO: 192037 - DNA, 90 bp, Homo sapiens
caataactgccctgttaaggatgctactgctagtgagaagaatgaaccagaagttcaatgcctagatattatcctactgaagatgtgcct

SEQ ID NO: 192038 - DNA, 100 bp, Homo sapiens
accccagccgaccttgagctccaggagttcgtctcttacgtctgcggaagtgcagctgcctcagttcttagcgcaggtgcccttgctcgtgtgaatgaac

SEQ ID NO: 192039 - DNA, 96 bp, Homo sapiens
cttggccatgtgagatacaaggctacacagagacagatcaaagcagctcgcctccaccgctatgtctggctggtttacgagcaggacaggccgcta

SEQ ID NO: 192040 - DNA, 75 bp, Homo sapiens
taaaatctcccaagaggaatgacaaacaaccagctcttcagagtgcttgtgatttcacgtatttttgctgaactc

SEQ ID NO: 192041 - DNA, 123 bp, Homo sapiens
ccagaaggctggtcatgaaaaaattccctcttcagtttacatatatggcagtggtatgtgatagtggaatgtgaagatcaagatactcagcagagagatccaaagacccatgagatgtacttg

SEQ ID NO: 192042 - DNA, 74 bp, Homo sapiens
tgcgtgagaacccgcccatgaagccagatttctcccaggtcctgaggcacgtgaatggccaggatcagattgtg

SEQ ID NO: 192043 - DNA, 97 bp, Homo sapiens
gaaaatgtggccaaatttcactgtccccactgtgacacagtcatagcccgaaaaagtgatttggaaagcgtggatacccatcaacgaagttttgata

SEQ ID NO: 192044 - DNA, 51 bp, Homo sapiens
accatgtgatgcacctgctccaggtctgtttggcaccccactgctgaccag

SEQ ID NO: 192045 - DNA, 90 bp, Homo sapiens
gcaatggagccaactggcccaacccaagagcgctacaaggatggggtggtgaccatcggctgtgtggtggtatgttcaagccacttgtgc

SEQ ID NO: 192046 - DNA, 97 bp, Homo sapiens
cgggcacgtgtccatcttcgagttcgacgtcttcaccaggctctttcagggagagtcccgtattctcagagtaaaagttgtttctggaattgatctc

SEQ ID NO: 192047 - DNA, 100 bp, Homo sapiens
cttcctcctcctcccgcgacggcattaccacaggagtcttggttcgagaacacagcaacctctcaactctagagaaattctactttgcttttcctggaga

SEQ ID NO: 192048 - DNA, 100 bp, Homo sapiens
gcgatggtgatggcagcagttactcgcacaaccccagttaagctgcgctccgggagggtcaacatatttcactggcacctattcacaagcttgaagaagc

SEQ ID NO: 192049 - DNA, 75 bp, Homo sapiens
cagattcgcagtggtcgcttcttctccttggtatgagaaagtgccagtcatcttggttgggaacaaagtggacct

SEQ ID NO: 192050 - DNA, 127 bp, Homo sapiens
ggatgacgacttctccttctacatctaccatctgtactggtgggagttcaacgttcacagcaagctcaagctggttggatggcaagcatgtggtgtttggcaaagtgaaagaaggcatgaatattgt

SEQ ID NO: 192051 - DNA, 100 bp, Homo sapiens
agcaattcgacaggagagagaacagcaagcagctatccagcttgagagagcaaaggatttggtgctatggagaaatttttggtagaatataagagtgcag

SEQ ID NO: 192052 - DNA, 100 bp, Homo sapiens
ctttcgtggctcactccctttcctctgctgccgctcggtcacgcttggtccggggttacccagagccccaggtgacatggcacagaaacgggcaacccat

SEQ ID NO: 192053 - DNA, 75 bp, Homo sapiens
aagacgccaggaggagtttgagcataaggaaggatctgagtctctccctgcggagacagccctgaagaactcctg

SEQ ID NO: 192054 - DNA, 100 bp, Homo sapiens
ttggagccctaacagaggaagagctgaggaccctggaaaatgagctggatgagctggaccctgatgatgacaaggagtatgtgggctttgcaaccctccc

SEQ ID NO: 192055 - DNA, 80 bp, Homo sapiens
aggaattacgggaacagaaagaaaagtccgaaagagctggcagaggcaaggctggcagcaaaacgggctgcccgggcaga

SEQ ID NO: 192056 - DNA, 82 bp, Homo sapiens
tttctatttattttacctcagtataacattagcgtgcctacagcagaaagcataaaggatgttattggcagaaagataaaaa

SEQ ID NO: 192057 - DNA, 80 bp, Homo sapiens
agggagtgctctgttcacggctccatcgctgttagtgtggacactgccagcggctgcagccgacttggaatgacctggga

SEQ ID NO: 192058 - DNA, 50 bp, Homo sapiens
cgggaaggccgaccgactgccgcgttacatgggaattggtctttctgctc

SEQ ID NO: 192059 - DNA, 100 bp, Homo sapiens
tgattagttcatactacaatgtgacatactggcccctctggtatattggagacaaggacggcagcaaggtgacaacagtggtggcaactcctgggcaggg

SEQ ID NO: 192060 - DNA, 120 bp, Homo sapiens
cggagcgcgcgtgtggtccttgcgccgctgacttctccactggttcctgggcaccgaaagttaatgaaggagttcccccttctgagtatgttcaatatccatgaaaaccttttagaagcc

SEQ ID NO: 192061 - DNA, 83 bp, Homo sapiens
aagaagcagagccgcgtcacggagcaggacaaggccatcctgtaagactttgaccccgacgcaggcttcagtgattgccgcgg

SEQ ID NO: 192062 - DNA, 100 bp, Homo sapiens
tctcggagtgggagacgtggagtgcagcacccccccaggcagcagcagcagttttcatctctggatgacaagccccagttcccaggggcctcggcggagt

SEQ ID NO: 192063 - DNA, 74 bp, Homo sapiens
atttgccagtctcaacaacattatcagatgttcttgacagagtgtcaggatggctgacttcaggctgcggaaac

SEQ ID NO: 192064 - DNA, 74 bp, Homo sapiens
gccgaaccgcccagactcttcagggaaaaggtcatacagcagatggaacaaaaaaaattacaacaaggaattcc

SEQ ID NO: 192065 - DNA, 75 bp, Homo sapiens
cctggctctataagctgaattatggcagcccagtcaagtattctaccttgtaaatactgttatttgtatatactg

SEQ ID NO: 192066 - DNA, 75 bp, Homo sapiens
ggagtgtgcgacggattgggaggcttctcgtcagtgcctcgcaggatggtaaacttatcatctgggacagctaca

SEQ ID NO: 192067 - DNA, 75 bp, Homo sapiens
caggagaagctgagcctttctggacagaccaacctgtcagtgctgcaagaacgtcaaggtcgtgggaaataaaag

SEQ ID NO: 192068 - DNA, 82 bp, Homo sapiens
gggttagccaagagagacagagaacactggatagacttcgaacatttaaacagattctgtgaggagaccaggaggaattttg

SEQ ID NO: 192069 - DNA, 99 bp, Homo sapiens
tacacctagaagtaatggctcaactgatttacagacaaatcagagatcgcggattcaggtgtggctctatgagcaagtgaatatgcggatagaaggctg

SEQ ID NO: 192070 - DNA, 100 bp, Homo sapiens
tcgtcaccaaccgtgatgacgtccagggctatgccgccaagaccgtctttgagggtaaaatccagtacaaggaatatatcattgaaggatttgaaaacat

SEQ ID NO: 192071 - DNA, 100 bp, Homo sapiens
tcagggagataaattcaacccagtggtattaccagagaaacggagtctgaaactcttgaagagccacaatctcaatgtgaattggtacatgtactgcccc

SEQ ID NO: 192072 - DNA, 100 bp, Homo sapiens
ctactcttggaatcaaagataaatccaaatactgcatatcagaaacaacagataaatactgcaacaactgtagctgacttaaagtcaataataaatgaat

SEQ ID NO: 192073 - DNA, 100 bp, Homo sapiens
ggcctgggtgctggcgaagcggaggccggagctacctctacccagatggaaagacccacaacccagacctgactgagctcggccaggcagaaccccagca

SEQ ID NO: 192074 - DNA, 100 bp, Homo sapiens
cgcagggcggccccggttctggtgtttggcgtcggctccagaaacatgacaaggaggactttcctgcctcttggagatcagaggaggaaatggcagcaga

SEQ ID NO: 192075 - DNA, 89 bp, Homo sapiens
caaaagcccagggccatatatctcagccatggcaatgacaggctcaacaccttgctcatccatgagtaaccacacaaaggaaagggtga

SEQ ID NO: 192076 - DNA, 90 bp, Homo sapiens
cgtggagggcgcggggggcgcggagccaactgggtacatggaaaactcagtctcctacagcgcaattgaagacgttcagctgctgtcctg

SEQ ID NO: 192077 - DNA, 100 bp, Homo sapiens
cccgcgtccgccgattcctcctccttggtcgccgcgtccttggctggcgtttggaatcgaagcctcttaaaatggcagatgacttggacttcgagacagg

SEQ ID NO: 192078 - DNA, 75 bp, Homo sapiens
gaaaatgtgcaagaagatcgcccagctcaccaaggttggagttgctgtgggtgagctgctgtggtctgtagccaa

SEQ ID NO: 192079 - DNA, 100 bp, Homo sapiens
gcgagtcttcggagcgaccccggcaggttagcatggcctcattgaaagaactagatcaaagactctttgaaaattacatcgagttgaaagcagatcccat

SEQ ID NO: 192080 - DNA, 100 bp, Homo sapiens
ccttgccatgtggaagaaactggtgaacacttgtcctgctccttcacctttttcttgcatggagacagcaatgtttgtaccagtgtggaaattaaccaac

SEQ ID NO: 192081 - DNA, 75 bp, Homo sapiens
tgaggcggcagtatgaccgggtttctttgatgcgacctcaggaaggagatgagattgcagcaaaaattggaggtg

SEQ ID NO: 192082 - DNA, 85 bp, Homo sapiens
aagaccgcgcgcagggcctgcagcgggagctggacggcgagcgcgagcggcgcgagaaagcagcgtctatcccagactaccgggg

SEQ ID NO: 192083 - DNA, 100 bp, Homo sapiens
aatgcataaaaactgcaatcatttttcttcagctttatcagagtattctaccttgtaaatactgttatttgtatatactgtaaatgatgacatcggtggg

SEQ ID NO: 192084 - DNA, 75 bp, Homo sapiens
atcaaatcatactccttcccaaagcctggccacagaaagagatggggtctcaccacctgcccacgctggtcttca

SEQ ID NO: 192085 - DNA, 74 bp, Homo sapiens
ccacgtcgggtcagatccgacagaaggttacacttccaggggctccccactcagtccccagtcatctatcgaca

SEQ ID NO: 192086 - DNA, 74 bp, Homo sapiens
gttggcaagaatttggctcacccattccccctgcaagcctccagcgtcgcgacaatgcagatcttcgtgaagac

SEQ ID NO: 192087 - DNA, 100 bp, Homo sapiens
cattaacatctgtctgtccgcttagtcatcacatcatttcactgtggtgtcatggagaaactccagctgggcccagagattctgcagcgggaaaatccaa

SEQ ID NO: 192088 - DNA, 78 bp, Homo sapiens
cgagacctcatttttgtgtttttctccagccatacacccttgagctgaagagacgcctgaaagctgagaagaaagtag

SEQ ID NO: 192089 - DNA, 74 bp, Homo sapiens
gcctcttcttagttgatgatttagttgattctctgaagaccacaaataacagcacgtcgaggcatctgaaaggc

SEQ ID NO: 192090 - DNA, 90 bp, Homo sapiens
cggcggccgaggacggggacagcgacgacgcggaggcagagaagggaacgcccggcccagccccgtgctgcagggtgcacagctgatcgc

SEQ ID NO: 192091 - DNA, 88 bp, Homo sapiens
cggatttttggcctcatactctgttatagataaacaagttagagatgtttatgattacttccgagctgtcctgcagcgtgatgaaaga

SEQ ID NO: 192092 - DNA, 49 bp, Homo sapiens
aaaatgagggagttcaactctggtcagcgtttctcgcagcacacatccc

SEQ ID NO: 192093 - DNA, 75 bp, Homo sapiens
ggccgccgccaactacctgctctgtaccaactgccggaaagtgctgcggaaggttgtgaccgagattcccgacga

SEQ ID NO: 192094 - DNA, 75 bp, Homo sapiens
gctcagtctgcggccaagactccgtcctgcaagatttctaggttggaagaatcccttaggaagtcagtgctgcag

SEQ ID NO: 192095 - DNA, 82 bp, Homo sapiens
gggcggcttcctggcctgggcgctccggtggcggcggaggcccagctgagagccagcctggaggttacccagcagcaggcca

SEQ ID NO: 192096 - DNA, 75 bp, Homo sapiens
atgacatcttccgaatctacattaaaggatctcccattaaccagtcataatgaagtaagaacaagaagatgggga

SEQ ID NO: 192097 - DNA, 75 bp, Homo sapiens
gcccccagcggttgccaaagctgtgtgaggaggaggaggaagtgagaggaggagagaaagtttcattgtgcaaat

SEQ ID NO: 192098 - DNA, 133 bp, Homo sapiens
aaacgtagggaccacatcaaagacagctttcacagtttgcgggactcagtcccatcactccaaggagagaaggtttttcgttggaatatacgttgcacatttatggcgattctgagtgtgagggcagacttct

SEQ ID NO: 192099 - DNA, 85 bp, Homo sapiens
ggcggacatcactttagaccctccacctaattgcagctgcttttctaacccaaactgtatgtcttgatgacactacagtaaagtt

SEQ ID NO: 192100 - DNA, 50 bp, Homo sapiens
ctgctctcaactacaacatcgtttcaggtgccaccatggcaactgcacca

SEQ ID NO: 192101 - DNA, 100 bp, Homo sapiens
gcctttcctttgttttgggaggatatagcctgcctatatgctgtggaaatgaacggggagcagcagcttgatgcagctgactggaaataccggcatgcag

SEQ ID NO: 192102 - DNA, 82 bp, Homo sapiens
ctttgtctccccgatctacggggctgacatcagcggctctttgtatgatgacgtatcgagaaccttccctgcgaacttcaga

SEQ ID NO: 192103 - DNA, 76 bp, Homo sapiens
gggaatcccatcaaagtcagccgtgtggggtctgcaatgattagtgatgatgaaccaggttatgaccttgatttat

SEQ ID NO: 192104 - DNA, 100 bp, Homo sapiens
ggtgtctacagtgttctcgacttcgtcgctgatgcgacctaaagtcatgtggcacctccttcgaaggtacatggcatcccggctccattccctgcggatg

SEQ ID NO: 192105 - DNA, 75 bp, Homo sapiens
cgggaatccggcacaaggcactgggctacgtgctggacagctccagagacacaagatcaagtgctgcttcctatc

SEQ ID NO: 192106 - DNA, 100 bp, Homo sapiens
tgatctcagcccagaaattacaactgaagatataaaagctgcttttgcaccatttggaagaatatcgacctctggtcctcaatcgagttcctctacgaag

SEQ ID NO: 192107 - DNA, 131 bp, Homo sapiens
agatggcagctcagatccgtgaggtggagcagagccgacaggaggtggttcggtctgtcttagaggacaacgtggatctgggagagctgatgttttccctgtgctatcttccaacggctggcaggctgacc

SEQ ID NO: 192108 - DNA, 75 bp, Homo sapiens
ttttgatgcatctctacctggaactttgccggaggaggtgcgccagtctgtaactcctgccgagccagtccagta

SEQ ID NO: 192109 - DNA, 51 bp, Homo sapiens
aagccattagatggtggagaaaggtgagagtgattttccagtgattgcttt

SEQ ID NO: 192110 - DNA, 96 bp, Homo sapiens
ctcctctgtgtttgccgcctggatgtggaagatgtcaagtttgtgatcaactatgactatccaaacagctcagaggattatgtgcaccgtattggc

SEQ ID NO: 192111 - DNA, 101 bp, Homo sapiens
cgtgacgtcacgctcacttccgccgccgtcgggggctgcgcgggggctgtggctccgggactgcggggtattccctcagcggatactacacccatccattt

SEQ ID NO: 192112 - DNA, 82 bp, Homo sapiens
tgcgcaagaagggccctacggccgcccaggccaaatccaagcaggctctgtgtgtactactcggaagaaaactggagtgggg

SEQ ID NO: 192113 - DNA, 100 bp, Homo sapiens
actgtttgtgctggatcgcagcgctgcctttccttatgaagaagacacaaagctccactggttcaacagcctctcctccagtttcgaccccagtcacagg

SEQ ID NO: 192114 - DNA, 75 bp, Homo sapiens
cggcgaagggagccgaccgggccctgggctggaggtaaaaccccacggtgcagtagacattgttgcaatcatgat

SEQ ID NO: 192115 - DNA, 90 bp, Homo sapiens
cggcgggcaggcgtgcggaggacactcctgcgaccaggtgctggagaatctggtaaaagcaccattgtgaagcagatgaggatcctgcat

SEQ ID NO: 192116 - DNA, 98 bp, Homo sapiens
aaatacaaactggaaaataaagattacagagaaaaaaccaacaccttcctgtgcagtcctgttggaatttataaaagcttcgatgatgaagaatcagt

SEQ ID NO: 192117 - DNA, 82 bp, Homo sapiens
ggatatcgacgtcgtgatccagaagtccagagctgaggactgcctgtttgcaggtcccttcaccgatgttgtcaccaccaac

SEQ ID NO: 192118 - DNA, 75 bp, Homo sapiens
gctggcggagcaggaggatgggcggtctcacagatttcaagcctggctactggattggtgtccgctatgatgagc

SEQ ID NO: 192119 - DNA, 76 bp, Homo sapiens
cttttcaggacgctcctcagccaagaagaagggcggaaaccacatccccgaaagaaggtggtcttctgccctgtta

SEQ ID NO: 192120 - DNA, 83 bp, Homo sapiens
tgccttctggacaatctttccggtgtgggcccatcgctggatggatctgtcagaacacggctttgggctggccctgctcaacg

SEQ ID NO: 192121 - DNA, 116 bp, Homo sapiens
gtccaaagaaaagatacttctgcaatcctggacatgaaatggatctgtgccagttcagaagcaggcgagcctcttccctgatgaaaaagaagataacttgctgggtaccacatgcc

SEQ ID NO: 192122 - DNA, 75 bp, Homo sapiens
ctggaatagaagagaatgacctagcaaaagttgatgatcttccccctggcccgggtcctttttgtgctgattgtg

SEQ ID NO: 192123 - DNA, 74 bp, Homo sapiens
cgaggaggagtacctggaaattaggctcccccccaaccaagcggcagcggcggagtcggggccggcccagtggt

SEQ ID NO: 192124 - DNA, 75 bp, Homo sapiens
tgctggccacttgcttgggatcctttatcctggtcatcttctatttccaaagtgaacaaatagaagctgagggtg

SEQ ID NO: 192125 - DNA, 50 bp, Homo sapiens
gcagtggtcgcttcttctccttgcttataccattgctaagtatggtatgt

SEQ ID NO: 192126 - DNA, 101 bp, Homo sapiens
ttatgcaaaaataatctgtaatactaaagacaatgcactgcctccttacctgtgaggaatgcaaaataaagcatggattaagtgagaagggagactctcag

SEQ ID NO: 192127 - DNA, 97 bp, Homo sapiens
tccagccgggcccgcgaagtggcatgcatgtagggaataccggattcataaagagctggatcatcccagaatagttaagctgtatgattacttttca

SEQ ID NO: 192128 - DNA, 96 bp, Homo sapiens
acgcgtcccccagtaggagaatgactccgattcgtgaccctcagcgccggtgcatgtcgatgtaacaggagaattcgagtggacgttgctgatcaa

SEQ ID NO: 192129 - DNA, 84 bp, Homo sapiens
cctcagttggaagcagccgatccagcctgcggagcctgtggggcagcttggctgaagaggaaataaaaacagaacaggaggtgg

SEQ ID NO: 192130 - DNA, 83 bp, Homo sapiens
ctgggcttgtccttgctggtgcatgcgtcgtcggcctctgggcagcagccaatgttttcagttgcaccaagcttagccaccaa

SEQ ID NO: 192131 - DNA, 100 bp, Homo sapiens
gaaaaggatagcttcagaaatcagaaaaacatttgggaggtgtctagcccagtggaccttctgaagggatgcaagtattggaatggaatggaattccctt

SEQ ID NO: 192132 - DNA, 75 bp, Homo sapiens
cttcgacgctattttttggaactgacacaaagtttcatcattccattaagcctggagaaagttcttgtggaattc

SEQ ID NO: 192133 - DNA, 75 bp, Homo sapiens
tggagaattacaggaatcttctctcattgggccggaaggtggtggtcgtacgctgtgaaggcatcaacatttctg

SEQ ID NO: 192134 - DNA, 49 bp, Homo sapiens
caggccgcgacgagggcgctgaggagccaaccccctgcagaggaatgaa

SEQ ID NO: 192135 - DNA, 91 bp, Homo sapiens
tgctgtggttcccctggatttagtgaaatgccgtatgcaggttatggaaacaaaggacatgctttacatcgtcactgaatttgctaaaaat

SEQ ID NO: 192136 - DNA, 99 bp, Homo sapiens
tgaagaggcggatgtggatatcgaaggggacgtggtagcggcggcgggggcacagccagggtcaaaatgcagatcttcgtgaaaacccttaccggcaag

SEQ ID NO: 192137 - DNA, 100 bp, Homo sapiens
ctcccggtcggctaagattgctgaggaggcggcgggtagctggcaggcgccgacttccgaaggccgccgtccgggcgagaatgaactctggaagcccagc

SEQ ID NO: 192138 - DNA, 71 bp, Homo sapiens
atcgccacctaccgcaagctgctggagggtgaggagtgcaggcttgtaaacatataacataaaaatggctt

SEQ ID NO: 192139 - DNA, 117 bp, Homo sapiens
acgttcggctactacttaataatgacaatctcctcagggaaggggcagcacatgagggccccaaggctgttgcagctcctcgacctgatcggttggtcaatcgcttgaagaatatca

SEQ ID NO: 192140 - DNA, 100 bp, Homo sapiens
acaaatggatggattaatccctggggtagaaccacgtgaaatggcagctatgtgtcttggattggctcacaggatgtgaagtgatagctgtgaatacccg

SEQ ID NO: 192141 - DNA, 50 bp, Homo sapiens
attttgcagcctgcaccggccaacggcaggaatagagttggagcggtgcc

SEQ ID NO: 192142 - DNA, 100 bp, Homo sapiens
acccaaacttgctggtcactgggaggttatgaagacagtatggagtttccagaccatagtagacatttgctacagtgtctgagcgagcagagacaccagg

SEQ ID NO: 192143 - DNA, 74 bp, Homo sapiens
attacaggcgtgagccaccacgcctggcctcactcaaacagtaaacgaggctggagtgcaatggcgcgatctcg

SEQ ID NO: 192144 - DNA, 75 bp, Homo sapiens
agtgaagataatgaatgtcgaatgtgactgactagcagcttcattttgaaattgtctcctaaccctctagtttta

SEQ ID NO: 192145 - DNA, 75 bp, Homo sapiens
ttggaacagcccacagtggtggtgggcaagggcagacttgggccagcagcctccttttagaggactcagaagaag

SEQ ID NO: 192146 - DNA, 75 bp, Homo sapiens
aaggaagctgcccttcagccgcctggtctacgaagatctacactccaggccggaaagagcaaggggagcccatga

SEQ ID NO: 192147 - DNA, 75 bp, Homo sapiens
tgtggataacgggaggtgaatttccatgtcaacatagtcctggtacatgtcccagagcaagcacacggaggcccg

SEQ ID NO: 192148 - DNA, 100 bp, Homo sapiens
tggataacgggaggtgaatttccatgtcaacatagtcctgctccagaacctgggtatcaacccagcaaacattggcttcagtaccctgactatggagtct

SEQ ID NO: 192149 - DNA, 89 bp, Homo sapiens
gctgcctcagttcttagcgcagggttgactttgataaagattgtgaagatcctgaatataaaccactccaaggtcccccaaaggaccaa

SEQ ID NO: 192150 - DNA, 82 bp, Homo sapiens
atttattggaggcctacttgcagcatattacctatcaggagaggagccttatgccagcctggaccatcttggaggcagtgta

SEQ ID NO: 192151 - DNA, 100 bp, Homo sapiens
aggttaagctggctgtcctgaaatattataagagccctttgctcctccctcagaatgaacggagaccagaattcagatgtttatgcccaagaaaagcagg

SEQ ID NO: 192152 - DNA, 74 bp, Homo sapiens
gttgtcttgccacctggttcagcttggccagatcgagcggagaaatgccctccagaatacccatcatatagccc

SEQ ID NO: 192153 - DNA, 100 bp, Homo sapiens
ttccttccaaagtgcagcgctgtgcagtggtgtcccgacccaggctaagcttgagcatggctgagcaggagcccacagccgagcagctggcccagattgc

SEQ ID NO: 192154 - DNA, 75 bp, Homo sapiens
cctcagttggaagcagccgatccagcctgcggagcctgtggggcagcattctgctccggatatggtgtacttggg

SEQ ID NO: 192155 - DNA, 124 bp, Homo sapiens
gaaatgcagaaaacagaaacacttcttttattttcctgtaatatatctgtatcatcggagaaatgtggatctgagagaatacttgtctgaagaagtacaagcagtacacaagaataccacctat

SEQ ID NO: 192156 - DNA, 100 bp, Homo sapiens
ggaagaggcaccagagactctcactctggggaggaaggatatggagtaatagtactaaatcccaatgaaaactatattgaagtagaaaagccgaagatac

SEQ ID NO: 192157 - DNA, 101 bp, Homo sapiens
ggcctccgggcccggcgccgccgcccgcaggtaaactcgggggccaggactcttttgaaagcatagagagctacgatagttgtgatcgcctcacccagtcc

SEQ ID NO: 192158 - DNA, 98 bp, Homo sapiens
gaaagcccgcaaattaacggggtgtctctctcctgatgaagagagttttgcggcctccaggtggtggatccaatttttcattaggttttgatgaacca

SEQ ID NO: 192159 - DNA, 100 bp, Homo sapiens
agccccaagacagagcgctactcctggcagtgcgtcaatcagagcgtcctgtgcgagtttatgtggccgaggcagacaagtggaattaggccttgctgca

SEQ ID NO: 192160 - DNA, 51 bp, Homo sapiens
cacttggagtccggacatctgaaacttggttggagtccgtgcggctggagt

SEQ ID NO: 192161 - DNA, 99 bp, Homo sapiens
gctgtggagagcccgtccgacagcgctgaggtgaagatggagctggaaaaacaagcttaataagaaaaattcagggaatagaggagtataagaaaggaa

SEQ ID NO: 192162 - DNA, 83 bp, Homo sapiens
ggacatcgtcttcagcaagatcaattggaatcgaagcctcttaaaatggcagatgacttggacttcgagacaggagatgcagg

SEQ ID NO: 192163 - DNA, 100 bp, Homo sapiens
gtggcacctgcgcgaagctggccaaagcctgcccagacggctcacctgtgcgggatggaacaaaaggcacagttggcgggcagctcccaggtctccatga

SEQ ID NO: 192164 - DNA, 75 bp, Homo sapiens
aaacctttagaaacctggcctgtgtaggtcattgagactgcctcttctcaaagggacactgtcctcagcacttta

SEQ ID NO: 192165 - DNA, 75 bp, Homo sapiens
gtcggggctgtcggccggccacagggatgtcttttactatagggaaattcaactactgaggaggttacggcacaa

SEQ ID NO: 192166 - DNA, 83 bp, Homo sapiens
accctctcgcctcgggtctcgggggccgctctgggatcccggccaccagcaattgtccgagaagctccatgaagaaattgaca

SEQ ID NO: 192167 - DNA, 74 bp, Homo sapiens
aacggagcttgaagcaaagctgcaggttttaaagcccccacagaacctttattgtgtaagtttgctgatggagg

SEQ ID NO: 192168 - DNA, 101 bp, Homo sapiens
gtaaaaattcaaactgtcaagcaagtgaatgtactcaagactgatcttctaagttcactggaaatgattttatccccaactgtggtgtctatactgaaaat

SEQ ID NO: 192169 - DNA, 50 bp, Homo sapiens
acaagaaggccatctatgcatcgaagcactaagtcaggagattggaaaag

SEQ ID NO: 192170 - DNA, 100 bp, Homo sapiens
ggttgaagattgtgaagcaatagcctaaggtgaagctgcgctgccggaaggggatcccctcctctctcagagccaaagcctggcagtacctgtctaatag

SEQ ID NO: 192171 - DNA, 83 bp, Homo sapiens
cgcagtcgccgtgaagatggcgtctaccagccgcactgccctgggaagaactaggatgaggtattgacttgctgttgccacat

SEQ ID NO: 192172 - DNA, 87 bp, Homo sapiens
ttactctggggtcccggctgccctgtggcctcgctcctcggagggtttcatgtggacaaactctcttcggctcatgtataccttcga

SEQ ID NO: 192173 - DNA, 90 bp, Homo sapiens
ggaaaacaagcctggttcagttaaacctactcaaactattggagccgtgtaaagccagtggaatatagtcagatgtacagttatagctac

SEQ ID NO: 192174 - DNA, 100 bp, Homo sapiens
ggacagtgcagatgaaattgaagacgagtgcaaattcaagctccattatttctttatagctccaagctctacagattcttcaaatatattgagaataggg

SEQ ID NO: 192175 - DNA, 74 bp, Homo sapiens
tttggaactgtcaggtacctcaaagccatgtagagcgcatgaagtacaggacaataaagcttcctacacatatc

SEQ ID NO: 192176 - DNA, 100 bp, Homo sapiens
cgagaagcggcggccgcgtcctcaagccggcacctgagcggcggagacggctgtagcacaaggtaattggcgtccgtggtaaccaatcaggaagaggatc

SEQ ID NO: 192177 - DNA, 75 bp, Homo sapiens
agatgctcctgctgctgctgctgctgctggtcccactctgttgcaagactggtcttagagagaagagtccccagg

SEQ ID NO: 192178 - DNA, 95 bp, Homo sapiens
acaacctgctgcgggatcccaaatcggaagtgaattcggattgtttgctgatctcccttgagtttagaaatctggctgagaaataccaaacagtg

SEQ ID NO: 192179 - DNA, 83 bp, Homo sapiens
caccgtgaacggacagtcccccccagaataccgtagcagtaggcaggacagttccaattcaacaaaaacctctttaccctggc

SEQ ID NO: 192180 - DNA, 100 bp, Homo sapiens
aaagatttcgaacaatcacctccagttattacagaggagcccatggcatcatagttgtgtatgatgtgacagatcagtttgtgaagtgtggatatgcagg

SEQ ID NO: 192181 - DNA, 101 bp, Homo sapiens
gggaacgggcgagaaagaggaggaggcgagaaactcccaccgacccacagagaaggccaatgatgaggccaatcagagtgatacaagtgtctccttgtcag

SEQ ID NO: 192182 - DNA, 74 bp, Homo sapiens
gggagagtgagagaaaggctggaagacgagccgactccctggaccctgagaagctattgcaatgcccctatgac

SEQ ID NO: 192183 - DNA, 97 bp, Homo sapiens
tggtctcaaggacactgcatcgtcaaactgatcccctggccgttggaggagcagttattcctgctccaaaacgaggagaaatagtaagacagattgg

SEQ ID NO: 192184 - DNA, 98 bp, Homo sapiens
caagcctggcacggcggctgagctccggcagagcgtgtctgaggccgtgcggggctccgtggtgctgacttaattcagtgcacaaatgagatgaatgt

SEQ ID NO: 192185 - DNA, 101 bp, Homo sapiens
atcagtatgaggaaggacacttggaaattgaacaagcgtcacttgacaagcctatagaatcgcctctacggcagacacatgcaggccaacccagaaccacc

SEQ ID NO: 192186 - DNA, 97 bp, Homo sapiens
tagttcagtaaccattaacacagcaccctttcaagccatgcagacatcctacaagattatcaattttgcccccagtttacttcggattatagtctct

SEQ ID NO: 192187 - DNA, 100 bp, Homo sapiens
ggggactggagagacaagtaaactctcagagtaactgtcccctctgactaccatttctaagctggcgtgcggccaggatgggcagctgaagggcttcgcg

SEQ ID NO: 192188 - DNA, 100 bp, Homo sapiens
ctcagcaacggacactttcgcaacatcaagggagttttccggggccctctcagcaagaacgggaacaaaactctggatttctctgcctcttccaaacttt

SEQ ID NO: 192189 - DNA, 100 bp, Homo sapiens
gacttactctcctggtccaaggacacctacagccccgacgaacatttctgggtgacactcaacaggattcccgatttggactgagcaacaaatttgaatc

SEQ ID NO: 192190 - DNA, 95 bp, Homo sapiens
ccgggatcgtgaccgagaccgtgaccgagagcgtgaccgagagcgcgaatatcgtcatcgttagaagatagaatgagtccatttaagtcccagga

SEQ ID NO: 192191 - DNA, 102 bp, Homo sapiens
tcagttccttgtggagccggagctgggcgcggattcgccgaggcaccgaggcactcagaggagcctgacatttaccccggtaactgctgggcatttaaaggc

SEQ ID NO: 192192 - DNA, 51 bp, Homo sapiens
tcgcctgctgctgtcgtcgggaggagtctactatgcaactgcatactggat

SEQ ID NO: 192193 - DNA, 100 bp, Homo sapiens
ggcgcggctgccggctggatgggaagttaatgtttacggcgaagtctactcaacgtttccaagttttgagtatccgaggagcccaggaggaggaacccac

SEQ ID NO: 192194 - DNA, 75 bp, Homo sapiens
acccaccccaccgagttcgacttctacctgtgtagtcacgctggcatccaggtcgtgttttcgcctggggcatgg

SEQ ID NO: 192195 - DNA, 90 bp, Homo sapiens
aaggaagatggcggatctggaggagcagttgtctgatgaagagaaggggtcccttcagtgttgtacgacgatgtatcaacagagaaactg

SEQ ID NO: 192196 - DNA, 51 bp, Homo sapiens
cgctggggctgccgccacggccgcccggagtggaagacttataaccctgcc

SEQ ID NO: 192197 - DNA, 98 bp, Homo sapiens
aggtacttggatctccagtgggagctgccctctcgaaggcaggacagcggtggcggcaggagattatttggtagcaattgaagagaaaaacaaagcta

SEQ ID NO: 192198 - DNA, 100 bp, Homo sapiens
gacctttgtttttacattctgtccggagtttgaggaaatcttcagaggaactagacatggacaaggtgacagcagcaatggtactaaccagcttgtcgac

SEQ ID NO: 192199 - DNA, 82 bp, Homo sapiens
aattatcaacaccaaaaagctttctgctaggggaatctggtggacagtaacaaactttggtgaaatttcaggaaccatagcc

SEQ ID NO: 192200 - DNA, 50 bp, Homo sapiens
ggaagacttgtaacctggagaagagcattttgaaagcgaagcagaagccg

SEQ ID NO: 192201 - DNA, 74 bp, Homo sapiens
cggacagtcatcaccatgggccgggatcacattctgattgtttgacatctacaggaaggtgcccaaggacctta

SEQ ID NO: 192202 - DNA, 100 bp, Homo sapiens
tgtcaataaggggtcataggtggaaaagacatgctaacatgcttgaatcaaagtcctttgaagtagaactcaaagatgctgaacctgatattattgaaca

SEQ ID NO: 192203 - DNA, 83 bp, Homo sapiens
ccttaatgagcatgttgacagcatcgatgctagacagacagacacattcagctaacgtattttagcaggtggagtgaggttga

SEQ ID NO: 192204 - DNA, 50 bp, Homo sapiens
aattattaaaacagattttgggagtgccgtgagcgatgtggagatgcagg

SEQ ID NO: 192205 - DNA, 82 bp, Homo sapiens
cttgtccgggggagaccttgaatttggtgtggaagaaataacatcagtagttcaggtgccattactgcaagtcatcctgcca

SEQ ID NO: 192206 - DNA, 83 bp, Homo sapiens
ctgaaggccccgcaggtgaatggagagtagcagccggggcccagtgctggacccaaaggagacaacatttatgaatggaggtc

SEQ ID NO: 192207 - DNA, 75 bp, Homo sapiens
agcgcagcgacggcgtcgggagagcgcgcctagccggctcgcgaaagcctccccagctttctgaggatgatatct

SEQ ID NO: 192208 - DNA, 96 bp, Homo sapiens
ttgccaaggagacatccctcttagtgaccaaagacttgaccactcaaagtccagctccccagaacactgctcgacatggacaccggtgtgattgaa

SEQ ID NO: 192209 - DNA, 100 bp, Homo sapiens
ctggcggatgccatgctccactaggttctccaaggctggccaagggcctgtgaagccaagactcaggtgggtttggaggatttgggacaacatctacaac

SEQ ID NO: 192210 - DNA, 78 bp, Homo sapiens
gactcttctgacctccgcgcgacgtacccgccgccgccgttggctggagttactgtaaaatggggaaaggagaaattt

SEQ ID NO: 192211 - DNA, 78 bp, Homo sapiens
tggcacactttttggagcacaggattacatggatcgtcttctagacgaaagtgaaagtgctgcatctagtcgagcacc

SEQ ID NO: 192212 - DNA, 99 bp, Homo sapiens
tggaagcagaggaagtagtttaaatgatacctatcactcaagagactcttcatttagattggattctgaatatcaggtccaagcatctcattttgaagg

SEQ ID NO: 192213 - DNA, 100 bp, Homo sapiens
ttcagttggcaaaccagatatatgacttgaggctaagaatattgtacacaaagattcttgatgttcttgaggaaatccctaaaaatgcagcatatagaaa

SEQ ID NO: 192214 - DNA, 82 bp, Homo sapiens
tcggctcaccgcaacctccgcctcccaggtgccaaatgtgacatccagatgacccagtctccttccaccctgtctgcatctg

SEQ ID NO: 192215 - DNA, 82 bp, Homo sapiens
tgcctggtgcagaggatcctggaggcctgggaagccaacgaccacacgcagtgcgcgcggagccatggttatcatgtcggag

SEQ ID NO: 192216 - DNA, 100 bp, Homo sapiens
accctcaaacccctcagacaatgaattcacaacctcaaacccgttctccggtgtaattgaaaagtgatcctctcttcagagatgtcaaaaacaaacaaat

SEQ ID NO: 192217 - DNA, 96 bp, Homo sapiens
acattcaaggaaacaaatcaactaaaaacaaaattgccagaaaatctttcctctaaagtcaaactgaaaacttggaatataacgtggagcctcaag

SEQ ID NO: 192218 - DNA, 98 bp, Homo sapiens
cctgcagcagcccacggagaagaaccccttgttcgtggaggctgaggagaaagtctcctacaactgctgccgccagggcactgtctgtttgcaaatcc

SEQ ID NO: 192219 - DNA, 100 bp, Homo sapiens
acccgggccccgggctagcagagcggaggcgctgccacgaaactcgtacctgcggctaagagcagatcctgataacttaagtgactctctcttttccggt

SEQ ID NO: 192220 - DNA, 100 bp, Homo sapiens
cgttctatttctctagctattgccttattttttctcatggatgttcttcttcgagtatttgtagaaggatggtggatgcttccaaaagcatcgaagctgt

SEQ ID NO: 192221 - DNA, 100 bp, Homo sapiens
ctcggggcgcgcatcccgcaagtcggaacccggcggatcggatcccgcagatcggagacggggcctggaggccaagcccagcattcggtgcttcattaaa

SEQ ID NO: 192222 - DNA, 100 bp, Homo sapiens
accaggatttgcatatccttcaagatgcctgaagacaatcggaggggtatacaagcaagcgaggctggagcctccattccctgccttggtaccaaagtct

SEQ ID NO: 192223 - DNA, 100 bp, Homo sapiens
aattgggattgctctctaatattaactggctctatggacaaaacctgcaagtctgcagatgtggatcccgaatcctgcgagaagtagcccaccatgacga

SEQ ID NO: 192224 - DNA, 100 bp, Homo sapiens
agcaagcagttcagaagagccaaggaataaacatgcaatgaacccaaaaggcttctccaaacaggctggtgtacagggagcaacaccggagctggtgcac

SEQ ID NO: 192225 - DNA, 75 bp, Homo sapiens
agtggactgtgcccccagcagcccccaagatgggcactgtgccccgactgcggcctcgcctcaatgccattctct

SEQ ID NO: 192226 - DNA, 82 bp, Homo sapiens
ggaaacagccagaccgagagcagcctgccggggcggagacctcctgccccccgaggtctgcagtctcctgaacccagcagcc

SEQ ID NO: 192227 - DNA, 100 bp, Homo sapiens
ctcgcctcctcgcagcagcgccatgctgcatatctatgtgagactgaattttcctcttagacttcagctaaaactgtgtattgcatcaggctgagagcag

SEQ ID NO: 192228 - DNA, 100 bp, Homo sapiens
gtcttcccttgtccatacccgtttcctggggatcgctacggaccttaaaataccagcaacagccccttcgccccaacaataagagctaactgccatcaag

SEQ ID NO: 192229 - DNA, 101 bp, Homo sapiens
ctcttcctctggcccgaagccttcctttatcgctttcaggtactccaattcagaatgatctgcaagaattttttgcattaattgattttgtaaatccagga

SEQ ID NO: 192230 - DNA, 112 bp, Homo sapiens
cttcacctgcagaagcgtgtcgttctgcaccagcgccttgatcgagtacttgaggtgaaagaaaatggcccgaaccaagcagactgctcgtaagtccaccggtgggaaagcc

SEQ ID NO: 192231 - DNA, 100 bp, Homo sapiens
tgatactacatattccagatgaggagaaggcagagcccccccaggctatgaatgccctgatgcggttgaaccagctgaagccagggctgcagtacaagct

SEQ ID NO: 192232 - DNA, 82 bp, Homo sapiens
atcatgtctggtggctccgcggattataacagtttaagctatgaagaaggacatccctcacactctgaaacagatctccttc

SEQ ID NO: 192233 - DNA, 90 bp, Homo sapiens
aatcttctgggagctgaggaaccagatatcttgaaaagctgccagaaagtgtaccacatgaaggaagatggttgggtgaaagtagaaagt

SEQ ID NO: 192234 - DNA, 100 bp, Homo sapiens
tggagtctgcgaaggccgggacccggttccccggcccacagtgggggtgtgcaaacccgagagaactggatgggacgcctatgcctgacagctacccaac

SEQ ID NO: 192235 - DNA, 98 bp, Homo sapiens
tggaaataaagtttctgagcatccctgcaatgaagagaacccagggaagttcctttttgaagtagttccagcatataggttgctgtagatgaatgttc

SEQ ID NO: 192236 - DNA, 111 bp, Homo sapiens
gaagaccgcgcgcagggcctgcagcgggagctggacggcgagcgcgagcggcgcgagaaacgagcagctgatgcagctgtacagtgcgcgccagcggcggcggctgaaccg

SEQ ID NO: 192237 - DNA, 74 bp, Homo sapiens
acactgaacctaagctgggttatacacgtgacagtttttccagaaaggaggagtcaaggaagcccttagtgaac

SEQ ID NO: 192238 - DNA, 90 bp, Homo sapiens
ctatgatgctgatggtgatggagattttgatgtggatgatgccaaagttttattaggtaatttcatctgtgccaaagcctccagaggaca

SEQ ID NO: 192239 - DNA, 75 bp, Homo sapiens
gcctggcctcgcttctgtcccatgtagagactgaagttggtgattacatgttctgctttgacaatacattcagca

SEQ ID NO: 192240 - DNA, 109 bp, Homo sapiens
cttggacatatcaagcattggtgcacgatgtactggcccggattgcatttctacaaggcgaaagaaaaggtcaagagaacctgaagaaggacttagtaagaagaataaa

SEQ ID NO: 192241 - DNA, 98 bp, Homo sapiens
cgactactacgaggcgcaccagatgtaccggaccctgttcttcagagcgccgccctgtgctgggctgccgggagctcgtcttcaggaacctctccaag

SEQ ID NO: 192242 - DNA, 83 bp, Homo sapiens
gctacagcttggttccatgtactatagtatatgtggatattcctggagctatggatttatttcttaatttgccacttgtcatc

SEQ ID NO: 192243 - DNA, 83 bp, Homo sapiens
gctgaggaggccaccgaagctcggggacgcgaggagccggcgtggccctgggctgaaggtgatgtggccgccctcaaccgacg

SEQ ID NO: 192244 - DNA, 96 bp, Homo sapiens
cactttcaagaccaggttcacacagccgctgctgcctgctttcacgccagtgagctcctccgacagcgaggcccccgaggccaaccccgccgacgg

SEQ ID NO: 192245 - DNA, 121 bp, Homo sapiens
cagagaggaggtcctggatcagcaagaggcgttcgaggtgcgagaggaggtgcccaacaacaaagaggccgcgggagtgcccttatgcctgcacagttgttttttaagacggaagatggag

SEQ ID NO: 192246 - DNA, 100 bp, Homo sapiens
gccgcagcccaggcgcgggggcgacgacaggtgaaagaacttgtcctggacaacagtcggtcgaatgaaggcaaactcgaaggcctcacagatgaatttg

SEQ ID NO: 192247 - DNA, 99 bp, Homo sapiens
ggattcagaaatcatggaaagcagagcaactgttcatattcaggtgaacgacgtgaatgagtacgcgcccgtgttcaaggagaagtcctacaaagccac

SEQ ID NO: 192248 - DNA, 75 bp, Homo sapiens
atcatttgaagacgttccttgaggaggtttgaaaaagattgctgtcacgtctaatgtggctgctgcctcgtgtca

SEQ ID NO: 192249 - DNA, 75 bp, Homo sapiens
atggagaatatatggctggacagctagctgcttatggctataaaattacagaatggccaacatgcagggactggt

SEQ ID NO: 192250 - DNA, 82 bp, Homo sapiens
tccttctccactttcgccagcccgtgccgcgagcgcggcctgcaggagtgatgaacggcagcagccactcaccaacagccat

SEQ ID NO: 192251 - DNA, 82 bp, Homo sapiens
cggggcgtgcgcgtcctcctccccaggcccgccgcctccctgccaagactcggtgaaatacctggagtgctcagctctcacc

SEQ ID NO: 192252 - DNA, 75 bp, Homo sapiens
tgcagcgcctggggggcctcctctcgcacctgcggaagaccctcaaagatcctggagccaggccgcagggagcgg

SEQ ID NO: 192253 - DNA, 75 bp, Homo sapiens
tccctgaagagggaagacacgcggaaacaggaaactacaagatccccggatcatgaccactctcagcgtcctcct

SEQ ID NO: 192254 - DNA, 75 bp, Homo sapiens
cgccaagcagcaacagctggcagcatcacccccggacagcaaggaagttggtgaaccatctaaagaagagaaggc

SEQ ID NO: 192255 - DNA, 75 bp, Homo sapiens
ctggttcgaagtctcagcggtattctggtgcttatggtgcctcagattccgaagaggctcaatctgtaaatcctt

SEQ ID NO: 192256 - DNA, 75 bp, Homo sapiens
aaagcgtttcctcgcttgcattcagctcctctgtgtttgccgcctggcctttctgagaaaagtctacagcattct

SEQ ID NO: 192257 - DNA, 75 bp, Homo sapiens
ataaatgcagcactggctcagagggtcaggaacagagtcaatttcaggggtccttctcccacacctgaggatgtc

SEQ ID NO: 192258 - DNA, 100 bp, Homo sapiens
agacggggtggagcccatggaatcggtcctggaggacaggaatggttagactctccgaactcaaatcgacagttcagaattccaggcccatcaaaacggc

SEQ ID NO: 192259 - DNA, 75 bp, Homo sapiens
gcgatgaaagccggttgggatctcgaggagagtcagcccgaggccaaggctctggcatcctgctgtttatcttcc

SEQ ID NO: 192260 - DNA, 83 bp, Homo sapiens
gtctctacgctgcggggatgcagcccgcaccctggggccccggacaatgcagatcttcgtgaagactctgactggtaagacca

SEQ ID NO: 192261 - DNA, 100 bp, Homo sapiens
tatcgttctatttctctagctattgccttattttttctcatggatgttcttcttcgagtatttgtagaaggctccccagttaaagatctcagatgaccgg

SEQ ID NO: 192262 - DNA, 94 bp, Homo sapiens
ctggctctggctgtgcgcgctggcgctgagcctgcagccggccctgccgccttatgccagcctggaccatcttggaggcagtgtaggatcatgg

SEQ ID NO: 192263 - DNA, 100 bp, Homo sapiens
ccgttacaatgcctatccttcagagcaagaaaaagcgttgctgtcccagcaaacacacctgtctacgctacagggttttggccaaattgggcgagggcac

SEQ ID NO: 192264 - DNA, 97 bp, Homo sapiens
acgacgcggaggcagagaagggaacgcccggcccagccccgtttttcgttggaatatacgttgcacatttatggcgattctgagtgtgagggcagac

SEQ ID NO: 192265 - DNA, 90 bp, Homo sapiens
acttggactgagctactgctggcttccttgcttctcaacttacagatgggacttcacctatagatcatactggtcgaattgacaaatctt

SEQ ID NO: 192266 - DNA, 76 bp, Homo sapiens
atatgtgatgccattccagcactggactcatggaggctgagcatttattcagtttcccgtcaccaattttccttgg

SEQ ID NO: 192267 - DNA, 111 bp, Homo sapiens
ccaggacagactgtcctccacatttagctgtgggagactggtcgaaggtagaacaagtcagccagttggctgtgttcatagaggcagcattagactatcacagacagtcca

SEQ ID NO: 192268 - DNA, 75 bp, Homo sapiens
aatacttttaaaggaacctgttgataaatgcaaaacagtggctgttgcaggttctacatgaaacattttctcaac

SEQ ID NO: 192269 - DNA, 50 bp, Homo sapiens
tcaacctgtcccacagcgaaagtatgacgaggaagcgatggtggaggctg

SEQ ID NO: 192270 - DNA, 51 bp, Homo sapiens
ggaatagactccatctatccatatgaggaaaatgttggggcttttcaggaa

SEQ ID NO: 192271 - DNA, 83 bp, Homo sapiens
gaagcaacaacataatgcccagagttggagccaattaaaccagtgagaaagatcagtctaaagaaaaggagaagaaagtgaaa

SEQ ID NO: 192272 - DNA, 83 bp, Homo sapiens
aagagcagcggaaaatgatccagtcacagatgctctctgtgtgggtatgtgtgtagccatcctccttctttgaagtctcatat

SEQ ID NO: 192273 - DNA, 74 bp, Homo sapiens
gtgcactctgctgcttatcctcctccggcagtggaagagaagacgccaaaagactcatgtacccatgttacagg

SEQ ID NO: 192274 - DNA, 97 bp, Homo sapiens
tttcagctcttctcagacatatgtccaaaaacatgcaaaaacttcctttgcttgtgctcagcgtttctggtgaaccaggctgttaagtgcaccagaa

SEQ ID NO: 192275 - DNA, 100 bp, Homo sapiens
ccgcgttccatgcgcacagggacaggggccccctcagaccgtgccatgggtgacagtgatgacgagtacgatcgaaggcgcagggacaagttcagaagag

SEQ ID NO: 192276 - DNA, 90 bp, Homo sapiens
gctccccagaaatgaacctgcccacggtgtccgcgctcagggagctcgaggccatgagcagatataccagcccagtgaacccagctgtct

SEQ ID NO: 192277 - DNA, 90 bp, Homo sapiens
cagacgacaagcacacactatggcgctgaaacggattaataagggacgtggctaaacgtgagggggcgtggccaagatggccgcgtgcgg

SEQ ID NO: 192278 - DNA, 73 bp, Homo sapiens
ccaggaggagcaagtccgatggagaggctaagcctcctctccaccaaactgccatattgccgtgagaatgtgt

SEQ ID NO: 192279 - DNA, 75 bp, Homo sapiens
tgcttcaaacgggcagggctctaggaaacatatgttacgatagccgagtctaccatggctcaagaatctcccaaa

SEQ ID NO: 192280 - DNA, 100 bp, Homo sapiens
gtggactttgagactttcctgcccatgctccaggcagtggccaagaaccgaggccaaggagagaaggatattcctggactgactgatactacagtgcctc

SEQ ID NO: 192281 - DNA, 88 bp, Homo sapiens
gggtgtgctcgcacctgcgaagaatccagcttctagggagcaccgcgagctgctttggtgtcatccccagcactcctctggccatcca

SEQ ID NO: 192282 - DNA, 83 bp, Homo sapiens
atctttctgggagcagtggccatgctgtgcaaagagcaagggatcactgtgctgagcctgcattgattctaatgaagatgggg

SEQ ID NO: 192283 - DNA, 95 bp, Homo sapiens
aggctttgggcggggcggagccgagagccacactttcaagtaaaccaggagccttcacgtaaatgggtccagtcatgcctcccagtaagaagcca

SEQ ID NO: 192284 - DNA, 75 bp, Homo sapiens
cctgggcatcacgtcccccagcgccgacaccaacaagcgcaagagagacgaagagcaaaatatgctgtgaattcc

SEQ ID NO: 192285 - DNA, 51 bp, Homo sapiens
gtggcttctggcatacctgctggctggatgcctactcatgaaggttacttc

SEQ ID NO: 192286 - DNA, 75 bp, Homo sapiens
tctgctggaggttccttcactgtgcgtgctgaccatggtcaagagaaaggattccagaggctagctccaaaacca

SEQ ID NO: 192287 - DNA, 100 bp, Homo sapiens
gtcggaggccaaacacaccgtatttcatctgtagcattcaagacttcaaactgaattaaacaaccaccatgtcgagcaaaaaggcaaagaccaagaccac

SEQ ID NO: 192288 - DNA, 80 bp, Homo sapiens
tgaagagagaaggcaaagaacctctggtgttgaaaggctgggccagtaataaaggtgaaaattccaaaagataaggatgg

SEQ ID NO: 192289 - DNA, 82 bp, Homo sapiens
gtcacttctatctgtcgcgccaggaccagcagccaatggagatcttcgtggatgatgagacgaagttgacgctgcatgggtt

SEQ ID NO: 192290 - DNA, 98 bp, Homo sapiens
taaagcttctcctttgggttgtactcatagattgtgtaggcgttggtcttctgatagcaactttaatgtgttacagcaattggaacttgcacagatac

SEQ ID NO: 192291 - DNA, 82 bp, Homo sapiens
tcttcggtggactccttcggcagtccacccaccgccgccgcctcccagatcaggatcctcatgaccagccaaagagaagaag

SEQ ID NO: 192292 - DNA, 83 bp, Homo sapiens
tatttgactgagagaaacccactgaagacgtctgcgtgagaatagagaccaccgagcgctcctggttgcagccagaatgcatg

SEQ ID NO: 192293 - DNA, 100 bp, Homo sapiens
catcaccgttaccattacgggaatcctctccaaagaaggaggagactgtagcaagttaatttggagtggcccctggagtcagtttcctacaccatccgag

SEQ ID NO: 192294 - DNA, 96 bp, Homo sapiens
tcagtctcaggagaagaaatagatgcaatggatgttcagcagctttcacaaatagtaccaaagatctattcttacatacagccgaattggaggacg

SEQ ID NO: 192295 - DNA, 82 bp, Homo sapiens
cggcggcctgcctccgggcacacccggctccccggacgcctcggagaagatggggagccccgaggatgacctgattgggatt

SEQ ID NO: 192296 - DNA, 90 bp, Homo sapiens
ccagccttcaaatcaccaactgtgggaaccaactgcctcttattgccttggatgccaaagaagagtgaatggcccacaaagagcctggta

SEQ ID NO: 192297 - DNA, 100 bp, Homo sapiens
gagcgcttccttataggatctctgcccacagtcagcagcacaacagaggcgggatgaaggtttaaggctcagaaaggtagcacattcggataaacctgga

SEQ ID NO: 192298 - DNA, 83 bp, Homo sapiens
ggccatctttgctcctccctgcaactaactccattcttaattgggttacacatcattttggaatgactgtatatcatctggat

SEQ ID NO: 192299 - DNA, 82 bp, Homo sapiens
ccataaaaacaagtgtgtgcatctggctgttagaagaattcatgctcatccggagggcgcaatcagagcttgcagctcatca

SEQ ID NO: 192300 - DNA, 74 bp, Homo sapiens
aggcctgacagctctgcggctcgggccctgagatgccgacaaaaggatcaaggtggcgaagcccgtggtggaga

SEQ ID NO: 192301 - DNA, 50 bp, Homo sapiens
ctgtttgagcccggaagcgcagaagctgttcagagaagccgaactgggat

SEQ ID NO: 192302 - DNA, 75 bp, Homo sapiens
atggaacaatcattagttcagtgcagtgtctgacttgtgacagggaaggcgacatgccaattcatgaacttctca

SEQ ID NO: 192303 - DNA, 114 bp, Homo sapiens
cggagcgtggctgcggccagcggaccgggcgcctggggcactgaccactactgcctggagctgctgcgtgtttgaaagatgtatggtgatcttgaaacctccagacacaagaaa

SEQ ID NO: 192304 - DNA, 75 bp, Homo sapiens
cttcgatgctataagagatgcagaaattcttcgtaaggcaatgaagggttttggctcaggaagaggccaaagaag

SEQ ID NO: 192305 - DNA, 75 bp, Homo sapiens
ggcgccttcaaaagcccacttggcgatgggttacagtaagaggagccaccatgttggtgataccccccggactga

SEQ ID NO: 192306 - DNA, 100 bp, Homo sapiens
ggcgcccgaggggccgagcgaggcgcttgaagaggctcagaaagctatccaacaactctttggcaaaatcaaagatatcaaagacaaagctgaaaaatca

SEQ ID NO: 192307 - DNA, 83 bp, Homo sapiens
ggaggtggaagttggggagctttgagaaaatgtggtgacctggaagaagaactcaagaatgttactaacaatctgaaatctct

SEQ ID NO: 192308 - DNA, 90 bp, Homo sapiens
gtcgacggtccccactttcccctgagcctcagcacctgcttgtttggaaggtcgggttactaacattcctcaagggatggtgacggacca

SEQ ID NO: 192309 - DNA, 83 bp, Homo sapiens
agggcaacaattttctgtacaccaatggaaagtgcgtcatcctaaggaacatcgacgctgaaggtgatgtggccgccctcaac

SEQ ID NO: 192310 - DNA, 100 bp, Homo sapiens
gagatcctggagagcctgcaggacggcgcggcagagtccccgtacgcctacagtaacggtacgaggaacagcaaattcaggaaaaagtggcgacctttcg

SEQ ID NO: 192311 - DNA, 83 bp, Homo sapiens
tgtaatgcctggaaagtatacaatgaagtcttttattcaaaacttcagcgttctctatagtcccttgaaaaggcatctcattg

SEQ ID NO: 192312 - DNA, 100 bp, Homo sapiens
ggagccgtggccctgatccagacctgggcaggtagatttcgggcagacaacttgaacaagctgaagaacctatgcagcaagacaatcggagagaaaatga

SEQ ID NO: 192313 - DNA, 83 bp, Homo sapiens
cagaagatctgggtgcccgtggaccacaggccctcgttgcccagatcattttgaaagcgaagcagaagccgtagaatcagcgg

SEQ ID NO: 192314 - DNA, 100 bp, Homo sapiens
cactttcgggaggccatacggctcgcaccttgtcgcttagattgttatgaaggttgtttgctagatcccaatggagaaaagtgtgtaactgctcctcgtc

SEQ ID NO: 192315 - DNA, 74 bp, Homo sapiens
acgatgtgcggcggatgaacaagcggcaggttacaagatgttcacctaagattgagacctagtgactacatttc

SEQ ID NO: 192316 - DNA, 82 bp, Homo sapiens
ttccccaacatgcctcaccctcatctatatcctttggcagctcacagaaatcatgagtggaggatctcaagtccacattttt

SEQ ID NO: 192317 - DNA, 100 bp, Homo sapiens
cctgcaggtggtgtcgctgctgcccagctctagactgcccagcttggctgactgtgctgtcctgattgttgctgctggtgttggtgaatttgaagctggt

SEQ ID NO: 192318 - DNA, 97 bp, Homo sapiens
ataagagcaaagaacactgttgttgccacaggaattcctagaggacctgtgcaacaacctcttgaggatcgaatcttcactcccgctgtctcagcag

SEQ ID NO: 192319 - DNA, 100 bp, Homo sapiens
ccagaccctggagcctcagttggaagcagccgatccagcctgcggagcctgtggggcaggtacctgaaagaattccgcacagagcagtgcccactctttg

SEQ ID NO: 192320 - DNA, 121 bp, Homo sapiens
cagtaacaatgtggagaaagacattacaccatctgaattgcctgcaaacccaggctcccttctgttgccacatttgggccaaggaatggagagatttcttcgtctggaaacattttgccaa

SEQ ID NO: 192321 - DNA, 90 bp, Homo sapiens
cttttgtaacttttgatgatcatgatacagttgataaaattgttgtatctggagtccatctttcaccatcttctcctgagattgtactgg

SEQ ID NO: 192322 - DNA, 75 bp, Homo sapiens
ctgttaaagctggtctgttctaactgaggtggcgacatgtctaagaatgtgagccagtcacagatggcaaaattg

SEQ ID NO: 192323 - DNA, 100 bp, Homo sapiens
agaagaagatgtcaacgcccatcgaggtcctctgcaaaggctatccctgtagacaagggcgtggtccccctggcagggacaaatggcgagactaccaccc

SEQ ID NO: 192324 - DNA, 98 bp, Homo sapiens
gaagatactgggaaatccatagctaagatgccaggaccccctgaaagcctagacatgttgtcgccgtgatcctgaaggcgctgacctacgacgagaag

SEQ ID NO: 192325 - DNA, 101 bp, Homo sapiens
tggggaaccaaagactctgggactcttggtgccaacagagttactctaaaaatgtctcaaattgggtataacaaatcagcgtgattgcctttcacctccac

SEQ ID NO: 192326 - DNA, 75 bp, Homo sapiens
agcaggcgaggtggccggagccgtgtggaccaggaggagcgctgattgtcagctgacctctgtcctgtgtgccca

SEQ ID NO: 192327 - DNA, 80 bp, Homo sapiens
ttgctgcccaatctttgccaacagggtgaagttgaacaaattgctatgatgaaaccaaaaggccagactgaacacgatga

SEQ ID NO: 192328 - DNA, 76 bp, Homo sapiens
ggggactccgcgcagaggtcgacagaggttgaggcagggccaggagccatggtgtccgcaatgttgccagtgtctg

SEQ ID NO: 192329 - DNA, 82 bp, Homo sapiens
agatggagctctatggccccaaaaagcgtggacccaagcccaaaaccttcctcctcaaaggtcctgcagttctgagcttggg

SEQ ID NO: 192330 - DNA, 50 bp, Homo sapiens
caacaccacaataatccacagccaagtattgactcggagacaaaaagagg

SEQ ID NO: 192331 - DNA, 50 bp, Homo sapiens
gcccagaagccaaacctggaaggtactccaaagattcaggtttactcacg

SEQ ID NO: 192332 - DNA, 100 bp, Homo sapiens
tggcctgcgggtcacagtctccctgaaggagctgcagaggaaccacgtgaatgttgagggggcgacacacaagcaggtggtggacctgattcgagcaggc

SEQ ID NO: 192333 - DNA, 74 bp, Homo sapiens
tcggactaccccgagtacatgtggcacttttctgtagaaggtcagttggaattcagggcattgctatttattcc

SEQ ID NO: 192334 - DNA, 89 bp, Homo sapiens
aacagaggcgacggctagaagagatataatacattgccaagcagaagaactctgaaaaattcaagattagtgagtaagaaagatgatgt

SEQ ID NO: 192335 - DNA, 96 bp, Homo sapiens
caatacttagtggataccatcgaatagtacaacaggcggaggaagcgctggcggaccatcaagctgctgctgcgccggggcgcggaccccaacctg

SEQ ID NO: 192336 - DNA, 100 bp, Homo sapiens
aggcgaagctggccgagcaggctgagcgatacgacggaaagaccacagcaagattctttcattcgtctcctcctagcctgggggaccaggctcgaactga

SEQ ID NO: 192337 - DNA, 101 bp, Homo sapiens
ctcggatcccatgcaacagccacgatgtgaagcggggcagagccgggggagcccagcccagccagcctccaggaagctcttcgtgggcggtcttgactgga

SEQ ID NO: 192338 - DNA, 80 bp, Homo sapiens
gcgggcgccaatggggagcagaaggactcggacacagaaggagaggacttgggtgaggagctgctgccacccgggctggg

SEQ ID NO: 192339 - DNA, 99 bp, Homo sapiens
aagatggaccttctaataatgcgagctgcttccgaaggctgaccgagtgcttcctgagccccagataaaagaatcagagtgtctcaacccttgacaaga

SEQ ID NO: 192340 - DNA, 75 bp, Homo sapiens
cctttctattttaaagagccaagcctcagagaagaaaatgctgctgtgaagacccaattaaagctttcacataaa

SEQ ID NO: 192341 - DNA, 87 bp, Homo sapiens
tccttcggcagtccacccaccgccgccgcctcccagagtgcctggtgaagaatgtgatgggatcactagcatgtctgcggagagcgg

SEQ ID NO: 192342 - DNA, 88 bp, Homo sapiens
gagtctcagagctgtcagaaaggaacatgtttgacaagctgaaccgtgatgcctttcatataatttcttattttttgtttcaagttct

SEQ ID NO: 192343 - DNA, 96 bp, Homo sapiens
tggcgctcggggtgactcttctcaaatgccttctcatccccacatatgcccgtccgtgatgatgggaacatgcccgacgtgcccagccacccccag

SEQ ID NO: 192344 - DNA, 75 bp, Homo sapiens
cgggcgcaggagggcagcaccagaggccagtggcactcccagctcggagctgtttgatcagtgtgagaacaagag

SEQ ID NO: 192345 - DNA, 51 bp, Homo sapiens
gtcatcggacgccagaatctggcctgacctctcgggacacacccagccctg

SEQ ID NO: 192346 - DNA, 83 bp, Homo sapiens
gtcagaaaacaaggtgtctgcaggaccaacctctcctctggatgctctagtttttggtgttgagccagacttgaccagggaag

SEQ ID NO: 192347 - DNA, 80 bp, Homo sapiens
gttctaacgctgcctttgctttaaaacagtattacttgcggtaaaacatggctaaaagcttacggagtaagtggaaaaga

SEQ ID NO: 192348 - DNA, 100 bp, Homo sapiens
ctacatgggcaaacgcctggatcagccacaaatgtacccccagtacacttactactatcctcattatctccaaaccaagattaaatgccttaatggataa

SEQ ID NO: 192349 - DNA, 75 bp, Homo sapiens
actggcatcagtcaatgttctgagatttaccgcattgtttctcagaagcaaatgtcagacagacgcgaaaatgac

SEQ ID NO: 192350 - DNA, 100 bp, Homo sapiens
actggagcagtgagaaagcaaaggctgctctgaagcgcacgacctccgactactttctccttcaagcctcacttctaaacttctggaacccgcccaccac

SEQ ID NO: 192351 - DNA, 98 bp, Homo sapiens
cagcacctttcggcttctgagacggcggcagcagcggcattcaggatctcactttgtcactcaggttggagtgcagtggcacaatcacagttcattgc

SEQ ID NO: 192352 - DNA, 100 bp, Homo sapiens
aggacatcgacatccaggcgaactcggcctatcgctaccctccgaagtccggctccatctactctttgaagcttctgcccagcttgcattgtttctagga

SEQ ID NO: 192353 - DNA, 82 bp, Homo sapiens
tataaatggcgccgaagcaggacccgaagcctaaattccaggagggaatcctatccatcttcttcaccgatatggtttgtgg

SEQ ID NO: 192354 - DNA, 97 bp, Homo sapiens
gcaaggagtggaagacaacaaaaacaactgcattgtgtacagcaaagtgtgccccctaccaccggagccagagaatggtggctacatctgccacccc

SEQ ID NO: 192355 - DNA, 82 bp, Homo sapiens
ggccgtctcgctctgggtctccaggcccgcgaccgtccgccagtcgtcccgagacatttatgcagtgtgtgattctttctaa

SEQ ID NO: 192356 - DNA, 101 bp, Homo sapiens
gtatctggagcagtcggggcgggcaggcccagctgagaggtgcgcgggcgaggacagcggcagcgatggtcgccactgggacactgtgaaccaggagtgag

SEQ ID NO: 192357 - DNA, 117 bp, Homo sapiens
tcctgctcgccgtccccgccatgctgtctctagactttttggacgatgtgcggcggatgaacaagcggcagtgccggtggtggtgtgcacattgagccccggtatagacagttcccc

SEQ ID NO: 192358 - DNA, 75 bp, Homo sapiens
gcagaagtagctaatgaaattgaaaacctgggatccacagaggaaagaatgacagcccatatcaaggcggtgtat

SEQ ID NO: 192359 - DNA, 75 bp, Homo sapiens
gcgggtgcaggagcaggacttacggcagtgggggctgacaggggcatatgatattttcctgaatgcaaaagagca

SEQ ID NO: 192360 - DNA, 75 bp, Homo sapiens
aatcagcaaagaggaggccatgcgctggttccagcagaagtgatgggaccagtggaggccgcgcctgaataccgc

SEQ ID NO: 192361 - DNA, 100 bp, Homo sapiens
ctgtcgacccggcctggcgccggactagttttcctaccgatctagagttcgtccttgtgtagtttatggtggtgctgatattggtcagcagattcgggac

SEQ ID NO: 192362 - DNA, 83 bp, Homo sapiens
ccaggcgccggccggctgcgaagacgcggtgggccgcccctccgtgcctccggagccagcgtggtggccatagacaacaagat

SEQ ID NO: 192363 - DNA, 71 bp, Homo sapiens
attcatctttcatgcagtgacatgttgataaaaaatgatgcatgcagccagtaaagatcccagagaagttc

SEQ ID NO: 192364 - DNA, 75 bp, Homo sapiens
tggcgcacctgacctctgcatctgcccaggcagcagctgcctccctgccagatgaattatactttgaggaaggtg

SEQ ID NO: 192365 - DNA, 100 bp, Homo sapiens
gcccctgtgctcagtaaggactcggcggacatcgaggtgtctgcttttggggcagagttttcatcggaggcatgcagagagttaggcttttctagcaact

SEQ ID NO: 192366 - DNA, 100 bp, Homo sapiens
gcggggacccagacgaggctcgggactttgcagccggccttagtgctcgcgcaggtacaggtttgcagattccgccagcagcacagcaagctctacagat

SEQ ID NO: 192367 - DNA, 99 bp, Homo sapiens
aaagcattcggcagcgtcgtcgcttcactgtggctcatacatgattcaagtcaatctgaaagtcccagccagccaagtgacgctgacattaaggaccag

SEQ ID NO: 192368 - DNA, 74 bp, Homo sapiens
cgggactaggggcgactgcctggggcgccggcgagtaagactttgaccccgacgcaggcttcagtgattgccgc

SEQ ID NO: 192369 - DNA, 88 bp, Homo sapiens
gacatccaaatctggtattcaacaaataattgagtgctttcgatcaggttaaacccatccagagtaatggctgcggccttacccagga

SEQ ID NO: 192370 - DNA, 80 bp, Homo sapiens
tcgcagtgacctggggaacctgctcaaagccctgggtcgcttggaagaagccaagggtgatcagcccatgacctaaacct

SEQ ID NO: 192371 - DNA, 101 bp, Homo sapiens
tctccattgacattgaaggatttcagctaccagttacttttacgtgtgatggtcccagtagggatggcacaatcagcgaggacaccatccgagcctctctc

SEQ ID NO: 192372 - DNA, 82 bp, Homo sapiens
acgtgatcatgcaggtggccgacgtgcctgagaagcccagtgccgtggaggtcccagcccccgctgcggttctcggaggtcc

SEQ ID NO: 192373 - DNA, 83 bp, Homo sapiens
ggaggatcatgaagacgagtttaatgaggaggatgaacgtgctattgaaatgtacaggggcttcaagaagcgtgcacctcggg

SEQ ID NO: 192374 - DNA, 100 bp, Homo sapiens
tcagtgcccagaacaaggaaacaggcccagcagcaaagaaacctggataacatcgtcttgcaacaacccagaataggtagcaagaggaaatctaagaaag

SEQ ID NO: 192375 - DNA, 101 bp, Homo sapiens
gaggatcaggagatctgatcctgattgcagaaccttccctgattacagaatcttggtgtttgatggtctaggtgatcttttgatgccaaccatggcaccag

SEQ ID NO: 192376 - DNA, 100 bp, Homo sapiens
tccctgccagcaagccggagcctgccagagccaaggccaagctctccaagttcagcatccccaagcagggggaggatcttcaagatgaagttcaaaggga

SEQ ID NO: 192377 - DNA, 98 bp, Homo sapiens
gaggatggagcagaggacattctagagaaagaggaattcagaaaagcagctcagcaacaggaagaacaagaagaaaaggaggaagaggatgatgaaca

SEQ ID NO: 192378 - DNA, 75 bp, Homo sapiens
tcccatccctgcagcatgaacaaggttgatgacaacaagaaactaggagaatgggtaggcctttgtaaaattgac

SEQ ID NO: 192379 - DNA, 74 bp, Homo sapiens
gcagatacagaggacagcatggaaatttccatggtgtcagtgattcatattcctgataggacttataaactatc

SEQ ID NO: 192380 - DNA, 100 bp, Homo sapiens
tcccgtcgcccatccggctggagtttgagaagcttactaccagcccagtctgactgcggagtatgatgaagacagcccaggaggggactttgactttttc

SEQ ID NO: 192381 - DNA, 88 bp, Homo sapiens
agaaaaggagttgttgagagtagcaccagagactgctgctactttgaaacgtacgatagaggccctgatggacagaggagcaatagtg

SEQ ID NO: 192382 - DNA, 82 bp, Homo sapiens
gcctgagtccagctgctccgtgtccacctccctggctccccagtgctgctcacggccgtgaactgctacagcgtgaaggccg

SEQ ID NO: 192383 - DNA, 135 bp, Homo sapiens
gcttagtctcacacccgccgggccgttgttcccgagacgttgttgagtcccctgtgtcctcttctggagctaaagttgcagacaagatccagctcatcaataatatgctggacaaagtcaatgagatgattattg

SEQ ID NO: 192384 - DNA, 96 bp, Homo sapiens
tggcggcggcggcggccggagcttctctcagccgggccaattcctgtccccccagcagcatggcatcgtgtgctgaaccctctgagccctctgccc

SEQ ID NO: 192385 - DNA, 90 bp, Homo sapiens
ggtctgacagaggctgaggaggaggagctcagggctgagcttaccaaggatctgcccaataacatgattcatcaggtgccaattaaatcc

SEQ ID NO: 192386 - DNA, 75 bp, Homo sapiens
gggcaccatcgacccgaagttgcggattgcagccgagaacgagctcaaccagcatgactatatgaaggaagagga

SEQ ID NO: 192387 - DNA, 50 bp, Homo sapiens
acagccaggtcaccagcaccaagaggagtgcatccgccccaacccttttc

SEQ ID NO: 192388 - DNA, 75 bp, Homo sapiens
cggcagagtccccgtacgcctacagtaacggtgcatctgcagacgcagcaggaggtgaagctgcgcatgacgggc

SEQ ID NO: 192389 - DNA, 75 bp, Homo sapiens
tcccaccaaagggggctgctgaccgagagagctcactcagccaggtcttcaaagcttcacctttctccaaaggca

SEQ ID NO: 192390 - DNA, 100 bp, Homo sapiens
gccactacctcctggctgccgtgaataggcagcctaaaggagttaaagttcctcgtaattttcgcttgttggaagaacttgaagaaggacaaaaaggagt

SEQ ID NO: 192391 - DNA, 90 bp, Homo sapiens
cgcatgaaggacttcaccaagggtttcagccctgaggtcctgatccggttccccatgcagaggaacttggtggtgatccccaagtctgtg

SEQ ID NO: 192392 - DNA, 76 bp, Homo sapiens
catgaatggagcaaaatggcggatcatgtgcaggattccttttaagattgggcagcccaagaaacagattgtgccc

SEQ ID NO: 192393 - DNA, 75 bp, Homo sapiens
tgttagagaagaaagacagctttgtggaagagctgcatagatgaatggtttgaagtaaatagatcttgccctgag

SEQ ID NO: 192394 - DNA, 100 bp, Homo sapiens
tgtgaacattcatgcacaaatttttatgtggaggagacatttgctcagaagagaatcaaatagtttcctcttatgcttctaaagtctgttttgagatcga

SEQ ID NO: 192395 - DNA, 96 bp, Homo sapiens
gaaataaggacaaaagccaagaggaggacagttcgctacacagcaatgcatcgaggaatactctgaagatagtaactccgagccaaatgtggattt

SEQ ID NO: 192396 - DNA, 74 bp, Homo sapiens
acggcatcagcttccaggcaggcctgaaggtcgaggtttgacatctacaggaaggtgcccaaggaccttacgca

SEQ ID NO: 192397 - DNA, 136 bp, Homo sapiens
actgcggcagcgaactgggtggcgaacggggcgagcctggaggattgtcactccaacctcttttcgctgctttttgacattcatactagtggcctattgggagaaatccacacgggccatcacagcaccatccagt

SEQ ID NO: 192398 - DNA, 82 bp, Homo sapiens
gtgggatgttgagcactacagacctcacagtgccaaatggagctggaagcagtccagtggggccattcacatgttaaactgc

SEQ ID NO: 192399 - DNA, 74 bp, Homo sapiens
acagaggaacgagctgagctggcagagtcaattgaccttgctgttctgctggggaagacaccatctacaatgga

SEQ ID NO: 192400 - DNA, 50 bp, Homo sapiens
cagagacacagagggcagtcatgagtgatcagggccaaagcggtcagtga

SEQ ID NO: 192401 - DNA, 80 bp, Homo sapiens
gaagacgaagttgatggcctggagaagaaagatgttttgcctactgttgatccgtgggatgaagctctcttgactatgag

SEQ ID NO: 192402 - DNA, 90 bp, Homo sapiens
ttctcttcactagaatatggagactgttcaatcaccaggagattcgtcagcgaactgcagctcaaagaaacctttctccaacaccagcaa

SEQ ID NO: 192403 - DNA, 97 bp, Homo sapiens
tgtcttttcttaacctgggaagtggaaccggatatttaagtacaatggtgggcttaattttagacttatgaaaatatgcatcagtttaatactgtct

SEQ ID NO: 192404 - DNA, 51 bp, Homo sapiens
cgctggagtccgcgcctccctggctattattcatggactatccagtctaac

SEQ ID NO: 192405 - DNA, 97 bp, Homo sapiens
atcatcttatcagacgaaggcaaaatgtatggtgatcccattaagatactaatgccatcactgtctcctacaatggaagaaggaaacattgtgaaat

SEQ ID NO: 192406 - DNA, 90 bp, Homo sapiens
gaggcccgccgctcgcatgagcacctcatacggctgcttctggagaagtatggggacaccacacacaccctggtggagaagatgaactac

SEQ ID NO: 192407 - DNA, 98 bp, Homo sapiens
ctcgccaaggaaacaaatgaattgctgaaagaattagggtccttgccccttcccttatctacttcagaacaggcaccaccaggaccagctgatcattc

SEQ ID NO: 192408 - DNA, 98 bp, Homo sapiens
ttctggccaaggtgattcagattgcaacgtcatcctccacagctaaggtcccctctgagccctctcaccttgtcctgtggaagaagcacaggctcctg

SEQ ID NO: 192409 - DNA, 96 bp, Homo sapiens
gaaaccccaggcagagacgggggaagcagcacgggatcccagcctcaggcctgcacggacggtgttggttggggaggccactgtctgcagctcccg

SEQ ID NO: 192410 - DNA, 154 bp, Homo sapiens
gcagcagttcatccagcagaccggggctgcgctgccaccgcccccacggcctgacaggggccctcctggcactcaggaagacggaagaaagtgccgggaagaaagaaaaccccgtccggaccatccgcaaaaagtaagagctcagcgacaagat

SEQ ID NO: 192411 - DNA, 82 bp, Homo sapiens
caccttcccattggataatgaagtgaaggcctttatgagaggacagaggctatatgaaaaggtgtccctggagcaaaggggg

SEQ ID NO: 192412 - DNA, 75 bp, Homo sapiens
gaaacaaaagttcacctctgcgaaggttttagatggagcaggattagatattgatttccatcttgcctctccaga

SEQ ID NO: 192413 - DNA, 100 bp, Homo sapiens
gagcctgccccgccctggggacgaagagctgcagctcctcctgtgcgggagccaaaaacctgtatatcatctccgtgaaggggatcaagggacggctgaa

SEQ ID NO: 192414 - DNA, 82 bp, Homo sapiens
tgaaatcaatgaaaacaacgtcagggaattttgcaatgttattgattgtaatcaaggccacgcccagatttcttctaccgct

SEQ ID NO: 192415 - DNA, 75 bp, Homo sapiens
gctccgtctcggcggcggcggcgtgcctgccagtgtagagccggtggagcagctgggctcggcgctgaggtttcg

SEQ ID NO: 192416 - DNA, 75 bp, Homo sapiens
ccatggagaccctcacggagctgggcgacgagctgaccctgggagacatcgacgtgtttgtccaacatgatgctg

SEQ ID NO: 192417 - DNA, 90 bp, Homo sapiens
tgcccgtgaccgtcgctagaactcagttgtgcgttgcggccagtcgccactgctagtgcagcagctgccccgagccccgtgcttggcaac

SEQ ID NO: 192418 - DNA, 100 bp, Homo sapiens
gagacgtcgctgaggggcttgcctgaagcgaggggctgtggaaaatctctgttctcacaaagtctccccaatgctctacaagcaactgcgtcaggcctgt

SEQ ID NO: 192419 - DNA, 82 bp, Homo sapiens
gttggatactcagcgtcgctggcagccgctgtacttggtgagaagccctaccactgcaactgggacggctgcggctggaagt

SEQ ID NO: 192420 - DNA, 87 bp, Homo sapiens
attacataacatcaaacgtggtcccttcagtctgaatatgttcattactaaggccttgccactccagtgaaagctgttcttctctta

SEQ ID NO: 192421 - DNA, 101 bp, Homo sapiens
cacccaaagccccgcacccgccttttctctctctcctctggcaggatgaggcgtgcaggcctggaacccattaaaagagccagtaaatcctgtggaaaatg

SEQ ID NO: 192422 - DNA, 50 bp, Homo sapiens
caagcagtttgtgaccggagggaagaagatgtccggtctgtgctacgaca

SEQ ID NO: 192423 - DNA, 101 bp, Homo sapiens
cagtgttatatcctccaggaatactggccagagcaatggtggaacaaagcggcaaaagatatcccatcaaaattatatagcctatcaaaagcaagttattc

SEQ ID NO: 192424 - DNA, 100 bp, Homo sapiens
gtacgatgaagccatccagattctcctgcagttataccagtgggggtattaatctctggagaagacacatccacagttagcactttcttcagatgctgac

SEQ ID NO: 192425 - DNA, 100 bp, Homo sapiens
ggaagggggagctgcgctacatgcactcgcgtgtggtggccaactcggaggagatcgccttctatgggggccatgaggttttcaaaaatacctggcaaga

SEQ ID NO: 192426 - DNA, 74 bp, Homo sapiens
cattgctgcagctcgtgggtgctcagctccagaacctgggtatcaacccagcaaacattggcttcagtaccctg

SEQ ID NO: 192427 - DNA, 75 bp, Homo sapiens
ccgcctccgggcatcttcaactgcctccaggcccaaggtcagcatcccactgtcagccatcattgaggtccgcac

SEQ ID NO: 192428 - DNA, 73 bp, Homo sapiens
ctggatgcagttgatgacatgaagattaagctgaaacagataagatagtcgttggttcatcagttgcccctgg

SEQ ID NO: 192429 - DNA, 75 bp, Homo sapiens
cgcccctccgagctggggttggacgctgccagtttgcacagcagcaggaatactcccccagttgcaagaggcgca

SEQ ID NO: 192430 - DNA, 83 bp, Homo sapiens
tccaagtaaagtcccaagtgaaaacaaggatgcccagtggttccctagaaccccagccaggtccgtggtggccctgaagaccc

SEQ ID NO: 192431 - DNA, 97 bp, Homo sapiens
acgctttctgtacagcctgcagaactcaggagagcctgtcctgcctccagtccacctgtggccttgtccagtctgtagagttgaaggagaagctgga

SEQ ID NO: 192432 - DNA, 75 bp, Homo sapiens
agaaaacaaggcgattccgcagtccccccgttccctggaggtcctgtggaatgcggatgtgatgctggtacaacc

SEQ ID NO: 192433 - DNA, 82 bp, Homo sapiens
ctgtggacacccaagtgggcactgtgacctccctcacagctggacactcatgaggaccatgatacttccactgagaatacag

SEQ ID NO: 192434 - DNA, 82 bp, Homo sapiens
ggaagagaagatcatcgagcatttcaaacggtttacccaaggtccagcctagcccctaggcaccatgtcggacagtgatcta

SEQ ID NO: 192435 - DNA, 98 bp, Homo sapiens
gccccatcgatgtgcggcgcccgctgtataagttgaccacggcatgtttgagaatttgaacacagccctcactccaaagctccaggccagccgctcct

SEQ ID NO: 192436 - DNA, 83 bp, Homo sapiens
gtagacaccagctccgaaatcaccaccaagggatccaggtccggcacgatcaagacccaggctacatgcatcacaagtttgcc

SEQ ID NO: 192437 - DNA, 90 bp, Homo sapiens
catccctgaggactccatcttcaccatggctgaccgaggccagcctttcgaccccaccttcctcatcggctgcgcgccctgcaacgtcat

SEQ ID NO: 192438 - DNA, 90 bp, Homo sapiens
ccctcgcccccaacaaggacaagtgaagctcaccatggctcaacttactcagttaacacagggccacgacagagcgggatgccaccagct

SEQ ID NO: 192439 - DNA, 97 bp, Homo sapiens
ttagtgtggggccgtgtctcagtccacccaaggtctcctcggatcgcctggagaggcactcggacctggtggcccgggagagtggcccaccccacat

SEQ ID NO: 192440 - DNA, 100 bp, Homo sapiens
agaacagctacgactagaattgcagcaattgaaccatcagattagccagcagacccagctacgtggactagagcttgaagctcaactagagaaaaaggac

SEQ ID NO: 192441 - DNA, 74 bp, Homo sapiens
ttaaacatatatgtgaagagtccccgatgtttgtagaccttatcttagcagtgtctgcaaaaacgaatcttttc

SEQ ID NO: 192442 - DNA, 75 bp, Homo sapiens
ccacagaggactttaggagaaagttgctgaaggcaggagggtccaaacaggagctttacagaaatgcactgtatg

SEQ ID NO: 192443 - DNA, 82 bp, Homo sapiens
ttcggtgcctctctccagcagactgcgataagaccatcatcatgtggaaactgaccagggatgagaccaactatggaattcc

SEQ ID NO: 192444 - DNA, 75 bp, Homo sapiens
actctgaagcagcgacggcacagcgggaagaatgcaagcgatccccctccaagaccatcccaggcctccccagac

SEQ ID NO: 192445 - DNA, 100 bp, Homo sapiens
ggaagagatgtgaatcttgtagtcagaaacttgaaagagagaataaccgttgtaacatcagtcacagcatgtcctgaacaatggagcaagctgtatccca

SEQ ID NO: 192446 - DNA, 100 bp, Homo sapiens
ggactctatcagatcatcacagtggagagaagtacactcaaaagggagttctacatcacatttgccaaacttgatccagtggcatatagattagaaccta

SEQ ID NO: 192447 - DNA, 96 bp, Homo sapiens
aaagctgagatctccactacaagattaagggcaagataacccctgtgacagaaggctactgttgctgtaacaaagggcatacatacattttcaaga

SEQ ID NO: 192448 - DNA, 74 bp, Homo sapiens
cacgccgccgcttgtgctgcagccatggtcagaaccatccagtcctggacatgggaccacatcggcgactgcag

SEQ ID NO: 192449 - DNA, 75 bp, Homo sapiens
tcttctaccttggaatagtgaatggttgctccttgagggcaggacagttcttatggctttatccgttgcgtaagc

SEQ ID NO: 192450 - DNA, 100 bp, Homo sapiens
cgcagcggcggcagcggagagcgagagaggggagcaggcagcctgcttctgcaaagtggtacgatcgaagggactatgtcttcattgaattttgtgttga

SEQ ID NO: 192451 - DNA, 127 bp, Homo sapiens
cgttttccaaacagaaggatggtagctagaggggagatagcaagattctggagtctggaaagccttcacttgggtgtaaaaggaagagaatgtctcctggacctaattgccacaatgctggtactac

SEQ ID NO: 192452 - DNA, 100 bp, Homo sapiens
gggcctgcagcgggagctggacggcgagcgcgagcggcgcgagaaagtccagccctgctgggagttttctgccacacagatttgcggaagaacctgaccg

SEQ ID NO: 192453 - DNA, 96 bp, Homo sapiens
gccgcctgccgcgaagccccggcgcaccgcaaacttcagttgaaatcacaaagattagacacctttttagataggtgttcttcagcaccactgaca

SEQ ID NO: 192454 - DNA, 75 bp, Homo sapiens
ataacaagggcatcgactcagacgcttcctatccctacaaagccatgctctcaaaggtctatggccctgtgttca

SEQ ID NO: 192455 - DNA, 100 bp, Homo sapiens
caagcctctacaggggcctcccgcgccccccgggacccccacgccgccgccaggtgtggacactgccagcggctgcagccgacttggaatgacctgggag

SEQ ID NO: 192456 - DNA, 75 bp, Homo sapiens
ctgcaaggtccggctgctggatggaggggattttgtcagcttgtcgtcaagggggggccctcagcctcttggcct

SEQ ID NO: 192457 - DNA, 83 bp, Homo sapiens
agacctcatgagcgacgcccttgtcctcgccaaaatggtgcagaccatgaattacgtggggcagttagccggccaggtgtttg

SEQ ID NO: 192458 - DNA, 75 bp, Homo sapiens
cattatagagctggaattaggcaaatatggacaggtgaatcaggtctaggaaaatcgactctcataaacagccta

SEQ ID NO: 192459 - DNA, 100 bp, Homo sapiens
gggctgtccaggaactgtcggaacagaaccaaaggctattggatcagctcagcaggtatatcctttcgggctctgatgacttcaacctgtacatgtggag

SEQ ID NO: 192460 - DNA, 74 bp, Homo sapiens
gatgataaagactacaggagaattcggtttgtaggtcgtcagaaagaggccagaagaatgtttgaaggtgagat

SEQ ID NO: 192461 - DNA, 99 bp, Homo sapiens
aaaaatattcaatgcactgcaagaaacaagagccaacaagcatctgttatatatgccactgccgccaggagccctgtaacatcagccatcgtcaacccc

SEQ ID NO: 192462 - DNA, 90 bp, Homo sapiens
cctcctcggccagcaacagcgagctgtccccgccctactccggaccgccccaaagactccatgggatggacctgagtcagccgaatccta

SEQ ID NO: 192463 - DNA, 100 bp, Homo sapiens
ggctggcggaggccttgctgatgaacctgactgagggggtgatcgctgagctgaaggtgcgcagggacccccaggtgagccccatgcactgcctggacga

SEQ ID NO: 192464 - DNA, 100 bp, Homo sapiens
ctcactttgctaatgtgacacagattgaagatgctgtctcctgaagagagaagggcacagttacctaagtatcaacgtaatcttcctcggccaggacagg

SEQ ID NO: 192465 - DNA, 50 bp, Homo sapiens
gagagaaaggggaaaaagggggtgaagactgggtacattgctcaaaagat

SEQ ID NO: 192466 - DNA, 75 bp, Homo sapiens
cgggaatttagacttgtagcagctgaccgaaggcaccagcagacgtttttgaatcaactgagagaaattacgggg

SEQ ID NO: 192467 - DNA, 82 bp, Homo sapiens
gttaaggattccaagtaactcttatttggtggtgttcccactgatgaagagcaggcgactgggttggagagggagatcatgc

SEQ ID NO: 192468 - DNA, 75 bp, Homo sapiens
cgcgcacgttggaaccgaagagagctctgttgttgcacaaagcacgattgtgtgccacaatcgagtggaccctaa

SEQ ID NO: 192469 - DNA, 98 bp, Homo sapiens
gaaaatcagctgaaagatgagttttttaaacttctgcaggattggcagccaccatttgcatgtgatgttgataaacttcattttacgccacgtatcca

SEQ ID NO: 192470 - DNA, 90 bp, Homo sapiens
cgactggcagtacctacagaatgctgccaagctcttggccaagggtgtggagagaagctcgggaccgcatcgtgggcttccctggccgtt

SEQ ID NO: 192471 - DNA, 90 bp, Homo sapiens
cgagctctggggcgtcttgcagccctatgagcatctcatctgcggcaagaacgccaatgaaagctgatgtcctgaccactggagctggta

SEQ ID NO: 192472 - DNA, 100 bp, Homo sapiens
tgaaccgtgccgtctatgaggacaggccccatggacgccagcgtggaggaggagggtgtgcggcgtgcactggactttgccgtcggcgagtacaacaaag

SEQ ID NO: 192473 - DNA, 83 bp, Homo sapiens
tcacagctattacagtgaccacggatcaagatgaggcagaagaggcctggaccttggcgcacacagacccaggaacagatgag

SEQ ID NO: 192474 - DNA, 74 bp, Homo sapiens
ttttcccttaataccgttgcaagtgctggattggcctaatgaagaagttcaacctggagagatggaaaatcagc

SEQ ID NO: 192475 - DNA, 75 bp, Homo sapiens
gagagtcataacatatcactgactgggaactctaatgatccaggacaaagaagttaccctggagtatgtatcaag

SEQ ID NO: 192476 - DNA, 100 bp, Homo sapiens
agaagcatgggttaaaatagaaaatctagccaaagccaatccccagagccctaatttgtttagaactgtaatatgcacagttaaaacaacttgtcctctc

SEQ ID NO: 192477 - DNA, 75 bp, Homo sapiens
cggcctcagcaggcggggaagatgaaaggaggcggggtttcaccatgttgcccagactggtcttgaactcctgag

SEQ ID NO: 192478 - DNA, 50 bp, Homo sapiens
ggaaaattacccggtatcgttagaggtacggttcctggagcagcagaaca

SEQ ID NO: 192479 - DNA, 90 bp, Homo sapiens
aaagattttgcatctagaggaattgaaaacgcagtaaaacgcaggactcttcccgcttggattcgcgaaggtcttgaaaaaatggaacgt

SEQ ID NO: 192480 - DNA, 100 bp, Homo sapiens
cgagggagggagagagacagcgatcgagagagaccggagaggtggagagatgcggttcatgctattattcagccggcagggaaaactgcggctgcaaaaa

SEQ ID NO: 192481 - DNA, 98 bp, Homo sapiens
aggagaacttcttaagaagagtggcatccgtgtcattctggaccttactcccaactaccggggtgagaactcgtggttctccactcaggttgacactg

SEQ ID NO: 192482 - DNA, 95 bp, Homo sapiens
gtggaggcctcacgcagctccacagacagccccagctcggtgttcctcagtaccccaaccccatggataaaaatgtcatctcagtaaaaatcatg

SEQ ID NO: 192483 - DNA, 74 bp, Homo sapiens
cttagttttgcctctctggagcgacacgctaattcatttggatggtgatggatacagccttttcctccctctcc

SEQ ID NO: 192484 - DNA, 97 bp, Homo sapiens
gcacccagtgtccctggagcaagacccacgcagccacccagcctcagcactcatctgcgcagccatggaggccctgggacctgggggcgaccgcgcc

SEQ ID NO: 192485 - DNA, 51 bp, Homo sapiens
ccgctgccgcctccgagcagcccgccaggaggatttgttggtattgaggaa

SEQ ID NO: 192486 - DNA, 100 bp, Homo sapiens
agaccaacctgaagcggcggcaggtggtccgcggcttctcggagcttatccacatgaagaccatgcccgccgccatgttcaggctcctcacgggtcagga

SEQ ID NO: 192487 - DNA, 80 bp, Homo sapiens
ctgagagccttcgcagggcccctgagtccagccaagatggcctgatatgaaggagtcacgcctcccgcctcccggagctg

SEQ ID NO: 192488 - DNA, 119 bp, Homo sapiens
agcaactggctgagggactcacagctgatgacctgctgctcgtgctgatctcaggaggtatgtcgtggcccccgaatgagccagaacctcctgcggcaggctgaccttgacaagttcac

SEQ ID NO: 192489 - DNA, 90 bp, Homo sapiens
cctggagaaccaggaccttccaccaatattcctgaaaatgtaaatggggagcaggagaaccgagtgcagaagggaaatggatattttcaa

SEQ ID NO: 192490 - DNA, 90 bp, Homo sapiens
gctttgatgacataagtggctacacttgccactgtgtgctgccatacacaggctccagtgatcattctacatatattgtacaaacactag

SEQ ID NO: 192491 - DNA, 82 bp, Homo sapiens
atagcattcgcctactccgtgaaggccaatgagaacagcctgctgagtgcgcagctcaagggcttccccctgttcctgcact

SEQ ID NO: 192492 - DNA, 101 bp, Homo sapiens
gcaacgtgttggaccttccggagcttctcagaagacagagggttttcttttgagctccccgcagccaccgccacccattggaatggccaacaggggacctg

SEQ ID NO: 192493 - DNA, 75 bp, Homo sapiens
gtcaacttcctcttcagtcatcagttggctgagaaaccctggcccccagcatgagaagcggactctgtttggcga

SEQ ID NO: 192494 - DNA, 100 bp, Homo sapiens
tgatcgaggagccagccttcaatgtgtcctacaccaggcagcccccaaatcccggcccagccaacaacatctgcttctacggcgagtgttcctactactg

SEQ ID NO: 192495 - DNA, 90 bp, Homo sapiens
gtggacaacttcaggtttaccccccgaatccagaggctgaatgagctagaggatgcccaggctgaggaagagatcaagcaagagatgaac

SEQ ID NO: 192496 - DNA, 100 bp, Homo sapiens
aacgtcaacaacagttttacggtattcaagagacgatatttttacttgacccaacttcctgacggttcatatattctcaattcctataaagatgagaaaa

SEQ ID NO: 192497 - DNA, 78 bp, Homo sapiens
agattccagcttcggaacaagagaccctggatctcttccacattcctccttcttataagagcacagtaacactatcct

SEQ ID NO: 192498 - DNA, 83 bp, Homo sapiens
gcatatggtaaaacattgcggcaacaccatggctgggtagttcgaggggtttttgcggttttaaaatcaaagatgggaaaatc

SEQ ID NO: 192499 - DNA, 90 bp, Homo sapiens
tgatgatagctttggagacaaccaagatcactccatggatgaaatgacagctgtggtgaaaattgaaaaaggagttggtggcaataatgg

SEQ ID NO: 192500 - DNA, 100 bp, Homo sapiens
ggcgggcgctgctgaaggagtctcgctgagctcgaggaggtggcgcgatggagggactggaagacaccaaagttctatgtgttcatgtggctccttgcag

SEQ ID NO: 192501 - DNA, 75 bp, Homo sapiens
ataaaacactcctggggaaagagtcactgcagtgttctacggtcttgcgagtggctggttccctgcagaagagca

SEQ ID NO: 192502 - DNA, 113 bp, Homo sapiens
cagccgctgttttgccggaggagcccctcaggccggaccagttactctccacaagaaaattcacacaaccacagtgctcttcatagttcaaattcacattcttctaatccaag

SEQ ID NO: 192503 - DNA, 82 bp, Homo sapiens
ccctggagcctcagttggaagcagccgatccagcctgcggagcctgtggggcagtatgaaaacaaagttgcagtacgtgaca

SEQ ID NO: 192504 - DNA, 76 bp, Homo sapiens
gctccagggcactggtaatttggctagaggaccgcgcggaggcagcggggtctgtaaacagatttggctaggatta

SEQ ID NO: 192505 - DNA, 101 bp, Homo sapiens
cgcggtggaggtctgcgttgctcttgcttttcctcgctggggtgtacggctcattggtgggcagtattacttatgggaattgctctgatcatgctaatggc

SEQ ID NO: 192506 - DNA, 74 bp, Homo sapiens
gaaaaggacaagggagatgaggaggaggaaggagaagagaaacttgctatcagttgagggatttgcagttgata

SEQ ID NO: 192507 - DNA, 100 bp, Homo sapiens
gccctcagaagaaagattctggaggaaaggtttacaagcaggccacgattgaatctctgaagtgtgggcgaaatgctgaaaacttcgaccgatttttcac

SEQ ID NO: 192508 - DNA, 98 bp, Homo sapiens
tcaagaaatctcaagatattaaagttactgctgttaaaaagtctacaaataagaaacctcgaaaatctccaggtgagaagagcagaattgaagctgga

SEQ ID NO: 192509 - DNA, 75 bp, Homo sapiens
agatcattggagagatctctaaaaaagtggctcagattcagaatgatctgactgcagccatgagcagcaatgagt

SEQ ID NO: 192510 - DNA, 90 bp, Homo sapiens
aaagcaaacagaaatttgtgctcaaaacccccaagttttccacctatttccctggatattttgatggtcagtactggctctggtgggtgt

SEQ ID NO: 192511 - DNA, 100 bp, Homo sapiens
ccttgagcgaggaggagctggacaatgaagactattactcgttgctgaacgtgcgcagggaggtcaaaatgcagatcttcgtgaaaacccttaccggcaa

SEQ ID NO: 192512 - DNA, 99 bp, Homo sapiens
gttacatagctaagatgccaggacaccccgaaagccggaaaacgactgatgaagagaagcagcagggcttacctgtggtgatgccagtgtttgacagaa

SEQ ID NO: 192513 - DNA, 90 bp, Homo sapiens
caccgctctgcaggctgttcctcctcggctttgtcaccgaaaagacctggatttggcaaaagtaggataccttgactccaacactaacag

SEQ ID NO: 192514 - DNA, 100 bp, Homo sapiens
caaccatcgcagttggaagcccatggggcagcaagagtgagccatggagctacgtgtggggaacaagtaccgcctgggacggaagatcgggagcgggtcc

SEQ ID NO: 192515 - DNA, 95 bp, Homo sapiens
agctccaagtccccctgggtggagtccgaatacctggattacctttttgaagaccaaactgcagctggaatacccagtacagttctgcttactac

SEQ ID NO: 192516 - DNA, 50 bp, Homo sapiens
gagaccgcggccgggaccgaggccggtggctgctggcagcggaatccccc

SEQ ID NO: 192517 - DNA, 100 bp, Homo sapiens
tcgatctgggtatcaaatatgacccaagcattggtatctacggcctggacttctatgtgggtatctagttgcgaagccagatgtgatcttcaggttggga

SEQ ID NO: 192518 - DNA, 100 bp, Homo sapiens
tggccatcgaccgcctggaccgcatcggccaaaaagcaaatggatttccacctgacaaatcttcgggatccaagaagcagaaacaatatcagcggattcg

SEQ ID NO: 192519 - DNA, 75 bp, Homo sapiens
agcagatttcccaagagcagcggaaaatgatccagtcacagtttctcaagtcaaagaaggccctgtcctagcaac

SEQ ID NO: 192520 - DNA, 83 bp, Homo sapiens
gtcgcgtgtctaggtgagtcgcggtgggtcctcgcttgcagttcagcgaccacgctttagccagggccctctgaaggatgcac

SEQ ID NO: 192521 - DNA, 100 bp, Homo sapiens
gtttctttacagtaatttcaacagaagagtgagagatggaacccgaagaagaaaggattcgttacagccagagattggtatggcctcacaagtcttggtc

SEQ ID NO: 192522 - DNA, 80 bp, Homo sapiens
gggaaccctggtcaccgtctcctcagctgtgatgcagatccatccgccctagcaaaatatgttctggctttggtaaagaa

SEQ ID NO: 192523 - DNA, 97 bp, Homo sapiens
caagccaaacatcaagcagaatgtgatttgcttgaagatatgagatgttcctcctgctgatcaagagaagctttttatccagaagttacgtcagtgt

SEQ ID NO: 192524 - DNA, 83 bp, Homo sapiens
tggacgatcactgggactttaccttctcatactttgttagaaaagccaccaggatggtgctgctccactggtgcctgctgtgg

SEQ ID NO: 192525 - DNA, 90 bp, Homo sapiens
gaagaaaatggtttggctgtgataggagtatttttaaagagcatcctggccagaacaagccaaggagccaagacgagagggacacacgga

SEQ ID NO: 192526 - DNA, 100 bp, Homo sapiens
taattgaaaaacagtaaagatggaaaaccagttattgaatatcaagaggaggagttgttgatccaggtccagagagcatcgcagacatcgatctcgctcc

SEQ ID NO: 192527 - DNA, 76 bp, Homo sapiens
tggtggtgcaagtagtgattggagaacaaagaggtgaaggagtattgcgtttacagtccctaattaaaaatattac

SEQ ID NO: 192528 - DNA, 90 bp, Homo sapiens
cgctgaggggcttgcctgaagcgaggggccctgctacccacaaggcgctggtttaataccatcctggatgattcccaccttctggttcac

SEQ ID NO: 192529 - DNA, 137 bp, Homo sapiens
gaggaggcggctataataatagcaaacatcgatggcctactggggataacattcatgcagaacatcaggtctgggacctgcgccagaacaagctaacctacaccatgagaggccatgcagattcagtgactggcctg

SEQ ID NO: 192530 - DNA, 101 bp, Homo sapiens
gatggctgcagacaagcctgcagcatatagcactttctacattgtgggtttaatattatcaatgcagataccttttgtgggattccagccaatcagaacaa

SEQ ID NO: 192531 - DNA, 83 bp, Homo sapiens
acagacctccagatgtccttctaggctcaacagaatattccacctgccttgacatgtggtatttaccttgctgtggattgctg

SEQ ID NO: 192532 - DNA, 100 bp, Homo sapiens
gaacctctatgccgacatcgacgccgcctggcaggccctgcgcaccaggactctccagtcctcagtcaccttggacaaagaagtgtggatcctcagattc

SEQ ID NO: 192533 - DNA, 100 bp, Homo sapiens
cctagacgccgtacgtgccagatggtgttacctggagcttaaaaagctgcacgcaagtgttaaacttctggtggtgttcccactgatgaagagcaggcga

SEQ ID NO: 192534 - DNA, 82 bp, Homo sapiens
ttcttgtcctccttcctcatgaagcccatcaacaagtgcattgggaggaactgccgactgagagcgccgccacacccccaga

SEQ ID NO: 192535 - DNA, 82 bp, Homo sapiens
caacattttttgaaatttttaagacacgctgcaacaaagcagatttgatggtagagtggtggcaaagcttccttttacccct

SEQ ID NO: 192536 - DNA, 82 bp, Homo sapiens
agacaggagcgtcccggtgcggctgcacgtctcgcggatcatgctgaaggatgcctgtggccctcggagagcacagtgtcag

SEQ ID NO: 192537 - DNA, 95 bp, Homo sapiens
aaaatgaacacagtcactggggaggtggacatctataccgtcaaggtggaagacctgaccttcacctccccgttctgcctgcaagtgaagcggaa

SEQ ID NO: 192538 - DNA, 50 bp, Homo sapiens
cgggcagctagcagggcgcttcgggtcatggaaaatggaagatttgcaaa

SEQ ID NO: 192539 - DNA, 83 bp, Homo sapiens
atggaaaaaacttgtttaatgggaagtgggaaaactcttgcctttgccatcccaatgattcatgcggtgttgcagtggcagaa

SEQ ID NO: 192540 - DNA, 101 bp, Homo sapiens
tgaatggacacagtgatgaagaaagtgttagaaacagtagtggagaatcaagattctgaagggagtggtaatggaagtgaagatgcttcaaaggacagtgg

SEQ ID NO: 192541 - DNA, 100 bp, Homo sapiens
cgagaccgtgaccgagagcgtgaccgagagcgcgaatatcgtcatcgttagaagaggtacttggaaggctccatcgcccctgaagacaaaggaagctgct

SEQ ID NO: 192542 - DNA, 89 bp, Homo sapiens
aggaggagaagagagagatcaagaggaggctaacccgaaaggtgtgcaactgaggaacatggctcaagaaactaatcacagccaagtgc

SEQ ID NO: 192543 - DNA, 100 bp, Homo sapiens
ggagaagtatgagcttgctcacccaccagaggagtggaatgagggccccaaggctgttgcagctcctcgacctgatcggttggtcaatcgcttgaagaat

SEQ ID NO: 192544 - DNA, 75 bp, Homo sapiens
gtagggcgcaccaaggatgtgaaagaggctgtcagaaagctggcttatcaggtgcaagaattgtttatccgtgat

SEQ ID NO: 192545 - DNA, 98 bp, Homo sapiens
ggccttcagcgactgcaccagcaagatcggcaggcgagattgcctgacccaggcctgctcggccctcacaggggctgaagaagatgcagagcagcctg

SEQ ID NO: 192546 - DNA, 131 bp, Homo sapiens
tgagtgctctggcgaagtttggagcccagaatgaagagatgttacccagtatcttggtgttgctgaagaggttggatggcaagcatgtggtgtttggcaaagtgaaagaaggcatgaatattgtggaggcc

SEQ ID NO: 192547 - DNA, 100 bp, Homo sapiens
aggacagggctgaggaaccatgtctccatccccgaccgccctcttctgtcttggcattatattgtacttctagcaagtgcaccaacagaaaaacaacgcc

SEQ ID NO: 192548 - DNA, 101 bp, Homo sapiens
gggatggagtctggcgcctggggaggcgcggaggtgcttccagcggacggcagcgcgcgaggtactccaaagattcaggtttactcacgtcatccagcaga

SEQ ID NO: 192549 - DNA, 75 bp, Homo sapiens
gagaaagccaagatccactaccggaagaagaaacagctcatgctagctgacgtggtggacagtgaggcgctgcag

SEQ ID NO: 192550 - DNA, 75 bp, Homo sapiens
ctggaatattgacccttatttatccagaagattgatcatcatatgggtttaacaaatgtggcaattattttggat

SEQ ID NO: 192551 - DNA, 100 bp, Homo sapiens
aaattccctcattactttggaaaggccccaatcttcatctccttcttcattgctttgagagagatggccaaccttcctgtgcccagcctgcagacaggtg

SEQ ID NO: 192552 - DNA, 144 bp, Homo sapiens
gccgccgccgccgctgctgctgggagcccagggagcgccgcgcgaccaggaggcggcggcgccgccggctttggtactataagatctccgtggtgctcatgtgctttgtggtccccacgctggtgccctggtacatctggggag

SEQ ID NO: 192553 - DNA, 83 bp, Homo sapiens
cgggaggtgaatttccatgtcaacatagtcctgggatcgcttacacctgagacgaactacagaacagcacgtaccagaggtgg

SEQ ID NO: 192554 - DNA, 75 bp, Homo sapiens
tgcatccaccacaacagtgtggagagccccactccacagcgccgaccggtgtccagcatacacccccctggccgg

SEQ ID NO: 192555 - DNA, 90 bp, Homo sapiens
cctgatcccaaaattattgaaaacactcgaaggtgctacacacgcagggccctgtcgatggcagcctttacgcgaaggtgaggaagaaaa

SEQ ID NO: 192556 - DNA, 98 bp, Homo sapiens
tggcttttaaggaggacacccggacacctggaagctgggaaatgaggtttttcattagtcaatacagtgaaggctggcatgatcatcagcttcccatc

SEQ ID NO: 192557 - DNA, 98 bp, Homo sapiens
cactaacattctagagtattccaggtggccctcatgacactgacgctcttcccggtccggctcctggttgccgctgccatgatgctgctggcctggcc

SEQ ID NO: 192558 - DNA, 97 bp, Homo sapiens
agttgtattagatgatgacagagaagatctttttgcagaggcaatgagtgcatataatagtcatgaagagggcagattagtttaccgatatggagga

SEQ ID NO: 192559 - DNA, 96 bp, Homo sapiens
agaatgagagaagtcatatgcccggcacaatgcatcaatctcaaataattctacaagtaaaaggaaatctgagtctgccacttgcaacttagtcag

SEQ ID NO: 192560 - DNA, 83 bp, Homo sapiens
ctggggaggcgaggccggacgcacctctgtttgggggtcctcagatgtgcactcccagcaacacccctgccacgccgcccaac

SEQ ID NO: 192561 - DNA, 82 bp, Homo sapiens
ggagttcattgaattatggcatagatcttgggaaaattgcggaaatgggtcctgatgaatatgaagagatggaagaagagga

SEQ ID NO: 192562 - DNA, 100 bp, Homo sapiens
ttccgctattcagcagagagctattattccctgtattaaaggatgctgaaaacgccattcaacagatgggtggccagtggcttggtggaagacaaatcag

SEQ ID NO: 192563 - DNA, 73 bp, Homo sapiens
aactcagcagcggaggctggacgcttgcatggcgcttgagacaggatcttgctacattgcccaggctggcctc

SEQ ID NO: 192564 - DNA, 75 bp, Homo sapiens
gagatgaagcctaagaatatgatcaggtgttattcaagtattgggaaagttcaggatgcctttatatcttacagg

SEQ ID NO: 192565 - DNA, 73 bp, Homo sapiens
agcagtgaaggggctctgcaaattgttctgcttgactctgcatcgatatagctcgcatgtggaagactctcac

SEQ ID NO: 192566 - DNA, 75 bp, Homo sapiens
gattgctgtaaaaaatttcaggattggtactacaagaccatcatctgcaaatagcataagcagcagcacatcttc

SEQ ID NO: 192567 - DNA, 100 bp, Homo sapiens
ctgtatgaagcggttggcaccactgaagtgaccgaatgagatcggtcgcttggttatcggacagaatggaatcctctccacccctgctgtatcctgcatc

SEQ ID NO: 192568 - DNA, 101 bp, Homo sapiens
ctccgacataaagcagatgtgacaaaagaaaatcgccagggatggacagatgggatacacaccactgcatgtgggctgccactatggaaatatcaagattg

SEQ ID NO: 192569 - DNA, 100 bp, Homo sapiens
ctagccgccatggaggacggcgtctatgggggattcccgaagtcttccgttttctgagaatgtgagtgctgttcaaaaattagacttttcagatacaatg

SEQ ID NO: 192570 - DNA, 96 bp, Homo sapiens
cctgcttcgtcaccccagaccttgccagagacctggcaaatgacatcatgacactgagcttccttctcctacatctgcttgctgctgggatacccg

SEQ ID NO: 192571 - DNA, 100 bp, Homo sapiens
gggagtcgcggaacagcaggcccgagcccaccgcgccgggccccggacgccgcgcggaaaaggttttgtaatcaacccccctcagcatggtcctctcatc

SEQ ID NO: 192572 - DNA, 51 bp, Homo sapiens
agtggtgatgaacttcaggatgagttatctgatgatggccgctatgtcttg

SEQ ID NO: 192573 - DNA, 75 bp, Homo sapiens
cagtagaagataatggcaagtccagactggggatatgatgacaaaaatgcagcagggaatacagcagacagcccc

SEQ ID NO: 192574 - DNA, 100 bp, Homo sapiens
tcctcaagcagaacactgctgggagtcctaaaacctgcgacaggaaggagcagtgaggagaatgaataccttccaagaccagagtggcagctccagtaat

SEQ ID NO: 192575 - DNA, 74 bp, Homo sapiens
ggcagggctgtgagtggcaaggactttggaggtgggccaatggccttagtgaggagaagccactgtctgtgccc

SEQ ID NO: 192576 - DNA, 90 bp, Homo sapiens
ggtggtctggagaccatggagaccctcacggagctgggcgacgagctgaccctgggagacatcgacggacaggaagatgtcacccaagcg

SEQ ID NO: 192577 - DNA, 76 bp, Homo sapiens
ggggaacagaaccaaccaggctttacagggtgttgaaagcagcaggggcctagaagacattaaaccgataccacag

SEQ ID NO: 192578 - DNA, 75 bp, Homo sapiens
gccatcttctccgcgctatggctgcgttcggccgtcaggatcagttccatgacaagaccccttatacgattatgt

SEQ ID NO: 192579 - DNA, 83 bp, Homo sapiens
gttggaactggtgccgtaggcatggcttgtgctattagtatcttactgaagttgatattcactgatggactccaaagaatcat

SEQ ID NO: 192580 - DNA, 75 bp, Homo sapiens
cggacccgcaggtccacacggtgctggtggagcgctccacgctcaaaggtggtgatggcacttctcaaatactgg

SEQ ID NO: 192581 - DNA, 82 bp, Homo sapiens
tggaagccgtggctgcgctctcttccctctgctgggcgtcctgttcttccaggaaatcatgaccaccccaggaaaagagaac

SEQ ID NO: 192582 - DNA, 100 bp, Homo sapiens
aaagacagatgtatggctgacaagacgctcccagagtgttcaaaattacctgcccagtttgatatctctgtggccagtgaaattatggctgtcctggctc

SEQ ID NO: 192583 - DNA, 106 bp, Homo sapiens
ggaaaacttgcctgctctctacactattttccaaggagagttcttggatgaaatttcatctactgaaactaaagagtccagtggtacgagtgagcctgtgcacctg

SEQ ID NO: 192584 - DNA, 100 bp, Homo sapiens
tttccgtttaagagaagctcaaggccgaagccgagcagaggatctaaatacaagagtggcctattggttggtcaaagaaaaagtgatgtatgaaaaagag

SEQ ID NO: 192585 - DNA, 80 bp, Homo sapiens
cccggacctgctgatggcccgcagcttcggtgacaagtggaggccatagtggagtttgactaccaggcccagcacgatga

SEQ ID NO: 192586 - DNA, 83 bp, Homo sapiens
agagactccttgggggtcgagcacataacggggttcgggtgtctcgtgtgtgaacatcacagaacgaggtcactcggacacta

SEQ ID NO: 192587 - DNA, 98 bp, Homo sapiens
caaggcgtgaggcgccgcccgggtgtccccgcggcgcaggaggcggtggagcgcagagcgggcgagcgcgttggaaaatggatataccttatttgatt

SEQ ID NO: 192588 - DNA, 75 bp, Homo sapiens
tggagatcgacccgtacttgaagccctacgccgtggacttccagcgcagaatgaagactattctcagcaatcaga

SEQ ID NO: 192589 - DNA, 73 bp, Homo sapiens
acgcaaccacagaaacaagtggtacagggtgactatgaccagagcaggaccaaagtgctgcacatgagcctga

SEQ ID NO: 192590 - DNA, 57 bp, Homo sapiens
cttgcagtctcatatttctcctctgaagtggccgccgccgacagcggcatcagccct

SEQ ID NO: 192591 - DNA, 100 bp, Homo sapiens
acaagcggacctcgagaaggaggaactggcagaggagctggccagtagcctgtcgggaaggaaagatgaatgggagggctgattttcgagagccgaatgc

SEQ ID NO: 192592 - DNA, 101 bp, Homo sapiens
tgaggagattcgggccgtcaccctgcctcccctgcgtcccgccaccggccgcttctgtcctcggttgctccttgagggcaggacagttcttatggctttat

SEQ ID NO: 192593 - DNA, 82 bp, Homo sapiens
gccgaatcagccttttcacgctcaagacagtgggagtagctcaccgttacccaagtatgcttcatctcccaaaccaaacaac

SEQ ID NO: 192594 - DNA, 50 bp, Homo sapiens
ctgggacagccatggtttcagacgggaactccaaattcagctaataccca

SEQ ID NO: 192595 - DNA, 97 bp, Homo sapiens
ttgagataccactcagtggggagacggatgtttccagtcctaaagattagtgtcacagggttggaccccaatgccatgtactccctcctgctggact

SEQ ID NO: 192596 - DNA, 101 bp, Homo sapiens
ctgttgatgctggctttgttcccaatgacatgcaagttggacagacgggaaaaatagtagcaccagtccgtaaaagccctgggctcagccagagcagggca

SEQ ID NO: 192597 - DNA, 75 bp, Homo sapiens
cagattcgcagtggtcgcttcttctccttggaatccccatctctaatgtaagcttggagatccgggcccccgggg

SEQ ID NO: 192598 - DNA, 88 bp, Homo sapiens
cacaggatccctggctgtagcgaacaacaacccaaccattactgattatcttagaagacctaggactccaaaaatgtttcccctgaag

SEQ ID NO: 192599 - DNA, 100 bp, Homo sapiens
ttagcagaagcctatgagcaaatagagaaagatcttactctgcttggtgctacagctgttgaggaccgccttggaagtggagtttactctccccttgagg

SEQ ID NO: 192600 - DNA, 100 bp, Homo sapiens
gtgtatatattgcatcttcctctggctctacagcgttaatcagctgtgttcagcgaatacttatgaacagaaggctccagcagcagtacaatcagcagca

SEQ ID NO: 192601 - DNA, 74 bp, Homo sapiens
gagaaggcccagccaatgaagatgaagacataggagcccgtggaacacagagcattcctaatgacagtcctgcc

SEQ ID NO: 192602 - DNA, 88 bp, Homo sapiens
gctgctggcacttcaggctctgagctaaaaaagtccctgtacgccatcttctcccagtttggccagatcctggatatcctggtatcac

SEQ ID NO: 192603 - DNA, 89 bp, Homo sapiens
acgcccttccccagtctgaaagggtcagcatttggatccttcatcatcctctgtgtggggggactaatctcacaggccttgagctggcc

SEQ ID NO: 192604 - DNA, 94 bp, Homo sapiens
gggtaggagatggagaaattccaagttcagattctccaggagggactgaccttcaaggatgtggctgtggtcttcactgaggaggagctggggc

SEQ ID NO: 192605 - DNA, 50 bp, Homo sapiens
ctggcctcactcaaacagtaaacgagttgatgcggatgaaattaaaaggc

SEQ ID NO: 192606 - DNA, 90 bp, Homo sapiens
aggagatccgccagggagtggtcagagccaaccaggacactaatacagctcagagaaatgcggtgacctgccagcacctgccgcagcctt

SEQ ID NO: 192607 - DNA, 101 bp, Homo sapiens
aactgaggaaggtcccaggtagccgcggagcgcacccccgtgcccttttcagctcaccatggatgatgatatcgccgcgctcgtcgtcgacaacggctccg

SEQ ID NO: 192608 - DNA, 90 bp, Homo sapiens
tttttcctgtcgtacgtgggacaggccacgctgtccgtccgcagtaccgacgcctgcagaggctgggaggcggcagaatgcagccagagg

SEQ ID NO: 192609 - DNA, 75 bp, Homo sapiens
gtggcagcaagtcttagcagtggacgcgaggaaaaaggtcactggtcagaacagcaagaagaaagtagctcttga

SEQ ID NO: 192610 - DNA, 83 bp, Homo sapiens
gttcgcgtctctctgctgcggcgcggggaccgctgtgctctcgaaagtttcctacactactgaggtttaggggcactgtgaag

SEQ ID NO: 192611 - DNA, 90 bp, Homo sapiens
agaatctgtcacagagggagatgtcaggtgggagaaagtccagcctagggtgaatgtttccccctccaagaaggggcccttgcagcacca

SEQ ID NO: 192612 - DNA, 82 bp, Homo sapiens
tgctcgtgattgcatttgattgcaaggagacaggtaagactttgaccccgacgcaggcttcagtgattgccgcggatcagaa

SEQ ID NO: 192613 - DNA, 75 bp, Homo sapiens
gcctccccagccatgtggaacttctctggctgatgaacttgctcttgtggatgttttggaagataagcttaaagg

SEQ ID NO: 192614 - DNA, 75 bp, Homo sapiens
agggcatgtccctgcttgtcagggctgagagcgacgacaagttggatggcttgaggactggtactaaaaggaaac

SEQ ID NO: 192615 - DNA, 98 bp, Homo sapiens
ttgacatttaattttagggtcctttatatagaagggagagtaggatacgcagctccacctggatgatgccctccggggccaggaggacctgaaggagc

SEQ ID NO: 192616 - DNA, 100 bp, Homo sapiens
tagccaaggagttgaagtttgtgactttgggaccagttactctccacaagaaaattcacacaaccacagtgctcttcatagttcaaattcacattcttct

SEQ ID NO: 192617 - DNA, 50 bp, Homo sapiens
cggagcctttgactggtttctggagcgggtcacagaaagtcgagagagcc

SEQ ID NO: 192618 - DNA, 82 bp, Homo sapiens
catcaaccggacctacctccatcatcacatgaccaaagcattcctcttctatgagcagcccgacggccatggaggctgaaga

SEQ ID NO: 192619 - DNA, 73 bp, Homo sapiens
gactacattgcaccatgggaaagagagagaagggagcccagcgaagtgccaacacctaagagacctcggggcc

SEQ ID NO: 192620 - DNA, 100 bp, Homo sapiens
gccgagcaggcggagcgctacgacgacatggcctccgctatgaaggcggtcgcaatggaagaagagatcgccgcgctggtcattgacaatggctccggca

SEQ ID NO: 192621 - DNA, 97 bp, Homo sapiens
tgcaggaaagaattaccactaccaagaagggatctatcacctctgtacaggacataagcagctctatgaccaatagcacagctgccagtagaccccc

SEQ ID NO: 192622 - DNA, 100 bp, Homo sapiens
ctaagagaagtcacaaaacagcagatttcccaagagcagcggaaaatgatccagtcacaggcccccttgtatttgctggtcctatttttatgaaccatcg

SEQ ID NO: 192623 - DNA, 74 bp, Homo sapiens
ggcctccccagccacgtggaactgaatggcatcaccagctgccggatgcggactgagagtgagccatcttgtgg

SEQ ID NO: 192624 - DNA, 124 bp, Homo sapiens
gacctccttcttcaggagagcgccccagggcaagccccgctccggccaacaaatgctggttgccaacattgacttgggtcctactattttggacattgctggctacgacctaaataagacacag

SEQ ID NO: 192625 - DNA, 80 bp, Homo sapiens
ctcagttggaagcagccgatccagcctgcggagcctgtggggcagtaaaacgatgtttgcagaaatggaaatcattggtc

SEQ ID NO: 192626 - DNA, 98 bp, Homo sapiens
gctgaccatctggagtgcaggctgggaggcgggatggagtgatagggaaggtggtgaaattgcctctacctttgatcacccagaactggtgaagcttg

SEQ ID NO: 192627 - DNA, 80 bp, Homo sapiens
cgacgcggacatggtcatgagctttgtgaacctggaccctctttcccagctgcccgctcctcagcacccgaagattcgcc

SEQ ID NO: 192628 - DNA, 90 bp, Homo sapiens
gcagagcctgcggggcaagatctccgagcccctgccactgatggacctgtgccggagatccatccgctcggccctgggccgccagcgcct

SEQ ID NO: 192629 - DNA, 82 bp, Homo sapiens
cgggacctctccgggccatgggtatcgagaaccttccctgcgaacttcagaggaacttccagctgatgcgagagctggacca

SEQ ID NO: 192630 - DNA, 90 bp, Homo sapiens
ccgacgaccggatcctgaggaggcagctgcggtggcagctgctgagttctcggtgaagggggatatgagactttctactcggaatatcct

SEQ ID NO: 192631 - DNA, 50 bp, Homo sapiens
ggctccgggaaaactacactggccagaaatgcgtgtactgccggaagcgg

SEQ ID NO: 192632 - DNA, 74 bp, Homo sapiens
tacgagctagagttgccatttcgctgggatttttgggtggtgcaaagggcactccacagaaggatgttattatc

SEQ ID NO: 192633 - DNA, 82 bp, Homo sapiens
tccacgacaccggctacttctcagctttaccatccctggaggagacctggcagcaggtcattagtaattatcagcactttag

SEQ ID NO: 192634 - DNA, 75 bp, Homo sapiens
gcagaaggtctctggagacatcttcagcagggatcagtgtccttcagtgatgtggctgtgggcttcacccaggag

SEQ ID NO: 192635 - DNA, 98 bp, Homo sapiens
gtaggaggagcaatctcaacagcccaggcgcaggctttccttggacatctccatcagtgttcagaatcaagtggatgaagttattgatgtcatgcaag

SEQ ID NO: 192636 - DNA, 109 bp, Homo sapiens
aaactgcaatcatttttcttcagctttatcagagggcctgggatacaacagtgatgagataaggcctcggactttactgatcgaacatctaatggaaggtggaagaaga

SEQ ID NO: 192637 - DNA, 82 bp, Homo sapiens
acaccagtggaagatgatcacatcccagggatcatagacggtatttctatgtaaacgaacagtcgggcgagtctcagtggga

SEQ ID NO: 192638 - DNA, 75 bp, Homo sapiens
cttaactcatatatttaacccccctccaaaaagcaggtgacaaacattaccaccccagctgtgcacgatgcagca

SEQ ID NO: 192639 - DNA, 98 bp, Homo sapiens
cttgatactagactgaaacccagaccccatgctcctgacacagcccaggtggtggacatcatacgtgtgaacgtggacaaggtcctggagagggacca

SEQ ID NO: 192640 - DNA, 76 bp, Homo sapiens
ttctcggtggaggccgacccatccagggactggtgattgcagctggaagtgcccatgaccgagctggcgtcctccg

SEQ ID NO: 192641 - DNA, 82 bp, Homo sapiens
aagaactcaagagcagaatctccggttttaaaatcaaagatgggaaaatcggagaaaattgcccttccccatggccagcttg

SEQ ID NO: 192642 - DNA, 50 bp, Homo sapiens
agaacatccactagcctcactaaagagacccagggccctgtggagccgag

SEQ ID NO: 192643 - DNA, 74 bp, Homo sapiens
aggctctggaaagatgtggtgatggggcattcttgctaacaacgttctttggcatggacacaagttcagtggga

SEQ ID NO: 192644 - DNA, 82 bp, Homo sapiens
cggacccagcacgcctgggccgggggctgcagcatgttccagggtctccctccactgctgtagtaacccgggtccggggcct

SEQ ID NO: 192645 - DNA, 90 bp, Homo sapiens
ggcgctggagaaatacaacatagagaaggacattgcggctcatatcaagaaggttcgagatgtgaggatgatttctgacagaaattcaag

SEQ ID NO: 192646 - DNA, 100 bp, Homo sapiens
cgcgagcggcggtttccttgcccggggccgcgggaaggccgaccgactgccgcggtattttgaaggtggcgtctcatctgtctacctctgggatctggat

SEQ ID NO: 192647 - DNA, 75 bp, Homo sapiens
ccgaagctaaagtggattcaggagtacctggagaaagctttaaacaagttgaaggggcccggccaggactcgggg

SEQ ID NO: 192648 - DNA, 80 bp, Homo sapiens
tccgcacctcggggacattattgcgcgtggaacggctgcttttggaagattggcggcagtaagcacacaatgaatgatca

SEQ ID NO: 192649 - DNA, 100 bp, Homo sapiens
aggacttgaaaagctgagatatgatgattttgaagtcatttcacatcgaagccatgatttaaatatcggcgttaaggtcgtggcaattctgcagaagttc

SEQ ID NO: 192650 - DNA, 75 bp, Homo sapiens
ctgcaaagattcagactggcccttctgctctgatgaagactggacagtcgaccggcccaaggactggtacaagac

SEQ ID NO: 192651 - DNA, 86 bp, Homo sapiens
aagctgccaagttgaaaatggacgagtaatcgcctgctttgattcattgaaagagtggacctaccctatgagacgagagatgcagg

SEQ ID NO: 192652 - DNA, 75 bp, Homo sapiens
tggcgggtgccctggctaccatggaccatcctgctggtcagcactgcggctgctgactccactggaacccattct

SEQ ID NO: 192653 - DNA, 83 bp, Homo sapiens
cttgaactctttaaggaaataacatttagagtggactgtgcccccagcagcccccaagctggtaggtgagtgctgtcctcggc

SEQ ID NO: 192654 - DNA, 100 bp, Homo sapiens
agaagtttggcgactcctttgtctttgaaggcatgttgagtgagcaagtgaagaccaatattcaacaggcactcttgaatgtcgtctctcaactagccaa

SEQ ID NO: 192655 - DNA, 74 bp, Homo sapiens
actcattgatgaaatttatggcattcagaacactgggaaaactcttcagatttttaacattgaaatgaaaagta

SEQ ID NO: 192656 - DNA, 100 bp, Homo sapiens
atccggagcctggaggaagagaaggcagctgtgactgaggcagtgcgggccctgctgctgtgccacgaccgtggctatctggtgacccaggacgagcttg

SEQ ID NO: 192657 - DNA, 100 bp, Homo sapiens
cccacacccctgtattctcctccgaaccccttcatgcccaaatcccggaaactccagcgtgtctccagccgtggtattgttgcagcatctggcagtgaga

SEQ ID NO: 192658 - DNA, 101 bp, Homo sapiens
tggaacttggaactctgggacaaatagagagctcgtccgcatggtgctgaatggctgaggaccttcccagtctccccagagtccgtgcctttccctgtgtg

SEQ ID NO: 192659 - DNA, 90 bp, Homo sapiens
gtggggagatgaacccaacctagtgggtgtaatacatcatgaactgcaggacaagttggatggcttgaggactggtactaaaaggaaacg

SEQ ID NO: 192660 - DNA, 100 bp, Homo sapiens
agtctgagagagccaggccccgtggttcccaatcatctgattcgacacctcttagaggctgcaatcccagagagagttgaagagatccctcctgaagttc

SEQ ID NO: 192661 - DNA, 100 bp, Homo sapiens
gcctggctccacgccctgctgggtcctacctgtcagagccccaaggttcgatacaagaggctgttttcctagcgtggcttgctgcctttggtaagaacat

SEQ ID NO: 192662 - DNA, 85 bp, Homo sapiens
gaaggaccattttctgtactgtgccaactcccggagccagtcggcagcggtcaccccgtcatccaccacctcttccacccgtgcc

SEQ ID NO: 192663 - DNA, 83 bp, Homo sapiens
cttggacacgtcccagctctctctgggcatctggaaaggatgaccatgaaagctgtggttctaattctaccaaccgtagtact

SEQ ID NO: 192664 - DNA, 98 bp, Homo sapiens
ggacagcatcctcaatcaatccaacagcatattcggttgcatcttctacacactacagctattgttagatccacagaccagcatggctgccactgctg

SEQ ID NO: 192665 - DNA, 100 bp, Homo sapiens
atgatgaagagaaaggcccggagactcaaagctgtggggatgccttcccctgtttctccaaagctgtcaccaggcaattcaggaaattattcatctgggg

SEQ ID NO: 192666 - DNA, 74 bp, Homo sapiens
tcgatcgccggcctcctctacgcgctggtacagctcggcacctgcggaactcgagtcatgcaggagcttttgtg

SEQ ID NO: 192667 - DNA, 98 bp, Homo sapiens
ccccatcttcccatgcttgtcaaaaatcagaggcaactaacactgcggcttcctgagcaacctttcccctggatctcacaaaaactcgactccaaatg

SEQ ID NO: 192668 - DNA, 100 bp, Homo sapiens
catgtttcagtgccactcacataagaagtgcccgatctacggaatccagaggcagcattgtctccaaccttccgtagtgacagcccagtgcctactgcac

SEQ ID NO: 192669 - DNA, 100 bp, Homo sapiens
gaacgtgctgaacaagagcaacgagggggcaaggaagtctgcagaccccaagagaccttgtgatcatccagcttgggctcacaagaaaacccacgtgcgg

SEQ ID NO: 192670 - DNA, 50 bp, Homo sapiens
tcaggacacggcctacaacaccaagagatggagtttcactcttgttgccc

SEQ ID NO: 192671 - DNA, 82 bp, Homo sapiens
gggaggaagcgcaagcaccccccggctttatcctgtggataaacgcagagtgaacgagtttggggagtcctacgaggagaag

SEQ ID NO: 192672 - DNA, 89 bp, Homo sapiens
ccgaacaccctatgggatgccatatcttggcatcctggtggggaagaagttttaagggaacaagctggaggtgacgctactgagaactt

SEQ ID NO: 192673 - DNA, 51 bp, Homo sapiens
tgtgctgacgacctgctacaacagaattcttcgtgccatgaaggaggacag

SEQ ID NO: 192674 - DNA, 83 bp, Homo sapiens
ataagacggcaggaggaagagagagagagggtggctttttctcaagtatattttccagtctgtttggaactcgggaaatgaga

SEQ ID NO: 192675 - DNA, 96 bp, Homo sapiens
caagaaatggttaatgtaatctgccaactaatagtaatggcccggaaccgtgaagatctaccaaaagttttaaaccttcatttattaaattcagga

SEQ ID NO: 192676 - DNA, 101 bp, Homo sapiens
catctacaagaggggacaagtacctttatgaaccagtgtatcccaatttgccaaggcacgagtaacaagctcacgcagttgggcacttttgaagatcattt

SEQ ID NO: 192677 - DNA, 50 bp, Homo sapiens
tgcaaccaagcacctgaaacagcaggtaaacgccctgcagaagatatgga

SEQ ID NO: 192678 - DNA, 98 bp, Homo sapiens
ggaaccagcctgcacgcgctggctccgggtgacagccgcgcgcctcggccagtggattttgctctgaaggttctccagtggtctgactacgagatagt

SEQ ID NO: 192679 - DNA, 101 bp, Homo sapiens
ccgcttcagttctcccggtgtggccacgagtcggaagacccttttgaggacttctttgggaatcgaaggggtccccgaggaagcagaagccgagggacggg

SEQ ID NO: 192680 - DNA, 90 bp, Homo sapiens
ggagctaaagcagcgtgcgttcagccctggggttgttcctggtcattgagtacgtcaacggcggggacctgatgttccacatgcagaggc

SEQ ID NO: 192681 - DNA, 122 bp, Homo sapiens
tgcaagtagcttcagctacttataccactgaaaatttggatttagctttcaatcccaacaatgacctgcaggctgggacaatgaaaagaaaatagctattttacatgaaaattttacaaccg

SEQ ID NO: 192682 - DNA, 73 bp, Homo sapiens
gctttgtatgaacaaaaccagtctgatgtgttatgatgtgattgctcaagcccaatctgggactgggaaaacg

SEQ ID NO: 192683 - DNA, 82 bp, Homo sapiens
gcgcccgcgcccccgcggctggagggtgttgtcgacaacagtagcaactgggcagtgtgtgggaaaagctgcggtgtcatct

SEQ ID NO: 192684 - DNA, 83 bp, Homo sapiens
agccgatccagcctgcggagcctgtggggcagccaaactggcaagacgcagtcaagaacgggacaatcttggcatgttggtct

SEQ ID NO: 192685 - DNA, 85 bp, Homo sapiens
gggcagccgccgctcctccggggctgattcaccccaagagtggccgttcctaccacgaggagttcaaccctccaaaagagcccat

SEQ ID NO: 192686 - DNA, 52 bp, Homo sapiens
agcggcgcagctgatagcaggaacagagtggagactgctgcacggactctgg

SEQ ID NO: 192687 - DNA, 100 bp, Homo sapiens
aaaacaccacgatgaaaagaaatacctgtgatttgctttctcggagcaaaagtgaaggtggtgaggcgggtgagcctaacccagcgcaccgacctgtacc

SEQ ID NO: 192688 - DNA, 75 bp, Homo sapiens
ctcggcgccgcggctcttttctaaaagtgaggaggtgcgccagtctgtaactcctgccgagccagtccagtacta

SEQ ID NO: 192689 - DNA, 87 bp, Homo sapiens
ctcggcctccccttggattcagacgccgattcgcccagaattaaacaaccaccatgtcgagcaaaaaggcaaagaccaagaccacca

SEQ ID NO: 192690 - DNA, 98 bp, Homo sapiens
caagaagcgaaatgtgctcattggccattcctacgggttgttcctcaaagtcattcaagctgtactcgccgaaggagcccccgaacggcaacgccttt

SEQ ID NO: 192691 - DNA, 75 bp, Homo sapiens
aaccaagataaagatgcccattttccaccaccaagcaagcagcatgtttgtgtcattagtgaaactggaaaagca

SEQ ID NO: 192692 - DNA, 100 bp, Homo sapiens
acatctcaggcgctctgccagcaacgggtatgttagagcccaccaaggaaccactgaaaccactttctgctgcagaaaaaatagcttccatcggtcagac

SEQ ID NO: 192693 - DNA, 100 bp, Homo sapiens
gctggacccggcctgggagaagcagcagcgcaaggcgacaggcagcatccccattacggtgcggcacatcgagtccatgatccgcatggcggaggcccac

SEQ ID NO: 192694 - DNA, 100 bp, Homo sapiens
gcggctgctcttcgaagtgaccagcgctaacgttgtcaaggacccgccctccaagtacgtggcagtgtgtgaagaaaccctgaaggtcgggcctcaagta

SEQ ID NO: 192695 - DNA, 73 bp, Homo sapiens
agaaaccgtgctcagaaactagccagattgaaggtgttttggggaacgagtttagtatattaaaatcaccagg

SEQ ID NO: 192696 - DNA, 99 bp, Homo sapiens
gaggaaggaacgaggcaaggagctaaagcagcgtgcgttcagccctgggaattcagaaggagctggcggacatcactttagaccctccacctaattgca

SEQ ID NO: 192697 - DNA, 98 bp, Homo sapiens
acttcatattttggaaagcagtttttaagacaagggatcctcttggtgtatgacatcaccaaccgctggtcctttgacggcatcgaccgctggatcaa

SEQ ID NO: 192698 - DNA, 82 bp, Homo sapiens
cctctatgccgacatcgacgccgcctggcaggccctgcgcaccagaagcgagacatccccgactacctgtgtggcaagatca

SEQ ID NO: 192699 - DNA, 74 bp, Homo sapiens
gtatcttaagaaggaaaatatggctgctctttgccggacagcagagtcccagccaatggagatcttcgtggatg

SEQ ID NO: 192700 - DNA, 83 bp, Homo sapiens
gggagatcccaggcggtgacagagtggagccatggctagaggatgacttacaacttaagtgtctccctttgtgggaggaatcc

SEQ ID NO: 192701 - DNA, 100 bp, Homo sapiens
gaaattcaagtcaagttcataaagaatgtatgaaggttctcaacttgaaacgttaaaaagatcaagtggcatgagcagccttttggggaaaattggtgcc

SEQ ID NO: 192702 - DNA, 86 bp, Homo sapiens
agcaaatggttgacacctttacacagagcagttgcatcttgtagtgaggaagatgagaatgtgcctactgctcctgatcctccaag

SEQ ID NO: 192703 - DNA, 74 bp, Homo sapiens
tcaccagccaggagtacgccgtcaagaagagcttaaagcagcgcctgggtaagagtaacatccaggcacggtta

SEQ ID NO: 192704 - DNA, 89 bp, Homo sapiens
ctgcgccaccacgtcacgcacacgctcggcgctgcgatccgcgcatataacgaccatcttgattcaaaacatctatcgtaatccccaaa

SEQ ID NO: 192705 - DNA, 100 bp, Homo sapiens
ctcctcccgtccttctcatccttcgaggagagacttcagcatgcaaaccttcatctgttcggcttgcaccgtcattttcattccatgctgctggccttca

SEQ ID NO: 192706 - DNA, 83 bp, Homo sapiens
cattgactggaaacaatggcatttacagaaagagtcaacagcagtggcaacaggttttaaaatcaaagatgggaaaatcggag

SEQ ID NO: 192707 - DNA, 82 bp, Homo sapiens
aggatgtgcggggtgcgccggcagaggatccagtgttcaccatcctggccccggaaggtccagccctgctgggagttttctg

SEQ ID NO: 192708 - DNA, 51 bp, Homo sapiens
gctcaccatccagttcatccaggagcttactccacgggaacagcctctaga

SEQ ID NO: 192709 - DNA, 50 bp, Homo sapiens
gcctcttgcgctacgccctggatgagatgaaacttgaagggtcaaagtgc

SEQ ID NO: 192710 - DNA, 75 bp, Homo sapiens
tcctgagacccggacagtggcagtgaaacagaggcaaggtcttgctatgttgctcagactgatcttgaactcctg

SEQ ID NO: 192711 - DNA, 101 bp, Homo sapiens
gagaactacaggaacctggagtttgtgggcccagatgggggaaccccgggctggggccgccctggacgatggcagcggctggacgggcagtgaggaaggca

SEQ ID NO: 192712 - DNA, 95 bp, Homo sapiens
cggacggcgtggaccacatagacatttacgcggatgtcggcgaagagttcaaccagtgtgctggaattgatgttcgtctgtgtgatgttggtgag

SEQ ID NO: 192713 - DNA, 74 bp, Homo sapiens
aaggagtctcgctgcttttgtggctatggagttactagtagagaaagcaatcagcagtgcttctagccctcaga

SEQ ID NO: 192714 - DNA, 100 bp, Homo sapiens
tcagcccctttctcactatttcattaattcctcgcacaacacctacctcacagggagaggagcggaagaccttctggtgtgggctgggcagcaattcact

SEQ ID NO: 192715 - DNA, 90 bp, Homo sapiens
cccaaaatcagtgattctacatctcaagctcatattttgaagtgtttacggtggaagatagatgataagcctgtaaaaattgacaagtgg

SEQ ID NO: 192716 - DNA, 50 bp, Homo sapiens
aaaactacaggaagctgctctccctcggcacagatagatcattatctagg

SEQ ID NO: 192717 - DNA, 48 bp, Homo sapiens
ctttatggaaatcatactattggaatttttaccattcgcctgcccaaa

SEQ ID NO: 192718 - DNA, 83 bp, Homo sapiens
caatgctgcgaaagctgccaaaagtgacatgcaggcctatgaagaatacaccagcaagctagatgcactccaacaaagagaac

SEQ ID NO: 192719 - DNA, 82 bp, Homo sapiens
caagaaaccaacattcccaacagccaccaccaccaccagatgaggtggggctggtgtccgagcacttctcgcaggccccgca

SEQ ID NO: 192720 - DNA, 90 bp, Homo sapiens
cagatgtcgaacctgctgcttttctcgctatgctgaagaggaattttgttgtcagagaataaaaggaggttgtccataattgactttaag

SEQ ID NO: 192721 - DNA, 83 bp, Homo sapiens
aagccgctggcagccgcggatctcaccgccgctcagggtgcgtgcaggagctgcggcaggggctgctggtgtggcagcaggag

SEQ ID NO: 192722 - DNA, 82 bp, Homo sapiens
gcaaggctgagggacgagaacgagatgtccctggtagatttgggaaagaagcttttagaagcggcacgagcaggtcaagatg

SEQ ID NO: 192723 - DNA, 75 bp, Homo sapiens
gagtgggggcacgacagccttgaggcccagcgctagcacccagatactaatggaccatactaccaaggaccagtc

SEQ ID NO: 192724 - DNA, 85 bp, Homo sapiens
tctacttcacaggaattgccatttgattcactggcaaaatttgctggcagaaaactgaaagactgtggagaagatcttcttgtag

SEQ ID NO: 192725 - DNA, 83 bp, Homo sapiens
ccggcccggaggaggctcatgcgggatttcaagcggctgaaggtgatgtggccgccctcaaccgacgcatccagctcgttgag

SEQ ID NO: 192726 - DNA, 98 bp, Homo sapiens
ccctggtgcaccgctatctgacggggacctatgtccaggaggagtcccctgaagacctgcctagagctggaacgttacctccagagcgagccctgcta

SEQ ID NO: 192727 - DNA, 100 bp, Homo sapiens
ccggactccgacggcggctcggacgccgactcggaggtgggtccggggagcccgactcggaccgcggagcctatggaccagctctcattgaacactgtct

SEQ ID NO: 192728 - DNA, 90 bp, Homo sapiens
gtaactgcacgaccagcgagggcaggagcacgaacagcaaggtgtgtgtggtttcagcgcagcatggctgtggtcatccgtttgcaaggt

SEQ ID NO: 192729 - DNA, 74 bp, Homo sapiens
gcagccggcccttgttaactacaacagaccatctgaagccacagaagaagtttctttggacagccctgaaaggg

SEQ ID NO: 192730 - DNA, 83 bp, Homo sapiens
ctggaagcagcagctcaccgaggacggggactccctggtggagttgacagaagagatcctgaagctgctgatggaactggtct

SEQ ID NO: 192731 - DNA, 90 bp, Homo sapiens
atggagtcttccatcaatcatatctcacaggttgtcctttgtggagggtcttctcgaatcccaaagctacagcaactgattaaagatctt

SEQ ID NO: 192732 - DNA, 90 bp, Homo sapiens
atgaaacagcagttttggtagaagatgtggtacacactcagttaattaatctggaagacagagatgtcaatgaccccatgcccaaccgag

SEQ ID NO: 192733 - DNA, 50 bp, Homo sapiens
tctatgaggattgcccagctcaaggcaaggcctttggctgtgtgggcggc

SEQ ID NO: 192734 - DNA, 100 bp, Homo sapiens
attcaagtccctgacttcctgcctggactccaaagccttcttattgactcctaggaatcaagagtcacctaaggtcctgcgagtacaagggtcgaccccc

SEQ ID NO: 192735 - DNA, 82 bp, Homo sapiens
cgtccgtgtcaccgccggaacctggcgcagggaacggcaggagcagctgatgggatatcggaagagagggccgaagcccaaa

SEQ ID NO: 192736 - DNA, 82 bp, Homo sapiens
acaagctctgtgattggtggtcgcttggggtgatcatgtatgagatgctcatcggtaattctgaattgctcagctctgcaga

SEQ ID NO: 192737 - DNA, 90 bp, Homo sapiens
cgaggtggtagcctttgactaccaatccaaaatgctggctttaactacttgtttgcggccccctactactacggcttctacaacaaccgg

SEQ ID NO: 192738 - DNA, 49 bp, Homo sapiens
agaaccccggcgcggcccttgtggctgcttcaacccccaactccactgc

SEQ ID NO: 192739 - DNA, 108 bp, Homo sapiens
gtgtacctgcgcaggaagtcgcgctccaagagctccagcctgagccggctcgaggaatttagataatgggctgtgtgcaatgtaaggataaagaagcaacaaaactga

SEQ ID NO: 192740 - DNA, 97 bp, Homo sapiens
atatggggattccgcagatccggcagctttccgaaagattctctcgggcctagccgtccttggaacccgatattcgggctgggcggttccgcggcct

SEQ ID NO: 192741 - DNA, 75 bp, Homo sapiens
ggacctctgtcagagaatgaaacactcatcgcatgccctggcctcccacgactacatcctgaagattgtgcccac

SEQ ID NO: 192742 - DNA, 83 bp, Homo sapiens
caggaacatcgtctgcttcatggggcatagaaggaaaaactggaaagtgaggaagttcatcttgagagaagaccctgcctacc

SEQ ID NO: 192743 - DNA, 85 bp, Homo sapiens
gagctggagcacaaggagctcggggagagcttcgagagctgtgcccaggagtgaacaaccagccctacctctgtgagagtggtca

SEQ ID NO: 192744 - DNA, 96 bp, Homo sapiens
tgcggtttaacccgcggtggcggcggcgacggcggccctggcagaggctgaggggatctggcggtggagcgctaggatcagacgcccccgcgatga

SEQ ID NO: 192745 - DNA, 50 bp, Homo sapiens
tttttattctccacagtaaaaggtaatgaatttgggcatcctgaatggtt

SEQ ID NO: 192746 - DNA, 100 bp, Homo sapiens
tgccacctcccccggcagaacctgttgagaaaggggcatccacagatggagacctcacagacacggtcagtggtccccgctccacagcctccgacctgac

SEQ ID NO: 192747 - DNA, 50 bp, Homo sapiens
tcacggagaagtccgcctgtaagaggtctcgccacggaggccgcaagcaa

SEQ ID NO: 192748 - DNA, 80 bp, Homo sapiens
agagctcatctggaattttgccgatttcatgactaaccagtgatcagcagcaggctcgtcagtctcagcttgctcaggat

SEQ ID NO: 192749 - DNA, 101 bp, Homo sapiens
tcgcgctcttcttcttcttccagggactcagcacctggcaggtttcccaaaccactccttatgatccagtgaatattcaagagagctacatttgaagcctg

SEQ ID NO: 192750 - DNA, 100 bp, Homo sapiens
tgaattacagaatcaattggataaatgtcgtaatgaaatgatgaccatgactgaggatcagttccatgacaagaccccttatacgattatgtttggtcca

SEQ ID NO: 192751 - DNA, 83 bp, Homo sapiens
cgcggccgcaccttcccgccttctcagaatgagtctgcaggtcttaaacgacaaaaatgtcagcaatgaaaaaaatacagaaa

SEQ ID NO: 192752 - DNA, 100 bp, Homo sapiens
cgagatgccccctcacatctatgccatcacagacaccgcctacaggagtatgatgcaaggaaactttgagggaaattttgagtcactggaccttgcggaa

SEQ ID NO: 192753 - DNA, 96 bp, Homo sapiens
ttcactatgcctgtgcgaactgccaagtccctcgtcactgtgctagatgccatggacaatattaccaggcagaaccaattctacgatacccaagtc

SEQ ID NO: 192754 - DNA, 52 bp, Homo sapiens
gcaaacagattcagtggcctgcattggtaggaggtgtgcaatctttgggggg

SEQ ID NO: 192755 - DNA, 100 bp, Homo sapiens
tcaaccatctggggaaaaggcaaaaatcccatctaccgcaactctcagttcgagagtaaagggtactagatggaaacttgagaaaggactgcttattgat

SEQ ID NO: 192756 - DNA, 73 bp, Homo sapiens
ttctggagagctgaccaaacactaagggccagctacagatgcatgcatattgtgaaaacccagatatagtgct

SEQ ID NO: 192757 - DNA, 87 bp, Homo sapiens
atgacaaaacttcaagccaaacatcaagcagaatgtgatttgcttgaagatatgagccaccttctgggtgaaccctcagttcaagat

SEQ ID NO: 192758 - DNA, 96 bp, Homo sapiens
ggaggaatctcagtagggacaacaggcaggagaattatgggagcgcatttccccagggagtcagtggatcggtggggaaaatgctgcttaccctgg

SEQ ID NO: 192759 - DNA, 100 bp, Homo sapiens
cagactgtggtgcctacccccatcactgcttccctcagccataacagatggggcgcctacccttcttcagcaagatgggaacagctgagtctgaaggaag

SEQ ID NO: 192760 - DNA, 100 bp, Homo sapiens
tatgcagtcccccaggatacagggtcaaaggagagcacaaccatcgcagttggaagcccatggggcagaatgcatacacagccacagctatcaacagcac

SEQ ID NO: 192761 - DNA, 80 bp, Homo sapiens
gagagggcctgggagcttgctgcagcttcagtaatctcaggggcgatataatcaatgaggtggtcctaaagttgctcaag

SEQ ID NO: 192762 - DNA, 100 bp, Homo sapiens
gctgggaaacatggcgaccgagggaatgatccttactaaccacgaccatcaaatccgtgtcggagtccttacaggtctctaattaacagaagatggcaaa

SEQ ID NO: 192763 - DNA, 87 bp, Homo sapiens
actgccctcatccacgatggcctagcacgtggaattcgcgaagctgccaaagccttagacaattatacttactggtggacaccagag

SEQ ID NO: 192764 - DNA, 74 bp, Homo sapiens
aactgtgggactttttgactacaattctcaacaacagctgtatgcaggagctattcttgaagtttgtggatgaa

SEQ ID NO: 192765 - DNA, 102 bp, Homo sapiens
gttcttactggccctgagtctttgggggcagcctgcagaggctgcgacacttagcctgtgatgaggagagagtggaagaagcaaaactgctggtgtcccaag

SEQ ID NO: 192766 - DNA, 100 bp, Homo sapiens
gtggaagatccagaatacaaacctgccccagccatctttaaagatgatatagagtaaagccatcaataaggcctatgaggagtatgttttatctgttggg

SEQ ID NO: 192767 - DNA, 90 bp, Homo sapiens
ggcttatgagtggaacatggctagcaggaatgcttactgttgcgtggttcgttattaacagttcattgtggtgtcactaaaagaaggtat

SEQ ID NO: 192768 - DNA, 96 bp, Homo sapiens
gaattcagaaggatatcgacgtcgtgatccagaagtccagagctgaggactgcctgtttgcaggttctaaatggcttctaagaagttgggtgcaga

SEQ ID NO: 192769 - DNA, 75 bp, Homo sapiens
tggtgaagacagtgccagttcctgacacgggagacagtgtgtttggtggtaatccatttgcttccttggtgagca

SEQ ID NO: 192770 - DNA, 100 bp, Homo sapiens
tggcactggacaaatccaggtgaacatccaggagcctcacggacatgcacgtggtggatgtagagctgagcggaccccggggccccacgggccgaagctt

SEQ ID NO: 192771 - DNA, 100 bp, Homo sapiens
caagattcaaagataaaactcctgcccctcttcaacacctggacaccttgttagatggaacctacaagcaggccgaaatagaactatttgtgaacagact

SEQ ID NO: 192772 - DNA, 100 bp, Homo sapiens
aaccatctgggagccttcctgatccgggagagtgagagctccccaggggagttctctgtgtctgtgaattggtccaggcgcaatgttcagcgtatttgag

SEQ ID NO: 192773 - DNA, 100 bp, Homo sapiens
gagtgcgctccaagagcgacacgccgtacctcgcagaggccaggatctcctttaacctgggggcagcgatggcaagccggcaggtggatattgcaactca

SEQ ID NO: 192774 - DNA, 83 bp, Homo sapiens
caagaattgccgcttccttttagttactgttttaaaatcaaagatgggaaaatcggagaaaattgcccttccccatggccagc

SEQ ID NO: 192775 - DNA, 90 bp, Homo sapiens
gaccaagctatccgaccagactggctacgtggagtactacaggtcatgtggtgggacatccgaaagatgagcgagcccactgaagttgtg

SEQ ID NO: 192776 - DNA, 100 bp, Homo sapiens
cggagtgcgcagggcgacggccccacctccggccactgggacggcggcgcggagaaggcaggggagtacatcaagacctggcggccacgctacttcctcc

SEQ ID NO: 192777 - DNA, 75 bp, Homo sapiens
agtggaggcattttggggcagaatacagagatatggaatcagattcatgttacatgtaaagctgtcctcatttgt

SEQ ID NO: 192778 - DNA, 106 bp, Homo sapiens
cagaagaagggaaggcgcgagtgaggaaaggaggtactgtagaattaaacaaccaccatgtcgagcaaaaaggcaaagaccaagaccaccaagaagcgccctcagc

SEQ ID NO: 192779 - DNA, 82 bp, Homo sapiens
tgcttatggcggcgctggagagggggcgctgagctgttgggcattttgaaagcgaagcagaagccgtagaatcagcggcgag

SEQ ID NO: 192780 - DNA, 100 bp, Homo sapiens
catggcctacccgggatacggaggagggatgcctggaatgatgtcgtcagtaatgcctggaatgatgatgtctcatatgtctcaggcttccatgcagcct

SEQ ID NO: 192781 - DNA, 100 bp, Homo sapiens
ttcggtcatctaaaggaggttttaaacagtataacagtcttgaatccagataatagttttgaaatactggttgaccaatctgtggtgaatagtggaaatc

SEQ ID NO: 192782 - DNA, 87 bp, Homo sapiens
gaaggaacgaggcaaggagctaaagcagcgtgcgttcagccctggggtatcgagaaccttccctgcgaacttcagaggaacttccag

SEQ ID NO: 192783 - DNA, 50 bp, Homo sapiens
tctggatcacggatgtaggaagtgtgcggtcccccccgggtctggccaag

SEQ ID NO: 192784 - DNA, 100 bp, Homo sapiens
aactcctgagaatcatttctgggagaatgccgaagactgcatttcaacttcaagaatggtcagcccaagactaccccgtcggtcattctgttcctgccgt

SEQ ID NO: 192785 - DNA, 80 bp, Homo sapiens
gaaacatgctagaattacctggaacttcatcatcatctacttcacaggaattgccatttacaatgcagatcttcgtgaag

SEQ ID NO: 192786 - DNA, 100 bp, Homo sapiens
gctgaatggaaaaaacattgaagacgtcattgcccagggtcctagccaatggtctggacaacaagctccgtgaagacctggagcgactgaagaagattcg

SEQ ID NO: 192787 - DNA, 75 bp, Homo sapiens
ggagaaggaggtcgacgaggacacgacagtcacaatcccctcggccgtgacacaattgggaaaactggttatttt

SEQ ID NO: 192788 - DNA, 51 bp, Homo sapiens
agatatcttgaaaagctgccagaaaggttctggagacagcctgtatttctt

SEQ ID NO: 192789 - DNA, 100 bp, Homo sapiens
gcctcgtttgttgggaacctactgatgaaccttggtcctaatctacccatggctacagttgatataaaaaatccagaaatcacaacaaatagattttatg

SEQ ID NO: 192790 - DNA, 100 bp, Homo sapiens
ctgcaaaagttccttctccaccagacgagcaccaagaagctgagaatgctgtttcctcaggagatgttgcagtaaagatcctaaaggttgtcgacccaac

SEQ ID NO: 192791 - DNA, 97 bp, Homo sapiens
tcgtggggatcttggcagcgctgcagggaagatccacgtttgaaatttccagtacatatgcggtcaaagacatctttaaaccccaatgaccttggcc

SEQ ID NO: 192792 - DNA, 90 bp, Homo sapiens
gcattctacaaagaacagctggctagactggaggagaggcccagcgacttctccgtgtcccttaaagcgtcagggaagaacaaacacttc

SEQ ID NO: 192793 - DNA, 90 bp, Homo sapiens
tccaggcaacaaaggatcattggtttatgcaggaattaaatcaattgtaaagtcatcgttggaaatacactttcgggaaatggcctctaa

SEQ ID NO: 192794 - DNA, 74 bp, Homo sapiens
cttggcgagcctggatctccaagtgaccccctcagcaactcctgatgaacaggctggagtgcggtggcgtgatc

SEQ ID NO: 192795 - DNA, 82 bp, Homo sapiens
gggaagacgcggcggcggcggcggaggatgagcctgcagagcgcgcagtacctccggcatctgcatctgggaccgacctcct

SEQ ID NO: 192796 - DNA, 75 bp, Homo sapiens
gaactggtcgccatcaagaaagtattgcaggacaagagatttaagtcctggaagttgccgtactcagtacagaag

SEQ ID NO: 192797 - DNA, 100 bp, Homo sapiens
ctagtggttatttaatggaccttataaattttttgagaagcatctttcaagtgtttactcatttgcctggtgatgacaactccgtgagggtggagattat

SEQ ID NO: 192798 - DNA, 80 bp, Homo sapiens
gtgatttgcctcagcttgtactgtatctgctgtgcgtttcagtcaacaatacagcttgtgttcgacaatattccttgatg

SEQ ID NO: 192799 - DNA, 101 bp, Homo sapiens
aaccttggtgtgtcccaaaaattggtatcaccttcaaggagcacaagtagctgctcttccaagcaaggaagtcgacaggtgtggtggacacaggcctattc

SEQ ID NO: 192800 - DNA, 99 bp, Homo sapiens
agcgccagcggccgagcgggcggcttcctggcctgggcgctccggtggcggcggaggttaatttggagtggcccctggagtcagtttcctacaccatcc

SEQ ID NO: 192801 - DNA, 82 bp, Homo sapiens
tatcaagccagagaagtgcccgaggagagttaacagatagcagaccccacgttagctgaaatgggaaaaaacttgaaggagg

SEQ ID NO: 192802 - DNA, 100 bp, Homo sapiens
aaattaagtactacccaacagcaaaggcaaaggaatgcctattcagaatggcagattcaggagagagtttgtgccaggctgagtcatcactagagagtgg

SEQ ID NO: 192803 - DNA, 100 bp, Homo sapiens
gcggcagcggagggacggcagtctcgcgcgtgattcgcctttgccagtctcatctcgtgtctgctttgttaagttccatgatccagactcagcagttgtg

SEQ ID NO: 192804 - DNA, 83 bp, Homo sapiens
ggagtggaaaggctctcagtgaaaaagaacgctgacctggagtggactgcagtgaagcagagcttcctgaccgaggtggagca

SEQ ID NO: 192805 - DNA, 98 bp, Homo sapiens
ccctccgccacctcgagctgcggtagcagcgactcatgagagcgcggccggaggacagcggggatctgatgagcttctttcttctggcatcattaacg

SEQ ID NO: 192806 - DNA, 90 bp, Homo sapiens
ggaaaatgatgagacatctaggaggaaagctggtcatcagtttggagttacatggcggcgttacatagccatgtgccgcgagaagcagcc

SEQ ID NO: 192807 - DNA, 82 bp, Homo sapiens
cactgaagacgtctgcgtgagaatagagaccaccgagagccctcatcctgcaagtctctcggaaacacctccctgagtggcc

SEQ ID NO: 192808 - DNA, 100 bp, Homo sapiens
gtacatctgaaagccgggaaatgttcactgagacttttttgacggagagggacaaacaatccaagtggagtggaattcctcagctgctcctcaagctgca

SEQ ID NO: 192809 - DNA, 75 bp, Homo sapiens
ctcaggatttacttgaaacaaaaggagaccctaatcttcagatggcattggagtcaagagagattataaacaggc

SEQ ID NO: 192810 - DNA, 50 bp, Homo sapiens
cgacgcctttggagtggcccccatcgatcctgtcctcggtaccgtgggct

SEQ ID NO: 192811 - DNA, 49 bp, Homo sapiens
atattcatcatcatgggtgcatcggccattggctgtggtattgtagaaa

SEQ ID NO: 192812 - DNA, 75 bp, Homo sapiens
cttgtaccccggggagagacgagccccgagcccggctggacgccgctgcctcagatggagtctggctctgtcgcc

SEQ ID NO: 192813 - DNA, 100 bp, Homo sapiens
ttggccccacggctggggccgccattgcctcccatgaggatgtggacaaagtggcattcacaggctccactgagagtgatgacagacctaatgctctatt

SEQ ID NO: 192814 - DNA, 90 bp, Homo sapiens
ggccggatgggccgctgagcccgaatcgggcactggtggagaaggaacgtgataaagaagtaagcgatgatgaggctgaagaaaaggaag

SEQ ID NO: 192815 - DNA, 100 bp, Homo sapiens
tggaaggttgatggtgaacgtggttgaaggcatcgagttgaaaccctgtcggtcacatgtgctcatctctcagagatctagaacttgcctaccaagtaca

SEQ ID NO: 192816 - DNA, 83 bp, Homo sapiens
gcgtcccgggggcgcagggaaggagggcgtccgagtcaacaaccgcttcgagctgagacaagaggagcagcagcggcaccgcc

SEQ ID NO: 192817 - DNA, 75 bp, Homo sapiens
ccgagagcgtgaccgagagcgcgaatatcgtcatcgttagaagatttcgctgcctcatcacccacatctcccaat

SEQ ID NO: 192818 - DNA, 50 bp, Homo sapiens
gcacccaggctgaagttggaggctatggctggtgcagtggtgtcatcttg

SEQ ID NO: 192819 - DNA, 100 bp, Homo sapiens
aaaatcacattttcagtgacgtttgttgatggcaacaaccctttccaagcagttcaagaagacatcgctattgcggttccgaggcagtgggaagagatgc

SEQ ID NO: 192820 - DNA, 76 bp, Homo sapiens
caggcgggagggttcgaggccaatgatgggagaccaccgggatgggcaggtgagaagccctaccactgcaactggg

SEQ ID NO: 192821 - DNA, 100 bp, Homo sapiens
gtcacaatgccacacatagatggttttgaggttttgctgaagatattcctgaagaatcatcccaggtgccacactaaaaaaatgatccagttgacagcta

SEQ ID NO: 192822 - DNA, 90 bp, Homo sapiens
tgttcctggaggaatccgagaagagcagagcggagggagccccagacacggatggccaggccatgttatgggatctcaacgaaggcaaac

SEQ ID NO: 192823 - DNA, 83 bp, Homo sapiens
tggagatggagttcgactgcgagggcctgagacggctgcttggcaagataccatgtttgtgtggaagtgccccgtgtttgcta

SEQ ID NO: 192824 - DNA, 74 bp, Homo sapiens
gaagctggagttcccttcccttccacagtgcaaggaagacgccgagattgatgtacagctatatattttgtcct

SEQ ID NO: 192825 - DNA, 100 bp, Homo sapiens
ctgtaatgacaccctccagcaactgatggaggaaatcttacctgtattccttaacgccaatagaaactggaattctccagttgctaatttcataatggag

SEQ ID NO: 192826 - DNA, 75 bp, Homo sapiens
gctctggctctggctgtgcgcgctggcgctgagcctgcagccggccctgccgggcgtgatggtgggcatgggtca

SEQ ID NO: 192827 - DNA, 50 bp, Homo sapiens
ctcatgaccatcgaggagttcgctgcagctcttgggaccagaactgagta

SEQ ID NO: 192828 - DNA, 80 bp, Homo sapiens
cgcgcacgttggaaccgaagagagctctgttgttgcaagcacggttcccataagggcggcgagatcagcctcctgtctca

SEQ ID NO: 192829 - DNA, 75 bp, Homo sapiens
atgaagacacgcttcttctggaagaccagccaacagactgcaaaattcaaaatggggctcaaggtattcgtttca

SEQ ID NO: 192830 - DNA, 98 bp, Homo sapiens
cgggggacagctgagtttcaaaggcaagagcctcaaactcaacactgcagaagatggtttgttgaatgtacagagtgcggaagaaagatgcatcagat

SEQ ID NO: 192831 - DNA, 100 bp, Homo sapiens
catcgccttcaccatggacctgcgcagcgatgaccaggcgggctgacgcacgaggcacacaggaaggaggtggagcaggtgtatctgcgctgtgcggcgg

SEQ ID NO: 192832 - DNA, 100 bp, Homo sapiens
tgaacgagagggacacggagcagggtatgttagagcccaccaaggaaccactgaaaccactttctgctgcagaaaaaatagcttccatcggtcagacagc

SEQ ID NO: 192833 - DNA, 82 bp, Homo sapiens
tggcaaccagatcggtgccaaggctccctggggaagggaatgcagggttgctggggctgggcccagaagcagcagcaccagg

SEQ ID NO: 192834 - DNA, 51 bp, Homo sapiens
aggaggagttccagaagcatgaagctgcaagctttcttcctggtggcagat

SEQ ID NO: 192835 - DNA, 75 bp, Homo sapiens
cccttgtgtcttcagtttgaggtacctcccataattttaaggggctcccagtaccagccttgcaagagaactttt

SEQ ID NO: 192836 - DNA, 100 bp, Homo sapiens
gactgggggcatctgaagcagtggccgacatcaagttttcctctgcagttgcctttccccatcttcctggttctgctccttcgtggcctagtcttgtgga

SEQ ID NO: 192837 - DNA, 74 bp, Homo sapiens
gcttgatatcacagaggaaactctgcattctcgcttcctggagggattaatgaaaatcaagttccatcctcaga

SEQ ID NO: 192838 - DNA, 74 bp, Homo sapiens
agaatttgctcataggatatgggacacacttcagaaattaggtgctgtgtgatgtgttaagagcatattagaag

SEQ ID NO: 192839 - DNA, 100 bp, Homo sapiens
ttcgagcgccgcggacgcgtcatcgagtgtgacgtggtgaaagccattgagacccagagcagcagttctgaagagatagtgcccagccctccctcgccac

SEQ ID NO: 192840 - DNA, 75 bp, Homo sapiens
tggctgttccaatcgctcctgtttgtcttctgctttggcccagaacattctagtatgccagtagaaaaaaatatc

SEQ ID NO: 192841 - DNA, 99 bp, Homo sapiens
atcgtgtttggcacccggatcctggatgaggaggtgtttgaggtgctgcccaccaaccctgaggagagctggcaggtgtacagctctgcccaggacagc

SEQ ID NO: 192842 - DNA, 133 bp, Homo sapiens
ggagaaccaggagaagtttttatcaacaaaggcaaaggattcggatttattaagcttggaggaggtaaatgacaaattgcgggatatgccagatgggaccttcttggtccgagatgcctcaacaaaaatgcag

SEQ ID NO: 192843 - DNA, 74 bp, Homo sapiens
ccgtgcacgcctacaaattcttctttaagtccatggaccaggacttcggatgtgaagttcatttccaatccgcc

SEQ ID NO: 192844 - DNA, 100 bp, Homo sapiens
tgtggaggagcagcagtagtcggagggtgcagttcacggaggagaaatttggccaggctgagaagactgagcttgatgcccactttgaaaaccttctggc

SEQ ID NO: 192845 - DNA, 82 bp, Homo sapiens
gctgtagtcctgttcttctggctctaagatctgaatgttgtgaccactaatttggcggtgatccagggtgctttcaccagtg

SEQ ID NO: 192846 - DNA, 100 bp, Homo sapiens
cgacttccttcagggtttaggagaagcactgttgttttccacacagttccatcaccgggacagcttcaacacagggtccacagcgtggggcatttcccag

SEQ ID NO: 192847 - DNA, 75 bp, Homo sapiens
tggacaactattttcgtcatctttggaacaaaggaaattgacaatggcccttcagctatgctaggtctataatgg

SEQ ID NO: 192848 - DNA, 90 bp, Homo sapiens
acccttggagcggcttttgtctacttggctgacctcctgatgcctcacttggcctctggctgtacctggcagggagcagcctgccctgtc

SEQ ID NO: 192849 - DNA, 95 bp, Homo sapiens
tgctcagagggacttgtacagggatgtgatgttggagaactacagcaacctgatctcattggggctttttggtggtgctggagttggcaagactg

SEQ ID NO: 192850 - DNA, 83 bp, Homo sapiens
aaccaccagggcgacctggacgtagccaagcgcatgatccgcatggccaaggtggatggaagtttgcttagttgaagaattgc

SEQ ID NO: 192851 - DNA, 100 bp, Homo sapiens
gataaggaagaagaccatgctgggaccttccagacagtgaccacagaagaactcctcagcttcgtccaaacttggaaggaaaaactgagccagaggattc

SEQ ID NO: 192852 - DNA, 75 bp, Homo sapiens
cctggcgagcctgcaggatggcgcggccgagtccccgtacggccacccggcggattcctggtcgggtggcttcca

SEQ ID NO: 192853 - DNA, 100 bp, Homo sapiens
caagcagcggatcatcccctttctgccagggaagctgccaaagaatgtcgacgtcgaaagaaagaatatgtaaaatgtctggagagccgagttgcagtgc

SEQ ID NO: 192854 - DNA, 82 bp, Homo sapiens
attaccagacatgatctttcaggatatgatcatcgtggcgcatgtattactcatccttttgggggccactgagatactgcaa

SEQ ID NO: 192855 - DNA, 96 bp, Homo sapiens
agcctgcccagacggctcacctgtgcgggatggaacaaaaggattgtcaccagacctgcaatctatggagcagattcggagaattatgagacctac

SEQ ID NO: 192856 - DNA, 118 bp, Homo sapiens
cggcaaagttttgcagatcttcaacaagaggacccaggagaaattcgccctcaaagtaagtaaggaggtctctgtaccatggctcgtacaaagcagactgcccgcaaatcgaccggtg

SEQ ID NO: 192857 - DNA, 83 bp, Homo sapiens
gccgagtgcagaagatctgggtgcccgtggaccacaggccctcgttgcccagatgtatcgagaaccttccctgcgaacttcag

SEQ ID NO: 192858 - DNA, 50 bp, Homo sapiens
tgtacccggtggactcggtgaaggtcacttcatcctggcccaggtactgc

SEQ ID NO: 192859 - DNA, 82 bp, Homo sapiens
gtgcaacatctgcaaggtccgcttcaccagacctggaggcagaagccagccttccagaaaagaaaggaaatactctgtctcg

SEQ ID NO: 192860 - DNA, 109 bp, Homo sapiens
ctgctctcggccctgcctctggctgtggaaacaggcctccaagtacccaaggtgtggccgacgacgatgccctcgctgaggagcgcatgcggagaggccagaacgccct

SEQ ID NO: 192861 - DNA, 74 bp, Homo sapiens
caccctccgcttcctctcctaggcgacgagacccagtggctagatctcacattcttgaaggtggcattgaagag

SEQ ID NO: 192862 - DNA, 75 bp, Homo sapiens
tcctctgcattgctgatcttgtacttggattcagcaaggaaccttccgctgaagcagtttgaacgactggaacag

SEQ ID NO: 192863 - DNA, 75 bp, Homo sapiens
gtgggcacgcgctcctacatggctctgctaaatcctgaagatgacctcttaccagggaagattcgagacagcaat

SEQ ID NO: 192864 - DNA, 99 bp, Homo sapiens
gctagcaaagaaacttcttgatttttcagaagaggaagaagaggaagacgaagaggaggatattgataaggtggtgatctttgtgaagtctgtgcagcg

SEQ ID NO: 192865 - DNA, 82 bp, Homo sapiens
tccagacgccccaaacaaacaacaatgcagatcttcgtgaagactctgactggtaagaccatcaccctcgaggttgagccca

SEQ ID NO: 192866 - DNA, 75 bp, Homo sapiens
gcggcgctgctgctcgggctgctcttggagagaatttggatggagagacccggaactgccggaagtgattcagat

SEQ ID NO: 192867 - DNA, 100 bp, Homo sapiens
ttgctcagttgagcctctggtctcggggtgtccacggtgggctcctcgtgctgggatccgccaacgtggatgagagtagagacggggtttcaccgtgtta

SEQ ID NO: 192868 - DNA, 87 bp, Homo sapiens
cgcgcgaggaaatggccgaggagccggagccgcaggggcatggtctagtggcccagtcaggacgcggaaacactccctggaggttct

SEQ ID NO: 192869 - DNA, 112 bp, Homo sapiens
atggcggaggcttcgagtgacccgggtgccgaggagcgggaagagttgctggggctgaccccgcactacatctacccaccagccatcgtgcagcccagcgtggtgatcccag

SEQ ID NO: 192870 - DNA, 75 bp, Homo sapiens
gcaggacccgaggccaggagccaggggcccagaaggaagctcttcgtgggcggtcttgactggagcacgacccaa

SEQ ID NO: 192871 - DNA, 83 bp, Homo sapiens
cgggccggccggccctgcccgggctgggtgaggggcgcccgcctcaagctagaggtgagaagccctaccactgcaactgggac

SEQ ID NO: 192872 - DNA, 50 bp, Homo sapiens
gccgatttcatgactaaccagtgcactgcctccttacctgtgaggaatgc

SEQ ID NO: 192873 - DNA, 97 bp, Homo sapiens
gtggcaaagtgctgcttccaaagctcattgacttttctgctcaggtgctggagaatctggtaaaagcaccattgtgaagcagatgaggatcctgcat

SEQ ID NO: 192874 - DNA, 82 bp, Homo sapiens
cgcgtgtctaggtgagtcgcggtgggtcctcgcttgcagttcagcgaccacgggtcatggaggacgctggcggcggcgagga

SEQ ID NO: 192875 - DNA, 87 bp, Homo sapiens
tcaggagagcgccccagggcaagccccgctccggccaacaatggagaacatgcagctgaccctgaacctgcagacggagaacaaagg

SEQ ID NO: 192876 - DNA, 75 bp, Homo sapiens
ctccattgtttgaccacaacaagggccggattctcacccagggggaagtcataaaatggtatgtctttttaatat

SEQ ID NO: 192877 - DNA, 73 bp, Homo sapiens
tccagacccaaggaaggagtgaattgaaagctaaggaggggctcagggaggtatggaaacattggaacttcaa

SEQ ID NO: 192878 - DNA, 83 bp, Homo sapiens
gtgggtccctccctgctgcgggacagcagctgtgaaactggaacgccaagctgaagaagaacgaatacggaagcacaaagcag

SEQ ID NO: 192879 - DNA, 74 bp, Homo sapiens
tgatacagatgtattcaaatggatcttcaaagttgtggaatacagactcacgttcaaaggtggctgattgcaga

SEQ ID NO: 192880 - DNA, 90 bp, Homo sapiens
tcaacatctctcagagacgaaagatgacagagcacgtagatcgccacgaaaacttcctacttcattaaaaaaaggagaaaggaaatgggc

SEQ ID NO: 192881 - DNA, 100 bp, Homo sapiens
caagatcatgggcaaaggacagatccaggattatatctgtccaagatgcgagtctggttttatcgaggagcttccggaagagaccaggtaatgcagcccc

SEQ ID NO: 192882 - DNA, 50 bp, Homo sapiens
cggagctggaatgactggcaacccaggctttgtggatttgaccctccatg

SEQ ID NO: 192883 - DNA, 90 bp, Homo sapiens
gaagggagacgacgctgctgggtccgctgagcggggcgacccgagcacaatcctggaggaagagaaggctcagcaagaagagcgcatgag

SEQ ID NO: 192884 - DNA, 96 bp, Homo sapiens
gcctccgacctgggcgctcagcccccggatcagcctgcctctggcgatgccctcctagctagccgtcacgggatggagggcttcatggactcaggg

SEQ ID NO: 192885 - DNA, 100 bp, Homo sapiens
catcttctgtaggatctgatgaaaattctcttcattctcttggactgaacttaaatactgatagatgtgttcagagcaacattgttttgttgacacaagc

SEQ ID NO: 192886 - DNA, 98 bp, Homo sapiens
cggcaacatgtaccccagcaacaagaagaaaaaggtgtggagagaggagaaagggaatcagcagtctcttcagttctttaaaagtggtgcgtctctta

SEQ ID NO: 192887 - DNA, 82 bp, Homo sapiens
gcgtctgagacttggtgggaacggaccttcctcttagaactgccattggatgtccagaatcccctgtagttgataatgttgg

SEQ ID NO: 192888 - DNA, 90 bp, Homo sapiens
gtgattggcaggatcctggtatccgctaacagctctaagcgaaagacatgaggcctcagcctgaaatgaggttgttttgaggtcatctga

SEQ ID NO: 192889 - DNA, 83 bp, Homo sapiens
gccgcgcagccctcggagcacggaggatcccttttcccccagaaattactcaatgctgaaacctctcaaagtggtattagaga

SEQ ID NO: 192890 - DNA, 95 bp, Homo sapiens
ggatatatgaaagaaaagtggcaccactgttcaccttagcctccatcaccactgacatcatcggggtagtaaaaagaatcattcctgcagtagct

SEQ ID NO: 192891 - DNA, 100 bp, Homo sapiens
gaaacttttgcccttatcagtaacacctgaggcgcctgtgtctggcagagctggtgtgagacgagacaatcctgccccgccgccgggataatcaagagtt

SEQ ID NO: 192892 - DNA, 74 bp, Homo sapiens
tccgtgggcagcgtcggggatgtccccttcacgaggttccctataaaagagaagaggaagccttagaggagagg

SEQ ID NO: 192893 - DNA, 97 bp, Homo sapiens
ctggaccacctggtcggggaggagaccatggctgactacctgctgtacaccctcaacaaacaccagcgctttgggattgccaaggatccaagatttg

SEQ ID NO: 192894 - DNA, 100 bp, Homo sapiens
tactgtgtgtggattcagaaagtcaagtctccatcatcaccagttccagtagtgaaaaacagaacccaacaaactcaaaatacattacatttaccactaa

SEQ ID NO: 192895 - DNA, 75 bp, Homo sapiens
gctgctctgttgatgcttatcggtgacttcatggtcatgacgattttcttcaatgtgagcaggcggtttggctat

SEQ ID NO: 192896 - DNA, 50 bp, Homo sapiens
ccggctcctgctccctgagcccgatttcctttgacctcgctgagtacact

SEQ ID NO: 192897 - DNA, 100 bp, Homo sapiens
agcccatcagctgccacgcctggaacaaggaccgcacccgtctcagtgctgtgccccccccagagcctagaggatgtttcatgggatcccagccacgccg

SEQ ID NO: 192898 - DNA, 76 bp, Homo sapiens
ggaggattcagggaataggagctggggagcccttctgcgccacaggttaaatgggccagggaaaactatcaccata

SEQ ID NO: 192899 - DNA, 100 bp, Homo sapiens
ctgccgcccggcttcaaggcccgcggaacagcggaggacgaagagcgggacccgagccctggtcatatatcagttatgtgcatgctctgatacatctggt

SEQ ID NO: 192900 - DNA, 97 bp, Homo sapiens
cacatgaaagacttcctcaaggactacagtatgcacttaatgtccctgcagactccaggttaaaagcgcttaatgcaacattcagagtgaaaaaccc

SEQ ID NO: 192901 - DNA, 100 bp, Homo sapiens
attattttcaatagaaacagatatacagatgtggagaaggtatttaccttgctgtggattgctgactggatggtccatcacttctggaggaaaggaaagg

SEQ ID NO: 192902 - DNA, 74 bp, Homo sapiens
caagaacaagcagctgggccatgaggaaggacgactgggtttggattcagaagaggattattatacaccacaaa

SEQ ID NO: 192903 - DNA, 98 bp, Homo sapiens
aatggaaccattggagaaactggaggtcacctcgaaagttctcaccactaaagacaagttttggtattgtcggctttcgccaaatcacaaagtcctgc

SEQ ID NO: 192904 - DNA, 101 bp, Homo sapiens
atcgacatcagtgaagaagatcaggatgtacagttacccagcacgtgtacctcctcctcctcctattgctcgggctgtagtgccctcgaaacgtcagcgtg

SEQ ID NO: 192905 - DNA, 100 bp, Homo sapiens
cttcctggcgctttcctgggttgcttctggcggccatggtgttgctgctgtactccttctccgacaaagaaacagccttggtataatagcacgttagcat

SEQ ID NO: 192906 - DNA, 100 bp, Homo sapiens
ggcagggtcagcaggcccaaacccccacaggtgaaaatgctttttacttgtccccagatatcaggaaacagtgtgattggttccaaggggaccaacccac

SEQ ID NO: 192907 - DNA, 100 bp, Homo sapiens
gccgatgcaccgagtccagcccaggaaaatggagaggttggaaagggcaaagaaattacaagaacagcgagaaaaggaaatggttgaaaaacaaaaacaa

SEQ ID NO: 192908 - DNA, 75 bp, Homo sapiens
agcctcatgagtagctgggattacagatccatgaccagaactgtcctttggcaaatgtcatctgtgaatactgca

SEQ ID NO: 192909 - DNA, 75 bp, Homo sapiens
ccggggtgcgcaagggggaccgcatcctggaggtgtcatttgaaccaattctccgcctccttccccagggaatct

SEQ ID NO: 192910 - DNA, 96 bp, Homo sapiens
gtttgctctgctcttccaacaccagtggaagatgatcacatcccagatctccagtctatgtgctgaagaagcagcagcccaagagcagacaggtca

SEQ ID NO: 192911 - DNA, 75 bp, Homo sapiens
gaagaggttgttcacaacaggtatccagcaatgaggacctggcggaaaagatagcatctcaaatgataaccgaag

SEQ ID NO: 192912 - DNA, 50 bp, Homo sapiens
ctgaccgctctggcccagggtgatgttcattctggacagagtggaaggtg

SEQ ID NO: 192913 - DNA, 98 bp, Homo sapiens
gagttcaagtatcagaagtcccttcctccccgattccagcgccagcagcagcaacaacagcagatggcctggccactgagcctgagtctgtctttgct

SEQ ID NO: 192914 - DNA, 96 bp, Homo sapiens
cgtggctggaagacatggccactccagtcggtgttgagcacggcgagcagtctcaggcctttagtgatgatggaagaccaacactgtcatctgaag

SEQ ID NO: 192915 - DNA, 100 bp, Homo sapiens
attttcaactctccactggaggctgctatggcgttccctcacctgcagcagcccagctttctactgattcatgctggtcctggccagcaatctgcctgag

SEQ ID NO: 192916 - DNA, 75 bp, Homo sapiens
atacagatctgggaccgaaatttgacttgtaaagaactggccaagtccaaagccgaagtggcctgcattgcagtg

SEQ ID NO: 192917 - DNA, 82 bp, Homo sapiens
ggacacccgcgaggccggaaaatggtgccctacgagacgctgaacaaacgctttcgcgccgctcagaagaacattgaccggg

SEQ ID NO: 192918 - DNA, 108 bp, Homo sapiens
cgatcatggcggatggcccccggtgcaagaggcgcaaacaagccaatcccaggaggaaaaacgacatcaactagtcaggcagtcttccgtctccagtctggcatctgc

SEQ ID NO: 192919 - DNA, 82 bp, Homo sapiens
gcccctgttgcgatggcgcagaaaccccgttgacaaggcactgctttttcatgacgggagcatcgagtacagctgtccggcc

SEQ ID NO: 192920 - DNA, 82 bp, Homo sapiens
ggacaccaagatgcggatccgggcctttccgaccatcatcaaagaggggatgctgaccaaacagaacaattcattccagcga

SEQ ID NO: 192921 - DNA, 75 bp, Homo sapiens
tctcgctcggagcttcgctcggaagggtctttgttccctgcagccctcccacggagtaaaagtccctcgcaattt

SEQ ID NO: 192922 - DNA, 83 bp, Homo sapiens
ggcagaacgaattcagtgatatcattaagtccagatctgattggaagtaaaggaagatcagagaaaataagaacatataattt

SEQ ID NO: 192923 - DNA, 90 bp, Homo sapiens
aagtgggaaacattgaaatcaaggtaggtagccatccaagcttcctgaaggaggttcgagatcacatgcaggactctttcttaatgcagc

SEQ ID NO: 192924 - DNA, 75 bp, Homo sapiens
gccgtgccgcatgagcatcgcggagcttgacccgtccatcgctgtgaccctggcctatggggacatgaaccatga

SEQ ID NO: 192925 - DNA, 75 bp, Homo sapiens
aaagatgagatttacctgtgagatgtttcatcccaacagttttaggagaagttttagcacaacttctgcttcttc

SEQ ID NO: 192926 - DNA, 75 bp, Homo sapiens
gaagcggatttccgattgaatgtcttaggaaaagtcctcagtgctgtgggcagtgcccagctactgatgtcccag

SEQ ID NO: 192927 - DNA, 82 bp, Homo sapiens
gaaccctggtcaccgtctcctcaggctccttgccagaggcctccactcactccagacccctatagcccgtcgctgtcagctg

SEQ ID NO: 192928 - DNA, 75 bp, Homo sapiens
gatgtctcatatgtctcaggcttccatgcagcctgccttaccggctgacagagtacttcttggtggtcctggtag

SEQ ID NO: 192929 - DNA, 82 bp, Homo sapiens
caaccatctcacacctttccaaaggacgcgaccataactctaaaaggtgagaagccctaccactgcaactgggacggctgcg

SEQ ID NO: 192930 - DNA, 75 bp, Homo sapiens
gctccgggatgctgtactccttgtctttgcaaacaaacaggaggataagatcaatgccctcattaaagcagccgg

SEQ ID NO: 192931 - DNA, 75 bp, Homo sapiens
gcagttggaagaacgcagtcgtgaacttcagaaggaggttgaccagaggatttgttaaggattccaagtaactct

SEQ ID NO: 192932 - DNA, 75 bp, Homo sapiens
gggagacgaagaaggcagaaggagccacgttgctgaaaagccaggagtcaaaatgactgagcgctttgactgcca

SEQ ID NO: 192933 - DNA, 98 bp, Homo sapiens
ttccctgtgctttagactggagcaaggttgggagtgggttccttgggaagaactacctcccctggaccagcttttctggggactgcgttgtttaaaag

SEQ ID NO: 192934 - DNA, 98 bp, Homo sapiens
gaagccgaggtccttctggacccccagggcctgatggaaacaaggtgatgctgggaggttcctggttacagacactggaggctagtggctgtgtctta

SEQ ID NO: 192935 - DNA, 75 bp, Homo sapiens
ctttctgcagtgcctctgagaacttacgcagatcagccgatgcagaaataccataccatcaatggtcataatgca

SEQ ID NO: 192936 - DNA, 100 bp, Homo sapiens
aagatgttcagcgtagagtcgctggagcgggcggagctgtgcgagagcctcctcacttgggtactccaaagattcaggtttactcacgtcatccagcaga

SEQ ID NO: 192937 - DNA, 83 bp, Homo sapiens
cccagaccctggagcctcagttggaagcagccgatccagcctgcggagcctgtggggcagatgcacccactgggcctatgtaa

SEQ ID NO: 192938 - DNA, 110 bp, Homo sapiens
gcaaggagggactccccgtgaacaacatcttccagcagatctcccccgtgggtgagaagccctaccactgcaactgggacggctgcggctggaagtttgcgcgctcagac

SEQ ID NO: 192939 - DNA, 119 bp, Homo sapiens
cagcctctggtgccaccactgctgctgccccatttccgtgctgcccttgctacctggcctatcgaaactttatgattgacacttaccgactgaacccccaagagtatcttacctctacc

SEQ ID NO: 192940 - DNA, 100 bp, Homo sapiens
tcgctccgtggccttagctgtgctcgcgctactctctctttctggcctggaggctatccagcgacacaactcagatgggaagttcatcgcccgggcacag

SEQ ID NO: 192941 - DNA, 75 bp, Homo sapiens
gcccagcgtcaacttcctcaagtcgcccaaaggcctgtttaaagaagaaaacccgtatgctagatttgaaaacaa

SEQ ID NO: 192942 - DNA, 75 bp, Homo sapiens
gccaaatggacgggactattaagctgctctgttaaaagcgaaaatgaaacaattgcctgcggcaacagttcgact

SEQ ID NO: 192943 - DNA, 51 bp, Homo sapiens
ggacatgatcctctccgcctctcgagctcctgcccctcctaaagctgaagc

SEQ ID NO: 192944 - DNA, 83 bp, Homo sapiens
ggggacgggggcgagagtgaacgattcaacccgggggagctcagatgccttcaattaagttgcagagttctgatggagagata

SEQ ID NO: 192945 - DNA, 99 bp, Homo sapiens
tgaccaagaggcagaggaaaattcactgacagagactcataaatgatccataatgagatggcatcaacatcagataaaggtgcccaaggaagaaatgac

SEQ ID NO: 192946 - DNA, 90 bp, Homo sapiens
ctcgggcaagaccaccttcgtcaacgtgatcgcggcaaggccaggcgggtgctgcctgggacccagtgactcagcacccctgcccggatc

SEQ ID NO: 192947 - DNA, 101 bp, Homo sapiens
caagcccattgacaaaaaagccccggcttccactgcagccatgtcactcctcttgctggtggtctcagcccttcacatcctcattcttatactgcttttcg

SEQ ID NO: 192948 - DNA, 87 bp, Homo sapiens
gggaaagccgtggccccgagggcggatccgaggtcaccctgctgattgccttcatctgtgtgcggagctccctgtggaccaactaca

SEQ ID NO: 192949 - DNA, 90 bp, Homo sapiens
tttttctccagccgagaggacgcggctgtgatatacgaagatcagccaaatggccgatgacacagtggcagaactggacaggcatctggc

SEQ ID NO: 192950 - DNA, 100 bp, Homo sapiens
ggagcatctcgcagaccattttgacagtcgagaacgaagcctgattgggctgcctccagaggatgactggcctcgagatgtatccctgccccgtggagcc

SEQ ID NO: 192951 - DNA, 83 bp, Homo sapiens
ggcggatggccccaggtgtaagcgcagaaagcaggcgaacccgcggcgcaataacgacatgttttgagcgcctgctgtgtctc

SEQ ID NO: 192952 - DNA, 100 bp, Homo sapiens
agcagcgactcatgagagcgcggccggaggacagcacacggaccctgactactcggctgcctatgtcgtcatagaaactgatgcagaagatggaatcaag

SEQ ID NO: 192953 - DNA, 75 bp, Homo sapiens
aacaccccttcagtaaatttgggacaggtgctgtacttctttgcagtatacaaggactagcagttaatattgacc

SEQ ID NO: 192954 - DNA, 100 bp, Homo sapiens
ggcctgcaaggctgttgtttcaagaaatgaaaatgaagggcgccctggaataggttcgccgaagagagagacaaactgggaagattgagcctgtggtcct

SEQ ID NO: 192955 - DNA, 90 bp, Homo sapiens
ctttatatcctgacactatgaatgctacttggatgcctcttaaggatgataatgaagataattcaaatgatgggacccagccatccaaaa

SEQ ID NO: 192956 - DNA, 75 bp, Homo sapiens
aggaattctcttccacagcacctgaaagagcctgagaaatgccagtggcctgacagcagcagacattgcacaaac

SEQ ID NO: 192957 - DNA, 75 bp, Homo sapiens
aagacaggagctgcagaacagaacactttctcatgtccagggtcagattacaagtggccacagatgtctttaatt

SEQ ID NO: 192958 - DNA, 75 bp, Homo sapiens
ctgaggcatgcagtagctgctacaggaaggtgcaatttctcaagtcgcctgttgtttacatgatgatgattatgt

SEQ ID NO: 192959 - DNA, 115 bp, Homo sapiens
gtgtagagccggtggagcagctgggctcggcgctgaggtttcgccctggctacaacgaccccatgtcagggctgagaaagtgttcatggtggctcgagggcttgtccgagaggct

SEQ ID NO: 192960 - DNA, 100 bp, Homo sapiens
ctacggtgaggcccttggtagagatcattctgaacatctaagtggaagttcttatagagatgcacttcagagatacgggacctctcatggtgcaccacct

SEQ ID NO: 192961 - DNA, 75 bp, Homo sapiens
atggtggatgaagttgttcattgtttgtcaccacaaaaaggacaggaaggtggtttgaagttgacatttcagaag

SEQ ID NO: 192962 - DNA, 101 bp, Homo sapiens
cgcggagtctgagggagatggaagttgagcaagagcagcggcgcagaaaggtggaggccgggaggacgaagaatgccagcagttactctgcagagatgacg

SEQ ID NO: 192963 - DNA, 83 bp, Homo sapiens
tcctctgctgccagtcccctgccccgggcaaagcccatctggtccgccgagcaggctgaccccgcactacatctacccaccag

SEQ ID NO: 192964 - DNA, 100 bp, Homo sapiens
ctctacagagatgtgatgctggaaaacttccagaacctggcctcactaggtggagccgccaccaaaatgcagattttcgtgaaaacccttacggggaaga

SEQ ID NO: 192965 - DNA, 96 bp, Homo sapiens
aggcgggggctgcacttgacaaccagcatgccgagatgcactggtggtccggttcctcaccaaacgattcatcggtgactatgaaagaaatgcagg

SEQ ID NO: 192966 - DNA, 75 bp, Homo sapiens
gaaacattaccgtcatattccacccattactaagaagctcattcacacagaagacccatttaatgatgaacatca

SEQ ID NO: 192967 - DNA, 74 bp, Homo sapiens
ccggaagctctttgaccttctggatgtccttgagttcaaccaggtgaaactgaggtttagtgaatggacgtgtc

SEQ ID NO: 192968 - DNA, 96 bp, Homo sapiens
tgacagctgtgataaaaaaaaaattcatctgggcggtatctggaacttggacatggatttgattgacatactttggaggcaagatatagatcttgg

SEQ ID NO: 192969 - DNA, 82 bp, Homo sapiens
agtcttcatccttccccacaagtatactgaagccaggacagatccggcgcaggagaccaacgcctgccatgctgttccggct

SEQ ID NO: 192970 - DNA, 100 bp, Homo sapiens
ttagccatggtcaaccccaccgtgttcttcgacattgccgtcgacggcgagcccttgggccgcgtctcctttgagtagattccctggaggattgaagatt

SEQ ID NO: 192971 - DNA, 100 bp, Homo sapiens
gccgcctcagccgccgccgccgccgttttcgcctgcagctgctcaccgatcggtttgggcttggccagccaggaagaatacctggttctgtgaatgccat

SEQ ID NO: 192972 - DNA, 50 bp, Homo sapiens
agaaaacaaagaatttgccagatgtttgatgtccggtctgtgctacgaca

SEQ ID NO: 192973 - DNA, 77 bp, Homo sapiens
ggagccgcggcggggggaaaatggagcccttcaccaatgaaaaaagcagcaagcctcggcagcagtcaatcctccag

SEQ ID NO: 192974 - DNA, 83 bp, Homo sapiens
gtcctccccagtgtgtgccggagaacacgggctacacgtatgcgctcagtcaccattactttaagtactgcaaaatctcagca

SEQ ID NO: 192975 - DNA, 90 bp, Homo sapiens
ccagcttccagttagtggatatagcacaccatccccagccaaacaccgaaaatctctcccagcactttagaaaggggaccctgactgtgt

SEQ ID NO: 192976 - DNA, 100 bp, Homo sapiens
atttgcaacccttccgggaagccatagctctgcatggagcacagcttgggacagtaatttctcttcctctttctggaataatttgctactatatgaattg

SEQ ID NO: 192977 - DNA, 100 bp, Homo sapiens
ctgggacgttggggagggggctgtgccgggcggagagaactcagcgaggattctgagcggggatctgatgagcttctttcttctggcatcattaacggac

SEQ ID NO: 192978 - DNA, 74 bp, Homo sapiens
gtcagccttcccagtagctgggaccacagatagaagagtgatggatgtcatttctcgttcacagctttacttgg

SEQ ID NO: 192979 - DNA, 100 bp, Homo sapiens
cctcatcgtggcagagcgtattgcgggcatggaccctgtcgtgcaatggagaaggatgaaactgtgagtgactgctccccacacatagccaacatcgggc

SEQ ID NO: 192980 - DNA, 100 bp, Homo sapiens
cttagtttcctgcttgccttcccccaggcttctattgtggctgaggcctacgattttgttccagattgggctgaaattttataccagcaagtgattctta

SEQ ID NO: 192981 - DNA, 95 bp, Homo sapiens
ctcctgttgggccatttccgagaactcccatcagtttctgtatagtgtaaaaggagatctcagccctgctgagctgatgatgctgactataggag

SEQ ID NO: 192982 - DNA, 101 bp, Homo sapiens
agattgaagacagccttacagaagctttggagcaaattaagataattagctcatcttcagaaaatggacatgaactttgaattttccctttctccaaatgt

SEQ ID NO: 192983 - DNA, 100 bp, Homo sapiens
cattttccaagtactgtaaattcctgtgcagaaggcatcgtcgtcttccggacagactatggtcagatgccttcaattaagttgcagagttctgatggag

SEQ ID NO: 192984 - DNA, 73 bp, Homo sapiens
gaacgagctgagctggcagagtcgttgccaagctgacaaaggaactggaagatgccaagaaagaaatggcttc

SEQ ID NO: 192985 - DNA, 75 bp, Homo sapiens
atgatgaacaaagtactgatgacagagatccggaaaatgaggcccataggaaacaagtgacttgctgagtccaga

SEQ ID NO: 192986 - DNA, 100 bp, Homo sapiens
tatcagaagacaatatcatgcaagtgtggcaaatggtattctctactgccgctgatggtcaaacgcaagtggaaattaaagtgtgtcagggtgaaagaga

SEQ ID NO: 192987 - DNA, 75 bp, Homo sapiens
cccttgaaggaatcaaacagttttatattaatgttgagagagagccgattccacgactcttctttgcgggagaac

SEQ ID NO: 192988 - DNA, 76 bp, Homo sapiens
cctgatccgggagagtgagagctccccaggggagttctctgtgtctgtgaaatccaccgtgggcgccctgctggca

SEQ ID NO: 192989 - DNA, 90 bp, Homo sapiens
gctgaactgagcgtatgtgccacgccgcccaggagacccctctgctgcaccacttcatgggacagccctgccatcaaggaagacagcaca

SEQ ID NO: 192990 - DNA, 75 bp, Homo sapiens
tgtggagcgaggaaaggtgtgctgtgcctgaggccagggcagctgcaatgactctccgcacggtattattgtcat

SEQ ID NO: 192991 - DNA, 101 bp, Homo sapiens
aagcagatcctgaaacacctgtcccgaccacaggcggagcagcagcagccggagccaggactctgcggaggggcaggacgggcaggtcccagagcagttct

SEQ ID NO: 192992 - DNA, 126 bp, Homo sapiens
cgggcacctccgagcgcaaggacagcgcgaggtccgcgcagcccagcgcagccatgggacggcaaaacagaacagaaaggcggagataaaaagaggggtgttaaaagaccacgagaagatcatggc

SEQ ID NO: 192993 - DNA, 73 bp, Homo sapiens
acatatttcctgtcaccaacaaagatttcaggggatggcattcctactgtatttgtggcagtggcaggcagaa

SEQ ID NO: 192994 - DNA, 51 bp, Homo sapiens
gctaatccagtggaaatcaggagaggggcccatcctgatggagctgcagac

SEQ ID NO: 192995 - DNA, 74 bp, Homo sapiens
tcaaagagttgggtttctgcgtccatgtgaagcatcctcataagggaccgtttggagggagccattcacctaca

SEQ ID NO: 192996 - DNA, 101 bp, Homo sapiens
tttggttctcccggcagcagcccgacgcaaaccaaggatctggggatcttcgcactatcccaaggtttaaagtaaaggtgggtgctgatctccaggatgac

SEQ ID NO: 192997 - DNA, 75 bp, Homo sapiens
ccaggccaatccacgaaagcatcaagactctgaaacagcttggttctacagccattgggatccagacatcagagg

SEQ ID NO: 192998 - DNA, 50 bp, Homo sapiens
ccgagcgctactcgcaggaggtcttcgtagagacggggtttcaccgtgtt

SEQ ID NO: 192999 - DNA, 83 bp, Homo sapiens
ccacacgtgttcaatacacctcccacctgtcctcaggcatatcaaagggcacaaatagtttacatttcatggaggcaagtcct

SEQ ID NO: 193000 - DNA, 100 bp, Homo sapiens
gattcgaaatggaccaagatcccatgaatcattccaagaaatggatcttaatgatgactggaaactctctaaagatgagacagaatctcactctgttgcc

SEQ ID NO: 193001 - DNA, 49 bp, Homo sapiens
caaagcgggaaatgcgtcaaaggtcgggaactacaagcggactgtgaag

SEQ ID NO: 193002 - DNA, 75 bp, Homo sapiens
atgctgaattcctgccagacccctcagctttgcaggtttttagaacttcagccataaaaatgggcagaattttcc

SEQ ID NO: 193003 - DNA, 101 bp, Homo sapiens
atggtgcagaaataccagtccccagtgagggtgtacaaatacccctttgaattaattatggctttgttgacctcctgtactggagagacattaagaagact

SEQ ID NO: 193004 - DNA, 100 bp, Homo sapiens
atgcccagtcttcggacgagtcctttgagccttacccagaaaggaactggcagagaggctgatgacatcgtgaactggctgaagaagcgcacgggcccgg

SEQ ID NO: 193005 - DNA, 74 bp, Homo sapiens
agcggcggcggaccacctccagattcatgatgttgctatcaaaagttgagaaattgtcagaagaaatcatggag

SEQ ID NO: 193006 - DNA, 90 bp, Homo sapiens
ctcgacaccatggtggacacttttcttcagaagctggtcgccgccggcagacttaattcagtgcacaaatgagatgaatgtgaacatccc

SEQ ID NO: 193007 - DNA, 100 bp, Homo sapiens
aaaatctaaaacttacctggatggggaaggctgcatagttgtcgagatgtccacagaaggaggatttggtggtactagcagcagtgatgcccagcaaagc

SEQ ID NO: 193008 - DNA, 75 bp, Homo sapiens
tgccctgcagcccctccggccgcgggcggcgcgggagcctggatggacaattgtcgagatgtccacagaaggagg

SEQ ID NO: 193009 - DNA, 74 bp, Homo sapiens
tgacaacagcatcatgaccttcaacctcagtcagctatcagttgagggatttgcagttgataaaatggctggag

SEQ ID NO: 193010 - DNA, 88 bp, Homo sapiens
aggaaccagactgggggcgagctgagcacctgtagtcaatcacacgcagcttttcctccgcaaccatgtctgacaaacccgatatggc

SEQ ID NO: 193011 - DNA, 100 bp, Homo sapiens
tggatcaagcaggttttaaatcaagatttaacattccaacacataaaaattatttatccaacagctcctcccagggtcatccgcacagaatggcagcgca

SEQ ID NO: 193012 - DNA, 100 bp, Homo sapiens
gacgagctgtggggatctggcactgtggttcctgcatgaagacagtggctggcggtgcctggacgtacaagagagaaactgagtccgagggatgtcaaca

SEQ ID NO: 193013 - DNA, 100 bp, Homo sapiens
atgaggagatggaggcgtcgggcgtgagcggaaatgaggaggagatggtggaggaggctgaagaaatccgagctgttccacttgttaacagagaccgggg

SEQ ID NO: 193014 - DNA, 74 bp, Homo sapiens
gtgttgagcttttcatggattatcttacgtagataagacactgcaacagttggatggcaagcatgtggtgtttg

SEQ ID NO: 193015 - DNA, 118 bp, Homo sapiens
aaccattgacgccatgtcgggttattcgagtgaccgagaccgcggccgggaccgagggaccatggccaacctggagcgcaccttcatcgccatcaagccggacggcgtgcagcgcggc

SEQ ID NO: 193016 - DNA, 100 bp, Homo sapiens
ccggcattgcacatcctgaccaccttgcaagagccacatgacaaggcacctgcggaactcgagtcatgcaggagcttttgtgatcgtgacggaagaagcc

SEQ ID NO: 193017 - DNA, 100 bp, Homo sapiens
attgacatcacgggagtgcgcctgcccaccggctactacttcggggcctccgccggcaccggcgacctgtctgaggctgacccgcggctgattgagtccc

SEQ ID NO: 193018 - DNA, 75 bp, Homo sapiens
gaaatatgctacagatagatgttaaggacatctgcaaatctttcaccaatgctcatgctgaagattcggttatgg

SEQ ID NO: 193019 - DNA, 88 bp, Homo sapiens
cggagctgggcgcggattcgccgaggcaccgaggcactcagaggaggtttacccaaggtccagcctagcccctaggcaccatgtcgga

SEQ ID NO: 193020 - DNA, 82 bp, Homo sapiens
gggaagccgcacttacctatgaggccagcaagcggaggtgctgggagcgagttggctggtgagaagccctaccactgcaact

SEQ ID NO: 193021 - DNA, 90 bp, Homo sapiens
gtgaccgagagcgcgaatatcgtcatcgttagaagaagctttgaggaagagccataactacctggagcagaatgattatttggagccaca

SEQ ID NO: 193022 - DNA, 103 bp, Homo sapiens
attggaggtgtcagtgttaaaggaacctctacaacgaaggtgaagccacggaagataagggacctcaggatggaaaccagcagcctgcaccgcccgagaaggt

SEQ ID NO: 193023 - DNA, 83 bp, Homo sapiens
agtgaagggcataggatccggcaaagtcctgaagagttactatgcgagtcagaagaaaacatttgaaattaatcccagacacc

SEQ ID NO: 193024 - DNA, 82 bp, Homo sapiens
gggaagacgcggggaagaggaggcggaaaaggacgcaaagttctccggcgaggtttggtgcacctcgatttggaggaagtag

SEQ ID NO: 193025 - DNA, 98 bp, Homo sapiens
atgctatttcatacctaatgagggagttccaggagattcaaccaggagaatgttccggagaatcacagcagctgccactaggctgttccgcagtgatg

SEQ ID NO: 193026 - DNA, 100 bp, Homo sapiens
gcgcccagcaatcacagaagccgacaaggcgttcaagcgaaaacatgaccgctgagcccatgagttgtatcacggactgattcaccgagcccaaccgtac

SEQ ID NO: 193027 - DNA, 98 bp, Homo sapiens
tggactgcagtcacagtggactcccaaggggcaggttccctctcccagcctgtgctgactcagccatcttcccattctgcatcttctggagcatcagt

SEQ ID NO: 193028 - DNA, 82 bp, Homo sapiens
gcgtccgccgattcctcctccttggtcgccgcgtccttggctggcgtgagggtgtgaagacagagaatgaccacatcaacct

SEQ ID NO: 193029 - DNA, 100 bp, Homo sapiens
gccgccgatattcaccaagcgcttcgctacaaggattctcagcaagttacagaagtatctttgacaactcttgtgaactttgtggacattacccagaagc

SEQ ID NO: 193030 - DNA, 100 bp, Homo sapiens
atcagtcccaccctgctagcagaatatgcctacgtgctaagagttgggatcccggagatcgcccgccatggctttacttactgcggccgcccggctcttg

SEQ ID NO: 193031 - DNA, 83 bp, Homo sapiens
tttcagaacctgagaaagtagagactgttaattgctggccctcggagagtggaaatggctgtgatgtcaacatagaatatgag

SEQ ID NO: 193032 - DNA, 83 bp, Homo sapiens
tgggggtgaagctggagatatttcggctgtccccgccctactccggaccgccccaaagactccatgggatggacctgagtcag

SEQ ID NO: 193033 - DNA, 75 bp, Homo sapiens
atgaacccggaccacaacgctgtggggcggataaaaatgtcgttgtgtttgacaaaagttctgaacaaatcctgg

SEQ ID NO: 193034 - DNA, 100 bp, Homo sapiens
ggccacttgctgtccgggaagatacccaaaaaggggtggtcgttcatggacttactttacaccagggatatcagtatgaacaacattactcagttgccag

SEQ ID NO: 193035 - DNA, 85 bp, Homo sapiens
caaaacaggtcatcactaagaaatcaggtgtagttctgctgaatcctattcctaaggtatttgtggaaacattagacaaatgttt

SEQ ID NO: 193036 - DNA, 100 bp, Homo sapiens
ccgtcgcccaggagtcatcggacgccagaatctgaataatccagaatggctactctgatctatgttgataaggaaaatggagaaccaggcacccgtgtgg

SEQ ID NO: 193037 - DNA, 97 bp, Homo sapiens
cagccatcgcttcggaggggaaggctgaggaaaggcactgggctccctctgctccccgtgggccgctccccgcgtggggccactgcccccggccccc

SEQ ID NO: 193038 - DNA, 100 bp, Homo sapiens
ttgggctctcagttctgctgcagcagtaatggaagaaagaaaaccactgactacatctggatttcaccactcagaggtcatgaaacgagtgcgtaccgag

SEQ ID NO: 193039 - DNA, 100 bp, Homo sapiens
ctattttactgataagaaaacacatctttacacactaaaaatttctgaataaattggcagaagaacgcagacagaagaaggaaacttaagatgtgcaagg

SEQ ID NO: 193040 - DNA, 100 bp, Homo sapiens
accactgtcccaatgccatccagagctgtgcctcccagcaccacagtccttctgcagtccctcgtccagccacccccagcctcatctagttgaatctgaa

SEQ ID NO: 193041 - DNA, 89 bp, Homo sapiens
ccacagccagagcctcagcaggagcctgttctcatcaccatggcaacagacttcccaagtaagaagcggaagaggagccgctggaacca

SEQ ID NO: 193042 - DNA, 89 bp, Homo sapiens
cggcccagcagctgcagccgcagcctgtggctgtgcagggccccgagccggcccgggtcgagctatcatggtgaacttacttcagattg

SEQ ID NO: 193043 - DNA, 101 bp, Homo sapiens
aactgactctactctgtgatgccaagacagatgggagtttccttgtacaccactttctctccttctatctcaaagctagaacaacagaggcagcagttgct

SEQ ID NO: 193044 - DNA, 90 bp, Homo sapiens
ggtccttacagccgctcgtcagactccagcagccaagatggtgaagcagatcgagagcaaggtggagattctggacgcaaagacaaggga

SEQ ID NO: 193045 - DNA, 83 bp, Homo sapiens
cccctgccatcacactgctaatacgagaaaagattcttcaaacttcatgagagaaagtgtgaacctattattatgactgttcc

SEQ ID NO: 193046 - DNA, 75 bp, Homo sapiens
tttctacgacccggagcacccgacccctgatttgcctgagaatacagatcaacccacagaacaaagcggatttcc

SEQ ID NO: 193047 - DNA, 50 bp, Homo sapiens
aaaggaagctgcccaaacccgaggccttggatggtatactgtaaattcag

SEQ ID NO: 193048 - DNA, 75 bp, Homo sapiens
aaactcttagataaaatgacgacgtccttctggaagaggcgaaactggtacaagtaatggttctgtcctggtgta

SEQ ID NO: 193049 - DNA, 141 bp, Homo sapiens
cgaggaggggaatttccttgtgcctccattcccgggaggggggagcggcgttggaggccaccgtttccagacagagtctagctctttcacccaggctggagtgaagtggtgcaatctcagctcagtgcaacctccgccccc

SEQ ID NO: 193050 - DNA, 90 bp, Homo sapiens
agggagaatttcaagaactgcaggttatgtgaaattacctccagagaaatttgcacctaagaaacagggcgatggtggtaaggacctccc

SEQ ID NO: 193051 - DNA, 117 bp, Homo sapiens
tctgctgctaggtgtaaacctgttttttttcaccctgacttgtggaaccaatcctgaaaggggagtgtgtttgcctacagtgtctctctggatcctctttgtttatattgaagcagc

SEQ ID NO: 193052 - DNA, 99 bp, Homo sapiens
tgttagagggatccgtggagaggaggccaggacacctggaagccgggaaatggatggtccagcagtttggggtggattttgagaagaggatcgagggct

SEQ ID NO: 193053 - DNA, 100 bp, Homo sapiens
tgtcagtgttctcaactcccacacacaggatgtcaagcatgtggtttggcacccaagtcaggagcagcagtgttgtactgctacttctataaacggacag

SEQ ID NO: 193054 - DNA, 75 bp, Homo sapiens
ctgcggtggcgtctccacacgttggctcctgtgcctgtgccggctcctgcaaatgcaaagagtgcaaatgcacct

SEQ ID NO: 193055 - DNA, 100 bp, Homo sapiens
ggccgcccgcgctctctacaccaagacctgcgcagccgccaacgaggagcgcaaaaagtgcacagttggcgggcagctcccaggtctccatgagtacggc

SEQ ID NO: 193056 - DNA, 129 bp, Homo sapiens
ctggaggacctcttcaacttctgctccaggaaattcagcctcaaaaccgtcctgctgcttgctgaccaaatgcacccagtcagcttgaagagtttcaaatggaccctaccactgagaaatcaagatggc

SEQ ID NO: 193057 - DNA, 82 bp, Homo sapiens
gaggggtgccagtccagccctagccaccaggaacctggaaccctgcaggactgcctccgggcctgccaggagcagatcgaag

SEQ ID NO: 193058 - DNA, 82 bp, Homo sapiens
aggaacgtgacagtcttatgtgtttggaaaattgggccgatttccacctatgatgcatcatcaccaggcaccctcagatggc

SEQ ID NO: 193059 - DNA, 98 bp, Homo sapiens
tttgggcgtcccattgccatgatggtaaaacttcaggagattttcaagacattttacctaggcaaacatagtggcaggaaacttcagtggcagtcaac

SEQ ID NO: 193060 - DNA, 75 bp, Homo sapiens
ccctgtccagaaaagctgccttatatgcacattgccaatctagctgatgaattcaaggatcacttggtgcctgac

SEQ ID NO: 193061 - DNA, 75 bp, Homo sapiens
gccagctccgcgtgctcctcgccttcagacggtgaaaggtgtagcagtcactcggcctacacccacagcatcgac

SEQ ID NO: 193062 - DNA, 50 bp, Homo sapiens
gttgaagattgtgaagcaatagcctaagagtcaagggtccagagaaggag

SEQ ID NO: 193063 - DNA, 100 bp, Homo sapiens
tgttcacaataacgtcacttcaatccagggcattcctggattggctagtggtataattacagaatcaggaaacccaggcccaacggcaggtggatgcaag

SEQ ID NO: 193064 - DNA, 75 bp, Homo sapiens
tattctccgtactgatcactacatcatgtctcttcaggacagaaagtcatgttctatgtctcctcaggacacagt

SEQ ID NO: 193065 - DNA, 75 bp, Homo sapiens
ggcaagattgggatatttgagagtccaactggcactccgtcatggaaatgatgagtcagaagattcagcagctca

SEQ ID NO: 193066 - DNA, 111 bp, Homo sapiens
cttctggcgctgccgcccaccttgtggccctgggctttaccatctttgtggctgtgcttgccaggcctggctccacctcctgacaaggtgatccgggcgggccccgcagga

SEQ ID NO: 193067 - DNA, 98 bp, Homo sapiens
ttgttggtgcttcctcatgtattgaagaattccaatcccagttcatttttgataaagatgattcagttgatgctcaaaatatttgtcatgtgtggcac

SEQ ID NO: 193068 - DNA, 102 bp, Homo sapiens
tgcccttattgctatgggggaggagattggtgcagagatggcattacgaacctttggccacttggtcttgggtggtgcctatgatgagttcatctttgctcc

SEQ ID NO: 193069 - DNA, 89 bp, Homo sapiens
agttaatttccactggcaagtttcagagatattggacagtgaacagcagagaatttcaaaggaccttgctaatatctgtaagacggcag

SEQ ID NO: 193070 - DNA, 101 bp, Homo sapiens
cagatgttttcccattgttcaaggacaaaggtggcccagaattttccagtgccctgaaaaataaataactgaagtgaagtgatggactccgatttggagag

SEQ ID NO: 193071 - DNA, 100 bp, Homo sapiens
gcagctggacagctagctgatgctttatctcagtttcatgctgccgtagataagctgtcattggaaggaatagtggtacaaagagctgaatgccgaccag

SEQ ID NO: 193072 - DNA, 75 bp, Homo sapiens
gagaggagtcttctggtgcagtcttattttgaaaagacacagggaatatggaggttctgcacctgtatggaagtg

SEQ ID NO: 193073 - DNA, 83 bp, Homo sapiens
gttggagcctgaagatggcacagctctgtttgggccccatggtatccctgtgacagtatttcccaaaagggaatataaggata

SEQ ID NO: 193074 - DNA, 102 bp, Homo sapiens
gatataccaggagttggtaacatccactcaggacaacgtggatctgggagagctgatgttttccctgtgctatcttccaacggctggcaggctgaccattac

SEQ ID NO: 193075 - DNA, 100 bp, Homo sapiens
taacatcaggattccagagctggtgcaaaggatagaaaaatgccatatagaagatttggactttgcagttatggctgattgtcctcacacaattggtgtt

SEQ ID NO: 193076 - DNA, 90 bp, Homo sapiens
agccgcgtgccgcgcctgcggagccaggagggccagatctactgcggcctcacaacctgccccgaaccaggctgcccagcacccctcccg

SEQ ID NO: 193077 - DNA, 75 bp, Homo sapiens
cgaactccaagggacgacgctcgcggaagcagaggtttggggtactccaaagattcaggtttactcacgtcatcc

SEQ ID NO: 193078 - DNA, 100 bp, Homo sapiens
caagaaccaacccccaaattggctgggacagggaaaacaaagtgcatgatgaagtcttcagactgtgtcataaagcatgctggtgtatacagtactggcc

SEQ ID NO: 193079 - DNA, 82 bp, Homo sapiens
aacgactacaaaatattgaggcccacttgcggttacagacagctctgaggatgaagtggatgtgcttttacatggaactcct

SEQ ID NO: 193080 - DNA, 103 bp, Homo sapiens
ctggagcctcagttggaagcagccgatccagcctgcggagcctgtggggcaggagccttcacgtaaatgggtccagtcatgcctcccagtaagaagccagaaa

SEQ ID NO: 193081 - DNA, 90 bp, Homo sapiens
ctccatggtgaagtataggctgaggctacctgtgaacagtacgcagtgaatgttggcattatgctggtctatgacatcacaaatgaaaaa

SEQ ID NO: 193082 - DNA, 80 bp, Homo sapiens
ttctagacgacaaaatgcaaaaaaggaggccaaagactttatgaaacagtccatggaagaatttcgaagccttgcttctc

SEQ ID NO: 193083 - DNA, 73 bp, Homo sapiens
catggttccctggcccgtgctggaaaagtgagaggtcagactcctaaggtgaccggaatgagaagatgaaaaa

SEQ ID NO: 193084 - DNA, 100 bp, Homo sapiens
gtaccagcagggcgttggctatgtgcccatcacaggcccatggacagaccttcacgttcccagatctgtttcccgagaaagacgagagccctgaaggcag

SEQ ID NO: 193085 - DNA, 100 bp, Homo sapiens
cgaggatctggaggcacagctgcagtctgacgagagggccttgaaaagatcttttgaggtcgaggaggtcgagacacccaactccaccccaccccggagg

SEQ ID NO: 193086 - DNA, 75 bp, Homo sapiens
tctgtccttattatcggaccccgaggatcaggaaaaactatggaatttcttcacatggctcctggagaagtgacc

SEQ ID NO: 193087 - DNA, 75 bp, Homo sapiens
accctcccctgcctccgaggcctgtacgaagatgccctggtgctcctgctcacagaggtgttgaatcgaatccag

SEQ ID NO: 193088 - DNA, 99 bp, Homo sapiens
agcaggaggaattgctggtgccttcattcatgaaaagcatgcccatacgattaaacctgcagaaccatggagtctggcagtaccgccgccagtgaggag

SEQ ID NO: 193089 - DNA, 115 bp, Homo sapiens
gaaggccgggacccggttccccggcccacagtgggggtgtgcaaacccgagagaactgggtattggcaagcttgccagtgtacctgctggtggggctgtagccgtctctgctgcc

SEQ ID NO: 193090 - DNA, 82 bp, Homo sapiens
tcggctgcgggaaatcgggctgaagcgactgagtccgcgatggagaataccgtagcagtaggcaggacagttccaattcaac

SEQ ID NO: 193091 - DNA, 100 bp, Homo sapiens
ttggagccaagaaatgagtataggtgtcatggagaaactccagctgggcccagagattctgcagcgggaaaatccaaggcttatttatgccaggctgagt

SEQ ID NO: 193092 - DNA, 98 bp, Homo sapiens
caagataatgaaagaattggatgaagagatcacacaggccaaaaaggctatgtgaaaaggaccttgtcaatttgtgattgtagcagctggttcttttc

SEQ ID NO: 193093 - DNA, 87 bp, Homo sapiens
cacgaaagccgccaggaaaagcgctccctctaccggcggggtgaagaagcctcatcgctacaggtggtatagttagggtcaaagaac

SEQ ID NO: 193094 - DNA, 100 bp, Homo sapiens
tccctctctgttttgtctgtgtgcacagaggaatcatcacctccaaatactggtcccacggtgtgatccctcacatccacaaatctctgattggaaagaa

SEQ ID NO: 193095 - DNA, 100 bp, Homo sapiens
tcctcctccagttaccaccctcctccctagcataaaaataactgaagtgaagtgatggactccgatttggagagtagtaagacgtgaaaggaatacactt

SEQ ID NO: 193096 - DNA, 96 bp, Homo sapiens
ataagaagaacaaactgacgcagagtaaggaggtgttcacagaactgcaggagaagtatggggagattgaagagatgaatgtgtgcgacaaccttg

SEQ ID NO: 193097 - DNA, 100 bp, Homo sapiens
tgctgagaaactgatgaagctgcagaaccaacgaggtggccgaatcttccttcaggatatcaaggttccagcaacagatagaaatgctttaagttcactc

SEQ ID NO: 193098 - DNA, 100 bp, Homo sapiens
ggaaaaggctataccaaagaccaagtagatggagttctcagtgatctagaacaacttcgaaaaatcagacgacgaagtccccatgaagatactgagtctt

SEQ ID NO: 193099 - DNA, 75 bp, Homo sapiens
ccaaaccattactgatgatgtggaggttaacagctatctttctatctttgtagaatttgatggctgtaactggaa

SEQ ID NO: 193100 - DNA, 100 bp, Homo sapiens
tgatgtaaaatcaacagcatttaccttccggtcttccaaggatgaggattttgtgggtcgggatgattttgatgatgctgaccagctgaggataggaaat

SEQ ID NO: 193101 - DNA, 50 bp, Homo sapiens
cgaggaggtgcgcgagaagtacaaagagctcaggccccggggcctccagc

SEQ ID NO: 193102 - DNA, 82 bp, Homo sapiens
cccgggacgctgcccacggcgtccccggtcgcggctggctgcaggagctggcccgccgactggagactccctactacctggt

SEQ ID NO: 193103 - DNA, 80 bp, Homo sapiens
ttgcccatcttatatagcaaaagatttgatgaaagtacttcagggagtcaacggtgaggaggagatgttaaagtaaccca

SEQ ID NO: 193104 - DNA, 99 bp, Homo sapiens
gttgagtctctcctgcgccgagccttcggggcgatgtgtagtgccttccatagggctgagtctgggaccgagattttatcatgtgggcaacctgctgca

SEQ ID NO: 193105 - DNA, 75 bp, Homo sapiens
aactgcttgaacatcctttgactggttagccagggttacattccgaaaagcaaatgggagatggacacatctgag

SEQ ID NO: 193106 - DNA, 97 bp, Homo sapiens
ccaaaacagttcattcatattcagcgtttatcatttaaaagtgcctgtgtgaagtcacttttgctggaaaactgcagcttgggagctttctttgtat

SEQ ID NO: 193107 - DNA, 83 bp, Homo sapiens
tcatcacctcctgggatcagatgtgcattgaggaggaagttaacatccctaataggagggttctggttactggtgccactggg

SEQ ID NO: 193108 - DNA, 74 bp, Homo sapiens
ccatggtgcagttccaccggcaccatggccaggagggctccatcctggtaactaggatttctacctcaaccgcg

SEQ ID NO: 193109 - DNA, 101 bp, Homo sapiens
gggggagcatgctggagccggccctggaggacagcaggacaagatgaagctcatcatcctggagcactattctcaggcgagcgagtgggcggctaaataca

SEQ ID NO: 193110 - DNA, 82 bp, Homo sapiens
gcaccaggctctgcagcggcaacccccagcggcttaagccatggcgtcaaaatgcagatcttcgtgaaaacccttaccggca

SEQ ID NO: 193111 - DNA, 75 bp, Homo sapiens
ccagttcgtctgtggggaccgcggcttctacttcatgagtgagatcattggccgagacctgagtggcttccctgc

SEQ ID NO: 193112 - DNA, 100 bp, Homo sapiens
aaaaactgacactcgattcagctattggaaagtttttttaatgtggttggaacaactgagattggtccagaaaagggcgtggtgcacctggcgacagcgg

SEQ ID NO: 193113 - DNA, 75 bp, Homo sapiens
ccggagcaagcggagctcccccaagagccggaaagcaattaccagctctggctgggtcgccacaacttgtttgac

SEQ ID NO: 193114 - DNA, 83 bp, Homo sapiens
accccgcggagacccttcgagaaatctcgtctcgaccaagagctgaagctgatcggagtcaaattgactttatcagctttaat

SEQ ID NO: 193115 - DNA, 100 bp, Homo sapiens
tccagtggatttccttgcggaaaggatgttggcggtccctgtgacctgtggagacacggccagatctgccctccagttcggctttagagtgtggtgaagg

SEQ ID NO: 193116 - DNA, 80 bp, Homo sapiens
aggaaagtcaatcgtaggaagaacacagtacagttccagtgtctcgccccatcctcaccctcagggttcccagggcccag

SEQ ID NO: 193117 - DNA, 97 bp, Homo sapiens
cctgcctcccagagaggggagccggcgaggatcaaaatcttcgaaggagggtgtcatggagaaactccagctgggcccagagattctgcagcgggaa

SEQ ID NO: 193118 - DNA, 83 bp, Homo sapiens
caaggctctgtcccacatataggtggattaactgtctggcaaaggcaggtgcttatggaaactctgggtgctctgggggccca

SEQ ID NO: 193119 - DNA, 100 bp, Homo sapiens
agtacgcctacttctataaagtcatccagatgacagcgcttctgctgcaagtagcatggaggtgacagaccgcattgcttcactggagcagagagtccag

SEQ ID NO: 193120 - DNA, 75 bp, Homo sapiens
tcgggccggctgtcctggcgcggtacaccaggggttggaaaaaccacactaggcaaagaacttgcgtcaaaatca

SEQ ID NO: 193121 - DNA, 75 bp, Homo sapiens
gccgcctcagccatggacgcgtccctggagaagcttcgtgctgaacctgggcaaagacagcaacaacctgtgcct

SEQ ID NO: 193122 - DNA, 98 bp, Homo sapiens
cttcgccatcgccagcatcgccaacccggactggatcaacaccggggagtctgcgggtttgcaatggtctggagcagccaaggaagcagcagcgctct

SEQ ID NO: 193123 - DNA, 125 bp, Homo sapiens
tcgcgcccgggaggaaggaacgaggcaaggagctaaagcagcgtgcgttcagccctggggtgagaagccctaccactgcaactgggacggctgcggctggaagtttgcgcgctcagacgagctca

SEQ ID NO: 193124 - DNA, 78 bp, Homo sapiens
tttaagtaaaaattttcagaagcacatgtattataacaggtccgcccgtctgcgcccctcacaggaagccggagggtc

SEQ ID NO: 193125 - DNA, 51 bp, Homo sapiens
gacatctttacccgactctttcaggacctagatgtgaaggctggtggaggc

SEQ ID NO: 193126 - DNA, 75 bp, Homo sapiens
gtaggagaagttccaacgtgtcctacaaatactcaaagggtttttaatgaccacaacaagcaagcatgcagctta

SEQ ID NO: 193127 - DNA, 100 bp, Homo sapiens
accatttgggatcacttccaacagtgacgtgttctccaaataccagctcgacaaagatggggttgtcctctttaagaagaaaaagcttgtggtgaagggg

SEQ ID NO: 193128 - DNA, 75 bp, Homo sapiens
gccactccagaaatccaggagattgttgataagatactggtagacacagtctgggccctctcttaccttactgat

SEQ ID NO: 193129 - DNA, 100 bp, Homo sapiens
cttggcagctcggggagtcctaccctatgtgggcaacctcatcaccaagagctcgtgagcctgcaggtcctggatcaacacccagttgggacgagtgacc

SEQ ID NO: 193130 - DNA, 100 bp, Homo sapiens
tggctactatgctgaacggtgcagcagtgatggatgcagctcttctgttgatagattctggcagccaggaggtgctgtctgaattgagagtactatctca

SEQ ID NO: 193131 - DNA, 100 bp, Homo sapiens
gattcaaacaaccaaccctgatttcctgcttctccttttcatgagtgttcctgtggtctctgcacctcctttctgatctaagcattgaagaacagtcaga

SEQ ID NO: 193132 - DNA, 51 bp, Homo sapiens
gttcagcaggtcctgttggagatgatagatgaaaactttcggaagagaaag

SEQ ID NO: 193133 - DNA, 100 bp, Homo sapiens
gccgctcttccccacctgcccggtgcccgaggaggcagccaagctcgtggcctgcctctgcgtgcgcgggaggcagcaccgggctcttgatggacttggc

SEQ ID NO: 193134 - DNA, 100 bp, Homo sapiens
ggaacagcgagctgtttgacccctttgacctcttcgatgtgcgagactttggaaaggacggggaggtttactgcatcgacgcgcggttctacgggaacgt

SEQ ID NO: 193135 - DNA, 75 bp, Homo sapiens
gaggctgcctcggcggagcagaggaaccacacgctgatcatgaaatgaaagctcattagcatctacactgaagac

SEQ ID NO: 193136 - DNA, 98 bp, Homo sapiens
gcagcctcaacttcttgtcctcaagtgatcctcccaccttagcctcctaagtagctgggaccacaggcaaccatcggcttgatcaggaatctggccct

SEQ ID NO: 193137 - DNA, 83 bp, Homo sapiens
cttggactgagtcctgcaggacacagcctggtctgccacctcagaacttttcaatgtctgtcacagttccagtgaccagcccc

SEQ ID NO: 193138 - DNA, 75 bp, Homo sapiens
gttactatggaaactgccgttctctcctgactctatcaagaagaatatctaatccgtaccttgaacatacgcctt

SEQ ID NO: 193139 - DNA, 134 bp, Homo sapiens
ggctgcgagagtggcagaggagctggcggagagcggcctgcgggcgatcgggccgagggtcccgacggcctacacatggggcgctgtgggcgccgtggggctggtgtgggccaccgattggcggctgatcctgg

SEQ ID NO: 193140 - DNA, 98 bp, Homo sapiens
tacagtattttgcagagcatcccccaaagacagattgaagaaatgcagagacaggctcctgcaggagatgggtcacagacccgagggaagatgtctga

SEQ ID NO: 193141 - DNA, 88 bp, Homo sapiens
gagctccaggagttcgtctcttacgtctgcggaagtgcagctgcctcagttcttagcgcagggctctctgtcccgccgactcctgccc

SEQ ID NO: 193142 - DNA, 50 bp, Homo sapiens
cagagaacatgctggctacaactaatgcctaaagatattggaagacctaa

SEQ ID NO: 193143 - DNA, 82 bp, Homo sapiens
gccggcgaaagctggtgaggctgggctgcggtggagcctcggcagagggaacggattttttatcaagcagaaatgcatcgaa

SEQ ID NO: 193144 - DNA, 83 bp, Homo sapiens
ggaatacctggcattgacctctcagatcccaaacaactggcagaatttgctaggcgtctgcggtgttgctgtgggctaccccc

SEQ ID NO: 193145 - DNA, 100 bp, Homo sapiens
gtggtcgcgtctcggaaaccggtagcgcttgcagcatgcgacagggtctcactgtattgcccaggttggtctcgaactcctggcttcaagcgattctccc

SEQ ID NO: 193146 - DNA, 90 bp, Homo sapiens
cggagccatgaggatccacagtaaaggacatttccagggactttttttatgaagacatggagtccttgacgcagatgcttagggccttgg

SEQ ID NO: 193147 - DNA, 83 bp, Homo sapiens
ctgacgtggcttgaattgggaggggggcagctggagcctcaggcggcagcgcttctaggatttcttacaatctccagctacaa

SEQ ID NO: 193148 - DNA, 98 bp, Homo sapiens
ctggaacttctgcccagctctccttgacaagttggatggcttgaggactggtactaaaaggaaacgtgactgggaggccattgccagcagaatggagg

SEQ ID NO: 193149 - DNA, 96 bp, Homo sapiens
ggaggctccaagacctcatcaacaattaagagccagccccagtgcctgctgagccgtttgacaacactacctacaagaacctgcagcatcatgact

SEQ ID NO: 193150 - DNA, 100 bp, Homo sapiens
tctccagcgggcctggactgtgggctggtgtgtggaactggcttatttgcagctgggtatcaatgaaaagttaggactctctggaaggccagacaggccc

SEQ ID NO: 193151 - DNA, 90 bp, Homo sapiens
aatatcttggctcacgtatttaagagcctgaatattccagggtcttgctctatcgcccaagctggagagcagaggcatgatcacatctca

SEQ ID NO: 193152 - DNA, 50 bp, Homo sapiens
ctgagaattgtgtggccaaaggagtggagcttggtttcgggatctcggtg

SEQ ID NO: 193153 - DNA, 78 bp, Homo sapiens
aagatcttgtctcgctggcctgcgacccagccagccagcaacctggaccggcaagtgaaccggagcaaacgacttccg

SEQ ID NO: 193154 - DNA, 90 bp, Homo sapiens
ggtctccgacgtgttgggctatgtgcacccggacctgctgaaagcattggcatcaacaaaagtcagaattcccgggaacttgaacagagg

SEQ ID NO: 193155 - DNA, 90 bp, Homo sapiens
cccccagaaagcaatgataattcccaggacagtcagtctggtactaacaatgcagatgcagacagacatgctgaactatctggaagtcca

SEQ ID NO: 193156 - DNA, 100 bp, Homo sapiens
gcggtaactaccccggctgcgcacagctcggcgctccttcccgctccctcacacaccggcctcagcccgcaccggttatgaaggacagaatctggcaaag

SEQ ID NO: 193157 - DNA, 74 bp, Homo sapiens
ctttcgggaattcacagtctgcagcattgacaggtccggtggtagaacaggcagtgagaggccttgttcttgtt

SEQ ID NO: 193158 - DNA, 91 bp, Homo sapiens
ggaccagagagtcaaatcattcctgtgatgccagaacaaatcacctgctgcagtaacagaaccagagacaaataaatttgatagtaccgga

SEQ ID NO: 193159 - DNA, 98 bp, Homo sapiens
cccgctgcactcacagggaggaggaggcggcagcggcggaggaaggcggcgcaccccgagaggtagttagaaacaaacctgtggcaaggcaggctcct

SEQ ID NO: 193160 - DNA, 100 bp, Homo sapiens
ccgaagttctacgtggccctaacaggcacttcctcactaatatcagggcttattttggtgttctgttatgccctgagcccagacgatggcacaaacttcc

SEQ ID NO: 193161 - DNA, 100 bp, Homo sapiens
agagcctagatgagctcatacagattgatgacattgtaaaagctgttggtaactgcagctacaaccaactagtggagaagatcatctcttgtaaacagtc

SEQ ID NO: 193162 - DNA, 74 bp, Homo sapiens
gtttgaacctcattcaggggaagagtacactcgagatgaaggagaacggtgagctctgcatgaatagtgcccag

SEQ ID NO: 193163 - DNA, 51 bp, Homo sapiens
caacgtgggccttatcacactggctaacttcactcctgaagccagcgagac

SEQ ID NO: 193164 - DNA, 75 bp, Homo sapiens
ggaaggacaggcagagctaaacaagatgaatatttcccccgcttccctcgccagtctttatgaggaagacttcaa

SEQ ID NO: 193165 - DNA, 75 bp, Homo sapiens
agaaagacagctttgtggaagaggcattttgttcccaacatcacctttggtcaccctgtggtagaaagccttcga

SEQ ID NO: 193166 - DNA, 100 bp, Homo sapiens
ttcaagtgtttcactcctaaaggttcatctctcaaggttgcccccaagtttcctggcagtgtgtgatactgaggaggtgagcttgtttctggagctgtgc

SEQ ID NO: 193167 - DNA, 100 bp, Homo sapiens
ttgaaaccacagaagaaagtttgaggaactactacgaacaatggggaaagcttacagactgtgtgggagacataagacatcagtcagtacatgtgaggtg

SEQ ID NO: 193168 - DNA, 90 bp, Homo sapiens
gatttcttaaggaaacggttgcagaaaggggtatttaccaccagagtgttttgtggttgggaaagaaccaccaaagatctcaaataaagt

SEQ ID NO: 193169 - DNA, 130 bp, Homo sapiens
cgaaggatccggggatgggcagcgccacccggcccgctccagagtcagcatgggccccagtgcagagagcccacggccatccagtgcctacaatggggacctcaatggacttctggtcccagacccgctc

SEQ ID NO: 193170 - DNA, 100 bp, Homo sapiens
tgacttgaccatcatccagactacacagggcaagtgtccagagaatggctgggatgaaagtacacttgaactctttttacatgaacttgcaatcatggac

SEQ ID NO: 193171 - DNA, 51 bp, Homo sapiens
aacgcggctcccagccacaccaagttcagattagcctgaggcctgctcagt

SEQ ID NO: 193172 - DNA, 51 bp, Homo sapiens
gaagccttacagagtgaaaaatcacggaaaatgtttcaacgtgcgcaagag

SEQ ID NO: 193173 - DNA, 82 bp, Homo sapiens
cgagcgggtgcgtctgccgcagagtcggcacctgaaggacatggagagtctcactgtcgcccaggctgcagtgcagtggtgc

SEQ ID NO: 193174 - DNA, 75 bp, Homo sapiens
agaggatggaagttcaaaggaggaggatgatgcagcatccaacgagcaggggagagaagacagaagaggttggag

SEQ ID NO: 193175 - DNA, 100 bp, Homo sapiens
ggctgctttacggcaacagagtgaaggatttggttcacagagaagcagacgagttcactagacaagacatcccagttaccagtgtccttgaattgatagt

SEQ ID NO: 193176 - DNA, 75 bp, Homo sapiens
ttggaaagacgctcgtcaccaggacccaaggaaccagatatgaattgtctcccacggcagcagctaacttcacac

SEQ ID NO: 193177 - DNA, 98 bp, Homo sapiens
ctcgagtcttctttgacgtggacatcggaggggagcgagggattcgataaacaagtggatgtgtcatatattgccaaacattacaacatgagcaaaag

SEQ ID NO: 193178 - DNA, 74 bp, Homo sapiens
cttcacctagaactcccaacgggtcaacaaggaggtaccagaaaactgtggaatatgatgctgtggctgagaaa

SEQ ID NO: 193179 - DNA, 82 bp, Homo sapiens
cgcgaacccctctgggatccccgccgctctgtctacaacccgagacgaagttatacggaagcgtctcctcattgatggagat

SEQ ID NO: 193180 - DNA, 89 bp, Homo sapiens
cccgaaaaactgattgactgggctggcgttaactgtgcggaggcagacccgaaatcccatggttcctacagattcctggctccatggat

SEQ ID NO: 193181 - DNA, 82 bp, Homo sapiens
cagctctgcggctcgggccctgaggagcaggacatcgagactttacatggctctgttcacgtcacgctgtgtgggactccca

SEQ ID NO: 193182 - DNA, 100 bp, Homo sapiens
ttcacgaaatcctgtgcaagctcagcttggagggtgatgtctgtacctcctgcgttcccaacagggagtacgtgcgggtgttcgatgtgacggagcgcac

SEQ ID NO: 193183 - DNA, 96 bp, Homo sapiens
ttttgccggaggagcccctcaggccatggcgggtgaaaaagttgagaagccagatactaaagagaagaaacccgaagccaagaaggttgatgctgg

SEQ ID NO: 193184 - DNA, 100 bp, Homo sapiens
aatctacacatcctttgcttgtggctgaggaacaagtgcttcttaacctaccagtcctgccagagtttgatatatagaaggtgtttgctccatgacagca

SEQ ID NO: 193185 - DNA, 100 bp, Homo sapiens
gaggaggagatggtggaggaggctgaagggctactacaaagttctgggaaagggaaagctcccaaagcagcctgtcatcgtgaaggccaaattcttcagc

SEQ ID NO: 193186 - DNA, 101 bp, Homo sapiens
gcatcgttcctgaggaagaacaagcagctaacaaaggcgaggagaagaaagacgacgagaacattccgatggagacagcatttagcagaagagaaacctga

SEQ ID NO: 193187 - DNA, 51 bp, Homo sapiens
agcagctttgcgggccctacaagatcaggtggccatcaaagtgattccccg

SEQ ID NO: 193188 - DNA, 98 bp, Homo sapiens
aggtaaagtggataatttatcaagagacagcaacagagattgcacaaatgaactgtctaattcttgcaaggctgaagagatcactttaacaattggcc

SEQ ID NO: 193189 - DNA, 80 bp, Homo sapiens
aatgcggccgcgagaagcagcgggggggcaggcgatcgaagtgaaaatgcctcgtgtaaaagcagctcaagctggaagac

SEQ ID NO: 193190 - DNA, 100 bp, Homo sapiens
ggcttcacttccctcggtctgggcttctctgaggcggcgagagatggtcaggtctggagctcgaccgggccaggatgctaaagagcaggtaagccctttg

SEQ ID NO: 193191 - DNA, 100 bp, Homo sapiens
gggcccgcaagggcggagggggcccgaaggacttcggcgcgggactcaagtacaactcccggcacgaggaactgtggctgcaccatctgtcttcatcttc

SEQ ID NO: 193192 - DNA, 90 bp, Homo sapiens
ggccaacgcagacaccatgaaggtgctgggagtgcagcggcctctcctacaggttttaaaacgaccagaatattttgggaagtttggtaa

SEQ ID NO: 193193 - DNA, 100 bp, Homo sapiens
ggacttcccgtccgcggcgtggagggtacttggaaaaatggacaaggattgtgaaatgaaacgcaccacactggacagccctttggggaagctggagctg

SEQ ID NO: 193194 - DNA, 80 bp, Homo sapiens
gcagttgcagtgttggagctaaaatgagtgaccgaggaggtggcgttcctttgaggaaaattgacagacttttcaactac

SEQ ID NO: 193195 - DNA, 74 bp, Homo sapiens
attctacccaagtacatatgatttcagctgcaatggcaggcacagaccccacaggctcctcggacactgggtcc

SEQ ID NO: 193196 - DNA, 98 bp, Homo sapiens
gaagtcgaagactgcgcgtgctcaggagcgcggagcggcccgctgagcgcagagaatgggtgagaaatcttgaaagcaaagcattgatcccagcacag

SEQ ID NO: 193197 - DNA, 100 bp, Homo sapiens
gacatggccactccagtcggtgttgagcacggcgagcagtctcaggcctttagtgatgatgtggccttcaagtcacaggacgcagcgattccctgccctc

SEQ ID NO: 193198 - DNA, 50 bp, Homo sapiens
ttacaagccagcctctgggaccgagtgtgtgcaggaacggagaataaact

SEQ ID NO: 193199 - DNA, 75 bp, Homo sapiens
ctcctacctccttctgcttcgggactggagactgatgcatgagggggctacggaggcgcaggagcggtggtgatg

SEQ ID NO: 193200 - DNA, 83 bp, Homo sapiens
attccggcgggaactcgactcttggcgccaccgcctcatgcactgtgtagaaacttgaggagaggctggagttctggatggag

SEQ ID NO: 193201 - DNA, 110 bp, Homo sapiens
aggaagtgcgttccctactctcgcagaaggagaacatcaatgtgctggatccagtttgtgtgttctctgtgcaaataccggaccttctatgaggacgagatggccagcca

SEQ ID NO: 193202 - DNA, 80 bp, Homo sapiens
tgaacccaatcttgatgctttaatacagaaccagcatacactggtgaagacatttgaagtatgtgatcttcctgttcgag

SEQ ID NO: 193203 - DNA, 76 bp, Homo sapiens
aagcagatgctccagtttgagaaacctggatctgcgatctgtttgtgggacacggccaacacggtgaaggaaaagt

SEQ ID NO: 193204 - DNA, 75 bp, Homo sapiens
ggcaatggctgcgggcgcagcaacgagcggagttcctgcgagctagagtagagacgggggttcaccatgttagcc

SEQ ID NO: 193205 - DNA, 100 bp, Homo sapiens
gggctggtgaagtacatgaactcagggccggttgtggccatggagaccagccactaactggggcgtacacagtgaccctggatggacgagggccctcaag

SEQ ID NO: 193206 - DNA, 115 bp, Homo sapiens
acaccggtaaagaagggaaaagctctcatgggtgtccaattgctaagtggctgcactgggtgttcaacagccatcactccttggagcatctcctaccatttatacacagcaaact

SEQ ID NO: 193207 - DNA, 100 bp, Homo sapiens
aagacaggtgtgcgtcatgcacttgaagcacctgaggaccctgctgagccctcaggctgcgggcctctcgggtgcttcttgtcggcttgaaaggacttgg

SEQ ID NO: 193208 - DNA, 82 bp, Homo sapiens
atccagccttagcaaaccagagatggtggaagagagtgaagagcggctcacggaggagcagattgaagctcttctccacacc

SEQ ID NO: 193209 - DNA, 97 bp, Homo sapiens
gtaagaataatgaaggttttgaatcatcccaacatagtcatgatgctatggactcctactacgactacatatgggatgttaccattttggaatactt

SEQ ID NO: 193210 - DNA, 98 bp, Homo sapiens
tgaaacagttcctggaaactgccattaacctccagctttttaagcagctctttccaacaactgatcctgtgggtactttgctccaagttccagaacag

SEQ ID NO: 193211 - DNA, 87 bp, Homo sapiens
cttcgagtgacccgggtgccgaggagcgggaagagttgctggggagcatcagatccatgctgctgctgactcggagccccacagctt

SEQ ID NO: 193212 - DNA, 100 bp, Homo sapiens
gccaacatgaatgtggtggaataagtgctagtatcggacatgatcctcatcttttatacactcttagtgctgtccaggaagtggatgctttggaagaatt

SEQ ID NO: 193213 - DNA, 101 bp, Homo sapiens
gcagcggacagctcggacagcgcccagggccggagcccgagcccttggagaaccttcgagatctgcggtctggggtctggttgaaagatggcggccctcac

SEQ ID NO: 193214 - DNA, 74 bp, Homo sapiens
gaaataattgaaaaccgggtggaatctgcagaaatagaagagctttttagaaaagttcgaagtatcttaaataa

SEQ ID NO: 193215 - DNA, 100 bp, Homo sapiens
cgctgctcctgctgctcatcccggtggccgccgcgcaggagcctcccggagctgggtctcggattgcgagctggctgccgagtttttcggttgaagtgat

SEQ ID NO: 193216 - DNA, 50 bp, Homo sapiens
atgttgccctgagttacataaataggtgctggagaatctggtaaaagcac

SEQ ID NO: 193217 - DNA, 75 bp, Homo sapiens
gaggcgccgctctagcggccgggactctgaactatggcgagttttgattcatcatggataatctgtcatcagaag

SEQ ID NO: 193218 - DNA, 100 bp, Homo sapiens
gaatgacagcttttgtgagaaaattttgccgtggttggacaaatcagtagatttcattgtaccatggggcgcaagttggaccctacgaaggagaagcggg

SEQ ID NO: 193219 - DNA, 85 bp, Homo sapiens
gttatcttccgactgatccagctggtggtcctggtctacgtcatcgggtcagcccaaggccaaccccactgtcactctgttcccg

SEQ ID NO: 193220 - DNA, 51 bp, Homo sapiens
tggagggcctcgccatgtcctgctgcccgacccattttcaaagatactcaa

SEQ ID NO: 193221 - DNA, 82 bp, Homo sapiens
gttggaacctctgacaagaccaagtactaccttcaagttacgtgttaaatgaatcccagagtcgccaaaattcatcttcagc

SEQ ID NO: 193222 - DNA, 75 bp, Homo sapiens
cacctggcgacccttcccctccagtcacctggacgttccatcctcagagcagcctgaactgttcctaaagaaact

SEQ ID NO: 193223 - DNA, 100 bp, Homo sapiens
gttcacttacgcctctcaaggagggaccaatgagggaaatcagtcagcttggtttacagtcgtggcttccaacatcctccctgtgcatatcacctccttg

SEQ ID NO: 193224 - DNA, 50 bp, Homo sapiens
ctgagttttgactagcggaagaaaagtgctcaagtaaagctctttgtgac

SEQ ID NO: 193225 - DNA, 75 bp, Homo sapiens
ctgtctgcctgtgtccctgaccatggctccctgcagtaccctttaacggatacaatgtctctttgctatatgacc

SEQ ID NO: 193226 - DNA, 82 bp, Homo sapiens
tttgttcaatgagaaggccacattattactggaatccagatgacatgaaaatggagactgatattaagagaaacaaaaagac

SEQ ID NO: 193227 - DNA, 75 bp, Homo sapiens
actgcgctttctggctgaggaggatttccaaggtgcaattggcagacgctggcatcttcacctgtgtggccgcaa

SEQ ID NO: 193228 - DNA, 75 bp, Homo sapiens
catccttcctacatcagcaacaggcaagacatctgtatagattctgcttcatccgtgagagagaataagcaacct

SEQ ID NO: 193229 - DNA, 100 bp, Homo sapiens
gctaccgggcccagcacagccagcaccgcacgccctgcaagggagagtcaagaaacccccccttcttgagctatttacagcttttaacaattgagtaaag

SEQ ID NO: 193230 - DNA, 100 bp, Homo sapiens
tctcatcgtccctgccaactttccaagtctggggatggccaggctcagtttatgaacctcttaaaagcattaatcttccaagacctgataatgaaactct

SEQ ID NO: 193231 - DNA, 102 bp, Homo sapiens
ccagggctggagacaaggagctacagctaaaggtgtgggctcccgcctggatggtcttcgaaaccggggcccaggttgcacctgggattctctacgaaattc

SEQ ID NO: 193232 - DNA, 100 bp, Homo sapiens
cccctcggccccgcgcccgcccaggggtcgctgtcgcctgctgctggctcctcactgtgttctaagaacggaagcatctgggctggatggaatttagcat

SEQ ID NO: 193233 - DNA, 82 bp, Homo sapiens
cccgcggtccccgctcttgctggtgacttaagagattaaaattaatttggttgctgttggttctgaacaaataatgagttct

SEQ ID NO: 193234 - DNA, 50 bp, Homo sapiens
caggccaagaagcatccgagcaatacagattctgttcatcttgctctgaa

SEQ ID NO: 193235 - DNA, 51 bp, Homo sapiens
caatttatggtggatattttaaagttgaagcttcttgtcatgacggggatg

SEQ ID NO: 193236 - DNA, 75 bp, Homo sapiens
ccgcagtggcgtcctggagccctcctcaggtaaagggagaagatgaggaagagaacaatttggaagtacgtgaaa

SEQ ID NO: 193237 - DNA, 98 bp, Homo sapiens
gccgaacccagtcgcgcagcgctgcagtgaattttccccccaaactgcaataagccgccttccaagacaggtgatttggcttctgcacagttaggagg

SEQ ID NO: 193238 - DNA, 100 bp, Homo sapiens
tggcggccaacgggccaggtaggatttccgggagaggctgctgtggaggctgaggaggcggcggcggagatctggccatgaggagtggaaccagatgcag

SEQ ID NO: 193239 - DNA, 100 bp, Homo sapiens
tgagagatttcatttctgtcctgctgatgaagtctacgttcattcagggcctgctgtggaagaccagccccaaagaccatccttcctgctgctgcccagg

SEQ ID NO: 193240 - DNA, 75 bp, Homo sapiens
aaacgtgaggatcaagaagccggactacaaggtcgcctacgtgcagctggagctgctgctcttcctccagaacct

SEQ ID NO: 193241 - DNA, 73 bp, Homo sapiens
agtccctcgtccagccacccccaggaaggtgtcttgctgcaggtaactaatgaagaagtggtcaaccacagag

SEQ ID NO: 193242 - DNA, 49 bp, Homo sapiens
tgcagaggtgctggagctggcagaaaatcgcgctgcaactcaaagccac

SEQ ID NO: 193243 - DNA, 75 bp, Homo sapiens
cgagcggctgcgggacgcgaggtttccggggcccttaagtgagaagcaggaggctttgatgaccaagagccccgc

SEQ ID NO: 193244 - DNA, 90 bp, Homo sapiens
atctacatggtaggcttggaagaagtcgtacagagtgtcattgacagccaagatcttcctctgatggcgctgcctccatgccatgccctc

SEQ ID NO: 193245 - DNA, 100 bp, Homo sapiens
cgcagtggtcgcttcttctccttgcatattaaagaagacatgtctccctctcagagagaggatgatattctctggaaaaggaagttggccacacctgtca

SEQ ID NO: 193246 - DNA, 83 bp, Homo sapiens
gtcaacatcgcggtcatcaagtactgaacttgctactaccagcaccatgccctaccaatatccagcactgaccccggagcaga

SEQ ID NO: 193247 - DNA, 100 bp, Homo sapiens
tggaaacaccattccagaaaatgggattgcccaccacgataatgcagttcttattactaggttccctacttcagcaaagcgtggcagcgtgtgatacaga

SEQ ID NO: 193248 - DNA, 75 bp, Homo sapiens
acaagtccgacagtgagaatgattaaggcagttgacaatggtcgccctcaaaagtcatcaaccaccagactccat

SEQ ID NO: 193249 - DNA, 82 bp, Homo sapiens
tgatccagaaggagctcaccattggctcgtttggtgccctggttgtcagatgttggaaagcagtaggacggaacatactctt

SEQ ID NO: 193250 - DNA, 96 bp, Homo sapiens
ttctgcggcacgggatggcggaggcgcctcctgtctcagtgggggcttatttggcctccccaggatggactggagcatcagtagtgcccgggttta

SEQ ID NO: 193251 - DNA, 100 bp, Homo sapiens
gctgctgtatcctcagttgactcattcactcaggattccccagctttccgttgcacaaacagtgaagtgacagtccagcccagcccctatttgagttacc

SEQ ID NO: 193252 - DNA, 144 bp, Homo sapiens
ctcatttctattactacctgtggagatttctgcattttggctacaaaagctgatgaaaatcatcctcaggttcaaaccttgtactactcagctgatcacaagctgcttgatgggaacctactagatggacaggctgaggtgttt

SEQ ID NO: 193253 - DNA, 90 bp, Homo sapiens
cagcgatgtttttgctaaaaatgatcttgctgttgtggatgtcagaattggtatgactagtctgcgggccaggcatcgacatccgcaacg

SEQ ID NO: 193254 - DNA, 131 bp, Homo sapiens
ccgtcgagatcgccgccgacgccgctgctgtggccgctgctgctgctgctgctcctggaaaccggaagagagaagggcacagttacctaagtatcaacgtaatcttcctcggccaggacaggcccccatcg

SEQ ID NO: 193255 - DNA, 75 bp, Homo sapiens
gtgcacttgcaggccgggcagtgcggcaaccaaatcggcgccaagatggtgcacacgcttgccagcaacggggcc

SEQ ID NO: 193256 - DNA, 75 bp, Homo sapiens
ctgaatcaaatcagaggcccaagcgtttagattctgctgatgccaaagatgagagtccggagtgttgtcatgtga

SEQ ID NO: 193257 - DNA, 100 bp, Homo sapiens
tagtcaccactgagcctgccatcaatgaaaagtatgatgctgaggcttcattgaggaccctgagaggaagtatcactttgagtgcagcagcgaggagcag

SEQ ID NO: 193258 - DNA, 100 bp, Homo sapiens
tgggaaccactgagaaggaacatgaagcgtcttcctccacttgatgaaggtggacccagactccacctggttcctcctgaacgagctttactgccccgtg

SEQ ID NO: 193259 - DNA, 100 bp, Homo sapiens
tcccatccagggtatgacattgaacttactcatcacgtctctatagtgtcttctgctcgacacttcatgcaccagatcatcacagggatgttgtatcttc

SEQ ID NO: 193260 - DNA, 75 bp, Homo sapiens
cagctctccagtgggacagcgcatcgggtcatatgactgctcctctccaccccacactggcccggggcgggctgg

SEQ ID NO: 193261 - DNA, 75 bp, Homo sapiens
tgacatcgaaaacccggacctcgcttacctgcatgctgggagtgaccttcacaatggcatcataggattcagtga

SEQ ID NO: 193262 - DNA, 51 bp, Homo sapiens
ggagcacgtggcagcgcaggaaacaggctccttcgagagcagtggatccgg

SEQ ID NO: 193263 - DNA, 51 bp, Homo sapiens
gcgtggagatatggcgcaactgcggcgcgcctgaccgccgctgcctacaga

SEQ ID NO: 193264 - DNA, 90 bp, Homo sapiens
tttggggaaatccttcggatggtgaactcattagaaacaacagcagttctgtagagagtttaaatatgaaggaatggcaggacgggctaa

SEQ ID NO: 193265 - DNA, 76 bp, Homo sapiens
gtgccgtagcaacagctctaggactcaatgcattgaccaaggcaaacgaagcggatgctgtgacactggatgcagg

SEQ ID NO: 193266 - DNA, 51 bp, Homo sapiens
ccacccgggagtttgaggaggttgtggccaaggctgcaggtgatgatgagg

SEQ ID NO: 193267 - DNA, 100 bp, Homo sapiens
caacccccaggatgtgacctattttgtggcctatcagaggtacaggtttgcagattccgccagcagcacagcaagctctacagatgagtggctctttggc

SEQ ID NO: 193268 - DNA, 90 bp, Homo sapiens
ctggacctcatgcaccatattcacatgttgactgcttccccacaacaaagagaaatgatggatcaggcagctgctcaattagctcaggac

SEQ ID NO: 193269 - DNA, 82 bp, Homo sapiens
aaaagcggcacgacaacattaaaccatcagatgagattattcagctgattgaaggcaaagcctctgcttatgtatttgcaag

SEQ ID NO: 193270 - DNA, 90 bp, Homo sapiens
gtgctcatagacgaactccgcaatgaggacgttcaggaggaggcctcggtggtaccagaagaggaggggctgatgtgaacatccggcatt

SEQ ID NO: 193271 - DNA, 51 bp, Homo sapiens
cgtcatcacgccctttctcttgctcaaggtccttgaatgggcaagagggca

SEQ ID NO: 193272 - DNA, 75 bp, Homo sapiens
ggaatccttgggacctcttcttttggagtatcctaagaaatccggtaaccaataagaagcattacagattgtatg

SEQ ID NO: 193273 - DNA, 117 bp, Homo sapiens
acaaaattgaatcttcaagggaaaatgtcattgcctgtgatattggaaccttcttacaatcattctatctgaggctgtcagagatgactctggttctgtccatgaatagattctgcg

SEQ ID NO: 193274 - DNA, 75 bp, Homo sapiens
gatgcaccctttttgtcagattatcaggatgagggtatccgttacagcactgatgtgagtgtagatgaagtaaaa

SEQ ID NO: 193275 - DNA, 83 bp, Homo sapiens
tatctggggccaagggacaatggtcaccgtctcttcagggtcctgccctccggaggagcagcctcgaggctggtggttttcag

SEQ ID NO: 193276 - DNA, 74 bp, Homo sapiens
ccgaatagatgggcaggacatttcacagggaggcatgcatctccccatgtgctatgatgctggctctggtgtac

SEQ ID NO: 193277 - DNA, 75 bp, Homo sapiens
gagctgtccctgctggaggagcgcttccggccacttctgccccaccaacgttgggccaaccaaaaggagtcagtg

SEQ ID NO: 193278 - DNA, 75 bp, Homo sapiens
gacttggccgagcggatcctaataaggggaaaatggtggacgacatccttggagaaggcagcgacgacagcgaca

SEQ ID NO: 193279 - DNA, 83 bp, Homo sapiens
agtacctgcagaaggtctctggagacatcttcagcagtggacagtttgcggttgtgaagaaatgccgtgagaaaagcaccggc

SEQ ID NO: 193280 - DNA, 74 bp, Homo sapiens
taagactcgctatatggggaaggacccctttgctgatgcaagtaagggtgatgacctgcttcctgctggcactg

SEQ ID NO: 193281 - DNA, 100 bp, Homo sapiens
agaagaaggcccacctgatggagatccaggttcacggaggccgaagtgatggtgatgggtgacgtgacctacggggcttgctgtgtggatgacttcacag

SEQ ID NO: 193282 - DNA, 100 bp, Homo sapiens
cagcagcagccgccgcaaccacagacgcagcaacaacagcagccggcccttgttaactacaacagaccatctggtgtcatggagaaactccagctgggcc

SEQ ID NO: 193283 - DNA, 82 bp, Homo sapiens
ggaagatggcggccggcgaaaggagctggtgcctgtgcaagttgttgaggcctccgacatccaggcaaggacagtagtactt

SEQ ID NO: 193284 - DNA, 75 bp, Homo sapiens
cgtggaggtggcgaaacgaggaggagataacgcggccttgggctctggacagtcattttgtttactcattcagcc

SEQ ID NO: 193285 - DNA, 75 bp, Homo sapiens
ggacattctgtcttcatggacatttttgaacttgtggtggtggtgaagtttattaagaaggagaaggtcttggag

SEQ ID NO: 193286 - DNA, 82 bp, Homo sapiens
tcgcgctgcactgtctctccgacgcaagactgtcccggcccggtactatactggcaattgctggagaagattttgcaattgt

SEQ ID NO: 193287 - DNA, 85 bp, Homo sapiens
gggatgagggaatacaagtgtcatgtctgtggtctgatgccaatgcaagttacttaagagcagctcgagctggacaccttgaaaa

SEQ ID NO: 193288 - DNA, 100 bp, Homo sapiens
tcccgagtggctgggactacagaaccctcggcctcaggaaagtcggacagtattcagtggctcagtcagtattccatctatcaccaaatcccgccctgag

SEQ ID NO: 193289 - DNA, 50 bp, Homo sapiens
tggagtgtaggtcatatcgccgcgcctcccgcgacgatgcccctcaacgt

SEQ ID NO: 193290 - DNA, 100 bp, Homo sapiens
aggcaactggagcgaaaccagcgacaggcagccctgcaagttgggggccatggagagaggctacaccagtgtcgagaagtcatgcttctaacttacaaat

SEQ ID NO: 193291 - DNA, 100 bp, Homo sapiens
ctgggcattgcagccattatagtctcccagtgggacatgtttgccacccctcagtatcggggagtaagagcagggttaaagcacgaattgggagctctca

SEQ ID NO: 193292 - DNA, 75 bp, Homo sapiens
agaagcacaagatcatgcacagagctgctggagccagttctgcttctcggcaaggagcgatttgctggtgtagac

SEQ ID NO: 193293 - DNA, 133 bp, Homo sapiens
ggcatctcctagtattgcatcctacagatgtgctgtaaacatcaaaagaagacggtgggatcaggagatggtttcttccaaggtgaaatccagtcccacctggtattcagcatcttccttctcttcttcagtg

SEQ ID NO: 193294 - DNA, 100 bp, Homo sapiens
tcccacagtgctaggcttggcccgcctaaggcactgggtgtacctgctttgcttctctgcagccctcatctttgatggcagcaccaacccagcccatccc

SEQ ID NO: 193295 - DNA, 90 bp, Homo sapiens
ccgcgggagcctcgtggctgcgtcaccgccgcccccccagacaagatggacaccgcggaggaagcttgaccacatattatcccctccacc

SEQ ID NO: 193296 - DNA, 106 bp, Homo sapiens
aaagacttgaaggcgtatacaggaacaatattgatgatgtagtaaggttatacattggctcttcaaagacgttcacctcatcagagaaatccctgactcctttgca

SEQ ID NO: 193297 - DNA, 75 bp, Homo sapiens
caagagaaggcactcaagtttatgctctattatcaagtcctaaattttggaatgattgtctcatcggcactaatg

SEQ ID NO: 193298 - DNA, 100 bp, Homo sapiens
ttcagagcctcagccactagctgcgatgcatgtgatcaagcgagatattatggctgtggtctggtgatccctgagcatctagaaaactgctggattttgg

SEQ ID NO: 193299 - DNA, 100 bp, Homo sapiens
ccggcgtctgcgcttccccatggggctggcctgcggcgcctgggcgctctgagctccaaagacaacaggccctccctctgccctcccgtctgtgagctcc

SEQ ID NO: 193300 - DNA, 83 bp, Homo sapiens
ggcggcgggagcgcccccgatccggacaaagaaacgagcgctcgctcatgatggagcagtccaagaagtcctccctcatggtg

SEQ ID NO: 193301 - DNA, 98 bp, Homo sapiens
gtggagaaattctaggacatgaacaagctatcctttcatcgaggacagcaaacattatggcatcagtgtcattcaaggacgtgactatagaattcacc

SEQ ID NO: 193302 - DNA, 74 bp, Homo sapiens
ctgccgtcgctgcagagaccccgctatggctatgccatggacaatattaccaggcagaaccaattctacgatac

SEQ ID NO: 193303 - DNA, 100 bp, Homo sapiens
ctgcccaacaaacagaggacagtgataacaacgaacttgatgcaagtgataggtttgccaaggtcagacctctcatcatccggatgaactgcaatttcca

SEQ ID NO: 193304 - DNA, 90 bp, Homo sapiens
gacatgatgaatctaggacgtctgcagggctttgaggcaacagctgaagctaataatcttgctgcagtagcaggagcaagagatacctat

SEQ ID NO: 193305 - DNA, 89 bp, Homo sapiens
gcgcgttgctgcggccgtggtccgcgcccttcctcggcgggccggactgatcattgctgaaggtgccaatgggccaacaactccagaag

SEQ ID NO: 193306 - DNA, 82 bp, Homo sapiens
caccatggaggaggacgacagctacgtgtaaacaggaacatcgataagtagtgtaaaaacttgcacaatgaaatccgaagcc

SEQ ID NO: 193307 - DNA, 100 bp, Homo sapiens
ttatcaaaatctaaaccctcacaagagctgttatttatctgaaaggatatccagctacatcttcagtgacccttgtagatgtgagtgccttgaggccaaa

SEQ ID NO: 193308 - DNA, 51 bp, Homo sapiens
gatgccctgtccgtcggcgctggtatgatgccaccagtccccatttctcaa

SEQ ID NO: 193309 - DNA, 81 bp, Homo sapiens
ggagatgaggaacaagtacattagagccgaggttcatggccaaacgtaccaagaaagtcgggatcgtcggtaaatacggga

SEQ ID NO: 193310 - DNA, 75 bp, Homo sapiens
cccttgccagaatttcctgcgctgttccacctcattcaacttcagcaggacagctggcctgaagctcagagccgg

SEQ ID NO: 193311 - DNA, 74 bp, Homo sapiens
tggccacaagagcgaggagaagcgagaaaagatgaaacggaccctaagtatgatgggcatcttccaatagaaat

SEQ ID NO: 193312 - DNA, 97 bp, Homo sapiens
ggatgagttgcttttaggcttgctggcccgcggggctgtccaggcacgcgaggcccctcagaaatatggctacacacacctttctgcaggagagctg

SEQ ID NO: 193313 - DNA, 75 bp, Homo sapiens
gttggaagcagccgatccagcctgcggagcctgtggggcaggtggccatggtggaggtgcagctggagagtgacc

SEQ ID NO: 193314 - DNA, 83 bp, Homo sapiens
tgacaatgcagaatgcagagattttgttttgaattgtgaaatacttccacctcttttagattgtggaagctgatcgaggaagc

SEQ ID NO: 193315 - DNA, 75 bp, Homo sapiens
ctcggataccagcgctcagcccacctgtgattatgtgaaactgatgaaagttgtaagaagcaccttggaagagtg

SEQ ID NO: 193316 - DNA, 100 bp, Homo sapiens
gacgaggaagaggaggtttctgagaatacttcagagagtcagagttgtgccagaagtctcttaatggcagatagaatgcaaatagttgtgattctctcag

SEQ ID NO: 193317 - DNA, 87 bp, Homo sapiens
gaattcaaaagcactgagatggaagttcatgaattgagtagacacttaacaagcacttgcacctcctgcgccgccgccccccatcca

SEQ ID NO: 193318 - DNA, 96 bp, Homo sapiens
caaagtcctggaggttgaagactccactgatttcttcaagtcaggggccgcgtctgtggacgttgtgagtctgcagatgcctccaaggagtccgaa

SEQ ID NO: 193319 - DNA, 89 bp, Homo sapiens
tcatctgcagcccctgctgttgctacaactcaggattttttatcaagcagaaatgcatcgaacaacgagaatcaagatcactgagctaa

SEQ ID NO: 193320 - DNA, 50 bp, Homo sapiens
tgctgtcttcatcagcgtgggccgcggaccccaccaacaactgaacgctt

SEQ ID NO: 193321 - DNA, 100 bp, Homo sapiens
tgttcattatctgcttttatttggaagtaggtggactctcaaagcagagagagatcatcattgcctgaatttagctttgtgactgcaagagcaagaccag

SEQ ID NO: 193322 - DNA, 100 bp, Homo sapiens
aaatgataaaacatttagaacgatgtgaacatcgaatcatggaatcccttgcatggctctcagttgaaaggattgtagacaagaggaagaacaagaaagg

SEQ ID NO: 193323 - DNA, 100 bp, Homo sapiens
gtttccgcagcgagagcgaggaggaggcacaagatgctggtcttggggtgtcaattttactgtgtgtcagagctcttcaactcagatcaagtgaagatga

SEQ ID NO: 193324 - DNA, 83 bp, Homo sapiens
gaagttctcaaaggtgcctaccaaggtcaaaggctatgacaacctctttgctatgcactatcctgaggagcgacatgtggttg

SEQ ID NO: 193325 - DNA, 105 bp, Homo sapiens
tgaggactttccttacctgtttttccagctcacccactgccagcagagaggctgggaggcggcagaatgcagccagaggagggcacaggctggctgctggagctg

SEQ ID NO: 193326 - DNA, 76 bp, Homo sapiens
ttgctcggttaaagcatcaagaaaagttccatctgggtggacttagtagttttaagcagaaccatgaaaacctctg

SEQ ID NO: 193327 - DNA, 100 bp, Homo sapiens
tcggatcgaatccctcacgcgggcgcggatcgaccggagcagagagctggcgagcaaggtcattttaaactctcagagtgaacgtcttgataggaccgac

SEQ ID NO: 193328 - DNA, 78 bp, Homo sapiens
gccacctaccacagagccatcaaaatcacagtggatgggccccgagaacctcgaattgagccccatatgggggttggc

SEQ ID NO: 193329 - DNA, 74 bp, Homo sapiens
ctctgggagcagaagggaggctccaagacctcatcaacaattaaggtgttggtgtctgtccagtcccttatatt

SEQ ID NO: 193330 - DNA, 73 bp, Homo sapiens
atcaccgaacccgagcacaccaaggagcgcgtctgcggcatcgtcctgggggcgctgctcttggtcttctgct

SEQ ID NO: 193331 - DNA, 98 bp, Homo sapiens
ataagagccagcaagatacattccctcaagtgtccagaatttccaattacagacgacaaagtagcactggtctcctgaaatctgcccctctcctactg

SEQ ID NO: 193332 - DNA, 76 bp, Homo sapiens
caactgctcatcctggcctacgtcatcggagacctgcgatggacttcacagatttgtccaggctgcccctggccct

SEQ ID NO: 193333 - DNA, 86 bp, Homo sapiens
cttatgccaggccgatcccgacctggactcagacaaggttggatttggtctagggagtcccagaaagaagtagaaaaagagagaga

SEQ ID NO: 193334 - DNA, 75 bp, Homo sapiens
cgagaccatcctggctaacacggtgccaccaatccatacacagaagcaaactacaaaccaacttttctatcagac

SEQ ID NO: 193335 - DNA, 75 bp, Homo sapiens
taattcccggcttctcgagaagacactacagcctcaaggagctatcagttgagggatttgcagttgataaaatgg

SEQ ID NO: 193336 - DNA, 100 bp, Homo sapiens
aatgtggtcttcaaaagagcagaagaggatgcagactcttcttattttaaaatctttaagacaaaacatgactgaaaagagcacctgtacttttcaagcc

SEQ ID NO: 193337 - DNA, 75 bp, Homo sapiens
atacctggctattgcccctcctatcatcaagggaagaaggagaaagggccaacccctgaagaagcaatacagaaa

SEQ ID NO: 193338 - DNA, 100 bp, Homo sapiens
cggcagccatcaggtaggctgcgttgaggatctttgctcttccatccgcctttgatcgtcttcctcttcagccatccagatgacaacggcaacacgacaa

SEQ ID NO: 193339 - DNA, 90 bp, Homo sapiens
gtaaaagttcctggtgaatatcgaagaaaggagaacggtagctgtaggtaaaacttgcctactgatcagttacacaaccaatgcatttcc

SEQ ID NO: 193340 - DNA, 100 bp, Homo sapiens
ctcggtttggctgactggggagtcggcaggcggcagaggatcattgctgtcttcaaacccaagaatgaagagccctatgggcatcttaatcctaagtgga

SEQ ID NO: 193341 - DNA, 75 bp, Homo sapiens
ataccgtgccctgaggttggacgtggggaatttctcctggggctcagagtgatggtgaagaagacgaagtaagtg

SEQ ID NO: 193342 - DNA, 98 bp, Homo sapiens
cagatgaagaagttgatgaaatgatcagggaagcagatattgatggtgatggtcaagtaaactatgaaggttatttccagaaagaagagaatggcaaa

SEQ ID NO: 193343 - DNA, 100 bp, Homo sapiens
tctggggcaggggaacgtggctctggacgtggcccgcatcctactgaccccacctgagcacctggaggtaccacgagtggatgaaatcagaggagctgca

SEQ ID NO: 193344 - DNA, 87 bp, Homo sapiens
cagtgttgacctatgcctctccgccactcatcaccaatgtcacgatcctgccccaggaggaggactatggctttgacatcgaggaga

SEQ ID NO: 193345 - DNA, 80 bp, Homo sapiens
cgacccgctgctcagcgtcctcatgtggggggtaaaccactcggtgacagatcagtcagtgaaagcatttgctgaacact

SEQ ID NO: 193346 - DNA, 83 bp, Homo sapiens
aaacaagaagaagagaaccctgcggaggagaccggcgaggagaagcaggcttcaacggaccacaccaaaatgccatctcaaat

SEQ ID NO: 193347 - DNA, 100 bp, Homo sapiens
tttgatgagtgtcatcttgcaatcctagaccacccctatcgagaaattatgaaggcctgttatggaatcctcaaggtaccagagggcagctggctgtgcc

SEQ ID NO: 193348 - DNA, 75 bp, Homo sapiens
atcccctatgagagtcccatcttcagcagagacaatggcgatgaccactcagaaggaggcctggtggagaaccac

SEQ ID NO: 193349 - DNA, 90 bp, Homo sapiens
ctgtactatcccaccttccatgatggaatgaagtggtgaagagagcctgcgattgaagattttttcatctcagctttttcccccttacct

SEQ ID NO: 193350 - DNA, 134 bp, Homo sapiens
gggaaggacgaggatcagctgccattctccaaagctgctgatgtctatgcatttggcctgggccgagccagtggcccccagaggatgagaaggaggtgatccgccgggccatccagaaagagctgaagatcaag

SEQ ID NO: 193351 - DNA, 51 bp, Homo sapiens
gtttgtgacttgaagtggatacatagatgaccagtgtcccagtgaaggaac

SEQ ID NO: 193352 - DNA, 144 bp, Homo sapiens
tgaagtctggagcaggacttctgaggctttctatcctccatgctgctcactagaaaaggggctgtgaactgtttattttcttgaaaaggctccaggcttcggcttggaaaatcccaccgccaaaattgagcccagcagctggag

SEQ ID NO: 193353 - DNA, 80 bp, Homo sapiens
ctgactctttcgtctgctctgacatcaactccagcagtgtcttgggacaaggtgcgcattcctggtgtgctgcagcgatt

SEQ ID NO: 193354 - DNA, 82 bp, Homo sapiens
ttcgaacttagacttccggaaggactttggcgagggctgaaggtgatgtggccgccctcaaccgacgcatccagctcgttga

SEQ ID NO: 193355 - DNA, 75 bp, Homo sapiens
gtactatttgggagacaagtgtcagctcttttaaggaagaaaaagatataaagccaatcattaaagatgaaaaag

SEQ ID NO: 193356 - DNA, 74 bp, Homo sapiens
gtgaccctgcagctcctcaaagtgaccattgtgaggtagatattttgttctaattttccagatgaggaagctga

SEQ ID NO: 193357 - DNA, 74 bp, Homo sapiens
ggaagcagcagtccaggaatgcagtcagtctgttgatgaaactataaatttctgaataaattggcagaagaacg

SEQ ID NO: 193358 - DNA, 50 bp, Homo sapiens
tcacccgcgcctgcgacctcgagatgcgctggcagctgagcgagcagctg

SEQ ID NO: 193359 - DNA, 83 bp, Homo sapiens
caaactgtatggtggagaaagaagtgggaaggatctgcgcgggttggtcaaagaaaaagtgatgtatgaaaaagaggcaaaac

SEQ ID NO: 193360 - DNA, 122 bp, Homo sapiens
cggaaggaggagaggtgctgtgctgtgtatgaagaggcagtgaagactctgccaacagttacttgctggacagaagaaaagctcccccttctggacatttgaatactaccaaacattctttg

SEQ ID NO: 193361 - DNA, 80 bp, Homo sapiens
acaccgcctacaggagtatgatgcaaggttttaaaatcaaagatgggaaaatcggagaaaattgcccttccccatggcca

SEQ ID NO: 193362 - DNA, 82 bp, Homo sapiens
ggctagtgcttcatccagccaaagaggtggaagaagagcccgaagaagaacctgaagagacagcagaagacacaacagaaga

SEQ ID NO: 193363 - DNA, 75 bp, Homo sapiens
ctcagttggaagcagccgatccagcctgcggagcctgtggggcagagctcccagctcctccagcagccgacagga

SEQ ID NO: 193364 - DNA, 75 bp, Homo sapiens
gctttacgttcatgtaaacagcatgacgtgaggccgtggatgcaggcattaagatggagtctggctctgtcgccc

SEQ ID NO: 193365 - DNA, 100 bp, Homo sapiens
aggtggagcaccctttgctgagtggcctcttataccccggactgcagagacagggtctcgatatgttgcccaggctggtcttgaacctctggcctcaggt

SEQ ID NO: 193366 - DNA, 75 bp, Homo sapiens
cgttgcggcgaaaggaacggctgaaggccctacgggagaaaaccgggcgcaagatggaccacacagcattcccct

SEQ ID NO: 193367 - DNA, 99 bp, Homo sapiens
aaacgtatgtttgtgggatactcttgtagcacctgccaatagtttagtccatgtggccacagatgtctttaattccaaaaacctggccgttcaggcaca

SEQ ID NO: 193368 - DNA, 73 bp, Homo sapiens
gtgcatgctgatgacgaaaaacgcagtcgatgatgtgaagaaaggttacatcaaagcagaagaaaagtcctat

SEQ ID NO: 193369 - DNA, 100 bp, Homo sapiens
tacacatgcgcctgccccacgggtgtgcagctgcaggacaacggcaggacgtgtaaggcagatgaggacggggacttggttgccttttccagtgacgagg

SEQ ID NO: 193370 - DNA, 50 bp, Homo sapiens
gaggctccattcttgggacaaaacggttcagaggacagttttggagaagg

SEQ ID NO: 193371 - DNA, 109 bp, Homo sapiens
tcaatattgtgcatgacacccgctacaagtgttgtttcagagactcctccactctctgggaatgacacggactccctctcctgcgacagtggcagttcggcaactagca

SEQ ID NO: 193372 - DNA, 75 bp, Homo sapiens
ggaaggaggagatgaagggcaagggccaaaatgatgagaacgtttgtctgcctgatgagagccacttgggttaag

SEQ ID NO: 193373 - DNA, 100 bp, Homo sapiens
acggaggagccggggtccagtgcaggtaaagcggtaccaatgtacctttgagggctgtccccgcacctacagcacagcaggcaacctgcgaacccaccag

SEQ ID NO: 193374 - DNA, 83 bp, Homo sapiens
cggactcctgatggcatgcctgtaaagaacttgcagttgaaggagtataacacaggtcagcccaaggccaaccccactgtcac

SEQ ID NO: 193375 - DNA, 75 bp, Homo sapiens
atagcacttcaacacttaatcaagttgtagaaccagaatgtgaacaaagttctgccaccacctattactggtaca

SEQ ID NO: 193376 - DNA, 100 bp, Homo sapiens
agtgagatgaagctgtcagtcaatgcccgtgcccgcattgtggctgaagagttccttaagaatatctaactggactctcgctcctgctggctggacatgg

SEQ ID NO: 193377 - DNA, 75 bp, Homo sapiens
gattgtgaggcctccccagccacgtgaaactagaggcgtttccatcaaccagttttgcaaggagttcaatgagag

SEQ ID NO: 193378 - DNA, 100 bp, Homo sapiens
accacggaaactcaaatgcaccttcacatctcccaagtggatccggattggtgccaatgtctccaacttcacttttgctcctagcacgattatatttcac

SEQ ID NO: 193379 - DNA, 100 bp, Homo sapiens
ccaatgccaagacagtggagtgggactggaaactgctcacctatgtcatggaggaagagtttctttcaagatggcttgaaaacagctgataagttgaaac

SEQ ID NO: 193380 - DNA, 82 bp, Homo sapiens
attgtctgccacgagtgcacattctgaaaacagttggaggtaatgcttgaagataatgtttgcttgcccagcaatggcaaat

SEQ ID NO: 193381 - DNA, 115 bp, Homo sapiens
gcctagagacgctgacaaaggagcggaggagcagtcgcagctgctttccgaggaagccggtgttgccgaggaagaagccatggatttaataaatagagaaacaatgtctgaatgg

SEQ ID NO: 193382 - DNA, 100 bp, Homo sapiens
cgatgcaaagggtgagagtgacacagaccggaccactgtggaggtgaaacctggaaagtacacaggaagatgctatgaaatttccatcttcccaatcttc

SEQ ID NO: 193383 - DNA, 83 bp, Homo sapiens
cgccgccactgccgcagccaggagatggttcgggcctagcggagccgggactggaggaagatgagaatgtgcctactgctcct

SEQ ID NO: 193384 - DNA, 100 bp, Homo sapiens
cgcggctgcagctcgggacttcggcctgacccagcccccatggcttcagaagagacaatacaatggtgggtgaagagaagatgtctctaagaaaccggct

SEQ ID NO: 193385 - DNA, 83 bp, Homo sapiens
cagtgacgggtctggagtgcgtgggggaccggctgttggcggtttggtgccctggttgtcagatgttggaaagcagtaggacg

SEQ ID NO: 193386 - DNA, 100 bp, Homo sapiens
aatttctagtcagatttcaggttcagtgacatcagaaaatgtgtccagagattacaagtttcagctcaaattctcaagagcaaccttgcatcaatggaac

SEQ ID NO: 193387 - DNA, 75 bp, Homo sapiens
tcgacatcgagatcaaccgggagccgggaggaggaagccaagaatctggtgagcgaagccatcgcagctggcatc

SEQ ID NO: 193388 - DNA, 98 bp, Homo sapiens
ctgatgagcttctttcttctggcatcattaacggaccttttaccatgaatagttctactccttctacaggtctggagcccccaactcccttgacagtg

SEQ ID NO: 193389 - DNA, 75 bp, Homo sapiens
ctgctgctgcccgcgtccgaggctcgcgggcggcgggcccgggcgcccacggcctgcgagaggagcccgagtttg

SEQ ID NO: 193390 - DNA, 87 bp, Homo sapiens
ccggaagccctgagggcagctgttcccactggctctgctgaccttgtgccttgcaatggctgccatccggaagaaactggtgattgt

SEQ ID NO: 193391 - DNA, 75 bp, Homo sapiens
gaagagagggaacaagtcagtcagccttcgtggtcagaagagctgctaagaaggacaaataagatagcagagtga

SEQ ID NO: 193392 - DNA, 100 bp, Homo sapiens
cgtggcccacggcgtgtggattggtggtgtggcctgtgagccactgcctgacagatacacggtgtcggaggacaggtggcctgacggagcaagagctgat

SEQ ID NO: 193393 - DNA, 148 bp, Homo sapiens
aaaatggcggcggagccgaacaagaccgaaatccagactctttttaagaggcttcgcgcagttccaaccaacaaggtgggtcatgataactgggtacgtggagttctgttccattctggggggaagtttattttgagttgtgctgatg

SEQ ID NO: 193394 - DNA, 75 bp, Homo sapiens
ttctgctgtttcagttgtactactacaagcactatttatcaacaaagagctccaaacgagaatggaagccgctgg

SEQ ID NO: 193395 - DNA, 74 bp, Homo sapiens
tactttggaaaaacaaaggatatcgtcaatgggctgaggatgaaacaggcgcctatttaatcgacagagacccc

SEQ ID NO: 193396 - DNA, 50 bp, Homo sapiens
atcatgatgaaacttagacacagtaatttctcactatcagtgtaaagagc

SEQ ID NO: 193397 - DNA, 100 bp, Homo sapiens
gaggatgacagtcctgccaagggtcctgacggcctcgtgccaggggacctcatcctggagctcccagctgccaaaggctttgtggctaatagcttttatt

SEQ ID NO: 193398 - DNA, 88 bp, Homo sapiens
tccagggccccccaaaaccccggtggcacaaaaacctgactatggcagctggcagatggtaacgggctgtggcagtattcaggagcgg

SEQ ID NO: 193399 - DNA, 86 bp, Homo sapiens
ttagctttgtcatgcaaagctgtcatttgctgtcggctgaattgaagatccctcttacccgccaggtgccaagaactatgaacagg

SEQ ID NO: 193400 - DNA, 126 bp, Homo sapiens
ccgtttgaggaagtccccgaggcgcacagagcaagcccacgcgagggcacctctggaggggagcgcctgcagagatgatttacacaatgaagaaagtacatgcactttgggcttctgtatgcctgc

SEQ ID NO: 193401 - DNA, 75 bp, Homo sapiens
agagaagttgcttgggttatatttgatgaaattcattatatgagagattcagcccacttcgatgtgttgttcttg

SEQ ID NO: 193402 - DNA, 100 bp, Homo sapiens
ctgtacttttgtggacgcaagcaatttttcaagtctaactatgcagacctaggaattggtccagatggtcatatcgctttcaatgagcctggatccagtt

SEQ ID NO: 193403 - DNA, 100 bp, Homo sapiens
gcttaggaaggaagaggtcatctcgctcggagcttcgctcggaagggtctttgttccctgcagccctcccacggaaggatcgagatcgagaccgggatcg

SEQ ID NO: 193404 - DNA, 90 bp, Homo sapiens
ggatcacttgagccagggagttgaaggctgcagtgagccctgtttttgccaccacactccagcttgggctggagtgcagtggcgtgatct

SEQ ID NO: 193405 - DNA, 90 bp, Homo sapiens
cagaacaccccgagatgagaggagaagagcccagcacaacgaagcgatcactcactcgctgtacagaatgatattcctcacggcactgcc

SEQ ID NO: 193406 - DNA, 100 bp, Homo sapiens
gcaggatatacgtactgtgggtcttgtgctgcccatgcttataaacaagtggatccgtctattaccgtaactggcggaaacccagaggcattgacaacag

SEQ ID NO: 193407 - DNA, 98 bp, Homo sapiens
ttcgatgagtttccagaatctgatattcttaagccaacagaaagttactgtggcccatgtcctaaaaactggatatgttacaaaaataactgctacca

SEQ ID NO: 193408 - DNA, 49 bp, Homo sapiens
aggacacccctgaagccgagaaatggttcgtcacaaggcatcgcagaag

SEQ ID NO: 193409 - DNA, 100 bp, Homo sapiens
agggggagattttgggaatccactgagaaaattcaagttggtgttcttgggggagcagagcggtactaggttttgacaagcttgcatcatgcgtgagtat

SEQ ID NO: 193410 - DNA, 100 bp, Homo sapiens
tccaggttacatacagcttacatcttgcatcctcaagcgtgacaaccatgagtggaaaaaactaattatggttcagcactggcctgagacagtatgcgag

SEQ ID NO: 193411 - DNA, 98 bp, Homo sapiens
ccaggatccgcgcactcctggtgggtcagagtggagagagagcgttgacccggacgacacctataatgagaccccctacgagaaaggtttctgctttg

SEQ ID NO: 193412 - DNA, 90 bp, Homo sapiens
aggcggccaaagcttaactggatcagggcagggcagagcggcttgggtaaatccaccttaatcaacaccctcttcaaatccaaaatcagc

SEQ ID NO: 193413 - DNA, 100 bp, Homo sapiens
agagtccctctaaagcagctcaaaaggaagccagttgagggaagttctccatgaatgtacgtcacaatgatgatgaccgaccaaatccctctggaactgc

SEQ ID NO: 193414 - DNA, 98 bp, Homo sapiens
aggtgccttacaactacaaccagctggaaggcagattcaagcagctgcaagtttcaccagtgatcattaaagaatgggcagcttacaaaggaaagtct

SEQ ID NO: 193415 - DNA, 100 bp, Homo sapiens
actttgacagctgcagggccgcggcctggaggagaaggcagagcccccccaggctatgaatgccctgatgcggttgaaccagctgaagccagggctgcag

SEQ ID NO: 193416 - DNA, 75 bp, Homo sapiens
tgaagatctgtgctgtgatgaggggctccagatagcgatctacgaactgcgtgtgatggagaccaaacccgacaa

SEQ ID NO: 193417 - DNA, 83 bp, Homo sapiens
aaagcgtcaagaagaggaggaagccatgcgtaggagatatagatcagctatcaggaagggacttctgccattcaaagaaaatg

SEQ ID NO: 193418 - DNA, 100 bp, Homo sapiens
ctggatgccagcgcagtctcggccacatctcgctacatcgaggagcagcaggccacacagcaggatgccaggccaaggtggagcaagcggtggagacaga

SEQ ID NO: 193419 - DNA, 100 bp, Homo sapiens
ccgccgacgccgttccgtgcagctcacggagaagcgaatggacaaaggtgaacgcccgttccagtgcccttttgagggctgtggccgctccttcaccaca

SEQ ID NO: 193420 - DNA, 75 bp, Homo sapiens
ccaacatcaggaatatttgtgttttggctcatgttgaccatggttgctgatcagctctgtgccaagtatagcaag

SEQ ID NO: 193421 - DNA, 82 bp, Homo sapiens
ctcagacatctgcaaatcatggtcatggaaaatggaagatttgcaaaatacaaatattttacccatgtcatgatcaataaga

SEQ ID NO: 193422 - DNA, 100 bp, Homo sapiens
cccccatcaatctttatcattcctcagatgccttcaaacaagatgatttacaaccctgaagaatctccctatccctattttgtccccctgcagtaataaa

SEQ ID NO: 193423 - DNA, 100 bp, Homo sapiens
aaactgatgacagagaaagcagatgcagaagagaatttggaagatgccatggagcttgcattgaaaggctctagttacagtggacttcttgaacgacatc

SEQ ID NO: 193424 - DNA, 83 bp, Homo sapiens
agacatggatgtcaaatactttgcacaggaagctataagtggtcctgcagacattcgctttgtctgggagaagaatgggcgag

SEQ ID NO: 193425 - DNA, 101 bp, Homo sapiens
caccgggatcgtgaccgagaccgtgaccgagagcgtgaccgagagcgcgaatatcgtcatcgttagaagccacttccggctcctgcgtcgctccggaagcc

SEQ ID NO: 193426 - DNA, 131 bp, Homo sapiens
ctcttgtcagccgccgccacccaggccgtgcctgcccccaaccagcagcccgaggtcttctgcaaccagacaatgcagatcttcgtgaagactctgactggtaagaccatcaccctcgaggttgagcccag

SEQ ID NO: 193427 - DNA, 76 bp, Homo sapiens
gcgctcctgagccgccggcgcgccgggcgccccggtgttctaagaacggaagcatctgggctggatggaatttagc

SEQ ID NO: 193428 - DNA, 100 bp, Homo sapiens
cagtgaggaggctctagtaactgtccaggaactgtggctgcaccatctgtcttcatcttcccgccatctgatgagcagttgaaatctggaactgcctctg

SEQ ID NO: 193429 - DNA, 90 bp, Homo sapiens
gaggcccttggtggaagagggcctacgctgtgtcttgatctttggcgtccccagcagagttcccaaggccaaggcagaggcttcctcagg

SEQ ID NO: 193430 - DNA, 100 bp, Homo sapiens
ttgggacgaggagaggatccaggaggaggagttgcagagaaagtgttgtgaagagcgaagacttttcgctcccagcttatatggatcggcgtgaccaccc

SEQ ID NO: 193431 - DNA, 73 bp, Homo sapiens
gagccggtgccgagccggggcgaagctggatcccctagctccgccgcatgcaagagatgattgcaaggatgca

SEQ ID NO: 193432 - DNA, 100 bp, Homo sapiens
ctaggcaggcgttgaggaagaagccacccgagcggactcccgagctgatgttctaatcatgtcagataaagatgatattgagactccactgctaactgaa

SEQ ID NO: 193433 - DNA, 82 bp, Homo sapiens
ccaatctcctttctgggcaaacgttccaaggttcagttggaacattggaagaaggcattcaagaagaaagaaatgttaagga

SEQ ID NO: 193434 - DNA, 50 bp, Homo sapiens
tcgtgctctcgccccaacccgcgcgccagcagaggctgaccatgtggagg

SEQ ID NO: 193435 - DNA, 60 bp, Homo sapiens
cccctcaaggtgctatctcagagaccaggacttctgcacggacctggccgtctccagtgc

SEQ ID NO: 193436 - DNA, 90 bp, Homo sapiens
gtttgtccccgcaggcactcacactcctgggagccggctccagcaaagaatggctcaagaagtactgacacatttaaaggagcatcctga

SEQ ID NO: 193437 - DNA, 82 bp, Homo sapiens
ctgagaaccatgctcaccgaccctgcctccaggcccaaggtcagcatcccactgtcagccatcattgaggtccgcaccacca

SEQ ID NO: 193438 - DNA, 83 bp, Homo sapiens
gataatggtatcatcaaggccttcagaaacatccctgaaactaatctggattcactccctctggttgatacccactcaaaaag

SEQ ID NO: 193439 - DNA, 98 bp, Homo sapiens
cgaccgctttccgggagactggagtcgaaggccgtgaggtcagttgctgataaagaggccattgcaaatttcacaaatcagaagaacatcagcaatcc

SEQ ID NO: 193440 - DNA, 95 bp, Homo sapiens
agggcgagggtcttcagctgatgaatctcatgctcagcctgcaggatgtttcctcaatgaggggaaggctgctgcacaatggcagtttttgatac

SEQ ID NO: 193441 - DNA, 99 bp, Homo sapiens
cagaaaccccgttgacaaggcactgctttttcatgacgagtttattaaccacttaacctctcagaactgaacaaagacaacattgttcctggaacgccc

SEQ ID NO: 193442 - DNA, 51 bp, Homo sapiens
gctggcaagtctcaaagtcgccacaggatcagttggtaaaagaagataata

SEQ ID NO: 193443 - DNA, 100 bp, Homo sapiens
ggcggttctactggagaccactttaggcgacgtcgtcatcgacttgtacaccgaagaacggccgcgtgggcatccgcttcgatcctgaaattccgcaaac

SEQ ID NO: 193444 - DNA, 75 bp, Homo sapiens
gtgtccagcgctgccggagccgcctgaggtctatgttaacaatgaatgggcaaccagtgttggggaaggagggag

SEQ ID NO: 193445 - DNA, 100 bp, Homo sapiens
tgaatgaccgctctcagctggtgaagacatgacgaccctggactccaacaacaacacagattggtttatcttggaagctaaagggcattgctcatcctga

SEQ ID NO: 193446 - DNA, 100 bp, Homo sapiens
catccctcgtcgaaaggattggattggcatctttagagtccatgtgaaatctgaggtccttgctgtcaagttgtcacaagaaataaactacgcaaagagc

SEQ ID NO: 193447 - DNA, 101 bp, Homo sapiens
agaagaaaaactgtgcattaaaattcttcagacattacgagaaatgttagagaagaaagacagctttgtggaagaggcatatctttttcttgcacatcaag

SEQ ID NO: 193448 - DNA, 82 bp, Homo sapiens
ctgagcgagctgtcagagcccggggacggcgaggccctcatgtaccacacgctcatttagaggcgagttttgaggaggtaga

SEQ ID NO: 193449 - DNA, 100 bp, Homo sapiens
cagggatagagacggctgctccagctaaaggttccggtggaggaggaggttgctggtgatctctgctcctaacgatgaagactgggcctattcacagcag

SEQ ID NO: 193450 - DNA, 83 bp, Homo sapiens
aaacctgagcctgatgccatttctggggaatttcagagtgcctgccccggttgacatgcatgatcagagggatcggagaccca

SEQ ID NO: 193451 - DNA, 50 bp, Homo sapiens
ctaaatgcactctttcgaaagaaagctattgtacacatgtgacaacctat

SEQ ID NO: 193452 - DNA, 83 bp, Homo sapiens
aagaggtcgcgccccccaagcctcctctgcctggcattcgggtggttgataataggttgtgaccgagattcccgacgagagag

SEQ ID NO: 193453 - DNA, 50 bp, Homo sapiens
caccccggaagctgggaaatgatatcagttttagagaatgtggcgtggag

SEQ ID NO: 193454 - DNA, 75 bp, Homo sapiens
ttccggaggaaagatagagaagactctccagaaagatgcagtgacttctgacagctctctccatggaaggaggcg

SEQ ID NO: 193455 - DNA, 75 bp, Homo sapiens
tacttgtcacctcgaattgagcagcaatttgaatcaacccatagaagtgacagcgctgtattcatttgaaggaca

SEQ ID NO: 193456 - DNA, 100 bp, Homo sapiens
aggacaagcgactctccatggtttctctcaggttctgagactctaggcaggctggcaggcaacaccttaggagacaaagcatggaggacacaagaatggg

SEQ ID NO: 193457 - DNA, 100 bp, Homo sapiens
gttgagcggcggcgaacatgcgcttttgacacattggagcaagagtgagccatggagctacgtgtggggaacaagtaccgcctgggacggaagatcggga

SEQ ID NO: 193458 - DNA, 100 bp, Homo sapiens
tgacgactgtgccatctgttgggactccatgcaggctgcgcggaaactgccctgtggacatcttttccacaatatccatatattcctgcacatattacaa

SEQ ID NO: 193459 - DNA, 100 bp, Homo sapiens
ggaggagcgcctggactcgcgggcggcggcgagcgcctttacaatggccctgaccctgtttggggccacctacagatgctcctgcagtggacacagcaga

SEQ ID NO: 193460 - DNA, 82 bp, Homo sapiens
gggatcttcgcactatcccaaggagtgagctgagtcgacagaaacttcatacccaagagctgctttctcagctggaaatggc

SEQ ID NO: 193461 - DNA, 100 bp, Homo sapiens
ccaggtgcggagtccataccggagcgcaatggcgtccaaccccgaacggggggagattctgctcacggaactgcaggcactactgcagtcttcagttaag

SEQ ID NO: 193462 - DNA, 75 bp, Homo sapiens
ctgaaataatgtttgagtccttcaatgttccaggcttgtacattgctgtgcagtcactctctgaaagagaacaaa

SEQ ID NO: 193463 - DNA, 90 bp, Homo sapiens
cttcgacttgccaggaaaggctctatgagagcaggggaaagctctggcaatttaaatgacccaaataaggaggcactggctaagacggaa

SEQ ID NO: 193464 - DNA, 82 bp, Homo sapiens
ccgagagacctccatggtccatgaactcaaccgcatggcctgtatgagaagaaaaagacctcaagaaagcaacgaaaggaac

SEQ ID NO: 193465 - DNA, 100 bp, Homo sapiens
ccggatgctgcggcgcccgctggccgggctggctgcggccgccctgggccgggccccaccggacggtcctgaacgaggctgtgggggccctgatgtacca

SEQ ID NO: 193466 - DNA, 100 bp, Homo sapiens
tgcagcgtttccagtgttcccacgtccacgtcggagacgcctgactacttgctggacatcgcggtggaggaagatctcagcagcactcccctattgaaag

SEQ ID NO: 193467 - DNA, 100 bp, Homo sapiens
tgcactgcatggttgctgctggatgtgttgtgttcctggcttccctctggatgctgacagaaacaagggcagcttcgaaccagtgcaatgacgatgccag

SEQ ID NO: 193468 - DNA, 82 bp, Homo sapiens
gcccccacagctactccaacccaaacaacaaccaagccagtttaatgatcatggaagggaagtggttgctgtgtatgttact

SEQ ID NO: 193469 - DNA, 88 bp, Homo sapiens
catggggaaaatctccccggtgactttcaggtgttgacttcaaaatcaaaactgtagagctaagaggaaagaaaattagattacagat

SEQ ID NO: 193470 - DNA, 100 bp, Homo sapiens
gcgtcgcagagaacttagaaggcaaaagagggaggagatgcgactcgaagcagaaagggctgtcttcatcggtggaatacaacataatggagttggaaca

SEQ ID NO: 193471 - DNA, 75 bp, Homo sapiens
ctttgggaagcatgtcaccaacccggccttcaccaaactccctgttggtgaaaaccctgtgtccttggagaaagc

SEQ ID NO: 193472 - DNA, 98 bp, Homo sapiens
ctgcacttccatcccacggtcaggcatggaagaggagatggttcgtgttacgcagtggccgtttaactggagatccagatgttttggaatattacaaa

SEQ ID NO: 193473 - DNA, 90 bp, Homo sapiens
tgcttcccaatcccactgatgaggatcagcccatgatggatcctgagcttgaaaaaaaactgaaagagaataaaatatctttagagtcgg

SEQ ID NO: 193474 - DNA, 100 bp, Homo sapiens
tctgtatgatgactttgaatgggtgcatgttagtgctcaagagcctcattatctaccacccgagatgccccaagactgttcgccatggatttccctatca

SEQ ID NO: 193475 - DNA, 75 bp, Homo sapiens
agctggagtcgtgagcgcgcgcccgccccgctctgggaggaccgcgaggtagagtacagagagatggatgaaagc

SEQ ID NO: 193476 - DNA, 50 bp, Homo sapiens
cttagaggagtatttcctgaactgtgtggaccttagctggatctccaaaa

SEQ ID NO: 193477 - DNA, 100 bp, Homo sapiens
ggaaaacatgacgtctccagccaaattcaaaaaggataaggagatcatagcagagtacgatactcaggtcaaaggagtacgagagggcctccaaagtgga

SEQ ID NO: 193478 - DNA, 51 bp, Homo sapiens
ctcttattctggaaaccagtgcaatgatctggttagcaggaagaagatgag

SEQ ID NO: 193479 - DNA, 98 bp, Homo sapiens
ggggccccagcagcccccgaaggccctatcaggacatggagtatgaaagacgatatactggagtcctcactgagctgaagttaccctgtgaaatggac

SEQ ID NO: 193480 - DNA, 99 bp, Homo sapiens
cggctgcgctgttcgtgctgctgggattcgcgctgctgggcacccacggagcctccggggctggggttcagtcggctgccgtcaatgtcatctgcgagc

SEQ ID NO: 193481 - DNA, 101 bp, Homo sapiens
cctgacgctcgtcctcatcctggtcactagcggactcttcttcgccttcgaggtgtgaacggcatgtctgtggatgagaagcctgactcccccatgtatgt

SEQ ID NO: 193482 - DNA, 74 bp, Homo sapiens
ctgccacagaaggtcccgtgaaggccagagaagtccaaaaggtgacctgaaacatatcacgaagctgaaacctt

SEQ ID NO: 193483 - DNA, 75 bp, Homo sapiens
aagcagactcactaacttatgatgaaaggaaacagattcattgtctgtctgaggatgagttaagttcttctacaa

SEQ ID NO: 193484 - DNA, 74 bp, Homo sapiens
tccgtttcctgaggcctccccagccatgcttcctgtacggcctgcagaactcttggctttgaattggtggagac

SEQ ID NO: 193485 - DNA, 83 bp, Homo sapiens
aagcggcgcgagcgccccgccatcgtcccggggtacttcggtccttggtggaagcatctagctcaggtgtgtcggtactgagc

SEQ ID NO: 193486 - DNA, 100 bp, Homo sapiens
tgacatccaacctgtatcaagtcttctaatctgtgaacatgtttcctcactgcttggaggaagatgagaattctcagaggtccttatgctgccctttttg

SEQ ID NO: 193487 - DNA, 98 bp, Homo sapiens
tccgccccaccatctacagcaacgtgatcaaagggttttcgaaagaggagttgacttggcttcagagccttcgaggagttcctcatgtcatccagaca

SEQ ID NO: 193488 - DNA, 100 bp, Homo sapiens
ctctgacccagtttccacttcccaagaaccttctggccaaggtgattcagattgcaacgtcatcctccacagctaaggttggctggagatggagtgggag

SEQ ID NO: 193489 - DNA, 97 bp, Homo sapiens
tttagaattgggtcactggatttctgaggagccgttcgaactgtctcaccacttccctgcagctcccgtctatcagccacagtctctgcaagtttcc

SEQ ID NO: 193490 - DNA, 75 bp, Homo sapiens
tgggtcgtcacggaggacgggaaaatccagcagcaggaaaaatgctggcaggtggtgcaagcaaggacatctatg

SEQ ID NO: 193491 - DNA, 100 bp, Homo sapiens
ctcagattggctcctatgttcctgcagaagaagcgacaattgggattgtggatggcattttcacaagggaacctccacaaggagctcattttctttccag

SEQ ID NO: 193492 - DNA, 85 bp, Homo sapiens
tttttgtgctgccagcaagaaatgatcagtagcaccagtgtttatgtgtttctgaaagatctatccagcactccgatggccagca

SEQ ID NO: 193493 - DNA, 100 bp, Homo sapiens
aagccgatccccatttttattgaaagatgtattgagtacattgaagccacagactcagcccgcctgcacccaggtgaaatatacagccttgttgctcaca

SEQ ID NO: 193494 - DNA, 76 bp, Homo sapiens
ttaacctggaagaatacagcctttctcagtgcacactggagaagatagtgtgtgtaccatatcagtggcgtgtaac

SEQ ID NO: 193495 - DNA, 90 bp, Homo sapiens
ctttcctgctggtggcaaccgcctacgagacactcaagatggcccactgcgtgaccttggttcagctgtccatttcctgtgaccatctca

SEQ ID NO: 193496 - DNA, 99 bp, Homo sapiens
cattaattttaggaatcctgatgacatccttctttttagagatcgttttgatggatatatcttccttgacagcaaagggcatcgcaggcacagatgtag

SEQ ID NO: 193497 - DNA, 82 bp, Homo sapiens
cggggtcacttagactaccccaggaacccgcgccgcgagggctccttccctcagtttgctggaacattatcagatggcttag

SEQ ID NO: 193498 - DNA, 75 bp, Homo sapiens
ttcaaacattttgcagacttgctaccgggattcctacagcaaatcctgaaggaacccaaagtggctgcttctgtt

SEQ ID NO: 193499 - DNA, 99 bp, Homo sapiens
ccaacatgacacagcttgtttcaaatttatcagcaacagtagcagaattgaaacgggagcaccagatactgctacaccatctcatcggcatggacctat

SEQ ID NO: 193500 - DNA, 95 bp, Homo sapiens
ctggcgcagctggcggacccgtggcagaagatggctgtggagagcccgtccgacagcgctgagtattctgacaagtccctgtacacccagctgtg

SEQ ID NO: 193501 - DNA, 75 bp, Homo sapiens
ggagaacaggctggttccccagtaattatgtccgtgaaattaaatccagtggagaagctaaaacttacttatgag

SEQ ID NO: 193502 - DNA, 100 bp, Homo sapiens
caaattcttccctctttatgtttttcaagggacggatacaacgactagaggatactggtatcgggatgacacaggaagagctggtgtccaacctggggac

SEQ ID NO: 193503 - DNA, 100 bp, Homo sapiens
ttgaggttgttgatataaatagtgtggttagggcgggtctcgggaactgccatggagtgaagtgttgaggacctgtatgaggctggagagaagaaatggg

SEQ ID NO: 193504 - DNA, 100 bp, Homo sapiens
ctgcagttccagctggtgtccacagccctgaagagctggacggatgttagcctgctgcctgccttcgatgctgtggttacagccaagttctacttctgaa

SEQ ID NO: 193505 - DNA, 100 bp, Homo sapiens
cccagcgcggcgcggggctgcggagtcgtccggagccgctgcgcggtagcacaggcggagtgcagcggaggcccctgccgctgccgtcatgccgttcccg

SEQ ID NO: 193506 - DNA, 100 bp, Homo sapiens
gcagatgaatggacaccttgaagcagaggagcagcaggaccagatgagcacaatgcctggactccccacccggccctgtttttatgatattgatttggac

SEQ ID NO: 193507 - DNA, 74 bp, Homo sapiens
gcgggcccgttgcggctgcaggcaccatggaccgagcccccacggagcagaaagagacatcgggaagattctga

SEQ ID NO: 193508 - DNA, 103 bp, Homo sapiens
caaacagcccgcccgaccccgtcccgaccctggccgccccgagcggagcctggagggtggcccagttgaaatccttcccttcctctaccttggaagtgcctac

SEQ ID NO: 193509 - DNA, 83 bp, Homo sapiens
cacgtgcttcaacgctctgctgcccgctgtgagggaaaaggtggatcagtacaagggaaagcgggatttggagtcactgaggg

SEQ ID NO: 193510 - DNA, 83 bp, Homo sapiens
gaacttaatacagcaagaaagaccatcaagtttaccagtgaatcccagaccttgctggcagcagcagttgagagagaacgtgc

SEQ ID NO: 193511 - DNA, 75 bp, Homo sapiens
cagcctgcggagcctgtggggcaggggaccctcacaatgatcccaatgctcagggggatgccttcaagactctct

SEQ ID NO: 193512 - DNA, 100 bp, Homo sapiens
aaacggccatctggaggctgtatggccgcagctatcagctggcccagcggaccttccgcacttttgatttctacaagaaacaccaagaaaccatgactcc

SEQ ID NO: 193513 - DNA, 83 bp, Homo sapiens
cgccagcggccgagcgggcggcttcctggcctgggcgctccggtggcggcggagggaaatgatggcgggaacacagcaaagga

SEQ ID NO: 193514 - DNA, 100 bp, Homo sapiens
gcttcacttccctcggtctgggcttctctgaggcggcgagagatggtcaggtctggagctcgaccgggccaggtggcaggtccagcggaaagtgatctgc

SEQ ID NO: 193515 - DNA, 74 bp, Homo sapiens
cagcaattgcccaaacccaaagtgtggaggaggccgccgagcggctgaattccgtggagccggtcaggttcacc

SEQ ID NO: 193516 - DNA, 95 bp, Homo sapiens
atggatattctggtggggagatgaacccaacctagtgggtgtaatacatcatgaactgcaggtttgagattacgggaaatgatgagacgttcgtt

SEQ ID NO: 193517 - DNA, 100 bp, Homo sapiens
gaatttaatcaaacaaaattgtgagctttttgagcagcttggagagtacaaattccagaatgcacgcccactattgcttggttctacttcctttatcccg

SEQ ID NO: 193518 - DNA, 120 bp, Homo sapiens
tttcagctacttgaagatagccatcagccgctacgtgactcttttctccagggtattctgggcatgaaacaggcatagcgatatctgtggccgcagtggctctgggggccaaggtgttgg

SEQ ID NO: 193519 - DNA, 100 bp, Homo sapiens
cactacattctgggtgacacgctgggggtcggcaccttcggcaaagtgaagggtaagaatgattgatgttggctgatattggagtgctcattcacatgaa

SEQ ID NO: 193520 - DNA, 74 bp, Homo sapiens
tgaagagccagagagcaatatgaagtctatgccaccaagcactggatgtgtgtgagaagtggggagaaatgcca

SEQ ID NO: 193521 - DNA, 100 bp, Homo sapiens
gcagcctcgaggtggagaagaaggacaagcttgcggtgattgcccacagtgagtatcaaaagtccaaaagaatttccatctttctgagcatgcaagatga

SEQ ID NO: 193522 - DNA, 100 bp, Homo sapiens
agtcttcccgcgtccgccgattcctcctccttggtcgccgcgtccttggctggcgtatgagatggaccaaacgcccccggcgcgtcctgaatatctggtc

SEQ ID NO: 193523 - DNA, 82 bp, Homo sapiens
tcttcggtggactccttcggcagtccacccaccgccgccgcctcccagggctgaaatctctttaatgatggagggaagcagg

SEQ ID NO: 193524 - DNA, 101 bp, Homo sapiens
gagtgcaacaaccactggttctccaggaaccgaaaaggcgaggagtatagtacggcaaaaaactgtcggatgagacctgcacgcagtggctcacagcagca

SEQ ID NO: 193525 - DNA, 76 bp, Homo sapiens
ggcgcatgcaacaacaacttttggaaggatgccttcaattaagttgcagagttctgatggagagatatttgaagtt

SEQ ID NO: 193526 - DNA, 83 bp, Homo sapiens
cccgtctgtgcagcaggacatcaagttcttgccgttcaaggaagaaatgtacatcttcatggagtactgcgatgaggggactt

SEQ ID NO: 193527 - DNA, 100 bp, Homo sapiens
ccacgcagaggacgccggaacaccctggaagccgagaaatggtattttggcctctccccagtctgctcctggaaacttggacaatagtaaaagtggagaa

SEQ ID NO: 193528 - DNA, 80 bp, Homo sapiens
acttctctggggactctgaacttccctggtcgaacagttttttctaatggctattcaagagcctggagaaagttcttgtg

SEQ ID NO: 193529 - DNA, 90 bp, Homo sapiens
ggtctgtggagctggtcaacgaccgcggggcgcaggtattgctggccttttcacaattttctcaagttttgtattcagtacagttgtcat

SEQ ID NO: 193530 - DNA, 75 bp, Homo sapiens
cagacttgtggctacacttctggccagtttgacctggtgtgccatgcggagctgaatgccatcatgaacaaaaat

SEQ ID NO: 193531 - DNA, 55 bp, Homo sapiens
atttgaaggcctgctatccctccagtatttaaatctgggctgcaatttaattaca

SEQ ID NO: 193532 - DNA, 100 bp, Homo sapiens
ctggtggggagatgaacccaacctagtgggtgtaatacatcatgaactgcaggctcttcacagatggaatcacaaataaacttattggctgttacgtggg

SEQ ID NO: 193533 - DNA, 50 bp, Homo sapiens
ggaacttctgcccagctctccttggtatgggaggacatggctatggtgga

SEQ ID NO: 193534 - DNA, 83 bp, Homo sapiens
gccgatccagcctgcggagcctgtggggcaggtcccgcggcagtgctggtggccatggttcccgtagccagaaggagttgccc

SEQ ID NO: 193535 - DNA, 99 bp, Homo sapiens
ggagatccgcgaccgcatgtggctcaagatcaccatcgccaatgccgtcatcggtctgagtagcgacagtggccttgggggcagctcggatggcagctc

SEQ ID NO: 193536 - DNA, 76 bp, Homo sapiens
aggacttcgacctggagccgtcccaggactgtgcaggggactctgtcacacttgccgggattgctgtccttgccat

SEQ ID NO: 193537 - DNA, 82 bp, Homo sapiens
ggagctgtgcagccgcgaggaggcgcgggaggtgttcgagaacgaccccgagacgcagaagatggctgtgccacccacgtat

SEQ ID NO: 193538 - DNA, 100 bp, Homo sapiens
catgacaatttgggatttcaagttctccaccttcatctatggaagataaatcagatgttggttatggacgaagtatttcttcttcatcttccttaagaag

SEQ ID NO: 193539 - DNA, 75 bp, Homo sapiens
tccgtgtgcagccccaaactggaaagaagatgctaattaaagtgaagattgtccgtgtggagcccttggtgacca

SEQ ID NO: 193540 - DNA, 100 bp, Homo sapiens
actgtgcttggagcggctccagctgcaagcacgtcagcctctaccagcctcagctggccaccagtggttccaacaccagcactggctttactggcgaacc

SEQ ID NO: 193541 - DNA, 100 bp, Homo sapiens
ggacccccaagccgccgcggacgcagggggcccatgtgaccatcaacgcacgggccgaggaggatgtggagcctgagtgcatcatggagaaggtggccaa

SEQ ID NO: 193542 - DNA, 101 bp, Homo sapiens
agaatttccaaatgaaaatcaagtagtgtttgccagagttgattgtgatcagcactggcaagttaaagtcttcagagccctgtatacgtttgaacccagaa

SEQ ID NO: 193543 - DNA, 100 bp, Homo sapiens
tcctgactccataaactattggattcataacctgctccatgcttgaaaacatggggattggaattcggatatgttcaaggaatgagtgatttactttccc

SEQ ID NO: 193544 - DNA, 100 bp, Homo sapiens
gggagaaacaaggcgccttggagttcagggcagcgggtggcatgagacgtgggaacatgggccacctcacacggatcgccaacgcggtggtgcagaacct

SEQ ID NO: 193545 - DNA, 97 bp, Homo sapiens
gaagccgttttcgcttcacttttcctggctgtagagcgctttccccctggcgggtgagagtgcagagacgaaggaacgggaggatgaaattgctact

SEQ ID NO: 193546 - DNA, 102 bp, Homo sapiens
gaccgcgtccgccccgcgagcacagagcctcgcctttgccgatccgccgcccgtccacacccgccgccagaggtggggctggtgtccgagcacttctcgcag

SEQ ID NO: 193547 - DNA, 100 bp, Homo sapiens
agaaaaattgttctgtgagaacagccagcagcggctggctgtcggcaattggattcttccagtacagcccgggcgctgccgtggtcatgctgcttccagc

SEQ ID NO: 193548 - DNA, 80 bp, Homo sapiens
ggaggcgcgggaggtgttcgagaacgaccccgagacgaattttgtagccaccttggctaatgggatgagcctccagccgc

SEQ ID NO: 193549 - DNA, 75 bp, Homo sapiens
ggagttcttacaacatggcagacattgacaacatgtattccactgatgagaacctgatcctttccccactcctgg

SEQ ID NO: 193550 - DNA, 90 bp, Homo sapiens
cacacagctcagaacagttggatcttgctcagtctctgtcagaggaagatcccttgaaaaccgtgaggacatactgaatgccggtgacaa

SEQ ID NO: 193551 - DNA, 90 bp, Homo sapiens
cctgtccctggctccctcattaccgtcgccagcggagcgaacccgagagcgtggagcgggctgggccagaatagcctaacatggcagacc

SEQ ID NO: 193552 - DNA, 76 bp, Homo sapiens
cagaatcagctgttccctgcgaaagtgagacggtttaagcggaagcatcttactgccattgactgccagcatttgg

SEQ ID NO: 193553 - DNA, 100 bp, Homo sapiens
ctggaagggcttaggaccaaatgtgctacctccaacgacctcacacaaaaagaaatccggaccctggaggtgaatgccaaactcccgattgggaccccag

SEQ ID NO: 193554 - DNA, 83 bp, Homo sapiens
aaacatcaagaagaaagaatgcgtgtattttgtggaaagttccaaactgtctgatgctggaaagctgacttcatgagaccgag

SEQ ID NO: 193555 - DNA, 100 bp, Homo sapiens
atcaaaatcacgttataatcagattttgaccaagcattttgtaagccacgaacaattcaccaaatacctcaacttctcagagtctgaggagaaggaaagc

SEQ ID NO: 193556 - DNA, 50 bp, Homo sapiens
gacacctcaatggaagaatctttgaaggagcacctaggctaaaatgtcaa

SEQ ID NO: 193557 - DNA, 100 bp, Homo sapiens
gaacgagagcggagcggagcacagtccgccgagcacaagctccagcatcccgtcaggggttgcaggtgtgtgggagacattgggtttgcctatcacagat

SEQ ID NO: 193558 - DNA, 51 bp, Homo sapiens
gaagaatccccccgaaaggaccccccaggtttgacatctacaggaaggtgc

SEQ ID NO: 193559 - DNA, 87 bp, Homo sapiens
ttgttgctgctgcacattaggttgcagtatgtggccagttatttgcctcagtaaaagaaggcgtggagctatttcctatgacagttc

SEQ ID NO: 193560 - DNA, 82 bp, Homo sapiens
ggggatgtgagcgctgagcccttggcagagcggttctggtgaggttggaaggatgcagccacccggttgtcatgaaaggcct

SEQ ID NO: 193561 - DNA, 75 bp, Homo sapiens
tgaaggaggacgagccgtggtacgaccaccaggacctccagcaagcaaaatgatgcttcaacacccaggccaggt

SEQ ID NO: 193562 - DNA, 74 bp, Homo sapiens
cgatccgctggcgctagtctgaccctccgccaggcaaaaggaagacgcaaacatgcagatctttgtgaagaccc

SEQ ID NO: 193563 - DNA, 75 bp, Homo sapiens
ctttgcatggctcccggggcgctgactgcgtgttaacatcagaaaatgggaagcttcccttcatggccatgcttc

SEQ ID NO: 193564 - DNA, 75 bp, Homo sapiens
ccggctcatggcatcaagtggcatccatcataagagctggacagaggcctcacggagccccagatacaggtggtt

SEQ ID NO: 193565 - DNA, 74 bp, Homo sapiens
ggtacctctccttttccctctccctttccctaagatatttgatcctgatgacctttattcaggggtcaatttct

SEQ ID NO: 193566 - DNA, 98 bp, Homo sapiens
gacatctgggggccacaaatgctccttctcctggagacgcaactcaaggttctactgtttctaaggcttatggtgcttcaaagacatttggaaaagct

SEQ ID NO: 193567 - DNA, 95 bp, Homo sapiens
tgtaccagctcaccaaggcccccgcccacaccttctggagggaaagttgcggagcccggtgtgtgctgctctccaacctcagcagcacctcccac

SEQ ID NO: 193568 - DNA, 101 bp, Homo sapiens
ggagagggactctgaaagggccccggccagcgtccctgagacgccaacggcagtcactgccccccattccagctcctggatgactttcacacgacctgcca

SEQ ID NO: 193569 - DNA, 82 bp, Homo sapiens
tgatcatttgcatttcgttagctttctggattatatcaatgactgcaagcacctattatgtgaacacctacctcttcatgat

SEQ ID NO: 193570 - DNA, 75 bp, Homo sapiens
tcccagagtgctgggattacaggagacagtcttgctctgttgcccaggctgtagtgcagtggcacaatctcggct

SEQ ID NO: 193571 - DNA, 103 bp, Homo sapiens
caagctaaaaaagctgcatccacagaccttggagcaggagaaacaggtgatgatgaacagtctacacagatggctgcaagttgggaagatgataaagttacag

SEQ ID NO: 193572 - DNA, 82 bp, Homo sapiens
cgcagttcttgtttgtggatcgctgtgatcgtcacttgaactgcatgaacttgcccccagacaaggtccagctgctgagcca

SEQ ID NO: 193573 - DNA, 85 bp, Homo sapiens
aatatccaagaagcagtagagggtgccatgcacattcagcaaccgcctccacgtttgataaactttcagaatcacagccccaaac

SEQ ID NO: 193574 - DNA, 75 bp, Homo sapiens
agcatatttgagtcatttccttcgtacccacagtgcttcatgagagattcctgacattcagacaactgacttgta

SEQ ID NO: 193575 - DNA, 100 bp, Homo sapiens
ctgggggtcatcgacagctgcaaggaggccgtcaccttcaaggccgtcagacaagctccagaaacatgacaaggaggactttcctgcctcttggagatca

SEQ ID NO: 193576 - DNA, 75 bp, Homo sapiens
gaggagaccggcacccagacaggtggcgacggcagaggagcgcccagacaccatgtcacaaccctccagaactga

SEQ ID NO: 193577 - DNA, 96 bp, Homo sapiens
gaagacaggcctttcctgctgagcccagcctatcttcgcagcctgctcaggatgaccggaaagaagggatgaccgcgtttgtggaaaagagaaagg

SEQ ID NO: 193578 - DNA, 98 bp, Homo sapiens
gcagaagagatcaccaggaaggagcttcagagtgttagcgtttgtccaatggttctatagactcaaccgatgaaactagtcaaatagttgaactacaa

SEQ ID NO: 193579 - DNA, 75 bp, Homo sapiens
cttttgaaggtgcaagatactatataaattccatggaaaatgggagaccacctgatcctgcagactgggccgtga

SEQ ID NO: 193580 - DNA, 100 bp, Homo sapiens
tgatgtcgtcagtaatgcctggaatgatgatgtctcatatgtctcaggcttccatgcagcctgccttaccgggattaatgaaaatcaagttccatcctca

SEQ ID NO: 193581 - DNA, 98 bp, Homo sapiens
gcgacggcggaacccgtgggcctgtggactgcagcctcggcggtcagcagaacactctgctccagccaaggtggtgagggcagctgttcctaaacagc

SEQ ID NO: 193582 - DNA, 97 bp, Homo sapiens
aatatggcatatatgctgtagagaatgagcatatgtatgactatgaatatgatgaaaatggtgacagagtcgttttaggaaaaggcacttatgggat

SEQ ID NO: 193583 - DNA, 83 bp, Homo sapiens
ggcaccccgaacgggttgcttcccccgctgcgagcgagccatccagcaggctgtgggaagctccctgcagggggacctgccca

SEQ ID NO: 193584 - DNA, 50 bp, Homo sapiens
atttgcagctcattgaaggaaaggtggctgtacttttgatgatggtccag

SEQ ID NO: 193585 - DNA, 100 bp, Homo sapiens
actacacaaccgtctccagccttggtctgagtggactgtcctgcaggtacaaagacgatgccgacagccccaccgaggacggcgacaagccccgggtgct

SEQ ID NO: 193586 - DNA, 74 bp, Homo sapiens
tgagatccatctgcaccacggtgctgcctgatgttcaccaaggtgaagctggagcaggtgctgaaaggcccaga

SEQ ID NO: 193587 - DNA, 83 bp, Homo sapiens
ggcggtgctcgggccagcccttctctgccgtccctgggagcggagctggagtttgttcagatcatcatcatcgtggtggtgat

SEQ ID NO: 193588 - DNA, 75 bp, Homo sapiens
aaaacaatcgtgaaacttcagaatacttcaagaatagcagaggagcagatcatatactcctatgaaaggaggaat

SEQ ID NO: 193589 - DNA, 100 bp, Homo sapiens
agccaccacgcctggcctcactcaaacagtaaacgaggttgactacagacaaaaagctgctgcagcaggtagaattcccacaaactatctgagaagagag

SEQ ID NO: 193590 - DNA, 98 bp, Homo sapiens
atcagagtcgggagagctttctggatgatgtaaaccttattctggccaacagtgttaagtataatgctggattgagccagagcaaccataaagattcc

SEQ ID NO: 193591 - DNA, 124 bp, Homo sapiens
gtaatagatttttccctctaccttaaggatgtgcaggatcttgatggtggcaaggaacaatgcagatcttcgtgaagactctgactggtaagaccatcaccctcgaggttgagcccagtgacac

SEQ ID NO: 193592 - DNA, 75 bp, Homo sapiens
caaagtttttgacatgctcacagtagcagcttctccctttcctggtgatgatgaagaggaagtttttgacagtat

SEQ ID NO: 193593 - DNA, 112 bp, Homo sapiens
ccaagcttgcctccgcaaggacttgtgtactcagcaatgccgactgcctacaacactgtaaggatggggatgataagaagagacctgtgatcattcatcgagccattttggg

SEQ ID NO: 193594 - DNA, 100 bp, Homo sapiens
cagaaggtggggaggataaaatttggagcaagattctcaaggaagcaacaagatcctaaggtagctacagcaagctgggtagcaggcagatccaaaggat

SEQ ID NO: 193595 - DNA, 75 bp, Homo sapiens
atggaggagcagatcgagatcaaacctggtatcgccagccttaaggtgtctggagcccccacacttggccaacct

SEQ ID NO: 193596 - DNA, 98 bp, Homo sapiens
ttcaacatggaggcggaggtcgataagctggaactgatgagctggtggagttgagatctataatggagatcgtaaaataaaggtttccaacaccctgg

SEQ ID NO: 193597 - DNA, 100 bp, Homo sapiens
gccgtccagcagatggcggatgccctgcagtacctgcagaaggtctctggagacatcttcagcaggtgggtaaagcaggaatctgagatttccaaggaat

SEQ ID NO: 193598 - DNA, 100 bp, Homo sapiens
caacctcagcaagtccactcggaagaagttggcagacaagttcatccacgcagtgctggagaagagcgagttcagggatgagtcccagtacttccgcttt

SEQ ID NO: 193599 - DNA, 100 bp, Homo sapiens
gaaacacttcacgaaggggcaaaagtggcttcaattctaagagtggacagcggggatcttccaagtctggaaagtacagtgatgtgtgttctgaaattgt

SEQ ID NO: 193600 - DNA, 82 bp, Homo sapiens
gccattatcgcatctccccgacaaacaccacgagaattccgcagcccacacgcgagggcggcactgctcacaggacggctac

SEQ ID NO: 193601 - DNA, 98 bp, Homo sapiens
gcgcagagctcgccggcgccccgacgggccccggagcagcggcccccggccgggcctagagagcgtggaccactatcccattctggtggcagtgacgg

SEQ ID NO: 193602 - DNA, 100 bp, Homo sapiens
ccgaatgaagttaaggtcccttgcccatccggagaggtcgctgtggttcccctccgacctggcagagctgcgggagctctctgaggtccttcgagagtac

SEQ ID NO: 193603 - DNA, 100 bp, Homo sapiens
cgccggcgcagcagggaaaggcaaaggcaaaggcggctcgggagattcagccgtgaagcaagtgcagatagatggccttcatcgagagtaaacatgaggt

SEQ ID NO: 193604 - DNA, 117 bp, Homo sapiens
cggcaggaattattggaggccaggtttactggagtaggtgttagtaagtgtgacttctttaagcggacccgctattatcagatcatgcccaagtaccacgcagtgcggatccgggag

SEQ ID NO: 193605 - DNA, 97 bp, Homo sapiens
tgcctccgagcgccgtccgccaggaagactccctgcctcctgagtcccagaactttatattgctgttggaatatctggagccatccaacatttagct

SEQ ID NO: 193606 - DNA, 100 bp, Homo sapiens
cagagagctattattccctgtattaaaggtattgatgaagatgaccctactgctgatgataccagtgctgctgtaactgaagaaatgccaccccttgaag

SEQ ID NO: 193607 - DNA, 100 bp, Homo sapiens
agagaatgtaagacaggaaaataattaaatattcttaccgaggaaaccacccctactcctaatcccccgactacagaagaggagaaaacggaatctaatc

SEQ ID NO: 193608 - DNA, 121 bp, Homo sapiens
tgccaccatcagtgcagagaagcattgggggaaccagtgggccccacgtgggtaaaaaggatgaggagaacaatccccttgagacagaatatggcctttctgtctacaaggatcaccagac

SEQ ID NO: 193609 - DNA, 100 bp, Homo sapiens
gcgggcgccaatggggagcagaaggactcggacacagcttctagaggccacccgcatcccctgcctcctggccccatccgtcttcaaagccagcagtggc

SEQ ID NO: 193610 - DNA, 82 bp, Homo sapiens
ggagtgcatgctgtgtcttggggccctttgggacgagtgctgtgactgtgttggtgctggagaatctggtaaaagcaccatt

SEQ ID NO: 193611 - DNA, 100 bp, Homo sapiens
gaatatgctgcattagacaaacgagagcatcagaggctccttgaaatgctagatacagagaaggaactgttaaaagaaaaaataaaggaagctttgattc

SEQ ID NO: 193612 - DNA, 80 bp, Homo sapiens
atccgttcttccgaagatcctaatgaggacattgtggagagaaacatccgaattatgcctgcacagctgaccacagttgg

SEQ ID NO: 193613 - DNA, 75 bp, Homo sapiens
gggatcccagcctcaggcgtgcgcggacggtgtgcggagtctgacaacctggattaccgcctaggagctattcac

SEQ ID NO: 193614 - DNA, 74 bp, Homo sapiens
attcgcagtggtcgcttcttctccttgctgaaagtacccatggcagacaagcctggtaacacagtgaatttccg

SEQ ID NO: 193615 - DNA, 100 bp, Homo sapiens
tcaccaagaagatgaagaagattgtggatgccgtgatcaagtacaaggacaggttcttgggtgtctctggggagtccctgggccagaccttcctccagac

SEQ ID NO: 193616 - DNA, 75 bp, Homo sapiens
tcctcccgggctggcgtgcgccagaggatccgcaaagtgctgaacagggggagtcggtgaagtacttcctggaca

SEQ ID NO: 193617 - DNA, 50 bp, Homo sapiens
gcaagtattacatccagcagccagaatggaactgaagaggagtttggagg

SEQ ID NO: 193618 - DNA, 100 bp, Homo sapiens
agcattggtaaagaacgatcgtccagtggagcttctcggacaaactatttagtggaaaaggcttacattttcagccatcagttttagattttggaataca

SEQ ID NO: 193619 - DNA, 76 bp, Homo sapiens
gcactggccttatgcctttgagacctctggccatgtagacaaatttgctgacttcatggtgaaagacgtaaaaaat

SEQ ID NO: 193620 - DNA, 75 bp, Homo sapiens
acgagatggagtgggctggcgcctcgggagagcgaatcgagggcggcggctcctgcccctcctaaagctgaagcc

SEQ ID NO: 193621 - DNA, 83 bp, Homo sapiens
ccgatgaggaagtactgagcctgttggaggaactggcccggaaacaggaggacaacccagcgggtgccgcttctccacccgag

SEQ ID NO: 193622 - DNA, 75 bp, Homo sapiens
caaagggtccctcaaggccccctttggacgcaaagatctttcgaggccagaggagaattctgcctaagccaactc

SEQ ID NO: 193623 - DNA, 75 bp, Homo sapiens
ctggcctcgattacaaccgcagttaccagagtcaacaaacactcgggtcctatacttcagcatcttttcaatgtt

SEQ ID NO: 193624 - DNA, 100 bp, Homo sapiens
ttagattctggactggaaaaagcaaaagaacttcagcatgaactctttaggcagtgtacaaaaaatgaggagtcaaattgactttatcagctttaatcga

SEQ ID NO: 193625 - DNA, 50 bp, Homo sapiens
tatggatggagaattatcctgtcgtgatgatgatgatgattttgatgatg

SEQ ID NO: 193626 - DNA, 98 bp, Homo sapiens
agaggaatgcctggacaaactggccccaagggaccagtccaacgtcaggcggatgcacacggctgtgaagctcaatggcgtcgtcctcaacaagtccc

SEQ ID NO: 193627 - DNA, 100 bp, Homo sapiens
ggcgaaggtctcagagctttacgatgtcacttgggaagtatcaccttttgccatgatagcatttctttcattggacagttccttacaagggctccactca

SEQ ID NO: 193628 - DNA, 74 bp, Homo sapiens
cgccgtccagagcaaggaacaggccgagcagtggctgaagcaagtaactggcagaagttttggtgataaagatt

SEQ ID NO: 193629 - DNA, 97 bp, Homo sapiens
ccaaggtgcaacagtgggacagccaggtcaccatgggccacctcttccagaagctgaaatggtggagtcaatgaagaaagtagcagggatggatgtg

SEQ ID NO: 193630 - DNA, 82 bp, Homo sapiens
aagagaagatcatcgagcatttcaaacgtgtggacgaatgtggaacctcgctctgtggctgtgttcccttggcactccttag

SEQ ID NO: 193631 - DNA, 100 bp, Homo sapiens
agattttgcatctagaggaattgaaaatggccttcgccggattttatgtcaagttggtttacaagaagggccagatggtgaaaactcttctctagtggac

SEQ ID NO: 193632 - DNA, 114 bp, Homo sapiens
cacggatcggattcctcagctacgaggaggcgctgaggagaggtacctttgacaggagcgtgaccctgctggaggtgtgcgggagctggcctgagggcttcgggctgcggcaca

SEQ ID NO: 193633 - DNA, 98 bp, Homo sapiens
ccagtggatggtccagacccaaggaaggagtgaattgaaagctaaggaggggctcagaatttgttcctagagacagagaacccaatacaaaagtgaga

SEQ ID NO: 193634 - DNA, 82 bp, Homo sapiens
gtttgtgcaggacaccgacatggaacagggactcactggggcatttgatgagcttgttgaagcataccaagagcaggccaaa

SEQ ID NO: 193635 - DNA, 75 bp, Homo sapiens
gccgcagtgccacttcgacatcgagatcaaccgggagccggacagaagaaactcatccagtcagctggaaaccag

SEQ ID NO: 193636 - DNA, 100 bp, Homo sapiens
tcgggtaattaatctggccaatgagatgtttggttacaatggctgggcacactccatcacgcagcagaatgtgggtcgtggtggccgagttggaacccac

SEQ ID NO: 193637 - DNA, 100 bp, Homo sapiens
caaggaggagcctgttccagaactgctggaagctgaggacctgaaggagaagaaggagaaggtggaggagaaggcaagccggaaagagcgaaagaaagaa

SEQ ID NO: 193638 - DNA, 75 bp, Homo sapiens
ccagtagcttggatccttgtgggcatgatccataatcggtttcaagtattgactcggagacaaaaagaggccaag

SEQ ID NO: 193639 - DNA, 82 bp, Homo sapiens
agcaccgcagatgttgtcaaggtggcctaccaggaggccaggggtgtcgccatggaaccttccctgtatactgtcaaagcca

SEQ ID NO: 193640 - DNA, 101 bp, Homo sapiens
cgattgaacagagcggctgacgaaccagcgagtaggagagaggggcaagattcttgccaagagaattaatgtgcgtattgagcacattaagcactctaaga

SEQ ID NO: 193641 - DNA, 80 bp, Homo sapiens
gtcaagaagcctgggtcctctctggcaagcagcagatagctaaggaaaaccagcaggcagcgctctcaggacgtcaccac

SEQ ID NO: 193642 - DNA, 82 bp, Homo sapiens
ctggctgctctgctgatcggaggcttcgcaggtctcacctcgacggtgatttgcaggtgggaacgctgtgaggagctccgtg

SEQ ID NO: 193643 - DNA, 97 bp, Homo sapiens
gtgactgagcggagcccggtgacaggatgaatgaagctgataggaccttgatatatataactctctacatttctgaatgtctgaagaaactgcaaaa

SEQ ID NO: 193644 - DNA, 83 bp, Homo sapiens
ccctacgagtgcaacatctgcaaggtccgcttcaccaggaccaagaatcgccttcagccctgtctggtgcatccttggcagaa

SEQ ID NO: 193645 - DNA, 82 bp, Homo sapiens
agacatggcccatgctgtgcatcccaactacctgccctaggcgagcccctttaccgggtgagcaccggcaactatgagtacc

SEQ ID NO: 193646 - DNA, 80 bp, Homo sapiens
ctgagcttcaaaaggggggacatcctcaagctctattaccaggttttaaacttcgccatgatcgtgtcttctgcactcat

SEQ ID NO: 193647 - DNA, 83 bp, Homo sapiens
accagtctgggggcgctggcggcctgcgcagccacctcaagctccctggaattcccatgccaccaccacctttgggactcccc

SEQ ID NO: 193648 - DNA, 100 bp, Homo sapiens
agaatgagtataaaggatgggttttaactacagacccagtctctgccaagtttctagagaggaaggatctccccagctgtcttcagcaaggccgtctcct

SEQ ID NO: 193649 - DNA, 83 bp, Homo sapiens
catctatgccatcacagacaccgcctacaggagtatgatgcaagagcaagtgcaccggcacctggaccaacacgaagtgagat

SEQ ID NO: 193650 - DNA, 74 bp, Homo sapiens
cgtgtgcgggttgcaaggagcgtgcgtgcgtctgagtatgaagagtgtaaagacctcataaaatttatgctgag

SEQ ID NO: 193651 - DNA, 83 bp, Homo sapiens
tgtgctgtgccaccaacgaggacagatcctgggtgttcgacagctacagcctgacagggtcttctcaagtcttaggattgcag

SEQ ID NO: 193652 - DNA, 82 bp, Homo sapiens
ggacagttcgctacacagcaatgcatcgagagacattttaaatccaaaggatgtgattagtgtccagctggaagacactacc

SEQ ID NO: 193653 - DNA, 122 bp, Homo sapiens
tcatcaacagggaccggaagatgcccacggactacatcaggaacggggtgctctacgtcacggagaaaccccgtgcctgtgtttgaggcggcacgcagcctagacgacagactgcagccccc

SEQ ID NO: 193654 - DNA, 82 bp, Homo sapiens
aatacttttagcagcactagtattgcccaagctgactatggccttgaacacttggaaattatcagttcattgcctagcatag

SEQ ID NO: 193655 - DNA, 98 bp, Homo sapiens
gacaactggatcagtttcattaaaaagaaatacccacctcggaaagacttggtccgagctgtgtccatccagacgggctacctcatccagagcacagg

SEQ ID NO: 193656 - DNA, 98 bp, Homo sapiens
gctgctaagtacatgctggattgtagaacttctctctctttgcagagttttcaaggcaaagatgtggcagcaattgcaggtggcttggtggatgctga

SEQ ID NO: 193657 - DNA, 74 bp, Homo sapiens
tcgaatgtgactgactagcagcttcattttgaaacaggggcaagtgtccgagtggtgaatcagctacttacaga

SEQ ID NO: 193658 - DNA, 96 bp, Homo sapiens
ctcgagggtgacgctcgctccgctcgtcccgctcgtcatggcctacccgggatacggaggagggaatttcagaaactgtggaggagtgtcactgta

SEQ ID NO: 193659 - DNA, 100 bp, Homo sapiens
gaccgagagcgcgaatatcgtcatcgttagaagggtggaattgcgtttgttgccataaaaggagcatttaaagtttacttcaaacagcagcaatatttac

SEQ ID NO: 193660 - DNA, 82 bp, Homo sapiens
ccgccctgcagccggccgtcggccccgcagccacaggctatggtgaactaaacggtaatgctggagaaagagaaatatcttt

SEQ ID NO: 193661 - DNA, 73 bp, Homo sapiens
ggcctgcaaattcatgacaggattattgaggatttttagactctgaggagcagttggagctaatccacattat

SEQ ID NO: 193662 - DNA, 83 bp, Homo sapiens
gtcccttcacccgggctccgctcttgccttctccacacttgtttgagacaagaggagcagcagcggcaccgcccctcaccctg

SEQ ID NO: 193663 - DNA, 90 bp, Homo sapiens
tggtaattaccatcaatactatggaatgcattttgaaacttaaggatgggatacaggaagcttatgtgcagaaaatggttaaagtgtgca

SEQ ID NO: 193664 - DNA, 80 bp, Homo sapiens
cttggactgagtcctgcaggacacagccatcactggtgcaagctatatttaacggagatcctgatgaagttcgagcacta

SEQ ID NO: 193665 - DNA, 100 bp, Homo sapiens
tgatacctttgatccagaacttgcagcaacaatagaaggtctgaagaaaaccctgcgggatgagatcaatgccattctgcagaagaggattatggtgctg

SEQ ID NO: 193666 - DNA, 75 bp, Homo sapiens
cagccactttgctgcactgaccagttatgaagacagtatggagtttccagaccatagtagacatttgctacagtg

SEQ ID NO: 193667 - DNA, 90 bp, Homo sapiens
gctggtcagtgtggcaaccagatcggtgccaaggtcatggcaaaaccccaaaagatgccgcgtcagttcgagccacgcatccaataccag

SEQ ID NO: 193668 - DNA, 100 bp, Homo sapiens
taatgcatgctatggaggcacagctgctgtcttcaatgctgttaactggattgagtccagctcttgggatgagtccgatgggtggtccttttattcctgc

SEQ ID NO: 193669 - DNA, 75 bp, Homo sapiens
cctcgctgtccctgcggcttctgggggtctttcccgcggtgacttcccttgggctgaatgaacaggagctgttat

SEQ ID NO: 193670 - DNA, 75 bp, Homo sapiens
ggcagcgcgggatcccagcctcaggcgtgcgcggacggtgtgcgggttgttcggaatcctataattgaaaaacag

SEQ ID NO: 193671 - DNA, 87 bp, Homo sapiens
ggtggtagcagagctcggaatcttcctcttcctccaccaccaccacctagagggggcttagcagtgtctgcaaaaacgaatcttttc

SEQ ID NO: 193672 - DNA, 98 bp, Homo sapiens
tgggacaacgataccaccccgaatggtacgccatgaagtgcctggacaaaaagcgcatcaagatgaagcagggggagaccctggccctgaacgagcgc

SEQ ID NO: 193673 - DNA, 108 bp, Homo sapiens
cgggaggtgaatttccatgtcaacatagtcctgggcataattggaatatcatttggagaaagtgtcatggaagttctgcgtccacagcttataagaattgatggccgg

SEQ ID NO: 193674 - DNA, 50 bp, Homo sapiens
cccgcctccgggcatcttcaactgtatccagtagaaaaagcactctccag

SEQ ID NO: 193675 - DNA, 100 bp, Homo sapiens
gttcaatggctgaaacacagtcgaaaagaatactgtgaattatgcaagcacagatttgcttttacaccaaacacgaagatcgattgagaagttattagaa

SEQ ID NO: 193676 - DNA, 98 bp, Homo sapiens
tgccagagtttgtagcctattggaggaaaacacaccaagttagcagacttgaagaaagagaagcagaactgaagaaggaatataatgcattacatcaa

SEQ ID NO: 193677 - DNA, 100 bp, Homo sapiens
gcaacaccatttccagcctgtttggaggcggtaccacaccagatgccaaggagaatggtactgatactgtccaggagttcaaagaaggacgcagagccag

SEQ ID NO: 193678 - DNA, 101 bp, Homo sapiens
accaaggatctggggatcttcgcactatcccaagcaccagtatgcatgagcgggtgaaccgaacagaaagacagtttcgatcacttccagctaaccaacag

SEQ ID NO: 193679 - DNA, 100 bp, Homo sapiens
ggcgcagctgccctgggaggacggcagccccaggccatttactgcaaggatgttctggacattgaacagttctctacggtcaagggcgtggagctggagc

SEQ ID NO: 193680 - DNA, 90 bp, Homo sapiens
ccagggccggaggattaccatcaccggaagcagagtacaggctgtgcaacgggtcagacaaggaatgtgtgtcccccaccgccagggtca

SEQ ID NO: 193681 - DNA, 74 bp, Homo sapiens
aggaacctgctttctctcgatgaggataacatccctccagaagatgactgtattggtgatcacgtaccgagaac

SEQ ID NO: 193682 - DNA, 90 bp, Homo sapiens
cagctccccagggcccacgggccagccccgccgccctcgcaacctggcagccgccgccgtggaagcggatgtgatgctggtacaacccag

SEQ ID NO: 193683 - DNA, 100 bp, Homo sapiens
acggcttctataacccagtcacgagggtagtcaaggactataggaaccgctttctaagaaacgcagatgagcccattattgaagagccaagccgcctcca

SEQ ID NO: 193684 - DNA, 100 bp, Homo sapiens
gagaccttctatgaagtcaactttgatgatggctccttcagcgacaatctttatcctgaggacatagtggccctgtctctgcccctggtggtcatcgtcc

SEQ ID NO: 193685 - DNA, 51 bp, Homo sapiens
gactgtggagccgggagccggcaggacctgaaggagaagaaggagaaggtg

SEQ ID NO: 193686 - DNA, 97 bp, Homo sapiens
cgcagatcggcgcccagcaatcacagaagccgacaaggcgttcaagcgaaaacatgaccgctgagcccatgaggacagctactaaagcttatccaca

SEQ ID NO: 193687 - DNA, 100 bp, Homo sapiens
taaaaaacaacaggaacagttgcagcttcaacttttacaacaacaacatgctggaaaacagcctaaagaggttttgagcaaaattttggactgtgaagca

SEQ ID NO: 193688 - DNA, 90 bp, Homo sapiens
cctacttctataaagtcatccagctgtgattgggttattatacccctgcattgacagacatctaggagaaccacataaatttaaaagaga

SEQ ID NO: 193689 - DNA, 97 bp, Homo sapiens
agcatgatattgagctttacatgcacttgaacagactagaaattgcaccacagatatatgggttccaccattggcgcctggaactattttgtatgaa

SEQ ID NO: 193690 - DNA, 100 bp, Homo sapiens
aaaaaagcacacccttttaagactactttatgaggcacttgtggattgtaagaagaggtgaaacaccattcaaagtcgtagtcaaatctctttcacctaa

SEQ ID NO: 193691 - DNA, 108 bp, Homo sapiens
cccgcttctcgtagtcctgggagcacagcagaagtgtgctggagaatctggtaaaagcaccattgtgaagcagatgaggatcctgcatgttaatgggtttaatggaga

SEQ ID NO: 193692 - DNA, 74 bp, Homo sapiens
ttgatatatatgctgacgaggagttcaaccaggagaagctattccaatctatgcagaaatagaaaattgttcct

SEQ ID NO: 193693 - DNA, 75 bp, Homo sapiens
gcgggcctggactgtgggctggtgtgtggaactggttgataacactgatgctgaggggaggctcatactggctga

SEQ ID NO: 193694 - DNA, 100 bp, Homo sapiens
ctgcagaggaccatccagtgtgcaaaaggaggaggaagccaagaatctggtgagcgaagccatcgcagctggcatcttcaacgacctgggctccggaagc

SEQ ID NO: 193695 - DNA, 50 bp, Homo sapiens
aggtgtcaatcccgaggaacaactggatgtgaacctgaagatgccccgga

SEQ ID NO: 193696 - DNA, 100 bp, Homo sapiens
gtgacctggaccacggcgcagacgcgggcgagctgcggctcggacgccagcggacacgcgggcgagctattccaatcaagttctctgaaaagcaacaggc

SEQ ID NO: 193697 - DNA, 100 bp, Homo sapiens
ttcggagtggacgaggaggagcgggtccgggtgctgcagggtgtccggagtggagcctttcaggctggcatggagagcttaaggggcaactgaaggagac

SEQ ID NO: 193698 - DNA, 75 bp, Homo sapiens
agggcggccacccggagccagcggagggacagttaccggtattgtaagaacaagccgtacccaaagtctcgcttc

SEQ ID NO: 193699 - DNA, 83 bp, Homo sapiens
gtcggcgcaggcccagatgcgcgcgatgctggaccagttgatgggcacctcccgggacgcaaaatgatgcttcaacacccagg

SEQ ID NO: 193700 - DNA, 75 bp, Homo sapiens
agctcaagaccagggccctgcagctggaagaggagctgttccagagtccgccatggagagggaccgctacatgag

SEQ ID NO: 193701 - DNA, 90 bp, Homo sapiens
acttggccatggaaacctggcttctcctggctgtcagcctggtgctcctctatctctctggacttattggacaaaatgttgacattcaac

SEQ ID NO: 193702 - DNA, 88 bp, Homo sapiens
ttcaagaggaagcccgctgccttgtggaggagttgagaaaaaccaatgggctggggagcagaataccaccgccaggatgttactagca

SEQ ID NO: 193703 - DNA, 100 bp, Homo sapiens
cggcgacagcagccaggagtcatgagcgacagcggcgagcagaactacggcgagcgggacagagcgggatgccaccagcttgtccaaagggaagttccag

SEQ ID NO: 193704 - DNA, 128 bp, Homo sapiens
agagaagtttcactacatctatagttgtgacctggatatcaacgtccagcttaagatgtgtcatggagaaactccagctgggcccagagattctgcagcgggaaaatccaaggcttatttatgccagg

SEQ ID NO: 193705 - DNA, 75 bp, Homo sapiens
tctaagactctgggacactcctgaagtcgggaaatggtcttctttgatgtgaggattggagacaaagatgttggc

SEQ ID NO: 193706 - DNA, 75 bp, Homo sapiens
catggccccctggtttagggaggctattgacctgaaaagtggttctggaaaagtgtaccaaggccctgcaaaagg

SEQ ID NO: 193707 - DNA, 100 bp, Homo sapiens
aagaaacccagcttgatatgttgatatggacatttctggaattacagagccccctctacattgagcacaagacagtgacgaatccacattcttcagccag

SEQ ID NO: 193708 - DNA, 100 bp, Homo sapiens
agagacttcttgccatggctgccgtaagaatgttgcttctccatttctggagccacatctagtccgaatggccaaagttgatcaaaacagagttcgttat

SEQ ID NO: 193709 - DNA, 98 bp, Homo sapiens
caagaccgaattcagaaggatatcgacgtcgtgatccagaagtccagagctgaggactgcctgtttgcagacacgatgaggcgagtggtacgacagag

SEQ ID NO: 193710 - DNA, 100 bp, Homo sapiens
gcgcggcgctggactggagcagaaccccaggactgcgcccccgggagcgggcgcccagagacccaacatgagtgaagtttcctgcaagaaacgggacgac

SEQ ID NO: 193711 - DNA, 75 bp, Homo sapiens
agaccactaccagctggcactgggcaagttctcagagggcactgcagctgcccacattggcgttggaataagtgg

SEQ ID NO: 193712 - DNA, 75 bp, Homo sapiens
cgcgttgtgcaggttcgtgcccggctggcgcggcgtggtttggtgccctggttgtcagatgttggaaagcagtag

SEQ ID NO: 193713 - DNA, 75 bp, Homo sapiens
tccatggtgatggtggctgtgggtgtctacgctcggctaatgaagcatgcaggtatgctgccccacaaaaccaag

SEQ ID NO: 193714 - DNA, 80 bp, Homo sapiens
tatttgctatttgtcttttccagattcaaattcagtaactctgggtggattttaactacaactcttgtcctctcggtgat

SEQ ID NO: 193715 - DNA, 100 bp, Homo sapiens
ccacagtgtgaagttgcccgaaggaagcttcaggagattgaggacagagacgtcactaacatatattggcacagtaatgtaattatagagcggattgagc

SEQ ID NO: 193716 - DNA, 83 bp, Homo sapiens
agctaagactcccgaatacttcagaagtggggaaatggaactgtggctgcaccatctgtcttcatcttcccgccatctgatga

SEQ ID NO: 193717 - DNA, 82 bp, Homo sapiens
ggaaggtgccatcctcaccttgctgagtgacattgcaagagtgagccatggagctacgtgtggggaacaagtaccgcctggg

SEQ ID NO: 193718 - DNA, 100 bp, Homo sapiens
cgggagagaagatgccgcagcccgagtcccagaaggcggcgatcctgggctgcgggcaaggcgtcactcagcctctgaagaagcttcgggttcagactca

SEQ ID NO: 193719 - DNA, 100 bp, Homo sapiens
actccttgcgccccgtcgcctgccgccactgcaaagccctgctgaggagaagaaagtggaagcaaagaaagaagaatccgaggagtctgatgatgacatg

SEQ ID NO: 193720 - DNA, 75 bp, Homo sapiens
caaatatgctgtgggagaagagtgtgacttcgaggcgctgaacaacctgcagtccaccttctcaggatttggctt

SEQ ID NO: 193721 - DNA, 73 bp, Homo sapiens
gtacagtatccaagtggcaataggaggtaggaaaagtaattggaattgctattatgaaacactttggatggaa

SEQ ID NO: 193722 - DNA, 100 bp, Homo sapiens
cgcgaatatcgtcatcgttagaaggaccaaactcttacccaggatctactggagcagctgttggagcccatgacgcctgtcgggatgcaaaagagaagcg

SEQ ID NO: 193723 - DNA, 100 bp, Homo sapiens
gccggaccccagcacacagaagccgagacgtcttcaggagacatatgaagcaaaaaggaatgaattcctgggagaactgcagaagaaagaagaagaaatg

SEQ ID NO: 193724 - DNA, 75 bp, Homo sapiens
agaactgcaggacatctgcaatgatgttctgagagacaagagagacacctccaacttcgacaaagagttcaccag

SEQ ID NO: 193725 - DNA, 88 bp, Homo sapiens
caagatggaggagtacgcgcgagagccttgaattcactcgtgaagtaacagacacacagatgccacttgttgctcctgtcattctccc

SEQ ID NO: 193726 - DNA, 98 bp, Homo sapiens
ggctccccacagaagctcatccgcaaggtgtccacgtcgggtcagatccgacagaaggtggtaattgaaactttatcagtgggagcaaccatgctgtt

SEQ ID NO: 193727 - DNA, 50 bp, Homo sapiens
gtggagtgtaggtcatatcgccgcggaccctggttaggagtagaatggga

SEQ ID NO: 193728 - DNA, 75 bp, Homo sapiens
gacactgacaactctgagggaggttcagcagactgtacaggatctttttggcagagccccaagtaaagctgtcaa

SEQ ID NO: 193729 - DNA, 100 bp, Homo sapiens
cgcaaccaggagcgcctggaggaagccctgagcccgcggttcccttcaaaaagcggctgcaagatctggaggtgcgggagaaggagtcggccacgttcct

SEQ ID NO: 193730 - DNA, 100 bp, Homo sapiens
ctggatgatacccaagttaaaagagaaaatatggagaagtcttgtgcaagcaaggaagaagtcaaagaagtcagtattgaagatacaggtgttgatgtag

SEQ ID NO: 193731 - DNA, 100 bp, Homo sapiens
tcgcgtcccagatgggccacagcgaggtggtgcgggtgatgctgctgcgcggagccgaccgcgacgctgcgcggaacacagtggtgaccgaggattttag

SEQ ID NO: 193732 - DNA, 75 bp, Homo sapiens
tcccaaagctattctgggggcaacagaggtaaaaattcatgcaggccccaaatttgcctcctatctgaccttcag

SEQ ID NO: 193733 - DNA, 75 bp, Homo sapiens
gacatctccaactgtgggaactctttccagcttgtgtctggcacgtgtggttctcaaatataggcattctgatgg

SEQ ID NO: 193734 - DNA, 98 bp, Homo sapiens
gaaccgaccacaccgtggcaagaggacccagaacccgaggacgaaaacttgtatgagaaggataagttctgaacgtcgaaaagaaaagtctcgagatg

SEQ ID NO: 193735 - DNA, 98 bp, Homo sapiens
aggaggtggccggcttcgttctgaaccgcctgcaatatgcaatcatcagcgaggcctggcggctagtggaggagctatcgaaaaaccttgaactgagt

SEQ ID NO: 193736 - DNA, 88 bp, Homo sapiens
cggcctcctcagtgcgaagaagctgcagccgcacctggccaaggatactaatggaccatactaccaaggaccagtccacctgaaccac

SEQ ID NO: 193737 - DNA, 100 bp, Homo sapiens
gtagagattggcttcgggctgagctagcagtgagcaccttttggcccaatgaatatcaggattcactggcaaaatttgctggcagaaaactgaaagactg

SEQ ID NO: 193738 - DNA, 100 bp, Homo sapiens
tgcgattccaaggagggcaaagcgtcctgcggtttcggctgagtccagctcctccatgaactccaacaccccgctggtgaggataacaacacgcctctct

SEQ ID NO: 193739 - DNA, 82 bp, Homo sapiens
ctgccgctgtcgctgctgctcgttcgagtcgcaggtgattgaattactcagatatgaagatcatcatctaggttttgtgtaa

SEQ ID NO: 193740 - DNA, 74 bp, Homo sapiens
tgttaaagattgcccaccaaatgagcttggtgaccaagaatatggcccaggtgaccaaagccctggacaaggcc

SEQ ID NO: 193741 - DNA, 100 bp, Homo sapiens
gacgcacctgggcatcggtggcgccggccagggaagtacgcagccatctcctcttcggagcagcgccagagctacaagaacgacttcaatgccgagtaca

SEQ ID NO: 193742 - DNA, 75 bp, Homo sapiens
tgaagatgttcctatttgtattcattgcagtctctgttggatgaacccaatcccaatagtccagcaaacagccag

SEQ ID NO: 193743 - DNA, 74 bp, Homo sapiens
aagaagtaggcattgaccccttgtccagttactctaacaagtctggagattaccagagactgatgactgtggcg

SEQ ID NO: 193744 - DNA, 100 bp, Homo sapiens
ttgtacggcttagaggacttccctttggatgtagcaaggaagaaattgttcagttcttctcagaaataagcgggttttgaaaacaaaaaaaagaaggagt

SEQ ID NO: 193745 - DNA, 90 bp, Homo sapiens
gtgccacgccgcccaggagacccctctgctgcaccacttcatggtcaaggtgttgaaatgcatctcagaggtgcaggccaacaatgtggt

SEQ ID NO: 193746 - DNA, 101 bp, Homo sapiens
gacgggttcagttcgtcatggggctgtttggaaagacccaggagaagccgcccaaagaactgattcagtcgggtccactaaaaatctctagtgtatcagaa

SEQ ID NO: 193747 - DNA, 82 bp, Homo sapiens
cacctggtggtttgtgtatgacgccgagggacctcacatcaacttctaccagctgctcctgaaactgggcactggtctcctg

SEQ ID NO: 193748 - DNA, 100 bp, Homo sapiens
cctcaacagtgaaagtaactttgcccgagcatatgcacagggtatcagccgaaccaagtactgggagaagatgggtgtgaacctgacacgcagcaacaag

SEQ ID NO: 193749 - DNA, 101 bp, Homo sapiens
gcggcgcctcaggcacctcggcccggcctcgaagcggaggatccctgtgtcccagccgggcatggccgacccccaccagcttttcgatgacacaagttcag

SEQ ID NO: 193750 - DNA, 97 bp, Homo sapiens
tctgcaacgggctcatcaactcctacgaggacaaaagcaacgacttcgtatggtggttgtgggaagagaagtttgcagaactgaaatggaggtcaga

SEQ ID NO: 193751 - DNA, 50 bp, Homo sapiens
ttgactttgacgtggaaatacagttagatactgatttagaagaacttcag

SEQ ID NO: 193752 - DNA, 88 bp, Homo sapiens
ctccaatgggcctttccagcccgtggtccttctccatattcgagacggtatccaactgttgaaaaacgagccagagtcttcaatggag

SEQ ID NO: 193753 - DNA, 75 bp, Homo sapiens
cccagagtccgcgaatcctccgctccgagcccgtccggactcccccgatcccagaaagcatcacagtgcagacta

SEQ ID NO: 193754 - DNA, 100 bp, Homo sapiens
ggttgcacaataaaccgacgtttagccagaacccttaggagaaatcttgagagtggacagcaattgtgaagatcgccagagagttctgtgtttcatcacc

SEQ ID NO: 193755 - DNA, 50 bp, Homo sapiens
ctggttttctcaccgcagatggtggggttgaatgtctccattgaatgtaa

SEQ ID NO: 193756 - DNA, 98 bp, Homo sapiens
accgggatcggttgccttgagcctggtactccaaagattcaggtttactcacgtcatccagcagagaatggaaagtcaaatttcctgaattgctatgt

SEQ ID NO: 193757 - DNA, 75 bp, Homo sapiens
gatgtggggggattctcgacctgctaacagaactggaccttttcggctcatttataagtgctcctgtgaaatggt

SEQ ID NO: 193758 - DNA, 90 bp, Homo sapiens
ctgacaagccttcaaggagcccaggggtggtggtcaccaatacaattccacatgaagtccagaagctccagtgccccaagattaaaactg

SEQ ID NO: 193759 - DNA, 100 bp, Homo sapiens
gggtgatcaaaagaaagctcatcaagccagagctggagtatctcaggattcgctaaatattgtaatggatcaaggagatacacctacactagaggaagat

SEQ ID NO: 193760 - DNA, 119 bp, Homo sapiens
tttcttggcccttgttcccccaaatgtctgactctgactctcggactgagaaacgcaagggcgtgatggtgggcatgggtcagaaggattcctatgtgggcgacgaggcccagagcaag

SEQ ID NO: 193761 - DNA, 100 bp, Homo sapiens
acgtctctaccgagcacaaactccacgaagccaacgcccagaaactatgttccaacttcctgtcaacaatcttggcagtttaagaaaagcccggaaaact

SEQ ID NO: 193762 - DNA, 100 bp, Homo sapiens
gaagagagttcgcctgagccagatcccaggtcagctttgtgaaagaagctatcatgaaggtgttgaacttggctctcatgtttgcagacggttggcaggc

SEQ ID NO: 193763 - DNA, 83 bp, Homo sapiens
ctccagcgtgtctccagccgtgccccagtggacaggaaagctaaggcctcagcgatgccggactccccagcggaggtgaagac

SEQ ID NO: 193764 - DNA, 96 bp, Homo sapiens
ggatttgttaaggattccaagtaactcttatttgtttcgtgaccttgtccagtagaaggctatttaattttcacaactgcttgaattttgacatac

SEQ ID NO: 193765 - DNA, 82 bp, Homo sapiens
gacaagccgctggcagccgcggatctcaccgccgctcagggaaaagcaggtgatattctcagtggagaccaggacaaggaac

SEQ ID NO: 193766 - DNA, 90 bp, Homo sapiens
ggcgggagcaggagcccgcggccggccagccgaagatggtggcggctactcctcctgggggggccctcagcctcttggccttgaacgggc

SEQ ID NO: 193767 - DNA, 98 bp, Homo sapiens
gtggactcagagaccaataaaaataaactgcttgaacatcctttgactggttagccagataatccgcaagatgggattatggtgaaactagttgtcaa

SEQ ID NO: 193768 - DNA, 101 bp, Homo sapiens
attcctactggacaagaatatgctgccaaaattatcaacaccaaaaagctttctgctagggatgaggaaactgaggatcagagggattaagtacttcccaa

SEQ ID NO: 193769 - DNA, 100 bp, Homo sapiens
cttcccacaaactgatgttctttcaagttcacttgaggcagaacacaggtcctacctcgagcataagacctcaatgaactatatgctggcaacacgcctc

SEQ ID NO: 193770 - DNA, 75 bp, Homo sapiens
gatgaccccactttgctctttgccaatgcaggcatgaaccagtggaatcaactatgaaattataatcatagatga

SEQ ID NO: 193771 - DNA, 75 bp, Homo sapiens
cctccaccctggcaggaatcccaatttgcctccacttagtgagcggaagaatggaaacccagcgtttgctggcag

SEQ ID NO: 193772 - DNA, 90 bp, Homo sapiens
tgcacagctaagatgccaggaccacctggaagcctagaaatgactccgtgggaaggaggcttgtttaaactacggatgcttttcaaagat

SEQ ID NO: 193773 - DNA, 74 bp, Homo sapiens
aagaatctcgtgctcaccggtttctcccacatcgacctgtctcttcaagaaaatgaggaggaggagattgggaa

SEQ ID NO: 193774 - DNA, 90 bp, Homo sapiens
cgcggagtgggcgatgccagcgtgccagaccccagagggtataagtgaagaacagagatctcaggagttggctgcaatggaagaaacccg

SEQ ID NO: 193775 - DNA, 75 bp, Homo sapiens
ctctgatgacgatttggatgaatatacccttagaaaaaatgtggcagtagttcggaatccagcattaagaagaaa

SEQ ID NO: 193776 - DNA, 90 bp, Homo sapiens
cgtgggcaacgtacgtcagacggcagtggtggaaaagatccatgccaagatttacagcatgagtttgcgcctgtctgctttctttgaaga

SEQ ID NO: 193777 - DNA, 100 bp, Homo sapiens
tggaactgctctggcagtcatcgtgcctgaaggagtacatgccctttatgaagatattcttgagggaagggaaaaggccgaggcatcagcgtgtgaagac

SEQ ID NO: 193778 - DNA, 100 bp, Homo sapiens
caaagatgaaagggaggcacctcccagggatttcaaagatggaggcggcggctccctaaaccacttttcgtgttcatccgcctccatccgagatcgaaac

SEQ ID NO: 193779 - DNA, 75 bp, Homo sapiens
cggccgtcggtgctgctgctcctgcagctgccttttctgccatcaggacgccaggaaagcatgtgcagatgcaac

SEQ ID NO: 193780 - DNA, 100 bp, Homo sapiens
tcaattttacacagaatctatacccaccagagtgatgtctggagctacgtgctgtgtttacctggacaaatttgttggtggttgtggttgagctggatgg

SEQ ID NO: 193781 - DNA, 95 bp, Homo sapiens
tgctgaacgctttcaccgcaacttttgagctaagtgatgatggccgctttgaggtgtggaatgcgatgactcggactcagaattcatgattgaag

SEQ ID NO: 193782 - DNA, 100 bp, Homo sapiens
cttcattacctgataactacctatctgaaatgttatagttttgccgctggactcttccctcccttcccccaccccatcaggatgatatgagacttgaaag

SEQ ID NO: 193783 - DNA, 100 bp, Homo sapiens
ccattacgacctgttcttgaatacattgatctggtcagcagtgatgatgaagagcctagcacctcttatactgatgcaccatactggacataccttttat

SEQ ID NO: 193784 - DNA, 100 bp, Homo sapiens
gggggagactgtgccgtggagggcctcgccatgtcctgctgcccgatttgcttgtaaatgcatcacgaagaggcagcccagaatgaagaaagcaagcagg

SEQ ID NO: 193785 - DNA, 83 bp, Homo sapiens
actgaagtgcagaaatcacaaagtacagctcagaatttgacttcagagaaactccagaaaatcttgccaaacttctgaccagg

SEQ ID NO: 193786 - DNA, 80 bp, Homo sapiens
ctgtttggaaagacccaggagaagccgcccaaagaactgttccagggtctccctccactgctgtagtaacccgggtccgg

SEQ ID NO: 193787 - DNA, 75 bp, Homo sapiens
aggcatggcttgtgctattagtatcttactgaaggaagtgcttcgggagatccaggatgcagtggccagggcggg

SEQ ID NO: 193788 - DNA, 72 bp, Homo sapiens
ggaatccctgtctgggtgcggactcggagaagccctcgagcatccccacagtgcatctgggggaggtgttgt

SEQ ID NO: 193789 - DNA, 115 bp, Homo sapiens
aactactctgacaaatcagatattgaaaatgctgatgaatccagcagcagcatcctaaaacctctcagtgtcatggagaaactccagctgggcccagagattctgcagcgggaaa

SEQ ID NO: 193790 - DNA, 75 bp, Homo sapiens
agaaagcaggcgaacccgcggcgcaataacgtgtaatgttcaagctcagaaatgccttatgtggatcgtcagaat

SEQ ID NO: 193791 - DNA, 85 bp, Homo sapiens
cctgctctgcctcctctccgaccacgtggacaagaggatcctggatgctgcaggggcttacagaaagactacagaacggatctag

SEQ ID NO: 193792 - DNA, 98 bp, Homo sapiens
gagacaccagcttcagtggcctgtcgttggaagagtacaagctgatcctgtccacagttgactatattgtggagtatgactatgatgctgtacatgat

SEQ ID NO: 193793 - DNA, 75 bp, Homo sapiens
gtatcagacagatccttctggtacttatcatgcttggaaggaactgccttctgttgaagaactcactattattct

SEQ ID NO: 193794 - DNA, 87 bp, Homo sapiens
gattaccatggcgaggagtctctgtccgggggcctggctaaggaaaccctattacctccagaatgctgaccccctgaaggtgtaccc

SEQ ID NO: 193795 - DNA, 100 bp, Homo sapiens
tatattcatctcaaaaacaaaattctgaactcaggacttggcaagctaagtgctatttatggaggtacctatatgctgaataaacccattgaagaaatca

SEQ ID NO: 193796 - DNA, 95 bp, Homo sapiens
ctggaggaggccgcgccgatgaacctgaccgagcttcgcctcaacagcatcaagaagctgtccaccatcgccttggcccttggggttgaaaggac

SEQ ID NO: 193797 - DNA, 100 bp, Homo sapiens
cggcaccatcgcagcacccctgtctaccacgcctctcgcgtgggccgggcagacatcctgaaggccctcatcaggtatggatcctggcgggagccagtca

SEQ ID NO: 193798 - DNA, 95 bp, Homo sapiens
gctgagcaccgtctcccagtacgaccgggacaagtactggaaccgctttcgagactgtatgtggtagaagaccaaagaagagatgagctaggacc

SEQ ID NO: 193799 - DNA, 101 bp, Homo sapiens
taactcctggattcccacagtccccaacatcatctgttactagcgagaactcagaagtgttccacgtttcagaggcaggcagccttgtttgcactccaaaa

SEQ ID NO: 193800 - DNA, 100 bp, Homo sapiens
gccgcggatcgccgcgctcagcgacaaacaagttatcaatactctggctgaccatcatcatcgtgggactgactttggtggaagtccttggttacatgtc

SEQ ID NO: 193801 - DNA, 75 bp, Homo sapiens
acacacaatccaaccaatgcgaccttaaacaaatttatagaggattaaggctgctgtcccaagcatcaaattctg

SEQ ID NO: 193802 - DNA, 97 bp, Homo sapiens
tcaaggcaagcctattgagttaacacctctgccgctgctaaaaggttttgaacgaagaatgtgatcagaactggtacaaggcagagcttaatggaaa

SEQ ID NO: 193803 - DNA, 82 bp, Homo sapiens
agcggcccgcgcctgggctgccggcacttcgcggcaggttgacatcatggacatatgtgagtccatcctggagaggaagcgg

SEQ ID NO: 193804 - DNA, 100 bp, Homo sapiens
gccgccgcgccgccatcatggacaccagccgtgtgcagcctatcaagctggccagggacttctgcacggacctggccgtctccagtgccaacttcattcc

SEQ ID NO: 193805 - DNA, 51 bp, Homo sapiens
agacagagtctcgctctgtcgccaggctagagtgcagtggcgcgatcttgg

SEQ ID NO: 193806 - DNA, 80 bp, Homo sapiens
gtcctggggctgtgctccatggcgagctggcctaatcacacggatgctacagagagatcccaagagaagggcttctttag

SEQ ID NO: 193807 - DNA, 75 bp, Homo sapiens
cggctctccgccgtccccagccctgcctctccctgggctctgttggaactgataatgggagagaagcaattgaaa

SEQ ID NO: 193808 - DNA, 100 bp, Homo sapiens
gacgacctcattgcgtgtgtgtcggcgcccgacagtctgcaaacaatgcagatcttcgtgaagactctgactggtaagaccatcaccctcgaggttgagc

SEQ ID NO: 193809 - DNA, 82 bp, Homo sapiens
ttcgagaacgaccccgagacgagtccggcagcgtcttctcttgagggagcaatttggagaagagctggaacccagactcgcg

SEQ ID NO: 193810 - DNA, 108 bp, Homo sapiens
ttgcgatatatgccatttgtttgacaaagataagaagcagtatcactgtgaaaactgtggaatttgtagagtcactcaagggaaaggattaatgccagatggtaccag

SEQ ID NO: 193811 - DNA, 100 bp, Homo sapiens
gtagtcaagctgggacatgcccacgctggaatgggaaaggggtcttcacggcttctctgcccaggggccagaaccgaggaggccaggagggctgctgggg

SEQ ID NO: 193812 - DNA, 75 bp, Homo sapiens
cgcccgtgtgcccagtgcgcggcggggacggccgcgagctcgctggaggagccttttgtggcagatgaatatatt

SEQ ID NO: 193813 - DNA, 82 bp, Homo sapiens
ggaaggagaagatgtgccgccgctgccaacgtcgagcggcgacggctgttgatattcactgatggactccaaagaatcatta

SEQ ID NO: 193814 - DNA, 49 bp, Homo sapiens
cggccaatggcacggaggcctgcgtaggccacaagaggaagctgaatga

SEQ ID NO: 193815 - DNA, 100 bp, Homo sapiens
ctggttttctgtaccccttagtaggaacggcagatgtaattgttaattctgtaaacccacatgatattacagttggacctgtggcaaagtcaattctaca

SEQ ID NO: 193816 - DNA, 90 bp, Homo sapiens
ctacttcatattttggaaagcagtttttaagacaagtagcccgagaatgtctatttcatcgagaaaagagaatgggaatcgacctagttc

SEQ ID NO: 193817 - DNA, 101 bp, Homo sapiens
aacactgatcttgcaaactcagatgcgctgaagctagctaaagaagttgatcctcaaggtgctggagaatctggtaaaagcaccattgtgaagcagatgag

SEQ ID NO: 193818 - DNA, 98 bp, Homo sapiens
tgtctgtgcagatgtacgcccaagccgccctggatggagactcccagcccaagaagatgaaaggattgttcttgttgacaacaaatgtaagtgtgccc

SEQ ID NO: 193819 - DNA, 98 bp, Homo sapiens
aggccattcagctgtgcgaccgggacgtctcttgttttcagcagccactgtaaagcagtgagtggctactcagaccaggttgtccatcagcggagatc

SEQ ID NO: 193820 - DNA, 75 bp, Homo sapiens
cgagagatgaggccggagcccaccaagttctgggaaccatggcaatgacaggctcaacaccttgctcatccatga

SEQ ID NO: 193821 - DNA, 100 bp, Homo sapiens
aatagaggaagctatgaaaagagtacgagaagcacagtccctaatttctgctgctatagaaccagactggaaaaagtctataatcttgtaaaggaaacca

SEQ ID NO: 193822 - DNA, 83 bp, Homo sapiens
tcttcctgcccctcgttgatgagagcattcgaagtgacctcagcagggcatccaggagagtggtagaggcacagaagatgatg

SEQ ID NO: 193823 - DNA, 82 bp, Homo sapiens
caggagactggtgattggtgcaagcgacgtgggatgagtgtgttccatgggaaccggtacaagcagactctatagtgctctc

SEQ ID NO: 193824 - DNA, 50 bp, Homo sapiens
gacgtgtgtccaggcgtttgccggtggtcgagatatccagtctgacggag

SEQ ID NO: 193825 - DNA, 121 bp, Homo sapiens
aggactggtgatctacgtgtgctttttcaagggagctgataaagaacttcttcccaaaatggaattcctagaggacctgtgcaacaacctcttgaggatcgaatcttcactcccgctgtct

SEQ ID NO: 193826 - DNA, 99 bp, Homo sapiens
cattgggggaaccagtgggccccacgtgggtaaaaagggtcatctttctgaaggattggttactaaatggtacagatctccacgtcttttactttctcc

SEQ ID NO: 193827 - DNA, 75 bp, Homo sapiens
ctacaagaaaaccattggagttgattttttggagcgacaaattcagaactacatattgtccataagtgcttcatc

SEQ ID NO: 193828 - DNA, 154 bp, Homo sapiens
tactgagaaaggaattgtggccatttgatataattctggatggaagacctcttatttgtattacattgaattagagtgcacgcgttactttggctaaaaggaggtgagcggcactctgcccttccagagcaagcatggagcaacaggatcagag

SEQ ID NO: 193829 - DNA, 95 bp, Homo sapiens
ccgaagcctgcatttttttgtggagtggtttgaatatcgtaagcgcacgtttaaacatctcaaggtaccagcaactaaggtttcagagctgaacc

SEQ ID NO: 193830 - DNA, 100 bp, Homo sapiens
gttgctatgacaatgcagaggcagccttcagtgacgatgaagaggatctcaacagcaaaggaaccggcgaatatttggcttgttgatgggtacccttcaa

SEQ ID NO: 193831 - DNA, 50 bp, Homo sapiens
cctctcctaaccgttaagtgcgctaagtggaatgcagtagccctctgggc

SEQ ID NO: 193832 - DNA, 50 bp, Homo sapiens
cccaagggtgcacagcccctggctacgggtagaatccgccaagctttgag

SEQ ID NO: 193833 - DNA, 75 bp, Homo sapiens
aagagtttgagaacattcgaaaggacctggagcacccatttgtcaggagtgccaaaggagtgtcaatactgcgag

SEQ ID NO: 193834 - DNA, 50 bp, Homo sapiens
cagcctcctgagcagctgggactacagtagagacggggtttcactatgtt

SEQ ID NO: 193835 - DNA, 75 bp, Homo sapiens
cataaacgcccccaatttcccagctgctaaaggaagaggaaggcaactcgagatgtggtgctgagccgggtgccg

SEQ ID NO: 193836 - DNA, 97 bp, Homo sapiens
tcggcaggcacacgttactcagcccctgcgaacctgtatgtgcgaggaatggaagttggatacactttgtgacttgtacgagacactgaccattaca

SEQ ID NO: 193837 - DNA, 132 bp, Homo sapiens
gtctttgtgtcctgagatcaaatggcacttcattggccacctacagaaacaaaatgtcaacaaattgatggatcacccggaagttcaggctgaattctgaaggcaaacttgagcagacggtctccatggcaa

SEQ ID NO: 193838 - DNA, 100 bp, Homo sapiens
agcgctggacgaccggctctactgcgtctaccagagcatggtgctcttcttcttcgagaattacaccggggtccaggttttggaaggaaggatgttgtag

SEQ ID NO: 193839 - DNA, 99 bp, Homo sapiens
caagctcaagcagcaggaagatcttttgaggttctttatagctccaagctctacagattcttcaaatatattgagaatagggatgttgcaaaaacagtg

SEQ ID NO: 193840 - DNA, 51 bp, Homo sapiens
gttcagtggtttatgctcacagcaaggcacggatgggcagaagcctttgca

SEQ ID NO: 193841 - DNA, 100 bp, Homo sapiens
gttcctcgcctggagcacgttccccgccttcaaccggctgcaaggggatcgcctgcgcgtcccgctcgtttcggtgtcatggagaaactccagctgggcc

SEQ ID NO: 193842 - DNA, 100 bp, Homo sapiens
agaaggaagatggcggatctggaggagcagttgtctgatgaagagaaggaatgcgatgttaattctggggcattgatgttttacaatgcctgatcaagat

SEQ ID NO: 193843 - DNA, 101 bp, Homo sapiens
tcctataattgaaaaacagtaaagatggaaaaccagttattgaatatcaagaggaggagttgttgaatgccagctgatgaagaccgagaggccgcgaccca

SEQ ID NO: 193844 - DNA, 95 bp, Homo sapiens
ctgatgaacagagatgcagacttcaggaagcttgcaaagatattctccttttcaaaaatcttgatcagattcaggcttcttcaggagaaagcaag

SEQ ID NO: 193845 - DNA, 87 bp, Homo sapiens
cgcagagtcggcacctgaaggacatggaggaactgaagctctcttcccacgaggaggccttgtcctttgtgtccctggtagatggct

SEQ ID NO: 193846 - DNA, 50 bp, Homo sapiens
caagtcccggctccggaagatgaagatgagagtccctacactaaatccgc

SEQ ID NO: 193847 - DNA, 100 bp, Homo sapiens
tccgctggcccatagtgatctttgcagtgacccagatgtataagcattccaataataaggccatgactacgggggcaattgctgcaatgctgtctacaat

SEQ ID NO: 193848 - DNA, 48 bp, Homo sapiens
ggcttcccccaaggaatatacagatcgtgctctcctctctcaagcacg

SEQ ID NO: 193849 - DNA, 74 bp, Homo sapiens
gaatgtgaatggaaaccagatgaagaagatgagatttcggggtctaaattatggataataatggaatacctggg

SEQ ID NO: 193850 - DNA, 100 bp, Homo sapiens
atttgtgcatggggtcacagtgaaaaatcgaatgattcgactgcatcctgatggaacagttctctatggactccggtataagcagtttagccaaattttg

SEQ ID NO: 193851 - DNA, 101 bp, Homo sapiens
aggccggccggtgccagcacctttcggcttctgagacggcggcagcagcggcattcagctcaacttcctcgactgcttcactctcagggaactcacccaag

SEQ ID NO: 193852 - DNA, 75 bp, Homo sapiens
atttcaacctgaaagtggaggctgcgaaaataggaccgcagctgaatgcacagctagaaggttggctttcacaag

SEQ ID NO: 193853 - DNA, 101 bp, Homo sapiens
gaaaaattcaagaagttgaaaaacgcttttcacgtcacctggagagatgcacaggatcggaaactccatggtacagctcagcaactgctccaggacagcaa

SEQ ID NO: 193854 - DNA, 85 bp, Homo sapiens
tggttgcagttgtgtagtagttaagggcagcttttggcaaggagtctgaagttcttattgggaacctgggtgataaattaatccc

SEQ ID NO: 193855 - DNA, 102 bp, Homo sapiens
atacagagacagaaatgttgatgtggtacttgaagacacctgtactgttggtagatttcgggcagacaacttgaacaagctgaagaacctatgcagcaagac

SEQ ID NO: 193856 - DNA, 100 bp, Homo sapiens
aatgtcagagccaccgaggctgtggttgcactctgccagtgttatagttttgccgctggactcttccctcccttcccccaccccatcaggatgatatgag

SEQ ID NO: 193857 - DNA, 83 bp, Homo sapiens
caggcgctggcgtccggcctgaacaatgcagatcttcgtgaagactctgactggtaagaccatcaccctcgaggttgagccca

SEQ ID NO: 193858 - DNA, 83 bp, Homo sapiens
ctgggcgcggattcgccgaggcaccgaggcactcagaggaggctactgcagcactggggtgtcagttgttggtccgacccaga

SEQ ID NO: 193859 - DNA, 90 bp, Homo sapiens
aacactctctgaaggagaatgatcatgcgcgtttcctacagactgctaagaatatcaccgagagcgtggagattggtgaaagcgtgagag

SEQ ID NO: 193860 - DNA, 155 bp, Homo sapiens
agcttcattcagatgtggtggaatatgccaaggaaaaactggagagcttcatcaaaaatagtgatagctttgataaagagacaagagagacacctccaacttcgacaaagagttcaccagacagcctgtggaactgacccccactgataaactct

SEQ ID NO: 193861 - DNA, 90 bp, Homo sapiens
agcagatcctggaggatgtgcggggtgcgccggcagaggatccagtgttcaccatcctggccccggaagctccaccgggggacggctacg

SEQ ID NO: 193862 - DNA, 74 bp, Homo sapiens
gacagatcctgggtgttcgacagctacagcctgacagggcttgtattggttggtgatggtggtactggaaaaac

SEQ ID NO: 193863 - DNA, 108 bp, Homo sapiens
tcttagatacttgggttcagccagcaattgcccaaacccaaagtgtggaggaagagctaaggagcaaatccaagatctgtgccaatgtgttttgtggagccggccggg

SEQ ID NO: 193864 - DNA, 96 bp, Homo sapiens
gagtccggaccggagactttggggcctaactagatcccatttaaaattctgagtgggcacgagcacgctgtgagcacctgccacttctgtgtggat

SEQ ID NO: 193865 - DNA, 100 bp, Homo sapiens
caagcggccgcgcactgaggaggcggcggccgacggtggcggcgggatgcaggtcctggctataagtcaccatggcacagcaagctgccgataagtatct

SEQ ID NO: 193866 - DNA, 74 bp, Homo sapiens
agatggcagacatacatcatttaaagggaaaaccagtagattcccagacatcgcgaagtgaatctgaaattgtg

SEQ ID NO: 193867 - DNA, 100 bp, Homo sapiens
caagcctcttcagaacctgtcattgcaccctggctcatcagctttgcactatgcagtggaagagaatggtgttgaacgcgtgtgtcctgagagcctgctg

SEQ ID NO: 193868 - DNA, 98 bp, Homo sapiens
gatagaatgaagaccacaataaaagagacctctacttagctcagcaattcttaccttgccgtcgctttcgggttctctcatcgcttcgtcgttcgcca

SEQ ID NO: 193869 - DNA, 98 bp, Homo sapiens
ctgctcctgggtgccgtggcatgtcgatttgtccttcactacagatgttttgaacagagataaggatgaggagccaactgtaaaacaagagattgaag

SEQ ID NO: 193870 - DNA, 75 bp, Homo sapiens
gttctggtggagatggtacaggcgctttacgaggtgctggagaatctggtaaaagcaccattgtgaagcagatga

SEQ ID NO: 193871 - DNA, 98 bp, Homo sapiens
tgcttaggaatccgggcttttgctgatatgcatgcatgtaccgaccttctgaacaaggccaacacctatgcagctgcaggacaagttcgagcatctta

SEQ ID NO: 193872 - DNA, 100 bp, Homo sapiens
ttcaggtcacctacctcccagtgcagaagagtgggatcattgacctaaagggcgcggccctaaaacccaggctccccgcgccaccccccgtcaccacgcc

SEQ ID NO: 193873 - DNA, 100 bp, Homo sapiens
tggcggccggcgaaaggagctggtgcctgtgcaagttgttgagctctactgagatgaagaaagaaaaagaatacctgctcagctccagagacacgtaaag

SEQ ID NO: 193874 - DNA, 100 bp, Homo sapiens
gggaattgtcctctgtggaagggactttcttttggccctaggccccttcctgcccctgtcgtcagcagattgatcattcttagaagagctgctgtaacac

SEQ ID NO: 193875 - DNA, 83 bp, Homo sapiens
gtgcgttgcgtgccctacttcaaggataagggcgacagcaacagctctgccggctggaagaaagttcccccatctttactctg

SEQ ID NO: 193876 - DNA, 100 bp, Homo sapiens
gcccccctcaacacggaccgcgcccgccgggcacacaagaatggtcactgctgcatgcagggcatggtgccctacctgcctgagctgatcccgcacctga

SEQ ID NO: 193877 - DNA, 100 bp, Homo sapiens
agcagattggctgtgtggagttgcaccagcgtgcccgggagtacatctacatgcattttggggagccattgatcagccgcaactacaagggcgatgtggc

SEQ ID NO: 193878 - DNA, 75 bp, Homo sapiens
acagattcacacataacgatggtgaatggtttagggattctggggtggggtgtgagccatgcaatgggagggaga

SEQ ID NO: 193879 - DNA, 83 bp, Homo sapiens
ggaccacaagatcctcatcgacagggtgcttcaaggatgaccgcatcgtcttctggacttggatgttctccacctacttcatg

SEQ ID NO: 193880 - DNA, 100 bp, Homo sapiens
ttggggaaggaggcgtcttggcccgggcagcagtggcggcagcgcccgagagaggatctgtgccagttcagaagcaggcgagcctcttccctgatgaaaa

SEQ ID NO: 193881 - DNA, 100 bp, Homo sapiens
gaagaagatccttcaaaattaaaagaggagcagcatggcatttcagtcactggtttgcagagtccaggtataccggacactacttcataaccactttact

SEQ ID NO: 193882 - DNA, 75 bp, Homo sapiens
acgtctccgagtccctcaactctctacgctttgcctccaaggcacttaagtattcatcgaagagtcaccccagta

SEQ ID NO: 193883 - DNA, 87 bp, Homo sapiens
attgaagctcaagaaggtgaagatgatacctttctaacagcccaaaatatgagtgatgccatggcaattttgcacaaactacagaca

SEQ ID NO: 193884 - DNA, 75 bp, Homo sapiens
gttggggcggcctggctccctcagaccaaagagaaccctgtacagtaagaaatatggtgtggacctcatcagata

SEQ ID NO: 193885 - DNA, 82 bp, Homo sapiens
ttccttccagctccctggattgctgaactttggcgagtttaagtcttctcaagtcttaggattgcagcaacacgctcggctg

SEQ ID NO: 193886 - DNA, 100 bp, Homo sapiens
tgcatcgttccgagtcctgtactggactgcatcaggccgcgtctcctcaggggtgttttgaatgctgtatcaaatgcctggggggcattccctatgcctc

SEQ ID NO: 193887 - DNA, 90 bp, Homo sapiens
gccctggctgggggaaccactatgatcagttttcccatcatatgattcccggtcctcctggtccccacacaactggcatccctcatccag

SEQ ID NO: 193888 - DNA, 50 bp, Homo sapiens
gaaaactcgaaacagattttgtcgatccagtgtttacaagggaagtgaaa

SEQ ID NO: 193889 - DNA, 83 bp, Homo sapiens
ctccgccatgtcatccacttcgcccaacctccagacaatgcagatcttcgtgaagactctgactggtaagaccatcaccctcg

SEQ ID NO: 193890 - DNA, 74 bp, Homo sapiens
tgcagtccaggctgaagacagagggctctgatctgtgcgacagagctttggtgaagcacgtgcagtctaaagga

SEQ ID NO: 193891 - DNA, 75 bp, Homo sapiens
ttttcgttgtgaaggaccccaatggcaggacagtgcccagcgattggaggaaggccctgtcttcgccatgtgcat

SEQ ID NO: 193892 - DNA, 100 bp, Homo sapiens
aaaaactccaacagcttcatatggacagatggacttcaaatgctgtttgtattccagagactaggtggataattactgtaccttcctcatggaaaaagtt

SEQ ID NO: 193893 - DNA, 85 bp, Homo sapiens
aatgttcagactttgttgtggtacagtttaaagatatggactccagttatgcaaaaagagttgctgatagtccaactccaccgcc

SEQ ID NO: 193894 - DNA, 100 bp, Homo sapiens
aggcgtgcacatgctcgcccagccacccccaggacgccttctgcaactccgacatcggttctcttgctgcaaatggccctaccaccttggttgataaagt

SEQ ID NO: 193895 - DNA, 75 bp, Homo sapiens
ggggaaccaaggagacgctcctggcactgcagatttaagcgagtggtattgcaggaagtccattctggctctggt

SEQ ID NO: 193896 - DNA, 100 bp, Homo sapiens
gtgaggtctcatgtctgcttatgcggtggctcgctgctcagaacaggtgcctggatcaaagtggaacagctgaagccatatcatgctcataaagaggaaa

SEQ ID NO: 193897 - DNA, 75 bp, Homo sapiens
tgtctcttctaagctgaataaagctgttttggaactgtcaggtacctcaaagcctttgtgtccctggtgatgttg

SEQ ID NO: 193898 - DNA, 82 bp, Homo sapiens
gtctgaactggatcataaatgacagacagtatgctggctatgactattcgcagcaaggcagatttgtccctccagacatgat

SEQ ID NO: 193899 - DNA, 100 bp, Homo sapiens
ctcttttcattcctagtcattctctgtaaagtgaatctattctttgaacattctacaacaagaattacattatactgttataccagagtacttctgcagt

SEQ ID NO: 193900 - DNA, 76 bp, Homo sapiens
tcgaagaacagctgtggaaagaagttgcaaaacactggagcaaacgaggcccctgagagctccacctagttcacag

SEQ ID NO: 193901 - DNA, 101 bp, Homo sapiens
gactcagtcagtctcttggtttggtctctaaaagtaaaggggtcgtaagagtgaggctgaaaagctcttcttgaaggctattgagctggatcccaccaaag

SEQ ID NO: 193902 - DNA, 100 bp, Homo sapiens
acttgtggatggacttgctacctcttgggtgaactctagcaattacaaggcaaagtgtttcatggatttcaaagctggaggcgccttatgtcacattctt

SEQ ID NO: 193903 - DNA, 74 bp, Homo sapiens
tggcagcaagctgctctggaggatcaacacccggccccccaactctgcccagattgaggtggtgccttctgcct

SEQ ID NO: 193904 - DNA, 100 bp, Homo sapiens
gcagtccaagatcgagaggttcatccacgacaccgctttaaggaagcctcctatttcagtttctcaacatgaaagtcatcaagcaatctcccatcttcca

SEQ ID NO: 193905 - DNA, 90 bp, Homo sapiens
ccagtgctggcgtaaagacactgctcccagtaccaagttttgaaggggtcactcccattgatggagctccccaccgatcatacagtgagt

SEQ ID NO: 193906 - DNA, 99 bp, Homo sapiens
ttgctattcaggatatttcggttgaaggtgctggagaatctggtaaaagcaccattgtgaagcagatgaggatcctgcatgttaatgggtttaatggag

SEQ ID NO: 193907 - DNA, 100 bp, Homo sapiens
gaaaacacctaccagctttcctgtaatcatgtgttgggaagtcattgctgaagatggaaccaaggaaatagaaagtcaaggctccatcccaggatttttg

SEQ ID NO: 193908 - DNA, 75 bp, Homo sapiens
tgaataaagccaagagagaccttggagtaattcgtcgacagcctgattacatcaaccccagagccgtgcagctgg

SEQ ID NO: 193909 - DNA, 98 bp, Homo sapiens
ggcataccaccctgcactgtgaggatggatgtggacagtttccatatgatgcaaacatccagatacactgggtatcatttctggatgggcgccagaga

SEQ ID NO: 193910 - DNA, 83 bp, Homo sapiens
ggccaaagcctgcccagacggctcacctgtgcgggatggaacaaaagcttcgagagctgtgcccaggagtgaacaaccagccc

SEQ ID NO: 193911 - DNA, 83 bp, Homo sapiens
cctggttccagctgcagcacgtggacgctgactcggaagtgcagacttcccaagtaagaagcggaagaggagccgctggaacc

SEQ ID NO: 193912 - DNA, 116 bp, Homo sapiens
ctcacattcaagctgataggctgcgctaccggaatgtcatccagcgagtgattaggctgaagagattctgcagacatacttgaaatccaaggagtctgtgaccgatgcaattctac

SEQ ID NO: 193913 - DNA, 100 bp, Homo sapiens
tgtgcctgactttggtgtctgggaaagaggaagcaaatataataatggcagcacagagctacattcgaggtctgccatcatggatgttctcgcagaagca

SEQ ID NO: 193914 - DNA, 107 bp, Homo sapiens
tttgttgctgctgcacattaggttgcagtatgtggccagttatttgcctcagtaaaagagtgagcatctgcctggagtgtaacagcagcaaactgcgcgggctgaag

SEQ ID NO: 193915 - DNA, 74 bp, Homo sapiens
agccggccagccggggggcactgcccgcccgggctctgagacgtctcccacaacctgctccgggcgctggacgt

SEQ ID NO: 193916 - DNA, 50 bp, Homo sapiens
atcaaactgaagggcaccgtgggacacctagctcccctgtttgacaaccc

SEQ ID NO: 193917 - DNA, 98 bp, Homo sapiens
gaccacccacatgccttggagttcttgagaaaggattgcgccaacgtcaatggttatggagacatcggctcagtcctctggagaccatcaggagcagc

SEQ ID NO: 193918 - DNA, 74 bp, Homo sapiens
ggggctgaagaagcagttctacaaggcgagccaggggaacgcccttttgcttgtgactggcagggctgcgacaa

SEQ ID NO: 193919 - DNA, 100 bp, Homo sapiens
gaatgcactacaacaggaaaatcatattatagatggagtaaagatcttcctctgatggcgctgcctccatgccatgccctctgccagttctatgtggtga

SEQ ID NO: 193920 - DNA, 50 bp, Homo sapiens
gaagagggaagacacgcggaaacagttatgaggagtcaaatcctaaggat

SEQ ID NO: 193921 - DNA, 75 bp, Homo sapiens
cgctgcagagggtcttccagacggagaacctgggagcgcttgcattgtcttcagtgttaagaaatgtggactcct

SEQ ID NO: 193922 - DNA, 83 bp, Homo sapiens
tataaaagattgggaatgaaaagaggtgaagaaattgcttcctcaggccagaagcggactcctagaagaggggagcagcaagg

SEQ ID NO: 193923 - DNA, 100 bp, Homo sapiens
tggatgttcctgaattcttggtctattttccattgctaaatgaggcagcacagactatttcttgagcagtggtgacaagattcgattcttctttgagaaa

SEQ ID NO: 193924 - DNA, 82 bp, Homo sapiens
ctgaaggaaaagacagtgtagtcctgcaaaacattttgaggaaaaggttcgtgctgtgtttgataatctgattcaattggag

SEQ ID NO: 193925 - DNA, 75 bp, Homo sapiens
agttcgtctcttacgtctgcggaagtgcagctgcctcagttcttagcgcaggtgtcaccacagtgatggcagtgg

SEQ ID NO: 193926 - DNA, 75 bp, Homo sapiens
gaagtcgacggcgccggcggctcctgttggaggtccccctccccactaagtgcctctttgcatagcaccagtccc

SEQ ID NO: 193927 - DNA, 50 bp, Homo sapiens
gcaccgaggaccagctcaatgacagctgcagaaccttggcctgaaaatgc

SEQ ID NO: 193928 - DNA, 82 bp, Homo sapiens
ggatggataatgcatctgtaaacctgaaacgtacccattctccttgaaggcaaatgatgacagtcatgtccctttccaggga

SEQ ID NO: 193929 - DNA, 75 bp, Homo sapiens
ggcaaagtcatgggagcagagctcagacatgttctcaccacccttgtaggtgacctcacagtgactcaagctacc

SEQ ID NO: 193930 - DNA, 75 bp, Homo sapiens
tggatgagcttcagtgcctaccagacagcctttatctgccttgatgtcatcctcaaattccgggacaagattgag

SEQ ID NO: 193931 - DNA, 135 bp, Homo sapiens
gggggaactgctggggaaggcgattggcatcgatctctccatcccttccgaggcccgacttcggtatgcagtggaactgatgaagaccctgatgataaaaacgcaccctttcggcaacggccattttgcaaatat

SEQ ID NO: 193932 - DNA, 113 bp, Homo sapiens
ttttcacctcgcgtcgcgcccgggaggaaggaacgaggcaaggagctaaagcagcgtgcgttcagccctgggagcagcccgacggccatggaggctgaagagacgatggaatg

SEQ ID NO: 193933 - DNA, 100 bp, Homo sapiens
ctgagaccaaggttaagaagagacatgttgaccctttcatgggcctagttccccgagagcgttcagacagtgggggctcaagctcagagccatttgaccg

SEQ ID NO: 193934 - DNA, 80 bp, Homo sapiens
cttggtttcgggatctcggtgctgcagacggcgagacctcctgcacagagatgtggtatggtgtattcctgtgggcactg

SEQ ID NO: 193935 - DNA, 100 bp, Homo sapiens
ggattaaaatgcaaacagagctcctacaaaattagaccaggcatgcatggtagaaaatgaatgtgaagaccccagccaggagactattacgttcctctat

SEQ ID NO: 193936 - DNA, 100 bp, Homo sapiens
ttcattcacacttcgagactatgtggatcattctgagactctgcagaagttggttcttctagcctctgcctgtgagtttctggatattgtagagctgctg

SEQ ID NO: 193937 - DNA, 75 bp, Homo sapiens
cactgcgcccagccttgatcttgaggagtcccgacctctacatgttgtgctgggaaatgaagcctgtgatttgga

SEQ ID NO: 193938 - DNA, 49 bp, Homo sapiens
ctcctatagcagtcatgggcgaggctgctttgtaccgcctcagtggaga

SEQ ID NO: 193939 - DNA, 100 bp, Homo sapiens
atttaataaacctggggaaaaattatgagaaagctgtaaacggtcggattgtttgtgctgaacgaactgtcctcttgcttcagaagccccttttgagtgt

SEQ ID NO: 193940 - DNA, 82 bp, Homo sapiens
caaggtctcctcggatcgcctggagaggcactcggacctgcttagaccatgctcagcctccaagcagccttgtcatcgacaa

SEQ ID NO: 193941 - DNA, 104 bp, Homo sapiens
gggtgaaccacagcaagttcatggtcacggagaaggcagcctacatagctacgagttccagggagctctgtcctggtgaccgtgcccgggttatgacgactaat

SEQ ID NO: 193942 - DNA, 83 bp, Homo sapiens
cccgcgagcacagagcctcgcctttgccgatccgccgcccgtccacacccgccgccagaatctccctggaaaaggagacatga

SEQ ID NO: 193943 - DNA, 82 bp, Homo sapiens
gtgggagtctgtgcatttgtgagggtccagctgaagattgagaacctagatccccgaggaattcagctatcagctctcttca

SEQ ID NO: 193944 - DNA, 117 bp, Homo sapiens
gcaagaaaagcctctgggagcagaagggaggctccaagacctcatcaacaattaaggttcaaaccttgtactactcagctgatcacaagctgcttgatgggaacctactagatggac

SEQ ID NO: 193945 - DNA, 101 bp, Homo sapiens
cttgtccaagacctgaagggttgaactttcaggatctcaagaaccagctgaaacacatgtctgtatcctcaatcaaacacctggatttcattagcatcatg

SEQ ID NO: 193946 - DNA, 75 bp, Homo sapiens
ggattccaagtaactcttatttgtcttgcctccagattaactttggctgagctaaatcagatcctttaccgatgt

SEQ ID NO: 193947 - DNA, 75 bp, Homo sapiens
ttagagctggcagcagcatctcagcccaagagaagggttcctcacagatgacttggtgagccaagaggagaatgg

SEQ ID NO: 193948 - DNA, 115 bp, Homo sapiens
ctcgcaacaagatcccctatgagagtcccatcttcagcagaggagacagatcagttggaggaagaaaaagcagagctggagtcggagatcgccgagctccaaaaggagaaggaac

SEQ ID NO: 193949 - DNA, 75 bp, Homo sapiens
ctattaaaaccagggctccacagttaggagtacgtagagaaatcgacactcttaatgaacgtttagctgctgaag

SEQ ID NO: 193950 - DNA, 75 bp, Homo sapiens
cctgctcggaaccttgtttactaatttggttctagttttgcagaatttggtggtagaaactcaggatctgtaaac

SEQ ID NO: 193951 - DNA, 82 bp, Homo sapiens
gccgacaaggcgttcaagcgaaaacatgaccgctgagcccatgagtgcctccggagccagcgtggtggccatagacaacaag

SEQ ID NO: 193952 - DNA, 100 bp, Homo sapiens
cgagccacccgcccgcccaaggtctctcgcgggcgggagaacggaaaactcccaacttcctggaagcggtttgacagggctgaagcagagtacattgcag

SEQ ID NO: 193953 - DNA, 100 bp, Homo sapiens
tttcttttggctgttcgactccatacctttcttacaacttcccttccagcctatcgagctcaactccttcaccaaggctgcagtgcagtggcgtgatctc

SEQ ID NO: 193954 - DNA, 100 bp, Homo sapiens
ccgccggcagccctaagggcaaggaatgtatcctgtcaggtataatgtcagtgaatggcaagaaagttcttcatatggatcgaaacccttactacggagg

SEQ ID NO: 193955 - DNA, 50 bp, Homo sapiens
cgctgctgttatggccgcctccttgagtagagacggggttttaccgtgtt

SEQ ID NO: 193956 - DNA, 103 bp, Homo sapiens
cagttcctgggaaggtggagccaccagcctctccctgagactctccaacatgtgccttctgaccatacaaatgaaacttccaacagtactgtgaaaccaccaa

SEQ ID NO: 193957 - DNA, 100 bp, Homo sapiens
ggggccacacagacatcacagtgtttgtgccatcctggaggaaggagcagcctcggcccgacgtgcccatcacaggagcgctatgaagcagccatccaac

SEQ ID NO: 193958 - DNA, 98 bp, Homo sapiens
gagaactcccatcagtttctgtatagtgtaaaagcgcttctctgaagtagctttggaaagtagagaagaaaatccagtttgcttcttggagaacactg

SEQ ID NO: 193959 - DNA, 88 bp, Homo sapiens
aactattttgttcgtgataaactggatcctgatatggctctttgccgaaatgctagagaaatgattgcaaatagaagagtcttccaaa

SEQ ID NO: 193960 - DNA, 82 bp, Homo sapiens
tctgcctcgccgccgcgggtgccacctcccgggacgctgcccacggcgtccccggtcgcggaccaagaatcgccttcagccc

SEQ ID NO: 193961 - DNA, 100 bp, Homo sapiens
cgcctcttcttagttgatgatttagttgattctctgaagtatatcctttcgggctctgatgacttcaacctgtacatgtggagaattcctgcagatccag

SEQ ID NO: 193962 - DNA, 74 bp, Homo sapiens
agagcagtgccaggatccaagtaaagtcccaagtgaaaacaaggatgcccctccaggaacggtcccctttgctg
